United States Patent Application Publication US 2004/0214272 A1 - sequence listing, part 3

SEQ ID NO: 8952 - DNA, 828 bp, Zea mays
  Clone ID: MRT4577_10815C.1
atgggggcctgggagtggacaaccaggatgcctggttgctcaaaaattggctccttttggtggaaaagcttacttacgtttgtacaagattacaagggtctggctgccccaaaaattggagatggaagaaccattctgttctgggaagatatgtggaattcgggcatcccgactaatcaattccctgagttattttccttcgcccgcaatagcaaactgtccatcaaagaggctctccaaaaagagcaacttattgaaattttccagcttcctctgtcggttcaagctcatgaacaatttttagacttagacgcaacctggggccaaatcatgacccaggttcaccagatcttcagatcgctttggaaaaacaagtgtcaaccaaagcataaggtctttttttggctttggctaaaaaacagactcaatacaagagatatgctgaaaaggaagaatatgaacctcgagtcctacacttgtgagaactgcatctggcaaaaggaagaaactctttaccatcttttcctcaagtgtaactttgcaaaggcttgctggacttctattggtttgacgtctcccagaattgctaatcctgaggccgctgcagtaaacctaatgcaacaactcaatgttccattctctatggaaattgtcattctcatgaactggagcatttggaaaacctgtaatgcatggctttttcagaataaagccccgactgtgcaacattgccaaaatgagtttgcaagggaacttcatcttgttatgctgagggctaaaggccgttttgattcgacaattcctgcatggcttcagctttggcagtag

SEQ ID NO: 8953 - DNA, 215 bp, Zea mays
  Clone ID: MRT4577_108160C.1
gccttcactctcttgcagcagctgccgttaagcctcaatatttatcacttatggccttatgctcacccacctatacatctgtatacactaaacatacttcatctaattaatctaccaaggcgcgcggtccgtcttgtcacaactactatcattaggatgaagaggcgctcatacatatcacctcgccctagatatatcttcgggacaatacggaa

SEQ ID NO: 8954 - DNA, 725 bp, Zea mays
  Clone ID: MRT4577_108161C.1
accatctcaaggaggagaacgagcgcctcagagcagaggaggtactgggaaggcgaagcatttgttcgtcatgacaccatctccttattcatatctagtatactactatgcattgatctgatcaaacacgacgtccgtgttgcgtttttgttttgcagaggacgattctgctgtcgaagaaaaagatggtacagtaacaagtttcactcaatcgcttccttttacggagtaccggtcatttgctagttgtcagtgtaacagtcgatatgctctgtcaagacaagacagtgtcctgaaggcaaccctgccatggctttttgtgtctgtttcagctggtggagaagatgatggagcaggcaagggagaatgtgagcgccaagaaggtcggtcccggactgcgccggtggggcagcgccatgtggtgaacttgtgacgagtgagactcgcgttgtgcagttccagttcgattggcgcttgcttgcttgcttccatggaaagtgctgtacctgtcggtaccagaaccattggtaacagtacgcgatgtgattgacgcatacgtctttgagggactaataaatatatgggcaagagcttccgcgttggcctgctattgttcataacccttgggttgtacaaacaataaaccagctgtctttaagatagcaactcaacacaaagctatgtgttttcgtccatgtttatttgacatgggccatactgagtcc

SEQ ID NO: 8955 - DNA, 292 bp, Zea mays
  Clone ID: MRT4577_108162C.1
aatccccgctcgacccacgccttcgaccacacatacgcttatcctgataaactaaacgcacataacacataccaaaaaaacttgcaaattttaaaccaatctatcccctccacacttccaaccccatctttccccctcatctctctactccaacgttccttacctacaattcaaagccctgtcttactatagatcaaccctgaaaaaaatctacctttcccaaacataattctcatcctagacaaacaccttcatccacctctattaaaagcgataaaaaccactcctattt

SEQ ID NO: 8956 - DNA, 359 bp, Zea mays
  Clone ID: MRT4577_108163C.1
ccaggaggtatcttcatggtacatcattgtttatcaatatcacgagattccagtttcttccaaaaagttctaagaaaggaagacggctaagggctcccccagcaaaaaatgacctcaactgaacctaacaaaatggagcatttccaaaccccatttcatgtttacaggaatcatagcccaaacaccctgggattaaaacagtctaaactcaccagctgccaaccccctatcccatccccaaacatcatgaggaatcacaaaccccatttatgatgtgggacaagctaaaagctttgggaggacgctccgccatgcaaaacaaattggtccagcttgcttagcccgaccctgggaaaatt

SEQ ID NO: 8957 - DNA, 340 bp, Zea mays
  unsure (1)..(340): unsure at all n locations
  Clone ID: MRT4577_108164C.1
tgtttttttttttttttttcccctttttttcccccnnnnnnnnttttgagaaaacagaaaattaagtggaaatttactgaaaaccatggggggggttcaaggtaggatgaccatgttcccggggattttacagagggaatcccagatcaacaatcaaatccttttgagtagcatgccccacaaggcatctggggttcctttcgatagagagggaaaaaaaacccggtcctctggggtaaacagagaatgcttctttgttcaaatgggaaatgtcaaacaaggtatcaagaggcttaaagggggaattgggctcaccgggccctgtttgcgacggaagggg

SEQ ID NO: 8958 - DNA, 507 bp, Zea mays
  Clone ID: MRT4577_108165C.1
ggtcccttgggcggtcccttgggcggaccctcgggcggacgcgcgggcggacccgggggccgccgcgggggacgacccggggaaacccgggccgggacccgggggcggaccagggaaccccagaccgggaccggaaagaacccggcgtaaccaaggacaaagccggatccggggggaaaggggaaaccggcaaaaatgccaaacaaaaaaaaagccggaaccaaaaaaaggaaacccaggggagccaaaggaaggaaaaaacccaaaggagggggggcaaaaaaacggacccaactaaaatcaggaaacccggccccccagccgcattaaaaaaacggaaaacccccggggaaaggggaaaaaggaatcggccacccgggggggaaaggctttcaccaaagagaccgccaaaaggggattgcccttcaccagcgggaccggaaaaaggggcaggaaccggaccacccgggcttgaccacaaaggcaaaaaccccccacgaggggggg

SEQ ID NO: 8959 - DNA, 297 bp, Zea mays
  Clone ID: MRT4577_108166C.1
gcctcaccttcaagctaacctatcagctgagggttcacatgcaggctgccatccttggcggttacatggacttgaagactgcactgaatcctatactaaagtgagctattaagggagcttattattggaattgttgacatgctttaatacatgctatcatacaggctgctagcccaaactctaaccttaacttggctctatacatcactgcatattgcaaggctacttgatctgctcttagatcgactgttacgatgacggagtcgatattacaatgttcattacatgtatccttct

SEQ ID NO: 8960 - DNA, 234 bp, Zea mays
  unsure (1)..(234): unsure at all n locations
  Clone ID: MRT4577_108167C.1
ccgggacttgttttaccccatctatcccactnctccacccaccaccgcccgtggggggcggagtcgcggatcggatccgccgacagaccacccccgcgcgccggcacagcacagacagagagaggccggactcgaaccttcctcttacctcggatccgggaacgaggacaccctgacaagctctgggggggggggagagctgttctggacgcttgccggctgagaccatgacgc

SEQ ID NO: 8961 - DNA, 176 bp, Zea mays
  Clone ID: MRT4577_108168C.1
ggcgccgccgccgtccaccgccgcccgcgtgcgcccacagttttctgttactacatatgagatgttgcttatctttagtattcttgaacatattttccccactccaaccacactctactgatgcccaacgacaatgcataatcctatgtcgcctgccctcaatgcagatctttcag

SEQ ID NO: 8962 - DNA, 275 bp, Zea mays
  Clone ID: MRT4577_108169C.1
ttaatctcatgggcaaggccatgagggacatcctggtggaccacgccgggccggactactactacatgcagtagctgaagttcaacaggggcaaggtcaccacgctggacttcatcagagctgtcaagaatgactacaccttcgaagcggagagcatggactacaccgtcacgctcgacagccaacggaatcagcttcaccatccaggccaccgacagggacgacgacccgctcgtcgtctacgcttgctgcaagctgctgcacactaaggagct

SEQ ID NO: 8963 - DNA, 869 bp, Zea mays
  Clone ID: MRT4577_10816C.1
aaaaatcgttttttttattggaaaacattcacattatattattataaaaaaggcacaaaaaatcgttcatatagtgttgttccttatcagaacattttttttcaaacaatgtagttgtttacatatcatggaatggtttctggagcgagctgattacagaagcaaagacaaagatgcaactcagattagctgttccctgtcatgtcaagcagttcatcaagaccttttagtctctgcttcccttcactaatcaaaaacctaatcttttgtttgtcatcacaatggcgatatttctcaaactcggcccttgcggtctgcctcaactcatctcgagcatgtaccggggctcggtgagtgatacgcaatgcctgtctataaagcttcaagacatgtgtacgcaggatgaaagcccgtaaatccatgaaatacgccattgaagaacaacttaatgccaagtaatggtcaatccatgtgaaacctcccagcaagcaacttactaccgcaccaccgctgggatgtgcgtctgctccgccgcctttccgccaggtgctgtcgacggccgctgcctacttctctctctccggtcgctcctttgctccttgcctgctcggcccgctggggcttgttcacaaggctgcgtgcgggagagacagcaaccagcaacggggaagggtctgggggcggcaacggtgtcgcgccgaggagaggacgggggcggggccgcgggggcggaggaggggcagcccgggaggaggcccgcgagtgcctcgtgccgaattcggcacgaggggaatatttgtgtacaacaaataatcatataactccaaaccatatatctcaaatcctttacttaaaattcaaagcaaatc

SEQ ID NO: 8964 - DNA, 528 bp, Zea mays
  Clone ID: MRT4577_108170C.1
ctgtaaggccttgttcggttattcctattacacatggattagatgaaaaaaaaaaaaaaaaaaaaaaaaaaaaaaaaaaaaaaaaaaaaaaaaaaaaaaaaaaaaaaaaaaaaaaaaaaaaaaaaaaaaaaaaaaaaaaaaaaaaaaaaaaaaaaaaaaaaggggggccaattggggggggcccttttttgggtccccgtttttgcccccgttttgccttttttttgggtctttttattggaaccccttggccctttttttgccccggtttttccgggaaaaccctggggaaacccccttttttcccctttttaaacccccccctttccccccccttttttaaagggggggggcccgaaaagggggcccttccaaaaggttttccaaactttttggccattgggacggcccctgggcccccccttttacccccccttttagggggggttcccccggggttccccctaaatttgcccggccctttggcccgcgtttttggcccttttttttttttttttttcccccctt

SEQ ID NO: 8965 - DNA, 214 bp, Zea mays
  Clone ID: MRT4577_108171C.1
gacccacacgtcctgtcatcatcaacttctgcatgctttttgcgagacggacagagccatagagaaagtatctttcagattttggtacggcctcctcactctaaccagccagattatttcaagcttgtgaatgctctcttgtctaaacacaatgttcaccttgtcacttttccttctgctaatactcatatctatgtttcttatcttttcaata

SEQ ID NO: 8966 - DNA, 320 bp, Zea mays
  Clone ID: MRT4577_108172C.1
accagagctgttcgatgacgagaggaacggaagttgttgtgagagcgctgctcgttgcggcggcggtagctgggctgttgctgtcgtcggcggcggaggacggcgttggtatccagcggcggtcccttcaccagccgtttttccccgtcgatcccacgccgccgccggggttcgacgactcgatcgtaccgccgccgccgccgccggcggctggcgccgcggcggcgtcggtcgcgtcgaagggcggcgggcggtccgtcaccaacgccgtcgcgatcgcgctcgtcacaggcctcatcatgcttggcgtggagttttac

SEQ ID NO: 8967 - DNA, 292 bp, Zea mays
  Clone ID: MRT4577_108173C.1
aaataaaatataactcggggctggattttttttattaaaatttacaccccatccccaaacaaccaaaccaacaaaatgacgataactatagacactcttcatgaaaggataaatgctacctgccaaactacggaatcatgaacaaagagcaactacattattcctgacaaaactggacttaatcttgggcagtcaaagattgacacggacaacaaacttgacacaggccatattcaaattgaggcaggggcacaggtccaaacgataccccaccaccaaaaaaaggcaccgc

SEQ ID NO: 8968 - DNA, 430 bp, Zea mays
  Clone ID: MRT4577_108174C.1
ccggccgggattatctaacacacgctgctcggcgtcttcgggcgcaggggcctcggcgaccccgccgacctcgtcgcgctctccggcggccacaccgtggggaaggccagctgcggcttcatcaggagggggaacgacgacttcgcccagaggatcgccgccatctgctccgggaagcagagcctggacgtgatcacgcccgacgccttcgacaacaggtacttcgtggcgctgaggagcacccagggggtgctcctctccgaccagggcctcaacggagaccagcgcacgagccgcttcgtcgccgccttcgccagcaaccagggcgccttcttcgaccagttcgccaagtccatggtcaagctgggcagcatcagggcagccgcacccggcgagatacgccgcaactgcttcaggcccaacggcggcc

SEQ ID NO: 8969 - DNA, 295 bp, Zea mays
  Clone ID: MRT4577_108175C.1
gggctttgaggagttcaagtacctctggaacaacattaaaaagtggcagggtatatacaaacgctttgatactgaccgatcagggaccattggtagcaatgaactcccaggggcctttgaggcagcaggattccacctgaatcagcatatctacagcatgatcatccgccgctactcggacgagaccgggaacatggatttcgataacttcatcagctgcttggtcaggctggatgccatgttccgtgctttcagatctcttgacaaaaatggcactggacagatccaagtgaac

SEQ ID NO: 8970 - DNA, 404 bp, Zea mays
  Clone ID: MRT4577_108176C.1
cagctcccttcacccctccgagatccgtcctaaatccgggaggcacgcgtgggctattggggccacgttgtggcggtcggccgacggtgttgtagagcagcagggagcgcgttgcggcggccagtgcctagctcagctgtgcaggaaggcgcgtgtaatcgacatcagagaggacagaggagaaggtctgaatttcggggaacaagcttcaaaatatacgacaggcaacgccccctacgacggcgcaaaggcgtcgtcaagcacccgatccgttccgtgtttcggaagccgccggcgagtcagccccaaagcaagtctgtgctgtccgtagtctccacagataaacaataatctgcggacagcaaatgtatccatgatccttataaaaattatatacttagcgc

SEQ ID NO: 8971 - DNA, 389 bp, Zea mays
  Clone ID: MRT4577_108177C.1
gcgcgtcgccggctccggcctggtggtgtcggtgcgctcatctggggctcggcgaggacgacgaaccggcggtaggagaagcttccggagcggccgtgcgaggcggactgcacctactacctcggcactggcgcctgcggcttcggggagcgctgccgctccaaccacccccgggatcggccggctccggtttatggctttgggacgaccataggtatggagttccctgtagcgccctggacagccactctgtgagtactatgcatagaatggcgcatgcaaattgggctccttttgcgagttcgaccatcccatggaatgcggctgtgtacctgtgcctttcatctcccgtgggctccctctacgtccgggtgcattggcatgttcgt

SEQ ID NO: 8972 - DNA, 305 bp, Zea mays
  Clone ID: MRT4577_108178C.1
ttaaccgtctgatatcacttttgatatttctaggatggatggtatgctctttcttaatgggacggctaagatgatcttaactcccaactgatagactctttggcccaataagaagggttctaaagcggaagatcttgtgtgactgtccagtctcatggaggagacagatcttcccttgaagatgttgccccaagtaacttccttgactttggaactaaccctactgttctaacttaaatctaaaataactgatcaccaaaggattgctacctatacattcacctggcttgatcttgcttttccta

SEQ ID NO: 8973 - DNA, 288 bp, Zea mays
  Clone ID: MRT4577_108179C.1
gtacggtctagggattcgcgggccgcgtcaggtcgtatcgtctgtcgcattatattccttattattattcacagcaaccacatcgtcgagaccaaccaactcaagggaagcacaaacctccaattcgattcagaataatcatccacgcatcatgctatatatgtaccctcttttatttttttctctctcttttaaacttgctgctgttatttgttatttgaattaaagttacgtataccgtatacgtacgtcaaagagtaaaaaaaaaaagaaaaaaaacaagaaaat

SEQ ID NO: 8974 - DNA, 339 bp, Zea mays
  Clone ID: MRT4577_10817C.1
atggagcctagcggagggacagctgtcggagcggttgagtccttgctgacgtccttgtgcttccgtaagggggctgagagccgccgtcgtcacagagcatgcggggcgccatcattgcctatctggcggagccagccaaatgggatgccggtcttgttccctgcggcctgggttgggcgatgtggaggctcctccgaagccgaggtcgagtttgtcttccatggccgaggccgagtccgagcccctgggtcgggcgaggcggaggtcgtcggcagaggccagggcggagtccgagccctggggtcgggcgaagcggagttcgtcgtcttctggggctga

SEQ ID NO: 8975 - DNA, 2166 bp, Zea mays
  Clone ID: MRT4577_108180C.1
ggccggggatgcctaaccccgcaggccgcaggctcgcatcgccaagcatcttccgcgtctcttcggagacatctagtaaaagcatcttccgctactccgccctccgcctcccccgtctgcttcgcaatccgatccggcgaccggcggccatggatcctgcgccgcagacgcacccgatcctctcttacgtgctctcccgcatccccaacctctccatgaccaagacccccaccgccgagttcgacatcgagcagccgcctgtgcacaccccgtccccgcggacgccgtcctccgcgggagagttcgagctcgtcgagcgcatgccggggctgcgccacccgtccgtgctccgcgccatgacccgcgccgtcgccgacgtctccgccgcgcgctccgcgctgcaggtgctcggcccgcgccccgaccacgagctcgtcgactcctcccgcgccatagtggccgccgccgaggccggggattcgcggatccccgcgggcgacgtcgaggcgtgccgcgcggtggtgcgcctcgatgagacccacgacgcctacgaggccctgctgcacgaggccgagtccaggctcgagagggtgtaccgctccgcgatggaggggacggacctggatgacgaggcggcggagagcgtcaaggatcaagggccggtcgcggggcctgagggcggggacgcggcggtgggggaggaggtggtggcggtgctcaagcaggccgaggagggcaagccggtggagagcgtgcgcctcgtggatcgccagcttcgccatctgcccgaggcgttcgggaggatcctggggctccgtgtgctcgacgtctcccgcaaccagcttgaggttattccagatgctataggaggacttggtcatcttgaagagctttttcttactgccaatgatttggtatctctacctgataccattggactgctatccaatctgaagattttgaatgtatcaagtaataggcttagggcactgccagatagcatctccaagtgcaggtcgctagttgagcttaatgtgagctataatggtcttacttatctgccaaccaacattggttatgacttggtaaatctgcgaaaactctggattcatatgaacaaattgcgttctcttccatcatctgtctgtgagatgagatcgttgtatctcctggatgcccattttaatgaactatgcggtctaccatctctcttcgggaaacttagcggccttgaaattctcaaccttagcagcaacttcagtgatttgaaagagcttcctccctcgtttggtgacttgctaaatctgcgtgagcttgacctaagcaacaaccagattcatgctctccctgacacttttggtcggctggataaactggagaagcttaacctagagcagaaccctctagtcatgccaccagaggacattgtgaacaagggcgtggatgcagtaaaagagtacatgtcaaagaggtggctggacatattgctcgaggaagaacaaaggcgcattgcggcagagaccccagaaatgtcatcgactcctaaagcttggctgactcgcagcgtctcctgggtcacggacgtttctgagagtttggcagggtacctaggtgggaacaagtcagagaaagatgcatatctggaccagcagttttgatactttatgtttcttttgcctaatgtgcattcgccccatgtatacacaaataacgtttaccaaaaatcttcattacagatgtgttcctggtgagtataccgtacggttttgcttaggaaatggatgtgttcctaatgggtctgtcgtacggttttaccgtggtccattgaataatagtatctcacagcacttgagagtacactcaagataaacattgttcagagatcgacctgtcttctggtatttggctttcgcccttcgctgtgaattttgttcccctgtgaaaaaaaaaaaaaaaaaaaaaaaaaaaacatacataaaaaaaaatgaaaaaaaaataaaaaaaaaaagaaaaaaaaactgacatggtagaaacagaacaacatcaaaataaacgaaataaactgcacgggggggggccttttaaggatgaaaatatttgtaccccggattcagcagttataacttttttttaaggggacccaaatttaattgaaccgcccctgat

SEQ ID NO: 8976 - DNA, 201 bp, Zea mays
  Clone ID: MRT4577_108181C.1
ctcctcctacatacaaattttttttatctcacacaaaaacacagtggcgttcaatcaaccaactctgcaaacctatcttctacaacaagcatattgtggcaaccctactactacaacctaaatgcctaaccgcaacaactatccttgctacatttaacataccaaacaataacaacagattaactatatcaaatcctacct

SEQ ID NO: 8977 - DNA, 598 bp, Zea mays
  Clone ID: MRT4577_108182C.1
ggtaccggcccccttctcggtttttttttttttttttttttttttttttttttttttttttttttttttttttttttttttttttccccaaggttatgttcttccataaaacccggaatttttgccagtaaacccccctaaccctaaaaaatggaaaccggctcccctaacaaaacggaaggggctccaaaggaaattagggaataactttgccccccaacttttttttttccttgtgtgtaaaaaatttgcccaaagaaaaccaaaaaatccggggcctatttaaccccaagggtcccctccaactagttgggggaaaaaaaatcggggggggcagttttaatacctggggggtggaccaacccacaggacccgatttgggggtatacccaaggaaatggacttttacttttcttttaacagtcttggaaaagtatttcctgaccccgaccacggttttcctccggaagtttttcaccccccaacaggggttaaggcttgccaaaaaaacccgccttatctcccaaggttttccaccaaatagggcaggggtagggactacaagggtatccctaaaaccaacctgaatgcataaagg

SEQ ID NO: 8978 - DNA, 584 bp, Zea mays
  unsure (1)..(584): unsure at all n locations
  Clone ID: MRT4577_108183C.1
gcgttcgctttggcgtgnatggnaaccttcaggaaccaggagggttgtggctgtgattttaatggggacgggtacccactggaaacctgttcccaagaataaacttgtctactaactagatttacatgtaattactgtaaaggctagctttttctttcctttttattgaacacagaccaaacaagaggggagaattgtttggtcctttccatgaaaatttgcacagatctcaaagaaacaaaattttaattaataattgtattaattatatttctcttgtgtctcatctaggctggcatgcctgcgtccagcccatgcccgtagctagctgaagttcctgatccactttcatgaacttagcggctgctagacgaaaaaattgatcaagttagctaaataggctctgtaattgatcgaattaacctattagtttatctaggcaagcaaacaattcaaccatgtttgatttatgagaacgataaaagtgacagctgcaaaggataccaacaaggttccaaaccacaatttgattgcatgatctgaatgctcctcaatcatttgatgctacacaggggcgttcgcta

SEQ ID NO: 8979 - DNA, 420 bp, Zea mays
  Clone ID: MRT4577_108184C.1
ctgttacctccatcacttgtaccctgcttggaggctggaggggcattttgcaaaatatacagagcaatcaaagacgttagatcttatatagatggtgatgatttaatatatgtactatgtgcaccaaactctcatgtgcaccaaatatgtcccctttgaaaatatggatatagaaggactattgtgcggggggatgtatggcttcatactgcacgaatgagaacaagactatgatgtgtagagccgattcgtatctaattactttcattagtcggtgttcccccattataaaagcattagcagtctatttagcagacgagcacaggcagtttctcttttctctgttcccttgtaaaagtttccctatttcatatgtctttggctgccttttgcctcgtgaggccataccctttctgactc

SEQ ID NO: 8980 - DNA, 1007 bp, Zea mays
  Clone ID: MRT4577_108185C.1
tctgcattgcctcgagtccgccggacgcgtgggtttagcacagaaagacgaaagaagaaacggggcgactcgcagatccaagcggagaagctgcgtcgtggcctgaccctgtccgtcctctccggtcggcgagagcaagaagagatcccgcgccgtcctcttctccacctccacctccacccatggcggcctccaccttcagcggcgacgagacggcgcccttcttcggcttcctcggcgccgccgccgcgctcgtcttctcctgcatgggcgccgcctacgggacggccaagagcggcgtcggcgtcgcctccatgggcgtcatgcgccccgagctcgtcatgaagtccatcgtccccgtcgtcatggcgggagtactcggcatctacggcctcatcatcgccgtcatcatctccaccgggatcaaccccaaggccaagccctacttcctcttcgacggctacgcgcacctctcctccggactcgcctgcggcctcgctggcctcgctgccggcatggccatcggcatcgtcggagacgccggagttagggcgaatgcacagcagccaaagttgtttgtgggcatgattctgatccttatcttcgcagaagctcttgctctgtacggtctcatcgtcggtatcattctctcatcccgtgcaggccaatctcgcgccgattagaaggcttgatatacgccacactgagtcatctgccattgtattcaaagtgttcttttctcggtgaacaatgtgagggatcatgttgagcctgttccacctttgtaacattatattgctattatgtgaagacaaacctagctagctgttgcagttatgctgttgtacttgtatttgtttgaaaataataggcagcgagccccggatgtgatgaataataagcaagctggactagttgttaatgttttttctttaatgtggattggttttgttaaaaaaaaaaaaaaaaaaaaaaaaaaaaaagtactctgcgttgttaccactgct

SEQ ID NO: 8981 - DNA, 353 bp, Zea mays
  Clone ID: MRT4577_108186C.1
cgcaaactctcccatcacaggtttttttcgaggggtttccattgtaaaagttttaccccccccacactttgaaaatttcttgaaaggattgggtgcccaaaccttggttaaatttacattggtcttgagtatgttgaaaggaaaatgggttgggataatggtttaaaaaaagcttcttcaagattttttttgcgagacataatatctggtcttttggatcttcacttccataatggtattcatggtggtatcaagccagaccatcttttggttaccagtaccggcaacgtgaagatcggggatttcagtgttagccaggtttttgaggatgatgatgatatgctttggagatc

SEQ ID NO: 8982 - DNA, 2197 bp, Zea mays
  Clone ID: MRT4577_108187C.1
agcagccgggagcagctatcggtacagtacgtgagcgagcggcggcggcaatgacaaggtgcggacgatgccgccagtgtgaatgcgccggcgcctccaccaccacctcccacggcgacgcgcgcaaccgcgacaacgatgcccccgacgcggtcctcgagggcctcgccatggcaggcctcgtcgacatcctccgccagctcggagacctcgcagagcttgccgcggaggtgttcgacgacatgcaagaccaagtgatggccgcgtccgcgcgagggcgacgactggccgcgagagccaggaagctgctggcggccgacctcgacctcgtcctcgacctcgacctgccgccgccgtccacccaagaacaccgctgcctcagctctgccgccgctgctactgctctcgccacctccggtggtgcaggccgtctgggctgccgctcctatctcggaggcgcgccgccgatgccgcgtgtcgtcgtccaacgtatcgagcgctgccgcgggcctcccaggctgtcactccttgacaagtttgatgctgctggcgatggagcgtgcctcaagaggtacaccgacccctccttcttcttcagggcccactctgccaagattgatgagcaaggcacgctgaagcagcatcgtcggcaggcagaagcagcagcagcagcaggtgccgccgggtctatgttcctgctgatgcagcaaacagctgctcacagggtcgaacagcccaacatggaacagaagctgcaagaaggtagtacagcgcagcccagcccaagtgagctcgagagaacgagctctttcgaggcatggctctctccacaagctcgccgctttcctaccgctactgctgctactactcatcaccatcttcaggaaccacctgatgatgatgatggtggtggtggtggtggtgctactacctgtagtggatccatcagtagtcaggttgataccacatcgaatgctgcggctgttagcagcagttccacggtgaaggcggtcaggctgaactcagcatcattggtgaaaggtggtgagagtaatacgacgaggtcgaggtacaaaggcaagatcgcctcaagagtcagcagcttgccgaggaagctcttcatgaacaccaccaagcatcacaacgaccactcgcgctcttttcgtgcaggtagtagcagcctccgggtgacccaagccacagacatcggggattgcagccctgaacttgaagccatcgccgtcgccatccccaccccagatcgatgcagtaacagtaacagcagcactcctgaaacatgtacagcagctgactccaagaacctgctgctgctgctgccaggaagtggtcctgttctggagccacctgacaattcttctgctgctgctgctgaagacgccaaagtacatacgccacttgcgcctattccaccgatgcagtggctgtcagagaaagggactccacctgcatctcctaaacacagaacaccatgtttccagcaacaatttggtagcagtgggcaatctgatgagaagccaagccaagagcacgaggcttcagaccacagcagcaatctgctgcaggagagcgtgttcttctctgcggcacaagagctagcgaagatgtcccctcctcctccttgggtgccaaggcccaaatatccactgcttgatgttaaggcactacggaatggtccaagcccgatccatccttcaagaaacattttggacagcaggagtgcacagataaaagacattgcaatttcttccaagctgaaaccagcttctagagcgagctctcatgtgactgggactgggagtcctaccaacgccaccattctgaacagagcagatggcattcggcaggtgcacgatgatgaaactgatcaaatctggagcgatgacactcaatgaataatgatcatgtactaactgatggaagtagagtcattcaagttgagatggccgagttggtctaaggcgccagattaaggttctggtccgaaagggcgtgggttcaaatcccactctcaacaaatatttttttatttttcctgttactcttgtaattgtttgtagagaattcattagcttttttttttcaaatccaactctcaacaaacatgtttttcattgtattgtttttctttttcctgtttcaaactactcttctaattgtaattgtttgtagagaattc

SEQ ID NO: 8983 - DNA, 204 bp, Zea mays
  Clone ID: MRT4577_108188C.1
gcactcgttcgcggactcgtgttcgacgacgaccactgggaatccattccggcgcgtgcgcactctctgtcgggggggcgtcttcgccatggtgtgggtggccttcgactaggcctcgatcgagatcgttgcgatcaaatcggcgcgcgcctgtcaatccgtggcgcatctgcagctccaggcccctgtactccggtgcctctc

SEQ ID NO: 8984 - DNA, 783 bp, Zea mays
  Clone ID: MRT4577_108189C.1
ggctcggagagcatagcactcctccaatcctcttatctgctgcacgtacgagctaccccgggcagctgtccagggccacgcttcccacgcccgaacgatcgatggccagtggcggcggcaacgcggcggcggacgccaagcacgtcgatgcggaggtcgtcatcgtgggcggcggcatcgcggggctggcgacggcgctggcgctccggcgggcgggcgcggcgcggcgcgtgctggtgctggagcgccacgcggggcatcgtgccaccggcgccgcgctcaccatcttccccaacggctggttcgcgctgcgcgcgctcggcgtcgcgcacaagctcgcctcccgctacgacgcctacgaaacatccagggtgaccaatctcgagaccggggcgacgcaggtgtttcgctttgccggcaacaagaacaagaaggcgccgctcctgtaccgcaacccggtgtccgtcctcctgggccccgcggctcgcgggcccgtcacggtggccggcgacgcgttccatcccatgacgcccgacatggcgcagggcgggtgctccgcgctggaggacgcggtggtgctcgcccgggcgctgtcgcgtgaggcgacgccggccgagggcgtgtccgcgtacgtggcgcagcggcggaggcgcgctgcctggctggtcgccggagcctacctgtccggcgtggatccagcagggcgtgaccaacgtcggcggcgtgcgcggcagcctgttgaaggtgttccgtgactggatcttctacaggttcgtgttcccc

SEQ ID NO: 8985 - DNA, 305 bp, Zea mays
  Clone ID: MRT4577_10818C.1
atcttagaacaccacttcggatggggcgagtgtggtcatacaatatggaactcattttttttttcggcccatgcaaaagcacacatggaaaccaaatttaacgggggcgagaaaaagccccacggatttgtcctgaaacactattacgggtctagcaatgatagcattgcatgtgctactaactctctgaaccgcacactatgttgttcactgcaggggcaagtagcaattgaccattccgccctaggcatagccccactatcagggatagcggtcacaagaactagagcgacgtctgaggaccg

SEQ ID NO: 8986 - DNA, 412 bp, Zea mays
  Clone ID: MRT4577_108190C.1
ggaccctcgagccgccggacgcgccctctgccgcttgttcgttcctcgcgctgccccggcacccccacacatcccaatctcgcgagggcaagcgcaggtctgcggcggcggcggcggcggcggcagcgcttccggctcccctttcccattggcctccacgatggcgctccgcctcaacgacgtcgcgctctgcctctccccgccgctcgccgcccgccgccgccgcggccgcagccgcggcttcgggctgttctggcgccgctgtgctccttttctgcctgcttcccgcgccctgtctgggttccgaagaggccttcacctgcaagctggctccatgttacgcccacaccctaaaaccgcaatgcccgcctgctcgctaaaccttattcgaaaatctgttctcctgacatta

SEQ ID NO: 8987 - DNA, 333 bp, Zea mays
  Clone ID: MRT4577_108191C.1
gttgaattaaactagaaacataaatagtgcattacagcacaaacaatccaaggggaaagattgtcttggcttatttgctccttgtgctacttaggatattcttggtgccaagattcttacgtccttgtatcacattgcttaatacttcaactcttttctcatagtgtaacgatttttgttgttccacgatttaacaacacatatgcatgcactcaggtttcttcactaacgtaaatcaatcagtaaggttgcttgaaccacccttgtggcaaatttaacaaccatttatttggggatatttgtctccaaatgatcgttacagaaaagaacaac

SEQ ID NO: 8988 - DNA, 1200 bp, Zea mays
  Clone ID: MRT4577_108192C.1
agctgtccagggccacgcttcccacgcccgaacgatcgatggccagtggcggcggcaacgcggcggcggacgccaagcacgtcgatgcggaggtcgtcatcgtgggcggcggcatcgcggggctggcgacggcgctggcgctccggcgggcgggcgcggcgcggcgcgtgctggtgctggagcgccacgcggggcatcgtgccaccggcgccgcgctcaccatcttccccaacggctggttcgcgctgcgcgcgctcggcgtcgcgcacaagctcgcctcccgctacgacgcctacgaaacatccagggtgaccaatctcgagaccggggcgacgcaggtgtttcgctttgccggcaacaagaacaagggcgaagaagtcagagtgagggcgcttgacaggaaggcgctgctggaggcgctcgcggaggagctgccgccgggcaccgtccgtttctcgtccaaggtcgtctccatcgacaccgagcgagcagccggcgactcgtcggtgaccgtcgtccttggattggacgacggcacggtgatccgagccaaggtcttgatcgggtgtgacggcgtgcactcggtgggtggcgcggtggctgggcctgtcggaaccggcgagctcgggccggtctgccgtccgcgggctctccgtcttccctggcgggcacggcgtaaagcgggagctccggcagttcctatcggagggtctcagagccggcatggtgcccatcagcgacaccgacatctactggttcctcgtcaacaacacggtcgccgcagagaaagaagccgccggggacccggtgaagaccctgcgcgaggtgaccgacaacctggccaggcacatgccagcggagtatctggacgtggtgcgccactccgaccacggcaacctctcgtgggcgccgctcctgtaccggaacccggtgtccgtcctcctgggccccgcggctcgcgggcccgtgacggtggccggcgacgcgttccactagttctatgacgcgacatggcgcagggcgggtgctccgcgctggaggacgcggtggtgctcgcccgggcgctgtcgcgtgaggcgacgccggccgagggcgtgtccgcgtacgtggcgcagcggcggtggcgcgctgcctggctggtcgccggagcctacctgtcggggtggatccagcagggcgggaccaacgtcggcggcgtgc

SEQ ID NO: 8989 - DNA, 574 bp, Zea mays
  Clone ID: MRT4577_108193C.1
ggtaccgcggccccttctcgagttttttttttttttttttttttttttttttttttttttttggtttttttttttttttttttttttttttttttttttggacaaaaaaacttcggcaggctttaaacaaaatagcaaaatttcccttttttatccaaaaactacgggggccccccttcaagtttcagcaaataagggcagggcaaagggaaggggggaaaaagagtaagggaaaaactttagctgcccccccccctttttcaccgttcaagttggctcatcaaatcttaaaggcggggcagttcctgaaatatgtcattccagttgggcaggcctattccaaattttttgacccgcccatcgagacaaaggattatgtaaacctcctccccaggagggaccccttcaaacccttgggggtcccgtatccacctgacccataaggagaacagggggatttcaaaccccaggatgggaaattcccactttcaggcttggaaaaccctgctaataatacccaaaagggaaccggacctgctgccctggtagattttctgggaccggcccttaaaaa

SEQ ID NO: 8990 - DNA, 345 bp, Zea mays
  Clone ID: MRT4577_108194C.1
cgcacgagcaagccaactatactcggagtacgtattgacaaactgcttatcaataggggggtggatcttgaccttggcccagcatacattaaccaagccaagatagatctttaaggtgtagacccgatcggaggggcatattattacgggggacaagaacctgatattgaccttttccatcacgcatgcgttcctgtggatgatgactgctttcaagttcggaatctatctgtttatcgcggaaaggatcaccaacatgaccgtgaatgtctacttcttcaatgccgaagactaagggcgtgcccatctaagagatagtgctgctttggcgtaagcactggattt

SEQ ID NO: 8991 - DNA, 2776 bp, Zea mays
  Clone ID: MRT4577_108195C.1
gggtacctcgaggccggcccgggaaacagacccaaatcggcaccccggaagcctcaaatccgctctattcctctctccccctctctcccccatcgcaccagcaggcgagcgcgaggcggaggagtagagatggagtcggaccagggcaagcttttcatcggcggcatctcctgggaaacgacggaggagaagctgagcgagcacttctccgcctacggcgaggtaacgcaggccgccgtcatgcgcgacaagatcaccggccgcccccgcggcttcgggttcgtcgtcttcgcggatcccgccgccgtcgacagagcgctgcaggacccccacaccctcgacggccgcacggtcgatgtgaagcgggcactctcgcgggaggagcagcaggcctccaaggccgcgaaccctagcggtgggaggaacactggcggaggaaatggcggcggcgatgcaaatggtgctcggacgaagaaaatatttgtgggcgggctgccctctactctgactgaggatgggtttcggcagtatttccagaccttcggcatcgtcactgatgtagttgtcatgtatgaccagaacacgcagcgcccccgtggcttcgggttcatcacctttgactcggaggacgcggttgaccacgtgctgcagaagaccttccatgatcttggtgggaagctggttgaggtgaagcgcgcattgccccgtgaggcgaatcctggcggctctggtggtggtcgttctgggggaggtgggggttatcagagcaacaatggccataacaccagctctggtagctatgatggtagaagtgatggtggcaggtacgggcagacacaacagggtagtggtggtggtggctatcctggttacggtgcaggaggctatggtgctggggcagctggatatggatatggtgctaaccctgcagttggatatggaaattatggggctggagggtatgggggtgttcctgctgcttatggtggacattatggaaacccaggtgcagctggttctggttaccaaggtggacatccaggctcaaatagaggaccttggggcagtcaagctccatctgcatatggaactggagggtatggtggcagtgctgggtatagtgcttggaacaactcttctggtggtggcaatgctctgaatagtcaagcccctggtggacctgcaggctatggaagccagggctatgggtatggtggatatggaggggatccatcatacgctagtcacggaggatatggggcttatggagcacgtattgatagtgctggcaatcctgctactggtggatcatctggatacaatgcaggctatggaagtggtggtgccaactctggctattcaagtgcttggagtgatccttcgcaaggtggtggatttggcggttcggtcaatggaggtgctgaaggacagtcaacttatggcactggctatggcagtgtgcagcccagggttgctcagtaaagagaggcattttgagtgtgcgaaatgaaccagtgcatctgggcagtctatgtattgatttgtcattccagtctctctggttgctctcagcattttgaagattgcccatttgctgcttaaatcagtatttatccgggttggaatgcttgatcctttagtggcttactactagaacttctagtcaataagtagctaaaatgtggagtagcagtatcttgcagaatgcttttattaatttttacatttagctttatctatctgtgtggtttgccatgagtggagtttcaggttgcttcatctctagttataagctagagtagcttgactacttatgggcaaaattatctagttgtacctctattctacagatcatacatttgtgtttgacagtagtatttatgctggatattgtacctctattctggaatgttctatatttggtggttgtattgacatatggtattatcaacattcatggtttgaaacagatgcaaaccctgaaatatgcaatcatagttacttgatgctgtagctgcttctaacagtattttcaactgtagtgcaagtgtttttatgtagctggaatggtacacccttcaagtatatcaccaagctatgaattccatccatttggtcctagatttcaatattttcaaagcagcagtaagcttattagcagcaagattgtagcgccaagtttctgaggttgaatgggatggcattctttttttagatatgcccaagcaaggtctatgaaatcaggcatttgaaaaaggcattttgcacagtgatttacatgaactggcgagaagttccaatatcggggttctgacagaatgcaagataccagcttaagtgcttcattttctgaagggtcttgtgctgtgctacaagatagtggacgaagtgcaacatgttggctggatccactttggctgggtctgagggagcatgggccaagatcttgggggctcggctgtgtggtgcaacgggcagcttgcttgcatactggtgatcgtggatgcttgtgatatagcattgccccccaatgtataagtgaacttttagtgctagaggcttccttttgttggcatgatgtctatggtttataggtgcagtagttgcataacacatagtatactcagtatactttgtgtggaagctattgatgcttttctttttgtttagcatgaatgccatataattgtacattgaattgacatattaagttattgctaaaacacactccagtgaattttataaggccctgtttggatccattgaattcaaaaaa

SEQ ID NO: 8992 - DNA, 1161 bp, Zea mays
  unsure (1)..(1161): unsure at all n locations
  Clone ID: MRT4577_108196C.1
ccgggtcgcccagcgtccgccccgcgtccgcccagcgtccgcccagcgtccgggaaaccagtgcagctggttctggttaccaaggtggacccccaggctcaaatagaggaccttggggcagtcaagctccatctgcatatggaactggagggtatggtggcagtgctggctatagtgcttggaacaactcttctggtggtggcaatgctcccactagtcaagcccctggcggacctgcgggctatggaagccagggttttgggtatggtggatatggaggtgatccatcgtatggtagtcatgggggatatggagcttatggagcgcgaagtgatggtgctggcaatcctgctactggtggagcatctggatatggtgcagggtatggaagtgggggtgccaactctggctattcaagtgcttggagtgatccttcacaaggtggtggatttggtggttcagtcaatggaggttctgaagggcaatcaaactatggcactggctatggcagtgtgcagcccagggttgctcagtaaagaaggcattttgagtgtctgaaatgaaccagcacatctgggcagtctatgtattgatttgtcattccagttctgatttgttctcagcattctgaagattgcccatttgctggttaaatcagtatttctccgggttgaatgggatgacattccttttcagagatgatacccaagcaaggttatgaaatcaggcatctgaaaaaaaatgtggcagtgattttacatgacgagctggtaaaaagttgcaatattggggtgcagacagaatgcaagataccagcttgagcgtttcattgtctgaagggtcttgtgctgtgctacaagatagtgtggcctctggcgttggaagcgaaggggaccggggcatcttgtggctggtgtgtatcatcttcctaccatcctaggacatctaattagtttgattagtttcttccccgttctagtggactcggttgctgcttttggctttcaccgaatcctctccaaaggtggcgctggtgctactgttccttatggtgatgattttacttctgaccatgattgttacagcggtaaggctgtcttaggatcttttaacctttaagcatggagacgactntatatacatgtaagtaaggtgaataat

SEQ ID NO: 8993 - DNA, 915 bp, Zea mays
  unsure (1)..(915): unsure at all n locations
  Clone ID: MRT4577_108197C.1
aattcggcacgagggcgcccccgtggcttcggattacgcacctttgactcggaggacgcggttgaccacgtgctgcagaagaccttccatgatcttggtgggaagctggttgaggtgaagcgtgcattgccccgtgaggcgaaccctggtggctctggtagtgggcgttctggggtgagtgggggttaccagagcaacaatggccataacaccagctctggtagctatgatggtagaagtgatggtggcaggtacgggcaggcacagcagggtagtggtgtctatcctggctatggtgctggggcagctggatatggatatggtgctaaccctgcaattggatatggaaattatggggctggaggatatggaggtgctcctgctgcttatggtggacattatggaaacccaggtgcagctggttctggttaccaaggtggacccccaggctcaaatagaggaccttggggcagtcaagctccatctgcatatggaactggagggtatggtggcagtgctggctatagtgcttggaacaactcttctggtggtggcaatgctcccactagtcaagcccctggcggacctgcgggctatggaagccagggttttgggtatggtggatatggaggtgatccatcgtatggtagtcatgggggatatggagcttatggagcgcgaagtgatggtgctggcaatcctgctactgggggagcatctggatatggtgcagggtatggaagtgggggtgccaactctggctattcaagtgcttggagtgatcccttcacaggtggtggatttggtggttcagtcaatggaggntctgaagggcaatcaaactatggcactggctatggcagtgtgcagcccagggttgctcagtaaagaagcattttgagtgtctgaaatgaa

SEQ ID NO: 8994 - DNA, 319 bp, Zea mays
  Clone ID: MRT4577_108198C.1
ggagaactgacctggatttggcgagggagagatggcctcgcggtgaactagattgccgttgcgagcgtgagagctggagactgggctcggctgtgaggaggggggggggggggggggggggggaggatttttgaggggggggggggggggaggagcggaaagaggggggggaaggcgggggggggagaggggggggggccgttaaaaggacccgggcttgcgggccgggggggctggggcgggggggagggtgggtttgggggggccggggggggggggggcagggggggggggggggcgggggggggggggggggggg

SEQ ID NO: 8995 - DNA, 620 bp, Zea mays
  Clone ID: MRT4577_108199C.1
aaagcagcagtaagcttattagcagcaagattgtagcgccaagtttctgaggtagtatagataactgggttatctgtgaagctacctgaatgtttaggggtagaaatgtattgtagaacagtcaaggctcggcaactaaagtaattgtccttcctcctaccttcctttatgtacaggttgaatgggatggcattctttttttagatatgcccaagcaaggtctatgaaatcaggcatttgaaaaaggcatgttgcacagtgatttacatgaaatggcgagaagttccaatatcggggttctgacagaatgcaagataccagcttaagtgcttcattttctgaagggtcttgtgctgtgctacaagatagtggacgaagtgcaacttgttggctggatccactttggctgggtctgagggagcatgggccaagatcttgggggctcggctgtgtggtgcaacgggcagcttgcttgcatactggtgatcgtggatgcttgtgatatagcattgccccccaatgtataagtgaacttttagtgctagaggcttccttttgttggcatgatgtctatggtttataggtgcagtagttgcataacacatagtatactcagtata

SEQ ID NO: 8996 - DNA, 1527 bp, Zea mays
  Clone ID: MRT4577_10819C.1
atggccgcctcaggctactcgggctccgcgcccattactgatcaggggttcgaaggctggcccccgaaggaggctcgggggctgctctcgcaaaaaccggctccggccaaaccgttgacagcgtcaacataccagcccgagagcttgggccccgaccgtgcacccgggctacggccagttcgcatgagggaacgaccagaccagccgaagcattacacaagcctgacagaaggacagcgtcgcctgcgccactccgactgcggtgccactcgacagagtgagtcaaacagacagtcaggccttgccaaaggcgccacggcgaactccgctccgcccgaccccagggctcggactcgggctaagacccggaagacggcgaactccgctccgcccgaccccagggctcggactcgggctaagacccggaagacggcgaactccgctccgcccgaccccagggctcggacttgggctaagacccggaagacggcgaactccgctccgcccgaccccagggctcggactcgggctaagacccggaaggcggcgaactccgctccgccctaccccagggctcggactcgggctaagacccggaagacggtgaactccgctccgcccgaccccagggctcggactcgggctaagacccggaagacgacgaaactccgcctcgcccgaccccagggctcggactccgccctggcctcggccaaacgacctccgcctcgcccgaccccagggctcggactcggcctcggcaacagaagacagactcaacctcggcttcggaggagcccccacgtcaccctgcctagggcacagacccgccacatcaacaggaagcgtcatcatcgtcctaccccaaatcgactcgggtcacggagaacaagaccggcgtcccatccggccagctccgccggatgggcaatgatggcgctccacaagctctgtgacgacggcggcccccagctctcttacggaagcagggcgacgtcagcaaggactcgaccgctccaacagttgtccctccgccaggctccgtcgcacctccgacagccacgacatcacgccagcaagggcttgattcttagtaatgccctgagggcacagaagaatattgaagacgaaagttatacaatggctctgaataaccttcattcagaagttattgaattgagaaacgaagatgatataaaggatccttcagctgaagcaaccatgatgggcggaaaattctataatgatgtctgggtgaatggtggccgagagatggcccatgaaattataaagaaaagtgaaaaagacacccaagatgctcgaacaaaagcaagacgagctgaagaagttgcagagcgcgaaaagcgtatagctgaattatctatgccgccggagccatttgatcccctagctgatccaaaaatgaaggaagcgctagagatcataaacatggctgaatctattgtcgacgaagtcgttaacaaattgctgaacgaagttgcagagaaagttcttaaagaggaatag

SEQ ID NO: 8997 - DNA, 817 bp, Zea mays
  Clone ID: MRT4577_1081C.1
ggccgggattcattaccggaagagaaaaaaaataactcggaaaaggagacgccgaaaattcgaaaggggaggggaaagcaaagctgatggcggaggaccaggggaacgcaaagcaaatggcggaggaccaggggaacgcaaagcaaatggcggaggccccgagcaagatcgaatccatgaggaagtgggtcgtcgagcacaagctccgagccgtaggttgcctctggctaggtgggatcagcagttcgatcgcctacaactggtcgcggcccaatatgaagcctagcgtcaagatcatccacgcaaggttgcatgctcaagctctaaccctggctgcattagttggttctgcatgcgtggagtactatgaccagaagtatggttcttctgggccaaaggtggacaaatacacaagccaatacctggcccattcgcataaagattaaaggtcgccatgttggttcctgcatgccggattaattttgggctcatctcgggttgctcatgacccgcccatggatgctggatgtttattctttttttgtcttcataattacaaaatggtggtgtacttgccaggcaaatgttaatgagggtataatgcagatattgtcgtcataatttggcctcatgttgcattatctaacctcactttgttgactgtcagcgactcagcgtctctgattttttttatattttttgagagaaggaaaagaaatcccggtttgtgcctaaaatttgagttctatgtgccccgtgtaacttctgttctgtgttcctgtgcttgtatgaatacaagggaaatgcaaaaatgttt

SEQ ID NO: 8998 - DNA, 349 bp, Zea mays
  Clone ID: MRT4577_108200C.1
gacaaccaaagtgggtatgttgttgtgtattgacgagaggaaacataccaattttacaccacaagttatactactataagaaacttatccaagttactcactgagctgttcactatgatacacacctcataagctcacttaaaatttctgctagatatacatattgtttgagaacaattctttattttcacttacacatttttaaccactcataattttaccaatgattcctacatctaattctccaccacttctaaattgggaacaacttaaacatattttaaataatttttaaacaaaacaccaccgtaaagtgttttatttaccactataaacactggaagtttaa

SEQ ID NO: 8999 - DNA, 189 bp, Zea mays
  Clone ID: MRT4577_108201C.1
ccagaggacttttcttcgaaccaggcaagggtgtccgggaaaaacccttttattgggtataagaattacacacacctggggccatagatccgcggcttccaactgcctttggtgggcggtgtggccaaccaggcaattcaccctacaaagaaaagggcgcttcctccggtaaagaaccaggacctagtt

SEQ ID NO: 9000 - DNA, 1713 bp, Zea mays
  Clone ID: MRT4577_108202C.1
tctctacaaacattgtctattccgaaggattggaagtgtgctaaacaggacccaaagtggaaggatgccatgaaagaagagttgcttgcccttcaaaagaacaagacatgggaacttgttcaccttcctgaaggaaagaaggcggtagggtgcaagtgggtcttcacagtaaagcagacccctgaaggaaagattgataggtacaaagcaagactcgtggcgaagggatatagttagacgtatgggattgactatgatgagacatttgcacctatggcaaaaatgggcatggtgaggaccttaatctcatgtgcggccattggttggacgtttcatcagctggatatgaagaatgcatttcttcatggtgacctgcaggaagaggtctatatggaaattccacctgggtttgcaaatgaacagacagttgggaaagtgtgtagacttaagaagtcactctggtctgaaatagtcaccacatgcatggtttgatatattcaggcgagcagtatgtgatatgggctattatcaatgcaatggagatcacacggtcttctacaaacatcagggttcttgtatcactattctggttgtttatgttgatgatatagtgatcactggagatgatgtgaaggaaattaggaaactaaaggaaaggctaggtagagcctttgaggtaaaagatcttggaccacttcgatacttccttgggattgagattgctaggtcatctaagggaattattctcttaacggaagtacgtccttgatttgttggcagaaacaggaatgcttgggtgtcgtccatgtggctcaaccattgataagaatcaccaaacttgtgctgagttaggtgaccctatggatcgagaaagatatcagaggatagttggtcgattgatatacctctgtcacacaagaccagacattgcttatgcagtgagtgtggtgagtaggtacatgcatgatcctagagttgggcatatgagggtaatttatcaaatcctgagatacctgaagggaacccctggcaagggtttgtggtttagggcaaaccaacacctgaatctagaagggtattgcgatgctgactaggcaagtagtagggatgatcggagatccacatctggatattgtgtttttgtgggtggtaatctagtttcgtggagaagcaagaagcaagcagtggtatctcggtctactgcagaggcagaacaaagagcaatggatctagccttatgtgaaatgatgtggttgaaaggtcttctaaaggagcttcaggtgtagaagaatgagaccatgttacttcattgtgataatgttgctgcaatcaacatagcaaataatctagttcagtttgaccgcatgaaacatgtggagattgataggttctttatcaaggagaagattgatggtggggctttgaagttgaattatgtcaagtctcgtaatcagttagcagatagtctcacgaaaggtctaggtcctaaggataatgagttggcttgtaacaagatgggaatgttgaatatatttagcccatcttgagggggagtgttggtgtaaatagaacaagtgtaaggggtttcttgtataatggtgaaatataatgtgagcttgggggtgttgtgaggaataactcaccccaaatcaacaacaaatactgaatgttaagatgatgaattgtagcactttacttcattatttggatagc

SEQ ID NO: 9001 - DNA, 1456 bp, Zea mays
  Clone ID: MRT4577_108203C.1
ttatcttccatactaccaaagaaaacgagtcgcgctagcgtataatagcaataaaagaaagaaatcttcagtccagggcagctggcaagatagggcaagcaagaaatcgcagacacaagagtttaacctactctctttttttcttaataatgtcattaaaacgaacgtctgatatagtctcttctttcttttccacaaaagaaaccaccacccaccaccagaatgttgcctttaaaactagcttttcactcaatgaaacttgaacctaactaatcatcatctttttttgttcttttctttttttctttttttgatgccatatagaagctaggaaccaccaaccatggcaggcacattcaaccaaaagaaaaaggaaaatggaaatggaaatggaaatgaaagccttggcagacagggaggggtaaaagattaacccagaagggcaaaaagggaaaaaactgtgggtgagaccaaaaaaaaaagctccggatgggccactactagacgtcacaacagtcaacccggacaggcatcgagccgattgtcaccacaccaactgcgctagttttacggtcagcttccactgccgccctggaaccgatcttgagagaagcaagtttggcagcggccctctgctcctcgcaaccctcttgaactgcgctcgaacagccgctgaccccatttaaccgcttctcaggtgcttcctcctgtgagcactgggcagggacgctgtccgcatgctgctttggattttcgaccttcttccagcgctgctgctgctgcttcccctccacacctgccgccttcaagcctgaagctggcgggtggttagttgcagttttcgctgcctcctcttggccctgattgccgctgcaacgacatccctgaggtccattctctttctcggcctcgctagcctgctcttcggagacgcacggatcctgaggcttgatcaccttggtatcgtggggcttctcggccgcattttgtatcccagatgtcctgtctacaagtacgctcctggattctctctgctcagtgccagactcatcttttgtacgctgtgagacaggtacaaagtctggagcattcgaacttagcttgcaccttctgtgtgccctcttttgcgcctcttctgcctcatagctcataaaatcatcaaaaaggcagtaccgcactttgatgtctttgaagatattgatcacagacattccagggaggtatggtacttcctgtgtatctctgctgtgcgtcacaggcttgttttcgttattctgcagtgtgatatgctgcaaagaaccatttggtatgtctttaacgatgtgccatctcacaggaaagcatccggtccatttatcctgacaccagaagtccatgtccttgtgaaaatcaacaggtccgaccatctcagccatgccacagaagtgcccactaccatggacgctgggtcgaacgg

SEQ ID NO: 9002 - DNA, 359 bp, Zea mays
  Clone ID: MRT4577_108204C.1
accacacttgcgtacctctgtagattatgacggcgctgaacctgtgtgatacgttgacatcccttcagctgatgttcatgtcaatgacactcaaggatatatatgctgttactacaaccataagataaataggtgatagtcccgcacaggagaagttacaactatatgtggaacggagagtgcaggatacaggcatggtgcatgcttcactgctcatctttttaaaccaactcgacttgtacgagttggagatggaaggctgcttgtaacatatacagacgacagcgctatcagatctatagcttttacagacaatagtgctgaagtgacgacactacagttgatcgtgagtcaaccgc

SEQ ID NO: 9003 - DNA, 444 bp, Zea mays
  unsure (1)..(444): unsure at all n locations
  Clone ID: MRT4577_108205C.1
acccactctactactctaagtttctaccattcttctngcttcaacantataatgtagcttgccaattttttcttggcctaacccctcttcnncttcccttcttcttctttcttctgcttcctttctttctctgtctctctctgaccttactcacgacaacttcttttataacatgaaagtaactgttcttatccttttcatccactactttactcttactctttatcctttttccaacatcccttctttttttctcttctcctacacattttcattctttcattctcaccttattttcctttatcttttttttctttattttatttttatcctttatttttatattttattattctactacttttttttttttattctaatttttcttttctttttttttactatttaatttctttatattttttattaaattatttttctatt

SEQ ID NO: 9004 - DNA, 253 bp, Zea mays
  Clone ID: MRT4577_108206C.1
ccaccattggactgcttgctacttgtggaccattgggtatacagaagcacggagtcatgggtgtgaagatgacttccatctacaggctgcgaacaaggcttggagcgatgttctggtcccagcacaatgaactgatagcactcttttgtagctatgtctagcaaggccaagggaaaggtgcaaagtcaacagctgcttaccgagtctgatgacccgtttgatactgaccacgaaaactatgaacgctttgaag

SEQ ID NO: 9005 - DNA, 256 bp, Zea mays
  Clone ID: MRT4577_108207C.1
gcgggtcatggcgccccgagccctcctcctgctgctctcgggaggcctggccctgaccgagacctgggcctgctcccactccatgaggtatttcgacaccgccgtgtcccggcccggccgcggagagccccgcttcatctcagtgggctacgtggacgacacgcagttcgtgcggttcgacagcgacgccgcgagtccgagaggggagccgcgggccccgtgggtggagcaggaggtggcggagtattgggaccgg

SEQ ID NO: 9006 - DNA, 450 bp, Zea mays
  Clone ID: MRT4577_108208C.1
aaaaaaaaaatagccctggatgtttaatttgggcttacattaaatataaaaaaagggggggcatttgggttcaaaatttaaaaaaaaaaaactggggtatttttgtgaggggaaaaaaaaattgtaatttttggaaaaaaaaatgattttgaaatgcattgaatttttatttattccctttgcctaaaaaatccattttaaggggagccatgccgggataaaattattaatatgctggggaggaaacccaatttggagggttggtttttttgaaatttccaggggataaaaaaataatccattgccaaaatttaatggggctttctttggaaaaaaatgcccctcgtaaccaattaataaggtggaaccgggcttccacatttgggcatgcacctggttggtgggctcctccaacttttttttaagggaattatttgtttaaaaaataat

SEQ ID NO: 9007 - DNA, 655 bp, Zea mays
  Clone ID: MRT4577_108209C.1
ccggccggggacctgcatccaaccatctaccagcgactcatggagagagagcagcacacccgcaggtagctaggagcagcagcagcggcggcggtgatggcggcctccatgatctcctcgtcagctctggcggtggtggctcagggcctgccgcccctcggccgccgcgcctcctccttctccgacgactgctccaagaaaaagatcaagaccgacaagacctacgggattgtgggtggcctgaccgtagacgacgacgccaacgagagaaagggaaagggcaagggcgtgcaccaaatcgacgacaagtacggcgcgaacggcgacggatacagtccaatctacaacgaagatgactgggctcccaccggcgacgtctacgtcaggaggaaccactgggacttctgaactggggcggtcacgcctctgctgagcattcctcggtcggcgaacgcccatcctcatgtacaacaccagagccctctccgggtaaggatatccaatgcatgagcttcttgcgattcgtcatgtaaaatcagggtgtctgtctataatctagactccatgtggatgctcaaccttcgacatgtaacaataatcagagctactcttcgttacataacggcagtagtttgtcttaggtgccactatatat

SEQ ID NO: 9008 - DNA, 1022 bp, Zea mays
  Clone ID: MRT4577_10820C.1
ccttcccctatctgcagcagagcagttcctttcttgctctccgctagtccggtaccctcgacctcggcgtcccaccgaagacgacctcacgcggagctgggaatattccttcgcctccgtgctccctttagcaccaactgtcacggccgcttccagcacgcatcattctcgtctcccgtctcgagagattgcagggggcggcgctcgaagctggaggaagcggacgggttcgcgatggggtccgagggatcctcgggtccggtcgtcgttcccagaaactttaggctgctagaagaactagaacgtggtgagaagggcattggtgatggaactgtgagctatgggatggatgatgctgatgacatatatatgcggtcctggacaggaactataattggtcctcccaatactgttcacgagggacgaatctaccaattaaagctgttttgtgatacggattatccagataaaccaccgacagtccgattccagactcggatcaatatgacatgcgtgaaccaagaaactggattggttgaaccaagtctatttcctatgcttggcaagtgggaaagggaacatacaatggaggacattctgagcagcttaaaaagggagatgtcaactcctcagaaccgcaggctgtaccaacctcatgaagaagctggcaaggtggctagatacaggaaccagatgagcatggccgtcagcgatcttctgcattatgcgctgtagttaatattaattagttaactttgaggtaatgaagatcaaagagtagagcagaaagggctgtcccttagatgtgccgtcatgtaataatgtacatttgaattgagcagcgagatgccgagcttgagcgaaccctctcagggcatgtttaggaacaatcccgttcaattgccttgcttccaaacaagccctgtattaaatcctcctgtagctcaccttattcatgccgccatcgcaataaagtgtcgatgaaactgttaaattgactgcaaaaaaaaaaaaaaaaaaaa

SEQ ID NO: 9009 - DNA, 1799 bp, Zea mays
  Clone ID: MRT4577_108210C.1
cattgggtgcctcgcgtccgccgacgccggccgggattagctccgaggccgtctcggtctcggatagacagcgacggagaggagagcggcgggcggagagaagtggaggaagaagacgaggatggccacctatttcacgctcaacaccggggctcgcatcccctcggtagggctcggcacctacaaggccggacccggcgtcgtcgccgacgcgatcaccgccgccgtcaaggccgggtaccggcacatcgactgcgcgccgctatacaagaacgagaaggagatcggcgttgctctgaacaagctctttgatgacggcgtcgtcaagcgagaagaccttttcatcacctcaaagatatgggtgcagcgatctcgcacctgaagacgtgccgttggcgatcgacagcaccctgaatgatctgcagctggattatcttgacctgtacctgatacactggcccttccagataaagagaggcagcgagctcagtccagagaacttcgtccacctcgacatgcccaagacctggcaggcaatggagaggctgtacggctcaggcaaggctcgcgcggtaggcgtcagcaatttctcgaccaggaagctggccgatctgcttgccgtagcccgtgtccctccagccgttgatcaggtggagtgccacccgggctggcagcaggcgaggctcagagcgttctgctgctccagcggggttcatttctctgcgtacgcgccgctaggcaggatgaaagccgtcgccagtgacccggtggtcgcatccgtagccgagagcttggggaaaactccggcacaggttgctctgcgatggggtatccagcagggccagagcgtgcttcccaaaagcgccaatgagtcgaggttgaaggagaacattgacctgtttggttggtccattcctgatgagctgtgcgccaagttttctgaaattgaacaggttaagcagatcagaaatgacgcgtttgtgcacccccagagtatttacaaaacaatcgacgaactctgggatggtgagatctaaaatgaagatcattttcggtacgaaaccaatctgtaaccagggttgaaatttacgccaaaaaagtagggatatatgcttttgtcttccaagggggggaaaaggcacatgtttatcttaagcactactggcaacaggcatgtggtgtgggttgcattttcggcagggctgagtgacgtcagcatattgttgcattgcagcagatccaatgaaggggcccttgagtaaagcatagaacgaacaattttcatctgttgttgtcgtatgctcgtttcatcgatgactttgtatgtagcattaagtgtagttcttaaataaccgagaagtcatatcctggcctagccaaagcttccattaattcaggattcagcacatagccgatcataaagctagctttgagagctctttgttccggaaacgttacgaaacgatgagcaagcatcgacatttgccggcctttagatagcctcaggcggcgtgcatctgcgctcgcagaagctgatgaggatgtccgcacaccggaagacgggtggttcgtcgatgccgccggtgggggcatggttgtgatggtcatcaagctccaaaatcaatatagaaaatggtttaaagtcatttacctttcaatctctccctttttggttgatgtcaacacataaacaaagcaaatatcatattatgaaaattgtaactagtttgcaatttgctcaagtattcataagatactaagtacaaagcagttctaagtaagaaaaaaaaaaaaaaaaa

SEQ ID NO: 9010 - DNA, 176 bp, Zea mays
  Clone ID: MRT4577_108211C.1
cgggggggccatttttttaaataatttggtcttttgaaaaaggccaaatgcacggtataaaagaccaggggcttgttcttacatccttgagtgcccccggggaaaattgaggactggtgaaacccgcgctccaaacaaccattagaggcggttttttttacaggcgggctgcaaaa

SEQ ID NO: 9011 - DNA, 446 bp, Zea mays
  Clone ID: MRT4577_108212C.1
ccatcccaaaggggggggctaaggacattttcgggcccaacctttggccagaaaggggttttggggcaaacaaaatttttggcagcccagccaaacatatgggcggtctaatccggcccccccccaggggaaaaaaattaaaaaaggcccgggccggtaaagccaaagttgggcttttaaagggcgaaacctttttatatttaaaagggggggggcctgggggaaaccccagaaggggggttccgcccaaccaaaaaaatttaaaccctttttaaagctaaaccccccggaagggggggggaaaaaacccccccaggttttggggggccaaccagggcaacccctttggaggtttcccctaattggcccggctgccccgaaggttggaaagggaaaaaaccacccttgggcccttgggggagggggcacccccggttctctcccga

SEQ ID NO: 9012 - DNA, 617 bp, Zea mays
  Clone ID: MRT4577_108213C.1
gccggccgggttacgaattacagtggacaaggttagtggcatctttactccctcctcccgttgccctctctggctctggatgcatctctcctctcggacgcctttttatgcgcgccgatcgtcacacattttggaaagaggagagagaggtagggacagattacagggagctgccctgtcagcccctgtccaagcaaagagaaaccgcgcgggcgagaagaggaaggaatgctcaacgccgagagcggacgctagagatgatcagcatgcacattggccagtacgggattcatgacggccaaggctgctgagagctctactgcctccagcaagacatcgagccgatggagcatgcgcggaacctccccgagcgacagggacgcaccgaacgtcagcatacggctcggcacaatgtgccgagggtcatcgtcgacaacattgacgccactgccataggtgaggcacgcactggatcgcaccgccaccgcatccagcacgagcacctcatctccgaaaggaagatccactagccactatggcagtgtccagtacaatggtgtatacgacattgacgatgtatgactggaccgcgcgcacaatgttgaatacagtgcact

SEQ ID NO: 9013 - DNA, 835 bp, Zea mays
  Clone ID: MRT4577_108214C.1
gaattgtaatgtcctgatttgttgaatataaacggcacataggcaaagtatcagcagctttctccgtttacatccctgcgagcacgcaaatgagctcgacagattcttcttcgtttggtttctgcgccatctggtcggctagcagccggagcacctcccagatctcgaagcgccgcgggtgcgcttggtcgtcggcgacgaacgagcttacctcgccgtccacctctaacgcgctatacgcggggagcttcttgatcccccggccgccgatcagcttccgcacccgacgcgcgtcatccttgcggttggcgtcgaggtagatgagcgcgaaagggaaggagaggtggtccggagcggggagcgccgggggcgtggtgggggagagcatgaggcggaggaggcggagcgcgaggcgcgggtgggccgggcgcgcggcacggcgggacagcgcgtggaggagcgagttgagcgcgagcagggcgaggtccgggtggcgcgggagcaggccggcggtgacgaggagggcttggatggagaggagcggtgcggttggggaggcggcggaggggaggaggcgggaggcgaggagggagtggcagaatgcgaaggtgggtttggggatgtacgggcgcatgcttgcctgcttgctttgatcgcgcgccgctgacgctgggtcgcaggcgcacccattctcatgttgccgaggtgcctgactccttggacggcagactcacggtcgcagggggctgcggctgctcggcagtcggcatcgacggcggagatcggaagctcgcagccgcaaaacgcacggctgatatggcggcagaggagaccg

SEQ ID NO: 9014 - DNA, 155 bp, Zea mays
  Clone ID: MRT4577_108215C.1
gagctcacatcctggcggccgcccttcttttttttttgtggtttttttccccaaaatagcggtccaaccgggcaaacaaaattccctgtcactattgctactttctgaaccacacacttctttttcagtggaatggattaagaacatgcacccta

SEQ ID NO: 9015 - DNA, 1885 bp, Zea mays
  unsure (1)..(1885): unsure at all n locations
  Clone ID: MRT4577_108216C.1
cattgggtacctcgaggccggccgggacacacagttccctcagcccctggcggcagaggctgagccggggaggcgcctccctctcccctccctcgcctcctactctcctgtctttctccaatggcggcgattaccgcgccgccggcccctcatccggcctccacctcatgccgccgccgcgcgccactcatccgcttcgccgcctcctcgtccncggcgtcgcgggcatcgccgtcgagctctggtggggcgtcatcgagcgccaccgccccggggagtacgactgggccggctacctcgagctcgccgccatggcccgacgccacggcctccgcgtgcgcgccatcctcgccttccaccagtgcggcgccggaccacatgacccgccctggattcctttgccacaatgggttcttgaggagatggataaggttccggacctgtcatataccaatagataccagaagagaaacagagaatacatatcactgggatgtgatattcttcctgttctgaaaggaagatcacctatgcaagcttactccgacttcatgagaagcttccgcaatactttcgaagattaccttggggccatagtaacagaagtacaagttggaatgggtccaggaggtgagcttaggtatccgtcatacccaactgagaagctaaatcagccaggcagttcatctgaacttggggaatttcaatgttatgataagtttatgcaagcttcgttgagtgctcgtgcacagatttttgggttacaacagtggggcaatggcggttcaactggcacagatggttcacagcagaaccttgaagaaacgagtttttttcgcaccgatggaggctattggaatacaccttatggtcacttttttcttaagtggtattcaggaatgcttctcctccatggagagaggttatgcatgatagctgatgcaatcttctctggtactggtgtgaccatctcagggaaggttgctggaatacattggcactattatacttgttcacatccatctgaactgacatctggctactacaatactctattaagagatggctatcttcctatagctcaaatgtttgccaaatacaaagctacattgtgctgcagttgtttcgacctgagggacgcagaaagaacaaattctgagagcagtcccgaaggtactctccggcagcttgcaggtgctgctaaaatgtgcaaccttcctcttaatggtgagaattctgcgacaaggctggatgatgcatcactgaatcaagtgataagaagctcaaggctctactcaggctgtacttcaggaacatctttttcctttaactatgttaggatgaacaaaagcttgtttgagtttcacaattggaatcgatttacaaagtttgttaggcagatgtcagatgccaggacctttctagcaagactgtatgtcaggagagggcagcaatacttgtcttcaatgtcagttgtttgggtggttagtcgggcttgtgcatatacatgaaagttgtcaaaagctattgcggataatctcagccataaatggttccaccactgtggatggaaaaggtttgctcagtatatggctcatttttagttgccagaagggcaggcaggcttatatgctgaaggctgtactgatttcatgcatatgcatgtattagtttcatgcatatgtcattgctgaacaaaagtttatagttatttgttgtaaagtggcagactggcagtgttttgctgccaacaatattgaatcgcacgagggtcctgtttagccattttagaaataattagatggagcttcatgttttcccgttacaatatgaatgctttcaaactatatctgcctatgaaaatatgtatacttcctcttgtcac

SEQ ID NO: 9016 - DNA, 769 bp, Zea mays
  Clone ID: MRT4577_108217C.1
ccccatcgaggctagcggagagaaagagacttagcggcgggaatcgctgaccaccgacaccgagcgggagatcgagcacaccaggtcaagaaagatgcgacccaaagacccatcggtgaacagccgctcatcgagtatcagcatcaccgctcgagcttcgagcttcacctgtcgtcgccgtctcaggtaagcgtcctctctgttgtgatcaccgctttgtttgggtgcgtctacggtctgtcctgtgctcggggactctgggtggcgccgggcagtgcaccgtcgtggacggcgggcatgccatggttagcttgcggagagagatgggagtgtgcggttgaagacaagcatgtgtcactaattggcaattggatggcccaatcattttgggtgtatcgcttcatcattcgtagtttgaaacgtcgatctccgattgtgtggctctgattagattaggagtagcgatcggttttgaagcactggtcgagtaatagacggtgtagattagatctgtgttatttaaaaggtgggtcgtcaatcccatagtggacagctaggattatatcgccacatatcccttcgtgatttggatccgagccgcagatctagcgatcaacggctcatgtccatctgcatgtgttagccggataataattcataaagagactctcgactttatcctatttaacccgcggtctcgactagtgctaagagtgttaccactaggacctagaatttacaagtgacccccgacagcaccggaattcga

SEQ ID NO: 9017 - DNA, 181 bp, Zea mays
  Clone ID: MRT4577_108218C.1
agcaaggtgagtctcgtaggccagctgcgccgccaagagatccaccacggcggtgtttctttttcttgtccaatcctccgacgagttacaacagaaataaatggatcagctcaatccttatgcattaataatagattccagtgatagtgtacgtactccacatttgttacttgttagtatt

SEQ ID NO: 9018 - DNA, 2034 bp, Zea mays
  Clone ID: MRT4577_108219C.1
ccggccgggacacacagttccctcagcctctggcggcagaggctgagccggggaggcgcctccctctcccctccctcgcctcctactctcctgtctttctccaatggcggcgattaccgcgccgccggcccctcatccggcctccacctcatgccgccgccgcgcgccactcatccgcttcgccgcctcctcgtccccgtcctcccgcttccgcccatcctcctcctcctccttcccgggcgcagccggcagcagcagcggcggcgggggcgagatcctccacgtctcgccgcttcccccgcccgccgcgcccccgggggcccccgtctacgtcacgctcccagccgacgtcgtcggcccggggggccgcgtcgcgcgccgccgagccatgggggcctcgctcgccgcccttgccgccgccggcgtcgcgggcatcgccgtcgagctctggtggggcgtcatcgagcgccaccgccccggggagtacgactgggccggctacctcgagctcgccgccatggcccgacgccacggcctccgcgtgcgcgccatcctcgccttccaccagtgcggcgccggaccacatgacccgccctggattcctttgccacaatgggttcttgaggagatggataaggttccggacctgtcatataccaatagataccagaagagaaacagagaatacatatcactgggatgtgatattcttcctgttctgaaaggaagatcccctatgcaagcttactccgacttcatgagaagcttccgcaatactttcgaagattaccttggggccatagtaacagaagtacaagttggaatgggtccaggaggtgagcttaggtatccgtcatacccaactgagaagctaaatcagccaggcagttcatctgaacttggggaatttcaatgttatgataagtttatgcaagcttcgttaagtgctcgtgcacagatttttgggttacaacagtggggcaatgatggttcaactggcacagatggttcgcagcagaaccttgaagaaacgagtttttttaggctcgatggaggatattggaatacaccttatggtcactttttccttgagtggtattcaggaatgcttcttctccatggagagaggctatgcatgatagctgatgcaatcttctctggtactggtgtgaccatctcagggaaggttgctggcatacattggcactactatacttgttcacatccatctgaactgacagctggctactacaatacactactaagagatggctatcttcctatagctcaaatgtttgccaaatacaaagctgcattgtgctgcagttgtttcgacctgagggacacagaaagaacagattctgagagcagcccagaaggtactctccggcagcttgcgggtgctgctaaaatgtgcggccttcctcttaatggtgagaattctatgacaaggctggatgatgcatcactgaatcaagtcataagaagctcaaggctatactcaggccgtacttcaggaacatccttttcctttaactatgttaggatgaacaaaagcttgtttgaatttcacaattggaatcgatttacaaagtttgttaggcagatgtcagatgctaggacctttctagcaagactgtatgtcaggagagggcagcaatgcttgtcttcaatgtcggttgtttgggtggttagtcgggcttgtgtatatacatgaaagttgtcgaaagctactggggaaatcatgtgcttgtaatctcagcaatcaatgattcgaccactgtggaagtaaaaggtttgctcagtatatggctcatttttagttgccagaagggcaggcaggcttatgctgaaggctgtactgatatcatgcataggcatgtcattagtttcatgcatatgtcgtagtttgtcagcagcttatagttatttgttggaaagtgccagacgggcagtgttgttgctgccaacaaaattgaatcgcacgagggtcctgtttagcccttttagaaataattagttggagcttctgtt

SEQ ID NO: 9019 - DNA, 274 bp, Zea mays
  Clone ID: MRT4577_10821C.1
tgcttttcctagctacttaggcgagacgagccagccaagcaacatagatatggaagcatggcatgctcgaaatcaagctccttaggactcataccaatgtggtcatggacgactagatgctgcggtcctgattcatagacggcgcgccgaaggagggcgttaagatcgtccactcttagcccgataacctgttaccctctgccctgcgagacttcgactctccgtactcatcgtataaggaaggactctactaggaggagtccaacaggaactg

SEQ ID NO: 9020 - DNA, 262 bp, Zea mays
  Clone ID: MRT4577_108220C.1
aaggcaagggaactttttttaattggcattttataagttttagagcaaacatctttttaaatcaccacgggttaaaaattggagcccatccccggtcccttataggggggggaaaaatgcttccctaaccttttggaaaagttaaaccatagtccataacctaaattattttggccaaaaaaaaacaaaacaccttttttttcaaatttttatccccttcccagaaaaaaaattcattgtgggaaattttcccccccgggaa

SEQ ID NO: 9021 - DNA, 117 bp, Zea mays
  Clone ID: MRT4577_108221C.1
taggggcgaataaaaacttgcttaaaacaggaatagtgaatcctggtgaaaagaatgagtcaagtcccacactagagccgacgcataaggaaggcggggcctatgaggacaataata

SEQ ID NO: 9022 - DNA, 750 bp, Zea mays
  Clone ID: MRT4577_108222C.1
acgtttgtccatttcctcggctcgactcgatttcgatcctccacttgtttcacagatatctgaagggagcaaaagcaggagcagcagagcgagcatgcagagaagggacgatcgagcaagcaagctccgggcagggagagatgaggaagcccaggctgagtgtcggcgctgctggcctcctccatgggtttccctcccccgcgctgctgctcttgctgctgccgctgatgagatggtggagggcggctgcccaggcgcagcagagcgcctcagactgatccggaggaagcggtggaggcgaacgcgatcctgagcaagctggggctgagcgcgtcgacgtcgtggaacatcaccgcgaacccctgcatgggagccgcgacggacgacacgcccatcgacgacaagcctgcgatcaacccggtcatcaagtgcgactgctccgaccagaacaacacgctctgtcatgtcactatactgtgagtccagagctgtcgccgccgccgccgtgctcccttgcgctatctctctctccatgacaggttcaccatattttcccatccgatgctcgctggtgacgcaggaatataaacacgctgtgacgcggttgcgcccatacctgaggagctgcgaaacctcgctcacctcgttaagctgtatgtgctggctgactatagctcgtctctaaagtctgtactctattttcttcaattatgtactatagtctatagtcccttcgataactgcttgctg

SEQ ID NO: 9023 - DNA, 221 bp, Zea mays
  Clone ID: MRT4577_108223C.1
cgggaagcagccaggcaccaatcaacggacggccagccggcagccgtcgtagcgggagccgggagtatagtaaaggacaaatcagacgaggaggagcgtggagcggggacagcctgcgctgcgctgccttgctccggccggccggccccccaccttagcccttgtcccggctccctcctccaccattcaaatctcctggcttcgtttcacttccatttata

SEQ ID NO: 9024 - DNA, 590 bp, Zea mays
  Clone ID: MRT4577_108224C.1
ctcggacgcgcaggagagctgcgcatcattatattaagagaggaaaaggtccaaagaggaccaaagtacaatgaccagtgggcaagcataaaactagaccaaattgaaaaacagcctagaccctactaatagcagcaactaggccaagacttggtagctgtttagcaccagccatatcccagcaactcagctcatctaaaaacaaacttttaacagagctcaaaggaagggtttactccatcaaaaatagccttgtttcgaagaagccataagcaccacgcccccaaaattatgaggctattgaagccttttcttttggtcttgtgcacctttttatgcacctttcgccaccactcagcaaaagatatccttatctcaatggcaaaaggatatcatgccaaaactgcctggcaaaaattttgggggagcccaagtcttccacaatcgtttccatggctcaaaggaaatggatcccatgaaaatgccttatagcaagattttgaagagaactgccagaagaagtgtgcatccatacatacttatcagtatcttgagaaagcaaaacccctctcaaagtatcccataacaac

SEQ ID NO: 9025 - DNA, 256 bp, Zea mays
  Clone ID: MRT4577_108225C.1
atcggaaaacacggaatttccccatcaggcccatttcatctggggttaaactatacatacaggcgcaggtgacacaacccaaggggtgccttttatttacacccccctgggtttggttggggggtgggattccggaaggccgctagctaggttttccaggtctccggggtcttacacggagaaggaaaccatttggttcacatacccacatagcgggggggaccaaaatgggtgggtcaggggcttcagggggggg

SEQ ID NO: 9026 - DNA, 930 bp, Zea mays
  unsure (1)..(930): unsure at all n locations
  Clone ID: MRT4577_108226C.1
gtgccggaactcccgggcttttcttccagaactgtggcacatgctctagataactggcggtgggggagcgacattgaaaaccctctttctttaaaagggataaaacaatantttgttgttattgggatacctttgagaggggttttgctttctcaagatactgataagtatgtatggatgcacacttcttctggcagttctcttcaaaatcttggtggggggcattttcatgggatccatttcctttgagccatggaaacgattgtggaagacttgggctcccccaaaatgtaagttctttttgtggttggcaataaggaactagtgttggactgctgatagacttagaaggagggttgcagcacccactggtctatactttgtgaccaagaacaagaaacaatccaacatcttctatgcacttgcagttttgccaggcagttttggcatgatatccttttgccattgagataaggatatcttttgctgagtggtggcgaaaggtgcataaaaaggtgcacaagaccaaaagaaaaggcttcaatagcctcataattttgggggcgtggtgcttatggcttcttcgaaacaaggctatttttgatggagtaaacccttcctttgagctctgttaaaagtttgtttttagatgagctgagttgctgggatatggctggtgctaaacagctaccaagtcttggcctagttgctgctattagtagggtctaggctgtttttcaatttggtctagttttatgcttgcccactggtcattgtactttggtcctctttggacctttttcctctcttaatataatgatgcgcagctctcctgcgcgtccgagaaaaaaaagataaagcacaccctagaggattgtcttcattgttagtcaaaacttcaaccaaggtggcaaatttcctgaccccaaa

SEQ ID NO: 9027 - DNA, 287 bp, Zea mays
  Clone ID: MRT4577_108227C.1
gatcgtgaagaaggttttgaagatccaaaaaaccaaggataaggcctccaagaactaggcgatataggcatcttccacaatgtttaagtcccttagaatttgtttcagcacaaaatttaaaccatatcatctcgcatatcttgtgggtttggggattccccaaacccacgagaaaatttcttgctgaaacaaattctaagggactgcgagatgcctatatggtttaaattttgaacggaagttgcggatccttttattttttaaaatctcggtgcaatgtttatccc

SEQ ID NO: 9028 - DNA, 159 bp, Zea mays
  Clone ID: MRT4577_108228C.1
aaaattcattattatctccaaaacaattgtccaaccccccaaagataaattgtcattgttgtgatggcatggggtttctgctagtctttacaacccactcgcttgttttcccaggtgctggagaagatcaacaacccacactatttataccgcatgacg

SEQ ID NO: 9029 - DNA, 1567 bp, Zea mays
  Clone ID: MRT4577_108229C.1
gcacgactctcggcaacggatatctcggctctcgcatcgatgaagaacgtagcagaatggaagaacgggtgggggagggcgagagcccgggagaaacagcggcgcggcggcaaattgggccggcaggctcccgtaccgggaagcgccacacgcgacgccacacgaacgcccgtggggccagggcgctcgagaccggaggtggaaggcctgggaccaaggcgagcacgcggcgcacgcagcggccggcggcaccgtgccgccccggcccttctccgccgccacgctagagaggaagagcgcgcggagagcgagagcccgggagaaacagcggccggcggcaaaatggtgcagcggctcacctaccggaagcgccacagctacgccacaaaatccaatcagacccgcgtggtcaagacccctggtgggaggcttgtgtaccagtacaccaagaagcgcgcgagcggaccgaaatgcccggtcaccgggaagaagatccaaggaattccacacctgagacctgctgagtacaagaggtccaggttggcaaggaaccgcaggactgtgaaccgtccatatggtggtgttctgtctggtaccgcagtgagagagaggatcatccgtgcctttttggtcgaggagcagaagatcgtgaagaaggttttgaagatccaaaaaaccaaggataaggcctccaagaactaggcgatataggcatcttccacaatgtttaagtcccttagaatttgtttcagcaagaaattttctcgtgggtttggggaatcctgatacttacacaagatatgcgagatgatatggtttaaattttgaacgaaaaaaaaaaaaaaaaaaagcggcgaaaagagaagagaaaaaagaacggtccgtgctcggctgccgtgaatctctctcacctccccgaagcaagcgagcggggcagcgcgctaggaaggatcggaggagacgccatcaatcagcacttgcacgcgcgcggtcggccgcaggtggaggaaggagatgggcctgtgctcgtgctgctgccggtgcctggagctgctgtgctcggtcctcctcccgcccctcggcgtctgcctccgccacggctgctgctccatggagttctggatcagtgtgctgctcaccatcctcggctacctccccggcgtcctctacgccgtctacgtcatctgctccgtcgacccccaccgccaccgcgacaacgacgactacgtctacgtcgcatgacaagatggaccggtccccgtggtgctctggtccgtgtctctgctgctagcctgctacctccgtccgctgtgctgtgtgcatctttttgtttggtttagtaaactaaatccatcttgtggccttctgtaaactgtaaattcgtatgtcgaatctgacaatctggacggattcattccataaactaagatctggtgttgcgggatctgtggagttagttagggttactttgctacctcgttcagttgtgcttgtgaaatgaaactgcagatggttattaaatcccctgcattttccctcgaaaaaaaaaaaaaaaaaaggggcggcc

SEQ ID NO: 9030 - DNA, 175 bp, Zea mays
  unsure (1)..(175): unsure at all n locations
  Clone ID: MRT4577_10822C.1
gcagacggnnncgaggaagtgccaccccggcgnngcaaggcgccccgaggaagcagctttggcgacttataggcgnngcccgcaaggtctgtcccccttccgacccggcggagatgagagaagaccccacacgcgttttctgccccgtgcactcgtgcgcgcgtccggggggggg

SEQ ID NO: 9031 - DNA, 523 bp, Zea mays
  Clone ID: MRT4577_108230C.1
cggtgacaacgtctgtagttgtccaatccccaggtttgtaacaattatttggtaatctttgtgacggttaggcttctctagtcttattgaatattcagtgcactcctggtattgtacaacagatgttgtttttatcatgtgtaagaagatcatttcagtttctttatgatttgttggaatggaaacacacaagttagtgctgaattttatccatacgagacaatgtctcaatccagtgctaggttcattttgatcacgtatggcagatatgggtagaccgtagacattgtatagaattgtatatatatatttttttgttgcggcacaccctatataaaaaacctaggtccgccactgtttgcagcaaatctttttctttggagcctgctgttggtcttgtttcaggctattctgcctgttttatctagtatttcaggttggtatgtaagggtgtctgtgggtgttgtgtactctgtctactcttcttaatgaaatgacacacagatctcctgcgttgttcgag

SEQ ID NO: 9032 - DNA, 312 bp, Zea mays
  Clone ID: MRT4577_108231C.1
cgcgcttttgtcgccgatggacttcgcgccggagaagagcgcgctcgaggacgaagagatccgggtctacaaggagaccatggagatgctcgctgacctcggcatggacaacctgtccgggggtgagcgccaggctgaggggtgcaacgtgcccgcctactgccgctagtagtacggaggccgctggcgggaccgagtgtagactcggaggtgcatgaccattggtcgcactgatatgcgccagcgctgacctactatgctgaagtaatctctgatgtctagttgcaacagtggcggccatgcaacgaactg

SEQ ID NO: 9033 - DNA, 142 bp, Zea mays
  Clone ID: MRT4577_108232C.1
aaatttttccctgataatggatcaagcgcttattgggggggctcacattgtgcagccaacccaggggaaagggaacagaaacatggctgaggtgctcgcttggactttctatggagttagccctggcagataaccgctttag

SEQ ID NO: 9034 - DNA, 475 bp, Zea mays
  unsure (1)..(475): unsure at all n locations
  Clone ID: MRT4577_108233C.1
gcccgggggtttttttttttttttttttttttttgggggtttttttttttttttttttttttttttttttaaaccccaaagccggggatagaattaggagccaaggggggggggccctggccatggttaacacgggggattccttccttcacgggggaggagggggggacaaaatcaaagggaagggaaaaacatttggatgggcacaggaccacaaaattttaaaaaggggttaaaaaaaaaaaaagctacgggtaccctcaaaatacccttttttggacaaaaccatgttagcttccaaaaggaatattttttagcatggacaaaaacagccaaaaacccctggggttaagggggtcggaaaaatgcccatttaccagttttaaaccaaaggcgccctagggaagcccagccctgggcatacaagggtgaaaaagggcgggaaccctaaaaacatggcccctgtcttntttaa

SEQ ID NO: 9035 - DNA, 195 bp, Zea mays
  unsure (1)..(195): unsure at all n locations
  Clone ID: MRT4577_108234C.1
gttcctgatgattatattaaggctgaccctgttctctttttacagtctactgccactgaagaaagccanagtatggctttaaatggaggagagtagcgttctataccatcttcacgcggatctccttacaagaagaataagtcgcttagagattattagctagatcgtgctaagtgtgcttggaagttctataca

SEQ ID NO: 9036 - DNA, 752 bp, Zea mays
  Clone ID: MRT4577_108235C.1
cattgggaccctcgaggccggccggggcgcgtacttgagatgcttcaacaacaacgtggttatgaatgtggaagcccgcatagtggagttcaagtggctgggcctccagtacaccggcgacagcgtgggtaagaagggcaacgcctacttccattgccgccccgacatcccgctgtattctgtctggaggtgatcagtgtggccaccgttgaggactcacaggacatctgcgacctcgtctactcactctatcatctccataggatgtgcacaatgaggagctgttctagctccaaggtcgtgttgctggtgggctccgaccccatcatccagacactgatcttcatggacccctatgaagagatttgcgacttgaacgtcgtctgtgcgaacgcctctatggactatctcttccgactcagcagcattgacgggaaattcaccgcggagagtcataacgtgaagatcgagacgacaaccttctctcccgcggtggatgtcaagctagaacccgggcagatcctggacgaactgctcccgctctacctcttgcttcagatcgttcgagacctgcgtgatgaacatatcatgctagctcgatcttcggatgaatgtcgtgagcaaggtgcccgacaacggcatcgagatcgcaaagaacctgtccaatatctacgatctactcgtgcaatgcacatcacctcaagagatactggagatctacgccatggtcttacgcctcgctgtgtgatact

SEQ ID NO: 9037 - DNA, 350 bp, Zea mays
  Clone ID: MRT4577_108236C.1
gagctcactagttggtggccgccctttttttttttttttttggtggcgatcacatagaattgcttcgggaaaaacaggcgaaaacatggcaaccataaaaagggggactgaaacacaggctaagatgcaccatacataacggagagccagtgcgtggaacaaggccaacctgcaaagggccgaaattttttacgccccacttcccaggaatagattggtccgaatgggacctatattaccttcactgtgctttgggcaaaaacagcgacgggggtaaaaatggcctggcacttatgcatgcagggaccgcacattttttttttagccgaatttggagcaaacctgaaggg

SEQ ID NO: 9038 - DNA, 778 bp, Zea mays
  Clone ID: MRT4577_108237C.1
gcttccattcctcgaccctgttcacgcgacgcggtcgcaacgcgagctgtgcgcttcacttatggccatggcgacggcgtacgacgcttgcagcatcgggagcctcggcaagggcggcgcgttcgcggctgtggcggacgtggcgctggacagggcgcggatcagccgcgcgcagaacggggtgcggatcaagacgtggcagggcggggccgggtacgtccgcggcgtgcgcttcgccgacgtggccgtggacggcgtcgaccaccccatcgtcatcgaccagttctactgcgacgtgacccgccggcagagggacggcggcggaggcggcgcctgcgccaaccagacctccgccgtggccgtgtccgacgtgtcctaccgcaacatcagcggcacgtcgcgccgcgccgaggccatccggttcgcctgcagcgacgccgtgccgtgcaccggcatcgttctcagcaacatcaacctgcgccgcgccgacgatgacggcgaggtgcagacggtgtgcaactgcgccgtcggcctcgactacggccgcgtccagcccgccgccgactgcctccgtagcagcacctgcggcggcacgcctgatggccaccaccaccacgacgacgacgacgaggagcaggggaaggacgacgccgtcctgcacaccgagctctgataaaagcaagcagctgcacccctgcaagtgaaaccaatggccgccgcgctcgttcgtccgcatttaggagattgattggtctaaaatctcttattatatattttt

SEQ ID NO: 9039 - DNA, 652 bp, Zea mays
  Clone ID: MRT4577_108238C.1
ctggccgggatcagctgctggtatccctcaaaagacctagtatagcttccatacggtcaaagtttatactgtataatcatagtctgcgcatttcctgaataatcttttacgtacaatcaacatggcaccatcaaccaccaaggcatggaccgtccaaggaaaggacggcttcgagtctcttaagtttaacgagcaggccaaggtacctgagattggcgacaaagatgtcctcgtcaagatccatgccgcatctctcaactatcgtgacctcattatccccaagggcaaataccccttccccatgaaggacaacattgtccccggctcagacggtgctggtaccgtagaagctgttggcaagcacgttacccgtttccagcctggagacaaggtcgtcactctcttcaaccagggccacatcgccggctctcttgacgcacaatccctcggtactggtctcggtggcgccgtagacggtactctacgtgagtacggcatcttcgacgaggcaggcctcgtcaaggccccctccaacctcaacatgctcgaagcctcgaccctatcctgcgcagctctcacagcctggaacgccctctatggcctggagtcgcgcgcccctcagcccggcgacacagtcctcacccagggtacc

SEQ ID NO: 9040 - DNA, 436 bp, Zea mays
  Clone ID: MRT4577_108239C.1
tccggaatttccgggtcgacccacgcgttcgataatccttagctggaacgcgacacgcgagggcgcaacgtacatggcggagacaccggcggaccctaagacccaggccgaccagaaggacctgcatcaggacgaggaccagaacgaagagctggagaacgaccccaaccgggatgagaaggcacagggcagtgaagctgggcaacagggggaggatgatggggatgactacaaggtgaacaaggataccgcgcagaaggtgaagaaagaacaggagggaaacaacgcccagaagagctgcagtactaacattccagaagacaaacgaagcgccaatgccacgtgcttaaggaagaatggaacctacagggaagaaaggaaccatgccagtgaatcctaggtatgaacaggggggaaagttgaaggacatcaaggg

SEQ ID NO: 9041 - DNA, 1614 bp, Zea mays
  Clone ID: MRT4577_10823C.1
atggcggtggcaggcgggcgggcgcagcagtcacgtcgtcagccaggctcacgtctcatcctggggcagcaagagagcctcctcccacggcgtgaagacggagcatttaacgcaaagagtgagtcagacagacagtcaggccttgccaaaggcgccacggcgaactccgctccgcccgaccccagggctcggactcgggctaagacccggaagacggcgaactccgctccgcccgaccccagggctcggcctcgggctaagacccggaagacggtgaactccgctccgcccgaccccagggctcggactcgggctaagacccggaagacggcgaactccgctccgcccgaccccagggctcggactcgggctaagacccggaagacggcgaactccgctccgcccgaccccagggctcgaactcgggctaagacccggaagacgacgaaactccgcctcgcccgaccccagggctcggactccgccctggcctcggccaaacgacctccgcctcgcccgaccccatggctcggactcggcctcggcaacaaaagacagacccaacatcggcttcggaggagcccccacgtcaccccgcctagggcacagacccgccacgtcaacaggaagcatcatcatcgtcctaccccgaatcgactcgggtcacggagaacaagaccggtgtcccatccggccagctccgccggatgggcaatgatggcgctccacaagctctgtgacgacggcggcccccagctctcttatggaagcagggcgacgtcagcaaggactcgaccgctccaacagctgtccctccgccaggctccgtcgcacctccgacagccacgacatcacgccagcaagcactctgctacaccccccattgtacacctggatcctctccttacgactataaaagggaggaccagggccttcttagagaaggttggtcgcgcgggaccgaggacgggacaggcgctctcttggggccgctcgcttccctcacccgcgtggacgcttgtaacccccctactgcaagcgcacccgacctgggcgcgggacgaacacgaaggccgcgggacttccacctctctcacgctcgactccggccacctcgcctctccccccttcgcgctcgcccacgcgctcgacccatctgggctggggcacgcagcacactcactcgtcggctttgggacccccctgtctcgaaacgccgacaatattgtaaccgcgactgttttcgagcttcagccttttgttttaaccaaagctgagatggccgaagacaagaggagtgaggaccccgcacaggctaggttttacaaagctatggaaaggaccaatgttgagaaaataaccgatgagattttagctgggttgtctgaagattctggagacagcgaagatattgatgttgacagcgataatgataatgacaagcagctaggcgcagagacgagtgagcacgacgtggacaccaacgggcacgcagatgacagcattgagcgaggcaccagtaagtggcatagcagcaagcggcggggacaacggcgagcagcaacgaagggagcaaagcttcggcgacaggacatgcagctcgacaccgactga

SEQ ID NO: 9042 - DNA, 429 bp, Zea mays
  unsure (1)..(429): unsure at all n locations
  Clone ID: MRT4577_108240C.1
ctgtgtgtttttttttttttttttttttttttttttttttttttttttttttttttttttttttttggggctcaacaaaaagccaaattccgggggggggggcaagtataaaccaggttccaaggtccagcgcgcctttcagctactgcggaaacctatgggagcaaaaccctataaactccacaacttaagagaacccttgggcaacaggagccccatggggaggcccaaagcttataacggccctttctctctctctttctcttttctcaaccctacagggttatttattcttcaataaaacccattgggcccggcgttcctttttgcccccccttagtaatccacccccctaaacattttaaaaccaggacccaaccttaactccngccccctgggggggatgtcccccatcttcctcacaaatgg

SEQ ID NO: 9043 - DNA, 513 bp, Zea mays
  unsure (1)..(513): unsure at all n locations
  Clone ID: MRT4577_108241C.1
ccggccggggtagcaaggacttgggagccagcgacggcgatgcgtgccgcgagccctccgctgccgtccctgcaccaccatgacccggaccacctgctccgcctagtggacgatctctgcgcgtcgggccgctccgcggaggcgcaccggcgcgcgtccctgctcctcctctccccggcgagccatctccacgcgcgtgccgccgatgcgctcctgatccgcctcctgcgcgcccgcacgccgctcctcacgctccgcctcctccaggcgctccccgccgccgcgccctccctccccaaccgcaaccgcctgctcgcgcacctctgccgcgcggggcacgtgctcctggcgcaccgcttcctcctccgcatgggcgcggntccggacgccttgncctacgccgcgctcctcgacgggtacgcgcgggtgcccgacgctcgcgccgngcagaggctgctcgacgaaatgcccgcccgcggggtgccgaccacctccctggtgcgcacgtagctt

SEQ ID NO: 9044 - DNA, 565 bp, Zea mays
  Clone ID: MRT4577_108242C.1
cttttccaacccctccccgctctcgcactcgtctccatgtcgcccgccgccgccgccgccagagtcacatccttcgctgccaacttcaccacctccactgccccctcctcgggcggtcggctcctccgtccgttccgtgggaatccgcgcccccgccgcgccgtcgcctcgatggccgtgtccgctcccaagtcgccagccgccgcctcgttcctcgagcgccgcgagtccgagcgcgcgctccacttcgtcaagtaccagggcctcggcaacgacttcataatggtcgacaacagggattcggctgtgccgaaggtgacaccggaggaggcggcgaagctgtgcgaccgaaactttggtattggtgctgatggcgtcatctttgtcatgccgggggtcaacggtgcggactacactatgaggatattcaactctgatggcagcgagccggagatgtgtggcaatggagttcgttgctttgctcgctttatagcggaggttgaaaatctacagggaacacatagcttcaaaatccatactggcgctggattaattattcctgaaa

SEQ ID NO: 9045 - DNA, 260 bp, Zea mays
  Clone ID: MRT4577_108243C.1
ctcttgtgtgtgtcctttttttctttttatttttttttttccacccgtgaccaagcccaaatggtttttttcgggtccaaaatgccttcgggctgttaattaatctaagaaatttctccctaacaggcatgtccattgtgtcgggcatataattttttcaaaataatacttgctttatacccttggtggggctcttataatcctggccccctcccaaatataggcttctcctaattcttcccctaccgatattctccccc

SEQ ID NO: 9046 - DNA, 3918 bp, Zea mays
  Clone ID: MRT4577_108244C.1
atggttggagcagcgaagtggccagacctcggcgtgaagcggctccgcggcggagatgactcggcggcgagcaattcgacggtgtcgcaccacggcaaggagcaacaatgtcgagggtggcccggttatatgggagagcaggtcgtgcgggcacagctgaagaagcggtcgcgatcccagcgcggatttcagagtcacagttgtgccggcacgttcagtttgttagtgtcatccacggagcgagatccgcgcgaggatggccacgtgatggagaaacagctgacgatcgggggtccacaccctcaacctcggaagacggtctccgcctcgcccgaccccagggcacggactcagcctcgactccggaagatggtctccgcctcgcccgaccccagggatcggactccgcctcgactccggaagacagtctccgcctcgcccgaccccagggctcggactcagcctcgactccggaagacggtctccgcctcgcccaaccctagggctcggactcagcctcgacctcggaggagtcaccgcctcgcccgaccttgggctcagaccgaccacgtcacacggggggccttcattaccctacccctagctacctcaggctacggggaacaagaccggcgtcccatctggctcgccccggtgatgatggagaggatatcctggatgtataacttatcaaggctagatccatcatacatatctgaggtccataagtttattgttgtcgctacgaaccatgcttggagaacaaagacaaagcacatatattgtccatgcatggactgcaaaaatgctgttgtatttgatgacacagaacaaatcatatctcatctggtatgccgaggatttgtgaaggattacataatttggacaaagcatggagagggtagctctttgccttatacagctggaaaccctgcgaacatcgacgacaactttcagttcgttcacgagacacaacaacctcttccacagagcgaacatgtagtgccaaatgttactgatcttggttacgccggaggaaatgaacatgaaagaacccatgttctgccaaatgttatggatgaggaagatgcagagttgttagaggcaatgttgcgtcgtcatacagatccatcgatgttcttcatgaaaggtttggagtccctaaagaaggcagcagaagagcctttgtacgacgagtctaagggctgtaccaaagagttcacgacgctccagtctgtgttaaagctgttgatgttaaaagctagatatggtctgtctgatgctggcttcgatgcgttcttgagtattgtcgcagacatgcttccaaaggagaacaaagtgcctgctaacacgtactatgcaaagaaactaatcagtccactcactatgggcgtggagaagatccacgcgtgtagaaatcattgtatcctttatcgaggtgatgattataaagacttggagagctgcccaaagtgtggtgcaagtaggtacaagacgaataaagactatcgagaggaagagtgtgttacatctgtgtctaaagggacgaagctaaagaaagccaaaaagaaggcttcaaaatccacgagcaaagaaaaagaagaagtagactattatgcgctcaaaaagattcctgctttggtgatgtgcatgcttctgatgagcacaaaaacgatgggaagcttcgacatccagccgatgggaagcagtggcaagatttcaatgagaaccaccgagactttgccgatgaaccaagaaatgttagcccttaatggaggatatgaaaatattgtgggtaacggtgttcaaatgttggatgagtatcgtaaagattcattcatgctgagagcaattatttttgttacgatcaacgattaccctgcactcttcacattatcaggccagtttaagggaaaggttggctgcacagtatgcaatgatgaaactgcttacgtgtcccttactgcatctaagaagatagtgtacatgaggcacaaacgctttttattggaaggacacaggtaccgcatgcgaaagatggataagtactttgacaataatggtgaactacattctactgctccatcgggtaacaataaaggtcatagagtttttgaaatagttaggaatatcaagtttgttttcgagaagaagacaaaagacggaaaaacaaggaaggatgccaaaccagctccgggggctatattcaagaaaaagtctattttcttcgagtacttgccttaccggaaagagttagatgtgcggcatgcgatcgatggtatgcacgttcagaagaacgtgtttgaaagcataattggcaccttgctagacataaagggcaaaacaaaagaagggctcaattcatgcatggacttggtaaatttaggcataaaaaaggaactacatcctgttcttcaagaaaatgggaagtatcatctcccagcagcaagctacaatctcaatgtagatgagaaacatgcgatgtgtgtttggcttaagaatttgaaagtcccatccggattctgctctagcatacgaagtattgtgtcaatgaaagacctgatagtcaccaactacaactcacatgattgtcatgtcatgctgactacattcctacctattgccatcagggctataaatcctttgtttttaaagatggcaatcacacggttgtgctactttttcaacaaaatttcacaaaaggaattcgcagtggagacaatatcacagtttgagatgtgcttccctccatcgttctttgatattatggtgcaccttgtggtgcacttggtgccacaaatagaggcattgggtcctatgtacttgcatgaaatgtggatgtacgagcgtttcatgtcaatactgaatggctatgtatcaacctgtgctcatcccgaggcatccatgatagaggggtattgtaccgaagaggccattgagtctggaggtccattctgcaatagtatcctaaaagaccaggttgcaatagtacttgaggcacatcacagcatcctacatcagctagcgataatagagccatttatccaacaacacatcaatgagcttcacgagcaaaatcctgggcatacggctgattgggtaatgaagcaacataagcagcggttcaacacatggctaatggtgaaggacattccacgtggagaaacaatagaagaaaaaaccatcaaggggttggcatctggaccatcacgccagatcacaacatggcaaacctatgacattagtggattcacattttgtaccaagtccaaggacaaaaagagcatgtcacaaaacagtggtgttcgatgcgaggccatagatgatgaaactggtgagattattacatattttggctttattgaggacatatgggaactagactatggtacatttcagatctcggttttccgatgtcaatgggttgaagacaaacatgtcacggtagaaaactatggggtcagagttcttgatctaagtaaggtaggttacaaagatgacccatggatccttgctaatcgtgctgcacaggtcttctatgctgaacagatcatttctaacaatgagaagaaaagcatcgacaaaccgaagcatgtagtttttcctagaaaacaacaagctataggagttgatggtgtatctgatttagaggattttaaccagttcaacgacatgtctcttttcatagaccatccaaccaagataaggaacattgagcgaagcatcccacgcaattcgatgccctgggtccagcacttaccgtccgtgcggatgcagcactttgcacatccagaatgcccgttcttcagcgcgtccttctccacggatagtgtcacaatcgcctcttcctcatcctccaaccctgcctcttcctcatcctccaccaccaccttggctttctttggagtggcgccgtga

SEQ ID NO: 9047 - DNA, 266 bp, Zea mays
  Clone ID: MRT4577_108245C.1
actaggaacattctgtcgggcattggttttttttttaatttacaatttacttacaaaggaaaacaaagggtataaaaagttaaaggggggagaaattaggttttttcaaaaaaagccctaaaagggccaagaaccacataacaccttgggaggagcttgcctggcaagaaaaactttccaagggggctttatcacggttaaaacccaggaagaccccacttgaaagggtacacatctggcgggggttacaggcggggtttaaacca

SEQ ID NO: 9048 - DNA, 618 bp, Zea mays
  unsure (1)..(618): unsure at all n locations
  Clone ID: MRT4577_108246C.1
cgggttagggcccggaagtttgaggcaaagcggggaatccgctgcagggcgcggcggtgtccctggacgcggtccggaccaacttcccgctgggcgcggccgtgagccggtacatcctcaccaactcggcgtaccagacgtggttcgcgtcccggttcgcggtggccaccttcgagaacgagatgaagtggtacagcacggagcctgcgccgggccaagaggactacacggtcccggacgccatgatggcgttcgccaagtccaacggcatcgccgtgcgcggccacaacgtgttctgggaccagcccagccagcagccccggtgggtgcagtcgctgccgtacccgcagctgctggcggcggcgtcgcgccgcatccgctccgtcgtgtcgcgctacgccggccaggtcatcggctgggacgtggtcaacgagaacctgcacttcaacttctacgagggccgcttcggctgggacgcgtncaccgccttctacgccgccgcgcgcctgctggacgccggctccgcgctcatgttcatgaacgagttcaacaccgtggagcagccgggcgacatggccgcgctgccggcgaggtacatgcagcgcctgcagcagatca

SEQ ID NO: 9049 - DNA, 2433 bp, Zea mays
  Clone ID: MRT4577_108247C.1
atggagaggatatcctggatgtataacttatcaaggctagatccatcatacatatctgaggtccataagtttattgttgtcgctaagaaccatgcttggagaacaaagacaaagcacatatattgtccatgcatggactgcaaaaatgctgttgtatttgatgacacagaacaaatcatatctcatctggtatgccgaggatttgtgaaggattacataatttggacaaagcatggagagggtagctcttcgccttatacagctggaaaccctgcgaacatcgacgatagctttcagttcgttcacgagacacaacaacctcttccacagagcgaacatgtagtgccaaatgttactgatcatggttatgccggaggaaatgaacgtgaaagaacccatgttctgccaaatgttatggacgaggaagatgcagagttgttagaggcaatattgtgtcgtcatacagatccatcgatgttcttcatgaaaggtatggagtccctgaagaaggcagcagaagagcctttgtacgacgagtctaagggctgtaccaaagagttcacgacgctccggtctgtgttaaagttgttgatgttaaaagctagatatggtctgtctgatgctggcttcgatgcgttcttgagtattgtcgcagacatgcttccaaaggagagcaaagtgcctgctaacacgtactatgcaaagaaactaatcagtccactcactatgggcgtggagaagatccacgcgtgtagaaatcattgtatccttcatcgaggtgatgattataaagacttggagagctgcccaaagtgtggtgcaagtaggtacaagacgaataaagactatcgagaggaagagtgtgttgcatctgtgtataaagggaagaagcgaaagaaagccaaaaagaagacttcaaaatccacgagcaaagaaaaagaagaagtagactattatgcgctcaaaaagattcctgctttggtgatgtggtacctccccatcgtcgatcgattgaggagcagcaagcatagcacatggccagtgatcctcaccatatacaaccttccttcatggttgatgcagaaacggaagtacattttgctaaccatgcttatttttggacctacacaacctggagttgatatggatgtatttttagagcccttaatggaggatatgaaaatattgtgggtaacgggtgttcaaatgttggatgagtatcgtaaagattcattcacgctgagagcaattattttggttatgatcaacgattaccctgcactcttcacattatcaggccagtttaagggaaaggttggctgcacagtatgcattgatgaaactgcttacgtgtcccttactgcatctaagaagatagtgtacatgaggcacagacgctttttattggaaggacacaggtaccgcatgcgaaagatggataagtactttgacaataatggtgaactacattctactcctccatcgggtaacaataaaggtcatagagtttttgaaatagtcaggaatatcaagtttgttttcgggaagaagacaaaagacggaaaaacaaggaaggatgtcaaaccagctccgggggctatattcaagaaaaagtctattttcttcgagtacttgccttactggaaagagttagatgtgcggcatgcgattgatggtatgcacgttcagaagaacgtgtttgaaagcataattggcaccttgctagacataaagggcaaaacaaaagaagggctcaattcacgcatggacttggctataaatcctttgtttttaaagatggcaatcacacggttgtgctactttttcaacagaatttcacaaaaggaattcgcagtggagacaatagcacagtttgagatgtgtttccctccatcgttctttgatattatggtgcaccttgtggtgcacttggtgccacaaattgaggcattgggtcctatgtacttgcatgaaatgtggacgtacgagcgtttcatgtcaatactaaatggctatgtatcaacccgtgctcgtcccgaggcatccatgatagaggggtattgtaccgaagatgccattgagtccggaggtccattctgcaatagtatcctaaaagaccaggttgcaataggtctgcctccgtcacgacacgagggtagattgtatggaagcgggaggatgggacggaaatctttcatcccaccagattacaatacattacttgaggcacatcacagcatcctacatcagctagcgataatagagccatttatccaacaacacatcaatgagcttcacgagcaaaatcctgggcatacggctgattgggtaatgaagcaacataagcagcggttcaacacatggctaatggtgaaggacattccacgtggagaaacaatagaagaaaaaaccatcaagaggttggcatcttga

SEQ ID NO: 9050 - DNA, 199 bp, Zea mays
  Clone ID: MRT4577_108248C.1
cccacacatcccaacacgcctctctatagtattaaatcttacgcacacgttctagcggaggcatacttacataatcgtgcatgctacattatatctactctatagtgtcatacaaattcaatacattgaacaccctttcacatacccaagtaaatggaaaaccataacattacccattttactaatcttgcaatacata

SEQ ID NO: 9051 - DNA, 2031 bp, Zea mays
  Clone ID: MRT4577_108249C.1
atggagaggacatcctggatgtataacttatcaaggctagatccatcatacatatccgaggtccataggtttattgatgtcgctacgaaccatgcttggagaacaaagacaaaacacatatattgtccatgcatggactgcaaaaatgctgttgtatttaatgacacagaacaaatcatatctcatctggtatgccgaggatttatgaaggattacacaatttggacaaagcatggagagggtagctcttcgccttatacgactggaaaccctgagaacatcgacgacagatttcagttcgttcacgagacacaccaacctcttccacagagcgaacatgtagtgcaaaatgttactgatcatggttacgctggaggaaatgaacatgatagacctcatgttctgccaagtgttatggatgaggaagatgcagagttgctagaggcaatgttgcgtcgtcatacagatcaatcgatgttcttaatgaaaggtatggagtccctgaagaaggcagcagaagagcctttgtacgacgagtctaagggttgtaccaaagagttcacgacgctccggtctgtgctaaagctgttgatgttaaaagctaaatatggtgtgtttgatgctggcttcgatgcgttcttgagtattatcgcagacatgcttccaaaggagaacaatgtgcgtgctaacacgtactatgcaaagaaactaatcagtccgctcactatgggtgtggagaagatccacgcgtgtagaaatcactgtatcctttatcgaggtgatgattataaagacttggagagctgcccaaagtgcggtgcaagtaggtacaagacgaataaagactatcgagaggaagagtgtgttgcatccgtgtctaaagggaagaagcgaaagaaagcccaaaaaaagacttcaaaatccacgagcaaagaaaaagaagtagactattatgcgctcaaaaagattcctgctttggtgatgtggtacctccccgtcgttgatcgattgaggtgtttgttcgctaatcctgaggatgccagacttatgagctggcatgcttctgatgagcacaaaaacgatgggaagcttcgacatccagccgatgggaagcagtggcaagatttcaatgacaaccaccgagactttgccgatgaaccgagaaatgttaggttcgcactgagtactgatggaatgaacccatttgctgagaggagcagcaagcatagcacatggccggtgatcctcaccatatacaaccttcctccatggttgatgcagaaacggaagtacattttgctaaccatccttatttctggacctacacaacctggagttgacatggatgtatttttggagcccttaatggaggatatgaaaatattgtgggaaacgggtgttcaaatgttggatgagtatcgtaaaggttcattcacgctgagagcaattctttttgttacgatcaacgattaccctgctctcttcacattatcaggccagtttaagggaaagattggttgcacagtatgcattgatggaactgcttacgtatcccttgctgcatctaggaagatagtttacatgaggcacagacgatttttattggaaggacacaggtaccgcatgcgaaagatggataagtacttcgacaataatggtgaactacattctactgctccatcgggtaacaatagaggtcatagagtttttgaaatagtcaggaatatcaagtttgttttcgggaagaagacaaaagacggaaaaacaaggaaggatgccaaactagcttcgggggctatattcaagaagaagtctattttcttcgagtacttgccttactggaaagagttagatgtgcggcatgcgatcgatggtatgcacgttcagaagaacgtgtttgaaagcaaaagaagggatcaattcacgcatggacttggtagatttaggcataaaaaaggaactacatcccgttcttcaagaaaatgggaagtaccatctcccagcagcaagctacaatctcaatgtagatga

SEQ ID NO: 9052 - DNA, 1280 bp, Zea mays
  unsure (1)..(1280): unsure at all n locations
  Clone ID: MRT4577_10824C.1
tgggtacctcgaggccggccgggagttcctttcttgttgtcttgctctactccccagtccccagaccccagtcccccactcggacctggggggcatcgcaccgaggacgacctcacgctggggcgggccttggtatattccttctcctccctgctcggtttagcacgcccgcttccagcacgcatcctcccctcctcccgtctcaagggatagcagggtgcagcggctcgaagctggaggaagcggacgggttcgccatggggtccgagggatcctcgggtccagttgtcgttcccagaaactttaggctgctagaagaactagaacgtggtgagaagggcattggtgatggaactgtgagctatgggatggacgatgctgatgacatatttatgcggtcctggacaggaactatcattggtcctcccaacactgttcacgagggacgaatctatcagttaaagctgttttgtgatacagattatccagataaaccaccgactgtccgattccagactcggatcaatatgacatgtgtgaaccaagaaactggattggtactcgtgctttttttttgtttcttatagcttgcaacctaccaaggcaatttatgaatgatagtaggcctattacttaactagcaccttttctaggttgaaccaagtctatttcctatgcttggaaagtgggaaagggaacatacgatggaggacattctgaccagcttaaaaagggagatgtcaactccacagaatcgcaggctgtaccaacctcatgaaggcaatgaagaccaaagagtagagcagaaaggggtgtctcttagatgtgtcatcatgtaatctatgtgcgttgcaatgtacagcattattgaattgagcagcgagatgccgaggtgagagaccctctcaggaaatcatgtggttcgccttaatgttaatggtgccaccatcgcaataaaagcgtcgatgattgttaaagtgcctgcacaccatgtaacgtgtaacccagttcgttcagattctgtgaaagacaacgagttcagtgtctgtttgttaagggctggctctaggcctggttattttctcgaggaaacaccgtgctctttcgaccatgcgtaacgaatgtaccgattctgaacaagtcgcgaaaagctgataaaagtaccagagacaagcacgcatcancttgagaagtcggggatgagctgagttaggcttgttcgtttgtgccggantggtggatcggaacgattttatccagattggtccttaattaaaaaa

SEQ ID NO: 9053 - DNA, 534 bp, Zea mays
  Clone ID: MRT4577_108250C.1
ttggacgcgtgttgtcgatttgttccgtcgtctagagatctcatcgttgtgctcagtgaaatcaatccttggatgaattccaattcccgcgggcaaaatcgacgcatcgatctcgtttttaggccgagggccaggacggtgcagccatcctttttcgacgatcctgattacgatcccctgtgggacgatgatctggccgccgccgccgccgtgttcggcgatgatgatgatgattatctggtggcagcccccgctcatggcagcagcagcaagcgtcctcacgtcgctgccgctagcgaggaggccatcctgaggctgcaggaggtgacgggtcgttctcgcttggggtccgccggggaggagcagtgcgccgtctgccggcaagacttccgcgccgacgagacgctgagggccatgccctgctcccacgccttccaccagcactgcatctcggagtggctgcgccgcaacgccgactgccctctctgtcgctgccggctgcccgacgaggaggaagaggacaagcagaggagg

SEQ ID NO: 9054 - DNA, 3138 bp, Zea mays
  Clone ID: MRT4577_108251C.1
atggagaggacatcctggatgtataacttatcaaggctagatccatcatacatatccgaggtccataggtttattgatgtcgctacgaaccatgcttggagaacaaagacaaaacacatatattgtccatgcatggactgcaaaaatgctgctgtatttaatgacacagaacaaatcatatctcatctggtatgccgaggatttatgaaggattacacaatttggacaaagcatggagagggtagctcttcgccttatacgattggaaaccctgagaacatcgacgacagatttcagttcgttcacgagacacaccaacctcttccacagagcgaacatgtagtgcaaaatgttactgatcatggttacgctgttctgccaagtgtaggaaatgaacatgatagacctcatgttctgccaagtgttatggatgaggaagatgcagagttgctagaggcaatgttgcgtcgtcatacagatcaatcgatgttcttaatgaaaggtatggagtccctaaagaaggcagcagaagagcctttgtacgacgagtctaagggttgtaccaaagagttcacgacgttccggtctgtgctaaagctgttgatgttaaaagctaaatatggtgtgtctgatgctggcttcgatgcgttcttgagtattatcgcagacatgcttccaaaggagaacaatgtgcctgctaacacgtactatgcaaagaaactaatcagtccgctcactatgggtgtggagaagatccacgcgtgtagaaatcactgtatcctttatcgaggtgatgattataaagacttggagagctgcccaaagtgcggtgcaagtaggtacaagacgaataaagactatcgagaggacgaagagtgtgttgcatccgtgtctaaagggaagaagcgaaagaaagcccaaaaaaagacttcaaaatccacgagcaaagaaaaagaagaagtagactattatgcgctcaaaaagattcctgctttggtgatgtggtacctccccgtcgtcgatcgattgaggtgtttgttcgctaaattcggcgatgccagacttatgagctggcatgcttctgatgagcacaaaaacgatgggaagcttcgacatccagccgatgggaagcagtggcaagatttcaatgacaaccaccgagactttgccgatgaaccgagaaatgttaggttcgcactgagtactgatggaatgaacccatttgctgagaggagcagcaagcatagcacatggccggtgatcctcaccatatacaaccttcctccatggttgatgcagaaacggaagtacattttgctaaccatccttatttctggacctacacaacctggagttgacatggatgtatttttggagcccttaatggaggatatgaaaatattgtgggaaaaaggtgttcaaatgttggatgagtatcgtaaaggttcattcacgctgagagcaattctttttgttacgatcaacgattaccctgctctcttcacattatcaggccagtttaagggaaaggttggttgcacagtatgcattgatggaactgcttacgtatcccttgctgcatctaggaagatagtttacatgaggcacagacgctttttattggaaggacacaggtaccgcatgcgaaagatggataagtacttcgacaataatggtgaactacattctactgctccatcgggtaacaatagaggtcatagagtttttgaaatagtcaggaatatcaagtttgttttcgggaagaagacaaaagacggaaaaacaaggaaggatgtcaaaccagcttcgggggctatattcaagaagaagtctattttcttcgagtacttgccttactggaaagagttagatgtgcggcatgcgatcgatggtatgcacgttcagaagaacgtgtttgaaagcataatgggcaccttgctagacataaagggcaaaacaaaagaagggctcaattcacgcatggacttggtagatttaggcataaaaaaggaactacatcccgttcttcaagaaaatgggaagtaccatctcccagcagcaagctacaatctcaatgtagatgagaaacatgcgatgtgtgtttggctcaagaatttgaaagtcccatccggattctgctctagcatacggagtattgtgtcaatgaaagacctgacaatcaccaactacaactcacatgattgccatgtcatgctgactacattcctacctattgccatcagggctataaatcctttgtttttaaagatggcaatcacacggttgtgctactttttcaacaggatttcacaaaaggtaattggccgtgatgagttggcatctcttcaggaattcgcagtggagacaatatcacagtttgagatgtgtttccctccatcgttctttgatattatggtgcaccttgtggtgcacttggtgccacaaatagaggcattgggtcctatgtacttgcatgaaatgtggacgtatgaacgtttcatgtcaatactgaatggctatgtatcaacccgtgctcgtcccgaggcatccatgatagaggggtactgtaccgaagaggccattgagtccggagctccattctgcaatagtatcctaaaagaccaggttgcaataggtctgcctccgtcacgacacgagggtagactgtatggaagcgggaggatgggacggaaatctttcatcccaccggattacgatatagtacttgaggcacatcagagcatcctacatcagctaacgataatggagccatttatccaacaacacatcaatgagcttcgcgagcaaaatcctgggcatacggatgattgggtaatgaagcaacataagcagcggttcaacacatggctaatggtgaaggacattccacgtggagaaacaatagaagaacaaaccatcaagggcttggcatctggaccatcacgccaggtcacaacatggcaaacctatgacattagtggattcacattttgtaccaagtccaaggacaaaaagagcatgtcacaaaacagtggtgttcgatgcgaggccatagatgatgaaactggtgagattattacatattttggctttattgaggacatatgggaactagactatgcactacacgacggttga

SEQ ID NO: 9055 - DNA, 1917 bp, Zea mays
  Clone ID: MRT4577_108252C.1
aaacagaagtacattttgctaaccatgcttatttctggacctacacaacctggagttgatatggatgtatttttagagcccttaatggaggatatgaaaatattgtgggtaacgggtgttcaaatgttggatgagtatcgtaaagattcattcacgctgagagcaattatttttgttacgatcaacgattaccctgcactcttcacattatcaggccagtttaagggaaaggttggctgcacagtatgcattgatgaaactacttacgtgtcccttactacatctaagaagatagtgtacatgaggcacagacgctttttattggaaggacacaggtaccgcatgcgaaagatggataagtactttgacaataatggtgaactacattctactgctccatcgggtaacaataaaggtcatagagtttttgaaatagtcaggaatatcaagtttgttttcaggaagaagacaaaagacggaaaaataaggaaggatgtcaaaccagctccgggggctatattcaagaaaaagtctattttcttcgagtacttgccttactcgaaagagttagatgtgcggcatgcgatcgatggtatgcacgttcagaagaacttgtttgaaagcataattggcaccttgctagacataaagggcaaaacaaaagaagggctcaattcacgcatggacttggtaaatttaggcataaaaaaggaactacatcctgttcttcaagaaaatgggaagtatcatctcccagcagcaagctacaatctcaatgtagatgagaaacatgcgatgtgtgtttggcttaagaatttgaaagtcccatccggattctgctctagcatacgaagtattatgtcaatgaaagacctgatagtcaccaactacaactcacatgattgtcatgtcatgctgactacattcctacctattgccatcagggctataaatcctttgtttttaaagatggcaatcacacggttgtgctactttttcaacaaaatttcacaaaaggaattcgcagtggagacaatatcacagtttgagatgtgtttccctccatcgttctttgatattatggtgcaccttgtggtgcacttggtgccacaaatagaggcattgggtcctatgtacttgcatgaaatgtggacgtacgggcgtttcatgtcaatactgaatggctatgtatcaacccgtgctcgtcccgaggcatccatgatagaggggtactgtaccaaagaggccattgagtccggaagtccattctgcaataattacaatacagtacttgaggcacatcacaacatcctacatcagctagcgataatagagccatttatccaacaacacatcaatgagcttcacgagcaaaatcctgggcatacggctgattgggtaatgaagcaacataagcagcggttcaacacatggctaatggtgaaggacattccacgtggagaaacaatagaagaaaaaaccatcaaggggttggcatctggaccatcacgccaggtcacaacatggcaaacctatgacattagtggattcacattttgtacaaagtccaaggacaaaaagagcatgccacaaaacagtggtgttcgatgcgaggccatagatgatgaaactggtgagattattacatattttggctttattgaggacatatgggaactagactatggtacatttcagatcttggttttccgatgtcaatgggttgaagacaaacatgtcacggtagacaactatggggtcagagttcttgatctaagtaaggtaggttacaaagatgacccatggatccttactaatcgtgctgcgcaggtcttctatgctgaacagatcatttctaacaatgagaagaaaagcaccgacaaaccgaagcatgtagtttttcttggaaaacaataa

SEQ ID NO: 9056 - DNA, 6570 bp, Zea mays
  Clone ID: MRT4577_108253C.1
ctaataactatctcggctaagagataatctactaatttctgttagtattctgaactctggcaaagctaatgtcccggaagcatcgtgatattttccttctgcgggaatgacctctttcaatatgaatgtgcagaggtcctcgactatgccatacaatgcagcttcggtcaagttctccgggtttcctcgttgaaattgcttgtcagggttcgtgatgtatcgtccgttcactctcatgaactcgcacacatagaatccacataggaccgatccttgtggttgcttgtggcacggccagtgatgatggatgtctagtggcacgccgtttttcgacaggtcgtactttccacctctcatcttatagaatctataagccagctctaaggtgctgaggaattctgcatatgtcgaagggtcgaagttcaaggagtcgagcaccagcacctttccaaccttaggataaatgaggaagcatatccagtggtccttaaagttgtacggggtcattatggcttccctgtcttgaaattgaagcattgcatgtcctatgtaggtggcgtatcgagcttcaaaatccttcttcatatcctttatacgcttctcaacttcttcgtccgtctttccccgtaattcatcgttgtctttccctattctaaaagtgtggctttcctcggatataagtattgggttgagatacccaacccttttactggcactagcattgggcttggtaccgtaaaggatctcctgttgatcatgttgcattaatgcaaacatcgttacaagttgcacatcgagtctctgaaggttcatcattaaccacatgtcctcgaatgtaacaacgaccttttggtccgaaccaataaaagcatggtctggtatatgcacactaatggtgtcgatgccaaccgatgatgcccgcatgtaccagtcatgcaaccttttaacaccagccgggacctttcttagtttctcaagaggtagcagaggtctgcccgacacatattttttaggcacgtttttgtaatctgccttagttggcttctttatctttgcgtccaatgcctcagccttttttgtagactcctcgtgctcggccaaatcaacagtttgtgacgtgaggctccgtccaatccctttcaaaaaccgaactgtgcctgcagtagtagctttactcttctttttctgatacggggacaccaattttgatataggaagtttagatttctttgatggcatagacagtgggtcaccaagaggatggggaggagaaggtggtggagccctgaatggtgatgcttgtggcggagacggtgggtcagaaaaaggatgaggagcagcatgtgaagtttgaggaggtgaaggatgtacaataggaacagcaatttgagaaggaggagacggttgggcctgcgacgaattcgaccaatcaatcaattcgacatcccttcgaggccaaaggataaaattcttgatagcttgtccaagtttctcgataccttcaggcccagggatgtctaacatgtcttcctcggatccttgggcaaccgtcgtcacttctactttgcaataatcctctggaatatcgtttccatggaacttgcgtcctgggatcgcaaggcctgtggctactttctttgtacgtttattgttaataccatatcttataaccagtgtgcacgccgcaggccttgtgatgtcatcaactggataacagaccttatttcccgttgaagcaacagaggttggtaatgtcgtacaatcggtggaagccggcggttgagctgctggaattgtttgtatctgtggagtggtcatctgttgaacagacatcgcactcgccaaccgttgcatcaattctggaggaggattcgatagcatttcagacatcatggctttgaactctttcttggcctcctgcgtaaaataatccgccatctcttccttgtatcgatcacgtttcttgtacagaccttcccactgtggtccgaatccttccttccatccttccttagacgagattcctcgtacacgaccaggatgctcagggttaccgagaccagccgttaggatgtctctttccctttgtggcttaaaagttccttccctctgcttagctgccattgtatatatgttttttgccgcttcttcgacaatgggatcatcaaaagatacaccggtctcggtttcccttggttttctagcacggagccaatttgccgccctttcacctagttgctcggacagcgtcggcaaccctgcggccttcttctcggcgtcttcttgtgtccatttaggaacctgacgcttgtaaccacctgtgcctaggtggtggcggtacttgttcttctttgatagttccgaatttgcctcacttagagatatgaaatcagggctgctcctctgctctagaaatactgcccactgacctgctgagattttatattttttggtcgggtccagacctttctttgcaaactttgtgttcatttcagacctccagttccggaaattgattgcaagctgcttcatcgtgtattccttcacgagttcttctgaaccgcgaggcagaacgaacctcattaatagcttattccatatttgattcttgacatcatctgacacatctctccattgtcgtattgttatgtcaagattatctctaactaaaaacccaagtgcattccggaacttaggtaatgcctcttctggagctaggggctgacctttcgggctcacgtctgagattttgtatgttttgtcgggaaacttgttcagccccctgtcacctctttttcgatcgctctgcttccttttccttgacgtctcggttgttgtcttggtctgttccggtgcgtcttgggtcgcctccggtacgtcttcgtgtcgtgccacggcttcttcgagtatcgcacgaaattcagaaaggacctcctcagcttctcgtggatcataagtagggtcacgttccaactcacggagagcggccctatctatgctaatggtaggaaaagggtcgctaggcgtttcatatccttcactgctggattgttcttgagcaacactcttgtccatgtggtcggaactaatccttggtccttgatcggagaactcattgagtgcctgatatatattagtcgaataatcttctctgcttttatacatcaagaacgggcattctggatgtgcaaagtcccagggcaacgaattgcgtgggatgcttcgctcaacgttccttatcttggttggatggtctatgaaaagagatatgtcgttgaactggttaaaatcctctaaatcagatacaccatcaactcctatagcttgttgttttccaggaaaaactacatgcttcggtttgtcggtgcttttcttctcattgttagaaatgatctgttcagcatagaagacctgtgcagcacgattagcaaggatccatgggtcatctttgtaacctaccttacttagatcaagaactctgaccccatagttgtctaccctgacatgtttgtcttcaacccattgacatcggaaaaccgagatctgaaatgtaccatagtctagttcccatatgtcctcaataaagccaaaatatgtaataatctcaccagtttcatcatctatggcctcgcatcgaacaccactgttttgtgacatgctctttttgtccttggacttggtacaaaatgtgaatccactaatgtcataggtttgccatgttgtgacctggcgtgatggtccagatgccaagcccttgatggtttgttcttctattgtttctccacgtggaatgtccttcaccattagccatgtgttgaaccgctgcttatgttgcttcattacccaatcatccgtatgcccaggattttgctcgcgaagctcattggtgtgttgttggataaatggctccattatcgttagctgttgtaggatgctctgatgtgcctcaagtactattgcaacctggtcttttaggacactattgcagaatggacctccggactcaatggcctcttcggtacagtacccctctatcatggatgcctcgggacgagcacgggttgatacatagccattcagtattgacatgaaacgctcatacgtccacatttcatgcaagtacataggacccaatgcctctatttgtggcaccaagtgcaccacaaggtgcaccataatatcaaagaacgatggagggaaacacatctcaaactgtgatattgtctccactgcgaattcctgaagagatgccaactcatcacggccaattaccttttgtgaaatcctgttgaaaaagtagcacaaccgtgtgattgccatctttaaaaacaaaggatttatagccctgatggcaataggtaggaatgtagtcagcatgacatggcaatcatgtgagttgtagttggtgattgtcaggtctttcattgacacaatactccgtatgctagagcagaatccggatgggactttcaaattcttgagccaaacacacatcgcatgtttctcatctacattgagattgtagcttgctgctgggagatggtacttcccattttcttgaagaacgggatgtagttccttttttatgcctaaatctaccaagtccatgcgtgaattgagcccttcttttgttttgccctttatgtctagcaaggtgcccattatgctttcaaacacgttcttctgaacgtgcataccatcgatcgcatgccgcacatctaactctttccagtaaggcaagtactcgaagaatatagacttcttcttgaatatagcccctggagctggtttggcatccttccttgtttttccgtcttttgtcttcttcccgaaaacaaacttgatattcctgactatttcaaaaactctatgacctctattgttacccgatggagcagtagaatgtagttcaccattattgtcgaagtacttatccatctttcgcatgcggtacctgtgtccttccaataaaaagcgtctgtgcctcatgtaaactatctttttagatgcagcaagggatacataagcagttccatcaatgcatactgtgcaaccaacctttcccttaaactggcctgataatgtgaagagagcagggtaatcgttgatcgtaacaaaaagaattgctctcatcgtgaatgaacctttacgatactcatccaacatttgaacacccgtttcccacaatattttcatatcctccattaagggctccaaaaatacatccatgtcaactccagtttgtgtaggtcctgtaataatgagaacacgctcaagcttactcgtatcttagttataccacatcagcagagaacattacagttacagcgtctagcaaatttcttacacaacactgcagtcagataatcagtctgcccatcaaatgcaaaacgcccatccaacactatgtcgctaaagatcaattctacaatggtattcttttatatcaacttaactttcgaattgacaacgcaaaatcaacataccattatgtcattccttcatctcccttccagatcaatgtaacaagtccactcccgcatcagcgcatgtgcagatatcctaaaattatcattatcgagcatccagaacccagactgttaataatatagatcagcaatgcctacctcataattggaaaatgagcaaacatttagatgggcatgtagcacacaaacattacatgctactggatatcgaggacaccatccatttatcgatccatcaccgacttgctttcacagtacatcacccgcataagggatatctttttacgttgattgaagattctcctcatagaagtatcttttccggagtttttcctattctcttctctgcttcaactgggagccggcttatctacttcgtgggtgctttaacagactccttcgatattttgagctgtgcaaagtctccagtcacggtacgttccacccgtagttcctctccctaggccaatccagttcttgccgtactaattggcacctctcgtccagaatattgcgtctaggcccggctctccctctcctcatactcgtcgcataaatggctgacgtcggagatgaccaggcaggccacacctttcctgcagtacctcagtggatcgggattaggccactctattgcccctgccgactccgaaacgcccacatccataatcctagtgtcgactagcgctcttgcactttagtttccgcgaacagtagctatgtaagcagcggggatcacgatgctggtgtaccaggggagcatgcaggttgtgttgcacggcgccggtcgcctgctgtggcggacgtgatggaccccggggctctaggggccatggccacccactcgagacgccagcggcacagcaggagacttcttaaatcctcggcacaccgagagacgggaacctggctcggggcctgcttttataacagcaggcgggaggagagggggtgggcgacattagtgggctggcccgctgcgcggcgggtgggtcgggacgggaagaatagaggcatggacagcgggtggcgtgtgttgcgtgtcacatgcgaggtcatccatccagaatctcctccccat

SEQ ID NO: 9057 - DNA, 496 bp, Zea mays
  Clone ID: MRT4577_108254C.1
ctctcccagcctccctcgctagcacgacggggcctccctctcggtcagggagtccagccgtccagggagtagggagtccactgtccatccgtccgacctcttaggaagtccagccatttgcccgtccagggagtccaggacagcggtcccatctcccactccatctcctagcctccacgagctgccgtccaggggcctccctcgatgccggccacaggctcaggcttccatccacggtcggggactgccctcagccgctgtcgctcctcgacagctcgacgccggccaccgtccctctcaattgtgtcatgcagcacgacagtcgacactcgacaacaactctctctgctcctcgtagaacgacaacaactctctccataggccacgagtccacgaccacgacgccgaccgtaggctgctgtccagaataaactagttggtttgttttagttgactaactccaatatttccccccttttgtttactattagatcat

SEQ ID NO: 9058 - DNA, 339 bp, Zea mays
  Clone ID: MRT4577_108255C.1
atgtgtcagggagaggagccaactttctcaaggccatatgcttttgcatgtgatgaaaggaagggtaaaaatagagatggcaatgggtacccgaaacctgaatacccgatgggttttacccgatataaaggcgggtacgggatgatttctctacccacaggtagaggatattctcttaacattgaaaggaaaaagcaaagaaagagaggatgcttcacatgcatgcggggagaaggaccacttcagggacagctgtccaactattgtagaacccaaaaaggagaggagcaaaggcaaggtgctaacaagtgtcaaaacttgggacgattcttcaagtga

SEQ ID NO: 9059 - DNA, 277 bp, Zea mays
  Clone ID: MRT4577_108256C.1
ggtccattcaacggacgtttgtagctggcactcctgtgtgccaattcagcacaggttggacactggcgcttcccaccactcattatgttagctcaggcattatcatttgcgatgggcacttgaccactacttccttcttggcacccttggctcatgttgatcctttgactggcacctgcacgcttcccaatagaagtagacaccttttttgcgaatggcactgtgtgccagaaagacctgtgaccaatggtgaccactactctggaataagcgttta

SEQ ID NO: 9060 - DNA, 666 bp, Zea mays
  Clone ID: MRT4577_108257C.1
atgtgtcagggagaggagccaactttctcaaggccatatgcttttgcatgtgatgaaaggaagggtaaaaatagagatggcaatgggtacccgaaacctgaatacccgatgggttttacccgatataaaggcgggtacgggatgatttctctacccacaggtatgttaatgggtaaaaatctctacccgttgggtagacgggtagaggatattctcttaacattgaaaggaaaaagcaaagaaagagaggatgcttcacatgcatgcggggagaaggaccacttcagggacagctgtccaactattgtagaacccaaaaaggagaggagcaaaggcaaggtgctaacaagtgtcaaaacttgggacgattcttcaagtgaagatgaacctccaaggatgcgcagccaccgatcctcatcacgctcatcacagtcatcacacaagtgccttatggcaagaggtaaaatgagtattccatcctctaatgatgaaagtagcagtgttgatgaaggtgagggaaaaccctccgtagatgagcttgtgaaagccgttaaattttttcaggatgtctgcactaaacaaaaagcccaacttaaaactttgaaaaataagttgattagctctcaaaatgattataaaggtttgctagaaaaatttgaattgtga

SEQ ID NO: 9061 - DNA, 582 bp, Zea mays
  unsure (1)..(582): unsure at all n locations
  Clone ID: MRT4577_108258C.1
cacctcttagcgggctgacacggagagctcccgccaggcccaggttccattgtacgggtgacgaacagtgcacggggaactggcaacgataccgcgacgtcaaaccacgtccttgctcggcacaactactcaagtacttggcacgcccaaccgacagaggacgacgaggacggtgacgacgaattccgttacttttacgataaccgcaaagtactcctttgcgaacacgaggaaaatctagagtaaataaggtttagactaggagatcaaggatgggtagaagtaaaccttactcatctgctcgacggactggagtaagacagttaaggagactaagaggaaggctaggtataggggcggtaggaacatgacttcgcgttacatagtaagaaagtaataccttaggggcaagattacgaacctattnctggttaagtagagcgtagttttgcctaggagtcacctagaggtctcgactcagaactggggcagtcccttgggagggttggtcgctaggactaggaccgagtttcaggagacaggggtctgtaaaagcgagtgatggtgtaaaaaggactggag

SEQ ID NO: 9062 - DNA, 352 bp, Zea mays
  Clone ID: MRT4577_108259C.1
gggggggggggggggggggggtgttttggggataactacgatgggggggggggctctcttccccgcgaggagtttttttttttttttttttttttttttttttttttttacatgaattagtggttttttttgacctttttttgattaaaggaggggaaaaagaaacttgaccatgcacaacgctaactatgagacaaaacaatccaagcatatctaaaaacacacatttgggcacgccagtgtatgaatgaggatatggaaaaggaaatcatagcttcaaagaagggagggggaaaaaatgcagacataggtaggtatattatgttggttaaagaggtctacacccggtctg

SEQ ID NO: 9063 - DNA, 582 bp, Zea mays
  Clone ID: MRT4577_10825C.1
atgggtgcgattaagtcaaggctcggtccactcaagggacccgatctcgcctcgcccgagcccagcctcggacaagggcagccgacctcggaggattcacgtctcgcccgaggccccctcaagcaacagacacaccttcggctcgcccgaggcccagtcttcgccaagaagcgaccttggccggatcgccacaccgaccgaccagagaggctgacaacagtcaagtccggtttcgggcaccataggaagctctgcctcgcccgaccccagggctcggactcggcctcggccccggaagacgacgaactccgcctcgcccgaccccagggctcggactcgacctcagccccggaagacgacgaactccgcctcgcccgaccccagggctcggactcggcctcggccccggaagacgacgaactccgcctcgcccgaccccagggctcggactcagctttggcctcagacgatggtttccgcctcgcccgacccggggctcggactcgacctcgacctcggaagacagactcgacctcgacctcggaggagcctccgcctcgcccgacccagggctcggactga

SEQ ID NO: 9064 - DNA, 198 bp, Zea mays
  Clone ID: MRT4577_108260C.1
tttgaagatatgaaaaagcgttcccctatgattgatgcagcgggaccattaaatgaagttggggcatcattccgaagggtgatgggtggaacaggtggattcttgtttgccatactctgcaaggctgcgtttgcagccttaaagcaaagttcacttgtcattgcaattaaatgggctgttccttaaaaggcctccatt

SEQ ID NO: 9065 - DNA, 750 bp, Zea mays
  Clone ID: MRT4577_108261C.1
gccggccgggccgggcacgatctccgactccctattaatctctatgacctcattctcgtgggaagcaaagcgcttgccccttctcactgtcccgatggcccgcacgaacctgatacccacgaagtccactgggggcaaagcgacatggaagtagctgtgcaccagggcgtgatgcatgtctgccccggcgacaggcgcaactaaaaagacccacacgattcctacacgctaccaccacgctcctgaagatccgcaaatatcagaagagcacggagctgctgatccgcaagctgccgctccagcgtctgtttccagatatcgtccaagacttcctcagcgaacttcgattccagagctgctgcgtagatgcgctgcaagaagaatcctaggcctacctcaacaccactcttctagggacaccaacctctgctgcattcactacaagagcgtgaccattatgcccccggacatccagctcgcccgccgcatcctgagggcagagggcctacgagactacgggatgcacctcgaagtagtgatcccagattctgtcatcaccgactggctacaacgagtagagatgtcgccgaccctctgtcagcctatattatcggccaaatcatgatgctcactggttcttcacagctgtaattcaagtatgacaatgccatggcaatgaacatctcaattatcttgtcccccatacccactttaaacaaatggcgctatagccaagagcgctctacaata

SEQ ID NO: 9066 - DNA, 118 bp, Zea mays
  Clone ID: MRT4577_108262C.1
caaaacctctgggttttgaaataattttatgccgacccgaggccgcaaaatgacagaggggccctatacaaacaacgaaacccacgcttttccaatgtcaaaataaaccccctttttt

SEQ ID NO: 9067 - DNA, 530 bp, Zea mays
  Clone ID: MRT4577_108263C.1
cggcacgaggacaaaaggtcttaaaaaagcagagaagggatgattaatcagagtttcctctctcatgtgtcactgcccctcctctctggaaggattaattagccattgggtttagtgggtgggagggagggagttcgggaatagttaggtagtatgtcctagttcgtcaattaatgatgctttcttttttggtttttgatggggaattgttttttctttgttgtccgtccgtccatccatgcaaccaagaaatttcatggagaatctgtacaaaagagtggctagctactacacgagagtccgttctgagagaagcaacacgagagagaagcaacacgagagaagtcagtggatgagtttagagaaagacattcacacgctgagagggttgataatttgtgatattttcctctttttttttcttcttcctgattttgtatattgtaatatcctgctggattttccaatgaatgagtgaatgaaccaatcaaaaaaaaaaaaaaaaaaaaaaaaaaaaaaagggggggggg

SEQ ID NO: 9068 - DNA, 148 bp, Zea mays
  unsure (1)..(148): unsure at all n locations
  Clone ID: MRT4577_108264C.1
gttatattnnnntcagacaggtttacaccttggttttttgtggcacatatgagcacaaaggctctctgatttttgttccatgatgcccacccgtaacagttgggctcctatatagctgcgccagctcacccttttatggtttattaca

SEQ ID NO: 9069 - DNA, 1528 bp, Zea mays
  Clone ID: MRT4577_108265C.1
ccacgcgtccgcaaattcaaaagattttgaattcaaaataaatttgaacaaccacacacatcaaaacatagtgtaccagcatctatgcatagcatttgaatcagttcatttaaaaaactaggaaaaaggggggaaaatcctacgttagagggccttgaagtttcttgcactgcaggctgcagcactgctgcccgggactggcacaccccaagtaattccaatcaaagttgtttaactggcacaaagtgtgtgagcaagatttatgtattttcttccgtttgtatcgaattagttattagggtgaaggagacatcttcctccccactgcctccagcaagtgttctaaaatctgaatggcatcttgctcctctgtccgcgccgcaccatcgctcctcgtctcggcgccgcctagccggcggcgcgcgagtacggccgtatgtcttcagggtgttcgccgcggcagggtcgcgtcctgccgcgtgcggtgtagcgccggggccgggcagggcggggtcaaggtccctgcgaagctggcggagctgtggtcggcggcgaagggcgcgcctcctctggccgtgctcgcgggtgtggcggcggcggtggcgatatacaaggtcgggtccagtctccttgcgccgcgccatcccccgccccgtcggctggaggcccagacggccccgccgcctccagtcccggagccggtgcaggtgggcgagataacggaggaggaactacggcagtacgacgggtccgaccccgagaaaccgctgctgatggccatcaaggggcagatctatgacgtctcagagagcaggatgttctatggacctggcgcagcttatgctctgtttgctggtaaagatgccagtagggcattggctaagatgtcctttgaatcacaggatctgaatggtgatatatctggtctaacgccaatggagctcggcgccttgaatgactgggagtacaagttcgccaccaagtatgcgaaggtaggaaccataagaagagcagcgcccgtcgaagtggtttatggcaacatttcgcctgaaatgagggaagaagttagtgaacctgtggttgaacctgagcttgagcctgagcccgagcctgagccgcatgacgacgatgcaccatgaataggaaaaacacaaagacatcagttcgggtaggaagatgaaatggagggcggcacactgcttataatgttccagaggtagtcagaatttcgaaataatgaaaagcctcataggctcgtacttgttgcgtggatattcagaaagaatagtgtctaaatttaaaccaatagtagatgtgtactctgtagtaggattgaattgttggatatgtacatgtcattcttctattttcgtgaaacgtgtcacttcctgatctctatactatgcaaatgcgcaagaaccctcgtgcatactaaacaaaagagcggccgctcgcgatctcgaactcgcccacgcgtccgcccacgcgtccgcggacgcgtgggcggacgcgtgggcggacgcgtggg

SEQ ID NO: 9070 - DNA, 386 bp, Zea mays
  Clone ID: MRT4577_108266C.1
gggcaggaaaaaaaaatatttggcccagacttttttggtttgtgttgacaaataggaaattgccttggggttagtgcacactgaaaaggaaaactggctatttctacttctgcacaaaccgattgcccttattatttacttcaaaaatctttttggttagaattactatttgggagctttcatgaccatttttgggggccgaggaaagttgaggtcaaacccgaggcctcacagcaaccacgggtgggaccgggagcagcatctcctgttcggatccccttagtccctttgaaccggatcctggtccagaaacaggatcagatgggtggccaccccctccggagaaagcccaagggctatgtcgatatactaatgggccggaggct

SEQ ID NO: 9071 - DNA, 442 bp, Zea mays
  Clone ID: MRT4577_108268C.1
attaccaatatggtttgattcaattacaggggaacaacagttgatgctggacacaaccccagggctgggagtaagatcacaacacagaacataaatgacaggacctgttaggatgaataaaggataggctttctcagtaaggagggaaggaatacccagtggtggacgccgggggcatcccatagagcatgcccgggttgggcgcgaaaccattgtggtaagcctggccgagcttgataaagctcgattggccttgcatgcagggcctctggatactgatgccacataatccgctactgaaacaagagctgaggcttattctgcaaaacagcgttaaaccatcaggagcgggcagaacaagcatgtaagacttatgaacaggaacaggcagggcgacactgatggcactaccggaggttacctgtgcactaacgggctggac

SEQ ID NO: 9072 - DNA, 511 bp, Zea mays
  Clone ID: MRT4577_108269C.1
ggccgctttttttttttttttttttttggggggtgggtggggtagatataaatttattgttgtggtgggattgaatgccctttgtttactgattatatttcagcgttctttttggacagtcaacatacaaccacgatgcaataacacgaccaatgttttttttttcaagaagcgaacactctgggggggggggggaagctgcacccccagctgggcatgtccaagaccacgaggggcccagattggatcactctccacgacagaagcctcgggggtgtaaggcctaaaacaggcacggctgcagaccccacatctggcgtgaaccccgatatgaaagctgagggggccgccccagaatacccgggggagttgaacacaccctacccctttgctggcttcgctggtgaggggaagtttactgcaaggggtctccaactcgatggaggttcccctgagccgatgctgttttcggggcgggcgaaccggaagggggaggcccgcccccctggga

SEQ ID NO: 9073 - DNA, 3654 bp, Zea mays
  Clone ID: MRT4577_10826C.1
atggcgcttcctattgacgtggctggcctgcgccctaggttgggcgacgtggaggctcctccgaagccgaggtcgagtctgtcttccgtggccgaggccgagtccgagcccctggggtcgggcggagcggagttcaccgtcttccgggacttagcccgagtccgagccctggggtcgggcggagcggagttcgtcgtcttccgggacttagcccgagtccgagccctggggtcgggcggagcggagttcgccgtcttccaggacttagcccgagtccgagccctggggtcgggcggagcggagttcgccgtcttccgggacttagcccgagtccgagccctggggtcgggcggagcggagttcgccgtcttccgggacttagcccgagtccgagccctggggtcgggcagagcggagttcgccgtcttccgggacttagcccgagtccgagccctggggtcgggcggagcggagcttcctatggtgcctttggcagggcctgactgcccgtcagtctcactcagtcaagtggcactgcagtcggagtggcgcaggcggcgctgtccttttgtcaggccggttttcgcaacccgagagactttagccagagaagagaaaaccgcccttcctgccccttgcgccgccatcccttccgttttggtgatggctgaccgggtgaccatcatctcgccgcgcgatccatggcccttttccacggtgacggcaagcgatctggaggagctggtcggcgagggtttgcttcgccctctcaccgatgagcagcgaccagaatggattcctcccgtgggcggagccgctccatccccaccgccggggtacgtcgtgagcttcgtctccttccacgagcggggattcggtgtgccagcgggccgctttatgcgggcgatcctgtaccactatggggtggagttgcataacctcacccccaactccatctcgcaggccgctatcttcgtagcggtgtgcgaagggtatttggggatcgccccccattgggatttgtggactcatctctttttcgccgagctttttgcctcgccgacgggggagaggaaggggtggcagcgccggtggttctacctccggaacgacggtgagttgctcccgccgttctcccagcgagtagtcaccgccgccaccgacgcctggcgtcacgggaccccgcacgaaagacagaaaaacctcggaccccttctccaggccttggaggcgttgcgggaggggggactcaccgctgcgggagtgattgccgccatccaccgtcggagggtgcttcccttggcggagcgacggctgtcgctttgggagatgaccccggaggctgaccaggagggctcacggatgtcccctgatcctcttcccttcgacgccctccaatggcgggtgtcggctgcgttggggaagccggacccccacgccttctcccagcttcagatgcgccccgaccaggggtgcgtgactctggaggtggggtggcacaagccttcccggccacgggtcccagaggatgcggtggaccgagcagcgcggcgggtcgccgcggaggagaagaagaagaagaaggacgcggagaaggctcgggcccgtgagcggaggcgggctcaggacgccttggaaaagcgtcgtcgccagcaggagagggagggactcccgagggagccgtcgccggagacgcccgacgacgacgatgatgatgaggaggaggacgacatgaccgcccatctcggcctcagccccggcttggggtgcaaccaggagccgtcgagccagcccccgagcgggccgacgccgtcagtccccggagtcggggcgtcggggtcccggcccgaggcacgggggcaacccgagagggcacctgacccctcggctggaggagctgaggtgactccggggggccaggtcagggcgtctgctccccaagagccgccgctcgtaccggcagcgcatggaggtgaccctcaagtcatgcgacagtgcccgggcaatctgctccccgggtgtccaaagcaagggtggcgccgaagttgccggcgaagcggacctcggcggctgttccgggagctgggatccaagaaacttccccccaggcgcggtggatcatggcccggagcgggtaacaagcgaagccatggccagatcgacctggcaccccggaaggcccttaagacggtgccggcctacgcggccagcgccgctccgggccttgtcgttcagccgaccctttcgcagggcgtttcaccgcagggggctcgggtgacacctgtcgctggggagcaggttcccgaggctggctcttctgccgaggcggccatcgtgataggggaggcggctgacgccgacgtggtcccgagcccgcctatcgtgccggccatgctggcgcctgctgctaccgaagtcgacgccatcccagtcggagagcggccggttgctgccggcgtcgagacggctgatgcgtcggcgcccagtgcctcggaagaggtgggcgtggaggcgcgacccgtccagtcgggtggcagcctcatcgctgtgcggcggagccccggggcccggcgccagttgctccggtttcggacccgcgaggcctcggaccctgtcctcgacgatgaacaggaggaccagtcctgggatgagctccgcgagtgtgctgaagcaacggtggggtcgctccggttgtcgctggaggttttctgcagagacgtccccaaaatcctccaggatctgacggatcggagcgccgccaagtcgtcgttcatccaccgcgaggtcgatgtctggggctcgccgcgatccctgaggacctcgctcgccggggctactgcgcgcctctctcagcagggtgccaaggtagcggacctccagttgttctgcactgacctgagagccgaggcagcagcggcgcgcgcagaggcgcaacaacagcggttggagtttgtccaggtcgtcgaggagcgggaccaatctcgggaccgggctgccgaggccgaaagccgggctgaagccctcgcagccgacttagccgcagcccaggtcgctgcctcggagcagcgtgcccgagccggaggtacgccttggccgtccctggttcttgttcttgtctgtttcctccgcttgtgtttgagatctttcttctggctgttcatagagctcgagtccgcccttgacgagtccgccaaggcgcttgccgaggcgcttgccggagctgccgagcagagggaggccgacctcgcggccatgtccgaggccgtctcggacgtttatcagatccttggctccggcgacgtcccttcaggaagctcccctcaaagccgccttcaagccttgggtgatcacgcgcgcggcagagtccgcgaggcgctacaccacggcgtcaggcgggcctttgccgtgctcgcttcccactacgttgtggacctagagcgggttagtgaggggtattggcttcctgacgaagacgaagctgccctggcagaagttcagcggctcgacgcggtcgccgcgggtccgagcgcagtgctggcgaccacctttgaggcggagatccttccccctgcgccgtcgccggaagctgagatggaccttaccgaaggcggggacggagctgagggcgcggctccttcccaaggtggcgcctaa

SEQ ID NO: 9074 - DNA, 811 bp, Zea mays
  Clone ID: MRT4577_108270C.1
ctcccgtcatcacatcaacatccccacgactcaacgccgtccgctattacccaccaccaccacttccttaccctccccatctcacacaatcagccaccatgggtgatccgcaatttgcaaagtatcccgacctccagctgtcgcagcacatcttccagctcacaaatcccgccgcctcgaaacaagcaaagcaagctgccttgaagtcggttcaggatggcatcgccgagaacaagatggcgcccctctaccgataccttgcacaccctgtagatggcgttctcaatgcacaaggcgagggcagcgcagaccagccgagcaggaaccggagaccttccgccagcttagcgacgatgcttgccacacggaccccgacgctcgaagtgccccttccctgggatgagaagctgtacgagagcctaaaggccgagtgcgagaaggagttggaggcgatacaaaaggaggaagaggaggcagaggagaaggctggcgagaccgaagtgcaggctgcgcggggaaagcgcgcggagctgtacaaccgcataggcgacaaggacaaagccattgccagctacgaggccatcttcgaaaagacgggcatcctgggcaccaagatcgacctcgtccttgccataatacgcattgcgctcttcttcggtgacaggatactggccaagaagtcgattgaccgagccagcgcattggtagagagtggtggtgattggggatcgtcgcaatcgtctcaaggcatacactggattgcactacctcactgtccgatcacactcacaagctgccccgctgctgcttg

SEQ ID NO: 9075 - DNA, 1035 bp, Zea mays
  Clone ID: MRT4577_108271C.1
gcgaaaaatggtactcttcttcgtgcctattctgttttctgcaccatacagaagccagatttgaagtgctggaatgctatgataggaggatatggcaaccacggggattctgaaatggcattcaaactatttggtgacatgattcgtagtgatctgcaacctgaccatgtaacatacatctcactcctttctacttgtagccattgtggactggttgagaaaggaaagctttattggttctgcatgataaatgacggcattgtaccagggttcaaacactacactagcatggtgagtttgttgagtagggcaggtttattggaggaagcagttgagttaattaataaatccccttctgccaagagatatcctgagctatggagaattctactaagctctagtgtgacatttaaaaatctgtcaattggtgttcatgctgctgaacaagcactggagctggatccagatgatctctcaacacatatactgctttcaaacctttatgcttctataggaaaatgggatagtgtgtctgaaattaggagaaagatcagagggctcatgattgaaaaggagcctgggcttagctggattgagattgagaaaatggtacatgtgttttctgcagacgatgaatgccacacacgcattgatgattgtcgtgatgagttacttagaataatggaaaacatggtactgttggatagttatgaaaatgaaatagtgttaaatggttaggttgcctttgttgttaatggaaatggggttgacttggtcagaaaatgcctaagttgctatgaacttatttctgttgcatgacatgctttctttcatggcactaagaaagctgatgagtataaccagatttttcagcacaacaaatgataggagaagctatatatcaagcgtccaacaatttttgggattctcgatcatgaacagtagaatttctggctataaaacttgtcctctgtcaaatacacactgaaaattgatgtcgttcgagccagtctgccccgatgccgcctgccgctg

SEQ ID NO: 9076 - DNA, 524 bp, Zea mays
  Clone ID: MRT4577_108272C.1
cacggccgctgcggcggagccgtagacccgtagggtactggtgctgctacgtcatgtcagccgttgggggatgcgcacgccgagccgtttcccgttttcctcactgtggctgctgctgctcctcctgagcgtcgccgacggcggcaaggagccagcggtctaccggcacgcactgcaccttgtgcgcgcgcttccagtccagcgcctggcacgcgcgggagcagtagttggccgcgccgcacacggagcaccgccggaactcgtgccgccgcgtctcgcgccgcccgcaccgcacgtgggagcacagccggagctccgcgccgtcgccgtccacgcctctatcgccggttatcttcccgcccgcctgggcgccgcagcggtcggaggcccaccaccagtccaccatgaactggttcgccgcgtggggctccgcctcggggaggctccacccgaagtcggacaggagcgggcacccgccgccgccgccgcctccgacgacgacgccgcccgcggcgtggcgcgag

SEQ ID NO: 9077 - DNA, 841 bp, Zea mays
  unsure (1)..(841): unsure at all n locations
  Clone ID: MRT4577_108273C.1
agaaaagccgctcttcttccgttccgcccgcccgcctgcccgcttctctctccccctctccctccacccaacccgcgagaccgccggcagctccaggacaggaggaggagcggcttcaattcgtccccgcgccgcgcgcccaggacccgcccccgctgcctctcccgaggtgagcaacgcctttcctcctcctccagcagcagcacagcagcagttgtctgtttaatttgggccgacagctctctcccccaatggtctcgtctggggaattttggtttcaacaatccaatccaatctggactctcccttgtgttcttttaatcgacgccatatacgatggtttgtcagttaacccaaaaaaacactacaccctgtaactgaaaaacattattttacaccgtagaccgttggtagagtggagttctaacactctattgatagagcacgttgctgactccgggcttggttggcctcgacgagctttccattctctgatgcagcccggagctctgcaaccgtgcttgcttgtccagcttaggccttgttattcccaatacacatggattggatgggattggaaaaaattcttaaggctttgttcggttgggttggaactgaccgggaagaccgcctgatccagggggtgttatcccggggccgtatcaaataccatcccttgaagaaatagttgttcgtttagcccacacgtgtttgtaaaccaggcccaatccccatgaaaaacttcaatccaggcctgggatcaaaccacagatcaacagccgtggaactcatccagntcacggtgcgatggcggcggcacgaatcgtaggaattgatgacg

SEQ ID NO: 9078 - DNA, 532 bp, Zea mays
  Clone ID: MRT4577_108274C.1
gttgtcttaactttatattctttttttttctttttttttccccggcatgccccgatatttttaaggtttgcaaaacaaacaattacaacagggacgccagaaacacaatccacctgcccaatgtaaaacctaaatggaaacagggcccctaaagatgttccatggttaaaaaaagttatccgttcggccccctcttcttgggggggactatttcacaggtaataaaggggggcttggttggccttataaccagacactgaagggggggggggcgtgtggccaaaggattatgttggattcccggtcttgttgttccacaataagggcgccggccactgtggtttttcctgcccttccaaaaggggagacctttcaagaacttacctgtgttgccctggccccaggcgtgccgatttccaccgcccttttgaaaaaacaatgctataggagcggtaaaacagggttggacatattaggtcctgcttctttttatagggactggaatctgagtgggtcacacttcgacagaaat

SEQ ID NO: 9079 - DNA, 186 bp, Zea mays
  unsure (1)..(186): unsure at all n locations
  Clone ID: MRT4577_108275C.1
cccgggtggatgaccgccttgttgccacatagnctcaaggcgtgcaaggagctgtgaacgagngactgtgtctattcgnngcgtggttattgagggggtggagacaggngcannttggtgtcnntatcgccgagnaacctgtnnaaatcgctcagnanaggtgtaacgcgntccagttnnctgtga

SEQ ID NO: 9080 - DNA, 167 bp, Zea mays
  Clone ID: MRT4577_108276C.1
agcctccctaaatcagacatgtcaagcaatcagccaacgtggtgtatttctcattcaatattttagtgtgaatggagacactgagataaagacatcgtgcagatataaatggggatacagttaaatgtagcaactcttgagttcattttgtcccactgtagcaaaat

SEQ ID NO: 9081 - DNA, 314 bp, Zea mays
  Clone ID: MRT4577_108277C.1
cacagtgttacatgatgagcttgatgacctagaaagccaaagactttctataaaagaaagaaaggatgctgtcaagaagaaaaagaaagacacacagaaagcagagtaagttgagaattgctcacaatgttagctttcataagtgtagtgagtttgataattatatggatgctgaaaaaatccatcttagaagagctagatataataaagaataaatactagtgctatcttgcttgaattttggaaaaggccacttgctgatctgtgttatatccagccttgcctcatctttcattcccttcgtacattgtgat

SEQ ID NO: 9082 - DNA, 378 bp, Zea mays
  Clone ID: MRT4577_108278C.1
gggaaccccaaagcaataaaggggaaatacctttcccgggccttggccagggtggggacatcaacaacaattttacccatttacatcataaacaaaaacttttagttccaaacaaggtaggggttgttagagttgaaaccccacaaggtgtcaaaaaaaaaaaaagaaaggggatggaaaaatcttttgggagccccaaaaggaaaaaagacccaatcacgggtcgggcacctggataacttttttacaaacccttttatccaaacaaaacccccgggggatattccattcctttaaaccccttttgattgcttgaattgaaaatgggttgcaaccctccaggtttcaacatttatttttacccaaacattaaaaccc

SEQ ID NO: 9083 - DNA, 410 bp, Zea mays
  Clone ID: MRT4577_108279C.1
gaattgcagggtcgccccacgcgtcagcccactcgttcgagatggcttgcgagacgccggtgctgtgtgtttttctgggcgccgaggagcgggccgagccggatgatcgcgccggagatcgacgagctggccaaggactacgccggcaagatcacgcgctgcatggtgaacacggacgacagccccatcgaggtgtctacctacggcatccgcagcatccccaccgagctcatcttcaaaggcggcgagaagatagagagcgtcttcggtgccgacccgaagtccacgctcaccaccctgatagacaagtacatcggtagttcatgagcatgccatgccatgccatgcatacatgcatggacgactaaacacatatgtgtatggctagtagcctttgcattcgggttatg

SEQ ID NO: 9084 - DNA, 1259 bp, Zea mays
  Clone ID: MRT4577_10827C.1
atggatcctaaggggaagggaattgtgatcaacgacaaggaaaaggagtccttcgtcaacgagccaaaagatgataaatccaacgactctggctcgggccacagacgtaaagatgggaagaagaagaagacaaggcgcatcaaggagatcgtctactacgacagcgacgaatcctcttcttcccaaaaggacgacgacaacgactacaggaagacgacggtgctaagaggtcacaaggggcagccaagcaagaccaagacaaaggggaagcgctcatgcttcaagtgcggtaagattggtcattttatcgctaactgccccgataacgatagtgaccaggaaaaggggaacaagagggaaaagaagaagcattacaagaaggcaaagggcgaggcacatctaggcaaggagtgggactcggattgctcctcttccgactccgacaatgaaggactcgccgccaccgccttcaacaaatcaaccctcttccccaacgagcgtcacacatgccttatggcaagggagaagaagagtaagtctgacaggcagtcaggtcttgccaaaggcgccacagcgaactccgctccgcccgaccccagggctcggactcgggctaagacccggaagacggcgaactccgctccgcccgaccccagggctcggactcgggctaagacccggaagacggcgaactccgctccgcccgaccccagggctcggactcgggctaagacccggaagacggcgaactccgctccgcccgaccccagggctcggactcgggctaagacccggaagacggcgaactccgctccgcccgaccccagggctcggactcgggctaagacccggaagacggcgaactccgctccgcccgaccccagggctcggactcgggctaagacccggaagacggcgaactccgctccgcccggccccagggctcggactcgggctaagacccggaagacgacgaaactccgcctcgcccgaccccagggctcggactccgccctggcctcggccgaacgacttccgactcgcccgaccccagggctcggactccgccctggcctcggccgaacgacttccgcctcgcccgaccccttggctcgggctcggccacggcaacagaaggcagactcaacctcggcttcggaggaaaccccacgtcgccggaagcaggacaacgtcagcagggactcgaccgctccaacagctgtccctccatcaggctccgccgcacctccgacagccat

SEQ ID NO: 9085 - DNA, 143 bp, Zea mays
  unsure (1)..(143): unsure at all n locations
  Clone ID: MRT4577_108280C.1
aaaaagagaaacnnaaccaaaggggggggctatcggagcaaaagaacggcggagaaattatagaacccaacagattagcgatgtgatccagtatggcgagtaggacatggaagatcttagatcacggccaacaaatacacaca

SEQ ID NO: 9086 - DNA, 713 bp, Zea mays
  Clone ID: MRT4577_108281C.1
gacacgccgcgcgcttcttcttccttatcccctgcgtgctactctctgtcgagtctccctctactccacccatggccgcgcgcttcatccacccgtgcgttgcgcccaagctcctccctctccctctgctggctgagcaccctcgccatggagctgctcccttcgccgcgcgcactgctcccctgttggccgcgaagagctcgcccgtaacttcccatggcgctcggccctgtttggatttcgcccagccgagcccctacacgcgcccctcccttgctccatccagggccggagcctcctccctgcttggatttggtcttgccgcgcccctctggctgtgaagcttcctggtgtcgcgcccagctcgaatcttttccgtagccgctccgaggtcctgcttcatggaaatatgaagcagtcgtggacgcgcccgcgccgtccctgctcgtgtcttctcccatggcgcctgactggatctccctgctgcgctcgatcccatggcgcgctcatctccctccgctctctgctgcgcgcccagctgtgaatctccctggcgccggttccctgttcggctgttcctactccctcccagttcgtccaagttctgctcggagctccttcgtcctgctcccccaggcccacagtttcctctccctggctgtcaaatcgtcgtgcctcactagccgctcctcgacatcggttgtcgatctccc

SEQ ID NO: 9087 - DNA, 704 bp, Zea mays
  unsure (1)..(704): unsure at all n locations
  Clone ID: MRT4577_108282C.1
catcttcatnnctcccaggttttcccctccaatcacccccaggtcttcctctcgcgagttgcggtctcgcgccccccctccgccgaccgccgcctcctcacaaccgcggaagctgcttccctctccattggacgcggccagcttccatctctcggtcacctccctctacatcccacggccgctaccaccttccctctacctcacacggccgccggcctctccaaggaaaaaccttgccacgagtcgccgacactccatcccgaaagagctaacgaggtgactccccaccgcgcccatgggtgacagccagtactccttctccctcaccaccttcagtccgtcggggaagctcgtgcagattgagcacgcgctcacggctgtcggatccgggcagacctcgctcgggatcaaagctgccaatggtgtagtcattgccgctgagaagaagctgccttctattttagtggatgaaacatctgtatgtgtatctaagtttttgaatttctcttttgccacattctgacctttctccatgacgagtgctaaacagatacctgcatgaaaaacttttcaggtgcaaaagattcaggcactaacacctaatattgggagttgtctatagtgggatgggtccagaattccgtgttctggggaggaaaagtcgaaaggcaggcccaacatattatcagtacaaggaacatata

SEQ ID NO: 9088 - DNA, 212 bp, Zea mays
  Clone ID: MRT4577_108283C.1
ggcgttttgccaaacaaaaaagatcatgctaacagaaacttctggagtttcttctttttataagaaatgttgctccttttgcatctactggttcctggttctgtgatcgaatatctacaggtggctccgttgggagatcttgacgttgtctccttagatgctatcaaggtgctctgttgagttgttccttcagccttttcattcatgggcca

SEQ ID NO: 9089 - DNA, 712 bp, Zea mays
  Clone ID: MRT4577_108284C.1
ggccgggaacgtcttcatcttcatctcccaggttttcccctccaatcacccccaggtcttcctctcgcgagttgcggtctcgcgccccccctccgccgaccgccgcctcctcacaaccgcggaagctgcttccctctccattggacgcggccagcttccatctctcggtcacctccctctacatcccacggccgctaccaccttccctctacctcacacggccgccggcctctccaaggtctgcacacggaaaaacgttgccacgagtggccgacactccatcccggaagagctaacgaggcgactccccaccgcgcccatgggtgacagccagtactccttctcgctcaccaccttcagctgccaatggagtagtcattgccactgagaagaagctggcttctattttagtggatgaaacatctcgccgcaaaagattcagggactaacagctaatattggagttgactatagagggatgggtccagatttccgtgatctggtgaggaaaagtcgaaagcaggtacaacaatattatcgggtgtacaaggaacatatacctgtaacacagcttgtacgagagactgctgctgtcatgcaggagttcacacagtcaggtggtgtgagaacatttggagtatcactggtgattgctgcgtatgatgacaatggcccgcagttgtatcaggttgatccctcaggatcatacttc

SEQ ID NO: 9090 - DNA, 621 bp, Zea mays
  unsure (1)..(621): unsure at all n locations
  Clone ID: MRT4577_108285C.1
cttcatctcccaggttttcccctccaatcacccccaggtcttcctctcgcgagttgcggtctcgcgcccccctccgccgaccgccgcctcctcacaaccgcggaagctgcttccctctccattggacgcggccagcttccatctctcggtcacctccctctacatcccacggccgctaccaccttccctctacctcacacggccgccggcctctccaaggtctgcacacggaaaaaccttgccacgagtcgccgacactccatcccggaagagctaacgaggtgactccccaccgcgcccatgggtgacagccagtactccttctccctcaccaccttcagtccgtcggggaagctcgtgcagattgagcacgcgctcacggctgtcggatccgggcagacctcgctcgggatcaaagctgccaatggtgtagtcattgccactgagaagaagctgccttctgggaggaaaagtcgaagcaggcacaacaatattatcggntgtacaaggaacatatacctgtaacacagcttgtacgagagactgctgctgtcatgcaggagttcacacagtcaggtggtgtgagaccatttggagtatcactgttgattgctgggtatg

SEQ ID NO: 9091 - DNA, 304 bp, Zea mays
  Clone ID: MRT4577_108286C.1
caaaaaagtcgtttgccaaaattagggacttgttgccacaagaccagcgttttgatttaccccgaaaactcaggtttacttaccgagggcttatatcattttttttcatggaagattttggtcccagtaaaacacttcgtctcatgcctttacgaggcacacacctttccccagaatttttttctttccgaagttcgcctgctggtgggccaattaaagatgctttattttggtgatttccccaggccggtccatatttgtttctttgagtacggggtggtttgcccttggttcttttttttgt

SEQ ID NO: 9092 - DNA, 1095 bp, Zea mays
  Clone ID: MRT4577_108287C.1
ctgtgcggcgctcgaggcgccggccgggatccgatggcaatgaggcaatcaaagctgagagcagtgtcggcaaggccgtggttgttactcctttgcctcgcgctagcagccaccgccggcgtaatgcaagctcgcgcccagcctaacagcatcggtttcatcagcatcgactgtggtttcccggggacgacgagctacgtggacgacgccacgacgctgccgtacgccccggacgctgcgttcaccgacgccggcgagaaccacaacgtctcgtctgagcacgtcacgccggagctcccgaggatctaccgcgacgtgcgcagcttcgtggacggcgcgcgtaactgctacacgctcccgtcgaccctcgcggtggggctcaacaagtacctcttccgcgccgccttcatgtacggcaactacgacggcctcaaccggccgcccgtcttcgatctctacataggcgtcaacctctggaagacggtgaacctgtcgtcgtcggacccggccgccccagtcatcgcggaggccatcgttgtcgtaccggacgacttcgtccaggtttgcctggtgaacaccggcaccgggacgccgttcatctccgggctggagctgaggcctctcaagaactccatctacccgcaagtgaatgcgacacaggggctggtcctgcaaagcaggcgcaacttcggcccgactgatatgacagacattatcaggtaccctgacgatcaatacgacagattatggacacctatgattattgacgccatcgactggctggtgctatccacgacggaaaaggtgcggaacatatatgatgacctcttcagaggtgccgaaaaaaggtgatgcacacagctatcacgccttgtgacgctaccagcatcatcaacttgtattggaactccaaaggctcgtcgcttgggtacataccaatcttccacttctccgaagtgctaaaggcaggcgccctcgttgttcgccagatcaacatcaacatcaacgggttagcggttaacctgaccatgattattacacaccaccgtacctcccaaagggctacctttacggcatcagtaccttacaccaacc

SEQ ID NO: 9093 - DNA, 1383 bp, Zea mays
  Clone ID: MRT4577_108288C.1
cattgggaccctcgaggccggccgggatatagcacccacccgtacctattggacaggcaacgtcctcatcttcatctcccaggttttcccctccaatcacccccaggtcttcctctcgcgagttgcggtctcgcgccccccctccgccgaccgccgcctcctcacaaccgcggaagctgcttccctctccattggacgcggccagcttccatctctcggtcacctccctctacatcccacggccgctaccaccttccctctacctcacacggccgccggcctctccaaggtctgcacacgcaggaaaaaccttgccacgagtcgccgacactccatcccggaagagctaacgaggtgactccccaccgcgcccatgggtgacagccagtactccttctccctcaccaccttcagtccgtcggggaagctcgtgcagattgagcacgcgctcacggctgtcggatccgggcagacctcgctcgggatcaaagctgccaatggtgtagtcattgccactgagaagaagctgccttctattttagtggatgaaacatctgtgcaaaagattcaggcactaacacctaatattggagttgtctatagtgggatgggtccagatttccgtgttctggtgagaaaaagtcgaaagcaggcacaacaatattatcggttgtacaaggaacatatacctgtaacacagcttgtacgagagactgctgctgtcatgcaggagttcacacagtcaggtggtgtgagaccatttggagtatcactgttgattgctgggtatgatgacaatggcccgcagttgtatcaggttgatccctcaggatcatacttctcctggaaggcatcagccatgggaaaaaatgtgtccaatgcaaagacgtttcttgaaaagagatacacagaagatatggagcttgatgatgccatccacactgcaattttgactttgaaagaaggatatgaggggcaaatttcctccaacaacattgaaatcggaattattcgagctgatcgtgagttcaaagttttaagcccagcagagatcaaggatttcttggaagaggtggagtaagctgtctgttgatgatactagttcagacaacaatagcagcgtcacttatgagcagccagcctgaagattgtcttggttttattactctgtaaactgatttgctccagcgccatgtggtggttacatttgaaccctcctcaacgcatactgtagacaatgagataacgtaggatgaatgctgtatttgacatactttgcagcttgtttatgtgatgcacgttcttgcggacagtatcgatacccagtgtttattgtcgtcaaaaaaaaaaaaaaaaaaaaaaaaaaaaaaaaaaaaaaaaaaa

SEQ ID NO: 9094 - DNA, 349 bp, Zea mays
  Clone ID: MRT4577_108289C.1
agagaacatgtcctggctttctatttggtggcaacaatttgttgatgcttcaatgcttgtgcagcattttgatcaaccactgtccaaaggaaagattgaggccatcaagaacctgctggaaaaagggaagcagttgaagaggaaggtcaggggcaccaaagtcgcgccagctgttctggcttgcccatctgcgctggtctaatggtggagctggctcagtagggtcgtcttcctatttttatccatgttacagtctgctggagtgttgacaatagttgtgtgtcagggtctgttcccttttggtagttttaaaactaggccttcctacaagtgtgtggaacgtagtaag

SEQ ID NO: 9095 - DNA, 353 bp, Zea mays
  unsure (1)..(353): unsure at all n locations
  Clone ID: MRT4577_10828C.1
cccgggctcgggnaacacaaatcatcngcanngaggaccnngnccacgaggacaggacggncggcccgcacnncaaggaggccaacancnnccncgggccgnncaagcngaaggcaccccgcggcggccccaagaagaagaggaaccacnacgnggagggcggggacgccggaaaccgngagaacnacancaacgggcgggggggggaggagaacnaggcncncncgggganccggggagaaggcgggncggngncagcgnggnggnnnnggcncnagnaaggggacgganaaggagggagangcaannnaggnnnggggggnccagggcgcnaanacagccagacngcacna

SEQ ID NO: 9096 - DNA, 279 bp, Zea mays
  Clone ID: MRT4577_108290C.1
tcttcctctcactcttgagaaaaaaaaactaaaaaaaacataaatacaaataatacaaatacaaaaaaaaaagaaaggtaatattaaaatctaaaaacatataatataaatcacttacaaaaatcacacataatctaactatgttaaagaatcaaaagtcaactttatagtgacatctaatactgttatcctctcaaaagtttaccaaattacaattagcttcaccttacttaaatagcattatttaacaactttccatacctacctaattatataaaa

SEQ ID NO: 9097 - DNA, 2402 bp, Zea mays
  Clone ID: MRT4577_108291C.1
ttggactcgaggtcggtagggactcgccgttatcggccgaacgagttcacccatcggccatcgccccgtccagttctctcttctctttctttcttccccttcctacaccgccgcaccccactcccagatcccactgctccccagatccgcgcccgagccctagtcccccagatccgccgcggcgccggagatctactcctcgtcttggcgtccgcggcgccatggcgtgcctcgcgatctctctgcagccggtgaacggcccggacatcctactgcaaacgcggtcctggttccccgtctctcgcgccctcgccgccgtctccgcctttcgcctcgcgcgcctccaccttgcacgcggcaagcaacaatcctcctcatcctccgcctcctcggcctcgctcgacgccatcggcgacgacccgctcgccgccgcgtccgggcagctcgttgtcggcgtcgagtcacagtaccgcgtggtgtaccgccttgtcaactccatctacgtgctgggtgtcaccaccgcaggctctgaccatgctgcccctgctgtcaacgccttcgccgtcgccgacgccgtcaaccagtccgtctccgtcgtcgttgcagcctgccgtggcgtcgacgtcacccctgagaaggtgcaccgcaagtaccctgaggtctatctcgctctcgacctcgtcctccacggcgttggctccgtccgcctctctcagatcctcgccaccatccatggcgacaacctcgcgcgcatggtcaactcctcgcccgacgccgaagcccgggccccgtggcgcggatccctggcccgtcgtcgaacacctcgcgcaggaccgccacgctgcgagggagggcttctcgggcgcctctttcgagcttccccaggagacgctcgcggctggtgacgaattctcgtctaacatcgcccccgcgaccactgttgctactggggatgaaccaccacctgaggaggcagcacctgtggaaaaggatcctttcgcagccagtgacctgattaacaacaaaccggaggaggcattggtgggtgggttcaaaaagaacaaagagactgcccttgtggttgctgatcctgcagctgcgctagctggattggaggttacgactttgccaccagctgaggcgactaagccgacatttattggagttgaagggtttgagggtgattatggtggcattgagtttggcaacgatgagacttcacttgctgaggcatttgaagggctcaatgcgccatttggtggtggcctggatgcttctgagtttgttacaacaacgaagaaggatcacaaggacaggaccgtcactgggcttgagttgctagtagcaagtgggcagccaccgaatgcagctgctggtactccattggagaatctcttgctgactaagcgcgcagaaatgaccgctcctgagttgtttattgctgaggagatcaatgcagaattcaaggagtctattcttgtgcgtgttggattgaagggtacaatcttcctgcggaccttgccactgaataaggcagcgggtaaggagacagagttctcatttcgtcttgagggcacatcaggaatgaagagggctgcattgcagagtaatgtcttgagtaacctacaaaatggactgttccatgtcaggaccgtgtcgaaagaagaacccattcccctcatgaagtacagcttcctgccgaagcactcacctctccctttgaggatgcgcctagtgaagcgccatagtggaacgttactctcagtgatgatacagtacgcatccaatccaatgctgccccagcctctgagcaatgttacattcgttgttaagcttcctgtggatcctactctgctcaatgtttcacccaaggctgtgctaaaccgggcagagaaagagcttagatggcatatttcagacattcccctgaaaggtccagccggcaggctcagggcgcggatgcctgttgaccaagactccaaagatggtgagctagaggttgttgggatggtgaagtttgcttaccaaggtccattcacattgtctggcattaaactatgcccagccactgatggcattgcccaatttaatgaagttggccataccttctccagtgggagttacctgtgcatttgataggtacctgcttgtgctgtaggtgcttgttcacctgttttatgtttgtttctacagcagggtgtgaaaatcctattgtatgtagcaaagtgtgtttctttcactgaggctgaaattccatcacgtttttgagttgtctgtttcttggtaagtcatttgtggttactcatgaaggctactttatgcatcaagtttatcattcatacgaagaaacaatgtactgctctatttaattactattttattgcttctcaaaaaaaaaaaaa

SEQ ID NO: 9098 - DNA, 236 bp, Zea mays
  Clone ID: MRT4577_108292C.1
ataatagcctttaacgaatacggcgagctagagatgcgcgttccttatcctgggtgctctctgtacatgaatcactaacgcaacacttttcgttgagcgctcacacgcttctatagcttcgattgttagcctatacttacgatcattgatctgctaaggactggataacctatctgttcaatcatattggactcatcaatctatcgtagaatgcagcatacctatatcgtgcttga

SEQ ID NO: 9099 - DNA, 839 bp, Zea mays
  unsure (1)..(839): unsure at all n locations
  Clone ID: MRT4577_108293C.1
agcacgtatacagggacagggaagaaggacacgcgtgcgtcgccatggcgccgccccgggcccccctcgccaccctcctccccgcccccctcgcctccccctccccggcgcccccccccccgccgcgctcccccgcgcgcccggcccgccaaggccggtcccttccgggccgccccgcaatccggacggtgggcgggagaacatgtacgaggcgatgtcgccgcgccgggcgctcctcgccatcctcctcgccgtcgccctcgcctccgcttcctcggcaccccagcccccgccgtgcagccgctcgtgtgcggccctcaactgcgactccgttgggatccgctacggcaagtactgcggcgtgggctggagcggctgcgacggcgaggagccctgcgacgacctcgacgcctgctgccgcgaccacgaccgctgcgtcgagaggaaaggttacgtttccttcatccccggcctgcgtttgttgtgctcgttaattagggtctgagtgagatgggtggatggatcatgatcaagttcctagcttgcaactcatcggtagcaaagaatttttcattggatttgatttcgcgttgcaatctgatcactacacttggtgctcactccgttttttttatttgtcgcgttttagttaaaaaaaataaactagccggtaacaaatattgaagaatagagtcagntttctttatttattttctgcttgtggngtggttggaatgcagtgccttcaagcaccattacacaaaattttgcatttaccatcaccgaaaggatgaccacagttattctcccaccctgaacattacatggtatcagtcagt

SEQ ID NO: 9100 - DNA, 263 bp, Zea mays
  Clone ID: MRT4577_108294C.1
cggcagcggcctttaaaccttctcatctgtgccctcatgccccccttccttggcaacaatccgagcagattgacaacggctctccggggcaacttaaagcctgcgccggcgacgccgcggagaagctgctgctcgccgtctcaaccgagggtcctatatgtggtgtgccagacttcaagatgaggggaaagaacagtgatgagctcgaacctgtcgatgctggcgatgaagatgatgatggtggtgacgatggggacgaggat

SEQ ID NO: 9101 - DNA, 375 bp, Zea mays
  Clone ID: MRT4577_108295C.1
ctgcgcaggttgggtaggcattttgtcagccgccgtcgtaggatggaggaagacagcgggtcccccgccgtgattagcgccattgggagggttgaggaagggcctaggcgtaacaccgatgatgtccgctgctcaatcggggggaaaatggatgatcgggtggtttgggaattgctcacccgcgcataacctcgccatggtcccgcacttcatcgaggacagcactgcagtcgccaccgtttgaggtcaagaacaggtaccataggatgaggcgcatggaggatgctgcgatgtgttcgtgagaggtctaggccgtcgtctcccagtcaactttgggttgctggaccgttgtctccttttgatgtaattatttat

SEQ ID NO: 9102 - DNA, 378 bp, Zea mays
  Clone ID: MRT4577_108296C.1
tacccgttcgccccatcgtccgggccccttggtccgactaaggtggcaagtcgcagggtcattacccgttaatcacagagtggcatcaggtgacaactccagaaacgagacggcgcaccttgcagcatgacatttttacacgttactgaactgctcctgcttcattgccaagctgacgtagtgaatatccgccacgcccatgcctaagtatgatacattccgcacttgtataaaaacagctgctgattatactggaactgtgcttgacaagctcgattgcttgtcaacattgatcaaagtacctgaaaatgaaagctatgacccctaccaggagtttattaaagactgtattggatacatacatgttgcttgactgta

SEQ ID NO: 9103 - DNA, 395 bp, Zea mays
  Clone ID: MRT4577_108297C.1
cgggggagcgccccgcgttcggcgctcccgcgacgctctcgctcaacgcacggcctggggcttgcccgtgttctggattagttgcggcgccgggtgggggggcggacgggcgccggagagtccggccgggccgcggcgggcggccaacgttgcggagcgaatcccgaactacgcaagcacaacggactgcaaaatgcgctgcaggcatccatccaacattacattttttcctgttgccatgttcaatcttgacaagattagcacatatatcctgagaagacgggtcgttctttctcttaactggtcggtggggcttccggatcttgctttcttttcagtggcctgcctaagagcatgtgccggagctgcttagtttgctagttcctgttgtggtg

SEQ ID NO: 9104 - DNA, 502 bp, Zea mays
  Clone ID: MRT4577_108298C.1
cgttgctgtcggagctttctggaggatgaagtatctagaaattcttgtactgtgcattgttgaggttggtccccggatgacattttcaacggcgttctcgaccaatgctgtctcaatctgtaaatctctctcattagtagaagtgacacgattggagagatcaagaagataccttttgtgcctagagcctggtagtgacccacttgatgaaggtcagctcaaagaattcactgcattggttcatgatagaatgacagagtgcatttatcgcaataagctcacatcatttcaatcagatgtagttcctgaacctgtctgcattgttccagtcattgaaaggggagaagaagcattgaaagaaataaatgtgaagatgggacttgcttttgataaacaagatattgactattatacacacctttttagagatgatatcaaacgcaatccaactactgtggaactttttgatattgcacaatccaacagcgaacatagcaggcat

SEQ ID NO: 9105 - DNA, 800 bp, Zea mays
  Clone ID: MRT4577_108299C.1
ggggtaccctcggtgttggccgggctttttgcccctgctccaataagacgtggctgacacctttgctagcatctcccattcgctggacccgttcactcctcccgttcctcaacgacggcgggagccgctgctgcgattccttcggccgctccccctgttcactctgctcctcccctgccgccgcttagattggtgctcctccgtcgccctcgctcggtatttcgccaccgccgttgtgctcagaagtctgtcgccgccattcagattgctcctcctccgtcggcagtggagtctccatcccaagacagcaacgcaacacagtataggaagagaaagcctcgcatgaatacaacaaaatatggggagaatgccaaggtccccaaaagccgacaaagatcagaaaatgatgctgatgctgctgtccatgttgacaaaactattttcccccaagttgaaggtgctgtccatgatggagttgtttttccccaagttgaagctgatatccatgttgaaggtggtgtttttccccaagttgaagctgatgtccatgatgcagaagctgttattccccatgttgaaggtgttgtccatgttgaaggtggtgtttgtccccaagttgaacctgctgtccatgaagtaggagctgttgttcccctcgttgaaggtgttgtccatcttgaagttgttgtccaagttcagtcacctcccaagtctagaactcctaagaagatcctatcgaagaagctcacaccaaggaagctgaagaggatgtaaaccttgttatgctatccaagttagaa

SEQ ID NO: 9106 - DNA, 743 bp, Zea mays
  unsure (1)..(743): unsure at all n locations
  Clone ID: MRT4577_10829C.1
gggcggtgttaaaataggaaagttatgaatttccaaagttttttttatgtatttggtacggaattgtcggcgtttcgagaccggggggtccctcaggccgacgagtgagtgccgcgtgccccagcccagatgggtcgagcgcgtgggcgagcgcaaaggggggaaaggagcggggaggccggagtccggcgcgagagagatgggaatcccgcggccttcgtgttcgtcccgcgcccaggtcgggtgcgcttgcagtaggggattacaagcgcccacgcgggtgagggaatcgagcggccccaagagagcgcctgtcccgtcctcgtcccgcgcggccaaccttctctaagaaggccctggtccttccttttataggcgtaaggagaggatccaggtgtacaatgggggtgtagcagagtgctacgtgtctagcggggggagagctagcgccctaagtacatgccgatgtggcagccggagagatcttggcaccgagctggtgtggtgtcgtggctgtcggaggagcaacagagcctggcggagggacaactgtcggagcggttgggtccttgctgacgtccccttgcttccgtaagggagctgagagccgccgtcgtcacagggtgtaacaccctgattttggggtataattnttctttcctaatatccaccaaattcaggtgttaccctccccttttttttggttttcttctctttttcctaaataaggaaagtatttcata

SEQ ID NO: 9107 - DNA, 326 bp, Zea mays
  Clone ID: MRT4577_1082C.1
aacttgggacatggggaataaaaacggccagggaccaatgccccatgccacggggcacggtccaaagctgacaaccaggcccccctgcaccctgagtactccggttccccggatgtcaaataactaaaagatttggaacatagaaacttgggacccaggatagaaaggaggaagggcggatggaggaatttccctttctccagactcatgacccctcacacctgcgggagggcgaagcccccttgctagttgctgaatgtttaaatggtccaagagaaagggcaaaagcccaaggggcaaacactcctagactaaagggtgggggg

SEQ ID NO: 9108 - DNA, 2299 bp, Zea mays
  Clone ID: MRT4577_108300C.1
gccggccggtccgagatctccgccggtccgtccacggtgtgaatcgcgtggtccgccgaacctcagaatagccgctcgaaccgcttcataactcccaccgcaccggtcgccccggcgcgccggcgaggtgacctactgacctcgacgagcgcgcgacgttgaccggggcgtgcatccggccgcatcttgtcctcgttccttacgcagaggagcgccgctccaaaatcgcagaacgccaaggcgggcgtagcgaaggatgtcggaggccgtcgccgcaggcgagtcgcccgtcgagctgctgctccgcgcggcggcgatggtgcccgcagagcgctacgcgctggccgccatcatcgtcgtgtccgtctttctgtaccgcttcctcgagctccatgttatcggcgacatcctccgcggcttccggggcggccgcgtcgagctcaccttccaccccgcctcggagatctaccaccgcgtcgcgtccaagtgccgcttgctccacggcaggtatctggcgacaccatggctggcgagcccgcatttgcagacattgttcctgggcatttacgggacgccgccttcattcacatacaagagacagttgtacactgttcgtgatggtggaaccattgctttggattggctgctcgcatctgatttggaagttgcagatggattcatttcgaaagatgcttcaacaccccttgtagttgtggttcctggattaactagcgattctgctgctgcttatgtaaaacacttggtttactccatggcaagcaaaggatggaatgttgttgtaagcaaccacagaggtcttggtggtgtgtccattacttcagattgcttctacaatggtggttggacagaagatgtccgagaggtcattacacacctgcatcacagatatccgaaaaccacactgttttgcattggtacaagcataggtgccaatattgtggtcaagtatcttggagaagaaggcgagaatactcctatagcgggtgcagtatctatttgttctccatgggatctgttgataggtgacagatttatttcccgcaagcttgtacagcgtatttacgacaaagcacttgcaattggtctgaagggctatgcaaaattacatcaacctgtcttggcccgacttgcaaattgggaaggtattaaaaagtcacgatctatccgagagtttgaccaccatgctacttgtgttgtctcaagatatgagacagtggatacctactatcgccggtgcagtagtgctagttacgtcggaaatgtgtcagttcccttgctttgtatcaatgctttggatgatcctctttgcacaagggaggctattccttgggatgaatgcagggccaataagaacattgttttagcaactactccaaatggtggtcatcttgcattctttcaaggactaactgcgcggagactatggtgggttggagctacttctgagttcctttctgctcttcatgacagctcctacatgcataggcagaaggcaaatgatcatgttttgctctcgtctttggaatcctccattgataagagtccgtatgttaatctcatggaagatggaatggtagctgcggtaacaaaagatggccctagcaatgacgggtcacctttgaaccatgcagctgatgaacaattaagtaacgaggcgggcggtggacaacagaatgtggtatctgcattgaaccataatgaaaactccattggagtgggaaacgacagccctgcagagccagtaaaacagcaaggtgatgacatccacagcaataagcttcatgagataattgctcctgtcaagagatctatgagccaactgactcgataccaagggaggtcagtctggttgcttgcctacattgcttttgtaacatcctggccgctgcttggctccctagctttcatcaccttccggaaaaagtccaggaatccgttgcgagctaaatgaatcatacttatattatgttattacaattacatcatgcaacatcctctgagctacgaaggccatttttccccgggtcgtcacagctcctgtgtacagtatcatcaccgatcatcagcaaacattgggggcgcctggataaactgatactttgtattgtatttacaacaaaataatacgcatgataagcatctgtgtaattttactcggtaaatctggcttgatttgctgtttggcatctgtcgagcttaacattatttttaatccaaaggatgcgaaacgtgtggtgaatgaacggtaaaaactatcagatagttgaggcgggaattt

SEQ ID NO: 9109 - DNA, 268 bp, Zea mays
  Clone ID: MRT4577_108301C.1
gagttcacaggcgccccatggtaaccgcatggtttgagatttgagaatatatagagaactacggggcttggttacctatacagcgagtgcctgcatccatactttcataaagcaattgattgcctgccatttagagcttacgctgtggatacacatagatacatcagttatagaacaacatgtccttttccataatgttgcaacggatctagctgttttaacacctggtgctgtctgaccaacaggacttgggagaagatgatccgaa

SEQ ID NO: 9110 - DNA, 484 bp, Zea mays
  Clone ID: MRT4577_108302C.1
aggtatttttttttctttttttttttttttttcttctcgttcttttcgtttttcttttcctgttacagtacattaagctttggtaacactttttgtgagtgcaagtgcaccatagaaggttacctctgcggcggctaaagccacaacgggtggggctactgcgttaggttcttcccaaacaccttccagcccaccttgcctacggacctgggaccccccgaaaaggctggaaccttaccaactgcaaactgtgctgccctctggctgggcccggtggctttcttaaccccgttgctcccagccccgaccggtcgctgaggggcttccgcgggaaggaccgtgttaatctggtagcgggatatggcctgggggttggagacctgcttgctgggctcggggtccctcataaactgtttctgcttgtggccccaccttttctggatatgctctgggacgccggactctcccaagatctgggacctca

SEQ ID NO: 9111 - DNA, 491 bp, Zea mays
  unsure (1)..(491): unsure at all n locations
  Clone ID: MRT4577_108303C.1
tttgaactttttaaaaagnaaggnacaggccatcgntggtaggggggcagccactgatgacgatacatgcgcggcaccgtcaagagcgttccccagagcatatggtacggccctgatcgccccaagtaccttggcccgttctccgagcagacgcttttttttttgaccggcgagttccccggcttttgtgggggggacaccgnngncctctcggctggcccggngacgttcgcgcgcggccgggagctggaggtgatccactcccggtgggcgatgctgggcgcgctgggctgcgtgtttccggtgntcctggctnngtncggcgtccagttcggcgtggcggtgtggttcatggccggcgcgcgggtcttgtcggggggcgggctgggcttcctggggttcgccgtcctggtgcgcgcgctgtgcattcgggccgtctgggcgtgcccctgtggcgcttgtgggcctgggggggggcttccgtgtgtggg

SEQ ID NO: 9112 - DNA, 288 bp, Zea mays
  Clone ID: MRT4577_108304C.1
ggtccagacacgcctctgaggacacgtgggttcctaaatgtgccccatgggttaggtgacatggcaactacaaatgcctccacattgaccttgtattgcctgccaaggatgctgttttacgagtcgacagtgttggtaccgtatcatcagctcttttgatcagctattccattcaaacacggaagccagaccttatcattaatgctggcattactggtggcatcaatgccaacggggcaagcattggggatgtaatcgtggcatcagatctttcattccatgacaaga

SEQ ID NO: 9113 - DNA, 1135 bp, Zea mays
  Clone ID: MRT4577_108305C.1
atttccaccggcaccaaagaaactttttccccttcccgcagttgcttttctccccccggcaactgaccaatccgaattttgggcccctgtaaatcttgcaaaagggtaatgggggtgtccatttcctgctccactgaccgtagtaggcgaaccatggtggcatggtcctcataactaccgtgggaaaaattcagccgggccacattcatgcccgcatccaccatctgacgtatcacctctaccgaactactggcggggccaatggtggccacaattttggtgcgatgacttaggggtctcataaacttcaccgggttaatcagggctggcactggaattttagtccaacttactgaggaggaattaagggaatgttatggagccgccatcccctgggccgccaaccaagccgtagtccaggcattttgaaaattaaaaccgccggtaataccatctacgtcgaggatttccccggcaaaatataatccagggcaacaacggctagccatggtcttaaaatccacttccttgagggtaatgcccccacaggtgacaaattcttctttgaacacccctttacctttgatcaaaaagtcaatttattctttcaaaagcccgacagtaaaactaaatctaatcttgattatatcgagcaaactcttttaccaatgctacaacaaactccccaggaaatcactaatttactccggggtttaaatggggaatatattgccagtgggccggcgggggcacctagtcgtggtcgccctgatgtactgccaacgggacggaatttctatgcggtggatatccgggccattcccacagaaacggcttgggacattggccgtcgagccgctgaaaccctgattgaaaggtacacccaagaccacggagaatatccccaaactttagctatttctatttggggcacttccaccatgcgtactggcggggatgacattgcccaggttctggccctattgggagtacaaccagtgtgggatagcccttcccgtcgcattgttgattttgaaattttgcccaccactgtactaaaacgtccccgggtggatgtgaccatcagaatttctggattttttcgggatagtttccccaacttggtggaatttct

SEQ ID NO: 9114 - DNA, 343 bp, Zea mays
  Clone ID: MRT4577_108306C.1
ctcctgtctaccatctcggctagggcgaggtcgaatggccaagtcgccatgatgcagcatcccacgccgcagcacccgcagccggtcatggagctgcctccctctacgaaggctgttggctggcagctaccgtactgggataggatcccgccgtcgatggcactgatgtacggcgcaccgactacattgcagacttaagcgatgtggaggaagactttgccgaatgcacactaaaactaggcaccaaccacgcaacagtactacaccatactcaccgtgtcgcttcaggttccagctgcatgcgctatagaagactaagtccggacgctatcgatcaggcacc

SEQ ID NO: 9115 - DNA, 266 bp, Zea mays
  Clone ID: MRT4577_108307C.1
cgccgcgtacggggacggcaacgagcgccgcctcaccggccgccacgagaccgccgacatcaacaccttcgtctgggtaagcgcgtcgagaccatttacagctcttgctcccgcctcctctgtcgtcgcctaacaaaaacgggctcatcttgtcagggcgtcgcgaaccgcggggcgtcgccgcgggtgggccgcgacaccgagaaggaaggcaaaggtgagaggcggaagcgaaagcgatttttagttctttccccttgcgggtc

SEQ ID NO: 9116 - DNA, 190 bp, Zea mays
  unsure (1)..(190): unsure at all n locations
  Clone ID: MRT4577_108308C.1
gtgtgtggggtggttttttatntgagtnaaagataagaatgtttacatgtagatacaagagaagaatattattgttttttgagaacagatgagctttttggtaaaagtgaaattgaattaggtatagaaattatagtgttttagggggggggggggggatttttttttgatgtggggttgtgtttagtga

SEQ ID NO: 9117 - DNA, 224 bp, Zea mays
  Clone ID: MRT4577_108309C.1
tgaggaggccatggagctgccgccggggttccgcttccaccccacagacgaggagctcatcacgcactacctcgcctccagcagtagcagcctcgtcgcgtcgtcggtcagagctggcgcgtcgtcaaagcaggacgagtgggtgctgtgcaggggtgtcaagaagagcatcgagccgccatccgtgctcggcagcaagagggtctcgtcggttgcgtgcatgg

SEQ ID NO: 9118 - DNA, 498 bp, Zea mays
  Clone ID: MRT4577_10830C.1
tgcgaatgcaacggcttgccctaagcaactaacgaactggagctcggtgcaaggatcctctcgatccgaaaatacggtttgcgaaccgtgttgttttttcaatgtttaacacagtcttgggcatgaaaatcgtcatccttggtttttgcttcaagaaggacacaggtgacacgagagagacttcagcgattgatgtttgtaacaaattagttgcagacaagggcaagcttgacatatacgacccacaagttcttgaagaacagatcagaacagatctttccatggctaggtttgactgggaccaccctgttcctcttcagcagattaaagctgaaggtattttatagcaagtgaatgtcgtcttaaatgcttaccaggcaactaaagattcccacggcctatttgtcttaacctgatgggatgagtttaaatcctttgaccttcaagaaaattttttggcattttcagaaaccaagcttttttgtttcgatggttgga

SEQ ID NO: 9119 - DNA, 286 bp, Zea mays
  Clone ID: MRT4577_108310C.1
acaggggggggggggatttaaaatacccttttaataacatgtggttaaaggggtttcgtaaaaatgcaaaaaattaaaagattgtcttcagcaagggcaaagatagataaacttgtacatactacacatgggcatgggaaaccccattcaagtgcgacctttagcaaaaggggggggcaaattatatcacttcttgggcaggggggcacactggaaccaatgcagcaccttcgaattcgggtcctttttcggaaccacatttttaacagtaatttggatcgcacca

SEQ ID NO: 9120 - DNA, 414 bp, Zea mays
  Clone ID: MRT4577_108311C.1
caaaaaaaaccggccgacaaacaatggcatttcccaccaggaacataaaaaaaacggcaatccaggcttactaattcccaaagcaaatatagtagggggaacagggaaagtacccccctccgtttcaaaataaacaaattaacatccaaaacaaagggggggggagggaaccccccccccctccctttaaaactggagcaggggaaggatgcccccctcacaaacagggcccttgacgttcctaatgaagaaacggttcgggccatccaaaaacttcactttgaccggggtcacctgaccccgggagccggtcctgcccataacctttaccaaaaaagaaagcttaattggggggcccatgctctcgcttctcggggggacgggggccgacaacctctcggggacccaaagcaa

SEQ ID NO: 9121 - DNA, 285 bp, Zea mays
  Clone ID: MRT4577_108312C.1
tgtgccgccctttgtgtttttttttttttacatttgaacagttcatatagataaagacgagggcgatatttggcgcacaagaaataaacaccctgggtgttacacacaacccttcaacttgagtgttttttcataatggaaacataatgttccggccttttgcaatctcctgtgtgtggctttacaaatcaaaataacaaaacacccaccataaaacaaaaataaaacatcctcagaaagaacatattaacgtattaagcgtcctctaattaaacattggacctc

SEQ ID NO: 9122 - DNA, 409 bp, Zea mays
  Clone ID: MRT4577_108313C.1
cccgggtctccctcccttggttcttcttgcgtttttccttcctgcctgggcgggttgtgccacctgctcgcgccgtccgccgttcctcaggctgctcctctcgcctgggtgtggcgccgcgcccctcttgcgcccagccgccggcgccggcgcccctggctgggcccggggtcccggcggtcttcaaggtcctcttgttgggacgggggatggcggtgcacgacgcgatcggccgcctctccttccgcgtcgtgggcagcgcctgcggggcctcggcgctccacgctggcgctggtggtgtcctggccaccgcctggtgctgtggccggggcgactggctagctttctgtgcgtctggtcttggggagagacacatcgttttcgctggctttgttctgcctgcttcttc

SEQ ID NO: 9123 - DNA, 153 bp, Zea mays
  Clone ID: MRT4577_108314C.1
cttaccaggtccagacatagcaaggattgacagtactgtgagctctttcttgattctatgggtggaggatcttggcatagatctcgcaaaccagttaagtgaatgctcttaacttaactaaggtgaccaatatcactgatgccaatgctttat

SEQ ID NO: 9124 - DNA, 480 bp, Zea mays
  Clone ID: MRT4577_108315C.1
aagagcaacaaagaatgggtttgagatttcagtatggtacagaagcatggtgttcagcacccgctcagcatggggccgtgatattgaagcggcaagtaacaaatactttttttacaggagcatgggcgtacaccaaccggggaccacacacttatgttcaggcggtcactggaagaccagtgttatccgttttggtttatcctgccactatgagcatggctttcgtccgaagagttttacatgttttgtagatgctactctaaaatcatcatttccagctatggggtgataagtgaagaagtatcatcttggactacccacaacatgggtttaaagaataatttacacctatttatttcctcatcagtaaattggtgcaacctttgctggctccattatccttacaatgttcctgatgtgctcaatccccagaagtattacccttttgagataaagaaagcttatttgcagctggccaat

SEQ ID NO: 9125 - DNA, 335 bp, Zea mays
  Clone ID: MRT4577_108316C.1
caatcaaaatgtactttcttttttgattacatggaatgttgtaaacacagcaaggaaaggtacgggggaaagcggtggctattcccaaataacaatgtcggcaggaccggcctttgttagaaggcctagtaactaaaaggtaaacacctgtgaataaaagtggggggtttaaaaaggggcctgcagaacagcctttgggtacctcgacagtagactctttaataaggtgcttggttcagaaagcgtcaaaaggacttgtgtaaataaaaattgttgacaatagttcatgcggtgcctggggggggtggaacaagggcaaggcaacattctatagt

SEQ ID NO: 9126 - DNA, 226 bp, Zea mays
  Clone ID: MRT4577_108317C.1
atatcccaaacccacatggccccttccttggaaaccgaaccccggggccggcccatcccaatccaagttttaaaaaccttttttggcccaaacccgtctacccacattttttcaaatacctctttttttggttttccaggtttcaaaggggggaacccttttagcccccccctcccaggggaacccctggggtcgaaaaacccataaagaggggggggggttttcc

SEQ ID NO: 9127 - DNA, 385 bp, Zea mays
  Clone ID: MRT4577_108318C.1
attcaaaaagtaatggcttgtctcacaaacaaaacagcttgcacgtccatgtccacgccaacagggtcaacgcaccatggactgactgttggaacaacggcagattttttgtctaggggccaaggacccttccccccctgccaaggtgtatgtcactaggacgagaaccttaggccccatacactcctcccctaactcagaaagtgactcccaccggtcgggggaggacaatatacctccttgacatggtgacggcgaccacaatcacactcttcggcgcggcctaccgggcatgaaatacctgtgcctacccaatggtgtgggggagaccctcatcctccctaactaaggcttagaattgagcactcagcctacagctcttggg

SEQ ID NO: 9128 - DNA, 2484 bp, Zea mays
  Clone ID: MRT4577_108319C.1
cgaagtagaaggtcggagaatcaacgcaggctaagaaccagaagcggatgatttagtcaaagaaagtgcgccaagctattgaaggatgaagcgccgaagcggaagcgattgtcgatcacgtctttgtaggtcgaggtagagtcttatcaagcagagcacagaagatggaagaaggaggcaatgtacacgcaccaaactatagctgtatcagaaaccacacctgcattagattataaggttgtgtttatcaacagctaataagagataggacaagcagtacctagacctacaggaagggcagctggtacgccagcccgtcacggggctgtattgccgggccgccccccgcgcccgcggacgctgatgaggattcaggctcgaggcaccgccaggaaatcctttggtatgaaagtgtcattaagcatgaaaatggatggagccatgattctgaacctgacagaaacatacttcctaacaagaaaccttcatgctataaccgtcccactgagcctggctgttctccagagctaatgaaatttactgtggtggataccagtcttgttcaaggggaagaaccttccaaggtgaggtcactaagaaacctaccaacagattctagccatggttacatgtcttcaccacattgtggaggctctggaagtgacagttcagaggaacactcagattctgaggacagctctcggtcttgtgaacatataatcactgatgatcgaagcacaaccaatgcaaagtatgctagtgatgagagaaaaagtaagcccccaacagctgataaggtggattctagtgtaattcagaagtctgcttcctcaggcacattagtgtcgattaatggtcatatttcaactgatcaaggtttcagcacaatgaataatgtatcctcttcaaatgcaactattcttcctgttgatgttcaaatggtccatgctcctactacttccactgaaataagctttcagtttgatcaaaggcttaatgctgagtcccaaattttcttagcgcctttttcaaagaggaggaggttggtttcatccaagactgaaagaactggtcgcaagaataccaccaccattgaaaaccattactggaagcaagttgacgagccagtgcatcatgatgcatctggagaaaatgaagcaagcggacccaaagcttttgtatggggtgcaactcctagctcatcaactaacatttcctttgaagtgaataacaagaaaccgtactgcagacagcttgacaatgtgctccctaacgctgaaacaatggtttacaaggaaacatgccaaaataggcatgtcattgatcttaatatcccacaaatgccttctgattttgagtcaactgtgagctacatcgtccctccatctgacaatgcagaaaccacaatcagacctatacgtacttctggagctgaggagactgaccgtgttacatagaggcctcttgatgtgctctatgatgagttttcttttaactcaagaagacatagtagcagaagccgcccaccaacagctcgagctttggaagctcttgcctgcggctttcttggaaccaaacagaaaggcagggagacaagtttcccatcttcaagcaggagcagtcatgacctgttcggcgaccacgaagatcacctgatgttgcacggcccatcgtccgctgaagcaaagaagcacttctcgtttccctgatccacccatggatgtcaatgcatggcagatgaataattctccataccaaatgattcatagcagctcctccgataaatccacagaaaaaggtagccctgacttgtttggagcagacaagtctaccgataaaggagttcatgaattgtatggcataccttagatcacatgtaaggtcgatcatatcctgctatatcttttgattaatcaacctttattgaatggattggctgctggttaagagagtgaagtgatggtatggtcaagatgcagcctgcagttaagtcatgggtactgcttgttcaaactttagtttgttgttgagaaacaaatggaagaagcttatacagctgaggtttctgtttcatctatagttttgtgcatgtacattgcctaaatattccagcatcgatacttaacaagaatagatgacaccaacgaactacaaaaatgtgatcgacgattgctttcgcatcggcgcttcagcttccagtagcttgtcaaactttatgtgatagaatcatgtgcttcttgtcggaagcctgtgatgaatctttgaccttttcctttgagattttatggttaagctttactgagagttatactcttgctctttattacatgtactgtgtggcggtagctgaacaagtgtaatagcgcaccgtataagaaccatacctgaactagacctgagttgagactgtttctctgtcgacaagccagaagacctaatattataagcttacttgtgaaaatgtatatgttctttgctccgtgc

SEQ ID NO: 9129 - DNA, 412 bp, Zea mays
  Clone ID: MRT4577_10831C.1
ggccgcttttttttttttttttttaaacacaatttgtgacattaacgaacaaagggcacacagttttgcgcgcagggcacaacagcgcacataacagtgatagcacacagtgagagcgcatataaatcttaagtattaccctatagcaatcacaccagcagggggcgcagccacagtcgcaaaagaaaaacttgagacacacaacacacactatacatatgtgctcttacaggggccccagaatcacaataaccccaacactttgtgtttttgacaatatgttagggggggagaataggccctctcggcggggactctttttgacaggtaaatgctctttggcaagagggacacactcttaacatgggtggcacacagggtggtgctctaacacaggcaaacaaggtgtgcc

SEQ ID NO: 9130 - DNA, 464 bp, Zea mays
  Clone ID: MRT4577_108320C.1
gtgggggggggggtgtttactttttttggaagcacgtttaggcgaatgttgtaagatagctattacaccttatatgagagaactatgtgagcagggaactacacgcgtgagctctacactgctaggctatgaatggatatagcaccaacgcagggggggggggggttacatagggaaaccaagctcttatcctggatccaaagtgggtacccaacgttttatgctactctagcaccaaaacgatgatgccagggaatcatgaagacctgcaacgctagaatcctgatggagaggtaagaaaagcaacaggtggcggaccttgtatatcatacacagaaaggacaggcttacttaatgccttcaacatgtcaaatcgatctatgttgatcatgctacccgctttctggagcaaatccttagtatattaaacccggatgcccataagtgaccataacacaatattg

SEQ ID NO: 9131 - DNA, 223 bp, Zea mays
  Clone ID: MRT4577_108321C.1
aaaaaaaaaagggggttaatacgcgggcgaaccgacataaattgccacacacaccatacccaggcgaataaagactactggttacacaggtagccacaaaaacatattttgaccctctaatactcacagcacaaaacataacagggctagcatactggcgggggtatgaaggcctgattaaacaccaccagcactaaaagggggtttttttagggggggcttc

SEQ ID NO: 9132 - DNA, 361 bp, Zea mays
  unsure (1)..(361): unsure at all n locations
  Clone ID: MRT4577_108322C.1
cgacccacgcccgtccgcggtagcttggtnngtggggcccttcgcgccgcacagccgacnngccggcggcatacattcccctgctcctgccgaggagccgacgtcgnntgggcggcccctcgagnnttcctcagggnnnccggcgnncccactgggntnnccccgtcggccccnncaccaagggggngnncaggctcnnttcgtcaaccatcggttgttctcatgatcgnnaggtcctcagctgcggggcggcgctgaccggnnagcgtccccctgcaccgcnggntcgcggccccggggaacccangggncnctgccgctcttgtcncccgtagccacccgttcttacaannncctggca

SEQ ID NO: 9133 - DNA, 332 bp, Zea mays
  Clone ID: MRT4577_108323C.1
cctcctcagtcctcacagcatcctctcagtccttagcttccttccctcgccgccacccaccaaggaaaggaggatgtcttgctgcggcggcaactgcgggtgcggcgccggctgcaagtgcggcaacggctgcggcgggtgcaagatgttccccgacgtggaggccaccgccggcgccgccgccatggtcatgcccaccgcctcccacaaggggagctccggcgggttcgagacggccggggagaccggcggctgcgactgcaccacctgcaagtgcggcaccgcgtgcggctgctcctgctgcagctgcaactgagccggcgcccaggagg

SEQ ID NO: 9134 - DNA, 501 bp, Zea mays
  Clone ID: MRT4577_108324C.1
gtcggcgtctgcgagtgctacggcgggggcgcctgcgtctccagctgcgccgcggcgttcgccgccagccactgcagcctgagcgacgcgcaggtgggggagatgcgctgggtgcagggcagctacaggatctacgactactgcgtcgaccccaagcgcttggtcaacggccagaggccggtcgagtgcgacctgccgcagtactgaacggatcggagctccgatcctgaggtccttgttgcgtatgaatgagggagcaataatcatacgtatttactcaaacaacagtgcaaggggcctgccgggaattccaacaagccgacatatacccaccagaggttgggtcgagtcacgacgatcaacgaggccgcccgtctcactcgtctattttcatggataatgcaattggttttgtgctcattttactcttttaccgatatatattatatacatggactatgagtttttgagaataattaactcgtcttcgtcagttcttta

SEQ ID NO: 9135 - DNA, 405 bp, Zea mays
  Clone ID: MRT4577_108325C.1
cccacgcgtccgcccacgcgtccgcccacgcgtccgaaaaaaaaaaaaaaaaaaaaagaggaaaaaaaaaaaaaaaaaaaaaaaaaaaaaaaaaaaaaaaaaaaaaaaaaaaaaaaaaaaaaaaaaaaaaaaaaaaaaaaaaaaaaaaaaaaaaaaaaaaagggaaaaaaaaaaggggcataaaattaaaatgaacgaaagaaaaaaaaaaaaaagtaacaaaggaatgaaacaaaaaagaaagacaaaaacacaaatgtaaacaacacttaatgccgaaaaaacagatggaaaaaccccaatgatgaccagggtgaaaaaacgccctaaatcaagagggatctaaacaagtgcgtatcctaaaaggggattttcaaaatacttgtctaaagaattgggaaaatg

SEQ ID NO: 9136 - DNA, 1195 bp, Zea mays
  Clone ID: MRT4577_108326C.1
cattgggtacctcgaggccggccgggagctatgtatatatatataccaatccggagaaccgggggggaaaatgtcattaatgataatggagagaggagacgaggagctgaagctgctgggcatgtgggcgagcccgttcgtgctacgggtgcaactcgcgcttagcctcaagggcctgagctacgagtacgtggaggtggacatcagcaacaagagcgagctcctcctccactccaaccccgtccacaacaaggtccccgtgctcatccacaacgggaaccccgtctgtgagtcgcagctcatcctgcagtacatcgacgaggccttcgccgccaccggcccgtgcctcctcccggccgacccctacgaacgcgccgtcgctcgcttctgggccgcctacatcgacgacaaggtgctggcgtcttggatgcaggcctcgaggggcaagacagaggaggacagagccgagggaagaaatcagtggctcgtcgtggttgagacgctggagggagcgctgagggactgcgccgccggcaaggggatgatgatgcccttcttcggcggcgacagcgtcggctatgtggacgtggtgctcggcagcctgcttgggtgggtcagcgcaaaccaggaggtttggggcatagagtgcttccatccccgacgggctccgctgctggcagcgtgggcggaccgcttcgccgcactgcaaaccgtccagacggtggtgccccaagtcagcaggctggttgagctcggcaagatgttgagggcccgtcaatcggacggggccgctgctgcaagcaactgaaaccactcgctatttaggtcctaaaacttgttcatcgaacttatttagcgcactactggaaacagatactttgccgagtacaatttatggagcactcacgaaaataatcttggtcgagtgccactctttgcaaataatgacactcgatatagttgtcatttgccgactatcgggatctcagctaaatatgatgcatgacaaaaggtcattagcagctatctatacatgatggccgttatctataccgagtgtccacctttaagcactagataaattaaggctaggtttctacacatagtgtgtgacagttttctcgaagttgctcttatgtgcgaataatataacaatctagtgtgtttgaaataaaaaaaaaaaaaaaaagcggcc

SEQ ID NO: 9137 - DNA, 502 bp, Zea mays
  Clone ID: MRT4577_108327C.1
cggaccgcatggtcatgtggagactggtgacatcacattcgctgggatggaagcacacctcttggtccaacgtggacagactaccgagtgtgaagtctgatgagatgcacctacgaggcacttcaggcaggcttttgcgactgacaatgatagcttgaacgagaagaatgtttttttattggatctcaagcgagggcttgaggcctccaactccaaggatgaccgctggcaaggacgctgccaccttcacctccaacaccatcatgatgaaccaccctgcactgattggcagcgcttatgcccctgagctggactgccacacctcccacatcgctgtcaaggttgctgacctcattaccaagatcgacaggcgctctggcacggagcttgcgaaggagccacagatcctgaagaacggggatgctggaatgagggagatgacacccaccaagcccatggcgctgaatacattctcaccgaatcctacactctgtaggccagc

SEQ ID NO: 9138 - DNA, 174 bp, Zea mays
  Clone ID: MRT4577_108328C.1
atatggttgacacggggcatttttggttattcttattaaaatttgggccgaagcccgcccccaaatccagcttcgttgggtcgacgtttacccccgtacatacaaatgcgggcccgtgtaatgcacccttttttttttttgggccaatccaaatcagaatttttcctgcaaaaa

SEQ ID NO: 9139 - DNA, 251 bp, Zea mays
  Clone ID: MRT4577_108329C.1
aaactgaagcacagcctccgaagcagggcgcaggctcccacgtctcagcactaccttgccactctttccttgcggccaacaccgggagacgaagagacagcacatcactgcaactctcccatctcacgaattcacaaattagagcaagtacaataagggactcaagtctaattacatgtcatttttgcttacggggaagagagacataaaaaaatagaggtagggagctctcatgcaagagttaggggcta

SEQ ID NO: 9140 - DNA, 1008 bp, Zea mays
  Clone ID: MRT4577_10832C.1
ggtaccactcgcggctttccgggaggccgggagagcccattgcccacggcccggaacaggcgcggcggatataacacactccaccctctccgcgactccgcctcgcggcggagacgtgccgcggccattcatacggcgtggctaggagcactccttcgaatcggcatcgcaattcatacggctacaacgtctattctgtgggcacttcgtctccgatcgattcacggcaagagcgagagttcatggattcgacagggcccatgagggtctccatcaaagcccaccgccccgactggaaatcggagcttagaacaaattgcctcagaagagttagaaaggacagaaatgacttgctttggaagatcaggaagcagggactgcccggcaatgtcatggaaaaggtcagatctgctgtcaggagcgtcatatctgatgaggtagagaaactcaaacagtccaatacaggaaacgaggaccaagaaatggatgtcatatgggagtatcaaggactgcatgctgctaagcctgctgaaattgaaagtgaagatatattgcttgaaatggaaagacttgtttgtgaagatattagagaagaagtaatcagaaaacaactagaggcacttgatgaggaagatgcatatttagctcaaagtgttttggatcatatgcaactaaatgacattgaggctgccgaaactgctaagctctggtgtccagtatgcaagcaaggagatctacgagaaacacgtaatctcatatactgtactctctgtaatctacggcttgaccttggagaagataagatgacgctggagttcttacgagaacggttggccaatgcacatatggatcactttgacagaggatgcaaatcagcaccccaggttctgtttacagactatgtttggcctgactgcgctctacatacagtgtgcagaatgcagtacatttgatatcgtggtataaccaacaagatgctgatatgaatcaaccctttaacggaggaaa

SEQ ID NO: 9141 - DNA, 326 bp, Zea mays
  Clone ID: MRT4577_108330C.1
atcaaacacacataaccactcacagtcttcttaatatataactgtaacatcagggcgactattaacattttattcaacttcaacaagaacccccacataacccttcaatacaaactcataatcagccaccaactatatatgccaattcttagaaactacttatttcactaactaaaagccctcttcaccatatatagagattaactatatgagtacaccccaatatcattaagtacaacagcacaaatttcttaccattcaaccaccaaattcttctaccactacatataatatataggtgacataaacatcttattatccttgca

SEQ ID NO: 9142 - DNA, 507 bp, Zea mays
  Clone ID: MRT4577_108331C.1
gtgttcccgctggagctgtagatatgccgtacttcacgagaggagagggaatgcttactgttattattctggtcacaagaaacattaactggtggcatggaaacggaggatgccgttgcttgaggagatccccttgtcgtgggggtgtcttcgccggtcctctctgcgctgatgaccatagatactccgctaaagcttctttggcgcgtcgatgtcgtcagtcatttccgcagattccccatagagcgacttcccgcgtcgctgatatccactcttgtgaatcgtgcgaactcaattagtgtagattcctccagaaagaaaccgacaagctccccctgatatttgtaatagggagccatatctgaccgctagtggagtctgtgtacgatttgatcgaggctacgacggagaccggttgctgactcaggcctgatccgaatactcaccgccggtgaccaatgaaaagcacccgaaccctgatggtgctctcagggggtatgagcaccg

SEQ ID NO: 9143 - DNA, 862 bp, Zea mays
  Clone ID: MRT4577_108333C.1
tgggtaccctcgggtctcggccgggctatccctgttggtcgcccctcctggagctcgccgccgccctctcgctttattttcccgaccacaacgccaccgcccgacgcaaagttgccgctccctgagtctcgacaaccgagcaagccttctagaagttaaggaagcagcagaaccatggcatcccgtttctggggacagggggacagtgagtctgaggaggaggaggtggaagaagttgagtcagaacagggcagtgatagtgatgatgatggaggtcgaggtggtgcgggacgcggtgcccaaaaccgatatttgaagaatcaagaagatgacagcgatgagtctgatacaggtcaccgtgtgatccgctccctgagggacaagcgcaacgaggagatgagatctattgttgatcagatgcgtaatgcaatgaagatcaatgactgggtgagcttgcaggagagttttgagaagcttaacaaacatcttgagaaggttgttcgtgtcaatgaatctactgaggtaccaaaaatgtatatcaaagctcttgtgttgctggaggacttccttgccgaagcccttgcaaacaaggaggccaggaagaagatgagcagcagcaattcgaaggcactcaatgcgatgaggcaaaaactcaagaagaacaacaagcagtatgaagagcagatccagaagtgcagggagcatccagagagttttgaagatgaagctgcagatgataaagatgtggatgatgacgatgctgatgaaagtgatgcagagattgaagatcctgataaaatagctatgtcagaatcagaagaggaacaagatgaagaggatgatgataaggatggttgggaac

SEQ ID NO: 9144 - DNA, 1013 bp, Zea mays
  Clone ID: MRT4577_108334C.1
gccggccgggctcctaaaatgaaaaaaagcacggcccgacacggctgatttaaaaacgggctagcacggcacgaatcgcgtgctgggccgtgctcgaaatgttggcccgtcgtgctatgaggcccggcacgtcgctgtgggccgggttcgtgccggcccggcacgaaacagcacgttttctccaccgcacacccagtcacaggctcactcagtctaccggctaccgcacgcgattaggttttcctgtttcctatcacttcgctccaccggccgccgcaatccattcatctactacacgcccagccgcccagcttgctgctcgcctgcacctacgcccagcggcctgctcgtacgcccagcggccagcggccagcttgctgctcctgcgcccagcggccaacagtggatgtggatgagtgcacgagctcccgacggccaacgcatttctttctctcgtactcccgacgaccagcagcggatgtcggatgagatcctgcgcagccgctcggctggacttctggagaccgctgggcgctgggcgctggagcgcagccgcagcccgcagcgtccacgagctggactgcgcagccgcaggcgcagcgtccacggcgacaccttctccgtctgcgtcgcgtcttggactctgcgtcctctgtgtgctgcgagcctgcgactctgcgtctccgccgcgagccagcgaggtatgtcatactcatatgtgcctactgccgatgcgcgttagcgacttagcggcccgatgcgtcgcgtcttggactccatgtgcgttagcggcccgatgcgtcgcagtaagtgcttgatccttcgattctcatccaacctctgtttcccacatcgtgcctcattgatgatgcgattaaacggtgatgcgattaaaccaggcaacatcactatttattacccctctcaggctctctgcagtctatctcggcactaaccaagccaccagtgagtagtgaccactgactagccaccatggggaaggaagagggcag

SEQ ID NO: 9145 - DNA, 548 bp, Zea mays
  Clone ID: MRT4577_108335C.1
gctcggaattcggctcgaggcagtttctacttcatttgttccacatccgacttgtacctcaggggggactgttagaatttcctgacgcagtgttaaattcaaagcgtcttgatttatataacttatacaaagaggtggtataccgaggtggcttttatgtaggcaatggcataaattggaaaggtcaaatcttttcaaagatgcacaaccatacagttacaaacaaaatgacgtggtgctctgggtgactgggtgaactgtggattatgtggagaatgggcccaccttggctgcgatagacggaaagggctgtctactttcaaggactactcgaaggcggatgggatggaatacatatgtccccagtgtagccttgcgaaatacaaaccgccgttgcctgcaccatgaaatatgttgattaacttctgttactttcttaagggtgatggtttggatagaaattagtggctaaggatgtgtagtgttgacctgtactattgaatatgatcctgtacgatttgtacaatctttataaaatttctgatttc

SEQ ID NO: 9146 - DNA, 200 bp, Zea mays
  Clone ID: MRT4577_108336C.1
taccataacgttagctcactactaacttcatattcatcaacatcatacatacatctatctagctagacacacgtgataggctctccactcacttcatcatttctttcaacctcaccatcactttccccgtcacaataccatttactgagctcctgattcttctaacaccttgttcatccacactagtcctaataaacacc

SEQ ID NO: 9147 - DNA, 2578 bp, Zea mays
  Clone ID: MRT4577_108337C.1
cccccgcgtccgcggccgcggggctgccaacctacaagacctacaaggccaagcgacatcccaatccgagcgtttcatctcgccctctgctctgccccctcacaccttctcgccaggctcagtggtgacatcagctgaggtccggtagtttgcctctgcagccatgcctcaaatccagaacaccatgcggcaaaactgcacactcctagctgttctttgtggggagtttgctgagaagcggcagacaccagcttccctggcgccagacacaaagcggctgcggctgtcataccctttccctgagctcgcttcgtctgggagactggaggtgcacacgctaatcaatcccactttggagcaatttagagaggcacagcaggcggtgcatcctgtcttcttgtatcttcaggggcagcagcaagagaatgaggaggagattggcacgcttgtctggggtgatacagatttatctgacccgcagatgtttgtctcactcatcaccccaccatttccgaccatggtttatttagaggttcccactggggaaaagcttgcccagtcacttcattcaaaggggataccatatgtggtatattggaggaatctattttcatcttatacagcatctcattttcgtcatgcgttaatgtcagtcattcagagttcctgcagccatacatgggatgcatttcaacttgcacatgcctccttccgactatactgtgtaagaaataatcatgtacaaagtgttaagcttggcccctgcctacttggggatgctccaaaaacagatgtcatccctgctggggatgaagtgaatgaggaacaaggttgttctgaaggttttccagatataagaatatatgatgaagatgtgagcatgaaatttcttctctgtggagtaccatgcaccctggatgcatgtttgttgggggcactagaagatggtttgaatgcgctcttgaatatcgagattcgtgcaagtaaacttcagaaccgagccagtgctcatccacctcttcaagctgaagatcttccacatggatttgttacaatgcgctgcgatatcacaacttgcagttctgcacatgtgtcgtttcttgtttcatgcagtgcccaaacttgttttgatgatcagcttctagggagccgtatcaagaatgaaattattgagaagaggcagttagttcgtgttctattgaataatgaggataacaagccatcttcatatgagcctttgccttccatgtgcgtggcttgcggagcttctacttttgaagtctggataaccatgccaaaatgggcagcacaggttttgaaacatcttgcgccagaaatctcctacagaagcttggttgcacttggaattgcttgggtaaatggtacaccagtgtcctcatttgataggcaggatgcagaccggcttcttttcttttgctctaaccagtgcggagatcaagctattcaaaatggctcatatgctcatgtatccagctggtcagcaccccttaccaaggatagaaccactggaagtctcgagtcaaaacagatgtcatttggtgcaaaaggagttgtaggggataatacgatctccctatcatcattgaaaccaaggttaaagcctgcaacaatgagaccccttccccactctcgcaagcaacaaatgcatccctttatggggtttcctcagtccatcattcacgatgctagtcaagttaagcctagcttgccagcccctcctgtgaagcacaacgcagtacctgttaccgcagtgacaccgagaaaatcatcatctgggtcaccatcatcctggtcacgtgttcagctaccaatcccattgaatcctctgccaataaagaaacatgagtgcaatcggttgcctatccacatttgctctgaagaagacttcttgaaagatgtcatgcagtttctacttcagaggggccacatccgacttgtacctcagggaggactggcagaatttcctgacgcagtgttaaattcaaagcgtcttgatttatataacttatacaaagaggtggtataccgaggtggcttttatgtaggcaatggcataaattggaaaggtcaaatcttttcaaagatgcacaaccatacagttacaaacaaaatgacgggtgttgggaacaccctaaaaaggcattatgagacgtacttgcttgaatatgaacttgcacatgacgatattgatggggaatgttgcttgatttgccacagtggtgctctgggtgactgggtgaactgtggattatgtggagaatgggcccaccttggctgcgatagacggaaagagctaggcactttcaaggactactcgaaggcagatgggatggaatacatatgtccccagtgtagccttgcgaaatacaagccgccgttgcctgcaccatgaaatatgttgattaacttctgttactttcttaagggtgatggtttggatagaaattagtggctaaggatgtgtagtgttgacctgtactattgaatatgatcctgtacgatttgtacattttttttataaaatttctgatttccgaaaaaaaaaaaaaaaaaaaaa

SEQ ID NO: 9148 - DNA, 349 bp, Zea mays
  unsure (1)..(349): unsure at all n locations
  Clone ID: MRT4577_108338C.1
gacccaggcgacnanatagccttaacctcgnccaagggacgattttgtttccatgagcgnggngatcctgaacggctgcgctgttcacaatttcggggcggacaaacccccctacccgcgcagcctggacaccacaaattgctgcctggacgccaacacctacatagtgctggcccaatctaagttataggcgggctcaaaacctacatacttatcgtcggttccatccattcttccaccaaacaaataatgttcgcaaacgatttattttcattcaagccacgtccctcgctgctattgaggctcccgggacagaagcggcagcgacaaaggtgaaacctttgctgac

SEQ ID NO: 9149 - DNA, 476 bp, Zea mays
  Clone ID: MRT4577_108339C.1
gggccccccctcgagttttttttttttttttttttttttttttttttttttttttttttttttttttttttttttttttttttttttttttttttttttttttaaaaggccggcctaagtttgcccccccaaatgaaaaacccccgggggccgggttttgaaaaataaaaacccaacaggggggggcaggcggcccacccttggaaaacctcccccagacaaacaggggggggaatcccccaaaaggccccccccggttttttgccctttttggggggccggggaaaaaaacttttccctttaaagcgggaaaaggcccttatggattagggggatcgaaaccccttttggtttctacaaggggctaagtggccagggggggcccttttttccccatcaaaaaatctttggaacggggagcccccagtcccattcgaaaaagcggtaaaacaacccagggggcccctttttttttt

SEQ ID NO: 9150 - DNA, 460 bp, Zea mays
  Clone ID: MRT4577_10833C.1
gtgcagttaatggaatttactttccccaaaaaaaaaaaaaaaaaaaaaaaaaaaaaaaaaaaaaaaaaaaaaaaagaaaaaaaaaaaaaaggggaggccatagttaagggaacgctgcctgcggcgcgcgttgcctgtgctttccgagcctcctttatttcggtgttgctgggccttcaatttgactggcgctggggacgtgggaacacccctggcggtgaccctgcttgttcctggccgaacttaatctcacttgttcggccgctggcttcccgccggggaggccggaaaagggccggcttgccccgtcctgcccaccctgagcgccacctgcctggcccgttgggccgacgcatcaggcgcggctgaggtgcgggcgccgcggagggtgtgcgctttaagtgcgaccgttttgccggcctcttctttcccgcttccttcctttctttttcgtcccttt

SEQ ID NO: 9151 - DNA, 280 bp, Zea mays
  Clone ID: MRT4577_108340C.1
accaaagaggcctaagcccacaagtagaggggctgctatcccagacaccagcattcagccagttgctaagccggtaccgagaggtggccataccaggagtacacgagccttaccaccaaccggagacccccgaactgttgccacagctccttgtatcggactcgaacctggcttaacaaagccgtattggataccgaaaaaagcaaaggcaaggttctaagttgacggtaggaagatagcttcctttcagcgtaacgataagcacaccatgttccttacg

SEQ ID NO: 9152 - DNA, 386 bp, Zea mays
  Clone ID: MRT4577_108341C.1
gacggatgcatatactccagagcgcacaacaacccaatcgacaccatgagggagctgctcgcgggccactgtctgctggctcacgatgccagcaccaccaacacgcatacaagccgcagctgaagctgccagccaccgacgccggttcatctaccggcggcggtacatatgacacctgcagttgacgtgccacctaagatgcatgtaccaccgacggtccacgtgacgccgcctgtacacctgccacaggcggtccatgtggccgtcggcagttcatatggcgaccgctacatgcgactacgctacacaaccggctcggtctgagtcttatcctcagtcacacgcatgcccgtgccaacagccgcatacaagcctgagccagctgc

SEQ ID NO: 9153 - DNA, 367 bp, Zea mays
  unsure (1)..(367): unsure at all n locations
  Clone ID: MRT4577_108342C.1
ctcgagccgccggaatcccattctactccggcaccatggcggngatttaccgatccggaggggggagntggaggaggacnanggnggggaanncaattttttccgcacgaaaaaagggggggaaggagaggaagagaaaggaggcaagaagggggggggggaccggggcgacaacgacgggaacaaggcccgggccacgcccaccacccgcgaccgcaaacccgcgcgggagagccacacccgcaaagccaacgagcgcccgacagaggcccaaggaaggagacagacagaaagaggaccgcggggtttaggggaccaacgccccccacccggaagaaaaaaattttttttttttcccccccccccc

SEQ ID NO: 9154 - DNA, 276 bp, Zea mays
  Clone ID: MRT4577_108343C.1
gcttcccagatctcagccatagcgatctcccagatctcactcttattcctggccatacttctactgagccgcgccttcgacgccgtcccagctgcgctagcgtacttgtgccgacgtagcaggttcttaccgaagccaccttcgagaaggaggtaaggtaaggaccgtgagctccctctactgaggcctagaccctccgagtggggtcacgtgcttgaagcttgcatcatgactatgaaagacttggtagctagtgttaagagagctaaatctatc

SEQ ID NO: 9155 - DNA, 248 bp, Zea mays
  unsure (1)..(248): unsure at all n locations
  Clone ID: MRT4577_108344C.1
gnntttntttnnnggggggnggggncggggggnntttttcnttgtttttggtnncngatttngttttttcnccccctttgggggaaaaaaactgaggggagcttgcttttactgtacactggtgggacggggtgggcaacgcccagcaggatcaaccaaaatgggctgggggcagaggcaacagtctcccgggaaatttaccactaccatttttttcaaatttcaggagaccccgggaacgttggggg

SEQ ID NO: 9156 - DNA, 754 bp, Zea mays
  Clone ID: MRT4577_108345C.1
cattgggtacctcgaggccggcccgtgtacatggagaagctggggcagatcgacaccaccaagctgctgcaggtcaccagcatggaccgctacgtgcagtaccacgtgagggagttcgagcgcgccttcgccgtcaagttccccgcctgctccatctccgccaagaagcacgtcgaccagagcaccaccatccttgacgtctccggcgtggggtacaagaacttcaacaaggctgcgagggacctcatcggacgcctccagaagatcgacggagacaactaccctgagacgctgtgccggatgttcatcatcaacgcggggcaagggttcaggctgctctggaacaccgtcaagtcgttcctggaccccaagaccacggccaagatccatgtccttggcaacaagtaccagagcaagctcctggaagtgaccgatgccagcgagctgcccgagttcttcggcggcacttgcaactgcgagggcggctgcatgcgctccgacaaagggccatggaaggaccctgagatcctcaagatggtccaatgcggcatggggagatgcgggatgaatagcggggaccctcgcgacgccgacgagaagctcatcaccgaggacgaaatagtgcccgttcccaagaagcaagactccatgcgccgcaacgccgtggattcccccaaggtggcgcgcgagaagatcgagcacccgcagatgtccccgctccacgagatgaaagacgccagcgacccggatcctg

SEQ ID NO: 9157 - DNA, 551 bp, Zea mays
  Clone ID: MRT4577_108346C.1
cccattctttctttgactcttggtttgaaccaaaacaactggtggacgtgcgcagagaaaattgaaaaaaagcattatgatggattccatatttatcaaccgaaaaaatggtgcgcaaaaagcgcggctaccccaaaggggaaatgaaccgtatggcccgtggctgtggagatgtggaacccaggggaaaaaagcgccccaaccaaggggggcggcgaccccaaaaaactgaataaaaaccaaggccaaaaaaaaaaaaaccccccgacggccaaacaggtacaaagccctgttaacagagggagaacccaccgcccaaaaaaacccaacacctgctagaaacccgaccccaccgaacataaagccccacaaggtactcgttggtgggggaagacgcccaataaaaaaaaaaaagggcgggagaaaaagtgaaacccccccacaccaaaaaaaagcagccccccggaaccgcccacgctagaaaaaaaaacaaaccccccaattgaatttggacccccccgaggggagcaaaaaaaaggggggggggaggg

SEQ ID NO: 9158 - DNA, 1456 bp, Zea mays
  Clone ID: MRT4577_108347C.1
atgggtgggtccggagccgccacatgtccagagaaagtgatataccccaaggcctcaacagtgagtccggacccccatgggaaggtaccggacacctggatatacagtccggacctccaaggcagcgtgctcagtccacgatatgcgggccgtgctgttattcaccattactcgcacattttggctatcaatgttgcatggactgtggtcatcaagactcccgatgattactcaggcgttactagcattaattactcacataatgtactccttccattatgctcctgggcccacatgtcggggctcagcatccttatttatggcattcacgtttttgtcatgcaagctttggctgtcttatgcgatcatgctgaggatcttcacgtgcacatccttgaggaggatgacactatagtcactcgaaagaccaagagacagagggttgcaaaatcctttggtaatgactttatagtgtaccttgtgaaagacacaccaactaccattagtgaggcatattcctctcctgatgctgacttatggaaggaagcagtaaggagtgagatggaatctgttatgtctaatggaacttgggagggtcgttgaccgtccttatggttgtcaacctataggttgcaaatggatcttcaagaaaaagcttaggcctgatggtacaattgagaggtacaaggcaaggcttcgtggccaaggatatacccaaaaagagggtgaagatttctttgatacctactcatcagtggctcgattgactacaattcgcacattaatagccgtggcagcctcttatggtcttatcatacatcagatggatattaagacaactttcctaaatggagagttggatgaggagatctacatggataagccagaagggttcattgcggatggtcaagagaacaaggtgtgcaagttgataaaatcattgtatggcctaaaacaagcacctaagcaatggcatgaaaagtttgataatactcttacagctactggttttgctgtaaatgaatctgacacgtgtgtaaattatcgatatggtggggatttgggagaagctgatgtcattctaaacatcaagcttgttagagaaggtgatggtggggtaactttgttacaatctcactatgtgaaaaaggtattgagtcgctttggttttagtgactgtgatcctgctccaacaccttatgaccctagcatgctattgagaaagaatcagagaatagcaagggatcaattgacatactcccagatcattggctcgctcatgtaccttgcaagtgcaacaaggccagacatctcatgcgctgtgagtaagctaagtcgaaacccaaaagtgctggaaggctattgtgatgccaactcgatttctgatgctgatgagctttatgccacaagcggatatgcgtttctgtttggaggtggcgctgtgaaagttgcctag

SEQ ID NO: 9159 - DNA, 410 bp, Zea mays
  Clone ID: MRT4577_108348C.1
aaaaaaaaaaaaaaaaaaaaaaaaaaaaatatttaaaaaaaaaaaaaaaaaaaaacacgtgggaaacaaaaaaatagtttgccggacaaaaaaacctaaaataaaaaaaaactaaacaatattattccgccccccctttttaaaaatcccatttttccacccccacccttttttcttttaaaattttcttttttccccctaaattttattcccttccccgctttttccaacccccacttttaaaaaacccttttcttccccaacttatttccctttcaaaaaattccccttttcaacacttgaatattaaacaaaatgccccaacccattcccctttccaaaaatttccccaccccaaattccaaatgacccccccctttattcctactttaaacccccctttttttttt

SEQ ID NO: 9160 - DNA, 382 bp, Zea mays
  Clone ID: MRT4577_108349C.1
tagtgagtggaacatggtggacaaacactgcaggaggttgctacacacacgtaggacccaggcctggcattctggaacggctgctaggcagttactgtggacggacctgcattgcttggagggctattgcgaagtggtaacacaccatacatgcactgcaacagacagcacagcatgggatgacggtctgtggacatggggttttagtggatatgacccttgaccctgacagggcatttgaagctgctggtctcgaaatgaaagtgcgccaagatactgcatatcatgctggcctttatcaaactgatgcagagacagaagcctttgacgcactgcttcaggaactttcaagaaccaggctgaaagctgttacaaccgactg

SEQ ID NO: 9161 - DNA, 290 bp, Zea mays
  unsure (1)..(290): unsure at all n locations
  Clone ID: MRT4577_10834C.1
ctgggctcatgcgctgcggtagtaaaacgccaggcccgcgtacacgggggctggggctggtgatgcatcaatgaccgccacacgacttcttacccgcccctacgccccaaaacgaggtaggagccccagaccatcgggcggcccttcagggcaccgacgacggggaccacatcgagcccccccccccgccggtatccgaccccgggggggggaggggctgntccttctaccgcgccggcggcctcgttctcggccccgcatggctcttgccctgcgtacccctcctcccc

SEQ ID NO: 9162 - DNA, 393 bp, Zea mays
  Clone ID: MRT4577_108350C.1
tgatactttttttttttttttttttttttttttttggggtttcttttttgttttttttttgttcacttttttttagggccaaaaaatttcaaacaaccggggggggagaggaacacggacccttgaggtccaatacaagaaacccacacccggcctggggaggccagggccatgtaaatttttactgacacccggggcgggaatatgtcacgcttggtaaaacggtcaaacaaacacacttttttctttggggcccagaccttgaggagggggggggctttttccacccccaaccggggcccttggaccacccgttggacccggacttagcgtttaaaaagaaaaaacatgccctaaaaacgggggcgggtgaaaatttaatttttggccccc

SEQ ID NO: 9163 - DNA, 450 bp, Zea mays
  unsure (1)..(450): unsure at all n locations
  Clone ID: MRT4577_108351C.1
ggcannggcggcccgaggnagaaagggcccgcgnnggnngggcgcaccnncgggnaggggcacaaggnncccccnnggcgccgcgccttggnggnnngcggagnncgcgcacggcgcgccgcgggggggggggggaccccgnnggnnggacccccggggaaggaaaccggcgcggnncgganncgacgnngcnncgccgnngcacnncacccggnagggggaggnngancaacnnccgnngancanncgcgcccgcaagcccgnnngccgnnncgacgcgcccacgccaccggcggggnnnggggcaccgcgcacgcggcgacggcgccgnngcnncaaccggcccngccnncngcnngcgagaaaggagggcccgggccgcacccagaagaaaggaggaggggggaccgncgagccagcngccggncccaggcagggcgcacaccgggc

SEQ ID NO: 9164 - DNA, 289 bp, Zea mays
  Clone ID: MRT4577_108352C.1
ccaccgatcaccaaagaccggggggcttttttttttttaaagggtcacttaaaaccccgcagggatcaccacactctttgggggcttttgctagctttacaagcctccaaaactttgggggaagttcaaggggggtaaaaactccccccccaaatgaacccaagatgtggaacccactttttttcaatgaatctcacaagggactagggctaaactcaaacgaggggccctctttgggttgctctcttttttggggcacttgtggtggggtgagggggctaaaatttgg

SEQ ID NO: 9165 - DNA, 231 bp, Zea mays
  unsure (1)..(231): unsure at all n locations
  Clone ID: MRT4577_108353C.1
ttgttcgctatcggtctctcgcctgtattagccctgggcggggtttaccggccggtttgggctggcttccccaacaacccgactcggtggcggggcctcgtggtgccacagggtcccggccgggcggggctcttacccttccacgcggggggggggggggaacttgggtccggtccggcgctgggggcgccttttccggcttccntctcggcggggtgggcgcctgcctct

SEQ ID NO: 9166 - DNA, 188 bp, Zea mays
  Clone ID: MRT4577_108354C.1
ttttttttttttttttttttttctatttcttcgggtattttttgttttttttttcttttggggaaaaaagtcattcttcgcctgttttattcctaaacaattggtcccatgcgatggcattcccactttattattgggcccaacaccaatgcttttttctggatggcaacacccacaaagggctcctt

SEQ ID NO: 9167 - DNA, 145 bp, Zea mays
  Clone ID: MRT4577_108355C.1
gacgcactcgtccgctgacgcgtgctctcgactcggcactatgcttttatcaatcaataacctactccacgtcccgttctatttactatgcatcggcgactacaatttcaacaagaacatgttccatcttatcaacacccatgcc

SEQ ID NO: 9168 - DNA, 313 bp, Zea mays
  unsure (1)..(313): unsure at all n locations
  Clone ID: MRT4577_108356C.1
ctgttnaaaagtgcctgaaggatgccaatatggacaagagcaccgtccatgacggaagacttgttggtagctccactaggatccccaaggtgcatcaactgctccaggacttcttcaacggcaaggagctgtgcaagaacatcaaccccgatgaggctgtctcctatagtgctactgtccaagctgccatctctgagcggtgagaggcaatgataaagtgcaggacctgtctttgctgagacgtcacccctctatccctgggtctgtatactgctttatgatttattacagtgcttattccgaagaacaccac

SEQ ID NO: 9169 - DNA, 256 bp, Zea mays
  unsure (1)..(256): unsure at all n locations
  Clone ID: MRT4577_108357C.1
cccacagcgggcgaccacgcgtgcgccaacgcgggcggcaacgcggccgacgaaaaaaaggggaaggaaagcaacaagagcaacggggccgcccgaacanaggagcaaagccaaggcacacgaaaacgcgacgcacggaggaggccaaacgggcaaggaaaaaaaagcgcaacgccgaagaaagacaacacaaggagagggaaaaccacggcggcacccaagagagagagcgggggacgcgcaacaaaaagcacaa

SEQ ID NO: 9170 - DNA, 958 bp, Zea mays
  Clone ID: MRT4577_108358C.1
agctagatgaatgtggtttattacttcatgggtctgtagtgcatatagtcttataggcgatcgatgataagcaataataacaacaaggtagctgaagagcttggcaaaaaacaaaaacaaaaatccataccacacactcttttttttttttttttttgaaaacaaatgaaatgcgttcttacttccagttccagcctattgacacagccaccagcagcgaaagcatctctctctctctctcttgcactcagagctggagcaacgggccgggggctggctttcttcccagccagatcttaactactagctagacacacacacacacgcacgtccatatgaccatatgtgaccaataaccaatcgcatatataggggctactactttggtggggtggtggcaggcaatggtgcatgggtgaccggcggcagcaggctgctggctaggctacacaccgtacatgtgagagagcctccggaggagtgccaccttcagctccagcgcgcagatgtactcggcggtccgccggagcaccacgtcgacgtctgccttccggcggcgagcgcccgctggcacgatcttcttcagctcccgcagccgcctcagcaccatgagctggaacggccgccttctcctcagtgacaccatccctctgctggttctccctccttttcctgctagtgtcaccatggactctatctctctgtgtctgtctgtctgtctggctctctctctctctagttttagcaagtgttgagctgtattaggcttgtggtggtgtgtgtggtgcgcatggggagtgcatatttatagtgtgagaacctgagctgagaggaggaggggcgcgtgcgatttcacttggccatgtgggagaggaggaactaggttctaagctgtatgtagactgagctgtaaggaggtatgcttggaggagctatcactgaccatcagtttttgttt

SEQ ID NO: 9171 - DNA, 769 bp, Zea mays
  unsure (1)..(769): unsure at all n locations
  Clone ID: MRT4577_108359C.1
gngccccatagtacgatctattcgggtaggcatctacaaaacgaagaacaagtaagaacgattgatattaagcagtgaaacacaagaaacatccaggcaaggaagggaagcacagacctctcagggtatcaatgtatgttttttcgagaggaattgtgatatgtgtgtgttgcgcagagcgtctgtagtgcagcctactgcggaggcggtgtctattcgatgtggtgaacgatgaagggaagtccattatggatttgtcgcctgctttgggacgggtattattgcaaatatatatttgaaagcagcaacgcaattccggtcagtgtgcgccgacaagtcgactaaataatgtaacacaattaagacgacataccgtgtgcgcttgcaaggcgcctgcgtcgccttgtttcatacgaacgggcaacacgtgcatacggagcatcagccatgggcacaccgcgacatgtaccacgtgacacacacacctagcacttgtagaacatgaatagcgcgcacgtgaactgtaatagagaggcccccacataaaaaaacatgtaccatacacctttcaaacaaatgtaaggaaactgaatcaatggttaattgtatcatatacatactaaaacatatagcaaacttaggcaaacaattagccacatgcgcataaaattcacgaagcaagaacatgtaaaaacgccaagtaacaaaccctagaaaatacgcgagaatacaattcagaatttatttacaaaatatttagatcgtacca

SEQ ID NO: 9172 - DNA, 642 bp, Zea mays
  Clone ID: MRT4577_10835C.1
cgggactcgtggggaaaagctatatcagcagcattattgcagtctgctcattacgatcagttgaatgtggtactgtctactgcgtgtttgaattgcaagctatgtgtgcttcttttggctcttttcctccggttgtggctttttgcttacatgaaactctcgagtagacaatctaacgctaattgattcaggtgtagagccttcctcggatacctggctccttttggctttcatagaactgcagctgcaagtttatatcattgcatctcagtatgcggagtgaataagctgtatacacaaccataatgacttcaatatccaactgtttaatatgatatcagtattgatggaccccacacgcacatagaaacggccacttaagattggacattccctctgttttcacaactactctgtagatcaaaggttcttagcatgctgtatgtatagttcttgttctattttaataatgaaatgcatgtctagatcttttttgtagtagagattatgtaatgtgtggatgacctggaaactgcacaaattttgtttttgagtatttgttttttatgcttttgatcaaaatttctatatatgtagcttctggacaaggttataacgaaacttgatggaactgcctgcaca

SEQ ID NO: 9173 - DNA, 340 bp, Zea mays
  unsure (1)..(340): unsure at all n locations
  Clone ID: MRT4577_108360C.1
naaaaaaaaaaaaaaaaaaaaaaaaaaaaaaaaaaagggcggacgaatctaaaaggtgccggcctgtacgtacagggtccatagctaactaatcacgtgcttgctagggaaaaactgaatttcaattgtattgagccgaaatttattcaacgtggccgactgggtaacaaccctggcgtctggcgaaatccctggcgttgcccaacttactcgtttcgccagaatatcctactttcgaaaagggccgtaccgatcgacattcccaaaccggtggcacctctccaatggttagtgcaacccgccttgtaacggggcctcaccctcggggggtgcattaatc

SEQ ID NO: 9174 - DNA, 248 bp, Zea mays
  Clone ID: MRT4577_108361C.1
ccggccgggacaaaacccagagacctcgagaacggctggaagaaccgagagcgccccggacacgtccgcggccgagctgcgataggagctggacgagctgcggcggctggagaggctcgccagagcacccccgccgccagatcctcctcgccaactaaacccgcagcgttgaagcgaacttggcgaagagcaaccgaaccatcgtcctgaagcactggcggaggcttctacgccagcagcccgcgtcc

SEQ ID NO: 9175 - DNA, 176 bp, Zea mays
  Clone ID: MRT4577_108362C.1
caaatttagaagttgcgtggctaataataagattcttaaaacgagatatgaaccaaccatgcccatgccatagatcacaggaggaaacctgggaggggggcaaacatttggtccttgtagctacatctaatttttgatctcatatctatttttggaatacgtaatacatctatttt

SEQ ID NO: 9176 - DNA, 370 bp, Zea mays
  Clone ID: MRT4577_108363C.1
gaggacagggagtgaagttttttgggatagaaaacaggaatactcatccattttttacccattcaaaaaggagcaagggctttattcaagcaagacggcgcaccttgacccaaccacccaaggttcggtgcaactccgacaggtccaaatacacggcgactttcaacatggggattgcaaacgtgactggggacacaatctataacggactttgggcagactggccttcaacacgggggggcaatcacttgaggaggggcttaacaatggatttcaaggtcagctcctttaggtccgggctggacggaccacagccaacaaacatgactggagctccagatatgtagaccatggaaagggctgctccaac

SEQ ID NO: 9177 - DNA, 255 bp, Zea mays
  unsure (1)..(255): unsure at all n locations
  Clone ID: MRT4577_108364C.1
cctgcccctgggnctcgtcgcgggagacacggtcctcggccacgcgccggagacgctggagcacgccgtgtcgccggtgtcacgggaagagctctccttcaagttcctccggctgctgcngagcttgctcggctccgagccgctggtgcacgtcgacgacgcctgcgaggcgctcctcttctgcatggagcgcccgtccatcgccggccgcttcttctgcgccgccgcgtacccgagcatccacgacatcacgga

SEQ ID NO: 9178 - DNA, 1446 bp, Zea mays
  Clone ID: MRT4577_108365C.1
cgactcaaaggctccccaaaaccttgtttatatgcaaaacccagtttttattactccaacagaaccccattcgccgcccgcaaatttccgcgtcccggaaaagaggctgggcgtccccggccgggccacggccacggagcgtcgcacgaatctcggcgcggtccgcgcctgcatcttctccctcgttatccgctgggtcactcgctcgtcgctcccaagtcccaccaagctgtcccccgaccactccgccgcccgctccaatggcggcgccggccagctcctcatgcttccacccacgcgcgaccgccagcccgccgtcttctctcagcgtcggcaccaaggtcttcgtcgggctcagggcgcagaccaagctcggttcgtcggagtcgtcatgcccgaatgtcagcgctgggttccacactgcggtcaaccggagaatctctctcaggttgtccaaaaagaaggcgaccagagcccgcatctcgatgatgcctattggtactccacgtgtgccttaccgaacacctggtgaaggaacctggcaatggcttgacatatggaacgctctgtaccgtgagcggattatcttcattggggacaatatagatgaagaattcagcaaccaagtgttggcaagcatgctctatcttgacagcattgataattccaaaaagataatgctatacattaatggaccaggaggagatcttactccgtgtatggcactatatgataccatgctaagtctaaaaagtcctattggcactcactgcttgggctttgcattcaacctggcaggattcatccttgcagccggtgaaaagggttcacgcactggtatgcctctatgccggatttcactccaatcacctgccggagcagctcgaggacaggctgacgatatagaaaacgaagcaaacgagcttatccgcatcaagaactatctctatggcaagctcgcggggcacacaggccattctgtcgagaagatccatgaggacctgtctagggtgaagcgcttcgacgccgaaggggctctcgagtacgggatcatcgaccgtattgtcaggccgtctaggatcaagaaagagggctccactgctcaaaggagggacatgcggaatctgggacttggctaataatagacgatcgaaatcctgttgtatcagaattttttgtgcaagggatgcgcttattatgggagagcgagcgatgcactgttccaggctctacgccggcgtaggtgttttgttgtgtcagctgtgcttttgctaactgtcagcactactattataatatatttgctgggattgttgatgagcacggcaaagaaaaagaccagagatgcgagggcactggcctctaggcgtctcgtctcttggacaactcttgtaccaatcaatcaaccaggtgcccatgctctggatggggactacagttatatgc

SEQ ID NO: 9179 - DNA, 238 bp, Zea mays
  Clone ID: MRT4577_108366C.1
ctccctccttttgtctgtcgtactctcgaccggacgacccgcgacgcgcgctaagctcctgtgctctgccttttgttgaactgtactgtcctataggtctcccaccagcttttctgtaaagaaaatgtgtcgtggtgacatctcgctctcggcgagaggtcagcgagatggttacgtctggaaggtgccaagactgtgactggtggagctcactgagaggagcagacctcttccgtga

SEQ ID NO: 9180 - DNA, 130 bp, Zea mays
  Clone ID: MRT4577_108367C.1
ccaacgccaaacttaaacccaggggcaatgcggaggaataaaggctttacaacataagaaggaaaccacacaacgacagaaaaatcagaaccgcaacaaacattaacacgataggagccactcaaggcag

SEQ ID NO: 9181 - DNA, 2100 bp, Zea mays
  Clone ID: MRT4577_108368C.1
tagagcaagagaactacatgatgaaaagcaggccgaatggccatcgaaagtcaatcgacctctatcctgcatgccatgccatcatgaacaattggctattcagctagactgaaggtctcgggtctatatctcctgtgtttatcttgtccagtcctaccatccctatccttattctcttccatcagctctggcagctttctgcacaagtgacctcggtctcaccgtcagtgctggcatgatgcaggtctgaatctacatcgatattaacaaaatactgccattaacatacagtgttctccatttccttcccccttctgtgcccatagcatactgtgtttgtgcttgttcagacaatgccggctgcagcggctgatggtcttgattccatgtgtcgcaatttaatttagtaaaacattaaatccttgacagcatattcagaattccacaatctagattgatacttaatcctaatcaaaattttaccttttcaagatttgaggttatgattttattaaagtcgaacccatgtgtgcaaggtcatcctctgacagatcatctagatcgccttatgcgtgctcggcctttgacaaccttcctatgacaattgacaagagatttatttcctttttaaaaaaaacaaaagactggtctttctttaaaggaaactgatgaggatcctcctggaccaatatgtgttactgagacctgagaagttagtacagttttttccacttgaaatatttcggtttagtgtgcttgattgggtatttttttgtcagggtggtggtccaaacactgtacaccagcagaggagtggggtgatgacttctgagtgtcaatgcaagtaagatgttgcactttttttttcaaatactggcaggagctctgcctgccagttaaaagtaagatgctgctagttgttgcttcctcagataattgcgagaaacttctccctattgcgtcgattcagttttattgtcttccctcattttgctctcactgttcatagcaacaaggacattgacgaatcatccgccgagaggctgtacgacgcagtgaagtacaccacggccaacatgatgctgatccaggtcccagtgttaggaacaacgaaggaattctggcgattatctgacaaagcgactaggatcagcagaaaacttgcattgatactgaggagccaccactcagtcggcaagtacctagctgctcctctgcaggtgtccaacatctggattgggaacaatgggagtgtcaagctaaggggggtcggtttcactggtaaaggcttcagcactgagcgtgtgagagatgactacaaacgcatgtccaggatcctgatggcgttaattactctctcgggtggggacagaagcaaattgcctccggactacaaagagttcctcctgctcttggaatcggacacccttacaatggaagatgaattcttgattgtaaacaatgctgcactgctgcccataaaaaaccgcactgaggtctttctgatgctacacgatagaattgtcgattatcttgggtgtgcggacaaaacgaagaagaagaaaaagaagaggatactctctagtcttccctacaaggaagactggctagatactgccaaggcaaatacaaaaatcaaccagtgggttgccaatgttcagaacgagtacagagcgactccacatgatctgctgcggctcaacagaaatgtaagaagccacatgcatcgctacagcgacggtgacgacatcgaggaagttctgtattgtgaatggcccgagctgctcatggtcatgcagaagatgttgcacttggaaggcgagctcgaaggcactgacattcagaacaagtttggctaggcgtcctacttaagctactgttcttcgatccagttcagggccgaaagtttatgctggtggagtgatggtcgatgtaagtttgtcgctctcatcatgaaggtaaagctggatcagctttataaaatgtatgctaaaatgtaaagtaaactttaaaccattctctctgagaaggtctcttcttaatacaataccgggagtctgtctcgtcttgcttgtccagaagctggtcaagataaccacg

SEQ ID NO: 9182 - DNA, 405 bp, Zea mays
  Clone ID: MRT4577_108369C.1
cccacgcgtccggctctttctgcatgtgttgctaacgcgacaattttccctgaatggggacaagctcctatagcttcccttcttgccccataccttccatcaatgatagcttcaatatgtgaaaacccagctcttcagccctataggctccaacaagcaatcgcaacaagcatcatacctttatcacccttgttgttgcaacaatcgtacagccctatctatggtgcagacattgagtacataccatcaaggcacaggacctgcaatacctcgtgctacctgtgatcaaccaagtagctctggcacacgcttgtgcctactctgagctacatcaatgcattgcattcaacctactgtctacactgaaccctactgctaacgcgcagcaacaactattaccattca

SEQ ID NO: 9183 - DNA, 332 bp, Zea mays
  Clone ID: MRT4577_10836C.1
ttaattcccgactcgagccactcattcgacgtcaccttctttttttttccttcattcatcatacattcgtcagcctttcctgaaggaggactatctcttctagttggctgcaacagtagttgtgctacaattaggaacattttccccagcatcaggattacattcgcacgatttcaacttcattgactatctttcgtgcacgtgcaactacgctgttggatatggaaactgttcattcaagctctcgtcaacatacggagataccttatctcaccatgccaccggactctcacactaacttcgcctagttacagactgtatctcagacacac

SEQ ID NO: 9184 - DNA, 215 bp, Zea mays
  Clone ID: MRT4577_108370C.1
ccttgactattgtgacatgctgcacactccatggagatggggatggattctgaggggagggcccataatagtattgtgcattggatgtagtaccatactgcatctacactgagaccattcctgatattacagacacttgctcgttcatcgtttggagagtgatatcgatgggcaaggaacgtcagccgttgacctttgcccacagccccactgcc

SEQ ID NO: 9185 - DNA, 870 bp, Zea mays
  unsure (1)..(870): unsure at all n locations
  Clone ID: MRT4577_108371C.1
gggtacctcgaggccggccggggtgatagctctttcctttactcactttgaccaattgctagaggaggcaaacagcagtcgtacgccacacacctgatcaccgccaccgcagcgtgatcgcttagaatgtctgttccctcgatcccctccacggagcctaagctcgcatacgatcaagacgcagccctggatctccagcgccagatcagcagcatgaagcaacaaatcggtaactcgatcttcgacacctaccagacatctctcacggggcgttactgctccaaggagatgtcgcaactcttcagccagcgcagccgtcacagcacgtggaggaagctctggttgtggcttgccgagtcagagaaagagcttggtattgagaatatctcggatgaggctctccagcagatgcgcgaccacttggtcgtttctgacagcgacttcgaggttgcgagggttgaggagaagaggaggagacacgatgtcatggctcacgtacacgcattcggtgaggtagcgccgaaggcggcgggaatcattcactacggcgcaacaagctgttatgtgactgataacgctgagctcgtccttatgcgcgatgccatgagcctgctccttcccaagctcgccaaggtcgtcgacaacctggccaagttcgccctgcagtggaaggctgagccaactctggcctacactcacttgcagcccgctcagctgatcaccgttggtaagcgagctgcccaatgggcgcaggatctcctcatggatctcgaggctacgagcaccgtgaaggaggtctccccagntccgcggtgctcagggtacaaccggaaccagcccctcttttctcgagatcttcacaacgactcg

SEQ ID NO: 9186 - DNA, 211 bp, Zea mays
  Clone ID: MRT4577_108372C.1
cggacgcgtggttttttttttttttttttcattcaaaccttgtcctttgttcaattcctcgtccgacaatctgggtcaaaacattaccaaaacgtacgtatgactccaacatgcataaaatttctaatgtgtccccatgaacctgtctagatggagcgtcaagatactagagggagagtaactctcaagcctaatcatcagcgcgttaagc

SEQ ID NO: 9187 - DNA, 408 bp, Zea mays
  Clone ID: MRT4577_108373C.1
gggaaaccgaccggttttttattccccaacgggaaaaaggaccaggtttatttttcccccgcccccaagttttggccaggggttaaaaaagggaaaactaacggggccggttaaaagttttaaccgggttaaaaaaacccctccgggcccaaaagaaaaacttttttaggcaaaaaaaactaaataaactggggggggttcccgaaggccttttggaaggggggaccccggccccgggggggggttgggggggaaaaggattcaggggaaaaggagggggggtccgggtaaggccccaaaaacccaccctttggaaatggggccgaaggggccctcggggagggggccccccccccacctccagggggggggggggcctgggaacgctaaccccccgggttggccgaa

SEQ ID NO: 9188 - DNA, 494 bp, Zea mays
  unsure (1)..(494): unsure at all n locations
  Clone ID: MRT4577_108374C.1
ccccgcagccgcctcctctcctaccgccgccgccactcatcctcgtctgcctcttctcctaccgccgcctcctcggcctcggccgtccctgctctgccggcgcccgtcggccttgatccggcctcggcaggaggagcttgccctcgagtaggactcaatataaggaggggagcagcagccgcgccccgtgctccaccggtgcctgtcgccatcgatccgtcctcggcaggaggagctcgagccgaggagcgcgacctcgacccagactccgcaggaggagggaagcagtagccgcgccagccgacgcgcctcgccgcaacctccgctatatcaggagagagagaagataagacggagagagaggaggagaggagggagaggaaaggaggtgcggtggcagggaaatcgtcgtcggatgcgtcctatatgtgatgggtgtgttcccatcaagtcgatggtggggttgatgtgcccgtcgattcngtgatccgttg

SEQ ID NO: 9189 - DNA, 265 bp, Zea mays
  Clone ID: MRT4577_108375C.1
gcttcattgacatcttcgcgcggccggccgcgggcttcgtggcggggcttgaggacggtgcggccctactccgtctacctcttcagcttctccatgttcttcaacggcctcgcggacctggcgggctctacggcgggcgactacggcggcctcgtggccttctgcatctactttggcatctcctacggcatggttagggccctgcagttcgaggtgctccatggcatcgtgtgcacgcacaagttctcagtgccattggcctggt

SEQ ID NO: 9190 - DNA, 120 bp, Zea mays
  Clone ID: MRT4577_108377C.1
atgacccacgcgggcgctcgtgaaagaagaagaaggtactgaccctaacagggacactggctcagattcagagaaaagcataggtgatctcagagggacagactggctgaagcgaataaa

SEQ ID NO: 9191 - DNA, 549 bp, Zea mays
  Clone ID: MRT4577_108378C.1
cgggtcgacccacgacgtccgcccacgcgtccgcttcgggcccaactccaccaccttcatcgtgccggcggagatcttcccagcaaggctgcggtccacctgccacggtatttcttcagctgcaggaaagtgtggcgccattgtcgggtcatttgggttcctgtacgcggcgcagagcacggatcccaccaagacggactccgggtacccgccgggcatcggagtgcgcaactcgctgttcatgctcaccggatgcaatgttatcggtttcctgttcacgttcctggtgccggagtccaagggaaaatcgctggaagagctctccggcgagaacgacgaggaggcagcaccgcagcaacagcagaccgtgccgacagatttgagtgaataaaacagagaaacagtacactcctactactacttgtcaatgtcttgtatttctgtagaactttcttttagtttcaggacgactattgtattgaactggcatgtctgaaggaccgacgacagatctaaaagaccataattctaatcgaaataagtaatgct

SEQ ID NO: 9192 - DNA, 433 bp, Zea mays
  Clone ID: MRT4577_108379C.1
gcagaattcactcggatatttgggggaaataagaactgtcgtcactttcgctttgatgtagctgggagatagatgcccttattgcatcaggtgttctttagatggtaagaaagagggaaagaggacacggcaagtgctaggccggatggatggatggattgagcgacctatagtctggatctggatcctgctgtctcgcttgttgtggaacgttccatgaatgaatgcgtaggaccacttccgttagaattagtagtattgtgcaaggtaggcttcgaaatcggaagtggtagactaaattgtgtgtcaaggtacttctggtcgcagatttcagaagttgtaagcacttctgattaaggagatctttttttttgttgtttgacgtaagatttaaggagatgtttatattcgagaagtttgggaccagtcatga

SEQ ID NO: 9193 - DNA, 519 bp, Zea mays
  unsure (1)..(519): unsure at all n locations
  Clone ID: MRT4577_10837C.1
tttttttttttttttttttaataataatacatccactagtcttggcttgtattggtacaaaggcgggccacggggccacgggccttttccatatttattttttgggagttgcccatgcgggggggcttggtttatttctctggtcccggggacggcagggttgcgttttcttttttttttttttcgcggaagcctcccatggttgccctcctggtggggcccgggggggattttttttcccaggggccgggggcctttgggggggggggtttttcccggggggccccggaccctggggggcccctttggggggcccccgggggtggggaaatcccccccaaaaaatgggcccttggggggggggggcccccggggggggggcccctcccccccggggtgttttaaaaaacctggggggtctccgctgtggggggccctttttttttttttttcccccccnngaaaactctcggtgcggggggttgtcgcggtggggggggggcccccctttcctccccg

SEQ ID NO: 9194 - DNA, 308 bp, Zea mays
  Clone ID: MRT4577_108380C.1
tcgtaagcagtggtaacaacgcagagtacgggggtcggtgggggctatggcccctcccaaggctaggacacagagaagagaacatatatatatattcgaaattttgtgtctaaatatatatattctaaattttgtgcaacgcaattaatcaaaggtttaatatagtggttagtaatacatgacacataactctgttgtagtatgccaaccaaagtctaaaaaaaaaaaaaaaaaaaaaaaaaaaaaaagtactctgcgttgttaccactgcttaagggcgaatctcagcgcactgccggccgcttctt

SEQ ID NO: 9195 - DNA, 208 bp, Zea mays
  Clone ID: MRT4577_108381C.1
ggggcttaataaaatcgaaaacctaggacatgggcgacaccacctcagcccggagaaaataaaaaagacaggccgggcatactggcggaacaggggggacctaaaaaggaaagagttgcctttaaaagctgcgataaaaaaatgttgcaattgacggactggtttttcccatcgaacctattgtggaattaagatcagattttatcgg

SEQ ID NO: 9196 - DNA, 401 bp, Zea mays
  Clone ID: MRT4577_108382C.1
agggacttcaggttgcctagccctttctgataactgtccatggaacttattcgaagctagccgtagcgcagtcaggtttctacaggagtatatgctttccggaatcgtgccattgaagttattgagcatgagatctatggttcttagactgggcatgttgctgaaatcaacctgggagagctcgccactgaaaccgttgctcctaaggtctagagttatgagatccgtgcagttgctcagggctggtggcagctccccatacatgctgttatagtccagatgaagttcttgcaatctcttgagctgacctatggtatcaggtatcttgccgccgaaactggtgtcttctaggtcaaggacgaccagattgggtgagcttggcttcatgtgcgccatcgact

SEQ ID NO: 9197 - DNA, 313 bp, Zea mays
  unsure (1)..(313): unsure at all n locations
  Clone ID: MRT4577_108383C.1
gaaaaaccggtaggggttaaagccaaacaaaaatggtggaaatgccaaaaaaaaaaggggtcccttgtttttttgggggggttgaccaaccggcttgcaaaaaaaaatttttgaagggcccttttcaaaactccctttaaccaaaattggccccaggggggccgggtttaagtggaacccccttaaaaggggggttgtttgtaancagaaggggcccaaaatccggggggggtaataacggggggggtttcctggggaagcccagggggttggattttcttccggaatttaactccggggggaagggccgggc

SEQ ID NO: 9198 - DNA, 550 bp, Zea mays
  Clone ID: MRT4577_108384C.1
cctgtaccgctgccgccctggagctgaaggcgaaggaaataacaggcatggtgcgacggatacgcgtggcgccgatcaagagcccgaatccgaccttctaccgggtgatggtcgacgtatcgccgcgtcccctctcagacggctacctcctcagaggccgtctactactatgcgcgctcccagggcacgaggtacctgaggatcggcctgaagatatctaccggctgaagtatctggatgtcgatctgcgacgctgtcatcgaatcctgtgcgaagcattttctttcgcgccgcacttctgtgaccatctccattgatcaatatgctcacggaagcgtggtgaccacgcgtataccatgccccattcatgcgatgatgtgcaacatctatgcatctctagtgcgccataatacttgataaatcgcgtgctccggaaggagctactgaagcgactacacacgaagtgcctccataagcctcttgaatgaatatagcatatggacggatgctatgatggaatgcttaggtgatgagcttgcgaggagactgt

SEQ ID NO: 9199 - DNA, 556 bp, Zea mays
  unsure (1)..(556): unsure at all n locations
  Clone ID: MRT4577_108385C.1
ggaacttgcgacgagagttgggcgcagagaatccccatgtaacaaacagggtanagggagaggagaggggaggagaggagaggttgggtctgggacaccatggctccgatgaagctgtacggggcggtgatgtcgtggaacgtgacgaggtgcgcaacggcgctggaggaggctggctccgactactatttttttcccatcaacttcgccaccgggggggcaagagcccctagcatcaacttccgcaacccgnnnggacaggaaccagctctgcaggatggggactgggacctcccccaatcacgagcaatctgcaagtacgctgctcgcaaaaacaagccagagctgataaaggaaggaaacctccaggaggcagcaatgggggatgtttggatcgaggtggaggctaaccagtacaccggtgcactgaatcccatcctcttccaggtcctcatcagacctatgcttgggggaaccaccgaccagaaaggtgtggatgagaaccttgagaagctgaacaacgtgctagaggggtacgaggcacacctgaccaagg

SEQ ID NO: 9200 - DNA, 276 bp, Zea mays
  Clone ID: MRT4577_108386C.1
ccacgcgtccgcccacgcgttcgcccacgcgttcgaccatacatatgcggacatgtgaatggatacgtgtccaataactaaaacgaaacctaattacaatgggcaaattttttatatgccagcattatgacataaaagcatgtggtaacctatttaaatgtattttgcagaatatttacattttgataactatcgtacttgttttaaagtacgtagaaattaaatttaagaagaagattgtaacaagaatgaattaatgatactctatgtttatag

SEQ ID NO: 9201 - DNA, 296 bp, Zea mays
  Clone ID: MRT4577_108387C.1
gcctgcagtaccgcacctacattcccggtattacccactcgtcccacaccttcggatgtatcgatgctgatgctgtacgatctaatgctaccaggttgcgcaatagtattcacggtggccactcccatgcttttgatttacagccaggatttcctgccagactccaataatcatggactcttcggtagccacatatagtgatatgagcggtagctaccagtattcgcgagacttttgtgagcaacaccatgaataaggatttgtgacaggacaggtctacagagaaacagccggac

SEQ ID NO: 9202 - DNA, 1966 bp, Zea mays
  Clone ID: MRT4577_108388C.1
gtggttttttttttttttttttttttttttttttttttcctttttttctaggaaaccaaacaggccacggcagatgcttatcaaatgtctagcgaccgacaaaatcagctccaaatctaaatttacagtgtaaaggatgagctgggcgtaattctactacaaaagctgaacaatcagagtggtgatcctaactgtttctttggttaggaccaatcagaagtacctacggctaaatctagagagagaaaaattagcgtcaagattttacaacaggcaaaaaataagctaatgaaggaattttgtgtacacattggcaggtttacatggcatctgcatctccagccatgtggccgtccatggtcatatcatccgcatatcttcctccatgttggttcctccatccacggttatactccaaagatcgcacacgatcatcatcagacgcctcagcaagccttgcaatcgcatcaattaatgattgttcgtgctcctttagcgctttcttagccctctccatctcaagggggtcagggttggctgaactgaaaacccgctccacctcctttatgagtgtctctgtatggagaatttctatgtagtcaacactcttcttcccaataccgttttgtgatggataatctttcttgaatgagttcttttggggacctctgtctcttccggtacctgacatggggccaccacgactgcttgacttcataccatggacgggagcaccacgacctataaggtttaaatcaggctcctcgccatcccatcttatatcctcaggtgccatctccttgaagtcaacccattcccatgtctcgtctgctgtatttatgtcataaaccagtgtatagatatcctttgatgcatcatagtcagttatttcagcttcataaaagctattatcgtcaggccaccgagtcatgactttacgaccaattaatggatttaattgtgaactttcaggtggaaggccagcagacatattcctattgataatagttcctcgcccaccaggaccagcagaagatggcatagatttgactgcagagccaccaggtatcttctggcctggtttggtcttcttcacttttgtgccgggttgagctcccttttttgctcctgaagatgatggttgcatcggtgcagttaaaggctgtgaatgcatagcagatggtgcaggtacacatgcagagagaatgggttgagacatcttttgcctcttgcgagcagatgtcgtagggctgggaatagggtcatgtgtacgctgagaattattcaccaaattaatcataagcccaccagttgactctctccatttccttattcttcgaataatatcatcgccattaactttgtttagcaactccctgtgttccttgtcagatacttgtagctccttcctaagctcagtaatgagactttctttttcccatgttatagcatcagattgagccttgaatgctctaagaactgaacaatatgcttcttgctcaagctcatgtatttgtgtttccatgtctgtctgaggttgaactctagtatacagagaagcaccaacactatctcttccattaccagtgatgcgtccactgcctttcatgcctctgctgttctgatatgattgtggaagatcatcatcggttccgctgctgtccacagctccgacgcagtccatgccgtactcacaaatgccttctaaatcacacctcgtcgatgcctgccaccgacagaaacgctacacgatgctcttcctccgataacacccagatccgccactttccgggatggcctacccctcctgcctctctgccccgatggagccctggttccggagcaaaaatcaagacgagacgcggcaaaccctggcgagatctaggcggaccgagggagaggggaacgtaggaggggacgacgcggcggaagagggcaggcccggccggcctcgaggtacccaatg

SEQ ID NO: 9203 - DNA, 312 bp, Zea mays
  unsure (1)..(312): unsure at all n locations
  Clone ID: MRT4577_108389C.1
ccggggtatttgttttcctcgacctattccttcatctctagccgtctctacgccgtctagggacgccctgggtggcctgccgaccccgaagcacccttggaactctcctccccgacggggtcccgggatccgggaggcgagatctagggtttttcaccgnaaagaagacgctctgcaccgncgcggacagnccgaccctatgcgcttactatccggtgctgggtagagaggagtcgctcctgcatcgagggtctaggncgntctncncttagncttggatcgnncgcgcactnnnagagagnaccgnnagga

SEQ ID NO: 9204 - DNA, 309 bp, Zea mays
  Clone ID: MRT4577_10838C.1
caaatctacgagtctcgcaaatcgtttaggatgcggtactatacctcgagagacacggtgtgaattgtattctccgaggatgagaaagctttggttgcaagcctgtgaagaaaatgatctacaagggtttgaggctgctgctatacagcgcaggcagatacaagaattcgctcagaacggaatattacagattcgcttgaggcaaatcagacaacaagatcagcagacacgattgttcatggcttctattcagaatcaaggcttggagggaatgtctattgctgtaggacagcatccgtcatatgagta

SEQ ID NO: 9205 - DNA, 357 bp, Zea mays
  Clone ID: MRT4577_108390C.1
gcgcccacgcgtacgatcaagcacgtgcgtgacaacgacaaagggaagctggtgtgtggtggtacaaaaacaccgtgctgggtctttgacaacagcctccaggcctaccactacggcttctgggttgaactcaccgtcctcacaaactggtccggccacatgtaaatcgtgcgcgaagagatcttccgtcccggcatgtgtatactaacgtatcagactggcgcggaagccacacagcgtgcgaacgcgcccgtcgggggtcttgcgggagctgtcttcaccaagagatcttaatgtcacagcatcaaggcattggtcagcttgaagctggccttacccaaggtcacacgtggggtg

SEQ ID NO: 9206 - DNA, 589 bp, Zea mays
  Clone ID: MRT4577_108391C.1
aaacttctcaatccaccaatgatgaagtgttggtaactgaaatatctgaaaaatcactgagtaaaaaagaaaagaaggctgctgcaaaagctaagcagtttggttcaaatgcaaaagtaaacaatggtgctcaatccaataaagctactctgaagacaattcttggtgaggcacctggcttatggccctgcactagcagagcatatcatattggatgctggtttggttccaagtacaaaggttgggaaagacccagagagcactatcaatgacagcactgttcagtctctaatggaatctattacaaggtttgaggactggcttgtagatattatatccggccaaaggattcctgagggttatattctcatgcaaaataagatgaccgcaaagaacatcacacccttggaagaggcttcgattaatcataagatatatgatgaatattgccctgttctgttgaatcaattcaagtcaagggaatataatgaatttgcgacatttgatgctgcactagacgagttctacagcaaaatagaaagtcaaaaggtgaatcaacagcagaaagcaaaagaggaatctgcagctc

SEQ ID NO: 9207 - DNA, 311 bp, Zea mays
  Clone ID: MRT4577_108392C.1
gacatccggttggctgttctcggtcttggcggtcccgagtaaagaccagcagcgcaagaagtcggtagagcgagaagaaggcagtggcggccgacaggttcgttttgaggtcggagtccgtgaacgaggcgcacccgacaagctgtgcgaccaggtgtcggacgccgtggttgacggatgcctcgcggaggaccccgacagcaacgtggcctggcacacgtgcaccgagaccaacgtggtgatggtgttcggcgaggtcacgaccaaggcgaccgttgactaggagaagatcgtgggggacacctgccgcg

SEQ ID NO: 9208 - DNA, 825 bp, Zea mays
  Clone ID: MRT4577_108393C.1
gtgcgccggccgggcgggcggggcggccggccgggccgggacaaaaagaaacacacacacacacaacactaccgtttcatcagtgcgatggcatccaacaagtccattgcgctcctcgtccttgccttggcactcatgttaacggtttcagtgcatggacagttatcgtcgccgacgcctgcaccaactcctgctgctgcagccccaacgcctacaccgacaccatcaccatcccctgcaccagcaccagcaccgacgacaacacctgctccggcaccatcccaaaaccgatgtccccctggcttccctaacctaatctccttaattgaaggcattaagacgttccttcaacagggcattactcttgtccccgttccattacctgtgacgaaccaacaaggcaacaacaacagcagccgcatatgcttgtgctatccctctactacaacagtgtttggcactcgcaacatcaaaggtccctacaaatgcgttcctgcaggccctccctttatctgaacgcgcgtatatgcaaccatgcagaaatgtgcgccgtggatgtatggcttagagccttatatgaataagtgcatgtgcggtctctgtgtgtgtggaggttgactaattccatgcatgcatctgtttaatttgcagtgtgtgtgcatgctgctgttgttgtacctgtgtcctcaaaatatatatcaatatacttattatacataccgaaaaaaaaaaaaaaaaaaacccccatactatcggcaatcctcatccgatccaatttgagggtatagaatataaagcaagttatataaaaaaaaaaaaaaaaaa

SEQ ID NO: 9209 - DNA, 673 bp, Zea mays
  Clone ID: MRT4577_108394C.1
aatacaactactagttccccacccccgcctccgtcggcacctcccccaaatcgaagcgagtcgcctaaaaccctaggtaagcccccggcaccgccccgcctcgccgccgcaccggatctcgccgccgtcgccgtcgccgtcgccgacgccatggacatggcagcgatgaacgacccggagaggctcttcttcttcgacctcgcctgcaagaccgccaagtccacctacgacgagaacccactcgacgccgacaacctgacgcgatggggcggcgcgctgctggagctgtcgcagatgcataacggccccgagagcctcaagtgcctcgaagatgcggagtctaagctggatgaagcactgagaattgatcccaacaaggctgatgcactctggtgcttggggaatgccctgacctctcgtggattcttcacttcggaaactgtccaggctaatgaatgctttgaaaagcaactggttgtttccagagggctgttgatgtggaaccagcaaatgagttgtacaggaagtcattggatttgtcatcaaaggcacctgaactgcatatggagatccataggcaaatcgcatctcaagcctcacaaggagcaccctcgtcctcaaatgcaaggcaatcaaggaaaaagaagaagaacaatgacttctggtatgatct

SEQ ID NO: 9210 - DNA, 854 bp, Zea mays
  Clone ID: MRT4577_108395C.1
cattgggtacctcgaggccggccgggacaacgtcccgagcggcatttttaaacgagtttatacttactgcagtaatacgcaccacatatattttaattacaagcatagttcgtacacgtacgttttaatatttagcaacaagctagctacactatgattcgggtagtgccaccttcgagggccggctgcgcgaattaaaaaccagccacctgctgtctgctgcccgctgcgctgagcgtgagagctagctactaccttattacctctctccggtctccgcagctgtaggcggcggcggccatggacttcgtgctccaggtcctgctgcgagtggtgatgagaagaagcatccgcaggctgcaagaggtcgttgacatcgccgtggacatcggcacggctgtcttcgtggccgtgcgggtctccggcctcgtcttccgccgccggctgcccacgccgactacgacatcgtcgtcgtcgacgacgtactactactccccggggacgtcctcctcgatcggcatgcatgtccaggaggattaattattggcaggcactagatgagctagctagctagctagggccagaagatgtatacttctcgcgggggggcatgtaagtaccaaggtcatatatctgtgcgttcttttttgtggaatcaaactaatttcgctagctaccctatatatatgtgttgtgctattgctctagctatatctaacatgtgtaatttgaggaattgaggccgcaaatcaaaacaaaaacttttgagccaaaaaaaaaaaaaaaaaagcggccaacagtgattaattcagaaattaagaaacagccttgacatgaccatgtagcttatttgc

SEQ ID NO: 9211 - DNA, 408 bp, Zea mays
  Clone ID: MRT4577_108396C.1
accttttctgttttttttcctctatacttcatactgtgggcggggttttttttttttaaaatgaaaacacccccaccaactttattattatatgtattattacaaggcacaagggcccatacatgcagggaaccaggggcaatatacatgaacaccctttggcccgctcctgctttatcaatgcaaacggtggcatgcatgcaaaaaaccccttgggagaaaaaacccctggaattctggtaggacctatgcatgcatgggcaccatcgatgggcgcgaagggtatattaccccgggggtcaaaaaaaaggctggatcttccaacggtgggtggcgccctcgccccacttccaaaagaccaaggcggggcccacacggacgccgccgtgccacttgaagccggggggg

SEQ ID NO: 9212 - DNA, 559 bp, Zea mays
  unsure (1)..(559): unsure at all n locations
  Clone ID: MRT4577_108397C.1
naaaaaaaaaaatttttataaaaaaaaaaaaaaaaaaaaaaaaaaaaaaagaaaaaaaaaaaaaaaaaaaaaaaaaaaaaaaaaaaaaaaaaaaaaaaaaaaaaaaggggggtcaatttttagggacccttctttggaacgactgtgactccctttttactgctgcgtggcttggtggaccccttgccgttgatcccgcgttgggggggtggcggctttttcctctttgtgaccacctcgggtttttcgccagttaggccccccctttaaccccctcccccttctgcccccctggccctaattggcccacgggcccttccccctgcatccgccccccccctttgccggtggtttcagtgctttgtgggccgctttttttgttccgcttgctcagcgccctttcttttcggtttttttcctttcttttcttccttttttgtgccgtttcccttttctccctttcattttttttttccgtggcgctttttggggtggccgctcttggttttccccggcaccttttttttggggctcttttttgggggccggttgacgtgtt

SEQ ID NO: 9213 - DNA, 264 bp, Zea mays
  Clone ID: MRT4577_108398C.1
gccgctgaggtcctggagcttgctgggaacgcagcgaaggataacaagaagacccggatcgttgccgcgtcacatacagctcgacgtgcgcaacgacgaggagctgaccaagctgcttggtggtgtcaacatcgcgagctgcggctttatgcccaacatacaccagcagctcgtccccaagaaggctggctcgtccaaggcttccaccgtcgatgacgatgaaaactgaagctgcacactggagaaggcattcgctaccgtctt

SEQ ID NO: 9214 - DNA, 617 bp, Zea mays
  unsure (1)..(617): unsure at all n locations
  Clone ID: MRT4577_108399C.1
gngcagccgagctcgccctagcctgcttggtgccaggcggctccccctcaccctttccccttcttcttcctcaaaccagcaggcgcccagaaattccagcaggagcttcatggtcgagctcgcccaggccccgacgcctgtgctcggccagcagccttggcgcccaagcaacgccctgccgtggtctgaggatgaagcccgatgctccagcgcccccttcttcttgtacctccagcagcaaggattgaaccccccatggcgtgtggccttttccctgctccacggtctacagcagccccgcgctcacctcccatggaaaaccagccggcttcctgcctccggcaagccgcatttgttccctgcgcgcgagctcgctgtggggcgccctagccgctgctcgccccgaccacatctccatggccgagcagcagttctgcacagcctttcttcttcctctcccattggtgctgctcgtcgagccctccctctttggatgtcggcaagaaaaatcggcgcagcagccctccagttcattctccacttccccgtcgcgagtcatcgctctcgtgtttgatgcgcagcgaacagcacgtcgggatgcccaaccagtgtttgct

SEQ ID NO: 9215 - DNA, 370 bp, Zea mays
  Clone ID: MRT4577_10839C.1
aaaaaaaaaaaaaaaaaaaaagaacaagctaaaaattatataaaaaaaaaaaggtttgttcattttaaaaaataaaggtttgttcgttggtttgtgaccacgtttaagggcgattttctgttgttgtctatcaccatttgcgggctcgttcggggggggggttgtggggggccttttggcgccttttcgtgggtcgtgtggggctctattggccgttttttggggcccttttggctgggttggccgtggttttcccctgcttagtcgggtgggaccccgtcctcctttggctagctggcgttgttgccctggggccttgcccgggtgccttttcgtccttttgcgccgcctgtttggggtttggccgccc

SEQ ID NO: 9216 - DNA, 818 bp, Zea mays
  Clone ID: MRT4577_1083C.1
cccgagttggaggaggaagacgacgacgaccacgagggacaagaggaggagcgcttcgactcgcccaccggcaccatgtcgtcctcgccgcccacctcgcgctcctcctccccggaggtggaggacgccgccgctgcggcggaggcgcacccgtcgtccctgccgccggcgctcatgcgcgcagggcagagcgtggtgccgggagaacgggtcgcgcaagcccgacgtggtcgtccgcgtccaggagcatcgcctccctctgcacagggacgtgatcacgtcgcggagcagctacctgaggcgcctgctgtcagagtccagcgacgtcgcgatcgcgctgccggcgggcctcacgttcgacgcgttcgtgcaggcgatcgcgacctgctacgtcgtccccgacgatgcagcggcggcggcgctgtccccggcgagcctcgccgcggcgtgggtggcggggggctggctggagctgagcgcgggcccggggagggaccctcgcgggctgacccacgccgcggaggactacttccatgaggtggccaccgaccacggccgagccgcgggcgtgctgcggtgctgcgcggcgttcctgggcggcgaggcggccgggcccgccgcggacctgctcgcccggtgcgtcgaggtgctcgcggcgtccgacagcgggagcgggaggtggctcgacgacgtggccgcgctccccgtggaggagtttctggtgggcgtggaggccatgcgcgcgcgggccgcgcacgaccacgagcctatgtgcacaggtcgtcgaccactacctgggggaccacaagggggaagct

SEQ ID NO: 9217 - DNA, 473 bp, Zea mays
  Clone ID: MRT4577_108400C.1
gcacgagcagaacacaaggtcaaatcagtcctcaaaaccatctgcggagcactcgcgcgccagatccatcgtctagccggcccaagatttccctccccaccgcgccgctccaacgccactaagaagccagccagccatgtcgttggtctccggcgccggcggccggcgcatgtccatcaggtccatctcctgccgcggcgtgagggccttcgtcctgttccagaagccgccgctctacgccacggtgtccctcggcggccgccgggagaagacgcagccggacgccgacggcggcgagaacccggactgggacgacgcggtgttcgcgttcgacctcgacagggacggctcgcagcagcagcagctggtggtggagtttgaggtgaaggcgcaggtgccgatcctcggcaacaaactcgtcgccacggctagcgtgcccgtggccgacctggcggcggcccagggaagaggcg

SEQ ID NO: 9218 - DNA, 108 bp, Zea mays
  Clone ID: MRT4577_108401C.1
ccctaccctcactcacgcactcagccatcagcggcaccgctgcgctcacgcgcgccaggctaccgcgctcacggcaattccccgccgctcgcacccgacgccgccccg

SEQ ID NO: 9219 - DNA, 358 bp, Zea mays
  unsure (1)..(358): unsure at all n locations
  Clone ID: MRT4577_108402C.1
cgaggggaacacatatcgatttaacattcctgtacatatacaagacttccttgactcgcattatggaaaaacttcgatgaactagatagttgtgcctaaggctattaagaatccatctactaaaaatccagccgaggaagagctccttttaaaatgtatataatgcactactaggcacaaggccgagaagcgccttccggcggccaagtcgttcggcaaagaaggcggcgacaagaagggtaagaagaaagcgaagaagtcggtggagacctacaagatctnnggggggggccgttctaaaggatccaagcttacttacgggtgcatgcaacataataatttttttatggggtccctt

SEQ ID NO: 9220 - DNA, 735 bp, Zea mays
  Clone ID: MRT4577_108403C.1
aattcggcacgaggccgctccgcaccatcgccgccccgaaattgctcgactcggcacaggcgagacgtggatctccgcggaggacctccgatcaccgatccatggcggccgcggactccgaccccgccatctccatctccacctgcccgcactgtcagcgggagattccatcttcaaacattgcattgcacagcgcgcactacgctaggaaccttcaaaagtgcgaacattgcggaaatatagttccgaggaagcttgtggatcaacactacgatgaaaaccatgctccggcatctttgtttccaaactccaagcttctcttagatgctgtcaattcataattgtagtattgttcaagtcaagcgttacattgagatgttgtttgatttacatattttgtaatgtgatgggtaattgataacatgtcaaattgtaattgtataccatactaggaattgatactagcatattcaaacttgttaccactaattctcgagtgcaaattattattgttgccatttatattacattttgtgaaccaagcagcatctaagaagcacagaagcctgcactattgtttttttcctaagttcttatcttactctgaagaagctgcaacattacatgaatgcatgtttacaatcattatgcctgcaaaatgtacagttgctttaaacagttatgaaagttttttttttatgtttgtggcaggcaacataatttattgtaaccact

SEQ ID NO: 9221 - DNA, 296 bp, Zea mays
  Clone ID: MRT4577_108404C.1
ctcggggagacagtctgctccctctagttcgccgaccgagtgggtcaactggagctggggccagcccggcgccgcatggtcccgcgctcctccgggacgccttcttccctcagcaccgacactccgctcttcgcgacctcctgcactactacgtcgtcctctggcagtcctccatgccccagtcgcgacaacggctcgggctccagtctcgcgtgcgcagatgtcctgcctgtctagtcctgggtcgcggccctgcgcatagggtctcaggctaggtctctgctggcacaggcggt

SEQ ID NO: 9222 - DNA, 1648 bp, Zea mays
  Clone ID: MRT4577_108405C.1
tgggacccggccgggccggggaaccttcgctcgggtggtgcctcgggttcagccaccacctcgcacatggcgcgctgctccgtcgcgaaaccgctctgcgccaccaccgcgactccccgccttacccgtcgctgccggcagctctccgcgaacgccaccaccccggccatggccaccagtaaagcacggttgccggccctaaacaaaccggccaaaccgccgccgcctctcctctcgcgtccgaagctccccgtccccaccaacaccgcgactgacaccactagcggcaaggattgcaccaagaaaccaccgccggaagctacggactcacatccgccctcgtccggcgccggcgacgtgctccgcctgatggacgcgctgggcatcccgcccgacgaggacatctacatatccctcctcagggagtgcgccgacgcagcagaggtggcctccgtgcacgcgcacataaccgcccgtcgcgcctccgatggactcccgtcgccggtcgccaaccgtctcctgctttcttacgccgcgtgtggggacatcgaagctgcccgccgggtgttcgacggaatgcccaccactaacggcatggcgtgggcgaccatggtgtccgcctactcggatggctgcctccaccatgaagcgatgcgtctgttcgcccacatgtgccatggaacgccggtcctggacggcgattgctactcccatgccatcgtggccgtgctgcggtcatgtacccgtgcaggcgagctacgtctcggtgagcaggtacacgctctcgtcgtcaagaaaggcaggatccacggtgacattggcagctcgctagtgcagctgtactgcgatggaggcggttttcacagaagcgcgcggcgagttctcgcgacgacgatgcagcaccactgtcaggaaccagtccctgaggcggcctggacgagcctgatcacatcctgccaccgtgaaagcctactgagcgaggctgtggatgtcttcagggacatggcgtcctcgggcgttccaaggagcagcttctccatgtcgagcatcctcgcggtgttcgcagagtcacaggacccagggtgttgctgcgggcagcaggtgcacgccgacgccatcaagcgcggcatggacacgaaccagttcgttggctccgggctcatacacatgtacgcgaagcaagggcggctggcggatgccgccagggcgttcgagacgatcggtggcaagcctgacgccgcgtgctggagtgccctggccatggcctatgctcgcggcggacggtacagagaggtcaccagaatcatgtatcagatgaaagctgccgggatgaatccttctaaggagatgaccgatgcggttaggttggcttgtttcagatgataatcctgaactactagtagtctggtaggagtgccaaagagtgagttactttgattgtacaattgtgttaagcagacgccagtgcactggtgtctgattccaaatgataacactgtgtagccgagtttgagttaacaaaaaaaaaaaaaaaaaaaaaaaaaaaaaaaaaaaaaaaaaaaaaaaaaaaaaaaaaaaaaaaaaaaaaaaaaaaaaaaaaaaaaagttgtttgttttataggtcacagattttacagaatgcaagctg

SEQ ID NO: 9223 - DNA, 419 bp, Zea mays
  Clone ID: MRT4577_108406C.1
cgttgagatggtgacaaccgatggtgctgatttgggggtgggattggatttgggaaagaggaaggtgaaggagatgttgtttaaatccattgatggggaaagacttattggtatctctgggatgagtggttcagggaaaaccactcttgccaaagagcttgcccgggacgaggaggttcgaggccactttgggaacaaggttttgtttctgactgtgtcacaatctcccaatcttgaggagcttagagcccatatatggggatttcttactagttatgaggctggggttggtgctactcttccagaatcgaggaagctagtgatccttgatgatgtttggacaagggaatctctggaccagcttgtgttcgaaaatattcctggaaccacaacttttgtggtctcacggtctaaactcg

SEQ ID NO: 9224 - DNA, 112 bp, Zea mays
  Clone ID: MRT4577_108407C.1
cccgggctcagaccgcgatttcacatttgctcagaagtacacatcaaggctaacttttaaatccagcggacatggggcgcaggctgtccaaattttcgattcatgggctact

SEQ ID NO: 9225 - DNA, 289 bp, Zea mays
  Clone ID: MRT4577_108408C.1
gaagaaaatgttatgctacatatcccttcttataccttattttgtttctttaatattattacataaactaaaggaaggatttatttaaaattttaaaaaaaaaaaaaaaaaaaaaaaaaaaaaaaaaaaaataaaaaaaaaaaaaattgcctgccgatctataataatcaaatttacttaccctatcatacaaaataataacttctctataatatcacctaaattaaattcacattccctcatttttacaaaataattaccgtaaaaaccctaattttaccaaatttaa

SEQ ID NO: 9226 - DNA, 202 bp, Zea mays
  Clone ID: MRT4577_108409C.1
ggtgctttttttttttttttatgttttttttggggggggggccttctgtctctaaaaagataccggcaccagaccaacgggaaagggcctgaacgggaaccaaagtacagctataacacaggggaaagcccggacacaaaaaggaaaaaaaacgtttgactatcgcctgtgaaaagcaagctagcctggcagacaccccgat

SEQ ID NO: 9227 - DNA, 387 bp, Zea mays
  Clone ID: MRT4577_10840C.1
tctcggtgaaattcaattcctcattctcaaagaaatatgacgcaaaaatgttcatatatgaattggaattatttgctatcttattaagcctatcctgtagccataggaaatgagatcggaattactcagcgaattccaattccacattttcaagaaataaggaggctaaaatgttcatatatgaattggaattatttgctttcttattaagcctattctgaagccaaaggatatgagatctgaattcctacgtgaattccaattgcacattttcaagaaataaggaggcaaatatgttcatatatgaataggaatgatatgctgtcttattaggcctatcctgatgccaaaggagatgatatcggaattcctcgatggtaccgagct

SEQ ID NO: 9228 - DNA, 233 bp, Zea mays
  Clone ID: MRT4577_108410C.1
cccgcgcacgagccaaaggacccgagcagctctacacccgcaacaagccagcggcagagcggagagccgccgaggcctgggtggcccagaaccgacaccctcagaaccccacgcccaccagagccgccctccccacagccgcacagcacccctgccagccacaaaaccaacaacgcgagaaggagccaagcgcgggaacaccgaggacaccaagcccccgcaggagcccacag

SEQ ID NO: 9229 - DNA, 256 bp, Zea mays
  Clone ID: MRT4577_108411C.1
ctaaaacatagcgataagaaaaaaaatgtagatttgtatggcacttaaagttccatatatatatatatatatatatatatatattgtatattaggagcctagtctttcaataattaaagaaagcccagaccagacagtgcaatccggtcgagccggaccaggtccagacgtctataaaagaaaatctgtagtgctagagatcagtttttcacgccacatctcgattcatttgagcaggagagcgtgtactaacgtt

SEQ ID NO: 9230 - DNA, 138 bp, Zea mays
  Clone ID: MRT4577_108412C.1
tggccgcatagaggacggtgcggatcagggctaagaagcggcgagatgtgaggatggggacgaacagtaatcataggaaagcgcataatattcgagcgcaatgatggacatactcgatgctggcgaagcagaagcagt

SEQ ID NO: 9231 - DNA, 218 bp, Zea mays
  Clone ID: MRT4577_108413C.1
gggggcgacccacgccccgacgcaacacacaccaatttgtacttgcagagccggacccaccgaaacgcggcacaaagagggggggaacaaaagcaccagaagcgacacccccagaggcaaacagtaagagcacgctcaagctagaagaggggggcaggcaaaacagtcggtgcaccggcgcaaaagcaacaagctaacagagcacagtcgagcaaaaa

SEQ ID NO: 9232 - DNA, 235 bp, Zea mays
  Clone ID: MRT4577_108414C.1
cacgcgttcgctcttgctcgcgcatcatttgtttgcacgtttaacggtatgcgcggaaggtcataatcggggtccggcggcgcattttcctcgcccaggcctatttcctcacggtgctcggtccttctcctattctcccacagcctttcccccttgtcccttctcccctgcgcccctgctcgctcagctccccaaccccatctgtctgcgtgtctgatccacagtccacataccc

SEQ ID NO: 9233 - DNA, 145 bp, Zea mays
  Clone ID: MRT4577_108415C.1
atcccactgtatactactgtactgtccagcaccacctataaccgaatcactatgtacaaggcagcacaggaacctcaaacctagtacatccggaactgctatcttggcaactgcaacagcccggacgcggaagcggacgcgtgcg

SEQ ID NO: 9234 - DNA, 437 bp, Zea mays
  Clone ID: MRT4577_108416C.1
gcgatcacaagcaaaatcaacacggtcgcagcacaagcaagaaccacacctactcggtcaccggtgatcatgttgtcgggctgcggcagcaagtgcgagtgcggctccagctgctcctgcatcagcgtatgcaacggctgcggtatgtacactgacgtgtacaccaccgtcaccagcagcgtcaagaccacggtcctcgacgctccgaccaccaaggtcagcgccggcagcttcgacgcggtcaccgacggcgacagctgcgactgcaacacctgcaagtgcaggaccagctgcggctgcttctagtgcagctgcaactgaaccggcccggttcggcgatagctcacgagagtcgagaggacgacgaccaggaggcgtataatacatataatagcggtctacagttaataagatcctgtcaactgcacccgccatta

SEQ ID NO: 9235 - DNA, 594 bp, Zea mays
  Clone ID: MRT4577_108417C.1
aagaacaggttaccattgcctccaacaacggggcattggagtccaaatgagcctaacacagttctgcgagttctgtgctaccggagtgatgagacagctacaaagttcctcaagaaaacttacaacctaccgaagaagatatgacttgtgggatagatcacaaaccacatgtacattttcctgtcagtataaaaaggtttctctatgcctgtcacaatctctggctgaggaccgaggaaatacccactaaactttccacagcaaaggcgcctcctcaagtgattgtcaacaagaaggtttattctgtggtgctggagagatgtgactgggtgttttcggtggttcgtatcatggataggtttacttacagcttgatttgttcattatattatatatgtttgcctaatctagttcttttgctgaccttgcgctcatgtaatttgattcattctagtttgcgacagctatacccagcgtgtgaataagttgtgtactcgcgtgatactgtctggtgcctttgatgtgacaatatgaggagcatttgtatatttttactgcatcgtgcactccccactactttggtagttttctgtc

SEQ ID NO: 9236 - DNA, 590 bp, Zea mays
  Clone ID: MRT4577_108418C.1
cgaaagcacaagggcggctgggagtgttatgattctgcgtacaccactgtgtatgtcctgtgtggttgttcgctaccctgatgatgctgcagatgccggtggagatgcatcaggggtgacagatgagttgcacactgtaggagagctcgaggccggccgagacgatgcacctgaggtgcagaaagaaaactgaggcaacggccacatgcggctgaagaacgaaggaaaacatgaggcttgtagtgaggcaatcctgtgtatctggaagatgggaccggctgtttatctttgcttctatatatcaactgcgtatcatgatcagctgtctgcttcccgttgagtttcatatcggagtcgtagatcatctgagttttttgttggtttgcttgtgagatgtagagtactcttcccgtgggtcgaaggtgtcttgcagatgcttgaactttatgttgtcgaacggtagttatctacacggtatcatcttctctgttaagcctgtttagtgtttactgtattggatactcgttaatagagaaccgctacttttcagtatttattatcacctgtatattggataaaattattgctta

SEQ ID NO: 9237 - DNA, 371 bp, Zea mays
  Clone ID: MRT4577_108419C.1
acgggctgtttatacctgagacaccacatgagctgggaacctgacgcgctgaacgacagcatgacattccggagccactggacaagctcgacgccgtatgcaaggtatcctgacatgttgcatcaaagcctaatcccaatgatctcgtgcacacagcttaccttcatgtgcgctgagactccatcctgatcatggacaagaggagcgtgactattctaatatgcagcaatccggtgtggaaaatactgaagctgatctgctgactaatcttgtgcctggtcaatcttgtgaacactatcatgatgcatccctgcattctagtggtgctggtacagagcacacatcgctagatctcactcaacttgctagag

SEQ ID NO: 9238 - DNA, 374 bp, Zea mays
  Clone ID: MRT4577_10841C.1
taaacattacacattgaattcttgagggcaaatacttacacaatgcggagcgtgagatgtaaggtagcgacattctgcattgttactgttacatacacactgtgcgagtccaaacaggtagaggcgttgcatatccactttaattccctgtccacgggaatgttactactactagcttaggtacaagccataattgacactgcgacacacaccgcgcggttacatggccagctgtgtatgtactctgcctaatggaaaggggcacaatagctatcgccttttttattaaccctaagccctggcccgatcacatacttgacagggtactgtagttcttcatgcgcgtgatgcaatacctgccctaacgcttgggc

SEQ ID NO: 9239 - DNA, 377 bp, Zea mays
  Clone ID: MRT4577_108420C.1
cggacgcgtgggcggacgcgtgggttttgcagcaaccaggaagctgactgaagataaatatcagcaaatgttaccacaccagatataataaaacttatccagtaacatatactgatctccttattatttcacatgaaatggtggcaaaataaaacgtatccaggatgaggatggagtcaattcaaaactgctgctgttccctgcatgcataactcatctcccagcacccatccggtacaactactggcggtatagacacatcatgacaaagctttcatgagaagatctttgaccttccgactaaagttgtctatttgaatctgctcacattgagatagttctatttgcagacaacaaaagattgatatggataaagg

SEQ ID NO: 9240 - DNA, 280 bp, Zea mays
  Clone ID: MRT4577_108421C.1
atctaatgccaataagtcatagaacgaggaccgttaaactgatgtgaagattgattggcccgaaaatgccatttaaaaagccaaaatgctcagatggaaggcgcagttcatctatgtcgatatggaaaacgtgagtactagttacgctacaggtatctaggatgtcactgaagcttatgcggcagctatgcgaagtgctttcgtcgacaagcaggactacctgctaaatcagaagtctttacaggagaaggtcaagtgcatatacatacagctcaacttc

SEQ ID NO: 9241 - DNA, 595 bp, Zea mays
  unsure (1)..(595): unsure at all n locations
  Clone ID: MRT4577_108422C.1
tttttttttttttttttttttttctcagatacataaaggctgaattcacatcaaggcaagcatccatctcaatttgagcacaacgttgatgttcataaaggcggagttctcatgtacataaaggctagcagccatatcaaattttcacagatacataaaggctgagttcacttctcagatacatgctactaacaaatactagctgatttcacaaatcagcatctcagtttcctaggtgtcaacttcttaggaggggtcatcttgtttgagaatgatgctgatggcagaccttcctgtgaagttgtaccatctgccaatagcattgcaagtcgacttctggtgaccctaattgggctgtcatttataattgtttccattgtaggcttagttgggttttgaacaacagcagcatcaccttgctccatgacttgaacaacagcaacaatctccatttcttggacaacaacacattcctcccttccatgggcagaagtacctccctcacctccttttgacttcttttgtgttggcactttggcattctccccatacttagttgngttttttcgaggctttctcttcctttccttcgttc

SEQ ID NO: 9242 - DNA, 255 bp, Zea mays
  Clone ID: MRT4577_108423C.1
gggaaccaaggggtgaaaacctgagaccaccaaaatcttttttcacccgaaccaaaaaaaattcctcctcctggtagagtaaaaagttttacagtccggggaaaaagaaagttccagttgctacttgagggccacggtcagtcaaaagtccgttacttgccaattacacacttcccctgaaatttctccccggtttaacagtcttttcccgtaaaggagcccatcttcatacccatgcatcatgctcactcaaac

SEQ ID NO: 9243 - DNA, 461 bp, Zea mays
  unsure (1)..(461): unsure at all n locations
  Clone ID: MRT4577_108424C.1
aagattaacttaaaattatgtctggctgtggttacatgatccattgattcggtgacacatgttgtttcatgcatgcttctgcttgaaaccgaggatgaacacagcttttacatacgtttttaaccggccttgcagtcataaacttagatgggcagcatcaataacgacgcgaccgaagattaaccctatgtactagtgtaaacataactgtagctaacaggataacttgggcgcacgggcccaaccggtcaatttctccagatcccgtcggagttgcagaagccgccgccacggaaggcaccgncgaagccgtcgatcctaccaacgtgatccgcaccgggactcgtagcgccggcccaagctggacgcgtccccgtcgtgaatgaggccgttgccggccgaagcgggggctccacattccccttcggactcccaggggtcccctacttggacggaccccg

SEQ ID NO: 9244 - DNA, 881 bp, Zea mays
  Clone ID: MRT4577_108425C.1
aaagaagttccgaccattaaattttatagcgtaaaattcagagttcattaacacccttaagtacacaccaggcagctgagctgagggaacaacgataaggcaggtgcgctgcagctaagcgccccatacggtgaccccctgcatcatcatgttcttgaattcgcggaagtcaacgcggccgtcgcagttgcggtcgacgctgcagatcatctcctgcacagtggccaggttccgagcctcggacaggccgagcttcctgagcacggcctgcagctcggcggccgagatgaagccgtcaccgtcctcgtcgaacacgcggaacgcctcctccatgtccccctcgacgtcctcctcaggcaccgcctccgggatggggccgaacagcgcgtccccgagcgcgcggtggaggcactggaagtcgtcgaagcggagccccgcggcgccggccgggatgtacgcgcctagcgcggcctgcaggccggggcggtcggcgccgaggccgagcgcgtcgagcgccgcggccatctccgtcgagggtgatctcgccgtcgccattgcggtcgaagaggtcgaacacgcggcgcaggcgcaggacgttgaggctgccgttccggaggcggaacgacggcgagggcttcttgggcagcgacggcctggcgataacgggagcggcgctctccatcgtccacgtgaactcgcgcggcggcgtcccttctcttcttctcttcaatgctttgtgggcgtcggccgtcagcaggtcaggctgcgagggctggctgattgtttgtggagttggtcgagtgtcgctggcgatggatggggattttattatagacccgggaggaacccacgcgtccgcggacgcgtgggcggacgctggg

SEQ ID NO: 9245 - DNA, 373 bp, Zea mays
  Clone ID: MRT4577_108426C.1
cccacgcgtccgctcccggatcttatttggttctcgctttcccttcggctgtctcggccggtcccaggtggtgctttttcttcgtcgtaatccccgcccagcgagctgcatcgcaccacagtccacaaactgctgatcgatcctagctgctatgctggctggagcatgaattgaatcatgcagctagctagctagcattgcgtgatgaataagaacaactccagcattgatagctcgggcggcggtggcggcacggtgttggaatccggctccggctccggctcctttaacctccggaacctgtccaatgtcatcctcccttcgctcgtgaggccgttcggcggtcaaaatcagtcgtatggcgtgtcggaca

SEQ ID NO: 9246 - DNA, 319 bp, Zea mays
  Clone ID: MRT4577_108427C.1
gcgtccgaccacgcgtccgcatctttcttctttggctacatttccaacatctgctatacattctactgcaagttattataaatacatgccggacccaaaacagcattatgaacgcccacatacattgcacccaaggtgctatcacctcccgactatgatacaaagcttccatacaaatgaccctgtcttgagactcttcacatcatgcttataacatcatacccattttaatacccagctaaccccactaatatacacatcaccattcaccaaataatgcaagagcaatacaagataccacaacatgtgcacatatcta

SEQ ID NO: 9247 - DNA, 212 bp, Zea mays
  Clone ID: MRT4577_108428C.1
ggggtccgacgcggccagctacctgcatgttagcctggccatcttaaagaagctatgcgctcaaaagggcgtcttttcacactaggcatagaagaaggcggaagggcacctcacgacctactacgacacaaaggatagggtatcgcccactcatgacccttcgagcggcatgatcatggagagtaacgcccatcagtagaaggttaaaaagg

SEQ ID NO: 9248 - DNA, 553 bp, Zea mays
  unsure (1)..(553): unsure at all n locations
  Clone ID: MRT4577_108429C.1
cccagcgtccgcccacgcgtccgnaaaaaaaaaaaaaaaaaaaaaaaaaaaaaaaaaaaaaaaaaaaaaaaataataaaaaaaaaaaaaaaaaaaaaaaaaaaaaataaaaaaaaaaaaaatttttttatagtgtgggggggattttttttttaggttccagttttttttcaaggttttttgattggtttttaggtttttttttattgacttttatagtttatttatttgatcccctgtttttatagttgaagttattgggaaaaaccgtgtttttcccttgtttattcattttgtttcaaatccttttttggaaagggggggtgatttgaaaggggcctttaccaatggcttttgtaaaagtttgggcaaattgaatgggttttgttgcgcgccttttagcgcggctttattggggtttgttgtgttgttttcccgcaaatttaccgttttttttgcgggggttttttagcctgttttttttttttttttcccttttttttggggaatggcccgtgtttttccaaataagggtttatattgggggttctttt

SEQ ID NO: 9249 - DNA, 2994 bp, Zea mays
  Clone ID: MRT4577_10842C.1
ggaagatcggtgtcctgaagcccgttttcacgatctggtctggttgctgagaggtatattgatatcaaatacaggtggttttatgatatcaatggggcattttgaagctgaaaactctgctaacctacttacctgcaactaacaaaaggtcacctatatatcaggaaaaaagaaagcaaagcctgtagtgtgtcgctaatctataccatggagcaaaaggacattgcagtatgcctgccacttaattgtgctgcgtataaactatccaacgcgtccgccccgcgtccgcccacgcgtccgcccacgcgtccgcccacgcgtccgctccgatgtgacagatgagatggaatcgtactctttacagcttcaagaaccagatgataaatctccattggaggtaaagaaaatgagtcacaatgctctagctgcccttgtgaagtatttgcagaagaaaagaagtggaatatttgagagagcgacggctgaagtaacagaggaggtggtctctggagctgttcaccacagcttaaaattatctgagccatataagtcaaagaagctgagcaagaaacgagctcagacacatacaagctctattgctagagaaatggcaactgtactggatacttgtctgcttcaagctcttattcttactgggcagtcctcaggggcaatagagttgttgaaaggactcaattattgtgacctgaagatatgcgaagagtttttgaaggaaaggagagaatatatggttttacttgaactctataaaagcaatgaaatgcaccgtgatgctctccaactactcaatcaattagttgaagaatcaaaatctgaaatggagaatacatattttaataaaaaatttaactctcaaatgatacttgaatatctcaggcccctttgtagatctgacccaatgctggttttagagtcttccttgtacgtccttgagcgcaacccatcagaaactattgagctctttttgtctgaaaatgttccagcagatttggtaaattcatatctgaagcagcatgccccaaatttgcagtcaacttacttagagctaatgctctcaatgaatgatactgggatcaaccctaatctgcaaaacgagctggtacaactgtacctttctgaagttctagactggtacaagattctgaaggaagagggaaactggacagagaagacatattccccaacacggaagaagttaatatctacgttggagagcaattcaggttacaatacagacgcacttcttaagcgccttccccaggacgctctttttgaggagcgagctatattgtatgggaaaataaatcaacacctcagagctctctctctctatgttcacaagcttcagatgccagagcgagcagttgcatattgtgaccgtgtttatgaagaaagagaacaacaaccgtccaaatcaaatatctattttaatcttctacagattcatctgaacccaagaaaagctgaaaaggaatttgagcagaaaattattccagttgcatcacaatactctggaatccaaaaggctagtgctactaagcccaaagggggtcgcgtaggtaaaaaggttgtagagattgagggggctgatgacatacgctttagccccagcggaacagatagtggccgaagtgatggtgatggagatgatgtaaatgaccgaggccctataatgttaaatgaagcactggaactgttgagccaacggtgggacaggataaatggtgctcaggctcttaggctgttaccaagagatactaaactccaggatcttgtatcatttcttgagccactattgcgtaactctagtgaacatcggcgcaattatttggttatcaaaaacttgattttgcgggcaaacttgcaggtcaaggaggatctgtataatcggtgtcaagctgttgtgaagattgatggagatagtacgtgttctctttgccataagcgtgttgcaaatagtgcttttgcaatatatccaaatggacaggctttggtgcattttgtctgctttaaagaatcacagcaaattaaggccgtcagaggagcaaactctgtgaaacgtagataatatggccgtgatccaggtcgggcgaccagctggtcattccagaggaccgaccaggcgcctaatcacgattagggcgacaattaggacgcttaatcggtcctggtcgacctctggtcgtcccctaatcgtcctatatatttctgggcatatgtatatataatatgatatatgtatatataagcaatactgcaataggcattatataagtctgaaagtatgaaattgaaactgagtaacagactgaaaggcaatatagacatatagcactatagcagaactgaaactgaaatatggaatacaaggctacaagcagtaatgcagtacctactacctagagcatatcatcatccaagcaaaaagcagcagcagcttctccaacagattcagattcatcagaatttagacaataggaaagataggaaagggggagaagggggaaccttgagatgaggagctcatctcgtcgctagtgttttggagacgccgccggtgttcttgagctgctgctggtgttctagagccgcagcctatgttctggactcggcagaggagaggaaaagtttcaaggggcggtggcgcattgcctttatactactgtagatgggccgaaaaaatagaagcccagtagcccactagaaaaccctagccgcctggacaaatcctggtcgatttaccatctagtcggacgacctgatactctagtcgagtcatccggctgatcggccactaccaggcgacctgcccgactaatcgcgattagtcggatgacttgaaaacagtgtttgtgtgcaccatatctttcatgattatcatgcactatgtaatttattttacatatgaccctgttaatatagttgtatttataacatacaaatgttgaactaaattaaactattctcgttgac

SEQ ID NO: 9250 - DNA, 628 bp, Zea mays
  unsure (1)..(628): unsure at all n locations
  Clone ID: MRT4577_108430C.1
atctgcagctattgcaacgattgccgggacctggatttctgccncgactcggcactccagggccgggagtggagatggtcggtgccgcgtccgcggccgcgtgggcggacgcgtgggcggacgcgtgggcttctgcaggtggtccggcagcgagagaggctgtaccacctgcaggacctggtgtgcgtgcgctgcaggcaggtgaaggccgcccatctgtcggagcagtgttcctgcgggggctccttccggtgcaaggaggagccttcgtatttcctcagcaaaatgcgggtgttcctgaaggtggcggtgagccaaaagttcccgctcctgcaggactgcgtgcagtggattcttgaagccagatgacgcgggctgctacttcaacatagttcattagttcacctgatcgctaggttgtacaacgtgcacaggctgtagctccgaagagtgtataaacgggtgtatagcgctgccacagttcattgtagctctgccctgcttgcaaaaggttgttgttgtattgtagatattcaaaggtggatggcgagaaacgatagtaaccttggtatcgaaacatctggataactagccctctcgtatgtgattgctgggcatagactattcc

SEQ ID NO: 9251 - DNA, 403 bp, Zea mays
  Clone ID: MRT4577_108431C.1
ccgagtgctacgtctacctgataccaccgttgaaaacagttgcctcctacagggagaaatgggatattatgaagcacgacgggtgcggcttcgacaaaatagaggctcaggcgagggtttctccattatggaaaagccatgcagggccaacactctaaaatggacatgacagctctattaacaggtaacgacgctttcaaactcacgccgtcatatttccgttaccatatacgtgaggcctgctcgctcttgatgtcgtccacgcccaaccgagtctctgccaaaccaaaccctagccgccgcaccagagcagccgcactgaaaaccccatggatcgaactgctccccgcgtcgctgttgcagaggctgtagatgctgcacgtgccgcggctgttgctgcggt

SEQ ID NO: 9252 - DNA, 450 bp, Zea mays
  Clone ID: MRT4577_108432C.1
ttttttttttttttaaaacctgttattagggtagcgatgaactaacagcgtttccgcaatttatttcgctttgagtatacctggtaaggcaatatgcaaatgtatacttctgcttgtttatgtttgctaggatttaataaatcaattagcggcaataaatacatatgcgtgcgtgtatagcctgaattttatttagctcgaccataatattgtatatagtttactttgatttgaatagatgggataataacctctaaataaataatgctagttaaccataatttaataccatgcatgtgatatgcataaaaatagtattattttggaataatctacaagatgtacttgcacgggcacaacacatgcatctatttattagctattgtttacggtattttactatagggtgcgttgttggtttccgcaccttgataaaaaaagatgcaactt

SEQ ID NO: 9253 - DNA, 618 bp, Zea mays
  Clone ID: MRT4577_108433C.1
gcaaatctctctctcccttctgatggtttttaccctaacaaattttatagaagctgcctaaaaagctaagcttttggtagtccacagcagcttttggtggtcagaagctgccaaaagccaaaacaaaaaggcctatagttgacagtctatagctatatccctcaagcatcttcgcgtctaaccttgttctattttactcttaataaagtcaaatgacgatttgaggaggcagtagtttcgagcacaagctagtagcgacaacgaaaaaaatattcgatccattccgtgaggcgaaaacagaaaacgtaacacgcgccccccgttcatgtccttgtggtcagattccatccttgctaagcatggcgcttcgtctacaaagcatctcgccgaccctgtttcaagccgcggcggcggctgccggagcgctggcgctcattgtcgcgacacgcctcctcagggaggacgccgtggcatccctccgccgggagatccgagaggtgctcacggcactcgtcgccgacgacgaggacggcgacggcgagagcgcctccccgccgccgccatccgtgctgatcacgggattccgtgcccacggcaagagctcgatggtcaacacgg

SEQ ID NO: 9254 - DNA, 666 bp, Zea mays
  Clone ID: MRT4577_108434C.1
ggggaccctcgggctcggccgggaacgaggccccagctcaccgccgagcggaagcggtgcctagcaaccaagcaatcttatcgtgcgccgtcgcgtctccggaccgtggacgtgggcggcgtcttctgccggctgttttgggagtgcctggctaccggctacctcaagatctccaccttgcccagggccttcgccaccgtgctgaaggatctgaagtatgctgacactcatgaatgggcgaaagctgagggagattcatcaaccgtgggtgatgactgaccatgccgagtatcattagggtgatgttgtgtgtgcggagctaccataagacgacatgagggtatccgagcgaaggaactatgatgctgacgatagtgtgaaggcaaccagcgatatcaattcaccagtggctggagaggtgggcgaagtgaacgacaaactaggtgaggagcctgtattgattaatgcacgtgcatatgagaagggatggattatcaaggtcaagctcagcaattcatgtgagctcagttcgatcatggatgatgataaggactcgaaattgtgtgaagaagaagacactcattgaagatatcagagtgtcttctaaacaccaggacctgagtttcaagctctatcactgggtatggtctgaagaccagctgcgac

SEQ ID NO: 9255 - DNA, 980 bp, Zea mays
  Clone ID: MRT4577_108435C.1
ggcgattgggttcctcgaggccggccggggcgagggctccccccaaccccatcaagtctggccaggtctctcccatatcgggttctcccttcctcttcctgtttccgcgcgcgagatcgccgccccgggtgggctctagatcccgatggcctcgcgccgccgcaccctgctcaaggtcatcatcctcggcgacagcggggttgggaagacgtctttgatgaaccagtatcctgcgattcagatcgattcttgacaagctgacttgatttcgtttcgttgaattttttattcttctggttggttggttggtttgggttgtgttttctttgagctgtgatgtaattcagatatgtgaacaagaagttcagcaaccagtacaaggctacgattggggcggatttcctcaccaaggaggtgcagttcgaggacaggctcttcactctgcaaatatgggacactgctggtcaggaaaggtttcagagtcttggcgttgcattctaccggggagcagattgttgtgtcctagtctatgatgttaattctatgaaatcgtttgataatcttcacaactggcgtgaagagtttctaattcaggcgagcccatcagatcctgacaatttcccttttgttctgttgggtaacaaagttgatgtagatggtgggaacagccgtgtggtgtcggagaaaaaggcaaaggcatggtgcgcctctaaagggaacatcccgtactttgagacgtctgctaaggatggaacgaacgtggaaaatcccttccagtgtattgtaaaaaatgctctgaagaatgaaccggaggaaaaattgtaagccccccttgattctcgtttctttgtgtgtttgattggcatttgacagtttttatgtgccattagttgctgcaagtactaaaaaaccggagcgctgctgtaaaagtaattacatttttaaaatcacccggcccttttgttggtctttttgccccc

SEQ ID NO: 9256 - DNA, 265 bp, Zea mays
  Clone ID: MRT4577_108436C.1
cacaaacgttcctctccttttccatcgtcgtcccctcttctcgcgtgcaacccctgtacgtgctaggcacacaacacagctagctgcagctacagcagggcagcaaatggtttccggtgcgggtcatggtgggtacggcggcggcagcgacgacgggcaggccgtggacttccggggcaacccggcggacaagtcgaggaccggaggctggctggcccccggcctgatcttggccacgaacctgccgaaccccttttccttaatg

SEQ ID NO: 9257 - DNA, 302 bp, Zea mays
  Clone ID: MRT4577_108437C.1
ctctcttatttcatggagttgataagcggtggaggcgcatgatacttaatttggcattgggaaaggacaacaacgtcttcatgacccaccagccagaaggggaaaactggtccagcgggcgcgctcgcatcggggagcacagaaagcagccgtcagggctagcttacttcgatggcttgcaccaacactgcatgctcttgaagaagagcacatgccgcgcatactttttttgtttgagatgcgtttcttacatacactgcggagctgatttattgtatgctagccaacatggagctgatcat

SEQ ID NO: 9258 - DNA, 1150 bp, Zea mays
  Clone ID: MRT4577_108438C.1
cgaggccggccggggaaaaaaaaaaaaaaaaaaaaaaaaaaaaaaaaaaaaaaaaaaaaaaaaaaaaaaaaaaaaaaaaaaaaaaaaaaaaaaacctcccttcctcttcctgtttccgcgcgcgagatcgccgccccgggtgggccctagatcccgatggcctcgcgccgccgcaccctgctcaaggtcatcatcctcggcgacagcggggttgggaagacgtctttgatgaaccaatatgtgaacaagaagttcagcaaccagtacaaggctacgattggggcggatttcctcaccaaggaggtgcagttcgaggacaggctcttcactctgcaaatatgggacactgctggtcaggaaaggtttcagagtcttggcgttgcattctaccggggagcagattgttgtgtcctagtctatgatgttaattctatgaaatcgtttgataatcttcacaactggcgtgaagagtttctaattcaggcgagcccatcagatcctgacaatttcccttttgttctgttgggtaacaaagttggtgtagatggtgggaacagccgtgtggtgtcggagaaaaaggcaaaggcatggtgcgcctctaaagggaacatcccgtactttgagacgtctgctaaggatggaacgaacgtggaagatgccttccagtgtattgtaaagaatgctctgaagaatgaaccggaggaagaattgtttgtttgtagatccatctagcacactgtaagcgtcaccctgcgaatttgccagttttagaggcagctggaacaatgtagagggcataacatgcatgctaaggtgaatggatgcatagatgaagcatatttagacattttgttgaggaaatggaagttgcttgtaagcatacgcagcaccggaaaatgttttttcatgttaactcaacaagaggacaagatacaaatactgaggataggctactaatattgatgactgtgacatggagttcataccaggcggagagtgtcggcaccaggggtgttgtgggcttctgatggcgtctgcacgttaggcgaagcagggataatttcttttcctagcagtaggttgtctccctgatgtggggttgtctatatcatacaatgcaaacaaaagacatgtgtagagcttgtttctc

SEQ ID NO: 9259 - DNA, 2392 bp, Zea mays
  Clone ID: MRT4577_108439C.1
aaaagggattatacatgctctcttgaaagatgagggagtttcacaacgatgaaactctggatattgttttctagacaagacaaatgtttagataatagccttagaaacaatgtgataaaactattcttaatgaatagcctaagggatggcattaacatgtttgcactgaagcagaaagcgaggaaaaggcggacgagttaatacaacacaaaaccataaagcatgaactttagtttacacttcctcttattttggccaattgtattcacaaggtatgacgctactgatgaaactgcacaaagtccaccgaattgacaggcgcccttgggtacatagcagtgagactggaaaggtaacaaatggaatacggatacgtagataaccacggagacccagcaatgctaaggtattgtttggtcactgcataaccgacgatgatgatcacaacgcctcgtgatgcctcgtgccttaacagcaaccagatgatctctgggcccggttgccacccaccacgtccacggtatctggcacatacagttcttcctctggctcattcttcagagcgttcttcacgatacactggaaggcgtcttccacgttcgttccgtccttagcagacgtctcaaagtacgggatgttccctttggaagcacaccatgcctttgcctttttctcagataccacgcggctgttgccaccatctacatcaactttgttacccaacagaacaaaagggaaattatcaggatctgatgggctagcctgaattagaaactcttctcgccagttgttcaggttgtcaaatgatttcatagaattaacatcatagactaggacacaacaatctgctccccggtagaatgcaacgccgagactctgaaacctttcctggccagcagtgtcccatatttgcagagtgaagagcctgtcctcgaactgcacctccttggtgaggaaatccgcgccgatcgtagccttgtactgattgctgaacttcttgttcacatattggttcatcaaggaagtcttcccaaccccactatcgccgaggatgatgaccttgagcagggtgcggcggcgcgaggccaaggaggtgcagttcgaggacaggctcttcactctgcaaatatgggacactgctggtcaggaaaggtttcagagtcttggcgttgctctccgccttcctcttccagtccccgcgcgcgagatcgccgccccgtgtgggccctagatcccgatggcctcgcgccgccgcaccctgctcaaggtcatcatcctcggcgatagtggggttgggaagacttccttgatgaaccaatatgtgaacaagaagttcagcaatcagtacaaggctacgatcggcgcggatttcctcaccaaggaggtgcagttcgaggacaggctcttcactctgcaaatatgggacactgctggccaggaaaggtttcagagtcttggcgttgcattctaccggggagcagattgttgtgtcctagtctatgatgttaattctatgaaatcatttgacaacctgaacaactggcgagaagagtttctaattcaggctagcccatcagatcctgataatttcccttttgttctgttgggtaacaaagttgatgtagatggtggcaacagccgcgtggtatctgagaaaaaggcaaaggcatggtgtgcttccaaagggaagtaagtacatggggtttcatcccgtactttgagacgtctgctaaggacggaacgaacgtggaagacgccttccagtgtatcgtgaagaatgctctgaagaatgagccagaggaagaactgtatgtgccagataccgtggacgtggtgggtggcaaccgggcccagagatcatccgggtgctgttaaggcacgaggcatcacgaggcgttgtgaccatcatcgtcggttatgcagtgaccaaacaataccttagcattgctgggtctccgtggttatctacgtatccgtattccatttgttacctttccagtctcactgctatgtacccaagggcgcctgtcaattcggtggactttgtgcagtttcatcagtagcgtcataccttgtgaatacaattggccaaaataagaggaagtgtaaactaaagttcatgctttatggttttgtgttgtattaactcgtccgccttttcctcgctttctgcttcagtgcaaacatgttaatgccatcccttaggctattcattaagaatagttttatcacattgtttctaaggctactatctaaacatttgtctagaaaacaatatccagagtttcatcgttgtgaaactccctcatctttcaagagagcatgtataatcccttttaatatgaggtttctatgggattgaaaaaatataagttatgatcaaaggctttaa

SEQ ID NO: 9260 - DNA, 1062 bp, Zea mays
  Clone ID: MRT4577_10843C.1
ggaccctcgaggccggccgcgtccctcctcctccgccaggcgccagccgcccgcactctagcaatggcgtctgcctcgcacgccccgacgccgctgctcaaggacgagctggacatcgtcatcccgacgatccgcaacctcgacttcctggagatgtggaggcccttcttccagccctaccacctcatcatcgtgcaggacggcgaccccagcaagatcatccgcgtccccgagggcttcgactacgagctcggccggggcaacgacatcaaccgcatgctggggcccaaggcctcctgcatctccttcaaggactccgcctgccgctgcttcggctacatggtctccaagaagaagtacatctacaccatcgacgatgactgcttcgttgccaaggatccattagggaaggacatcaatgcacttgagcagcacatcaagaacctcctgagcccttccaccccatttttcttcaatactctgtacgacccttaccatgttggcgccgattttgttcgtgggtaccccttcagccttcgtgagggtgtcccaactgctgtttctcacgggctttggctcaacattccagactacgatgcccctacccagcttgttaagccccttgagagaaacaccaggtatgtggatgctattcttacgatcccaaagggcaccctcttccctatgtgtggaatgaaccttgcgtttgaccgtgagctcattggtcctgcaatgtactttggtcttatgggtgatggccagcctattggtcgctacgatgatatgtgggcaggatggtgcacaaaggtgattacggaccatctgggcctgggtgtgaagactggcctgccctacatctggcacagcaaagcaagcaacccgtttgtgaacctgaagaaggaatacaacggcatcttctggcaagaagagctgatcccgttcttccagtcggtctcccttccaaaggaggccaccaccgtccaaaagtgctacctcgagctggccaagcaggtgaggggcaagctcggtaaggtggacggctacttcacagcttgccgactc

SEQ ID NO: 9261 - DNA, 546 bp, Zea mays
  unsure (1)..(546): unsure at all n locations
  Clone ID: MRT4577_108440C.1
ggcagacgatgacgactgcggctacgacggcgcggcggccgaaggcagctgctccactgcggcgatcaagaaggagctatacgcgcgcctctgccggcccaccccgttcgacggcggtaccaaggaattctggatcgagaagaacaagggagggttgtgcatgtccatctcctcaaaggctatgtcgatcacaggaagaaatgatcggaggtattggagcgacctgtccacagaggaatcaagatttcacagcgttgcctatcttcggcagatctggtggctagaggtggatggggagatcgacttctgcttccccgccggatcatacagcctattcttccggctccacctgggccggccgcgcacgcgccgagctcgccgncgcggtggctccgacaacgacatccacggctgggacatcaggccggcgcggttccggctctcgacctcggaccaccagcagcacaccaccgcgtccgaggctcacgctcgcctagctagccccggaagatgggtcctttaccacgtcggcgacttcgccgtgtc

SEQ ID NO: 9262 - DNA, 324 bp, Zea mays
  Clone ID: MRT4577_108441C.1
gctgcaacgatgcaggtcactttcaccatccgccgctgcggcatcttcatgaaggtttaagagctctccgtgctgtgctataccgacgtcgcgctcatcctcgtctcctccacggggaatcgctcgtaattatccaactgcaatatggatgagataattgacaactacttcacacattgctattttcgtgcgggacaacagagcagacttcgctggactttaacttatagcatagcatatatgtaaatttgaatgaccagcttgcggtaccaagccttcgactcatgcagattaaaggtgtagaacttgatggatttaatgttg

SEQ ID NO: 9263 - DNA, 334 bp, Zea mays
  Clone ID: MRT4577_108442C.1
gggggggggggttttttttttaagccgagggggggtcattcattcattcagggaaaggagatgagacctcatacatagttgattcaaagtacagacataagacattatcaaaaattcataatgcaacagcctatgaccaggccctttttttgagtcagccaaatcgtccatgaattctgggtatttgaatggaaccatgatcatgtcaattccagcaccaacaccagccttaattgagtaagaatagttggcgtgaggaggagtacttgatcccatcaatgccctcccagtcggaaaatacaaaacccctaaacttgagcttggttcttgaaaa

SEQ ID NO: 9264 - DNA, 361 bp, Zea mays
  Clone ID: MRT4577_108443C.1
atgctcttcttacaagtgagctaggttctctcgtccccctacctcgatccgcacctgaccaggaagttctccgtgaccgagagttcggcggactctgaccccgagagaaaggagaaattgtacacccaggtgaagattgctgctgtgttgtaggctatgtgcaggaccgcgtcgacgcgctgatcgaccacgttcaaagggttgctctaggatgaattaacgggctcgagatgaaaaacgctaagatgcacgatcggtccttcgactacgataggctgcttgaccaggtacaggctgaccgagagatagcgctcaacattgatagtgctctgtgagaatttgatattatacaggtactact

SEQ ID NO: 9265 - DNA, 342 bp, Zea mays
  unsure (1)..(342): unsure at all n locations
  Clone ID: MRT4577_108444C.1
cgcccacgcttctcgcccaggaaagccgtcaagctttttggttattgaacttcactagccgcctgtgcggggccatgtccgcgcacatcgcctccagctgttcgtcanaacaccgccaatgaagttcacttcagtgtcgtgtttcctcgaagtgtggactgtggcacgaagtgaagagaagcacccgcggcctacgaggtcagaggcgatgctcgaccttccacttcttcaagaacggcaagacggtcgcgaccatcttgggtgccaggaaggacaagctcctggcccagatcgagaagcatgctgcgcctgcgccttcttttgcgtctgcctaaaggagat

SEQ ID NO: 9266 - DNA, 286 bp, Zea mays
  unsure (1)..(286): unsure at all n locations
  Clone ID: MRT4577_108445C.1
cccacgcgtccgttccagtgtccatcagcacctcctgtgctgtgcattcctgagaaaccaaccccgccccctgcccccccacacgcacagtttagtgcccggagcccggaggcgtacgtgtacgtcgcatcccagcgcagcgatgccggtcaccgtcggcgcccggaccaccctcctcctcttcgccaccgcagtggtgctagcgtgcacttcagcgccgccggcatgccatgccgcgcacaacatcaccgccatcctcttcgggcaccgggacctngccgagttc

SEQ ID NO: 9267 - DNA, 240 bp, Zea mays
  Clone ID: MRT4577_108446C.1
cacaattccgcacagaataggggccgtaatatataaagagcaaaacctggggcgcctacccaccaatctaacaaacatgaattgtaaagtgctgggtgcacgttcgggaggagggaaaagcggtaggaaaattggtttattgagtcggcccccccgcccaaagaggaggacggaatttggggcgccaggggggtttttttatccaccaagggcacgggtaaaggttttttgccctccacg

SEQ ID NO: 9268 - DNA, 111 bp, Zea mays
  Clone ID: MRT4577_108447C.1
tgacaactcagctttcagtcatggactccggtaacgcgcgcatcgggaagccagcccctgacttcaaggccacagctgtggttgctggcgccttcaaagaggtgaagctgt

SEQ ID NO: 9269 - DNA, 380 bp, Zea mays
  Clone ID: MRT4577_108448C.1
ttttatcaatgagccaaccgctgatgctgggggctattgtcttgacaagagggcacccagcgttggtgagaagaatgtggtgatctttgacctgggaggtggaaccttggatgcatacatccttacaattgcagaaggtattggaggggataaggtcacaagggggaacacctacatgggggactgggactttgacaacacgaagccagaccactgagatcactattccaagaacctaagcatgaatgatgtaaatggaaaccctagggcttttctgatggtgaagacctcttgtgagagggccaacataactgtgggttacactgaccagaccatcaacgagcatgacttcatggacgagggcatggacttctactaga

SEQ ID NO: 9270 - DNA, 784 bp, Zea mays
  Clone ID: MRT4577_108449C.1
ggccgcttttttttttttttttttgatacaaatcataatttcttagattttgtcgagatagttatagaatttgagttggtaatacaagaccatcttagacatattcaaaagaaaaaaaaattatcaccattatctcagtcataaaatccaatataagccgatatttttttttgatacgcaccaataacctgagatttttctataggtacagaatatgcattcagtggtattgaatttggtgtgtaaggacatgccgtgtgtatgcgtgtgtagtggtgtgagtgtatggcgtccttgtaccgtataaaaaaaatccctcttggacttggtgaatagaaaccatgtactactcgaccagtcttgcagctgcacctttacgtgcttagtaagatcgatatggcgaagcactatgatgtgagtgtttccatcgcttgttgagtggtggtttgcagctgtacgtgcttcgtgagatcgacatggtgaagcatcaggatacagagtctcacctagggccgatcgggttctccattcaaatcaggtccttgcagcctcatccgagcaacagctattaccaccagttcagatgttacgggaaggaacataacagcctgtgagttcctaatgtgatatactatatcaatgtcaacatggtggccaagaatcccaagattgtgaaaccatgatgatataaaccaccaccacttatgattcgcacagccaaggttgatgacaaaacaagctccacatcaggcatcgccattgacataagtatgaaagcagcaaa

SEQ ID NO: 9271 - DNA, 2646 bp, Zea mays
  Clone ID: MRT4577_10844C.1
gtgacctgaagatatgcgaagagtttttgaaggaaaggagagaatatatggttttacttgaactctataaaagcaatgaaatgcaccgtgatgctctccaactactcaatcaattagttgaagaatcaaaatctgaaatggagaatacatattttaataaaaaatttaactctcaaatgatacttgaatatctcagggtattatttctatgtccttttgctcgcatttagctcaaatgatcctcaaatatcttacatgccttgctaaatggtgttctatctgctgcataaccactgtttctacaagctagatgggttcatgaataattatgctttattttgataacttaacaggttaagttttaaggcactattaaaatattaaattcaaggtgtgactcatgtttactagtttctctgtgcatattttgtaattatatccaactgcatgatgtctcttcgatcagtaggccaaacagtttgtatacttgaaagcttatttgatatgtggtaggattacatataattgctcaatatactatcatgttctgtttcacgcttttgttgtcctccaacaattgatcgttagtactagcaaaactggctgcatagtgatattttactgtgtatctcttgatatcttttaaagcttatcatttggatctttgctttgatgtcttgaaatcattttgctttctgccacaaattaatacttttatatgtctgattcgagatttcattttcatttccagcccctttgtagatctgacccaatgctggttttagagtcttccttgtacgtccttgagcgcaacccatcagaaactattgagctctttttgtctgaaaatgttccagcagatttggtaaattcatatctgaagcagcatgccccaaatttgcagtcaacttacttagagctaatgctctcaatgaatgatactgggatcaaccctaatctgcaaaacgagctggtacaactgtacctttctgaagttctagactggtacaagattctgaaggaagagggaaactggacagagaagacatattccccaacacggaagaagttaatatctacgttggagagcaattcaggttacaatacagacgcacttcttaagcgccttccccaggacgctctttttgaggagcgagctatattgtatgggaaaataaatcaacacctcagagctctctctctctatgttcacaagcttcagatgccagagcgagcagttgcatattgtgaccgtgtttatgaagaaagagaacaacaaccgtccaaatcaaatatctattttaatcttctacagattcatctgaacccaagaaaagctgaaaaggaatttgagcagaaaattattccagttgcatcacaatactctggaatccaaaaggctagtgctactaagcccaaagggggtcgcgtaggtaaaaaggttgtagagattgagggggctgatgacatacgctttagccccagcggaacagatagtggccgaagtgatggtgatggagatgatgtaaatgaccgaggccctataatgttaaatgaagcactggaactgttgagccaacggtgggacaggataaatggtgctcaggctcttaggctgttaccaagagatactaaactccaggatcttgtatcatttcttgagccactattgcgtaactctagtgaacatcggcgcaattatttggttatcaaaaacttgattttgcgggcaaacttgcaggtcaaggaggatctgtataatcggtgtcaagctgttgtcaagattgatggagatagtacgtgttctctttgccataagcgtgttgcaaatagtgcttttgcaatatatccaaatggacagactttggtgcattttgtctgctttaaagaatcacagcaaattaaggccgtcagaggagcaaattctgtgaaacgtagataatatggccgtgatccaggtacacccttgaacgggacactgacaaatcaatatcgaggtttggttgatgccagcttatggaattccttctctttggcttcacaatggattttagtggactgcttcagaagtttttactggagtaatcttcactctcttcagagatcgagtttatagccgtgcgtgtgtgctcggctgctcgctctctgttttctggccagcgtactggaaaactggaacccctttcttttggttttcatgtacagaatgtaaatgatactgtaaagtttcggttaacagattgatgatggtcttgattatagtgccgcaatgtgtgctccaaataggtttggacattattattattggatccatgtcattataattctctaagttttgaatggcgctattataattcgtaaaaaaaaaaaaaaaaaaaaaaaaaaaaaaaaaaaaaaaaaaaaaaaaaaaaaaaaaaaaaaaaaaaaaaaaaaaaaaaaaaaaaaaaaaaaaaaaaaaaaaaaaaaaaaaaaaaaaaaaagggggggccctttttaaaggaccaaattttacttccccgtgtttgcaaggtataactttttttttagggccaccaaaataaaataaatggcccgggttttaaaaacgtgggaattggaaaaaccttgggttacccaaattaaatcgctttgaaaaaattccccttt

SEQ ID NO: 9272 - DNA, 891 bp, Zea mays
  Clone ID: MRT4577_108450C.1
ctcagcgagctctcccgtacgtgcgcagttctcggcacgctaccccttatatacccccccggccgctctcgctctagatgcacaggcagtgacacgcgcgcataccgacggactaggtagctgctcatcagctatccagatcgttgctccttccttccctcgccatcggccgcgcccgtgtcgggcggcgggaatgggacgccacgcggcctccggcggcggcgtgcagcagaagctgcgcaagggcctctggtcgcccgaggaagacgagaagctctacaaccacatcatccactacggcgtcgggtgctggagctccgtgcccaagctctcagggctgcagaggtgcggcaagagctgccgccttcggtggatcaactacctgcgccccgacctgaagcggggcagcttctcgcagcaggaggaggacgccatcgtcggcctccatgagatcctgggcaacagatggtcgcagatcgcgtcgcacttgccgggccgaacggacaacgagatcaagaacttctggaacagctgcctcaagaagaagctgcgccagcgcggcatcgaccccagcacccacaagcccatctccgccgacgcggcggcattggagcagccggcgtcgcgagaccgcaagccgtcgttggccacagccgccgctggtggcggcctcgacgtgaagcagcagcagcagcagcagcaggtgttcgacccgttcccgctgaccgacagcttcggcggcggcttcgacgacgcggccggcgccgcattgtacggccacatgggcggcggcggcggcaagcagcaggacgcggccgccaccgcggtggacgtgttggaacgtgtcggagaacctgggctacggcgagagctccagcacagcagcacact

SEQ ID NO: 9273 - DNA, 723 bp, Zea mays
  Clone ID: MRT4577_108451C.1
gcaccggttagtgacacgcgcgcataccgacggacttggtagctgctcaccagctatccagatcattggctcattgctgcttccattccattccccccctcggcatcggccgcgcccgcccgtgtcgggcggaggcggacgcgcgcgggaatgggacgccacgcggcctccggcggcggcgtgcagcagaagctgcgcaagggcctctggtcgcccgaggaagacgagaagctctacaaccacatcattcgctacggggtcgggtgctggagctccgtgcccaagctcgcagggctgcagagatgcggcaagagctgccggcttcggtggatcaactacctacgccccgacctgaagcggggcagcttctcgcagcaggaggaggacgcgatcgtcggcctccaccagatcctggggaacaggtggtcgcagatcgcgtcgcacttgccgggccggacggacaacgagatcaagaacttctggaacagctgcctcaagaagaagctgcgtcagcgcggcatcgacaccagcacccacaagcccgcggtctccgccagcgtgccggcatcggagcagccggtgtcgcaggaccgcaagccgttggccgcagccgccgctgatggcggctccgacatgaagcaccagcaggtgttcgacccgttcccgctgaccgacagcttcggcggcggcttcggcgccgcactgtacggccacacgggcggc

SEQ ID NO: 9274 - DNA, 172 bp, Zea mays
  Clone ID: MRT4577_108452C.1
ctgctcgagctcttactcacgtcacgtactctatctcttctctgtccctctcagctcttccagactccacccactctacccagttgcccttctctgcgtcgctcgccatgacgtcgtccatggtgagcttggagtacatgggcatcacgctcacgttgaagaccttcatcac

SEQ ID NO: 9275 - DNA, 212 bp, Zea mays
  Clone ID: MRT4577_108453C.1
tgggggttttttttacaagatctttggggtaaagcacaaacgaggggcccacaaacccaggacttatctaagctgatggtgtgtacgaccagatgacaacacttgaagagatgacgaagcgcatgaacaactttcattgaacaagctaacacttctatgatgatgacgcgcgattcactgtcacaggcaacagacacttgattagagaataa

SEQ ID NO: 9276 - DNA, 575 bp, Zea mays
  Clone ID: MRT4577_108454C.1
agcagtggtaacaacgcagaggactttttttttttttttttttttttttttttcttttttttttttttttttttttttttttttttttttttttttttttttcccaccaaaggggggatgggtcccgggaaaacaggaaaaaaaaatggccccctcccttccaaggcattagggggggggaggttaaaagggactttttaagcccatctaacaacagcccaggctaagaggctctcaaactggggaaaacacaggccccccgggggcaattttcatcactaacagccccatggggatccaaagaaaacaaaagcttaaggataaggctggggagaccaaaacaaagtttttttattccagcccataagggctttcacaaacggaggggaaccaaccccagttttattcacatacggcttcccattttattaaaaaaaaggggaaaacagcggtggaggccttacccactagccaaaacagggggtggggccttacccttattgggaagggggggctccgaggaacccttttttttgagcggcatagctttcggggacaaaaacctcccctccccc

SEQ ID NO: 9277 - DNA, 351 bp, Zea mays
  Clone ID: MRT4577_108455C.1
cgggtgggtttttttttttttttttttttttttttcggccccaacttctgatgaacaacatgcaaatgcaggacaaagtcagtttatgacccacacacatacaggttctgttgaaaccacccaccccaaccaaattgcagagatacccataaacatttttagaatacagaggtccacatgaacatacatttttttatggaaattaacttcacatccagcaggttacgatggacttagtaaaaataaagcttcccaagcaggcggggctccaaaaagtttcggcggagaaggggcccatcacatcatttgctcccgggaggttcacctccgaaaaggttgccgagcgaaaag

SEQ ID NO: 9278 - DNA, 721 bp, Zea mays
  Clone ID: MRT4577_108456C.1
aagagaaagaacacgacacttctgttctggatgaagaaggttccaatgattttcaagtttgttacatcgatcaatacaaagaaataacacagcatcaagtacttcagtatctctattctctacatagatctttgtcaggattcggccattcgggataacatagctgggctagttacaagtcacaagaagcggtcaagcagaagcccatcaatccatactaataccctcttgacctttgcacgataggcacttccctcattgatgcaagagtttgcaagcagagggcagttgttaatgctcacgacctgaactgagctaggcaagcctccatttggcagggacttaatcgaaccacagtctgaaatctcgagtcttactaacgaatcaagaccacccatgtccggaaggtcggtaagcctcccacaagaaacgatctccaagtcttccaacgcttgcaggcgctgcatgccctctggcagttcacgaagcagaggacagtgcctcacacagaagtgagtcagggtacacggtggccagtcctctggtatgtgctgcagctgctcgcagtggctgatctccaggcgctgcaaagatgtatgcaactgtccgatccttggggggaagttcactgtaggcatgttgcagagggtgatggatgttggagaagaaagcctgggccatgatccccatatccagtcgccactagcgtctacgttcacgc

SEQ ID NO: 9279 - DNA, 297 bp, Zea mays
  Clone ID: MRT4577_108457C.1
cccacgcgtccggtcccagtatggcttgggcaaaaccttaagccacccaggaagagaccagagtagcctccaactgtctcaaccattaaccagtgaagttacttcaaccaacctacaccgccagtcgcctgtgccttcgagtcctagctccgaccggtgaccggatgcgggatgtataccatgctctgacgccgagcggctgcctgctcgcgcccgactccgcctggtcgcctgatggacgaccgccgatcgccacgctgagcgccgcggcgtgccctgtcccttatatgcttgctg

SEQ ID NO: 9280 - DNA, 441 bp, Zea mays
  unsure (1)..(441): unsure at all n locations
  Clone ID: MRT4577_108458C.1
agcgctcgtagatcggcagatggaaggaggggggctaataaaggctgccgggcgggggggctgcatcagcggagaggcgcaggatctgccacggtaaaatgggatgccgtttgtcggtcatgccgtgccgtgccgtgccgtgtgctatgcgcccgagcccgactgcagagccgcccgtccgccgtagctggcacggcgtgcgctgatggcaaaggtgtgcgggctctcggccgggccggttgacttcacgaggaggactcttgtgtttgtttggctgactctggtcctgggagatggcaaccgtttattgggccgtgcgagacactgggccgcgtgccagctttactgcagctggtggagctattgcaggccgaaaccgaaccttncaagcgccgcggactggctgccagtcccgtcagcgactacactgcgcaacataac

SEQ ID NO: 9281 - DNA, 435 bp, Zea mays
  Clone ID: MRT4577_108459C.1
ggcctaacaattttttgaaaagcttttttacatgttcattgggtcgtaacttgtaacaccgggttttaccagcaaggggggcgcccattcaagggaaataacctttgggccccaaatgagggttttaaagcctaaaaccaagacctttttttggccttcaaacattcaaaggtacattcttcaaatgtcattagcagcatgtgtgttttgttacattggaaaaacaaaccttttggagctttaaaatgggttccaaaggtttccaaaaatccacctttttaacattttcaaaacaacctttggttgatccataggtaccatgtgaccagcatcgtgaaccttttaaaaactcaaaggaccggggctttttaaaaagccagctttttttccgtcgactgtgaagggctttttggatgaggacacaaaaactttctt

SEQ ID NO: 9282 - DNA, 382 bp, Zea mays
  Clone ID: MRT4577_10845C.1
acgcacacacttacgctcacgcacgtaccataatccacttaacactttcctggggtctgacctaaagggcattaaacacaacctcttacaacacctgatgctgatggcgccgcagtacgttatccagcacctcttactcttgacctgcatgtccataccggttccggcttggattaacatgcccgatatgtctgtatcgaaataacacctgtctgcctcctctgatgtagaacatgtggacatggtgactctgttctacaccattatggcttagcactacatatttgatgttagctaaaaaaaaaccaattccacctgcatgggccacaaaaaaaaaaaatagccggctcttctttactgttcatacccaaaaaaaccttct

SEQ ID NO: 9283 - DNA, 175 bp, Zea mays
  Clone ID: MRT4577_108460C.1
cgcacgcttttttgcgatttacccatgccggcaccactccggtcaaaacacctgtcggagagagagatggcaaccctagcagacatacaatccctcgcgcccaaaagataccgtcgggcgccgtagatgaagacgaaagcggaggcctcgattttcttctcccagcccgcgtacc

SEQ ID NO: 9284 - DNA, 386 bp, Zea mays
  Clone ID: MRT4577_108461C.1
aaaaaaaaaaaaaaaaaaaaaaaaaaaaaaaccaccacgtaaccacaccgacagaaaaggagggacgaatgtggcgagcttctcagtgcttgcgataacccggccggcccttgaacccggctctgcggggaggggcaagggtcgtcgacagctttcggcgggctcaaggcctacgtcgccggccccgaggactccaaggccgccgtcgtcctcgtcgccgacgtttgggggggggggctcccattttcactaaaatatcctacattaccctcccctcatctcactaatttctgtcaccgggattttttgcctgtatttattttttaattttttgtgttttctttcttttttcttttttttttttttgttcttttatttttcttttt

SEQ ID NO: 9285 - DNA, 828 bp, Zea mays
  unsure (1)..(828): unsure at all n locations
  Clone ID: MRT4577_108462C.1
ccggccggaacgggttcaccggagccatgtcgccgctgatcgggcaggcgcagagcctcaaccagctgtggctgcagaacaaccacctcagcggggcaataccgccggaaatcggccggcttgggcaggtgcagaagctctacctgtccaacaacaccttctctggctccataccgtcggagatcggcagcctgtcgcagctgacggcgctgcacctggaggacaacgcgttcagcggcgccttgccagacgacatcggcaggtgcttgaggctcgtcgagatcgacgtctcccagaacgcactgtccgggccgattccggcctcgctgtcgctgctgtcgtcgctcaactcactgaacctctcctgcaacgagctcagcgggccgatcccaacgagcctccaggcgctcaagctcagctccatcgacttctcctcgaaccagctcaccgggaacgtgccgccggggcttctggtgctcagcggcggcacccaggcgtttgcccggaaccccggcctctgcattgacggcaggtccaacctcggcgtctgcaacgtggacggcggccacaaggacagcctcgccaggaagtcacagcttgtgctcgtgccggcccttgtctcggcgatgctgctgctcgtggccggcatcctgtttatcagctaccggagcttcaagctcgaggagctcaagaagagagacctggagcacggcgacgggtgcgggcagtggaagctggagtcgttccacccgctggagctggatgccgacgaaatctgcgccgtcggggaggagaacctgatcgggtcgggcggcacggngcgcgtgt

SEQ ID NO: 9286 - DNA, 298 bp, Zea mays
  Clone ID: MRT4577_108463C.1
acccaatccgaccaaaccggcagagccggggggcggcgatggcgctgcgacgggcgctcctcagatcggcagagatctctttcgaacgcaagtagccgggagattcggaatcccgcgcgcgagttgggcctagccagctggcgtcgtagccgcactctgggaggcatgtgggttcgagccgcggagggtaggggtaggggcgggtttcagttgttggcctgttgctgtatttcgcgtggtgatggaatttaatctcttccggggcgacgggcatggttttaagggaaaatttttgggg

SEQ ID NO: 9287 - DNA, 381 bp, Zea mays
  Clone ID: MRT4577_108464C.1
ctcacttcattttctatcctgtgtttgcattctgggacaggatcagatcgcatctcggttacgtatcgtatcagaattcacatgacctgcccattcaagtcaactccagtcttagcgtacatacctcatgcactgttacattacttcttctctgcatcgtatagtccttcactactcgcatcttgtaccagcacagccttttccctcgcttcggattccgagcctatagtctcttctcttttcttcacctcaagtaacgtgctgatatggtcgactcgcgaggcgctggcttcgcatcccacgccggggcggcgatttgcactgcagcgcatcgtctcgaatctatgttatggtggcgacctgagcatcgggcttggcgtg

SEQ ID NO: 9288 - DNA, 1241 bp, Zea mays
  Clone ID: MRT4577_108465C.1
ccggccgggaaaaaaaaaaaaaaaaaaagagaagggccacagcacagagagtgactgtctgccagcgccagactgccagtggactgcgagggagcgcctccgcctcagatccaaccccaccgatgcgagctccggcgatgctccgctgggccgcggcggcgctcgcggcgctcctcgccgcctcaccggccgccgcgttctgtctacccggcgtggcgcccaacgacttccataagaaagatccacttttggtgaaggtgaataagctgacatccacgaagacgcaacttccctactcatattactctcttcctttctgtaaaccaaacacgatagttgacagtgcagagaatcttggagaagttctgcgtggtgatcgcattgagaactctccttatgtgtttgagatgggggaacccaagatgtgccagattatctgcaaagcaaaaattaatgataaacaggcaaaggagctcaaggaaaaaatagaggatgagtatcgggtgaacatgattcttgacaatctcccactagttgttcctcttgcaaggcaggataggggtgctactgtttaccaggctggatatcatgttggtgtcaagggccaatacgctggtgtaagtttgtgtgctcagctggtgttttacttttaacagtgtgtaggtctccttttttcttgagagggtggagttatcttattacaaaatatatgttacagaacaatgataagaagtcctttatccacaatcacttggcatttttagtaaaataccacaaggatgaaactacagatctctctagaattgttggatttgaggtcaaaccattcaggttagttttagttatgcttgccctattttgttagtatgatgcctttcacgctgacactatcttgtttactaacttatactttttttgttaaatttctcatgccagtatcaatcaccagtttgaagggccgtggaatgataaaaacactcgtttaatcacatgtgatcctgatgccagcaagcttctggtaaactcagatactcctcaggaggttgaagccgggaaggaaatcatatttacctatgatgtaggcttcgaggagagtgatatcaagtgggcttctcgctgggacaccttcttgttaatgatagatgatcaaattcactggttttctattgtgaactctctcatgatcgtactcttcttatctgggatggtggcaatgattatgctccgcaccctgtatagag

SEQ ID NO: 9289 - DNA, 1019 bp, Zea mays
  Clone ID: MRT4577_108466C.1
aattcggcacgagggccgatttgagcttccttgaacgcaagcctgtgggatgcatccgcccaaattctgtctggcccgttcaccatttctcgttcagagttgagacatcagagaagggccacagcacagagagagtcagtctaaaaaaggcatagagagcctccctgccagtgccggactgccagtgtactgtgactgcgagggatcacctccgactccgactcagatccaaccccgaccgatgcgagcgccggcgatgcaccgctgggccgcggcggcgctcgcagcgttcctcgttgccttgccggctgccgccttctacctccctggcgtggcgcccaatgacttccacaaaaaagatccacttttggtgaaggtgaataagctgacatcaacaaagacacaacttccctactcgtattactctcttcctttttgcaagccaaacatgatagttgacagtgcagagaatcttggagaagttctgcgtggtgatcgcattgagaactctccttatgtgtttgagatgggggagcccaagatgtgccagattatttgcaaaacaaaaattgatgataaacaaacaaaggagctcaaggaaaagatagaggatgagtatcgggtgaacatgattcttgacaacctcccactagttgtttctattgcaaggcaggataggggtgctactgtttaccaggctggatatcatgtcggtgtcaagggccaatatgctggtaacaaggatgagaaatcctttatccacaaccacttgacatttttagtgaaataccacaaggatgaaactacagatctctctagaattgttgggatttgaggtcaagccattcagtatcaaccaccagttttgaagggccgtggaatgataaaaccactcgtttaatcacatgtgaccctcatgccagcaagcttgtggtaaactcagatactccctcaggaagttgaagctggaaagaaatcatatttacctatgatgtgggcttcgaggagagtgatgtcaa

SEQ ID NO: 9290 - DNA, 2389 bp, Zea mays
  Clone ID: MRT4577_108467C.1
atggaggcctcggtgccggcccgggcggcatttctcatcgttcaattcagaatctgatacatcagagaagggccacagcacagagagagactgtctgccagactgtggacgcgagggagcgcctccgcctcagatccaacccccaccgatgcgagctccggcgatgctccgctgggccgcggcggcgctcgcggcgctcctcgccgcctcaccggccgccgcgttctacctacccggcgtggcgcccaacgacttccataagaaagatccacttttggtgaaggtgaataagctgacatccacgaagacgcaacttccctactcatattactctcttcctttctgtaaaccaaacacgatagttgacagtgcagagaatcttggagaagttctgcgtggtgatcgcattgagaactctccttatgtgtttgagatgggggaacccaagatgtgccagattatctgcaaagcaaaaattgatgataaacaggcaaaggagctcaaggaaaaaatagaggatgagtatcgggtgaacatgattcttgacaatctcccactagttgttcctattgcaaggcaggataggggtgctactgtttaccaggctggatatcatgttggtgtcaagggccaatacgctggtaacaatgatgagaagtcctttatccacaaccacttggcatttttagtaaaataccacaaggatgaaactacagatctctctagaattgttggatttgaggtcaaaccattcagtatcaatcaccagtttgaagggccgtggaatgataaaaacactcgtttaatcacatgtgatcctcatgccagcaagcttgtggtaaactcagatactcctcaggaggttgaagccgggaaggaaatcatatttacctatgatgtaggcttcgaggagagtgatatcaagtgggcttctcgctgggacacctacttgttaatgatagatgatcaaattcactggttttctattgtgaactctctcatgatcgtactcttcttatctgggatggtggcaatgattatgctccgcaccctttatagagatatctctaggtacaatcagcttgaaactgaagaagaagcccaagaggagacaggatggaagcttgttcatggagacgtattccgccctcctgcaaactccgacttactctgtgtctgtgttgggactggtgttcagttcttcggtatgctactagtaaccatgatctttgctgttctgggtttcctttcaccatcaaaccggggaggactgatgactgccatgctgctcacttgggtcttgatggggttgtttgctggatatgcttcttcacgcctgtataagatgttgaaaggatcggaatggaagagcatcaccctgaggaccgccttcctgtttcctgggattgctttcggtattttcttcatccttaatgctctaatatggggggagaagtcgtctggcgctgttcctttcaccacaatgtttgctttggtcctcctctggtttggtatctcggttcctcttgtatttgtcgggagctatctgggcttcaagcaacctgccattgaggctccggtgaagacgaacaagatcccaagacaggtccctgagcaggcttggtacatgaaccctgccttcaccattctgattggtggcatacttccgttcggagcagtcttcatcgagctcttcttcatcctgacgtcgatctggcttcaccagttctactacatctttggcttcctgttcctggtgttcattatcctcatcatcacctgtgcggagatcacgatcgtgctgtgctatttccaactgtgcagtgaggactacctgtggtggtggaggtcctttctgacctcaggatcatcagcaatctacctcttcctgtacgccgggttctacttcttcactaagctacagatcactaaggttgtgtcaggcatgctgtactttggctacatgcttcttgcctcgtttgctttctgtgtgctcaccggtacgatcggcttctacgcctgcttctgcttcacaagattgatttattcatctgtgaagatcgactaggcatgttccatgggcctgcagcgagtatgcccattgtgtttttttcatgaattttcagtgcagctgtacttttggtgttagcttataaaccatttatgctcactgtggttcagagttgtacaaggataggacactactgctagctttatatggggtaattttaacttgtgctgttgagaactgctgcatacgttcaatccatagtctcgttatcgtctgccacccaatttctacctctgtgaaacagacaaaaaaacaaaccaaaagagaaaaaaaaaaaaaaaaaaaaaataattgcccctcgagggggggacccggtat

SEQ ID NO: 9291 - DNA, 602 bp, Zea mays
  unsure (1)..(602): unsure at all n locations
  Clone ID: MRT4577_108468C.1
cccacgcgtccngaaaaaaaaaaaaaaaaaaaaaaaaaaaaaaaaaaaaaaaaaaaaaaaaaaaaaaaaaaaaaaaaaaaaaattataaaaaaaaaaaaaatttaattaaatttgtataaaaaaaaatatattttttttattaaatgagggtggggggggttcactttctttcaatttaaaactttttttatggggaaaactataataatttttaaaattattagatttttgaaatatttcattttaaaaactttgtgttatactaatttaagctcttttgaaaaatttttcttattagttgcttaggtctttatttttattgggtacacccattgtttttttcaattaattgcgaagtttgtgttgttttttaaaagctttatttatagatttttataagctctagggttagttattttccatttgttttatttcttttttttgcagattttattaggtttcctttttttagattttttttagtgtttttttttttaaagtttcgatttattgtttttttaagctttaaatttaaaaattttttttaggtttttatttaaagtttttggcaattttcatgttaaaaaatttttttgctttt

SEQ ID NO: 9292 - DNA, 468 bp, Zea mays
  Clone ID: MRT4577_108469C.1
gccggccgttccgggatcacattcactagacactattctctcttccgtgggcttgctcgctcgttgttgcaccccatgacgctggtcgacgagcaggggatggaaatgtgcaccagcaacgcggccctcgcatcgcacaaccacggcgacgtgtcatgctacgtatacacctactcctagtcgatcgcaggcttcgccgggttcacccgcgcccggaatgcggtcgccgtcggcgccgggttgacgaccaacgtgactccaactcttgacgtctactgcgggagaggagacaagaaaacgaaaagggaggaaaaggttcaacgattcatatggcaatgcgaggacgcgcaacaagaagaagggaactgggacagcgcggctctttgccactcatgctcctccaaggaaggatgagttgagatgatcggagagatctattgcaatgcgagattgacagagagacatcca

SEQ ID NO: 9293 - DNA, 853 bp, Zea mays
  Clone ID: MRT4577_10846C.1
cattgggtacctcgaggccggccggtctttggtctcctctcactctcactctctcctttcttctatacccctagacagccacccatcgtcacttcaaaatggcctcgcgcatgtcgctcacccgcctctcggcacccctcgccaagcgcgccctgtccactaccgctcctgcggcggttgcgtcttcttccgcggcgaagttgactggccggaatgcgctgctcagcacgcccgtcgcccgggtccacaggggcgagagcaggtttttggttggtcaggagcagaggcggatggcgtcttccgaggagggtggaagtactatgaccgtccgtgaggcactcaacgccgccatggaggaagaaatgacgcgcgacgactcggtgtttgtcatgggtgaagaggtcgcgcggtacaacggtgcttacaagatcaccaagggcctcatggacaagtttggcgaggaccgtgtcatcgacacccccatcactgaatccggtttcgccggtatggctgtcggtgctgctcttgccggtctccgccccgtgtgcgagttcatgacctggaactttgccatgcaggccatcgaccaaatcgtcaactcgggcggcaagacgtactacatgtcgggcggcaacgtgccttgccccgtgaacgttccgcggtcccaacggtgcccgctgccggtgtcgccgcgcagcactcgcaggactattgtgcgtggtacggctcgattcccggggttgaaggtggtgagcccgtggagcgcggcggacttgcaagggttgttgaaggctgctattcgggaccctaaccctgtctgtgtcctcgaaacgagctcatgtacggtgtctcg

SEQ ID NO: 9294 - DNA, 740 bp, Zea mays
  Clone ID: MRT4577_108470C.1
gccgccgccgctgctccgatccctccgtccggcagccagatgcagaagttcaagaccttggccaaggccttgaccggcaagaccgtcaccgccgggaggaactcttctgggcgaatcacttcttttcaccgagggggtggatccaagcgatcgcttagggacattgacctcaaaaggaacacttgctcggttggcattgtggaaaggattgagtatgaccctaaccgttcttctcggatcgctcttctccgatggatcgaaggggtaccacagaaggatccagcatacaaggccgagcgtgcacctgtcaattacataatagccagccatcaaatggaaccgggcagcatggtggtgaacagcgactcctccaaaccctccacgaccggctccttgatgcggcctgcccacaatgccaattccatccttcggttccaagagctgttccgcaaagccagccaagaaggcgaagagggcactgatgatcaagcaaaggatgcggcggttcctgcagcagcaccgctcatgccagccgatctactggacctcaattccaaggtgggaaactgcatgccgttgtccgacatccgcatgggaacatgggtgcacagcatcgaactgcgtcatggccagggggcgaagctcgtccgggccgctggagcctacgccaaggtggtcaaggagtcggccacgcagtgccttgtgcggctgccgtcgggcgtcgagaagctgatcgactc

SEQ ID NO: 9295 - DNA, 403 bp, Zea mays
  Clone ID: MRT4577_108471C.1
gaggtgtgatgaggagcaagttggcacaggttacccgaatgataaagcggaaggcgacatgtcccatttgcaagatgcgaggccgcatgagcagcgcggtcgtgtagacagatgactgtggcccatgatcgctcgttctatggctcacaggtcgtcgttggagaagctgcaacagctcctgtggattatgatgagcttgcaaccagctcgggaaaagagaagatcgtctaggagatccagcgagcatatgctactgagaactagaaggcgaacgcgaaccctgttgaaccagacctataaaccgacatgatctcctatgtacccatacagggaactagcgtggtctctgaagaaccaaatcccaatgatgcagcttatcctaccactgtgcataagcgcgagg

SEQ ID NO: 9296 - DNA, 1272 bp, Zea mays
  Clone ID: MRT4577_108472C.1
ggccgcttttttttttttttttttaggtacggtactagctcgtcatcagtatgtatatatgataatgccaaaccaaaagatacctagcagcagtatgcatgctagctattagtataggtctgtggaacaatgaccatatatatatagctacttgatcgaggacgacggtcgatctgagattctgagattgcattggttaaaagttgaggacgctggggtagtagggagaccagctctccatccatgggctccgcagctgcgtcaagaaggggtcctgcatccactcctgctgctgcttcgccacctccagctgcggcaggctcagcgtcgacggcctcatcagcaccgccggcagcggcgccgcctcgggctcggccacctcctcctcttgcttcatgctcatcatcacaggcggtggtagtggtggttgtggtgagatgccgccgacgggcatcgtcatcatgatctccactcctccctgcccaagctgggtttgttggtcctggtcggacgacgacatggagtcggcgggcgacccggcgttgtgggacgcggacggcgtggcgcgcgccagctcctccatggccactcgctgctccagctccttgagcgacacggccttccggtagaccttgcacagcacgatgtcctccttgggcgagttgttggtggtggtggtggaggaggccgccgccgccgccgatgagtcgccggcgacggcattattgttgttgttgttgttattgcaggcgtcggggaggcggtactcgttcatgacccagtcggtcttggtgccacgaggcgcgcggccctcgtagtagacgagcgtcttcttgaggccgatgaggcgcttggggtcgtgggcgcagcgcacggcgcggtcggagcccgtagccttccagaagccgcgctccgtggtgcggctggggcgggcgccggacgactggtggtggtgctgcttggcaggccggccgccgtcgcggggcacgaagaagtaccactcgcgctcgccgatgcgcgccaggcccgggagctcccaggggtcgtggcggtacaggtgcaccgtggggatgatgtcgaacttgagcttccgcccgtgcgccacctgcttcaggtagaactccagcagctcctcctcggtggggtggaaccggaaccctggcaggtccagctgctccgccatggatggatcgacgacgacgacgatagatggaggccggtggagaatggagatgagctgatagagatgagaggaaagagcaggccgggttc

SEQ ID NO: 9297 - DNA, 409 bp, Zea mays
  Clone ID: MRT4577_108473C.1
aaaaacaatataggacacatttggaataaaaattatcagggtttaaaaggtccccggggcaccccaggggccccaaaatagcctggaaaaaggtcccaaaattattccaaccacccatatcgacaagggtttgaacccaggggcccctaaaaaaccccaagcaccggccccttaaaaggggatcccggaccccccctcaaaaacccggggggccattctattaaactggcataaaagaggatccccggaaacccaggttaaaaacatttttgggcttcccagggtcttaaccaagggcccaacaggcccagcccccttcacaggggcaaaggttaggccgcccccaaaacccctggggaacccagaaactgggcctccaagggcccaggggccccaatcataaacgagg

SEQ ID NO: 9298 - DNA, 458 bp, Zea mays
  unsure (1)..(458): unsure at all n locations
  Clone ID: MRT4577_108474C.1
cctngngcccgcccccgcttcctcggggccaggggtaaccccaaaaaaggacccccccccccccaaggaaaaaaacgcggtaacccgcccacccgggcccccgacattatgccacccccgaaagggccgggccacccactcgaacccgcaaacaaacaacaaaagcaagcaaactggcccccccccccccacagctaggcggcccgacagaaaaacatgaaaggacccctcgggcgccgcgcgggggaagaacctcacggagccgggaggggccccccccgaggaaaaaaggccggaatccacactgggcggccccccggaccgagcgaacagcgacccaagccccgcagcggcggggcaccggggaacgagagggtgggaaccccacactcccaacaaggagggccccccgccacccccggggggcaagctaccccccccccccccacgggcccccc

SEQ ID NO: 9299 - DNA, 249 bp, Zea mays
  Clone ID: MRT4577_108475C.1
cccacgcgtccgcccacgcgtccgcccacgcttccgcggacgcgtgggcggacgcacacatacggtgctgacatcatgccaatgcgctgtatctactcggtaggagcaccgtgaagtgatgcgcgaggtgctgatgtttaagggaagggctggcaccatgaaggatttagctgctatcttggacactgtaaataaggtcctaccacttgtagttgtcatctttgggatagttggataagacacaccact

SEQ ID NO: 9300 - DNA, 242 bp, Zea mays
  unsure (1)..(242): unsure at all n locations
  Clone ID: MRT4577_108476C.1
ccccaccttcngtccggcagcagaggacgtggtgctatagatcgagatccggaggccgcgagtgggagcgccaccaccagcgactgcggcaatggcagacacggtgacggtaccggtgtaaacgaccccctccacgcaactgctcaaggactagctaaacatcccgatcccgtcgatccgcaacctagtctttctggagatgtggcgagaataattccagccctaccaaaaaatgatctttc

SEQ ID NO: 9301 - DNA, 238 bp, Zea mays
  unsure (1)..(238): unsure at all n locations
  Clone ID: MRT4577_108477C.1
tttttttttaaggcccatccgaccaggcattttttaagttgttatgcaaaanncacaccccttgaaaacccttttgacaaatatatataaagagaatctcttccataaaaaacttacaatattcaaaaattttgatttcatattcaattaattttcttataaatactcaatttttcaaatccctataaaacatttccaataaatttcacattaaaaaaaattaaaactttttttcttt

SEQ ID NO: 9302 - DNA, 1283 bp, Zea mays
  Clone ID: MRT4577_108478C.1
ccgcatgtgctagagggaggcagaagatagtcccactcgtcgcctggtagcagcccgcatgtgctagagctagacagaagtcagtctccttcccctctctagtgctcaccggctccttccgtcgccatggacgtcctcttctgctgctgcctgctgcttctcctggcctccgccgcgtccgccggcagcgagcggtgcgtgcggcaggggaaggcggcctactctccctcgctctccccggcccctcacggtagcagcggagcgtgcgggtacggcgccatggccgccgagatcaatgggggcttcctcgccgccggcgggcccaggcagcaccgcgggggcctcggctgtggccgctgtttccagatgagatgccgagacgcaaggctgtgcagcgccgggggagtgcgggtggtgctgaccgacttccacaggagcaaccgtacggacttcctgctcgccgggccggcgttcgcgggcctggccaagcccgggatggcccaggagttgaacaggcgagacgccctctccgtagagtacaaaaggattccctgcgagtacaaggagaagaacctgtcgatccgggtggaagaagcgggcgacaggagccggggcaagctggtggtgaagctgctgtaccagggcgggcagaccgacgtactggcggtggaggtggcccccgtggggtcgtcgtcggagtggcggttcatgacaagggcgtacgggccggtgtggagcacggaccgggcccccgccggcccgctgcagttccgcgcggtggtcacgggcggctacgacggcaagtgggtgtgggccgagcaggaggtgctgccggccgactggcgccccggccaggtctacgacaccggcgtccgcatcgtcgacgtcgcccgggacgcatcccgcggctgcaccgccgccgccatggacgactggaagtgaagtgaggatagggctgggtagattaaaaatacgtatgaatacatactaacacgtcgccacatcggtgctgcgacactctggtaagaagaggacagcatgcaatggctccaagaacagcatcccccccaagcgcgtccggctgtccagaggagaggaggaagaagattggagtagctagcagctagggtgctccggtctttgtttgtttgctgcacgtgtaattgtgtatgcaggatcttctatcaaggtcgatccgattagatgcaggcaaaaaaaaaagagctgggatccagtcgacagttctaatgggtcatggcgtcatgccatcctggctgtaccac

SEQ ID NO: 9303 - DNA, 549 bp, Zea mays
  Clone ID: MRT4577_108479C.1
gttcatgacaagggcgtacgggccggtgtggagcacggaccgggcccccgccggcccgctgcagttccgcgcggtcgtcacgggcggctacgacggcaagtgggtgtgggccgagcaggaggtgctgccggccgactggcgccccggccaggtctacgacaccggcgtccgcatcgtcgacgtcgcccgggacgcatcccgcggctgcaccgccgccgccatggacgactggaagtgaagtgaggatatggctgggtagattaaaaatacgtatgaatacatactaacacgtcgccacatcggtgctgcgacactctggtaagaagaggacagcatgcaatggctccaagaacagcatcccccccaagcgcgtccggctgtccagaggagaggaggaagaagattggagtagctagcagctagggtgtaattgtgtatgcaggatcttctatcaaggtcgatccgattagatgcaggcaaaaaaaaagagctgggatccagtcgacagttctaatgggtcatggcgtcatgccatcctggctgtaccac

SEQ ID NO: 9304 - DNA, 109 bp, Zea mays
  Clone ID: MRT4577_10847C.1
gcagacgctaatcagaaactctactgaatggatgccttcgttctctctgagtacaaaggccccattgaaatatgtatgagacataaagcaaatttagaggaccggtagc

SEQ ID NO: 9305 - DNA, 544 bp, Zea mays
  Clone ID: MRT4577_108480C.1
cgccctcctgagttgaactgacaatttatgtaccattcttggtgtcaagttgttgggtatgagagatagatctttgtattgttgtttaacatggaattagtattacacatagtcttaagtaaatttgaatccaacttgcagtatatgacttagtttttgtttggaaaacctcataaccaagctttcattgactatcatgtacatggggactaggtcatgtgaccctgtataatataaggtcttgtataatgtcaaataattatagctagtcaaacaaaataatttgaattagtatatgggtaatggtatggttagtccaaaacacagtttgaactttatggtaccctgctcattctattttgttcccctcttgaatctctcaccttataaacacaattcatattgcgtgcttatgaaataatggtaaattacttgtgcaacaatggagatggctagacttatatgtggtggctgtcagacattattgatgtatgctcacggagcaacaactgaaaaatgctgatgttgagacacagggaatctt

SEQ ID NO: 9306 - DNA, 236 bp, Zea mays
  Clone ID: MRT4577_108481C.1
gccggaaaaacccgtcgacccacgcgccggccgacttgctccacaggcctccccaacacacaaagacgctcgagcggtacacacaggctccgctcccgtgcgagcgcgcttgcgccactgacccgccgggcgcctggctagctcggctgggctcctgctccgtgggcgggcggggtcggggcggacagcgggaccacctgtttctttcgggccgctgtgctctgggaccggggggg

SEQ ID NO: 9307 - DNA, 166 bp, Zea mays
  Clone ID: MRT4577_108482C.1
tctattcgtccgcagacacctgggcgggaggatgaataattctaacgtgcaagtgggcttgcacatgactcacgaacgatggacgttgggctcctacagacattcttcaagcaacaggcgcaggatctactttgctcataacctcaaagatgggatgtcagtagtg

SEQ ID NO: 9308 - DNA, 559 bp, Zea mays
  unsure (1)..(559): unsure at all n locations
  Clone ID: MRT4577_108483C.1
acctcgaggccggncgggagcttnatgcagaaggagtgggcagaccgatggcttaccaccctactccatagtgtatcgccaccgccaatcaaggccaaacagggccaatgtcgtaacctcctaacatcggcgcaggtgtcgtacggccttcgatgtcagattactcggagccacgacttaagtcaccgacgaatacttcctagggagcagcgagcgccgtaccccgccgtttttacgctatggcagcgagtagccaacccgccctcctctgctgacgagaaggaaactcctatatcaaaatggtcttccgacgaaagaccaggggtgcctccagcacgcttgtctaatcctattgaatctggttccatgcaaatggtgatcaatgatgcatctatcaaggagatcgcctaccccattgtatgggaccctgcatacaccgcttgggtgagcagctacagaatagtgctcacagtacaggagaactgggccatcctcgattatatactcaacaatacatggaagaaatgcaacaggtaatggcaaacccccagtttatgac

SEQ ID NO: 9309 - DNA, 310 bp, Zea mays
  Clone ID: MRT4577_108484C.1
gccaaagccagcttgatcggtgacgatttattagctagccgtcgtctgatagctcaattggttagctgattaacgtggtgcagaagaagaagttgagctagctagcgatggtggtttcaatattgactcacccgttcatggctgctgcggcgtgcgtcgccgtcgcgttggctctgttggccacgaccagcagcgcgcagctggacccgcacttctacgacaaggcgtgcccggtggcgctccccagcatcaagaggctcgtggaggatgctgttgccgcggaccccgctatgtcgcgtcgctgctgcgg

SEQ ID NO: 9310 - DNA, 580 bp, Zea mays
  Clone ID: MRT4577_108485C.1
ctcccccagggtcacgcctcctcagccccatgcacgcgaccacgagcgtcatttcggctcgtctcggggccccggatcgtcagcgggcgtcggcacaaggccctgctccgagggatggggccgtcggcggtccgaccgggccccgcttgacctccctgggcaccactcctctccgatccggtcgcgcgcctcccctccggtgttcggtgttgcacgcggcctccccaggtcgagtcgccctgccgggaggttgtggtctccgcacgcggtcgctagcgacgatgaatgtaatttcaagaggagatggggtcgcagatcatcaggaggcgtggacacaaggcactgaacggaagaatgtggactacggcggaccgaccaagtgcagcaatacattgctggtcaccagtgctcacctatccattttcttttactcgtaattgtatgtattcccctgcaaacaaaggggaacttccggttccctggcgaaatgtaatggtattaccatgcgatctctccaaatataaatggaagtttgctgtgctctgggcctaataatagagtacccaaacaaagctaattg

SEQ ID NO: 9311 - DNA, 300 bp, Zea mays
  Clone ID: MRT4577_108486C.1
aaaaaacaggtcataggaccaaggattcactcaacagacgaatacaaaaaagagggtcatgtacaaccaaaaaacaagagactgccacacatggaattaagggcatattaacacaagagagcggcttgacggttacgatacatggggcgatacgttaactcggtgccgttataatgaataagcctcaatagaagggagaacatgttacgatccaggaaacaaagacctactttcacatggcacatggctgactgaatggacagaatacatactcagatgctgaggcttgaaagatctttt

SEQ ID NO: 9312 - DNA, 628 bp, Zea mays
  Clone ID: MRT4577_108487C.1
aggattccagaggaggatctcatccccgcccgagcttcttctgccacctcgacaccacacgaccccgctgccatcagagacactgatgagccgccgccgtctcccaagtcgcctgccgacctccgcctcctctccttattctcccatctctcttctctcgtatctgacctttctccccggtgcagcttccacctccctgcagatccacactttgtcgggcggagggagcctccagcatcgctgggagcaatggcccatgcccggcggcactgaggtggcacatcacaatatgaagcaccgctcccgatccatagatccatggtggttagtggcccggagagtaactccccggtgcagcttccacctccctgcagatccacactttgtcgggcggagggagcctccagcatcgctgggagcaatggcccatgcccggcggcactgaggtggcacatcacaatatgaagcaccgctcccgatccatagatccatggtgaaaaaggggatttgaaaataaagcttccatggcatgcagaaacagagcatgtggttggatcaacaatagaacaacctacggggatcagggaggagagcagcagcctgctgcttcttggttactgctccctct

SEQ ID NO: 9313 - DNA, 698 bp, Zea mays
  unsure (1)..(698): unsure at all n locations
  Clone ID: MRT4577_108488C.1
cgagccggccgggatcgcagctgcagnctctcgctcgcccactcgcccagctacgacgtacacgtactgcacctggtgcacgtcggtgcagctagcaggctgaaactaaaggacgaccgatcgacgccgacgatgaaggtgtcggcgctggcgctggcgctgctgctgctggcggcggcagaggcctcccagtcccaccacggcagcggcctcgagctgggctactacaagacggcctgccccggcgtggagagcgtggtcaagtaccacgtcgccaaggccatcagcgccaaccgcggcgccggcgccgcgttcgtccgcctcatcttccatgactgcttcgtcagggggtgcgacgcgtcggttctccttgacccgacgccggcgaacccggagacagagaagacggcgccgatcaacatcgggctggcggcgttcgacgtgatcgacgacatcaaggcggcgctggaggagcggtgccccggcacggtgtcgtgcgcggacatcgtggtgtacgcggcgcgggacgcgtcgagcatcctgagcaacgggcgcgtgcgcttcgccgccgccgcggggcggctggacggcgtggtctcccgcgccgccgacgcgcagcgcgacctgccggactccaccttccacgtggccgagctggtccgcacttccgccggaaaaacttcacgggggaagagctg

SEQ ID NO: 9314 - DNA, 789 bp, Zea mays
  Clone ID: MRT4577_108489C.1
ccggccgggagccccgcatccgcacttccgcaggccgcagcgcacaggagtcccgatctcgactcccgactcgaactcgacgactcccagtcccagttcctctcgtccgcaaccgcaaaatccaagaccctggccgccggagccgaactgccccgcgcctcgggccctgcccgatttgtgtgctttgcggcctgtgggcatgctagccagccggcggcggcaccggagtccatagcagcaaccacgcggctacgagctacgacgggctggctaaggcgcaggttgagcgctgaaggctacccagctgtggtctcacgcgggtggccggtgagagcagccaagcggcaggtacatctcccctctgccgctccaccctccgaggcggccctccctctcaatccctccagcatctggtatctctctattatctgtagaatcataaatctaaaaattatagattattcacaattaaaagtagaagtgtactatgtaatgttattaacaattttatgtgaaacatgcggcttaatcgtcgtatcaattagtttttttttaaaaaaaaattgtagctactttccgtcgctggctagagtcctactctttgtcaaattctaggtgcgctggacgctggacgaaccctaccacgcgcaccgtcacgttgtggtctgtctctccctctacctccattcccccgcgatctcggtttctgttcaattttcgcgctcccttcccctcgcatatgacactctgtgacattgcagaattgaatcactctctggtgatgggcag

SEQ ID NO: 9315 - DNA, 226 bp, Zea mays
  Clone ID: MRT4577_10848C.1
tttatttgggtgaaaccgaagggctgaggcacaagctaagcacttatcggttgcaagccttctagcgaactgactataggactcgcgtccggcataatgctgtggatgacagatacttcattagagccctcctgcatgagaaggatgaccatttgactggttgcaatgcgtgacataccggatcggggcgagcttcatgaaatgctgactgacgcctagcatactc

SEQ ID NO: 9316 - DNA, 910 bp, Zea mays
  Clone ID: MRT4577_108490C.1
ctcgaggccggccgggctccttcacgaattcacgattcacgccgcacgcctcgacgccccgagggccgcagccccgcatccgcacttccgcaggccgcagcgcacaggagtcccgatctcgactcccgactcgaactcgacgactcccagtcccagttcctctcgtccgcaaccgcaaaatccaagaccctggccgccggagccgaactgccccgcgcctcgggccctgcccgatttgtgtgctttgcggcctgtgggcatgctagccagccggcggcggcaccggagtccatagcagcaaccacgcggctacgagctacgacgggctggctaaggcgcaggttgagcgctgaaggctacccagctgtggtctcacgcgggtggccggtgagagcagccaagcggcagaattgaatcactctctgttgatgggcagcctgcgcgctccgccagtgctgtcgccgctcgtttctgggctaatcttttcatctgacagagtcctcaattctagagggttaactaccagtagcgtgatgaagtcatgtaggctatctgaggttagcagcctcaaggctcgtcctcgcatcgattcctcgtccatgtccatatttggcacggtgaatccaattgttgagggtgtctgtgtcagaggtgatgcagcagataagcagtaccaggtgaaaaactgcagatggaggccaacttttgccttggagactgatgggccatctaacactgatggccaagactttgatgaggacagtggttttcttggtaggactagactgggaagactcatccaagctgctgcaagggagctacttgacaagctgaactctgcgagaacaattcgccaacaaggattccttgtcctcctggtttttcacagccatgccttggcacatactag

SEQ ID NO: 9317 - DNA, 544 bp, Zea mays
  Clone ID: MRT4577_108491C.1
ggccgcttttttttttttttttttcttttttttttttttttttttttttttttttttttttttttttttttttttacacaggggatccaaaaaagaccccggtgaaccaaacagccttttggggaccccctccccctgggggggatggcctccatcggacaaacaaaaagggaaccaaggaaacacgggggggtatccaagtatttgctaggaaaaaacagtcctgtttaaaaaggaaccacccaggataaagacgagcaaccaaagtaggccactgggaaggcttttatgcccaaggggggggtatcccaaaaaaagggttctaaaaggaaaaaaccggcgggaccaggtaaaaccccccgggggccgggaacccccacgaggagggaccggccacgaattcggcggacggcggggggttggacggcgaaactaaacgcaggagggcccatccccgccccaaaagtcccattgccgccgctaagagacattttgtttttgtatgcggaggggcagagaccaaccgtcctcgaagttacccagc

SEQ ID NO: 9318 - DNA, 1845 bp, Zea mays
  unsure (1)..(1845): unsure at all n locations
  Clone ID: MRT4577_108492C.1
cattgggtacctccgagccggccgggccgggactagttccctctccatcacgaattcacgattcacgccgcacgccccgacgccccgacgcccgcagccccgcatccgcacttccgcaggccgcagcgcacaggagtcccgatctcgactcccgactcgaactcgacgactcccagtcccagttcctctcgtccgcaaccgcaaaatccaagaccctggccgccggagccgaactgccccgcgcctcgggccctgcccgatttgtgtgctttgcggcctgtgggcatgctagccagccggcggcggcaccggagtccatagcagcaaccacgcggctacgagctacgacgggctggctaaggcgcaggttgagcgctgaaggctacccagctgtggtctcacgcgggtggccggtgagagcagccaagcggcaggtgcgctggacgctggacgaaccctaccacgcgcaccgtcacgttgtgaattgaatcactctctgttgatgggcagcctgagcgctccgccagtgctgtcgccgctcgtttctgggctcatcttttcatctgacagagtcctcaaatctagagggttaactaccagtagcgtgatgaagtcatgtaggctatccgagctcagcaatgctgaggttagcagcctcaaggctcgtcctcgcatcgattcctcgtccatgtccatatttggcacggtgaatccaattgttgagggtgtctgtgtcagaggtgatgcagcagataagcagtaccaggtgaaaaactgcagatggaggccaacttttgccttggagactgatgggccatctaacactgatggccaagactttgatgaggacagtggttttcttggtaggactagactgggaagactcatccaagctgctgcaagggagctacttgacaagctgaactctgcgagaaccaattcgccaacaaagatattccttgtcctccttggtttttacacagccaatgccttggcaacaatactagggcagaccggtgactgggatgttcttgttgctggtgttgtagtggctgccattgagggaattggcatgctcatgtacagaaaaccaattgccaggcctcctggtaggttccaatctttgatttcaatggtgaactactggaaagccggtgtatgcctgggcctttttgtggatgccttcaagctgggtagctgagtttatacaatcatctgctgctatctgcctatggtaattttttgggtatattgggatcacaataacgccatgatatggttccatgatggccattgctcgttgctcgaattctaatagctgcatttggctctaattctgggagcattggctgctgaggtatcagatttcttcaaagttaatgaagatgtttggagcagatattattctgaggtgactattcatttttccataatcgaaggccatgtttgtcaaccattgtttggcccgtaaactgtagatatgctgtagtttttccacctccatgtcatttagccctaatatgcatttatgcgtactgagagaagtcagctcccctctggcggtccaccctccgaggagggcctccctctcaatccctccagcatctgggatctctctattatctggagaatcataaatctaaaaattatagattattcaccattaaaagtagaagtggactatgtaatggtattaacaattttatgtgaaacatgcggcttaatcgtcgtatcaattaattttttttttaaaaaaaattgtagctactttccgtcgctggctagagtcctactctttgtcaaattctangtgcgctggacgctggacgaaccctaccacgcgca

SEQ ID NO: 9319 - DNA, 383 bp, Zea mays
  Clone ID: MRT4577_108493C.1
caaaaacaaagatattgccttgcacaatgcacagcttctaaggaaagctgcaggtttttgcacagcaggtgcaaaaaaaaaaaaaaaccattttggtggcaacagttttaataacagaactaaatggttgagccaacaagattaccctatactgaaccgtcatacaccaaggccagattttctaacattcggtactagttccaataaattgcaaatacttgaatgaagccaattcaacattgtacagaaactcgggagttgaaggccgagccaggctcaaaaatatatatgtgtcattccatacacatttgcagcagcatcacaggatggagaacaacctcaaaatttattcacagctttggcttcttcaggtggaatggagc

SEQ ID NO: 9320 - DNA, 399 bp, Zea mays
  unsure (1)..(399): unsure at all n locations
  Clone ID: MRT4577_108494C.1
cggtactttttttttttttttttttttttttttttttttttttttttttttttttttaaacaacccaaaccagcccaaggtatttattccagttactttccacacaaaaaaaaaaagacggcctgtccaaactccgctcacactgaaactagggggggggggcgactggnttaaacccccgaacaaacggaaccctttgaaaaaacacaggggagggattttttcatcccccggggggaaaagcaccaaattaaaaccaaacggctgcagaattatatcaaataaaaaaaagaccctacggatatccaaaagaaataaagaacctccccgggaacggaaatcttagcgctacccaggggaaaattaacaaaagatttcaaaaataaaaaaacttgggat

SEQ ID NO: 9321 - DNA, 465 bp, Zea mays
  Clone ID: MRT4577_108495C.1
tcggggcaccatggtgagatgtgagagaatctgaccgccgcagccacttcacgcatcggtcatcattcaggcttgtatggggatcgtacatggtcaccagggagcgtaggtcgtgtgcatggtctgcggtgcggggattttgtggcgtgcttggccaaatcgctcaacggagcaatggcgccgtcgtgggccacactactccgagggcggtatgcgttgcaacaccattgtagtgagggcacgagaatctgaagatcatcctggtacctggaatctgaagtctaaggtcaagaacaggttccactggattaggcgcatgaatgatgatgtgatgaagtcgtgagtggtctatgtcgtcggctttcagtcaactattgttgctggatcgatgtcttcgtatgatgtattttttatttattttgttcagaactcctattatattgtataagggtgggcatttgtttc

SEQ ID NO: 9322 - DNA, 392 bp, Zea mays
  Clone ID: MRT4577_108496C.1
tatgccaatttcctacacatatagccatgatgggctcactgatgcttcaaagattgcgatcttgaatgcaaactacatggcaaaacgtctagagaaccactacccagttctgttccgtggagtcaaccgaactattttccgttgaaaataccgtcaccacagtctgctatcttcagttttagtttcactttagtttacctttagtttcagttgcaggttatcttcagtttcagttttagtttctcttcaatttcattttacgtgtgtactcagtttcagtttaccggtgtactcagtttcagtttcagtttacctgtgtactctttgacgttgtttttccatttgtcttgtttcctctatgaatactagtgcgctaatttatattactttcg

SEQ ID NO: 9323 - DNA, 464 bp, Zea mays
  Clone ID: MRT4577_108497C.1
tcgaggcggcgggacacatcaactaacacacagctctctatgatcacatgatgagagcctggcggtggtggtgccatgatgacaccgccttcttcctgtgccttctcgcgccgagcagtgcacgtcgcaggccggcgccgcgttgcgccccaactgcctgacgatgcgccagactcggtggcagcgccaagccaccgtccgactactgcggagagcccgctgctacgagccaccgaccgcgtgcatgtacctgcagcccactgaccccttgagacacctagctacctgacggccgacttccccgacgactacttctgccacaccgtgctgctgtcgacgactcctgtttttttcgccaagaaccgctgaacatacggtgatccactcccgctgagccatgctggtacgggctcgacatgcagccttccccgagcctgatcgcccacaaccgcgataaagatcgt

SEQ ID NO: 9324 - DNA, 369 bp, Zea mays
  Clone ID: MRT4577_108498C.1
ctctagacggccgccctggggggtttttttttttgcatcagctcgcactggatggtgctatacggtctagcggccggaactggacgcaacatttctgtacagctacggttggataccctacgcggtctttagacctactgaccctagcatcatcccacccgattgggggggggggggggtcttacatctcctaatttgttgacgcacgccagcggactcagaccgtgccgccgcccgtgcgttggacggtcaaggcacggttggtccatagcatatcgatagctcgtagagatagttcggctaccttctgcatgccatcgtgaactgcccgaaggcttcggtccgcgtggcacatttgcggctccacca

SEQ ID NO: 9325 - DNA, 318 bp, Zea mays
  Clone ID: MRT4577_108499C.1
accttatatctatagcatttcccattcaaaagaatcgaataatcatcataaatgataactaagtctgctacaagtgaagatatagatcatggacataggggggttctgtatgcttgaagaaaaagctgtacaccctatcatgtctttttcccatatgaaataagggagaaccaaattgtgactgggaacctgggcgaaagctcgctagatgtgcccggcgctaggtagagatccattcccggccttgccatgtgtgatatcatgcggcagtatacctagatataactgtcctatacggtctcgagacttgccacgatt

SEQ ID NO: 9326 - DNA, 345 bp, Zea mays
  Clone ID: MRT4577_10849C.1
aattcttgggtcgacgagcatacttttcggcggccgccctttcattttatgggggttttttagaagaaaccaccaccacggcaccactaagcatatatgagctagcagcatagttccagcattatctatgcattcacggctcaaatatacaggtccatgcccttgttgtcttgcttcacaaaggagtaaatacagggcgggggggtgatatcattatggtcacgcggctataaaaaccgcgggatttcgtgtaatacagaaccacctaatttatatagcatcgtaggggaaaagtgtttatcggcctttttcgtctcaagcttcaatgatcccctgtcactaaca

SEQ ID NO: 9327 - DNA, 538 bp, Zea mays
  Clone ID: MRT4577_1084C.1
cctaaggaagcaaaacactcagaaactgcattgatgggttttgacctcgtagagcggaatacatgcaagggttcaaaatttactccctagacatgctcttaactgcataacaacacactaaaatatagattgaaagctccaatagtttatttggtacacagaaacaatgctcataaaaaccctgttgaactaatcttatggatatttccatgcagcccaatactaatgtgtcaatctagcacggttcggtcggccttacaatctcgggggattaaagaacgaacacattctactccaacatttttcctatcaatgcttttcatgaaacaccgggcacttacaggacctactggtctaataggcattcacctgtcaccacaaagacgcaaagcagaaaagaaacccctttcttaattttcaactgtaggacgtcacaactacattccccaactattaacccatttgtactcagacagggattcaactctgctcaagcaaattacaggatatataggccggccaaacctttccctctaac

SEQ ID NO: 9328 - DNA, 177 bp, Zea mays
  unsure (1)..(177): unsure at all n locations
  Clone ID: MRT4577_108500C.1
cgggaaaaagacaacaggaggccaccgcnggcaaaaaaccctccggatcagcggcggctcgccaaactccgngncgaaggctagggcggggctgctcaccggccccgagcaccgaaggcgcgagnaacaggcgcganccccctggcggggaccgagaggcctngcgaacaggggacc

SEQ ID NO: 9329 - DNA, 264 bp, Zea mays
  Clone ID: MRT4577_108501C.1
tacgagttcgttgccgttcaggacgcctgcgcgttcgagctgcgcacgtaccggcagcgcggcgcccgcacgatacccggccggccagcgatagagcgcgtactgatacgggccgcggcgcacacgtgaaccgtgcagcaacggttcgtaatagccggtgacgagcccgtcgagcgtgccgtcggtgttcgcgagctggaacggcgtgaaatacgtctcgaagaacgtgcgcgcactgctgacgtcgagctcgtcgagccggtc

SEQ ID NO: 9330 - DNA, 586 bp, Zea mays
  Clone ID: MRT4577_108502C.1
gctggagatggtcttcactccagtcagtgacacaaacaaacagccagcagcaccaaaactaggcaatttcagctgttgccctgtatgtacacagcagcttcaccaaacaagcacgaccttcacagtgatgttatgttacctagcaattagctgagctgagctaccaaaagtcaaaaagaagctgctccctcactgaccagctaagctacctaacaattaattaactctgaacacctgcagcttctcctcgcttaagcaaccaaggtacccacctggtccttcagtttcagcagcgtaccttaaatcaaggatgggctcccggtgggtgcagaggtcagcatgcatcccaaacgaaggcagttgccaggtccggaccccacgcagcgactcgtctccgtaggagaacaggtgcttctgctggtggcctccgtatccgtaaggtatgatggccgattttgacatgcgcagctcgctcacgttggcatagcaagtcgtgccttcagcgaagcaggtgttacccgtcctcctcctgataagggtgtgctgccctggtttcccctgcccagaccgtgtaggcgtttgtgat

SEQ ID NO: 9331 - DNA, 382 bp, Zea mays
  Clone ID: MRT4577_108503C.1
aaaaaaaaaaaaaaaaaaaaaaaaaaattaaaaaataaaaataataaaaaaaaaaaaaagaaaaaggtaaaaaggataaaaaagaacataactatgagctatgtggaacatactttaaaggggtggatgtttttaatggattgtttttgcagtccctggtttttcaaggggagtctattatttgtttacctttagtattgttaatggccagtagtttatgacattgggggttcttataagcgtggtctgcctatactatttccattttctggcatttaccatttatcctgtcgggctatttagaatgagctctctgatgttcctgttgtcaaccttttacattggcagatctgcattggggactacccctatgcgatcgttt

SEQ ID NO: 9332 - DNA, 181 bp, Zea mays
  Clone ID: MRT4577_108504C.1
acgcaccggcgcgacagggcacaggtgcagtgcagggccgcacttggcacgcgagcgcgcgcgtcatcggctaagatctaagcgggcttgatatcctgggacatggacgtcccaccgacatctactcgtccgtatggcgctgggcttcaccagctggtaagagcttacttgaccgggcctc

SEQ ID NO: 9333 - DNA, 422 bp, Zea mays
  unsure (1)..(422): unsure at all n locations
  Clone ID: MRT4577_108505C.1
ccgagcccccgccgaccgcggcgtctgttcctttcgtgccgattcgtggtggagccgcggcgcccaccaccacctgaactttcacgacctatagcaataccactagtaccacgatccatggaatagactagactacaccggtcggacggtgacgacgacggcaacaggcgacaggctatgcccaactacgctctggaccagcgacttatacggcgcttggggtttgctctggcgcggtggcagttgataaaggccgcagggattacagtaaggggagggatcggccattagcttcgcggatctggaggcgggagggctgaacagatgattacgccaggggggcggaactatacgctgccgaggnggtgcatgagttgctaagctgagggaagggaagattgaaccacgccgtggatatcgcc

SEQ ID NO: 9334 - DNA, 1206 bp, Zea mays
  Clone ID: MRT4577_108506C.1
ttgggtacctcgagcccgtggtagcgcacccagtcacgccgccccgccgccgccccctatataaattaatgagccaagcccgagttaacccttcgttgtacaaggttcgagttcgtcacgtctagacgactgtgcgagggaggaagaggcgaggagaagatgcagatcttcgtgaagaccctgacggggaagaccatcaccctcgaggtggagagcagcgacaccgtcgacaacgtcaaagccaaaatccaggacaaggaagggattcccccagatcaacagcgactgatattcgctgggcggggagattaaagaaaaaggaaattttcttgggcgttcttcggcttcattgtcacaaggttcgagttcgtcaccgtctagtacgactgtgcgagggaggaagaggcgaggagaagatgcagatcttcgtgaagaccctgacggggaagaccatcaccctcgaggtggagagcagcgacaccgtcgacaacgtcaaggccaaaatccaggacaaggaagggattcccccagatcaacagcgactgatattcgctggcaagcagctggaggatggacgcacgctggctgactacaacatccaaaaggagtcaactcttcatttggtcctcaggcttaggggtggaaccatgatcaaggtcaaaactctcactgggaaagagatcgagatcgacattgaacccactgactcgattgacaggatcaaggagcgtgttgaagagaaagaaggcattcctcccgtgcagcaaaggctcatctatgctggtaagcagcttgctgatgacaagaccgcaaaggactacaacatcgagggtggatctgtcctccatcttgtccttgctctgaggggtggttactagtctaaacctgatgaactagcagtcagataaactgttgtgttggctgcgaaatgtgcaggcctgatgttgaacttgcaaggagataataacaaattatcagctttgcgcctgtgcccagtggaaggggctgtcttccaagttattgtctgatatggaattgttccagattatcatgtctcggcgtttacccattattattatttgatttgaaccttgctaaaaaaaaaaattttcatactaatggtgtggttgcgtcttcttttttatactgcagtttggttttaaaacattgtacccaattgacttccaaggttgggtcaatgaattg

SEQ ID NO: 9335 - DNA, 930 bp, Zea mays
  Clone ID: MRT4577_108507C.1
gggtacctcgaggccggccggggcgcaccagtcacgccgccccgccgccgccccctatataaattaatgagccaagcccgagttaaccaaattaaagaaaaaggaaattttcttgggcgttcttcggcttcgttgtcacaaggttcgagttcgtcaccgtctagtacgactgtgcgagggaggaagaggcgaggagaagatgcagatcttcgtgaagaccctgacggggaagaccatcaccctcgaggtggagagcagcgacaccgtcgacaacgtcaaagccaaaatccaggacaaggaagggattcccccagatcaacagcgactgatattcgctggcaagcagctggaggatggacgcacgctggctgactacaacatccaaaaggagtcaactcttcatttggtcctcaggcttaggggtggaaccatgatcaaggtcaaaactctcactggaaaagagatcgagatcgacattgaacccactgactcgattgacaggatcaaggagcgtgttgaagagaaagaaggcattcctcccgtgcagcaaaggctcatctatgctggtaagcagcttgctgatgacaagaccgcaaaggactacaacatcgagggtggatctgtcctccatcttgtccttgctctgaggggtggttactagtctaaacctgatgaactagcagtcagataaactgttgtgttggctgcgaaatgtgcaggcctgatgttgaacttgcaaggagataataacaaattatcagctttgcgcctgcccccagtggaaggggctgtcttccaagttattgtctgatatggaattgttccagattatcatgtctcggcgtttacccattattattatttgatttgacccttactgtgttagtcagttttcaaaaaaaaaaaaaaaaaaaaaaaaaaaaaaacacc

SEQ ID NO: 9336 - DNA, 1189 bp, Zea mays
  unsure (1)..(1189): unsure at all n locations
  Clone ID: MRT4577_108508C.1
ctcgaggccggccggaggaagctagctaattataaagcttaataaagtatagcggcgtcgctgtgtgtgtttcgagtcagtcagtcagttgcgtgccatggcatgctctgagtctgagatgatgatgatggctgatggcggcgtcgtgtccccccctggcctcctggggcgcttctggcgagcagtgtgttgtgttgtgtgggtgccgcacgctagcaggctagccatgtgccctgctgtgttgtgtcaccatccatctataatcttatccataccccaccttttgtgtgaaaaaaaaaaaaaaaaaaaaaaaaaaaaaaaacggcttcattgtcacaaggttcgagttcgtcaccgtctagtacgactgtgcgagggaggaagaggcgaggagaagatgcagatcttcgtgaagaccctgacggggaagaccatcaccctcgaggtggagagcagcgacaccgtcgacaacgtcaaggccaaaatccaggacaaggaagggattcccccagatcaacagcgactgatattcgctggcaagcagctggaggatggacgcacgctggctgactacaacatccaaaaggagtcaactcttcatttggtcctcaggcttaggggtggaaccatgatcaaggtcaaaactctcactgggaaagagatcgagatcgacattgaacccactgactcgattgacaggatcaaggagcgtgttgaagagaaagaaggcattcctcccgtgcagcaaagttatgctttcctggcgtctggtgctgatgaagctactttggtcgcctttgcaggctcatctatgctggtaagcagcttgctgatgacaagaccgcaaaggactacaacatcgagggtggatctgtcctccatcttgtccttgctctgaggggtggttactagtctaaacctgatgaactagcagtcagataaactgttgtgttggctgcgaaatgtgcaggcctgatgttgaacttgcaaggagatagtaacaaattatcagctttgcgcctttgcccagtggaaggggctgtcttccaagttattgtctgatatggaattgttccagattatcatgtctcggcgtttacccattattattatttgatttgaaccttgctacacccccccccccccccccggccgtntagagctcaagcttagtagcgtgcaggacgtc

SEQ ID NO: 9337 - DNA, 788 bp, Zea mays
  unsure (1)..(788): unsure at all n locations
  Clone ID: MRT4577_108509C.1
ttcccgtcgacgacgcgtacgcggacgcatagcgcttcattgtcacaaggttcgagttcgttaccgtctagtacgactgtgggagggaggaagaggcgaggggaagatgcagatcttcgtgaagaccctgacggggaagaccatcaccctcgaggtggagagcatcgacaccgtcgacaacgtcaaggccaaaatccaggacaaggaacggattcccccagatcgacagctactgatattcgctggcatgcagctgggggatggacgcacgctggtgtgctacaacatccaaaaagaggcaactcttcatttggacctaaagcttatgggtggaaccatgattgatgtcaaaactctcactgggaaagagatcgagatcgacattgaacccactgactcgattgacaggatcaaggagcgtgttgaagagaaagaaggcattcctcccgtgcagcaaaggctcatctatgctggtaagcagcttgctgatgacaagaccgcaaaggactacaacatcgagggtggatctgtcctccatcttgtccttgctctgaggggtggttactagtctaaacctgatgaactagcagtcagataaactgttgtgttggctgcgaaatgtgcaggcctgatgttgaacttgcaaggagataataacaaattatcagctttgcgcctgtgcccagtggaaggggctgtcttccaagttattgtctgatatggaattgttccagattatcatgtcttcggcgtttacccattattattattntgatttgaaccttact

SEQ ID NO: 9338 - DNA, 162 bp, Zea mays
  Clone ID: MRT4577_10850C.1
tcagatccgccaaccgcgtgcgcagtccgccatgtcacgttcctagccttgcgcccaggcagctgtctcctccacagccgcgcgtgcaattcgcagtctcatcacgagccgcgctcgaacttcgacgaattgtacatcacagcccacaggactacagcaacc

SEQ ID NO: 9339 - DNA, 811 bp, Zea mays
  Clone ID: MRT4577_108510C.1
ccggccgggaagaaagaactacccatctctagtatccttctctttctcctcttaatctcacccctctcaccatcggggcgccgctcaaaaaccccaacgcctctacctgccgaagctacgaattacgtagccgaggtcctgctatgctttggaagctggctagtgccaaaggagaactacgtgtcatttcattaaggaagatagaaaaatcaagtacacatggaggaaaactccccgaaccaccaaacaccaagacaccaactcactttgaaaacaacgaacaagacaccacgaccaactacctagcagctaagggggctccctcctcaagaggagtttatgcagacctgcagccccagctagacaccacatgtgaccttcggcggccacctgagaaagaaccgcctgtgcttgaggttggacactatcaaacacgcaggcgttcctgtgtttccacaaaatccaggtgactaagatgaccaaggtattgaaaccttttctcagatctttgtcgagagatgcagcagcctgactccaccaggaacggaacctgctagaagggcagggtggcctgactcaggctccgtcgcgcgcaccagcaggttttgccgccgctcctccaccagcgacgactccatgaaagcagcttctgaagccgtggtccgtggaggcttttctctccagaagtaagggaaagcttcgaaccttgaagagtgatcagtgattgcttcttcggcaatgatgttttttttattgccggcaattgatgttggtccaactaatatgattcgccaacccggccggcctcgag

SEQ ID NO: 9340 - DNA, 295 bp, Zea mays
  Clone ID: MRT4577_108511C.1
taagagagggcggccagtgctctccatccgtctagggggctccatccgcgccggagtcgatcgtacagccggcggcctccatccgcgtcggcagcctccatccgcaacagacagtgctaactggtaatggcacggggtgggaaacaacgcattactcgtagccagatgagtacttgtctgaggaccatattggagagaaaagtccccaaaaaatgttgcatcatctgaacaaaacataagtaataaagaagaccatttagatagcagaagcgataatgagtcccaaggtatgcac

SEQ ID NO: 9341 - DNA, 225 bp, Zea mays
  Clone ID: MRT4577_108512C.1
acagcgatcaccacacacgaatcgcaaatatgggtaaaggaaagcctcgtggtcttaacgcagcgcgcaagctccggaacaaccgccgtgagcagcgttggtccgatcttgcctacaagaagcgtgccctgggtaccgctttcaagtcgtctcccttcggtggctcttcccacgccaagggcattgttctggagaaggtcggtgttgaggccaagcagcccaact

SEQ ID NO: 9342 - DNA, 1884 bp, Zea mays
  Clone ID: MRT4577_108513C.1
gggacctcgaggcggccgggattcgttcttgccgctgacacctcgctctcgctcactctcgccgtccgcacagccgctcatcgtctcccactgcctgccctctccctgcgccggccggtgccccgacgcgccatgtcgtacaacaaggccccgtccatcaccgccgagaccataaatcccagggtcaagatcatcagatacgcgccttgcggggagatcgtcaagcacgcagcgcggctggagcaggagatagaggagaaccctgcttctatccctttccaagagataatatactgcaacctcgggaacccccaggtccttggtcagccgccactaactttctttcgtgaggttctctccctgtgcgacaacccagccctcatggacagagatgaagctcgtgccttattcagcccttgtagcataagaagggccaggaggatcctaaactcgatccccagcaaagacactggtggatatactgattgccggggaatcaaatgcctgcgtcaagtagtagcagatgggattaccgcaagagacggttttccatcgacagcggacgatatctttctgacagatggagccacctcagcgatcaacttgatgatgcagatactcatcaggtctcacgaagacggcatcttgagccctctacccgaataccccttgtactcggcctccatcatactgcacggtggaacgatggtgccgtacaatctcactgaagataacggttggggcctagagatctttgaagtcaagaggtgcttggaagaggctcgttcggctggcctcactgttagagctatggtggtaataaatcccggcaaccctactggacaggtttcgagggagtttcacctgacatattctacgctcaccgcctgcttgatgccaccgggattgccgttgtgccgggctctgggttccaccaggcctctgggacgatccatatccgatgcacgatccttcctgacgaaagaaaaatcgaggcgatggtcgcacgcttgagggcgttccataaggcgttcatgaacgagttccggggctctcagcaggtcatgaacgatctccgtcgctgatggtgtcgatgcatggcacggttaggcctgtgcgtgtgcccatgggcaatcaagacaacttctgagctctggagttgttgtttgttgttctgtgttcttgcttcctcgttgagctgtgcccgtttgtcctcacttatgcagtcagtggtctgtctgtagtctgtactgcttaaagataagctgtgcattcttctgccagcgagccaagaccctggagaaagctttcagcggcctggagggcgtgacttgcaacaagttagagggtgcgctgtacttgttcccacggctccacctcccctccgctgcgatcagggccgccgatttcgagggagtttcacctgacatattctacgctcaccgcctgcttgatgccaccgggattgccgttgtgccgggctctgggttccaccaggcctctgggacgatccatatccgatgcacgatccttcctgacgaaagaaaaatcgaggcgatggtcgcacgcttgagggcgttccataaggcgttcatgaacgagttccggggctctcagcaggtcatgaacgatctccgtcgctgatggtgtcgatgcatggcacggttaggcctgtgcgtgtgcccatgggcaatcaagacaacttctgagctctggagttgttgtttgttgttctgtgttcttgcttcctcgttgagctgtgcccgtttgtcctcacttatgcagtcagtggtctgtctgtagtctgtactgcttaaagataagctgtgctttcaggaataaaaagtctgcagcttgtgcatataaaaaaaaaaaaaaactcgg

SEQ ID NO: 9343 - DNA, 537 bp, Zea mays
  Clone ID: MRT4577_108514C.1
tttcctcctgtgggccgggactaggggctacgcgctgaaaacagggcttgcataaaacttagttcacaggctgtacctgaagagaactggaggaccttatgagaattctaaaagcctgccactctaagacagcaaagaatcccgactggaatgcactattgaatatagctttcttagattaaaaagcttcgcccaatttggcctcagtaaagcaagagctccatgtaagactacaagctccaagaggcgaatcacgaacgtatctgggaggagatgatagtcttttcccctggagcatggcaaattcactcaccgggttttattaattggcaaattcttcctcagctagttaaaaaactgaaatgggctgatatcatgacactattaggtagtatagatatcattatggaggaagttgaccgttgacatgataatagctagggcagaggtagagactatcaattctttttcgaaaccggaactatctaaagatgtctacggacttatatggattctacccatcttaggcctcctact

SEQ ID NO: 9344 - DNA, 1795 bp, Zea mays
  Clone ID: MRT4577_108515C.1
cacagccgctcatcgtctcccactgcctgccctctccctgcgccggccggtgccccgacgcgccatgtcgtacaacaaggccccgtccatcaccgccgagaccataaatcccagggtcaagatcatcagatacgcgccttgcggggagatcgtcaagcacgcagcgcggctggagcaggagatagaggagaaccctgcttctatccctttccaagagataatatactgcaacctcgggaaccccctggcccgtgggctgccgcctcgaacttgctggcgccaggttctctccctgtgcgacaacccagccctcatggacagagatgaagctcgtgccttattcagcccttgtagcataagaagggccaggaggatcctaaactcgatccccagcaaagacactggtggatatactgattgccggggaatcaaatgcctgcgtcaagtagtagcagatgggattaccgcaagagacggttttccatcgacagcggacgatatctttctgacagatggagccacctcagcgatcaacttgatgatgcagatactcatcaggtctcacgaagacggcatcttgagccctctacccgaataccccttgtactcggcctccatcatactgcacggtggaacgatggtgccgtacaatctcactgaagataacggttggggcctagagatctttgaagtcaagaggtgcttggaagaggctcgttcggctggcctcactgttagagctatggtggtaataaatcccggcaaccctactggacaggtgctatccgtcacaaaccaggaggagatagtagagttttgtcggaaggaaggtctggttatacttgctgatgaggtataccaggaaaatatctacgcagagaacaagaagttccattccttcaagaaagtggccagatcacttgcttacgacgaaaatgacctcaccctagtatcacttcattccgtttcaatgagctatggggagagtggcagaagaggaggctacatggaggtgtctggtgttgcagctaatgtgaaggatcagatttacaaggtggcttctttaacactctgccccaacattgctggccagattctcgtcagccttgcaatggatccaccgaagaacttcccttgtgacctgtacgcagctaggagatgaatctttcgagtcatttgataaggagaaggaacagatccgttcatccttctgcaagcgagccaagaccctggagaaagctttcagcggcctggagggcgtgacttgcaacaagttagagggtgcgctgtacttgttcccacggctccacctcccctccgctgcgatcagggccgccgatttcgagggagtttcacctgacatattctacgctcaccgcctgcttgatgccaccgggattgccgttgtgccgggctctgggttccaccaggcctctgggacgatccatatccgatgcacgatccttcctgacgaaagaaaaatcgaggcgatggtcgcacgcttgagggcgttccataaggcgttcatgaacgagttccggggctctcagcaggtcatgaacgatctccgtcgctgatggtgtcgatgcatggcacggttaggcctgtgcgtgtgcccatgggcaatcaagacaacttctgagctctggagttgttgtttgttgttctgtgttcttgcttcctcgttgagctgtgcccgtttgtcctcacttatgcagtcagtggtctgtctgtagtctgtactgcttaaagataagctgtgctttcaggaataaaaagtctgcagcttgtgcat

SEQ ID NO: 9345 - DNA, 256 bp, Zea mays
  Clone ID: MRT4577_108516C.1
cccacgcgtccggcggggggcgccgacgagggcgaacgtgggggcggcgcctcccgtcccggcggagccgtcgtgcgacctcgggctgtggctcagccccgggtcgtgcccggcgccagacgagcggtggcagacgcggaccagcacgccgtacatgaccttcgaggagtacgagacgacgacgagcggcggtggtggcagtggaaggagggagcccgagctgctgaacctttttgtttgagactttagctacacc

SEQ ID NO: 9346 - DNA, 462 bp, Zea mays
  unsure (1)..(462): unsure at all n locations
  Clone ID: MRT4577_108517C.1
ccggggtgttgggcttctctcttcccctccgnngttcgggttcgggttgcgggggggtgctccgggngttcggttntcgtggggtgggcgggatcgagnatggcggcgtcggnatgtttgagtacccgctgcttttcgtcggcgggccctcgcctggggccacgggacgacccactccctccacaacgtccttcagcacctacgggcgagggtcctcgagtgccagnagtcatgcctcgatcggggagacgccanagggtcccgcggcgttcggctgtcgtcacccttctccacgggaggagggcgatggcggaacgccattcgagggcatggaacgggcaagggagctgtgacggcgcgctaacatcacccgtgcaaccgaggcgccatgtccctgcggctggcccgtgtgagggcggcgtgctttcttgctacccggtggtggccccgtggagggcggcg

SEQ ID NO: 9347 - DNA, 748 bp, Zea mays
  Clone ID: MRT4577_108518C.1
ccggggtcgttgtagtatagtggtgagtattcccgccggcccaattcccataccatactggaactggaaggcagaagcgcccgcacaggcacagcactactcgaagcaagaactatagcagctgctgctcctcctgtacaccaagcgtacgtgcaaatacaatggccaccaaaagcatcgcctcgctgctcgccgtggccctgctgctgctgctgctctcctccccggccgccgtcgtcgtcgtccgcgcgcagcagcagcagcggggcaacccgtgcccgacgaacgcggtggcggacctcaaggtgtgcgccgacgtgctggtcctgctcaagctcaagatcaacgtgccgccgagccagcggtgctgcccgctgctgggcagcctcgtcaacctcgacctggccgcctgcctgtgcgccaccatcaggctcaacgtgctcggcatccccgtcaacctgccgctcgacgtgcccctcgtgctcaactactgcggccggaacgcgtccgccgtgccgggctccaactgttccttctgaggcatgttcgatcgatcgatcggcaaccccgctccaattgtaggttggttggttggttatatgcgggccgggtactgtaacagcagctgcttggaaataaaaagcgtgtaatgaccttactcaacatcatggcaagtacaatttctgaatgctaccaacatacaacttgagaatgctaaataaaaaaaaaaaaaaaaaaaaaaccttag

SEQ ID NO: 9348 - DNA, 484 bp, Zea mays
  Clone ID: MRT4577_108519C.1
ggacaagaaaattagggaggacgggttatacgtggatcacaaacgggaaaggcggtacaaaaaaagtacccccgtctccaatatcaggcaaatatttttcacaatatggccagggcgggaaccctataaactttatccggggcaacaaactcgggttttggcactggcaacctactactatcccggaccttaaattctaataattggaccccgactgggatgggctaccaaaaaaaaaacgggagcagcacctccagctggtagcgcttaagcaggggctcagtgggttggtttcaaagccaagggattgggcggggacctcatgaaaaagggggagcagggttctttgttcagggccttacatcagcttcatccagggacaaaaacaaatagttcaaaaagaaatcggcaaaacccccttttaaaactgaacccgggccaaatccttcatagttcgcccggagacctttgcccctccgggtgg

SEQ ID NO: 9349 - DNA, 498 bp, Zea mays
  unsure (1)..(498): unsure at all n locations
  Clone ID: MRT4577_10851C.1
acagtaaatgcttgtcttttttgtggttcatataaattacagtacctagtagttctgaatttacaaaaggatttcactcacctctttttttttacttctgatttcactctgttctttcttctatcctccttcctgctgacaaaacggttacctggacaccggcacaccgctttccatgagctgggaaagacaatgactcaatggacaagccttaactttactgatttcactcgccacgaaactggaagcgttgtcctgacacctgaccaacaatcagctcgaaagggatacacatgcatgcagcagcaagcatcgccgtcggcgatcgacaatctacggcggcggcgtgccgattcacaccgccattgtcagcagcgcggacacgaggcacaggcaggcggcggcgagccccgcgcccgcgcggnccatgaggcgggcggcgccggagctgtcgtcgtccgtgtccggcggcggcggcgggaccaggagcacgttgat

SEQ ID NO: 9350 - DNA, 1336 bp, Zea mays
  Clone ID: MRT4577_108520C.1
cattgggtacctcgaggccggccgggccgaagaccgagtgacttccgttgccgccgcccgccgggcgatttttaggtcctcgctttccccacgcgtgcggcgtgttccgctggtgcccgcccggcctcccaccctctccagcgccgccgcctcctcttcccggccgaaggagcaccgccccagccgatcttctctcccccacgccccatcaggccgtttctggctgctcttgggcctccctcgccctccctgacggccccgagctcgccctccatctccgccccagctcgcgccatctcggtgcctcgagctcgtcgtcctcgcttctgtggtcaccgccgggaagcatgaggaggaggcctgggatcgctggcttgcagaatgcggcggctactcgtgaccaattccggctggtcggggagaatgtggccaaggtgaggaccgatgtcatgaaggagcagcttgcgacgttccggtcacagctcgaggaattcgctcgcaagcataagagtgacatccgtaaaaacccagtattcagacagcagttccatgagatgtgcgcaaaagtcggagtagatccattggcatctaataaaggagtctgggcagaacttctagggattggtgacttctactatgaacttggggttcagatagttgacatatgcattggtaccagatcacataatggtggcttgattgacttactagatctccgcaaactgctcggtcagaagaggaaagctactcttgaatcattatctgaagatgactgtttgcgtgctataagcaagctaaaagtccttggtagtggttttgaagtaatttctgttgggaggagaaagcttgtgcgttcagttcctaccgaattaaataaagaccacagtgggatacttgggctagctcaggctgatggctatgtcacggtggaacaagttgaaaaggaattctcatggtctactgggcgtgcgattgatgctcttgaaactttgctgaaggaggggcttgctatgatcgacgatggccacagggatggcaagcgaagatattggttcccatgcgtcactgtcagctccgacacagcagctgttgaagtcaagtcataacctgtaagtaaaatgtcgattccacagtgtgttcacgtccccattccatgaggatgaggtggaaaccagtggcacggatgtgtgtaatgattggtatgttaagaattcagttggaacatcacactttgaatatgaaaggtggcatgattcttattaaagcacttcgattatgaacggatgcatggaaatttcttatttaaaaaaaaaaaaaaaaaaaaactcgagggggg

SEQ ID NO: 9351 - DNA, 142 bp, Zea mays
  unsure (1)..(142): unsure at all n locations
  Clone ID: MRT4577_108521C.1
gtaaaagtcataaccaacatatgaacagacagatttatgtctttaaacacagaatgtaagctatagtttaatctgataccagttgctggaagttgccatttgtttttcttanatctatacccataaaacttcttttaagatt

SEQ ID NO: 9352 - DNA, 885 bp, Zea mays
  Clone ID: MRT4577_108522C.1
caagagctaaggcacagccgttgggacggccgaggcacgggtcgttgagtatgctgatgaggagtactccgtatctccaggcacctccgaattttctagccaggtggaagggcagagcaatggtgtgacctccaagggtgggtatgtatcagagtactcccatactggtccagcccgaagagaagcaaacaatttgggtcctaagaatcgtgcagcagctccagcgaggatgcgataccaacatgacagccattctgctcatgtccccgctcgagaggatgtgaaatcaacacgtaaattgaatgggtcatctggtgatattcctagtgcgccgccaataaatgattatgaccaggaccatcagccagtaactcatgatgatactcggtcttgtgataattcaaatttcaccaatggcttatctgccaaaaaagatcaccgggaagtcaatggaggagtaaacttagctgacaaaaatgacaggagcactttgaatgcaggaccaacaagcaagccatctagttcgattcctattcgagtcccaacctttcatgccagtctgcaggggccctggtattctgtacttgcttatgatgcttgcgtccgcctttgccttcatgcatgggctagaggctgtatggaagctcccgtttttctcgaaaatgaatgcacactcttgagaaatacattcagcttgcaaaatgtcttgttacaatcggaagaggagcttatgtcgaagcgtgcatcagagctagttagtgaaggggctgcatcaaagcccaagaaaacaataggcaaaatgaaggttcaagttcgcaaagttcggatgtctgtagatatgcctgctggttgcaacttttcatcgctgcccatggtgaaattgga

SEQ ID NO: 9353 - DNA, 291 bp, Zea mays
  Clone ID: MRT4577_108523C.1
cccttcgcttgggctgttaataacgacagaagggtgcaccgcttgaggatagttttcaacatcacatagcgccttactgtctgttcaagctaccatctctctctctctttcttagtgcctccttgccagaaattaaaatggcccaagaaactttcctattcacatctgaatcagtgaacgaagggcacccttacaagctctgtgaccagatctccgatgctgtgctcgatgcatgctttaagcaagaccctgacagcaaggttgcctgttaaacctgcaccaataccaaca

SEQ ID NO: 9354 - DNA, 1506 bp, Zea mays
  Clone ID: MRT4577_108524C.1
cgacgagctccggcggtaccggagggtgcaggcgctgctcaagaggctcaacaagccggcgctgcggagcatccaggcacagccccgacggcgacctcatcgactgcgtgccggcgcacctgcagccggccttcgaccacccgaggctgcgaggccagaggccactggcgggcccgccgccggcgaggcccaaggggaaccgcctccgcgacccgataaggaatgacaccgcggaggccgccggcgtccagcagctgtgggcggcgtccggggagtcgtgcccggaagggtccgtgcccatcaggcgtgtcacggagtcggacgtgctccgcgccagctccgtcaggcggttcgggagggcgcccgcgggcagggtgcggcgcgactccgtctccggcggccacgagcacgcggtggggtacgtggccggcgacgagtactacggcgcgaaggcgagcatcaacgtgtgggcgccgcaggtgagcacggcgtcggagttcagcctgtcgcagatctgggtcatcgccggctccttcggcaacgacctcaacaccatcgaggccggctggcaggtcagcccggagctgtacggggacaacgcgccgaggttcttcacctactggacgacggacgcttaccagaccaccggatgctacaacctcctctgctccggcttcatccagaccaacagccgcatcgccatgggcgccgccatctcgcccacctccgcctacaacgccggccagttcgacatcagcctgctcgtctggaaggacccgaaccacggcaactggtggctggagttcggctccggcgagctggtggggtactggccgtcgctgctgttcagccacctggcgtcgcacgcgagcatggtgcagttcggcggcgaggtggtgaacacgcgcgcgtcggggtcgcacacggccacgcagatgggcagcggacacttcgccggggaaggcttcggcagggcctcctacttccggaacctggaggtggtggactgggacaacagcctggtgccgctcgccgccggcttccacgtcaccgccgaccaccccagctgctacgacatccagggcggcgtcaacgccgtctgggggaactacttctactacggcgggccgggcaggaacgtcaggtgcacctagctctagctagcagctatagctcttcgtcatatagtctcggcccgttacctgatgtgatgatgccgctaggattttcttttctttatcaatgcccacaaaaaaggtttattaatttctcaaaagcgagagtcatggatcatgtagttttcttttcttttttgatttcctattttcttggtggtctgaacgaaacaaaagggtgaagggttaagctcagttcaaacgtagtccagttcatcaggtagcgacgatgatggtcgtcgtcgagttgtaacgtacgtacgtaaaagccccctgaacaatgtagccacaagctagcagagtatatacacgcattgtttactctttttcc

SEQ ID NO: 9355 - DNA, 305 bp, Zea mays
  Clone ID: MRT4577_108525C.1
ctgggtttttttttttttattttttttttttttctctcgcattttttatttttttttttccgccggggggaacacaaaaggaaatcccttaggtgccccggggcccattaaattttgagaaatcacaacaaaaaacggaggttaataccttttttttccagggatttataggcaacaaactggattttacaaaaaaaaaaaaatgagcggcgggtaaaaagggggcggaatcatttacaaaaaaagaaaccaggtggccctaaaaaaagctgttcaaaagcatcacaaaaggacattgacgcacc

SEQ ID NO: 9356 - DNA, 298 bp, Zea mays
  Clone ID: MRT4577_108526C.1
attaaactcttcaggcataattgatgcaactagagtcaatatgctgtatatattaatgatagctcttgggcatcgatctctgaaagctcaaatggatggaatttagtttgcgggaaagaggctttgctttgcgcatatcaggcttaggactgtgggaggcttaagttgcagatgcttcttttattgtactcttgttctgcccttgttttttgaaggctctgacttataactgctgtatcagaagaaacattttgacagtgtcttggttggagatgaacatccctaattgacatgtgat

SEQ ID NO: 9357 - DNA, 240 bp, Zea mays
  Clone ID: MRT4577_108527C.1
cctcgagccgattcggctcgaggtcggattaattttcagcttctctcgtgtggttctggggcgataagctcttcatcggccgtcgcgtccaatcttcagttcgccgactgactgtcgtgttccttattttcactcgtcggtcgacttcgtcacgacttagttcgtccatcgtgttggtcgctatcacatactgtacctattagctcggatcctgcccactcgtcgtcgcgtcgtttgccg

SEQ ID NO: 9358 - DNA, 343 bp, Zea mays
  Clone ID: MRT4577_108528C.1
gggaaaaaaggggcccccatcattcctttttttttatttttacccccccctccccaaaacccaaaaagaatttcccaggggtttaatcccgccccaaaaaaggggaatgctggtttggcccccaaattccaaccccgggggttattcaaaaacccacattctttcaaaaaaaccccgttttttgcttccccccctttttgttccccattgttttcccaagccccctcccccgggaaacaaaaatttcccctccattttaaaacccccggggttgggggctaaatttttccagattttcccggccctggaaaaaattataccttggaagaacaagtgggggggg

SEQ ID NO: 9359 - DNA, 469 bp, Zea mays
  Clone ID: MRT4577_108529C.1
tcggattgaaggctcgacccaagcgacccgtgaaacgcactgcacacgacctaacaccaatggctaccaagatattaggcctccttgggctgcttgccctttcagcgagcgctgcaaatgcgaccattattccacagtgctcacttgctcctatagccattattctacagttgctcctatcaccaacttcaatgggcttatgacataacgccgtgcaagaactactagatgaaactacgggcttgcgcagagcggcattacacaaccataacgctcaattgctacaacaaatactaggcacattacaacatacacactcattggcactcatcagacacaaacaacaacaggcacatgccactactagaaccacgtactacgcggacgaacgctgtctactattagcaacagcagctgcttgcattcaaacaactagctcaggcgaacgtagctgcataccagcaacaac

SEQ ID NO: 9360 - DNA, 309 bp, Zea mays
  Clone ID: MRT4577_10852C.1
ggtcattgtttggatccctttttcattttgtaaaaacaagaaaagatattccatctcccaaaacctgggcaaaagcgaaggaccccccgcacaattaggaaaaaacaagaaaaggagcaaacaccccctgaccggggggaaaccgaaaacaagctaaaccaaaggggggggggaccaccgggaaaaaaaaggcagcaaggggccaacggggggaacaaggaaaccgtgggcaaaaaaaaaaaaaaggtgaattttgggcccaattcaccccggggggggaaaacatacccccaacccaagggtccaaaa

SEQ ID NO: 9361 - DNA, 316 bp, Zea mays
  Clone ID: MRT4577_108530C.1
gggtggtttgcttaggcgcagacgggtgaagcggagccaacatgggccagtacgcccggagctagggttctgtcgcaagaagcttatggtgagccccgcgggagaccccttcggagaaatgctccgtctcgaaccaatgagctcgaagctgcatcgagcgcagtatgaggctccggagacaatacgtcgaggtactggagcggtcaaattgtaccctgagcctgcgatccgcaagggccgcgccgggtaactagctcgacgctgtgagtgagacaggacgccacgggcgtctttcgaagggcgacgccctgtctgc

SEQ ID NO: 9362 - DNA, 535 bp, Zea mays
  Clone ID: MRT4577_108531C.1
agcagtggtaacaacgcagagtacttttttttttttttttttttttttttttttagttcacaacaccttaccaagattgcaaaaattgtttccttctagaacattatgtcaagagagcaggcacacattttttccaactctacatgaacaggagattacttccttggaagctacatctctcattgaaccattagcactccataacagtatgaaccataagattttggtgattgatcacacacacgcccacctactttacttcatcgtgagacagcctatgtttccagcatcactaaacatgaacagataaccatcgagattgtcccagccatccctttacatttaccaggctagcaatgacacatactgatcctactagaatactactgctgtactagagctaaacattgtcatttacctatactctcaaggccaactgatcctgccatgagatcttcctctttccagatcgccctgctggattctggacccccgcgtactctgcgttgttaccactgcttaaggcgaattctgc

SEQ ID NO: 9363 - DNA, 381 bp, Zea mays
  Clone ID: MRT4577_108532C.1
gagctgatcttccattaacgaacagggcaaccaccacgagtccggggggggcggtgagcacgccaaaaacccccaagcacacgtccaagaaccagggacgcgagatcacgcaggaggaccgcgcacggcaggcaatgaggcagatccacgcggaagacaaaaacccaaaggccgaggactcagcgagggaacagaacaagaagtgcagacaaagagaaagcaccatggaccacatgtacaacgccaccggggccaacctgagcccggcggacgacggaaaagacagaaagggccccgacaacagctcgccgaacccggacacccaccacaacgggcagaggaccaccctcctccacgacaagccccgctccctggcacaag

SEQ ID NO: 9364 - DNA, 387 bp, Zea mays
  Clone ID: MRT4577_108533C.1
aaaaaagcctacgtgggaaatttgatgacttccccacaccactagatgggggcagggtataaaatgggactgacgcgccgcacaaaaatggctaaccaggctggcacgccctttaaacagcctgggaaatcatataacggtcagcaagagacaacatcattaaaggatttcaaagaaccgaacccatcaaaagatgcatagcaaccaaagccatcggacgattcaaaggagccaaatccacccaaggtttgagatttcacccatggacgtgcgaagaacaaaagaaggggacgctgtatgatccttagaaagcaccaaatgattctatatgactgacgaaagcgcttcgtgtttcggttgaacaagaatcattgttagacccaaagg

SEQ ID NO: 9365 - DNA, 423 bp, Zea mays
  Clone ID: MRT4577_108534C.1
attcggctcgagcgagcctccggctccattcatctggacgcaagccaagacaacccactagtttatgcactgcactgagccgggcccgcacgaactttccctgagcttgtcattcaaaacatgatgctggagccatatcccctatctgcgtgcgcgaaccatggctgaaggacatggcgtggatgcaaaggatgtaaccatttcgactgataccacatttgctgtgtatcaagaacatgagcatgacaggtaccacaaatggttgactaaagcagagcaagaagcatatattggacactagagcggtgacggtggtccatacatagcagcaggagaccgactcgacgctgtagcaaaaaaataccataacgtgggtctgaagacacactgaccctactgcccatgctaaaataactgcaccgt

SEQ ID NO: 9366 - DNA, 363 bp, Zea mays
  Clone ID: MRT4577_108535C.1
cggacccatggacggcagcagcggcggcggtcctaggcacggcgctgctgctgctggcggatgtggccggggcggcttatgcggcggggagctgcggcgaggtcacgtcatcagtggctccgcgcctagcatacagcaaggtcaacccggcatcgccctcaccatggtgctacaaacagtgcgctcgctcaacaccaagcaatcactaggctgaccggtcagccacctacaactgcctcaataactgactgacctgctcagtggttgtatcagcatggccaacgccaccaacatccccggtaagagcggcttcttccacgaaatgcccatcatccaaaactttgactgaaccaagatcaactg

SEQ ID NO: 9367 - DNA, 612 bp, Zea mays
  Clone ID: MRT4577_108536C.1
ttataaaaatataataataaaagatttggggtttcattaccaaagaaagtacaaacattgcaggacagacatgtcaggccaagaacggaagaaagagccttgtctctacaccgcgaaacctctcctccgttccaaatacaacaaggtcacaactcacatagccgtctagctccaacctctacatgacctattaaagcattctagcactgaaaaaatctcgggggtaaggggatgcgaggtatcccctgagatgaagacgtgcaccttgtcctgcagatcaatccagctgtagcctggatgcttgggaatgcctagccgttccagtgtcttctctaaccagagatgcacttccccacctcccctcagtgggcatgtaagttatgcatcaaaacatatggagcagaacgtgtcaggatcaatcttggataatgcattggcggccatctcagcgaggggttcgttctttttaacagtgcaggctcccaggaatgccccccacacagctcggtctggagcaattggcatgctcttgatcagctccaatgcgtcctctagctggccatatcgccctatgagattgacaagcgcagcatagggctcgacactagcagc

SEQ ID NO: 9368 - DNA, 740 bp, Zea mays
  unsure (1)..(740): unsure at all n locations
  Clone ID: MRT4577_108537C.1
ttcgggatgggatttgtgtgtgttgcttccctcccttactctaagtgctttacattggtaattgttgtaagggcgagagactccaagttgtggagattcctcgcaaacgggatatagtgaaaggaagaagatcaccgtggtattcaagttgatcattggatcacttgaaaggtgttgagtgcaaccctcgtccattgggacgccacaacgtggaggtagacaagtgttggacttgtcgaaccacggactcgcgtgtctcttgtgattgctttttgtgtgattgttgtgattcgcaagaactcgctttatagtcacttggcattatctctctaacacttaaccaagttttgtggttataagttttaagtttttacaggatcacctattcacccccctctctaggtcctctcactctctcccctcatgccttcgccaccacgccacctcattcttagcagagggtgtgggagcaagcgtctcctccccgtattcgtccgacaccagtcccgacatagacccgcgcagtggctattgcacgttcacgaggacgttttatagcgtgcacgcaccatcgttttcatcgtggtcggatgtaataaccaacattctaggagaataaaataagttcttcaaaatttataaagaccatgtgaattattntctnctttatgcatatcaacaatattaggcctgattaaatactactaataattaaagagtgggactaacctgcaccatgc

SEQ ID NO: 9369 - DNA, 417 bp, Zea mays
  Clone ID: MRT4577_108538C.1
gcgccgtcccctaaaaggaacaaaacctacccagggagtgcttggcaggagcctgtgcatgctacctcccgctgaccacagcaaggctggaccactactcggcgacgagcgcccaaccagatccggcgaacagcgaccgaagggagaccatcgagggactagccccgcgggctgacaccgaccgtatcgatgtctgccatgccgctgatctgcatcaagcggtcagagcccaccagtgaccggatcaatcggagaaccatgctcgaaactgagcttgggatgacgtgatcctgctgtgcgcatcgtagcatggctgccgtatacagaatgaccataccaggtggggctgatgcaccgggcatgtaatttatacatgcgaaaccatcttgactctagcttgaccgacttaggatatta

SEQ ID NO: 9370 - DNA, 302 bp, Zea mays
  unsure (1)..(302): unsure at all n locations
  Clone ID: MRT4577_108539C.1
ggtaccctncgagggcctggccgggtaaaaatcgtcatgccctgagcctgtcgttgccggcgtcgtcggcttgttgttttcggccgctgcatttccgtgtggggtgtcggctagcccgacaccgaggatcctatccgtccgcgaggtgagatggaatagatggttctcaggttaaccaagctggttagcctgctgtactgcaaaaaggaaatgcggattctggaggagggacttgaaatctactgtaagagcaccatactctgcaagctgtagctatgtgagaaacattccaccgttcccta

SEQ ID NO: 9371 - DNA, 256 bp, Zea mays
  Clone ID: MRT4577_10853C.1
gaagggcctttttttaaataattaaatttaaaggctttgttttttcatatgctaatttcccaatattttaaatattcacggtgtataccacccaaacatatttaaaaagattttgcaaatttacaaccaaaaacaaccgggtattcaaaaaaaaaaaaagcatttaaagagaaaaaaaaatttttccgggtcctacacggggaggaaaacctttccctttaaaatttaaactccaaaattggaattcaggggcaaa

SEQ ID NO: 9372 - DNA, 1645 bp, Zea mays
  Clone ID: MRT4577_108540C.1
aatggagtgggcttgacgatgcaaagcgaaagctctacccttctgctgaagagtcactgaagcatttgctttggttaacggacactgaagctgtttttagtgctgccttgggattgtatgatcggaagcgtgctgctattgttgggttgaattcccaaaaagatccaaaagagttccttcctttccttaagagtcttgaatgccttcctcctgctatcatgaggtatacgattgatttaagacttggaagatacgagagtgctctcagaaacattgtttctgctggcgacgcgtaccatgaggattgcatgaaactcctcaatgataatcctcagctgttcccactgggcctccagttatttaatgaaccagataaaaggaatcaaattcttgaggcatggggtgaccatctctctggagagaaatgctttgaagacgccgctttgacttatcagtgctgttcatcatatcagaagtcactgagagcttaccgtgcctgtggagactggagaggtgtttttaccgtcgcaggtcttctggagttaaaaagggaagaaatcgttcaactcgcacacgagttatgtgatgagttccaggcacttggcaagccaggagatgctgctagagtagcactggagtactgttcagatgctgaaagaggtgtaagctactatatcatggcaagggaatgggaagaggctcttagagtcgcttacatgcttagcacgcatgatctggttgaagctgtcagagacgcagcttcagaatgcgccgcatcactgatagccgagtaccaggaaggactgttgaagatcggtaaatatgcagcacgctatttggccgtacggcagaggagattgtcgctcgctgccaaactccggtcggaagatcggtttatggatgttgaagatgacagcgtttcagaaacgagcactagcttcagtgaaatgagcgcatataccacaagggagtcgagcgcttcggtcatgtccagcaacgccagcaaatcgcgggcggcgaggcggcaaaagaagggcggcaagatacgagctggaagccccggggaggaaatggccctcgtggagcatctcagggggatggcgctgacaggcggtgcccaaaacgagctgaagagcctgctcgtggctctaatacagctggggaaagcggagacggcccgtcgggtgcaggaggctgctgacagcttcgaagtgtctcagagggccgcagtgaagctggccgaggacacggtatgcagcgaccgcgtagaggagagagcgcacaccctcgagcgttacgtgaggatgctgagggatcgggagtctggccatggcgaggctggtggtacgtggcggatcaatgcgttgtctccccccgtgacagggtgagagggttttttttttactggttagcagtttagcattgtttaaatcgggacgaagagtgctgtgttctttcttgtgggtggcatcgtggcgtgcgtcaggctttgaccttgtcgattaactgctgtagcatcagttggaattcttggtgcctggtggggctgttgtattggatctatgtttgccaataccagatttgtccgggtttttttcttacaggaacaaaaaaaaaaaaaaaaaactcgagggggggcccggta

SEQ ID NO: 9373 - DNA, 129 bp, Zea mays
  Clone ID: MRT4577_108541C.1
tttctattgctctcttttgtaggaacactaatttctttattcgaatttctgaatacgaggccgcatgggactcgctaaagaaatctcatctcggggttgcgtgcactaggcccgccaacaagctggctg

SEQ ID NO: 9374 - DNA, 308 bp, Zea mays
  Clone ID: MRT4577_108542C.1
ctgaaatgagcattttatattaacgaggatttggccctattacacgaacagtacatataggactcgcatacaatttacaatttatagcataatcacaacttatatcatacaaatacacaaaaacacacttgactaactatataatccatttcgacactattatatctacacatgtgttacttgcactacttttatcaatactactcattggctataacatactcacattgacgagagctatgataatattaacactatattctattgcactatttccaccaatattctaataatgatgaccactttat

SEQ ID NO: 9375 - DNA, 389 bp, Zea mays
  unsure (1)..(389): unsure at all n locations
  Clone ID: MRT4577_108543C.1
ggaggcgtcgccgccgattctcaggaaagatgcagaatatttgtgagcactctcagataacagtacagcagtatgcatcgacaacctcaagaactgatatacaaacttaatcaaggtagaccagaccacgatttactacctcatcatgantagaaactatatgaagatcaaaggtctgttcgacatgatctggcagattgttgctgacatgatcaaagtaaagacaccagaagaaattagcaagaccttcaacatcaagaatgacttcatacctgaggaagaataggagattcgcagagaagaatcagtgagccatactagtaaggaagtgctggatctatagatgcctaagtttcgtgacgcctactactatgactactttatgttga

SEQ ID NO: 9376 - DNA, 1032 bp, Zea mays
  Clone ID: MRT4577_108544C.1
ctattttttaagttagtttgttaactggaattaactgttttattttgtaatggttcttttctgccatggttggtctgttcttatctctggcaaggaaccaaccttgctccatagaaatgatatatagtctaaatataagttaactcacatattttccccttcctcctcttggctcatctattcttggtttccattgaaggatgcaatgcatggaacaaccgttggttttcaaggatggccttgccctttgttattgaattcgtaccaagctagcatgcagaaattccaaggcaaccccccggtgtatttagctcctccagtcatggcaactgggaaccttccattggtggtaccaagccctgcatcacttgtgcagccgttcgaggccattcatcccataatggtccctgctgcaagcagcatggtcccaggaaaatacatgtaaacttgtcgtaccaatgacaatctccttttgttggaagaatcctggcgtacccattttgtctgaaaggactctagtctgttgattcacttgtcagttgctggtctgtgtccgtattttagttggaagggctttgcaacttcttgtcattcttcatgcttggtgtgggtttccaattttttttaggggcgggacagtaaaatgaattagggagaaaatgcagcgattctttgttatcttagcgacacctcttcttccaagagcagtatgtacaatgtgacattgtaaaagattcatatagtgaaggccttattttcacgaggctaatgtacatccatcttgcaagtgtaaaaaaaaaaaaaaaaaagcggccagaaaataaacttgttcgacaaaaaaaaaaaaaaaaaagcggccgagaaaatgcagcgattttttgttattttagcgacccctctttttccaaaagcagtatgtacaatgtgccattgtaaaagattcatatagtgaaggccttattttcccgaggccaaaaaaaaaaaaaaaaaaaaaaaaaaaaaaaaaaaaaaaaaaaaaactcgaagaggggc

SEQ ID NO: 9377 - DNA, 347 bp, Zea mays
  Clone ID: MRT4577_108545C.1
gggggggggggggggggggggggggcctctaaagtaagtacaggtatgcgtaacctacaactgggttgtgcaagggtgggcggtgagaggggcataatataaaagcgatgacagggcaaagttgaaaaagatagagtttacgcaagaagccttaattctaggcaactaaaggtcatacgaattatgggatcaatgccaaaaaagaaggattagcagtatgtagccctacaaaaatgaagcggctcggtctcctatacaaagcgacaattatgttccttgaatgtggtaatgttcttagctccctgggcgagacctacagagaacttagcgcttacgtattgttatta

SEQ ID NO: 9378 - DNA, 545 bp, Zea mays
  Clone ID: MRT4577_108546C.1
tcgcgctgcctccgtctctccgtgtctgcatggctcgctacgacctgacctcagtacatcggggtactgacgaagaggtgccaggaaggcggaggctactagcacggtctcatgagtcaccgtgtcgtcggcgcctgcatgagcaatagcgactgcgagaacgtctgcaagacggagggcttcccgggaagcgagtgcatggggcacggtataaagcgcaagcgccactgcaagcggatctgctaggaattaactagccgactggccagcgcatgcatgcaccacgaccgcgacctacctgctgctggtccgtgtgcgttagattcttgtcctttggaccgtgctgaggcgcgcaaccttgcgtacgtgcgtgtgcgtgtgtcttttcagttactctcaattactcataacatacgtgcgtgagagcgaacgcgcgtctcgctgcattgatgaaacgacttcacctgctgcggatttacagtttctgatgcattttaactagtctcgtatcaacgaaatggatatacgaccctaggaccctcaaa

SEQ ID NO: 9379 - DNA, 615 bp, Zea mays
  Clone ID: MRT4577_108547C.1
gctcggcccccatcacaacgctctacgaccgcatcctcgacgagtccaagaagaaggaccgcaagaactcgtgcggcctgctcaaggagatccaccagattgagctctgctccaggcacctcatggagatcactgacgccgccgacttcccgttgcgcgaggacaaggacgccgtcttgcgggaggccgcgcaggacctagtgcacctgtgcgaatccatcaaggaagggctcgacccgctcgagcgccaggtcagaaagatgttccacaggattgtgcgcacccgcacagaaatccttgactgcttgagtaagccacatggcaccgggtgatgggatacaggagattgccagcccgtttgcttgctgtgatgccccttaaccaaacattcttgtgaaatgcagcagcggtgttcaaatgaggtagccttttctctgcataagttagcaactactgcatcatacaaatgcgtcttcataaaggcttgtccttctgtttgatataaattggtttgtttattatttttatttcattttctcatctgtgtagattgtgaatccaaacttggcagtgcttcgtagtaatggtctaatactatttgttccattcctttcc

SEQ ID NO: 9380 - DNA, 219 bp, Zea mays
  Clone ID: MRT4577_108548C.1
caccacggcctttactgctaagatgtatagagcgaccgcgatctgcctgacagcgggaacccccgacccgtcctcagtgaaacctaggagcgtgcctacctgtgtgcgatgcctcaccggagagtgagtaacccaagagcgattccaacagtcgagagcaggctcaggctgggcgacgtagcacctttaagtgcagcaggaccagacctctacccacat

SEQ ID NO: 9381 - DNA, 323 bp, Zea mays
  Clone ID: MRT4577_108549C.1
gtttgtcatggcgcgatccaataccaacgtttcatttaagtcggccccaacaaatgcttcgagcaggtctattcctaatgtgccgcgcgtcatcaaaaagcctaccggttctactattgcctatcatctttacaaaaaagccaccaacttcagcgagaagaatatcctgacctattaccttacacgtggtaccctctatgtgaccctatttacaactgacgaacgtttctctcaagttaatgcctcagctcgcgactcccatctttgtacctatgacttacacaacacgatgacctaccactttatccaagactcccagacaa

SEQ ID NO: 9382 - DNA, 460 bp, Zea mays
  Clone ID: MRT4577_10854C.1
cagctagactccgccgccgggccgggggcacgcgcctcctcggcgcgcggatccagcccaaccgcgcggcgccgaattcgcggcgcggcgccctagctcacgctgcttcttgctctcgcgaggagtggagacgggacgggagactagagagcaagcgaagttggacgtaggcgcacccgctttgctgcttcttacctgagctttgaagaagtagcataacataacatggcaggacagcgtgagggcatgcatctggtttcggagatgactgacgcacgtgtttcatcacaagttgtggaagataggggcactgaaaagactatgccagaagaacaactatctgttactttatctgatggaaaggggtgctttgcttgcaatgagagatcacacaacttggagcagtgcaagacaaagtacaaacttgttcctgcagcacatcaatttggctatgctacaa

SEQ ID NO: 9383 - DNA, 558 bp, Zea mays
  unsure (1)..(558): unsure at all n locations
  Clone ID: MRT4577_108550C.1
gtcaaccctgtccatccaaagatgaagcgaagggagatgcatgctggggggcgggcatcaaacttcatgaactctgtgctttgacagattttcttctacctggccaaggctctagaaagattaacgtatcaacaacaaataattcagaaagcaacaaagacgatgatgaaagttttagggaagagctttatgagatgttaatccctgcagttctgagaccttcaagatgcaaactagactcctcgtttaagttgcatttctattacatagaatttattcccataccagcagatagacgatatcagatgtttggtctttttgtgatcaatcgccttccacaggaatctgaaaagttggatgttgaattgcatcttgctcgtgcgaggattgtgaaagcaggaattaaatatttgggacagattgagctcaacaaagaagagatgatactcgcacacaattgtcaagaaatgtttttgaaagctctnctggatagatctgagttcacaccatcttatattttgttggcgaatgatggtgcattggacatggattcaacat

SEQ ID NO: 9384 - DNA, 349 bp, Zea mays
  Clone ID: MRT4577_108551C.1
gcgatggccttgttggcctccctcctctcctccgctagctggcgccagagatacgtcctctcggcctcgagagaggggccaccttctccgacagcctgcggtttttgctttccgcagccgacttctcccgcacagcatccacatgctgcgcccggagactctcgacctcggcagcaaagtccgcagtcaaggcacccgacgcaacgtggtcggcgaagtcggccgcctgacacataaacccatgagacccgaaccctcataagaacaacaaccatcaaagtccaacacaacttacttgcttcagctgttgtgacagctgctgcgacgcttgcctcagttgctgagacat

SEQ ID NO: 9385 - DNA, 654 bp, Zea mays
  unsure (1)..(654): unsure at all n locations
  Clone ID: MRT4577_108552C.1
ccacgcgtccgcaccaccgccgtttgatctcacaccaaactgcaactggcagcaaccagtagatgccgccgccggagatgcagaagcggaagctcgcccgtatctgcgacctcgtctcctcctccctgcttctccacctcgaacccgcgccgtcgccgccgcggcagctgacgcgggagggcgagcggcagctcctcctcgcgctctccacggtgaacaagacgatacggcgatgggaccaggaggaggatgagtgggcttgtgaattgtttcaggaaactctttctgattctggagaagttcataattgctgcttactacctgaagcgcgtccatatgatggatttggttgcctggcaaatattgtctctatgctggttggtttccttgatttctgcagcgactatgtcaaacactcagctggcaacatcctcatttccgtatctagtacctaattaagtttgaatccatttggattcaattcattgaacttgcctggggggctatacatgcancatccaaatttttcataacacttcacattctncaaccgactcccaacaatgatganagcactattcangnacaagaatcacaacttcatgacacacttaatgacatcgtcttaatacaatcngnaaacatttcaatctc

SEQ ID NO: 9386 - DNA, 680 bp, Zea mays
  Clone ID: MRT4577_108553C.1
gacggaaatatcagcagccaagtctcaaaagagtggagaattacctgatactaatgacgaaattaattcagagagttcatcagggcgtcatctagaaaacaatacatctaaaaagaggggcaggaaccgatctaaacaagctgccatcgagcagggctctgaaggaaaagagaccactgggaaatctgccaaactaggtctgtcaggcattcgtgatgctcagacttcttcagggaaaaaggttagaaaattatccaggcgttctttgagcagccagcattcaccaaaagattctgaaagtgttgggacatcaacatcctcagctgacgaggtcagctgggcttctaaggagctcataaactttgtagctcatgcgagaaatggtgataaatctgtgatcaatcagtatgacgtccaaccccttttacttgactatatcaaacgcaacaatctgcgcgatcctcgtcggaaaagccagataatttgtgattctttgctccaaagtctcttcgggaaagaccgtgttgggcattttgagatgcttaagcttcttgaatcacattttcccacgagtgaggtttcaccaattgatgctgatgaaaatcatggtggtgtagtagaccctgatcctagtcaggatgctgatggtaacagtgaagcttcagttgttatgagttcag

SEQ ID NO: 9387 - DNA, 909 bp, Zea mays
  unsure (1)..(909): unsure at all n locations
  Clone ID: MRT4577_108554C.1
agcaataagttcacaccatacatgggggggaaatataataggaataagttcacatcacacaagagtctaatatagcacaagacagttcaacacgatagactattacaataaaagatggtttttaaatgacatangatagtgcaagcaatccatgcttgcttgaagatctcaagtcccaacatcatcatccaactccatgacattcatagcttcaattatagtttttatttcacactcgaaacctttctctaaagcaatccatgcttgcttaaaaatctcaagtcgcaacatgatcgtcgacctccacatcattcataacttcacttatagtttttatttcaccctccaaatctttctctgaagcaataatccaaggtttagtagaaactaaagcggctataattacgggtttaagcttcgaacggaaggactctgaaacacgagttgacacctgcattgatagtacatcacgagcaagggtagaaagaatagggaaatttgtcacttgacccttccaccatgataaggcattaaatggtgcatcactttcattagccttcactaggccctcactcatgtatagatccaattctgacactttcttctcattgtctgttgctgcatacaactcatcaagattcacctcattctcatcatcatcagccatcaaaacttgtttatttggaacaaaatccttcgagccgtccagcggcgcaacgagctcgggcctcgggcggacggacgacggggagtcggggatcgccggatgggagcttgggctcgcccgctcgatctgggcgtgaggctgtgtcgcgcagccgcggtgacggtgtctggcggctggacgatggaagccaacgcaggtggccagcactcacgtcagagggtagcagcgacactgtgctcggc

SEQ ID NO: 9388 - DNA, 3468 bp, Zea mays
  Clone ID: MRT4577_108555C.1
atggcacccaagagagctagctcgaaggcagccccatacgcaggcgtagccttatgggtttaatgcaaaaatcagctgaagttgtgcaacctgcaattgcaagtcctaccgctagtgcaaacgcaagtccaagttcaagtgtaagggcaagtgcaagaatctacgcaagaaggcacataccagcaagtgcccaagcaagtatcggcgacgatgaaaaacaagtagatggccagattgggaaaagactcacttcatgggtctggcaacatttcccattgtatgaaggagatgttgagcatccgggtcgttcgagtgatgagcaaaagtgggcaaaatatcttcgatgttgacataatgctaaggtggaggcaccaaatggaacaaagcctttttcatgactactgaaaccttttaacctttgattgcgtgaagccttcgatcgaagacaaattcggaattcactactcccatagtggcctttgggctagcgtcctctacagccactgcatcagggacccaccaaagaatctccaggagctctatcaactatttgaaaaatatgccagatccgaaggactccaccagcgcaaggtcgagtcccagaggaaacccaaggaccttccgcagtccagacgaacatggacaagaccttcacagtcagactccggtcgagacagccgcagtcagcagcaggtgcacaacattgccaaccagcaccccactgcctccgcacccgcatcagccaaacatccaccacccaaatcacatcaatcaccaaagcaggtagatttccttgataagcctgaacatgtatacataacaattattacttatgtgtcacagctcattggatagacgataatagggaaaagcgaacaatgataaacaatttaacgcatgtaggtcactggtccagtcgtgcaaacgaagtggtcccacgtgctgctgaccttcgacgccagagatgtcgacctgcgcagcgcaccccacatggacgccatggcggacaacattttcctccacgccttcgaccgcatgggcatcagccacagtctcttcaagccttcggacaaccccttatatggcttcggtggcaagggcacctttcctgtgggcaagatagagctacccctgtccttcggtgtagcacccaatgcacgaagtgagcaggtcaccttcgacatcgtcgacatggtatactcgtacaacgccataatgggtcggggctccattaacaagtttgaagcagccattcacggactttacttgtgtatgaaaatcctgggtccgcaaggcgtgatcacagtctatggcaaccagcagaccgcgcgcaacattgaaagagacttcattccagggcaaaggaacatacactgccttacgatgcagcgcgataggggtgaaaacgggtcgggtacccgaaccgggtaccggatacggatactaattcgggacgttttttcggatacggatacgggtaattttatttccgggacggatacgggtaatacccggatagaatcttatcggatacgggacggatacgggacgtgcaatacccgcgccatggatgtcgatgatatttgtgacattgacaacaatgtgtcccatgaagatgaaatacatcgcagtgaggaggatgttaatgctaacaacagtgaacacatggtggaggaggaccatgttcctgcacctattggtagtaaggtgaatgtcctgagccaacaagttagtcgtggaaaaaacaagtctgtagatggagaccatcgtgtagtgaaacgacaactaacaaccaagtcaaccaataccccaacaagcaagtttatggcatcttcatttaaagcagcaaggtcacaccagagcatggatttagtgccacaattggctaaagttgcacaagatggaagtgcgagcgcaaatgaaaatgcaagcgtagctgcaagtgtccaaataagcactgaagatgaattggatgaagaacaagtcaagaaaaagaagctcacttcatgggtttgggagcatttcacaaggtatgatgtagaagtggagcaaactgatggttccattgttaagcaaaaatgggcaaaatgcaaaaaatgtgcacataaagctaaggctgatagttcaaatggcacaaaggcttttagtaaccatttaaagctgaggcataagattttgaagggtcaacaacacctaactcagaatggcgatactatatcaacatataaatttgatgagaattttagtgtgagactgctatattatgccatcatcatgcatgagtatcctttcagtattacccaacacaagtacttgatgaaatttatcaaatcactgcgaccatcatttcctttgaagtcatgtgtcactgctcgtaaagagatcatggatctttatattgaggaaaagaatatgttgtatgcacaattcaaaaagttgtcctgtcgtaaaatgtttgctctttctttggataatgctgcttcaaacaaggttgctgttgatatagtgattgacaatgctaaagacttgcttgtctgtggaggaaagttctttcatgttagatgtgccaatcatatattgaaccttgttgctagagatgggttagctgtaattgcacatgccattggaaacattagacattttataacaattattaaaaggtcacccctgcagttggaggcatttgagaaatgtgcaagagaatgtgacctagaccctaaaaaatctctttccttggatgttgcaacaagatggaattccacatatattatggttagagatgccatttactataagaatgcttttgatcgccttgcaaaaaaagaaaaggatagatatggtcatatcaatccttcagctaatgattggttgaatgcattaaacattagcaagtgtttgaagaagttctatgatgtcacattacttttttctggcacttcatatcctactgcaaatcatttctttcgtaaattctctgagataaagatggctattgcaagatggtgtgatagtagcgatcccataatctgcaccatggcatattctatgagagacaagtttgataagtattgggaaatgaacaatatggctttggcagtgggagcatttcttgatcctaggtacaaacatagaatggttgagctgtacatgtctaagatgtatgataatgagatggctgatttggagaaaatggcattcatgaatgttattaatgaattattttcttgctattcatcaaccatcaatgcaaaaccaaccaaaaaagggactacctcgaaggattttgttccaaataaacaagttttgatggctgatgatgatgagaatgaggttgatcttgatgagttgtatgcagcaacagacaatgagaagaaagtgtcagaattggatctatacatgagtgagggcctagtgaaggctaatgaaagtgatgcaccatttaatgccttatcatggtggaagggtcaa

SEQ ID NO: 9389 - DNA, 3268 bp, Zea mays
  Clone ID: MRT4577_108556C.1
tctcatatgaggtggaaagttctttcatgggagatgttcaaagcatatattgaaccttggggcttaagaccggcttagtagtaatgaggaaatgctattgccatacatgtagaatgttcataacagctatggccacccacgacctgcacgcccgcgcctacgccagcagcgcttgcaccgaaaccccgcctcactggaaactctcgcaccatgccagaagaattgcaccggggcgagctagagatggcaatgggtacccgctacccgaaacccggtgggtttttgctctattagggtatgggtttgggtcaatttctctacccatgggtttgttaatgggttcaaatcgaaacccaacggtgggtatgggaaacccgttgggtacccgaaacccacatgggtacgggtttgggcaaaattttatacccgtcatgggtatgggttttttagcgggcgtattttttcttcgcgggcccaagcggccagcccaatcactttggcgtttggcctgtggcctccaagccgagcgccgtgtcgctgctaccctgggacctgggtcctggccacctgcgttggcttccatcgtccagccgccagacgccgtcaccgcggctgcgcgacacagcctcacgccagatcgagcgggcgagcccgagctcccatccggcgatccccgactccccgtcgtccgtccgcccgaggcccgagctcgtcgcgccgctggacggaccacggacgggcgagctcgcgccatggatgtcgatgatatttgtgacaacaatgtgtcccatgaagatgaaatacatggtagtagggaggatgttaatggtaacaacagtgaacacatggtggaggaccatgttcctgcacctagtgaggtgaatgtcctgtgccaacaagttagtcgtggaaaaaacaagtccatagatggagaccatcgtgtagtgaaacgacaactaacaaccaagtcaaccaataccccaacaagcaagtttatggcatcttcatttaaagccgcaaggtcacaccagagcatggatttagtgccacaattggctaaagttgcacaagatggaagtgcgagcgcaaatgaaaatgcaagcgtagctgcaagtgtccaaataagcactgaagatgaattggatgaagaacaagtcaagaaaaagaagctcacttcatgggtttgggagcatttcacaaggtatgatgtagaagtggagcaaactgatggttccagtgttaagcaaaaatgggcaaaatgccttcaatgttcacataaagctaagtctgatgcttcaaatggtacaaaggcttttagtaaccacttaaaattgaaacattatcttgtgaagggtcaacaacagctaattcagaatggaaatgacatagcaacatataaatatgatgagaaagctagtgtgagacttctatattatgccatcattatgcatgaatatccattcactgttgccgaacacaagtattttatgaaatttatcaaatcactgcggccatcatttcctttgaagtcacgtatcactggtcgtaaagagatcatgcaactttataaagaggaaaagaatatgttgtatgcacagttcaaaaagttgacatgtcgtgttagttttactatggatgcatggacatctattcaaaacaaatcgtacttatgtgtcacagcacattggattgatgataattggaacatgcaaaaaaggattatcaattttatgcatgtagaaggccaccatggtgggataaaattgagtgatactttttttgcaaatgtgttgaattggaaccttgataagaaaatgtttgctctttctttggataatgctgctgcaaacaaggttgccgttgatatagtgattgaaaatgctaaagacttgcttatatgtggtggaaagttctttcatgttagatgtgcaaatcatatattgaaccttgttgctagagatggcttagcagtaatgggaaatgccattggaaacattagacattttataacaattatcaaaaggtcacctttgcagttggaggcatttgaaaaatgtgctaaagaatgtgatctagaccctaaaaaagccctttccttggatgttgctacaagatggaattctacatatattatggttagagatgccatttactataagaatgcttttgatcgtcttgctaaaaaagataaggatagatatggtcatatcaatccttcaagtaatgattggttgaatgcaataaatattagcaagtgtttgaagaagttctatgatgtcacattacttttttctggcacttcatatcctactgcaaatcatttctttcgtaaattttctgagattaagatggctattgcaagatggtgtgatagtagtgatcccataatctgcaccatggcattttctatgagacacaagtttgataagtattgggaaatgaacaatttagctttggcagtgggagcatttcttgatcctagatacaaacataggatgattgagctatatatgtctaagatgtatggcagtgataaagccgagttggagaaattggtattcatgaatgttatcaatgaattatttgcatattattcagcagtcatcaatgcaaaatcaaccaaaaaagggactagctcagagaaggattttgttccacataaacaagttttgatggctgatgatgatgagaatgaggttgatcttgatgagttgtatgcagcaacagacaatgagaagaaagtgtcagaattggatctatacatgagtgagggcctagtgaaggctaatgaaagtgatgcaccatttaatgccttatcatggtggaagggtcaagtgacaaatttccctattctttctacccttgctcgtgatgtactatcaatgcaggtgtcaactgttgcttcagagtcggcatttagctctggtggacgcgtggttgatgcctttcgttcgaagcttaaacctgaaattattgaagccttggtttgtactaaggattggaagattgcttcagagaaagatttcattttattgtgcatgtgttcttgtatttctctatgactaaatgatgatgatggttattgatatgttttgttgttctctattggtttcagatttggagtgtgaaataaaaactatagctgaagctatgaatgctatggaggtggacgatgatgttgcgacttgagatctttaaacaagcatggattgcttgcactattttatgccatttgaaaactaccttttattggaataggctattgggg

SEQ ID NO: 9390 - DNA, 2057 bp, Zea mays
  Clone ID: MRT4577_108557C.1
aatatagcaataagttctcatcattcaacacatcatacaatatagcattacatagaccatagatcaacaagacaatataacaataagttcatagcatacaatagtctaacacaatagttcaaatataatagcgataagttcacatcacacaagagtctaacatagcacaagatagttcaacacaatagactattacaataaaaggtagttttcaaatggcataaaatagtgcaagcaatccatgcttgtttgaagatctcaagtcgcgacatcatcgtccacctccatagcattcatagcttcagctatagtttttatttcacactccaaatcgagctgcacgacggggccacggatcgaggcgggcgtgagttcatttctactgctgacgagccctgcaagacgagcagccgaagtcgcaacatcatcgtccacctccatagcattcatagcttcagctatagtttttatttcacactccaaatctttctctgcttccaatccttagtacaaaccaaggcttcaataatttcaggtttaagcttcgaacgaaaggcatcaaccacgacggggccacggatcgagggttcgggcgtgagttgcctcttgctgctgctgacgagccgccgccgacgagccgacgatggtggccgccgaggagtgcccgctgttgggacctgatgcgccggcgtggggctgctgcattcttggtctggctggcacctgggagcagcactcggtctggcggcggcgtggtctggcgacggcgcgcgatctggctggcacctgggagcagcgctcggtctggcggggcgcggtctggcgacggcgcgcggtctggctggcacctaggagccaggagcgaggtggctgatgggagctcgggcgaactgaggacggccgctcgctgctcggtctccgtccagcggcggcgcggtgagcagggagcgaggtggccggatgggagctcgggcgcaccacggacaggcgctcgccgctcggtctccgtccagcgcaccacggacggtgagcagggagcgaagcgaggtggcccgtggccggatgggagctcgggcctggggacctcctcctcggacgcctggggacctccaagcaccacggacgacggggaccgcggctgtgacggcgtctggaatctggcggctggggctggacgccggaacgcaggggccagggtaggcggctctcactaccagtaggtgtaagaacatgatcctcctcctccatgtggtcactgtcattgccattaacatcccccaataccatgtatctcatcttcattagacacattgttgtcaatatcacaaatattatccacatccatggtgcttagaagagagcgaggggctgcaaaccggggccacggcgcgagagttcgaccgcgaggcgcctccgattgttgttgccgagacgccggagccgatgacgacgagccggcgacgacgacgggtggcgacgagttgggaccggacctgctggcatggggcggctgcatcgagcgagcacgggtgaacaacgcctggctggctggctggctgtagacttgcacggaagcacccccggtcgaagtggcacacgccgcggcgcggcggtgcagtcggccggtctccagtgccagagctgcggcggcgccttgcccagccctagcgtctggtcgtccgcccaagccaagagtccaagacccgatcagttaaaaaaacccggacgggtgagagctcggacggacgcggcgcggtgagcagggagcgaggtgaccgagcggcgcccgtccgtggtccgtccagcggcggcgcggtgagcagggagctgaccgagctcgcccgtccgtggtccgtccagcggcgcgacgagctcgggcctcgggcggacggacgacggggagtcggggatcgccggatgggagcttgggctcgcccgctcgatctgggcgtgaggctgtgtcgcgcagccgcggccacggtgtctgacggatgcctcctggaagccaacgcaggtggccaccaaagaatccgcccacgagtccgcccacgcgtccg

SEQ ID NO: 9391 - DNA, 2527 bp, Zea mays
  Clone ID: MRT4577_108558C.1
gttcaacacagaagtcatgtcacgctatactttccgaggccgaccagatattgctggaaaatatgttgttgcagcagtaactgggtatttctattctattgcttgtgcatctactacgaaaggggtcgatgatagcttgcaggatatccttcgtctgttaactctttggttcaaccatggggatacctcagaagttcaaacagcgttgcagaaaggtttttcccttgtcaagattgagatgtggctggttgtgctgccccagataattgctaggattcattcgaacaatagagtagttagagaactgatacaatctttgctagttcgaattggaaaggggcatccacaggctttgatgtatcctctcttggttgcctgcaaatcaataagtatattgagacaacgtgcagcgcaggaggtcgttgataagatccgccagcacagtggaggtcttgttgaccaggcacaacttgtgtcgaaggaactgatacgggtagcaattttgtggcatgaaatgtggcatgaggcactcgaggaagctagcaggatgtattttggtgagcacaatatcgaaggaatgcttgctgtacttgagccattgcatgcaatgcttgagaggggggatgagacaattaaagaaaatgccttcattcaggcttatgggcatgaattactggaagctcatgaatgctgtttgaaatatcgggctacaggagaggatgctgagctaactaaggcctgggatttgtattaccatgttttcagaagaatcgacaaacagcttccaagtcttacgaccctcgatctgcactctgtttcgcctgagctactcaaatgtcgaaagttggaacttgctgtgccaggaacttatgctgcagattcaccacttgtgacgattgagtattttgttccccaattgattgttataacgtccaaacaaagaccaagaaagctgacaattcatggaagtgatggcaatgattatgcattcttgcttaaaggccacgaagatttgcggcaagatgaacgagtaatgcagctttttggtttggtgaatactctcctagagaactcaaggaaaacatcagagaaggatttatcaatccaaagatatgctgttatacctttgtcacctaacagtggtttaattggatgggttccaaactgtgacacacttcatgctctgatccgtgaatacagagatgccaggaagattttcttgaatcaggagcacagacttatgttggcttttgcacccgattatgatcacttacccctcattgcaaaggtggaagtgtttcagcatgctttgcaaaatactgagggaaatgaccttgcgaaggttctgtggctgaagagtcgaacttcggaagtatggcttgagcgccgcacaaactacgctagaagcctggctgttatgagcatggttgggtatttgcttggtttaggagatcggcatccaagcaaccttatgttagatcgctatagtggaaaaatattacacatcgacttcggagattgctttgaggcttcaatgaatcgagaaaagttccctgaaaaagtaccattccgtttgactcgaatgcttgtgaaagctatggaagttagcggtattgagggtacattccgaacaacttgtgaaaatgtgatgcaagtccttcgcacaaacagagacagcgttatggccatgatggaggcatttgtacatgacccgttaatcaattggcgtctgttcaatttcaatgaggttcctcaagtgtcgaactatggtaatgttcatgctcacacggttgtcagtagtgaagaagcagtggctaaccgagagctcatgcaacctcagcgaggagcacgtgagagggaactgctacaggctgtcaatcaactcggtgatgccaatgaggttttgaatgagcgtgctgtagctgtgatggcacggatgagtgacaaactaacagggcgtgacttctcttctgggtcagctttggctggagcaggtagctctatccaacatggcagtgagcatttggcttcaggagatgcccgggatgcccaacctggtctctcagtgaaggttcaggttcagaagctcatactccaagcgacttcacacgaaaatttgtgccaaaactatgtcgggtggtgtccgttctggtgagctctcttggaaacagtagcagtttataacatgtaaatattgtgaataccgtgtgcatagaagtttcgtggtgacagtttgtatgtgcagctttgtaattagcagaacttcaagatgccttggaccatccttttgtcagtttcttagaccgtgtttagcagttcacccttatggccatccaaaacactgtttttgtactgtagattgtattgtttgtagattgtactgttcgcagggtggatttttgaatatgagtataagaatgtgtaagctgttgaagatagccttaggttttcaaaaaaacgtcgagacctcgtgcggacgtggtcgacgtcttggtcaaccgacacaaacccggcgtccatgtgacct

SEQ ID NO: 9392 - DNA, 273 bp, Zea mays
  Clone ID: MRT4577_108559C.1
aggggggttcatacccctcagataagccaaacaaagagatccccctacaaattgtttgattaacggacctacaaataaacctcagaaccattttggtccacgatgtacaataaaaaaccttgtgccatatacataaactagaagtcaaattctctaagtacattctgcccaaaaggataatggggctaaatataatccaggtaaaaagcggggggggaaaacaactttggccaattaacaaaacacttgggcacaccatgctccttttcatct

SEQ ID NO: 9393 - DNA, 2017 bp, Zea mays
  Clone ID: MRT4577_10855C.1
gtttgcacaggcagccacgccacgcggacacctgccttacattgccggcgcgcttgcgtgactgggcgcggcgagatgacggcgccgggcgggtcgaacctggcggtgctggacgcgctggactcggcgcgcacccagatgtaccacatgaaggccatagtcatcgccggcatgggcttcttcaccgacgcctacgacctcttctgcatctccaccgtgtccaagctgctcggccgcatctactacccggacgacaacctgtacatagacaagcccaagcccggcactctgcccgtgtccgtcaacaacatggtgacaggcgtcgcgctcgtcggcacgctcatgggccagctcgtcttcggctacttcggcgacaagctcgggcggaagcgcgtgtacggcatcacgctcgtgctgatggccgcctgcgccatcggctcgggcctctcgttcggcagctcggcgcacgccgtcatcggcacgctctgcttcttccgcttctggctcggcttcggcatcggcggggactacccgctgtccgcgaccatcatgtccgagtactccaacaagaagacgcggggcgcgttcatcgccgcggtgttcgcgatgcagggcgtcggcatcatcttcgcggggctcgtgtccatgatcgtctcgggcatcctcctgcactaccacccggcgccggcgtggaaggagaaccacgaccggtcgtggcaggaccagatgccggcggcggactacatgtggcgcatcgtcctgatgatcggcgcgttcccggcgctggccacgttctactggcggatgaagatgcccgagacggcaaggtacaccgcgctcatcgagggcaacgccaagcaggcggccaacgacatgcagaaggtgatggacgtcgagatccaggccgagcaggacaagctcgcgaggtacaaggcggcgaacgactacccgctgctgtcgagggagttcgcccggcgccacggcctgcacctcatcggcacggccaccacgtggttccttctcgacatagccttctacagccagaacctgacccagaaagacatcttcccggcgatcaaactgacgagccccgtcgacgacataaacgccctcaaggaggtgttcgagatttccaaggccatgttcctcgtcgcactcctcggcaccttccccggctactgggtcaccgtcgcgctcatcgacaaaatgggcaggtacctgatccagctcatcggtttcttcatgatgtctgtcttcatgctactgatgggcgtcatgtacaacgacctcaagaacaaacacaccacgctcttcgccctcttctacgcgctcaccttcttcttcgccaacttcggccccaacagcaccaccttcgtgctgccggccgagctattcccgacgcgcgtgcgctccacctgccacgccatcagcgccgcgtcaggcaaggccggcgccatcgtcgcggccttcggggtgcagagcctcacgctcaagggagacgtgggccacatcaagaaggcgctcatcatcctctccgtcaccaacatcctcggcttcttcttcaccttcctcgtcccggagaccatgggccgctcgctcgaggagatctccggggaggacggcaacgtcgaaaacggtcccggtgctcccgccggcgtggccatgggcgtcgcggacgtgagcaaggatgacaagatgcctgtttccagtactgagtggcagagctccatgcatgcgtgatcgagtaagcagataccaaaactacagtactacacagggggtgtggaatccatgtgatcacgcctcgaacgatctatttaatctactagggtttcaatatatatatattttagcctaagcataataaagatatgtaaagacatatggattatgtctcgggccatacaccgtatgcatggtctgagactagtatctataacaataatgttgccggtttgaacaggcccggtcctgatatttggtgacatggaacgagagtaaaaatatatgtgttgct

SEQ ID NO: 9394 - DNA, 293 bp, Zea mays
  Clone ID: MRT4577_108560C.1
tcttccggaggcaccgaaattttccaggcaagggaaaatcccgttcgaaatccaacgcttcaaattcgttcgtcttctaggcgcttccccgaacccgtcacgaattccttagatccccgctgaaatcccttaatccttcgtgcttggcggcgccggcttcttccttggaccgggccgccttctttcgcaatcgtggccgcattttttcacccgagggttttggtttgcttttgctcttttcggtttactggcttcacagattggcgcgacccgtccgtcattgtggacctttt

SEQ ID NO: 9395 - DNA, 267 bp, Zea mays
  Clone ID: MRT4577_108561C.1
aaagcacaaccctggaggttgagagctcggacaccatcgacaatgtgatggcgaagatccacgacaaggaggcatccccccggacgagcagcgtctgatcttcgccggcaaacagctggaggatggccggaccttagtagactacaacatcaaggttgagagcacgctccagctcgtgctccgtctccgtggtggtcagtaagtcacgggtcgtctaagctgccgatgtgcatgcgtcgcctggtgcatgtctcgagatggtggttg

SEQ ID NO: 9396 - DNA, 250 bp, Zea mays
  Clone ID: MRT4577_108562C.1
taacgaacgacctgactcatatgaccttgtttatcagcagggataatgtgggaaagtgcatgcccttttatcttgctcggggcatccttcaacatcaccccttctaggacctgtacctgatgctatttgtcattaccttattcatttccccaaaaaagaaatacaaaaccaaaaaaaaaaaagaaaaaatattaacgaaaactatattaatttttttttttttcttcattaatattccaccttatttttt

SEQ ID NO: 9397 - DNA, 232 bp, Zea mays
  Clone ID: MRT4577_108563C.1
ccgaattcggctcgaggtttgattgatatggctcatagctacttcatatgtgactacttgttgggctcgtatttaggatgatatgaaactgaattttatcttgtgccttatcattacggaatatcattgagttccaatttaattgaatgtcaaatcaatgaaatgagggagaaaaacattggcttctgaaaaaaaaaagactacaatagggcggtcgtcgactagtgagctc

SEQ ID NO: 9398 - DNA, 508 bp, Zea mays
  Clone ID: MRT4577_108564C.1
gggggggggttttttttttttttttttttttttttttttctccggggggaccctagggcaaattttttttaaaagaaaagcacaggaatgcttttttccaaacaataaagggttcttttacaaggaagcttgcccacacaagggccctaaattttggtaataaaaaacccttttttgaacaggcaaacaccccaaaacagactggggtttttccattccccgatggacggggcacccgtttaaaggagggggtttaataagggcagggacctttgggacagagggcttttcaataaaaccagaccaccaggccttaaaatgggggggggggttcaagcacaaatgctaggggggtaccaaccaggccgggggggccaaacacatgtttaaggtcggcggggcttaaaaaatccccagcagggttcttggatttgggaaggggggccttgaccccttaagcccttttttagtttgaaggggtttaacccaattttggggggggggcccc

SEQ ID NO: 9399 - DNA, 239 bp, Zea mays
  Clone ID: MRT4577_108565C.1
gcggtggggtaacatcacgcctgcctccaaatagctggatttgtcatatgggtccgtgttggtttacagttacagctaatgattaccatgtgtttaaccaattaccttcttgttatgtaacagtggagagtataagagtggacttctgagagagagggagagcggtttgatgacttggcagttgctacacaaagctcctgtagcacactatgtgtggccgaattgaccgcgacctgacc

SEQ ID NO: 9400 - DNA, 237 bp, Zea mays
  unsure (1)..(237): unsure at all n locations
  Clone ID: MRT4577_108566C.1
accaatttttcctaagccttcngatagagggcagggtaggctttcgtttcgtccggaagaagcaagctaaaggaaggcgatcggatcggaggccatcgggaacggaacggaacggaaaaagccttaattcgagttatcggaggagtcgctagcaccacaacacagggccttcgattgcacgtattggggtgggaggatgttgcanaaaccatggaagggatgcatcttcttccttct

SEQ ID NO: 9401 - DNA, 346 bp, Zea mays
  Clone ID: MRT4577_108567C.1
attcggctcgaggcgaacggggtgtacgcgactttttgcaggatcgactgccccgggtgggccggtatcggggacaggaacctggcgcgaagagacaccgtgacgtccaccgagttagacaacacactactacataaacctgctgatgcacagagggttgtatcactccgaccagcaaatcttcaatggctgcgtcacgaacggcatgggcctcacgtagctgtccatgccgaggaggttcatgggcgacatgggcgagcggcatgaccaggatgtacaacatcaggcggctcacagacacgcacgggcagatcaggcacgcctgttccagggtcaactagttagc

SEQ ID NO: 9402 - DNA, 206 bp, Zea mays
  unsure (1)..(206): unsure at all n locations
  Clone ID: MRT4577_108568C.1
ccttagcaacatgaatttggttttttgtaagcatataaatagaaaaccaggattaacatggcacagctggcattctgaccagttggcccaatttttcaagaacgtgaatgagataaaccctacatactgttttaatgctggtgtgggttattacangacattcttggctccattccnatgttgaaggaatttctgaaccgcaggaa

SEQ ID NO: 9403 - DNA, 463 bp, Zea mays
  unsure (1)..(463): unsure at all n locations
  Clone ID: MRT4577_108569C.1
cgggngttccccacccatatcgtgaaccgcgccgccgacttatcagcaggagacgcgccaaggagagcccgcaaggaggcgactatgagggccaagtggaagaagaagcgcatgaggaggctgaagaggaagcgccgaaagatgaggcagagatccaagtaggctgatggggattgtggatgggtggtgacgacattgggttgtgttacgaattctttcgatgcggggggggtcattgaaagattttacatccttatttggcggcacccgttggccttgggtccattacttggtttggaaaccctgcctttaattaggccttttttgggggttcttacttttttcaaaagtttggggttaaaccaattaatcaatccgtttgggaaccttcttttaagggactttatttggttgttatattgaccttactttttagaaaaaaaaaaaaaaaaaagggggcctt

SEQ ID NO: 9404 - DNA, 1695 bp, Zea mays
  Clone ID: MRT4577_10856C.1
cttcctgaattcccgggtcgacccacgacgtcaggggaggcgcggagcagccgcgaccgcgagaaagaaaaggaagccgacgccacgcacgccatcgccgcctctatcctctcctcgtcctctccctccccctctctctccctgctccacctccaccaaccaatacacacctccctctctaaataccacttcgtccgagagcacaaagcagggtatcttcctttcaaaagaaacttggctgggtgttgacgcacgcagccggcggcaacctgtgcggggagcgccaagggctccaggaaagaatcggccgcgggctcgcgatcgggaaggggagcggggcgcatgcgcgagcactggcacggcgacggcgacggcgaggacgagcatgagccccagccggggtgcggggagggcgcggggcaggcggcggcgaactgcgcggcggtgtgctgctgctgcccgctggcgctgctcgacgtgctgctgctcgtcaccgtccggctccccgcgggcgtcatgcggcgggtgaggaggaggagccggcgccgccgcggccacggaggtgccggagccaaccggaagagaccggcctccgcggcgcccgcgtcgccttcgggaagcagcggcaaggcgatgatcggagcggcgatgctagacatcgaggatgaggcgcgtggcgaggtggagtcggcggcggcggcggagctggagcgcgagatcatgagctcgcacttctacggcgccggcttctggcgcagcgtctcctccaactccagctcctcgtccaggcgctaccaatagaggccaggcgcgttctggcgtaaatagtgagtactccgtcgctactaaactacaaacgattactccgcgcctgtttggttcgtggctaactgcgccacgctttggcttaggttagtcgttcgaattaaagaactatctttaggcagaaaagttaggtaaagtgtggcaagttaggtagcgaacgaaacagtcagcgcagcatgcatggcaacaggatgcatggcagtcagcgcagcatgcatggcaacaggagcagcagccttcggcatcgtgcaagtgaccgtgcacttattctgaatgcacacgtgcgaaactggcacgtgcgggttggatcattgtactgctacgccattgtctcgagcatggaccacgccagcagctgcagcttgggatggagaagcgaaaggggtcagtgattgtgcttaggtttttcatctctctcctaatctttttttgtgtaactggagcaggaaatgctgaaacctcaagcttctgtccaaacgatgtactcctatttagtattattgattgattgagaggccgatcgataacaaatgaacacatagaacgctgttcatgacgcagtgctttttttccctgcgtcactgcgtgcttttgcgtgtgtgcacgagctaaatcaagatcgagttctatttctatttatcttttagactaaaattaattaaaattcttcatttattaaaaaaaaaaaaaaaaaaaaaaaaaaaaaaaaaaaaaaaaaaaaaaaaaaaaaaaaaaaaaaaaaaaaataaaaaaaaaaaaaataaaataaaaaaaataaaaaaaaaaaaaaaaaaaggggcggcctttttaagggacccaagtttacttccccttgcttgcaacggtttagcctttttttggggcccccta

SEQ ID NO: 9405 - DNA, 528 bp, Zea mays
  Clone ID: MRT4577_108570C.1
tggggttctacaatctcgctttgctatagtttgtgggtcggctcgtttgtggggtgaagacacactccatgatattatgatggcttgcatcatactgcataatatgattgttgaagacaaacgggatgagtacggaggagaacaagtttacaacttcgacgatatgggacaatatctttgcaactacgacgacatgggacaaagggtgatagtgtcacacaattcttcacctgaactcgatgcattcattaaaaaaatacaaaaatatcaagaacaaggaaacccactatcagcttaaggcagacctgatcgagcacttgtggcaaaaccattctgagttatataaaattgattaatgtgctatttatttatttttatctactttatgtaataagaacaaagttgtgcagtaaacatggttactgtttatttccacttcaattgcctgcaatcatgtgtggagttacgtgttcacaaaaggggaggataatctataaatcaaatatttaagtttttaaggaattttcc

SEQ ID NO: 9406 - DNA, 456 bp, Zea mays
  Clone ID: MRT4577_108571C.1
gcgaccacgcgtcctaaaacgagctatcgtgcgagctctgaagtacgtagaaaatgggggttggcgacgatatccagcacatcggatgtgacatcggaactggtatggtcaacgctgactacgccggcaacgacgccttgaggaccatcttgcggagcatgctcgagagtgctctccacactggtatcatgcacaagaacgcgcacatggacgactacgtccatgacaagacgcatatcaagacgcttatgctgaccatcaagcaccgcatcgagcacggcatcgacaacatctagaacaacatgcataacatcttgtactacaagctctacaacgagctccacgtggatcccgaggagcacaccgaggtgctcatcgaagcgcacgttaacccgaaggataacacccagaacatggcccagatcatgatcgagacctttaacaacgtcgctatgt

SEQ ID NO: 9407 - DNA, 328 bp, Zea mays
  Clone ID: MRT4577_108572C.1
ttcaccatagggttgagtcaaatttccgatcattttatttctacagagcaaacgctctggcatgacactacactactttgtgcgcatgacacaatcgcatcaaggctactggggagaggttaccattccaaagcagcgcagatgacgagggaggcttgaattaacacgcacgagcacgctcctattgctgttgcgcccgcctgcacgggctcttgtgcgggcactgaacctgttcttgctgggactgactgtgtacgcgcgccacatccttttgaaagccactttcgaggacacaatgttcgaaccggaggccctgtaaaggatactc

SEQ ID NO: 9408 - DNA, 220 bp, Zea mays
  Clone ID: MRT4577_108573C.1
aaaagcacgggatacaaggtgttttttaaacacacccaccacgtttttgagattggggggaacattgacaccttttctctcttttaacacagggagccccccccggacccggttccccaaaattggttcacgggccgggtgtttcgtggaaaaaactggcccaaaataacccccccatatttggggaaaaaaaaggtatcccccaggccccaaacaactc

SEQ ID NO: 9409 - DNA, 489 bp, Zea mays
  unsure (1)..(489): unsure at all n locations
  Clone ID: MRT4577_108574C.1
gtggatggcgtacaacgatcgggttagagagctgcgcagacaggggcgtacccagcctgctctctacgtcgtgccggtccggccgactggtgccgtaataccacaagtcaatgacctcaggacgtttgaccatggccacaggaaagtataaaagatcagccaaaccttgaaaacctataatggtactatcaaacagactgttgttgctaataccataaacctatacaaccttaattgataacttctaacaaattaaggaggcagactttactactgaactgtactcatgcattgacgccaatcacatcatgcctccagaagatattttcataggaataacccacgaagttcaccaaagggcagacattgcatggtgctaagacgatataccatgataccacaagaccagtatggcactctaaacaaccatactgataacatacttataagatcattgcctntcgtcgaagcaccagctgcaccaaggca

SEQ ID NO: 9410 - DNA, 1887 bp, Zea mays
  Clone ID: MRT4577_108575C.1
ggaccctgagattcccacgcgtccgcccacgcgtccgcggacgcgtgggtgtgatctgagtagtccaccatggatacctcgaacgccttcgcggtcgtcactctcctcctactcccgctgcttctcgccctagcgcaacttgtacgacgtggatctccccagtacccgccggggccgatggctcttcctgtcatcggtcaccttcacctgcacctcttcgagaggcccctccaccgcaccctggcgtgcctcgcagctcgccacggcactgtcttccagctctggttcggttcccgccgcgtcatcgtcgtgtcgtcggctgatgccgccaaggagtgcctggccacgctcgacgtggcgttcgccaaccggccgcgtctgccgtcaggccggatcctctcctacgactggaccaccatgggcacctctaactacggaccctactggcggcgcgtccgccgcatcaccgtcacccatattctctccgtgcactgggtgcagcagttcgccgacgtgcacgagcgcgagacgcgggccatggtgcggggcctctaccgccccacggcccgcaacggcgtgcgacgcgctcgggtggagctcaagtcgcggctgttcgagctgctgatgaacgccatgatggggatggtgtgcgctaagaggtactacggctgcgacgggaaggagaacgagacagaggcggaggtgagcgaggaggcgcggtggttcagggagatggtggaggagaccatggagctgagtggcgcgtcgacggtgtgggacttcctgccggcgtgggcacggtggttggacgtgggcggagtggggcgccggctgtggcggctgcgggaaagccggactaagttcttgcaggggctgatcgaggagcagaggaaggagatggagaatggcccgcagccgcaggcacggaagaccatgatcggagtgctgcttacgctgcagaacgaggaccccgacgcctgcccggacaacctcatccgcaccatgtgcattagttccctcgaagctggaacaagtacttcagcggacgcagtggagtgggcgatgtccctcctgttaaacaaccctggcgcgctggcgaaggctcaagaagaaatagacgcatgcgtagggcaaccagcacgcctaatcgaggcggccgatctcccgaagctgcaatacctttggtgcatcatcatggagacgttgcgtctatacccgccgacgccccttcttcttcctcatgaatccgcaaatgactgcacggtcagcggatttcacgtacccatggggacaatgctcctagtcaatacgttcgcgatacatagggaccctgagatttgggatagacctgaaagcttcgtgccagagaggttcctaggtgagaacagtgaaggcaagatgttcaacccatttggtatgggaaggagacgatgcccgggggagaatttgggcacgcagatggtaggacttgctctggggactatgatccagtgtttcaattgggaaagagtaggagatgatcttgttgacatgaccgagggagctggattaaccatacccaaaaaaagtgccactggaggccttctatgagccccgtgcttctatggcgaatctgctttcgaagatttagaggtgtcgtgcgagttttatagtaaagtttatagctacatagtggttattaatcctagacaacgtatttacgtgtgttgagatatatgttggatataataggatttcgtttcctattgtatattaatactagtggagtcatatatgtacttgtattgttgcacctatatttcaaacaatatatatagtgaaggtatcgacaaccttaagggtttaagcccttacaataaattttatggtatcagatcttactcctac

SEQ ID NO: 9411 - DNA, 349 bp, Zea mays
  Clone ID: MRT4577_108576C.1
gggccaacccaaaaacaggtaggcttgacccttgaaaaaaaaacatggtcttggccctatgccacatgggggtcatccacaccaagggggcgggcggggttttttggttttttgaaaaaccaggtggggggcctcatattgcaggttaaccggttttttttttgggtggggggcaacgcaccccccccccgggaaggttttaatccacgggcccgggtacccaattatccaccatctatcaattgtagcccgggggggggggggggggtttttggggctggaccgggaaccccccaaggagggaggggcccctgcccgaacccccccaattgggggaggggattctccc

SEQ ID NO: 9412 - DNA, 375 bp, Zea mays
  Clone ID: MRT4577_108577C.1
tttgttttgctcattccaaacagggttagttctgaaggattccgcgcttgcaaaagctgggatgaaattgggctttagtgcacatgccgacagaaaatgagaaacataggaggccggtgtgggttttaaacttgttagaaacccagccggggtttggttgcatgtgcactctcaaggtgaaacaggcccttcccgaaagagctttttgcagctcgttggtcacttccttgggtggtttgttctcttgacgcctcgcctgtgaggccttcttggagcgattggctatgtcgggttcggcctctgctgccggtgtgccttgagccttgagttcaaaacctcacgctgtggcaactctccgtttggattaagggttct

SEQ ID NO: 9413 - DNA, 472 bp, Zea mays
  Clone ID: MRT4577_108578C.1
gatttaggactataaaactatgagcctccgcgtcgtgctgattcggtgagccacgacgcctccactgcggtgcgtcgctccaacccagcagagacactagcgttccctcaccagagcgttcatcccactatcatggcgaggcgtcatatggcgactgaggatacgtgacgagagtgccagcgtgttctggaatagttgataaagacacctgttcatggtgtacaagatcgactagcgctctcacgccgtgctgggggacaaggtgggcggccccaggtaagggtacgaggagctcgtggccgtcctgcccggtaactactgccgctacgccggcttcaacttctactgcgtcaccgtcgacaactgccagaagagcaagatcttcttcatcgcctgttcaccggcggtgtccaggatcatggccaacatcctgtactcgacatcaaaccaaggtctgtggtggatgctggac

SEQ ID NO: 9414 - DNA, 1071 bp, Zea mays
  Clone ID: MRT4577_108579C.1
gcctttcgtttttttttttttatcacatatatatcacatatatacatcacagatatcatcacagacataaatagccaacacaaacataaaaccgtgaccacaaacataaatatccatcacaaacataagtgttcaacacaagtattaaacacaaacataagtctcaaacgtcgcaagctctcacataagtatcaaacagaaacataagtattatacataagttgtgaagtctaaaacaacgactcatggaggtgggcggtttggccggggttgcgttgggctgaacccttccggagggttgttggatgccgccccagattggccttacaaacatctaactacaattttgatactcataggagtgtggaagagagcagggtcaactggagggaacaatggaggtggtggagcgatgccctgtgcggcgccaaggctctgcatgtactgcaacatctctgccatcctctgatgatctgcacggcgctccgcctcccgctccgccatcatcctcgcctccatctcgtgacgttccctcctctcttcttctagttgggtctcgagttgttgtatgcgatgctgtgagctgtcgtgccgaggtcgaatggctagactcgagcccgtgctccttgctctcacctgagacagagtgggagtggaggacgagtcgattgccccgtcggcaatccagtaccgcccatgtctcttgcctcctccgaccctcatgagcacatcggggtcgatcggctcggtgctcggatcacagtctgggccatggacctcctgcgccatggcggtgtagtcatggaggcggctgtagacggcggggttggtgtaggccttgggcccgtcatccgggttgtaggtgacatcggacgtcgccttacccttatgggccatagcataggccgagaaggtggagcaaggcctaccaccatgtgacgccgaggcggcggcgcggtgcgggcgcgagggagggcacgacggcagcgacgacggcgtggcgacggtgagggcgcggcggcggcggcgtttgagtgagtgagtgagagtgaggaagaagcgttcggccat

SEQ ID NO: 9415 - DNA, 318 bp, Zea mays
  Clone ID: MRT4577_10857C.1
agccggggaagctggttttaataaaaccccccgcccaaaaaatggagcgaacagcgcccaaaatttccccggtaacgggggttcaggcacaaatcccaaacctggctgggtgaagcacaaaattggtaaaggaaaatgctgttgaagttcatcaggggagaaacaaaccacccccgggggatttccccccccttttgcctaaattaagaggaaaaacgggggccccctggagggacccttggttcttctcaagaggttttccctttgggtcccgcccccaagggggggcaaaggcgagggggaaaccccccccccttt

SEQ ID NO: 9416 - DNA, 272 bp, Zea mays
  unsure (1)..(272): unsure at all n locations
  Clone ID: MRT4577_108580C.1
cgacaagatggcgtgcacacacaatgcgatgagagcttgttcctcctggtcctcttctgcatcgtgcatggtgagaaggaagagtcagagggcatcgatgcganagcagtccgcggctggtgcgtccttcgacatcgacaagttgagcgcctccggcaatggcangacagacagcacgaaggctgtcgcagaggcatgagcatcggcgtgcggcggcactgngacgcagacaatcgtcatacgcagggtgacttccttgtcggacaactcaa

SEQ ID NO: 9417 - DNA, 993 bp, Zea mays
  Clone ID: MRT4577_108581C.1
atgccgtcgccccccgatgcagtagaccaggatagccgggaattcaataacaaggcggagcgagtgaagcaagagctgtgggatttcttcagatgcgaggctggatacgaggctagggtggatgtggtggccaccacgagctgtaagaagctcgtcgtggacatgcactatgaggcccgaatccaggccatcgtcagctaccacggctccatccttagggagaaggtgaccaagcagcaagcccgaaccatgtcgttgaccagggaccagtacctgcagatggtggataggtggtgctcgcctgagtgggacgaggcgcacaacgctagccgggaacgacgtctgataatgcaaggtccctcccatcaccaaggcagccgcaacctaggccaatatgcagaagcatggtcggcatcacatggtggacggccttgctccatcttctcggcctatgctatggcccataagggcaaggcgacgtccgacgtcacctacaacctggatgacgggcccgaggcctacaacaaccccgccgtctacagccgccttcatgactataccgccatggcgcaggaggtccatggcccacaatatgatccgagcaccgagcagatcgaccccgatgtgctcatgagggtcggagcacgcaagagacatgggcggtactggattgccgacggggcaatcgactcgtcctccactcccactttttctcagacccaactagaagaagagaggagggaacgtcaagagatggaggcgaggatgatggcggagcgggaggctcgcctagcagatcatcagaagatggcggagatgttccagtacatgcatagccttggcgcagcacagggtttcgctccaccacctccattgttccctgcagttgaccctgctctgttccatactcctggtcaatctggggcggcatccaataaccctcatgaagcgcacaacccaacgcagcaccagtccaaccgcccacctcaatga

SEQ ID NO: 9418 - DNA, 3556 bp, Zea mays
  Clone ID: MRT4577_108582C.1
atggaggaccgtgagtggatgtacacggcccgtagagaaaggaacgatgtcaccactgaatggattagaaagaccgatgatttcgtggaatgggcatatggcgaagctgctaaaggagcgagtctagtcccatgcccgtgcaacaaatgtgccaaccggaaaagaaaaccaaagaaggtcatggtagaacatatttggaagaatggatttatgtcgggctatactcggtggatatttcatggtgaagcgcatcgtacgagagaggaggtgctgagacaacgtgtcgaggattatgacgcggatgtgggggtagcggatatgttgaatgactatcaggaggcacaatacatgggaggatgtatggatgacgagccagagccgactgcaaaggcgttctacgacatgttcgacgcggcacagaagccccttcccggccagacaaaggtttctcaaccggatgccattgggcgtgtaatggcgttcaagtcgcagtacagcatgagtagagacgcattcgatggcttgttgacggttattgggagcctgcttccggatgatcacgttctgccaaagagcatgtacgaggcacagaaactccttcgtgcactcaagatgacgtatgagcagattcatgcttgtccgaagggctgcgtgctatttaggaaagaatacgcggaggcaaagtactgtcccaagtgtacatcgtctaggttcatggaggtagactctggtgatggacagaagaggcagctcgacatccccttgacaatcctacgacaccttccgttcataccgaggatccagcgtctgtacatgacagaggaatccgcgaaacaggtgacatggcacaaaaatggaaaacgatacaatcctgacaagatggtgcacgcatccgatggtgaagcatggaaacgctttgatgccattcaccgtgacaaagccgaagaggctcgtaatgtacgtgttgcgttggccacagataggttcaatccctatggaatgagcgctgccccgtacacatgttggcccgtgtttgttatcccaatcaatctcccccctggtgtgtgctttcaaaggcagaatatattcgtgtcgttgataattcccggacacccggggaataaaatgggcgtgttcatggagcctttgatcgatgaattggtacgtgcctgggaggaaggggtatggacgtatgaccgagctacgaagacaaacttcagaatgcatgtttggtaccagtactccatgcatgacttaccggcgtatgggctattctgcgcctggtgtgttcacggtaagttcccatgcccagtttgcaaggaagctctcaggtccatttggttgaaaaagggtggcaaatattcgtccttcgataaacatcgacaatttctccctcctgaccatccattccgcctagacatcaaggactttacgaaaggtgtcgtagtgacagaccgcccacctgcaacgatgactggtgccgaaattcgtcaacagatagatgggctcgtggccaatacagaaggtggttttgtgggatatggtgagcagcatatgtggacacataagtctggcttgactcggctcccctattttggcgacctgctccttccacacaacattgacgtgatgcacactgaaaagaatgttgccgaggcactgtgggcaacaattatggacattcctgataagtcaagggataacgtgaaggcaagagtggatctggcagcgttatgtgatagaccacacctagagatgaagccgccaagtggcggaaagacgtggagaaggcctaaggccgatttcgtcctaagcagggcccagaggaaggaaagtacttcggtggatcaagatgttgatgttccctgatggaaataaatgcaaaatcgaggcttccattgcagagacatacattctagaggaggtctcaaacttcacaacaacttattatggtgacaaactgccgagcgtgcataatccaccccctcgttacaatgatggcgacaatgaatcgaaccttagcatatttcgtggccaactcggaagcacaagtggctcgaccaccaagaccctgacacatgaagagtggcggcatatcatgctatatgtattgaccaaccttgaagaggtgacgccatacatggaacaattccttcatgaattctggtgtcgatcaagggaccccactccacatgaatatgacactcttcttagaaagggtgcgagaaatagattgcccgaattcatttcctggttcaaacgtaaggtatcgccacacgggaggttacctgttcctaacgatgaagattacaacttagacccgaacacatatgatggagagttcttccaagaagatgggctagaagggcgatttgagatagatttaaccgaagctatcggaatggacgtagatattgaaatggttgttgatgaggaggatgatgaggtgcaaaatgataatgacttagtaatccttgaaggcaatgacattaataacgaggttgcgtcttccgatggtgttgagattgaaatggtttttggacaaatatggtcggcggcggcgcctcaggtcgacgacgaccagcagcaggacgacgacgaccaggagcaggacgcctcaggttctggtgccttaggttcgaggggcatctacctgcgaggtcccgcgagtcttcctcagcgtcccatacttcaggacagacagccgctgattcggccggaagggaagagggaacacttccctggattggtggagtacgccggagtgacgggcccagccttcaccttcgaccactacgccgtcacccccgatgcagtagaccgggacgaccgggaattcaataacaaggcggagcgagtgaagcaagagctgtgggccatcgtcacctaccacggctccgtccttggggagagggtgacaaaaactgaagcccgaaccatgtcgttgaccagggaccagtacctgcagtcggcgtcacatggtggccggccttgctccaccttctcggcctatgctatggcccataagggcaagacgtccgacgtcacctacaacccggatgacgggcccgaggcctacaccaaccccgtcgtctacaaccgccttcatgactacaccaccatggcgcaggaggtccatggcccagactatgatccgagcaccgagccgatcgaccccgatgtgctcatgagggtcggaggaggcaagagacatgggcggtactggattgccgacggggcaatcaactcgtcctccactcccagtctgtctcaggtgagagcaaggagcacgggctcgagtccagccatacgacctcgacacgacaactcacagcagcgcatacaacaactcgagacccaactagaagagatggaggcgaggataatggcggagcgggcggcgactgatcagaggatgacagatatgttccagtacatgcagaaccttagcgcaacacagggtttcgctccgccacctccattgttccctgcagttgactctaatgtgttccatactcctggtcaatctgggggccgcatccaacaaccctcctga

SEQ ID NO: 9419 - DNA, 737 bp, Zea mays
  Clone ID: MRT4577_108583C.1
attgggaccctcgaggccggccgggttattggttccctcagtcgacttaaccctaaatttagtcccacattttccttagacctttgactacaaaccatagcaagcttcccaagttatggtttgcttatgatttggacaggaggcaagggtttcatggtttagtggaaaatagaatggatgcaaattagctcgttttgtacaaaacagtcggtcattttcatgctgcatgtgcactgaggcactgtttggatcgatacctaccccttctggccaggccaaacttgggccgttaactaaggataaggaggctctgccacttttggatttgtgccatcttttgggttgaccgatgcccctgcgcggcagatttggggccgactcagacgccaaagtttggccagcagccaacatatgtggcatccaaacttgccctgatagatgagggtctgatgcctaacttgccacactttgccaaacttttctgcctaaggttagttcttcaattcgaacgactaaccttaggcaaagtgtggcacatttagccacgaaccaaacagcccctaaatctgtcgctcaatcttttatatggcttaccacctttattaaatctgaaagattgatggataaatgatatggccaaaggcagtgaatgttgaacttctgagattggaaaaacgaacgtgtttttgcttgtgtaatgaaattttggatcggcgatcaattcgccacaaattctt

SEQ ID NO: 9420 - DNA, 2843 bp, Zea mays
  Clone ID: MRT4577_108584C.1
ctggggaacactcgtagcttatctcggatggcaagggggctaatattggccatttccatagataagttgataggagtcctttagatgtgatccatacacaaaataaatcaaattctcaagatttggaggtggctacccgatcccgtccggatcccgctcgtcccacgccgccggatcccgcccgtcgtccaccagatctgccgctccgctgggccgccggaccccgctcgccctccgtcagatctattgctctgccaaaaagtgatggccatcacagacgcgcttgggaacggcggcaccgacccgccgcattcacctccgatcgcctctccaccggccgcacccgccccactcccaactgaagatcgttgaccgatctgactctgcacatgcattcggccaagggccaccacaccctaccacccagtgtagatcccaacatcccgcgtctaggtaatcgcctatcggcttgatttgatttcatttcctttgattcccaaaagccttggaatccatgtatgcgggcgaccagagcgtcgtgccctcactttgggtggacggaggtcttctgggcggggaaggtgagaagataggcaatccgaaaggaggaataacaagctagagcgcaggaagaagccaaggaggttgcggcgtactacgagcgtatccacgggaaacacgttgttctccggacgtgtacctggagaacaccaggaaggtgctgccaaaattctgtctcgaatcatattagagcatggaaactaacctcgtctacgcaattgcgggtgggattaggacctatcctcacctattagaaggtaggaatacaatgtacatgcattacatgtttatattaaactatactcggttatatatgttagaggatggaggaccgtgagtggatgtacacgggccatagaggaaggaacgatgtcacacctgaatggattagaaagaccgatgatttcgtggaacgagcatatggcgaagctgctaaaggagcgagtctagtcccatgcatgtgcagcaaatgtgccaaccggaaaagaaaaccaaagaagaccatggaggcacagtacacgggaggatgtatggatgacgagctagagccgactgcaaaggcgttctacgacatgtttgacacggcacagaagccccttcacgaccagacaaaggtttctcaactagatgtcattgggcgtgtaatggtgttcaagtcgcagtatagcatgagtagagacgcattcgatagcttgttgacggttattgggagcctacttccggatgatcacgttctgccaaagagcatgaaagaatacacggaggcaaagtactgtccgaagtgtaaatcatctaggttcatggaggtagactctggtgatggacagaagaggatccaatgtctgtacatgacagaggaattcgtgaaacagatgacatggcacaaaaatggaaaacgatataatcctgacaagatggtgcacgcatctgatggtgaagcatggaaacactttgatgccattcaccgtgagaaagccgaagaggctcgtaattactcaatgcatgacttaccggcgtatgggctattctgcgcctggtgtgttcacggtaagttcccatgcccagtttgcaaggaagctctcaggttcatttggttgaaaaaaggtggcaaatatttgtccttcgataaacatcgacaatttctccctcctgaccatccattctgcctagacatcaagaactttacgaaaggtgtcgtagtgacagaccgcccacctgcaacgattactggtgccgaaattcgtcaacagatagatgggctcgtggccaatacagaagatggttttgtgggatatggtgagcagcatatgtggacacataagtctggcttgactcggctcccatattatgacgacctgctacttccacacaacattgacgtgatgcacactgaaaagtcaaaggataacgtaaaggcaagagtggatctggcagcgttatgtgatagaccaaaccaagagatgaagccgccaagtggtggaaagacatggagaaggcctaaggccgatttcgttctaagcaaggcccagaggaaggaacaacgatcaagggaccccactccacaggaatatgacacttttcttagaaagggtacgagaaatggattgctcgattacatttcctggttcaaacgtaagggccaaagagatccgtctatgagtgccgagttgagacaagtagccaacgactttgcttatagggtcaagaaatattctgagtatgacgtcaatggataccgttttctcacaacaaactacgaccaaagtcggcccaatcggaaaacaacgtgttctggagtctttacgcccagccttgacgatgtcgattattttggacgaatcgaagaaatatatgagctcaatttttatggttccaaacctcttactccagtgatattcaaatgttattggtttgaccctcaagtgatgagacggacacattctaatcttggggtatcgccgcacaggagattacctgttcctaatgatgaagattataacttagacctggacacatatgatggagagttcttccaagaagatgggctagaagggcgatttgagatagacttaaccgaagctatcggaatggacgtagatattgaaatggttgttgatgaggaggatgatgaggtgcaaaatgataatgacttagtaatccttgaaggcaatgacattaatgacgaacttgcgccttccgatggtgttgactatgaaatggttgatagtgatgatgagagttatgatccagctaaccccgacacatatgaagattatttttaa

SEQ ID NO: 9421 - DNA, 478 bp, Zea mays
  Clone ID: MRT4577_108585C.1
acgggcaaacaaccatacttttaaaattccaattccacgggggaccccaattaatttctggggttgaccctacaaaagggcaactagttcaaaagaaacccaaaaagtaagtttgggggggggaaacaatatattaaaaaaaaaaaattttacaaaaaacaaaaacattggggagctctgccgattttaaaacaacccctataatgtatttataaaaagggggaccacccccctggatcgggtaaaaaaccaaaagcggttatgttaaggctaaaaaattttttcggaaatccttttcgggcgagggctaaacaaaaggagggcaggatttttcactcctgggcaccttggggcccaacatgggcaggaaactttgcaaaaacatctgcccaggggctttgtccttttggaaggtggttaaccacggaccccaccttgttgatgtccacacagatctgccccttgctggccctttttc

SEQ ID NO: 9422 - DNA, 1395 bp, Zea mays
  Clone ID: MRT4577_108586C.1
atggaggaccgtgagtggatgtacacggcccgtagagaaaggaatgatgtcaccactgaatggattagaaagaccgatgatttcgtggaatgggcatatggcgaagctgctaaaggagagagtctagtcccatgcccgtgcaacaaatgtgccaaccggaaaagaaaaccaaagaaagccatggtagaacatatttggaagaatggatttatgccgggctatactcgatggatatttcatggtgaagcgcatcgtacgagagaggaggtgctaagacaacgtgtcgaggattatgacgcgaatgtgggggtagcggatatgttgaatgactatcaggaggcacaatacatgggaggatgtatggatgatgagccagagccgactgcaaagtcgttctacgacatgttcgacgcggcacagaagccccttcacggccagacaaaggtttctcaactggatgccattgggcgtgtaatggcgttcaagtcgcagtacaacatgagtagagacgcattcgatggcttgttgacggttattgggagcctgcttccggatgatcacgttctgccaaagagcatgtacgaggcacaaaaactccttcgtgcactcaagatgacgtatgagcagattcatgcttgtccgaagggctgtgtgctatttaggaaagaatacgttgagacaaagtattttcccaagtgtaaatcgtctaggttcatggaggtagactctagtgatggacagaagaggcagctcgacatccccttgacaatcctacgacacctttcgttcataccgaggatccaacgtttgtatatgatagaggaatccgcgaaacagaggatggaggaccgtgagtggatgtacacggcccgtagagaaaggaacgatgtcaccactgaatggattagaaagaccgatgatttcgtggaatgggcatatggcgaagctgctaaaggagcgagtctagtcccatgcccgtgcaacaaatgtgccaaccagaaaagaaaaccaaagaaggccatggtagaacatatttggaagaatggatttatgtcgggctatactcggtggatatttcatggtgaagcgcatcgtacgagagaggaggtgctgagacaacgtgtcgaggattatgacgcggatgtgggggtagcggatatgttgaatgactatcaggaggcacaatacatgggaggatgtatggatgatgagccagagccgactgcaaagtcgttctatgacatgttcgacgcggcacagaagccccttcacggccagacaaaggtttctcaactggatgccattgggcgtgtaatggcgttcaagtcacagtacaacatgagtagagacgcacatttccctttcaatctccccctttttggtgatttatgctaa

SEQ ID NO: 9423 - DNA, 2316 bp, Zea mays
  Clone ID: MRT4577_108587C.1
atggaacaatttcttcatgaattctggcgtcgatcaagggaccccactccacaggaatatgacactcttcttagaaagggtgtgagaaatgggttgcccgatttcatttcctggttcaaacgtaagggccaaagagatccatctatgagtgccgagttgagacaagtagccaacgactttgcttatagggtcaagaaatattctgggtatgacgtcaatggataccgttttcacacaacaaactacgacaaaagtcggcccaatcagaaaataacgtgttctagagtctttatgcccggccttgacaatgtcgattattttggacgaatcgaagaaatatatgagctcaatttttatggttccaaacctcttactccagtgatattcaaatgtcattggtttgaccctcaagtgacgagacggacacattctaatcttgggatagtcgagattcgacaagattccaccttaccaggagacgttgtctatatcgtggcccaacaggccacacaagtgtattatctcccatatgcgtgccaaacgaaagaacatcttaagggttgggatgttgtgtataaggtatcgccgcacgggaggttacctattcctaacaaagaagattacaacttagactcggacacatatgatggagagttcttccaagcagatgggctagaagggcgatttgagatagacttaaccgaagctatcagaatggacgtagatattgaaatggttgttgatgaggaggatgatgaggtgcaaaatgataatgacttagtaatccttgaagtcaatgatattaatgatgaacttgcgtcttccgatggtttttggacaaatatggtcggcggtaattggctgaggaggaggagggggaggaggagtaggacggcggacgaggcagagcaggcggcgcagcaggacgaccttgtccagcagcaggcggtgcctcaggatgacgacgaccagcagcaggacgactcaggttctggcggcttaggttcgaggagcatctacctgcgaggtcccgcgagtctccctcagcgtcccatacttcgggacaggcgaccgctgattcggctggatggggagaggtcttggacggttgtggattatgctgggggtcatcgtcgcctccccaatggcatcctcggcctgctgtgcagggaacactttcctggactggttgagtacgccggagtgacgggcccggcctacaccttcgaccactacgccgtcgcccccgatgcagtagaccgggacggtcgggaattcaataacaaggcggagcgggttaagcaagagttgtgggatttcttcagatgcgaggttgtatacgaggctagggcggatgtggtggccaccacgagctgtaagaagctcgtcgtggacatgcactatgaggcccgaatccaggccatcgtcacctaccacggctccgtccttggggagagggtgaccaagcagcaagcccgaaccatgtcattgaccagggaccagtacctgcaggtgattccacattggtgcgccgcacatcctctctgctgggagcagatggtggataggtggtgttcggctgagtgggacgaggcgcacaacgctagccgggaacggcttatgatgatgcaaggtccctcccaccaccaaggcagccggagcctaggccaatatgccgaagcatgggtgcttgtgtcccttgtgtttcgtttcgtgagaggctttgtatttgagttactataacgttggcttgtaatattacatactcaactagaagaagagaggagggaacgtcatgagatggaggcgaggatgatggcggagcgggaggctcgcctggcagatcataagaggatggcggagatgttccagtacatgcagagccttggtgccgcacagggcttcgctccgccacctccattgttccctgcagttgaccctgctctcttccatactcctgtgagtatcaaaattgtagttagacgttggtaatgcatctggtataacacatgcaatctcttctctgtgcagggccaatctggggcggcatccaacaaccctcatgaagggttcagcccaacgtagcaccagtcgaaccgcccacctccatgagagttatgttttcagtgtttagacttcagaacttgtgttgaatacttatgtttgtgttggatacttatgtcagagcttgagacttatgagacttatgttcttgatacttatgtttgcgttgagaacttgaatatttatgtttgtgttggatatttatgtttgtgatgatatctgtgatgtatatatgtgatgtctggtgccgaa

SEQ ID NO: 9424 - DNA, 460 bp, Zea mays
  Clone ID: MRT4577_108588C.1
aggatattggtaacattttacatagtggatctattggcgaaataactccatctggttctggtttatcaaaagattcatctgtggactatagaggggaggttttagatggcttctcaatggaagcatctcttgaaaggtcttctacacgtggggaacaaaatggttgtagactagatgctattgagaatccttcaattactttagcaacttctggttataagcatgaaggtgctttatctgaggaagcagtgtacacaaagaagaattacgctggaacatgcttgtcaaatcccagggaattaatcatggagctgcaatcccatttctcaaaggaaaacataaatgaatctgatcctcatgacagccttgtattcccaactgctgaaaattcagcagatgaacagctggttaaagtacaccatggttctaatctgtctcagttaggattaactgatctgtt

SEQ ID NO: 9425 - DNA, 230 bp, Zea mays
  Clone ID: MRT4577_108589C.1
gcgtccggaacatagagaacactatcgagcacaacgagagcacgaaaactcgtttaggcagaaccacaaaccaccatcggtgtcagcatgatggagtacggtcagcaggggcagcgcggccacggcgccactggccatgtccaccagtacggcaacccagtcggcggctgtcaagcactgcaccggcggcatgcggcacgttacgggaaccatcgtatacataggccacc

SEQ ID NO: 9426 - DNA, 1221 bp, Zea mays
  Clone ID: MRT4577_10858C.1
gaccgcgagttctggaacttcagcgacctagtgcgcctgcacaacaacttcgccaacctctccatcgccgaccccatctggtcctccaccacactggatcctccctcctccttcagcgacgccccgggcctcataggatccgccaagctcgcctttggcaacgccaccacggccaacgccgaccgctacaacgccaacgccgccggtgtcgccagcaagagcatgagcgtgggcatgatcgaccattacctcaacaagaacactaacaacgacgtcgtcaagagctacttcaacaagtccgtcggcagcaggccggccaacaacaacaccaccacaaccgtcaagaagaactccgccgcccaccacgacaagaagcacaagaactccggcaacggcgccggcgtcgacaagaggttcaagagcctgccggcggcggaggcgctgcccaggggcgaggccatcggcggctacatcttcgtctgcaacaacgacaccatggaggagaacctcaagaggcggctcttcgggctgccgtccaggtacagggattctgtgagggccatcaggcccggcctgcccctcttcctctacaactactccacccaccagctccacggcatctttgaggctgcaagcttcggaggatccaacatcgatccagcagcttgggaggacaagaagtgccccggcgagtcccgcttccctgctcaggtgagggttgcaacgcgcaagatctgttcgccgctggaggaggacgctttccgccccatcctccaccactacgacggccccaagttcaggctggagctcagtgtccctgaggcgctctcccttcttgatatatttgcggagaagatttttgacagacagacagcctgatgtctccatacttgcttccagttccagaggagtagtacatgtataatataaatataatatgctgattaccgacatctgattatctattctagtataagttacactcgaacttaggccctctttggaattatagtatttttatagttttaaaacaatactatgttatttggtgatactatagtattggagctcaaaaggtgtttggtttgtacagtcaaaactcagttttaaataccatggtttaccaaaactgtggtatttttggagttttcgaaactccaatcaggatctcggttttcttctcctctaaaaaaaaaagaaaaaaaaaaaaaaaaagcggcc

SEQ ID NO: 9427 - DNA, 333 bp, Zea mays
  Clone ID: MRT4577_108590C.1
caagcgtaaaacttattcatgattgggcatacttccgggtggtacccacacacaaaacacccggtcgatttttaaaccaaccctgccccgactcatgacacgaacagaagattctttgacaacctccatatggagagggggcaccagacaacccaggcccatggggggcttaaacgacccatgatttactgcccaccacggagccggagcacaagggggggggggctcttctttaggatgttgaactctgttagggggcggccatcctccagttgtttgccggcaaaaatcaaactctgctggcccggggggatcccctccttgggctggatc

SEQ ID NO: 9428 - DNA, 467 bp, Zea mays
  Clone ID: MRT4577_108591C.1
ggaccacaaccatcctttgggttttttataaagcccttcccctccccgttaaaaggaatagccaccggccctaaaagctgcctcgtcctaaaacgggggctgatcctgcccaaaacaccaagggaccccaaattttccttcctttgcatttcaggcaaacccattttccggggaagggggctgaaagcattttagcccctttaaaacagagttcctttcgatgatgaaccccttaaaaacaagttgtccaacttttcccagccgacaaaatcccccccctgggttgtataaaacacattttttggggggcttcaatgcttgtttgccccgttgagggctgcaaccccttattttaaaaataaaagagcaggttttccccccttttttttccccgaggggtttcctccccccaacggacccctataaaggggggggtgtttggttggaggtatcccaaaccttgtggc

SEQ ID NO: 9429 - DNA, 886 bp, Zea mays
  unsure (1)..(886): unsure at all n locations
  Clone ID: MRT4577_108592C.1
tcgaggccggccgggccgggatccgaatccccatccccgatccatccctaccccagctcagctcagctgcccctcccctctttccactcaccagcgccagatctcccgccaccatcatggcctctgacgccaccgacgccccggcgcagcccgtgcccgccaagcgtcgcggaagctacaactgcggtcggtgcgggctgcccaagaagggccacgtttgctccgtcccgggtcccgcctcctccgccgccgctgctgggggcggcgacaaagcgggggagccgcagccacagaccaagccgcggcgcgcgctgcatttcgacgacccggcggcgtcggccgtggtgctggacgccgtgccactggcggtctcggcgccgccgctgcaggcggggtcgaagaaggcggtggacgtggaggaggacggcgacggcgacaacgacccgccggcggagcggtgggtcgaggttggcgcgggccggcgggcgcccggggttgtgttggtcgaggtgctacggcgcctgtccccacgctccgtggcggccgcggccggggtcagccgcggctggcacgagtgcgcgcgccgcgtctggagggccgccgaggaggttcgcctttgcgccgccgggtgatgttgatgccacaacgctggcatgtattgcattttcctgtcccaatttacagtccctggatatcagcatggccaatagcgccgccaacaggantatctggggatgagctatctaggtttgtttcggagaagcgatctctgtcagttcttanattagatggctgcagcagtcttggggttatcaatatcagctcttcaagncttcaagacttttggatgtcaggtctttcttcccttttacaagcgtcatgactg

SEQ ID NO: 9430 - DNA, 727 bp, Zea mays
  Clone ID: MRT4577_108593C.1
aattccgcatcccagcttcccgaacacgttcccgaaactgctcgcacgactcctcgcacggtttctccctaggtgccggccctcgtccccatcaccatccccgtcgccccgcgcagtctcgtgctccaggtacttctctgattctctcttttttcgtcatggcttacccttccggatcggtgctttttccccgccgcagtaagaatccccccccccacgggttccggttaccactcggcggtagacctgacggtgttgaggtgtttccgcttgctggaacaacttcgctggcgcctgcaagctgttcgaccgaatgcttctgcgaatgaagtgaaggtgagggtgaagcagcagaatgggtcggtaggctggtgctttgcacataaacccaaaaaagtttggtgctgttgcgaagccttgcatgccaaaaatggtggcctggccttaaacaaacataaagttgctaagtggatcaggcaatagtattttttggttgcatgcccccaaactcaaaaggggaggccaaaaaaaatatcgaagccgttcaatatccatttcctgcgacttgggaaaatcaagttcctttaggggcaagattttgatatcatttccgcattaggctttactgccctgtgtaaaagttcaggaaaaaaattttttttccaaaaaaaaaaaaaaaaaaaaaaaaaaaaaaaaaaaaaaaaaaaaaaaaaaaaactcgaggggg

SEQ ID NO: 9431 - DNA, 276 bp, Zea mays
  Clone ID: MRT4577_108594C.1
catccgcgtgctgatcacggtcatgaacacgttcaagcgcatgctcatgcgcatcctcgagaacttcccagacaaggtgcgcgccgaggtccacttcaacgcgacgctcaaccaccacatcatggaccacatcatcgtcctcgccgacatcatccgcttcaagacctgcttcctgatctagctgcatatgatgctatacgggacgccatgcgcctgggcgttcacctgtggactcatcgacaccatcatcgacagcaagatcggattccacatcgg

SEQ ID NO: 9432 - DNA, 774 bp, Zea mays
  Clone ID: MRT4577_108595C.1
cgctgctgtggggctctcctttatgcagttcaccaacatgaactcgatgcgcaatctcttcatcatcggtgtctcactcttcctgggtttatctataccagagtacttctctaggtattccacaagttctcaacaaggcccagcgcacacaaaagctggatggttcaatgactacatcaacactagcttctcatcaccacccgccgtcgccctcattgtagcagtactccttgacaacacacttgatgtgagagatgcagcaagggaccgaggaatgccatggtgggcgcggttcaggacattccgtggcgacagcaggaatgaagagttctacactttgcctttcaacctcaacagattctttccaccgacttaagccaaattgccattgagaacacgctgcatgtcaagtggtccactcaagcaagcattgcctaacaatgaggtctgcttctgatagagtagaacaacaaaaggctcgacaaaggaagaactaattccctgttaccaatcgattgtacataaaacaaaactgtttaggttgaccaccggtgtcgaatcagaatgccatattttgatgtaatatgagtttagagatcttatgaacaattttcaagccttatatgcaagctagcttttaaaccgtgttttcatggcttagtggcatggtctggtgtctgatccccaaaaagctatagaaggtatattgcaagaattgttcttcaaaaaaaaaaaaaaaaaaaaaaaaaagtacctgcccgggcggccgctcga

SEQ ID NO: 9433 - DNA, 451 bp, Zea mays
  unsure (1)..(451): unsure at all n locations
  Clone ID: MRT4577_108596C.1
gtgtgcaggttcaatgtacgttaggtaaatacctggcatggaaatggattggaggctgactcatggagaccggagacgagagcgttgtcgcttctccagcgnaggctgtgcgcgcgggggtcaggggggcatcgtcgcgtcgtgctggcgagcaggcagaaccggaggagatgggggagcgttgtgccttcccaccgctgtgatattaggcggcgacgaccatctccggatggcgaggaagcagcgacgaggagaaagatctctgctgcaccttgttcttgacgggtggatcgacatcagcatgtcgtgactgagaacgactcagtgacgaggcgtgaggcatgtagcggtgggggactcatggatgtgtgcccatgcgtttcagttacccagaaatcattatgaagttcctggtttggcatattattttgagtaagggggaaaaaggaag

SEQ ID NO: 9434 - DNA, 1667 bp, Zea mays
  unsure (1)..(1667): unsure at all n locations
  Clone ID: MRT4577_108597C.1
ttatttactgctaataattacaaatgaccaaacaaacataatattgcgaggaaaatctctgtacaaagaacaaatgcatattgttatgcataatagaccccaaaaaatattggtaacaggacagttgcaaatcacaccagtaaattttagtagtccagttttttgttgctcttaccaaaagttggtctctatgatgtctagttcttattctgattggtggaatctaaagaagtgaaaactcactccttttgtctttagatattttccctccaattgtgtttgtccccatttcgattaccatcaaagtggtaatgagtacaccagttgttgttgtctgcatcatgatccagacaccttcagtaaagtggttgtgctgatcaagttacaccacattgttccccttgaagaaatctaccttctggtctcacagacagggttgtgtgcaggttcaatgtacgttaggtcacctggcatggaaaatggattggaggctgactcatgcagaccggagacgagagcgttgtcgcttctccagcggaggctgtgcgcgcggggatcgtcatcgcgtagggcatcagcgggggggggggggcatcgtcgcgtcgtgctggcgagcaggcagaaccagaggagatggcttcccgccgctgtgatattaggcggcggcaaccatctccggatggcaaggaagcagcgacgaggagaaagatctccgctgcaccttgttcttgacgggtggatcgacatctttttcttcttacgataagactttgacaatgaaggatcattcaaaacaaacttgctcactccccaatagatgcaagtccaagaagtaccactatgctcatcattccttccaaagatatttcccagccatcaattccaggacccaatgtcttgcgcaaatttgagaaatacttcattgtagcccagaaattatacatgttatttgtccttggggctaatgtttccattatcttttctgggctacaatgacaaataacatgtataatttctttgcttcatcaactgtggtaatctagaaaaaaacatgaatcagatcaggctccagcttgatcgttcaacatttgataagaatttcactcaaatganaatataatgatccagtttcagacaccataatgccatatagagacatagagctactgcaaggtacacatttcagttaaccaaaaatccaatgatagcccaaaaaccagaaatccaattgaggtaatggtagttttccctttgtcttgattgatggtggctatgtgttctcttgttgtttcttcatcagtaccagactggagatcttgttacatgcattctttcatagatcatataacagtccgctgcaaagttcctccaatgtgaagcagtcaaaaagatgatgaagtggttgaacagcctgcatgttcacaacggtgcatccaagcgaagcggacgacagtgatgctcagacggtcgcaaatgttgccggcgaccgaggaaggtgacgtcatcagcggtctcgaaaccctagtcgccgctcccaaaaccctcgctggacgtcgggggatgggtgccgagcaggcttccagggatcggcgagactgggagtttctgcgcgtgggggagggcatcgcggatcgcgggacgggacaatgggcgagggttgcgtcggg

SEQ ID NO: 9435 - DNA, 1638 bp, Zea mays
  Clone ID: MRT4577_108598C.1
cttttttttttttttttcgcataatttatgaatacccttagtcattggtaatcgattgttcctttacctgtgtacaacctagaaccgttgaagcaaatggtgtttatttactgctaataattacaaatgaccaaacgaacataatattgcgaggaaaaatctctgtacaaagaacaaatgcatattgttatgcataatagaccccaaaaaatattggtaacaggacagttgaaaatcacaccagtaaattttagtagtccagttttttgttgctcttaccaaaagttggtctctatgatgtctagttcttattctgattggtggaatctgaagaagtgaaaactcactccttttgtctttggatattttccctccaattgtgtttgtctccatttcgattaccatcaaagtgggaatgagtacaccagttgttgtctgcatcatgatccggacaccttcagcaaagtggttgtgctgatgaagttacaccacattgttccccttgaagaaatctaccttctggtctcacagacagggttgtgtgcaggttcaatgtacgttaggtaaatacctggcatggaaatggattggaggctgactcatggagaccggagacgagagcgttgtcgcttctccagcggaggctgtgcgcgcggggatcgtcaccgggaagggcatcgtcgcgtcgtgctggcgaacagcgcatcgaaccggcgagaaggcggaggaagcggagatgccttcccgccgctgtgatattaggcggcgacgaccatctccggatggcgaggaagcagcgacgaggagaaagatctctgctgcaccttgttcttgacgggtggatcgacatcatcttcttcttacgataagactttgacaatgaaggatcattcaaaacaaacttgctcactccccaatagatgcaagtccaagaagtaccactatgctctcctttccttcctctgatatttcccagccatcaattccaggacccaatgtcttgcgcaaatttgagaaatacttcattgtagcccagttattcttcccccgataagactttgacaatgaaggatcattcaaaacaaacttgctcactccccaatagatgcaagtccaagaagtaccactatgctcatcattccttccaaagatacttcccagccatcaattccaggacccaatgtcttgcgcaaatttgagaaatacttcattgtagcccagaaaagataatggaaacattagccccaaggacaaataacatgtataatttctttgcttcatcaactatggtaatctagaaaaaaacatgaatcagatcaagctggagcctgaaggttcaacatttgataagaatttcactcaaatgaaaatataatgatccagtttcagacaccataatgccatatagagacatagagctactgcaaggtacacatttcagttaaccaaaaatccaatgatagcccaaaaaccagaaatccaattgaggtaatggtagttttccctttgtcttgattgatggtggctatgtgttctcttgttgtttcttcatcagtaccagactggagatcttgttacctgcagatgaaaagtaattgttcgttcaacacattttgattggatacatgggtgtgtttt

SEQ ID NO: 9436 - DNA, 661 bp, Zea mays
  unsure (1)..(661): unsure at all n locations
  Clone ID: MRT4577_108599C.1
actatacgtttctagcatccgactccgcaagagtacaccaccaagaaacaaccgcacctcctcacttcgactgtgatcatgtcgaggtgctgcgactggaactgcgagagcaacgtccggctgctgctggggcatcggctgcgatgattgctgtgtgtaccctgacgagaacagcgtctctgccagatacagtatgatcacgcgtgtccactccaagatctgcaacgtgagtgacaaatgtttactggcatcctctgactttcacggctgtatactgcgatctctgcaagagcctaactgcctgagaatggctgtgctgcacctgcataataaaaggatcagctgccccatcatgcaacagatcctctacgataacctgtactacgagtataacttatatatataacgccttccatgagataagatgctgttgactgcaaccgccaataatgatggttcatctatgctccactgcgtttccaggagataaccgtgatacagcgctcagggtaaccgaatctaatgtcatcatgcgcagatccggaccatcatctagaatcacctagtactctattactccctgtcgnggatgctgtctcaccattgtcggagtcagaggccatcgatctagttaaggacgagttcgcctctgcaactgaga

SEQ ID NO: 9437 - DNA, 344 bp, Zea mays
  Clone ID: MRT4577_10859C.1
ggggagccaaaaaaaaaaattttttttgcgggcaataagtttttttttttaaaaccaaccacactccaaaaaccgggggagcataaccatttgtacaaaatgttggggagagaaacgattcaaaccacacgtttttggggccattttttgcccccacattcccaaaatttaaaccattggttaaagggggcccctgagtccctgacctgaaactttgatcatttttgaaacacattggtttggaacctttttttgaaaaactgccaggggccgtacctccccatgtggaagggggagccgggtttttaaaaattgggttttaccagcgtaaccaaactttttaa

SEQ ID NO: 9438 - DNA, 283 bp, Zea mays
  Clone ID: MRT4577_1085C.1
agaccaggaaatgcacttgggagtactacgatgataaagatgaagtgaagcatgagataaggtcgaacaaactcatgggagagaagatgcagtgtggatctcagctcattgattcgtacattaaacagtgcggacagaagatacgtaggtttgccgaagaacttggctgtaatagcccgatgcgtgttgagcggagaaaaaggaaggtggcttacgagaagagggcacaggaggctagggaaatgccggcggccagagccgaggaggaaatgctggacaatct

SEQ ID NO: 9439 - DNA, 721 bp, Zea mays
  unsure (1)..(721): unsure at all n locations
  Clone ID: MRT4577_108600C.1
ccggactggcacgcgcacccttgtcaagctactgttctgtaaattcaaagaggcagagtagtataatacaccgacagtgaagaaatctctctgtctccaattgccttcccgcaaaaataaggaaaattacaccttcccgccgccgccaacgaacgacgctttgcctcattgctcagttccctatgaccagcacgcccaccgttaccaagtcgccgccggcgctcatcccgccggcgggacctaccccctgcggcacccttccgttctcctccattgacaagaccgtcgccggctccggctttgtgaaccttatgcaggtctttcccccgccctcgatctccgccgcccgcaaggaccagggcgccgtcgcggccgtggccgcaatgcgcaacgggttcgcgagggcgcttgtgccgtactatccggtggccggccgcatcgcctcgagcggcctcgcggtggactgcaccggggagggcatctggtttgtggaagccgccgcgagctgcacgctcgccgacgtggacggcctcgacagctgcccactgctgatcccaggagagctcctcctccctcgccctccccccggcgagaagctcagcgacctcatcctcatagccaagggcgacgaggttcaccctgcgggtggtttcgccgnncgggatccgcttcagccacgcggtgttcgacgggaatggggctgcgcagttccttacggcgg

SEQ ID NO: 9440 - DNA, 436 bp, Zea mays
  Clone ID: MRT4577_108601C.1
ctatcacggcacgatcgctattagctcgtgaatcaattaacaaagagtacatacaacatgacgcacacatttgtttcacgtggatggcgagctgaggcttctggtcagttcaggctctgctggtttccgggcgcttccttccgcggaggctgtttcgtcgtcgacttcaggctgcggctcccctctccctccgtctccttcaggtgaatctgcgccgaacagagacttgacgcttggtctctttgccttctccttcttcttcagctcagccatgccggggacatcgggatcgttcacaagttcaaagttcttgtaggtatagcccacaaagttcaggtcctttgaagaaagcatctttctccaagggcccgcctttgctgaaccctgaacgctactaccgtccgaggactcctcaaacttctcaaagttctgggtg

SEQ ID NO: 9441 - DNA, 375 bp, Zea mays
  Clone ID: MRT4577_108602C.1
ccggaataatttggtggacgacgtttttatctcgtcggcggccgtcctttaatagggggggttttataaagttttcgggctctgcaccacccagagagaccacttattttcctttggacttatctttaaaataaagacttacgggggtaacaaccccgatcaattctaagtccatgctggtagatcgaaaggttcttgtggagcccgggatgaacacacgccctaacacattgacacaaagtgacctctcgtgaaaaacacagttgggcaacaaccagccctagaggtatgaatagttaaccctttggctcgggtgaacaacacggtagggggtaagatatcttggcctgtcgggaccgaccgttaattgctttc

SEQ ID NO: 9442 - DNA, 187 bp, Zea mays
  unsure (1)..(187): unsure at all n locations
  Clone ID: MRT4577_108603C.1
gaggntatatttaggatcaaatcatatcatcgggggccaattaatatatggttacaggaaattcaatcggattaacccacatgcgggttgacacacgttcggacctgagcacaaagactggcgccaaacatgcggagagggagttggaacttgaaaactttggttttttttcttttacacacaccaa

SEQ ID NO: 9443 - DNA, 525 bp, Zea mays
  Clone ID: MRT4577_108604C.1
ttttttttttttttttttttttttttttatttgaatcatattccatatatgaaccacacaagcaagcatacattcgttgatttatcaacaaatttagaagcaaacaaaatggcgcagctatagcccaatgcttgcaatggcacccatgcccacaaacagagtcgtccgagtcagagtcggccgagtcagagtcggagctggcggaccacagcaacgtggtgaggcactcagcgacggacacggccacggcggcgccgagcgcgagccacatggacacgtgcacctgcccgcagaagcgggcgccggcgctactgcggcagacgctgaagcgccgcccgccgccggcgctgggctccgactccgagtagtagtagacgtcccagccggcggcgaacgccgcgccggcagacgagtagagcagcgccggcgcggcggcgccgaggagcggcatgagcaccctgaggaggcccttcttgcccttcttgctaacgctgaggaacagcgccaccgcctccagtggcgccg

SEQ ID NO: 9444 - DNA, 645 bp, Zea mays
  Clone ID: MRT4577_108605C.1
tttttttttttttaaattcttttttttttaggagcatactttagataaatcctttattggactgttttactataacgagttatttgcatgttcctcacagattcttggctgcaagcaatcaagcatatcgagtttcaactatctatctcctttaattgaactggacaaagtagtagtaagaatcttacttcggatttgcacattcatgcagtgaaccgcagatgggtctttcttgcaaactgaaagattcatccaatcatttgctaaggcaatgcaaaggtactgttatgagcggcagatagctgcgagggttagagggcaacggctagggttagggccgctggggaggccagccgcagggctttgcccacggccggcaatagagaaggggtttccttctaatctcttgcttactttcaattgatacaatccctccccttatttagagagggttacttgacctctaagcactagatctaatcttatcccaaactagccttatctttatctaaccttatctttattcaaccaacccgaggggctgtagcagccctattgggccctaacacatacatcatgtcatggttaaattgtttaaagtcttcttattttaaaataaaaatcacctttttattttgcccattc

SEQ ID NO: 9445 - DNA, 243 bp, Zea mays
  Clone ID: MRT4577_108606C.1
cgtccccgaggtgacggcgactcataagattactgtgctctatgctgggaaggatatcgttaagagtaccttcgacatgtacgtggactagtcacacagtgactccagcaaagtgacagacccaagtcctggctgagcccagtgcgactatcgccaacaagaccacctacattgagatctatacgacatgagctgtacacggctgaagttgaaactgtgatccatgaccccatgggacagaag

SEQ ID NO: 9446 - DNA, 154 bp, Zea mays
  unsure (1)..(154): unsure at all n locations
  Clone ID: MRT4577_108607C.1
cgacccacgcgtacgcgagggagaaggtggcaactacaaactgttttcaattgatcatggttattgcttgcctgggaagttttaagatgttacatctgaattgcaatactggccccaaccccgtgngcctttcagtgatgaaaccattgttaac

SEQ ID NO: 9447 - DNA, 137 bp, Zea mays
  unsure (1)..(137): unsure at all n locations
  Clone ID: MRT4577_108608C.1
gctcgcgcgcctcatggaagagagacgctctgcngcttgaggtgcggtactttgctgtgcgtcgcttcgtacctgtgatcgtcantgtgttttagcgtagatgtggngtgtgtaggtgggtgtcgatgcgtnggann

SEQ ID NO: 9448 - DNA, 312 bp, Zea mays
  Clone ID: MRT4577_108609C.1
aagtttaagcgaagcaacacacgaaacagccataattattttcaagaaccccgccccaatgcaggggaattaacaactcttacaacaccaggtgttggctaccacacaatacttgagaacaaacccccattacactataccgggggcaactctcggcacatcacgggataagggaagcacactggcctgattcttcgttatcaaaaaacttatctagtggctctcaccctcggggccatcctctccctgatagaactcagccaccgaccttcttgaattccttctcgagcgcctccatgtcctcaggggcct

SEQ ID NO: 9449 - DNA, 723 bp, Zea mays
  Clone ID: MRT4577_10860C.1
aggctccacccgtccgatctaaccgtcccaccgcccaagccactcgagggccgatcttgctgctgctgctccgccctccctcctcctcggcaccgtctcgtccgaccatggctgctgactcgggcagactcgggcaagccggcgtccacgcgcggcaaggcgcgcagccccaggccatcgcacccagggtccccggtcatcccggcgctcccgcgcctggcgcgcgtcttctctggctcagctgctgaaccgacctcgcgtaccacccggcgggcagggtcacgggaaaggccaggtaccccccggtcttcatgcacaggatcgactccaagaggtacgacgtgctccgggtgtcgccggagctggcccaggagctgggcgtctacctgctctccttcgaccgccccgggtacggggagagcgacccgcacccggctaggaccgataagagcgtcgccctggacatcgagcagctcgccgacgccatggagctcggcgacaggttctacctcgccggcttctccgctaggaccgagatcatgtggagctgcctcaagtacatcccgcacaggctttccggcgtagccatcctgggccccgtgggcaaacttctggtggtccggcctccccgcgaacgtgtccctggaggcctggaacgtgcaggtggcgcagggacagtgggcccggggggcgtggcgcaccacgctccctggctcacctact

SEQ ID NO: 9450 - DNA, 521 bp, Zea mays
  Clone ID: MRT4577_108610C.1
acactcctatgggcgattgggaccctcgaggccggccgggatccctgtcctgcctccaagatcatgctgacaatcttacccgatggcatgcaggcccgaggggataaggcacagtgccatggctgggtcgccggatctgtattcgcgcagctgaacgatccccccgctggaccacatgacgacattgatgcccaccaactgctgcgcgactctaggacaatgaccccggacggtaggcctcagagaacgaccttgctgcccatcggcttcctcacctggtccatgaaggcactctcaccgatggagccctccaagagcacctcttcttcgacagaccgctacattgaaacaatctcttcctcgacctcattcacaggataaatcttgccgcagaagtgctgctgcttcctctttcactgccctgatctgtatcaccaacaaagtgcaaggtgtcagtattttccttccctttcgcatgataatcctttcctcgcaaaaagaaaagaacaaaatatgcggcc

SEQ ID NO: 9451 - DNA, 2628 bp, Zea mays
  Clone ID: MRT4577_108611C.1
cattgggtacctcgaggccggccgggaaggatccctgctattccctgctatacagctctcgtcggggtcttctcccccttcggcccttcccccctccctgcgcgccatggaggcccaggagatcgccgctgcagcgcgccacttctgcgccatggttcgaatcgtcggtccggaccccaaggccgtgaagatgcgccgccacgcctttcattttcaccattcggggtcgaccacgctctcggcgtcggctctgctcctgccgcggggcgctttagcggagccgccgctacttctcgaccatatctgctcggcccacgggcacgcggcaggagacgtcgcgctcacggctgcttccctcgtcgagccgttcctggtcgcggagcagcgcaataactccggcgaggagcttcagccgaggttggttccggagacgcgtcttgatgtgtttgttgagtatgagttggggaatgctcaagatgggaagtctggacctccgcggtggcttccagctcgactgcttgccatggttgatgtcccaacagctgctgtttctgctttatccttattgagacatgacgattcattcatcagaaggccaacttgggatgtaggctggtcattggctgatgctaatcagaaacaggtcgaaaatgacagcagatcttccctcgaatctaacaggaataattcatctttggagtcagtagactcattgatgttggccaagtctgccacaagaattgctattctaggaatttcaacctccaatttaaatgatgcaagacgtatcaatggtttcagtgatgcaacaacgaggggaccctttgcttatagtaggatctccatttggcctcatgccacccttccatttcttcaacagtgtatcagttggtgctgttgcaaattgccttcctccatgcactgcaaggagctcattactgatggctgacatgcactgtctccctggcatggaaggcgctccagtgtttgaccaaaattcttgcctcgtggggctgctgatgaacccattaacacagaaaggcagcaatatagaagtccagctcgtgattacatgggatgcaatatgcacggaatggaacagcaaaaaactggaggaaattgaacgacccccaagaaaactacctaatgacaaaaatacagatagtaaatctatggaattacggcatgtatataactatgtgagggttttctcttctacggacaacaaaactaatcagcattgcatatcaccccgttcgctcagagaggctatatctgcagttgttcttgtcacggttggtgatacgtcttgggcttcaggtattgttctgaacaaaaggggtttagttctgacaaatgctcatctcttggaaccttggagatttggaagaacttcaccttcagatttacaagcctcgttcgctggagaacatctcaatgctggagaaaacaaatcattgcaaccacaacaaggcaaaatttccaatgaagatgctgtcaagcataaggtttcgtcatttaacttgggtttcaaaagagggaagagaatatctgttcgtttggaccatgaagagagacagatatggtgcaatgctagtgtggttttcatctcaaagggtccacttgatgttgcattgcttcaaatagaaaaggttccagttgaattaaatacaatcagaccagaatttgtttgtccaacagcagggtcgcctgtttatgttgttgggcatggcctttttggaccccgatcaggcctacactcttctctatactcgggggttgtgtcaaaggttgtccaaatcccagcaaatcaactttctcatctggcccgtgctgaggctgacaatatggacataccagtaatgcttcagacaacagcagcagttcatccaggagccagtggcggcgttcttgttaatacacatgggctaatggttgggataataacaagtaatgctaagcatggtggtggaagcacaatacctcatctgaatttcagcatcccctgcaaattactggttgcagtcttcgagtattcagcaaatggaaacctcgtggttttggagcagttggacaaaccaaatgaagtgctctcatcagtttgggcattggcaccatcatcatccccatttgtcaggagctccccagaaaaaggcaaagaggaaaaggtcttggagttctctaagtttcttagtgacaagcaacaagctctgaaatctaacgtagatctgaaggaactatttaggtacaagactcccagcaaaatatagagtgcgtccactagaattcatacaaggaaaatgtttgttcccagaattttgtatgagacgtttgatcccagaaatccccagtacaaaatgagttatcagagcacagtgccttttttttacagatggttaaggcataagcatcttttcttcgagtgtccggtagcgcgggcaatatggcaaactgttcaaatcgctacaatttttaccccccctcaagtgtcgtaaatatgtttaggtcaaagctagggggattggtaaaaatttaaaattgttagctcttttagggacagcaccagtttgttgggccatttgacattgcgtttcaaaaaaaatatgtgacaaactctttacaggttcc

SEQ ID NO: 9452 - DNA, 242 bp, Zea mays
  Clone ID: MRT4577_108612C.1
aagaccgtcaacaaggaaacacgaaaggcgggaaaaacaaagagaaatgctggcaccaaaacctgaggggggaagaagggaaggagtaaacatagagaaggcaacgatataaattgagaaggacgtgacaagagggaaagggggggtagaggctggatacaaagagaaaggaaaggtaagggccccgtaaggaagggcgaataagacgatggggaaagggggcatggataagaacgtggcac

SEQ ID NO: 9453 - DNA, 432 bp, Zea mays
  Clone ID: MRT4577_108613C.1
ggggccttgtcgctacccctgtccttatccccacctagtgcctaccatgctccgccgattgcgatttatagcccatactccgtacgtacagtttgccatgccatggaaaaaggctgaacaccgggcggacatagcatgtgtgacacaaacacgaagagctccgtgaatactcggcgaaaaaggtcctccacacccgacactcaggagaatgctacatggggcgatccatggaagagagccaagctgcccacgactgcccgtgcatggctagggcgtggtggaacgcaaaggtcaccatgattgtagggctgcccacgcctgatcagatcgcggcggtccctggcgctcaacatgttgaaacacataccgaacctgacctccaccggaccgtagacgtcgcccaactgattcatgaaacgtgctccggcgacc

SEQ ID NO: 9454 - DNA, 655 bp, Zea mays
  Clone ID: MRT4577_108614C.1
gtacctcgagggccggccgggacccgttctcaactagacacagatagtatatccttgtgcacatatcgaaacagctccctagttactgtgctcgttgtctaacctggattccggcatggcttccaagaagatcggatgattgacctgcttcattgccatcaccgctctcaccttccgtacctgaacatccgccgcgactatgtaaggtgcctgcacgaacggcgaagccaccatgatacaggccccgccaaaggcgctgcatcctaacggtggtgcatgtgaatacgagggtggcgtcgaccaacctccggtctcatcaatgatcaccgccagggaatcaatcacatcttccagaactcaaagggctgcagcacctgctaccatatgaagtgcaccggacacgacgcgtgctccgccagacagaagacagtgatcatcaccgacctgtgccccgactctacatggcaggtggaccccatccacttcaacgtgagcggcaacggcgttcggtgccatggcgaaaaccagggcaggtcgacatgctcccaaacgcctcacgcctacaagtacagtacactcggctgactagcaactgacagggattgtacatctgcttcaggatgaacagcgggtcaaacgccaactacctggtcat

SEQ ID NO: 9455 - DNA, 755 bp, Zea mays
  unsure (1)..(755): unsure at all n locations
  Clone ID: MRT4577_108615C.1
agactgtggtgtactgtaataagcaatatatatatatagcccagccgggcgacatggtcgccgccagagcagagctcgccgctcttctcctcctcgtcgccgccgtctgctctgccaccgggttcacgccgggcgggggcggcccgccgtcggtaacggaggacacccttgagaaggtggccgcctcgctggaaatgtacgtcgacgcgctccctcagatgcctaaggtcctcggctactccatcaagcacggccgccccacgccgactcacctcaccatcgggatgtaccagaaaaagtggaaattccaccgggacctgccgccgacgaccgtgttcgtgttcggcacgtcggcggagagcgcgaccttcccagggcccaccatcgaggcgctgcagggggtcccgctgcaggtgacgtgggacaaccacctccccgaccgccacantcctgccgtgggaccccacggtgcccaccgccatccccagggngcggcggcgtccccacggccgccacctcccacggcggcgtccacccgccgcagtccgacggccacgcctacgcctggttcaccgcgggcttccgggagaggggccccgcgtggacgacgcccacgtacgcgtacccgaacgtgcagtcgcccggcggcgcgctctggtaccacgaccacgcgctcgggctcacgcgcgcaancctcctcgcnggnctcctcggngcctacgtcgtccggaaccccggcggcggaggcgccgctc

SEQ ID NO: 9456 - DNA, 1162 bp, Zea mays
  Clone ID: MRT4577_108616C.1
atgaaagccacatttttcatgacatacgtaatgggagatggctgggctggtattgctaacgagatccttcgagtgaaggctctggtgatataccatctgaagaacatgttcatcgtgaagacggagagggacagggatcgggcgatggatcccggcagcataggactcggagaaaacctgccgtcccttcagctgtatttcctcctcggcctcgtgtacgccgtcgttaccccgcttctcctgccgtttataatcgtcttcttcgcctttgctttcctcgtctacagacaccagatcatcaacgtgtacaatcaggagtacgagagtgctgctgcgttctggcctcaggtgcactcccggataatagctagcctactcatctctcatgtaactctgtttgggttgatgagcacaaaggaagctgcgtactccacccctctgctcatcttcctgcctctgctgacgatctggttccacaaatactgcaagagccggttcgaaccagctttcagaaagtatcctcttgaggaagcaatggcgaaggacaccatggagcacgcatcggagcctaacctgaacctggaatccttcctggctaacgcttacctgcaccccatcttccgccttttcgaggaagccgggaaagaggaggagacggtggaggtgaggatcgacaaagccgagaagcagcagcatcgccatgaggaggacgaggctcacgcgaggagctcgtcgcagtaccgggaggaggagactcacttcaggagcacgcacgagacgcattaccaccacgaggagagccacatcagcaggagcacccagtatcatgagggcatccacgtgaggagcgacacggactcgccgtcgccgccacacttcgtctaccactacgacatccagcagccctgatgatgtcgtctctaactttgttttcctgggtgtcttgtgaatgcttctcttggctaacctgtccagccccccccccccccccccccaagaggtttgctaaagtcgctgatgattgatgaattgttgcgtgtacatgcagggtagggtctagtgttgtagtgactgtaaaagttctggtgtgccatgggacctgaacattgattccatgcaggaaaaaaaagaagtggatgaatcaagttgagtattgcgtggt

SEQ ID NO: 9457 - DNA, 143 bp, Zea mays
  Clone ID: MRT4577_108617C.1
aatcacaaccaaacccccagggtaaatgaacaccccccgcgggaggccctacagagggggggcatcacctgcttgttgttcaggggtctagaattgttgcggtgtatttcacatccccccccgaacacatgatcttgcaaccc

SEQ ID NO: 9458 - DNA, 209 bp, Zea mays
  Clone ID: MRT4577_108618C.1
cttacgtttcctgcgacgccgcccccacgactggctgggttgaccgcgcccccggcttacaattcctcatccacctccgaggggcccggctctactctctatcacggcacagcacgtgcgagcaccaaccgaggggcggacatctaattaagttgtctgcgcagcgcgatccggtgtccaccgctgcccagcccgacgaggcggaggag

SEQ ID NO: 9459 - DNA, 307 bp, Zea mays
  Clone ID: MRT4577_108619C.1
gagcaccctcaaccctcactacccggcagccggtacaagctcatacgtcgattcaacgccatcaagcgaccggctaacagaagacatggcgcaatagctggcaggttcgatggcggcagccgcgagtcggcagccgcggccgtgggttccacggtggtagaggccagagactggacagaggaggcagaggttgcaggacccccagaagcggccgttacggcggtcacaagcatggccgctatggtcgcatgaacaccggcagccatgacgtcgtggtctaccacaagctcgaccatgtcttcatctg

SEQ ID NO: 9460 - DNA, 1131 bp, Zea mays
  Clone ID: MRT4577_10861C.1
cccacgcgtccgcccacgcgtggggccttttgtccgcgctctcgccctcccgctcgctgcagtgcactcagcttgcttcttgcgtgctcagctcgctctgcccctcatttctgttgcgtgctagagctcctccagtggtcccttgctcactgacgtcgaggatcgccgcagtcgtccctgcgtcgtctgatcccgtcaccacgcagtagttgcagattgtcacgtcatcaccgacacagttcagctcaccaaaatccaacgccgtcgcgccgtcgctccagggaccccttggcgaagcccgccagccacttcgtcgaagcaattccttgcacagttcgccgtcgtgaagctcgttgccggaccgtctgcatccgtacgccgttcgccatccgtggagcctcgccggagttcgcgtctcgcctcaccgcgatcgaatccctcgattcaccacaagtggttgatttagtagttaagaatcaagatctattccgatccacggaagaacctcaagttttcaataagcaagtttgcagatgaagatatgatgctgaactccatggatgctagtctagtgatacccccgatcatcttcctgtggatggatgtccatgtctcgctgtactttgatgaataaaggttaagacattatgtctgttcgaagtgtaatatgttaatatattctttatttatgctttatgcattgttcttttgatatattacacttgtgacgtcaacatatgtgtggaaatagatcctggcacacatatgctatgcacccggctctgcccctcagaaacgggtgtgacagaagtggtatcaaagcaatgtgatcgtaggtcgctagattagttagaaatggaaagcccagtcagtcgttcgaaacttgacttatttgtctccataaaaacttactttatatcaaaactcgtctcttttatcttcaacccttcttgtctgatttttggtctatcagaaggttctaatgagaagcattgcaagatgatcaagctaggattgcggaacttgaagcgaagtttgccagaagaaaccttttcgaagctatcaacgatgccctattctctgtcttatccccaccccgcaagaagtttcgttatagatctcttggatcta

SEQ ID NO: 9461 - DNA, 260 bp, Zea mays
  Clone ID: MRT4577_108620C.1
agctaattttttctatttcacccactttatagatcacgagcttcttacactccttgaggtggttcttgtaaagatcatggaagctaccccttgctgccacgcgactcatttcaatcagatgaccattagaccgcctgagctcacattttaggtagatagagcctttggactccaccgaggataagcatgctcgactgatgtttactgaggaacgacacacgtattacttggtctttgaaccaattgcaattataaagcct

SEQ ID NO: 9462 - DNA, 491 bp, Zea mays
  Clone ID: MRT4577_108621C.1
acacactggcacactggccatcttcatcaggcataatgacagtagaggatgcctttctcaggatcttgcggtacttggagaaactatggggaacaatatcgtcttcaggaaaaacagaattgatggaactggcatttataccagttgcaaatggtactcgcttaatagaagcgaaatcactttttgctcgcctgactatcaacatgtcaccttttgcttttgaacttccaagtctgtatcttccatttgttgccattcttagagaaattgggatgcaggaaagccttacaaactcttatgcaaaggagcttctttagatatccaaaaagcatgtggttaccaacgcctgaacccaaacgaactccgcgcagtgatggaaatcttggactacatgtgttcaggagtcagccagcctatctcagacggatcagaagggctgtttgattctgtaataccagatgatggctgcaggcttgtctcagctacatcat

SEQ ID NO: 9463 - DNA, 229 bp, Zea mays
  Clone ID: MRT4577_108622C.1
caggaaaaaataaaaagtggaattcccccctcaacgagggggtagtttttacccttcattcaccacacttttcgtatcctttggattaaaaataatgttaagctcgacagaatccaaacattaaatccatccaaatttaccctgttaaattacacaaatgcttatcctgcgtattattttgttgtaaatacctttctaatttcaaagtattattttatcctgtcccccc

SEQ ID NO: 9464 - DNA, 622 bp, Zea mays
  Clone ID: MRT4577_108623C.1
acttttagaaacactgtttctatatattctcatgaagctgtacgaaaatatccaccatgccactgttatacaacatacaacttctgaaaaatcaattgtactatataaattgggacttgaggcccgacagatctgatgctaaatttacccggttcttgttctccaaacggtaatgtcagggcctgatcatctactactctctatcatgggttagtttttgactttttgtcgacactggatttctcagacgacttgagcaagaacctcccgatgcggcaatcccaatgtgacggatgagctccacccggtgcggcaagcccagcctcgatcttgtctcgtctcgtctcgtgaggtctggccatggtcatccaatccaggaggagggaaacgacgaagacgagcagagggaggcgaagtcaggccataactggacaggcgagtcgcgcgcggcagatcaaaatcacatgagccgagtcgcgcgctaacggcgagatcaggatcagcgcgcggcgcagaaaggaccgcgccgcgggcgggcgggcacccaccaccaaaatgtcggcatcaaatggtcctcgaacgtgggcgtgttgcttggatcgctaggcccggagggtggggg

SEQ ID NO: 9465 - DNA, 616 bp, Zea mays
  unsure (1)..(616): unsure at all n locations
  Clone ID: MRT4577_108624C.1
ccgggactactggcgcataccactatgcctggctctgcagcagcatctgcaagaccaaactctcttagcactcgaatctgaatttcatagctgacagtggcgccttccccgcagttcagggcataggccctctgcacctgctccgtgtgccgcagttcctgcagtcgtctgaccatgtctttcataatgaggagacgaggaactggaaggagaacaacagtgggcaagcaaaattcctgagctacacaaaagacgaccccgtgagcccaagggaaaaaagcatgtatttcataccagaatcttataagtttttaagatagtatcttaatttcctgggaacacattcatttatatatctctaattatttttcaaggttttaaaatttcactatgcccaaaaggctcttgatcatactgaacagcccgagttgtattatttagtttacagttcaaatacaattttacttgcatgtattcttgtctgaatctcaggatatttcagaagtctttaaatatattcattctattattcaaataattntttgagtcctgactatgcaccagggattggacttggatattagggtgcacagaatgaaacacgattcctcttctc

SEQ ID NO: 9466 - DNA, 170 bp, Zea mays
  Clone ID: MRT4577_108625C.1
cgcgtgttgagcgaattcctccgtggatctctccggtcattccgccaccgccttggttgttggatcgaccgagtttcttgccaccaaattctgtgaaatccactgctccagtgaataactaccgtgtcggctgccttccccagttcccctcctctccatttctccccttc

SEQ ID NO: 9467 - DNA, 247 bp, Zea mays
  Clone ID: MRT4577_108626C.1
aaaaaaaatcatcaaaagaaagcggggtctatataataaacaatgatgaaaaacccatcaacaaaatcttccacaaaatattcaaaaccacacggcccataatacatgtgtatccacactcacttaattcccatctatacccgacaaaaataaccttttattctaagcactgaaacgtgccacaacacaacccaacaaaattgcttttcactaaaaaacgttcataactacacaaataacaccaatg

SEQ ID NO: 9468 - DNA, 586 bp, Zea mays
  unsure (1)..(586): unsure at all n locations
  Clone ID: MRT4577_108627C.1
gttttggtgagcccccgaaaacctaggtcgacacggccagcgctggtgtgacgaagcgggcgaggccgtctggctgactattggcggaaccgcggaagaagcgcgcgtgaatctcctggatttacagactcgagggggagctgagaaaagatggagtgtttgttggaggatggccttcttcggttgaacacctgccaccaggtgaccctgcaatcatagattgcacgtgtgagttgccaaaaagctcaactatatctaacaatgcatatctgtgcgttgctacctgggatacgagggctcctcaaccatcacaaattgagtctgccgtgcgatgggctgtgagacagcggtcacagaacaaacctggctatgtccactgtgcctatggtcatggcagaagtgtctgtgtgatgtgtgcgcttcttgtcgcattaggattggctgaagattggaaagctgctgagcaaatgattcatgaggagcgaccttctattagcatgaacactcttcaccgcanaagcttggaggaatggtcaaaacatttgctccctcttaaagaagtgggaatcagatgtgagttttgtat

SEQ ID NO: 9469 - DNA, 325 bp, Zea mays
  Clone ID: MRT4577_108628C.1
atttctgtttcttgcaacatcatgatgtattcatatattaaacatggattgcttgaatactcgaaatacctgctccatgatattttgaattgcatgattaggattaaagcggtttctaatcaagtggcaaccgctgacatgtttactttcaatactttcatggatgcctgtgctgcagcaaaaaggaggaatgacttcgattatgcgttttttgagatgttatagactgggttccaatatcttttagcgaagtactccttcttattggtactttgactcttttaggcatgtgtaaggaactgctgttgtatgatctatggcacta

SEQ ID NO: 9470 - DNA, 1253 bp, Zea mays
  Clone ID: MRT4577_108629C.1
aaagaggcctcgtcttcagtcttcaccctcttttcaacggttccggtgagcccccgaaaacctaggtcgacacggccagcgctggtgtgacgaagcgggcgaggccgtctggctgactattggcggaaccgcggaagaagcgcgcgtgaatctcctggatttacagactcgagggggagctgagaaaagagatgggttggggaatatcaaggttgattggactgaaggctgctgtcctgctttctgtggcgtgttttttccaaggattaggagtgatccttatctcatttcctctcatatatgcatccgtgattgcaatactagtctccatagcttcccacccatcaattgatcttcctttacttcttggcaaggcatccgatggaagttttccgctgtggtcatggatcatcttctcaccatttcttcttttcattcacctgtttgtgctgatacgaagatttgtgaaaaacgagcccttatacactgaggttgcagatggagtgtttgttggaggatggccttcttcggttgaacacctgccaccaggtgaccctgcaatcatagattgcacgtgtgagttgccaaaaagctcaactatatctaacaatgcatatctgtgtgttgctacctgggatacgagggctcctcaaccatcacaaattgagtctgccgtgcgatgggctgtgagacagcggtcacagaacaaacctgtctatgtccactgtgcctatggtcatggcagaagtgtctgtgtgatgtgtgcgcttcttgtcgcattaggattggctgaagattggaaagctgctgagcaaatgatccatgagaagcgaccttctattagcatgaacactcttcaccgcaaaagcttggaggaatggtcaaaacatttgctcccctctaaaagaagtggggaagcagatgtgagttctgttatccattcggattataaccggaaataaaattggaccagcaagagacaggcgtgttcagatatttaagatgcattgtacatttggttgtattgtttgctcctgtcctagtgaatgcctatggttcattttaagttaccattttgtggtaattgtgttgtaaaaactatatgtatcaaattatattagtactgtagctttacacggttagttctttacggaagatgtactgtccttgtctccttttttgtaatataacagtcctatcattgaatgcttgtcagggaagggctgttgcctaacctttggggcttgttttgg

SEQ ID NO: 9471 - DNA, 294 bp, Zea mays
  Clone ID: MRT4577_10862C.1
cggacgcgtggggcctctttggtgaggttttctactccgtggctttgccttccctctggagagagcgggtggtgtcttcagccctgatggcaccatgtcatgtgcgcgattggatcatggggattctgatggttcacagcgcttcttcaccttctccgtcaagggttctgtatgttgcaaaccacggtgtggttctctttgacatgtccattgacgactgccatactgtgcatttctgatagctttgcgcagcttacctgtcttattgcaaaataaccagtagtaccattggcg

SEQ ID NO: 9472 - DNA, 465 bp, Zea mays
  Clone ID: MRT4577_108630C.1
cactacgcgatcaccgtccggagccgcacatgcatgctgttctcgcctgcccgatcaactaccagcagcagcaggaggcggctgccgcgcagttgctcgccaagtgagcccctgctggcaagggtggcgaccagaaatgtttaaaaccctagtccccttttcatctctaaaaggggcgtcgctattctgttgattaattcctgtgtctgttggttggaaacttgggatctggctgttagggtggtgtctgccttgtgttcgtggaaatgcctgtgaaggaactgccatgtgttaggctgtgttatcatgaccattttcttaatgttatctgttactatgtcatcaggatgacactcctgttgtggtgtgatctgtgtgatggtgtgattctgtgaccaggatgacactcctgtgaaggaactgccatgtgttaggctgtgttatcatgaccattttcttaatgtt

SEQ ID NO: 9473 - DNA, 245 bp, Zea mays
  Clone ID: MRT4577_108631C.1
gcgcgcggaggattcaaaaagtggctatcctccgccgccttttttgactccactcccaggcgccgtataggtacgtcgccggcggtgatgacgacgcgcttcaagaagaaccgcaagaagcgtggtcacgtgtccgccgggcacggtcgcatcggcaagcaccggaagcatcccgcgaggctctcggctaacgccggcggcgtgcaccaccacctcatactcgtcgacatgtaccatcccgttct

SEQ ID NO: 9474 - DNA, 789 bp, Zea mays
  Clone ID: MRT4577_108632C.1
cccacgcgggccgggacccacgcgcgtcgttcgttcctcaagtgatcttaatcgtcgagaagttaccagctagcggagatcatcggcaatgtcgaacatggggcaatccttccaggccggcaaggcgcaggcccagggcgagtgccaggcggagcgcgcagcgcagtgcgttagggacggcgccggcgccaccgcctgcgccgtgaccgacaccgccggagccgcggccgacagcgcgcagctgcaggagcaccgcgccgccggcaccgttcagcaggctgctgagcaggtggcgcagacggcggcgggcgcggcggcagccgtcaaggacacggtggcgggcgcggcggcggccgtcaaggacacggtggcgggcgcggcggcaggcgccaatgacgcggtgaccggcggccactgaccgactcacgcgcgtgaaccggacggcgtaccaacaatgctgcatggccaagggttgcgcctcaagatggctactaaattttccccctttttctttatgttttttcattttaacgtgtttcattcacccatcttattgtgattgatcgcttgcaataaaaaggccatctttactatgacgaaaaaaaaaaaaaaaaaagcggcctctgaaggaaacaagctgcctaatgtttgcacagtggaaaggagcgaatcatttgcaaaacatgcttattctgtgattctcaacatttgacgccttttacgcctttacccgatatttgccagatcacatgctcctagtctgcttattggccgattgctttccaactt

SEQ ID NO: 9475 - DNA, 798 bp, Zea mays
  Clone ID: MRT4577_108633C.1
gtaaactcaattctgccgtcttacttcccaagcttgctgagtagcttctcgccgtcatttctctcaccgcgttcacctcgctacctcgcactacctcatggcatcgtttcgtatcacgcgggctctcgtaggcatcgttggtaaaggaggaaggatagcggagcgggcgcgctgccggcgagcgtactctcggcgcacggaggaataatggccgagcgtcgaagggagcgcgatacgacgtcactgctcgtcctcttcgaccgcactggatatgctactctacgaaggaccatccactccaccacgttctcctcgcgtcgaggagctcatactccctcggtggcctgcaagtatacatcgatatatgtccaaatactgctcatgacttgagctttatcaatggaggaaagatattggataataaccggacacttgcttatgcccgtgctccacgacgagaaatcccagaagctgctgttacaatggatgagcgatcgcggcctcgacctcctgactataacaccgggaatgatgttgccaatataccccaagacaaagcagatgtggatgcaccattctctgataaggcgtccgcttggggctgcacaatctgcgtgaacgcataaaatgactgatgggcttggctgggtgcacaccaggatggatacaccatgatgtccagatcttgaagccatacatgttccagaatgtacaacccacggaatacgaacagctctggatcgccctgtgctatagagtatgattgaatgctgcctggtgtctaaatgtgttgtcaaa

SEQ ID NO: 9476 - DNA, 139 bp, Zea mays
  Clone ID: MRT4577_108634C.1
gcacacgatgtgttcccctgctaatgctcggtctcagtatgctggttctgggtgctatggcacacgtcgtattgaaattgttgagtgctgatgattatttctctgcgtccattgcaggcacggcatttagcaatcgtga

SEQ ID NO: 9477 - DNA, 416 bp, Zea mays
  Clone ID: MRT4577_108635C.1
agctaaaacgatcaaataccccaactttattcaacagttgcttcacaaacggaaagagggtgatcatgaaaagaagcttaaaaaaaggaggagattgcttgagacccaagccacaacgaaccctatagaagaacctatggacccaattcaagatgaagagtttttggtttccatggatgatagggttgtaccagagatgtcaacaaatgaaagaggtagatgtgaatgattcaaagatttatgttgaattaaagcagttggtgaattggaagccatgtagctagggtgggtttccaagtgagccagtggagcaaactggctgttgaataatatatacatatttgtgtgtgtatgtatatgtatgttatatgaatggatgggcattggttgcatgcatgatgaacccttgaagatga

SEQ ID NO: 9478 - DNA, 297 bp, Zea mays
  Clone ID: MRT4577_108636C.1
cggtccggactgcccgccgcaagccacacgtccggcgaatcacagacgcgtctttctcattttgctgcgctgcactaccctgcggtgccagtatatattacgggagccctggcgagcgagagctatggataggcatggctgctccgaagctcgcgacgctggcgctggccgtgctcctggcggcgaccgtggtggctcccccggccgctgtgctcgcggcgatgtcgtgttccaccgtgtacagtacgctgatgccgtgcctgccgttcgtccaaatgggctgggccatgccgtccc

SEQ ID NO: 9479 - DNA, 761 bp, Zea mays
  Clone ID: MRT4577_108637C.1
aattccacataacctcgcccgcgccgcctcccccacgagacgccttcttgctctcgcttccggtgacgcccgccacttcctcgccgacgagatggtacgtcgctttggatgaaattgtttactcttggggctcttttgattctgttcggcgtctttgagaaatcatgacctaatcaacttgtttagcctgttagtgctcctgctagtgctttccgcagctgtcagaaatcatttattcatagtctgaccgtggggatcgaaatctagcactattatgtgactcatagcctgaccgtgggatttcgaaatctggcactattatagtattatgtgaatattctgacggtgggatttcgaaatcttgcagtattatcttgtttcgtgttaaaatgtttaatcttgttgccggttgtacagcctccattagtccttttcgatcactccaatacacatctatcgggattgaggtgcaaaactcaatagttttccacaccaattcgtcccaatatatgtagattgggtgggttagcgtgcacctaaacaagctctactggcactaaataattttaataagtacaagtgtgtagttgaataggttaccgaagtagtaagaattctgtgctttcttcacatacatgctttgagcggtaattaccatcccactcgaaaagttatgtagcttaaactttccaactagatcttagctattgactattgtttaccatctcctagttttgggcaggcgaaattaatttgcatag

SEQ ID NO: 9480 - DNA, 953 bp, Zea mays
  Clone ID: MRT4577_108638C.1
ccggccctgcgtatttcggcactgctagcacatcacttcacagccatgccgcttgttctgctagtgctgctgctgctcttgtcctgttcttctccagttgccctgctagcagcagcgcatgaacatgacgagtacacactcgtggcgaagagctcgctgaaacccaaagctacgtgcaccggatacagggtgtctccaccccagaacatcacgtgggttccattgaacgcccctcacgggccgtgctcgccattgccgggctcggcggcgccgtccttggccgcgctgctcctccacgaccagctccgcgtcgacggcatcgagaggaggctctctgacaatccccatgatagtaagttggttccggctggcggagaggatttccaaacgaacggcaatttacttcaagtcaactacggcaattcaggacagcctatgagctccgaggcccagcagagcggcgtggttaatgcgtcggctgccggcggcggaagcagatccaagctgcccggagtgatccagacggtggttctggactcggcgagcgacgtgccgtgggtgcagtgcgtgccgtgccccatcccgccgtgccacccccaggtggacagcttctacgacccgagcaggtctcccagctctgcccccttctcgtgcagctccccgacctgcacggctctcggcccctacgccaatggctgcgccaacaaccagtgccagtacctggtccgctaccccgacgggtcgtccacgtcgggggcctacatcgccgacctgctcaccttggacgccggcaacgccgtctcgggcttcaagttcgggtgcagccacgccgagcagggcagcttcgacgcccgggcagccggcatcatggcgctcggcggcgggcctgagtcgctgctgtcccagaccgcgtcccgctacgggaacgccttctcctactgcatcccggccac

SEQ ID NO: 9481 - DNA, 773 bp, Zea mays
  unsure (1)..(773): unsure at all n locations
  Clone ID: MRT4577_108639C.1
ttggaattcggcacgaggggacgcatgtacagagantaggtatagtccggaaaagaaaatagccagacatgaccatagcatggatgttgaattttcccattacactgattacagattttgcgagtggcggagtctggaggtaagaggcagatacagagataaaggaaaatttgccaaaagcaatgatgggcatttcagacatgctaaccatctcgagttgtattctggcctcaacaattttgagagggacaaacctgctactggcttccctgttatgagctcaagaaacagatgcatcgataacaaagaagtctgcaatgctaagatgacacaaaataattgccatgggtatcatcaaaagaacaagcaacatgattcatcattttgtattggcaacattcctcgatatgctttgcgcactgatacttatgctgaaaagggccattttgttctgccaattaagaggaagctttattctgatctgggttccatggaccaaaggactcttgctgatttgccacttctgaaaggaagattgatgcatggccaatccattgccagtgacaggaggatttatgctttgaagctgcataagtcgacaaagaaaattaatacagaagccatttgtagttccagtgatatgagaaatattaatactctntcaaacattttgtgttggcagaagacatgagctggataatggctgatacatccacttgaatgatagaaaaataaagtttgagagggaaggtaatgagttaaagaccgtgtat

SEQ ID NO: 9482 - DNA, 151 bp, Zea mays
  Clone ID: MRT4577_10863C.1
aggatgacacttaatacaaaccttgacatgagtggcactattcatttacagacaatccatggtaccggaatcatgcttatactaacgtctagtaataacatggaattttcaactgtgagatctcgactttcataacaaaaacacagatggg

SEQ ID NO: 9483 - DNA, 772 bp, Zea mays
  Clone ID: MRT4577_108640C.1
aattcgaattcggcatcgccgtccggcgctgccctgtcccatctcaccgcagctcgctcccacctcgagccgcgagcgcgcccgtagcagtctcaacgcgggcactcgcttgcgtaccccaggccgatcgacgagtccgcccggcccgcgtctcacgcgtgagcctgttgcgcgcggtggcttgttgttcgatcatattcgtgtacgggcaccccgcacggccggagaatcacttgccagccccagccccgttttccggggctcctcatccctcgcctcgccggtgttgcttcccggaggtttccgctgccgctgcgtgccggtgccgcgggcaggcgcaggaggctctcggctgtttccttagcgtgccatcgtccatggaggcgaagcagcgcccgcggcacggcgaggagaggaggccgccggcgacggacaacggcggcggcggcggcggcggcgaggagtacgacccatggacggcgtggctctacaagccgcacaccatctcggtgctcctcgtcggcgcctgccttctcatgtaagcaaccgccctcgaattctcctcctctatcctgctcgcgcccacacagggagagccctacgtatctggtttcgctcgcctcttgctagttgctaccgtgttcgtactacgaccccgcttgacccgagggtgccatttttacgggggcgaaagcaacggcctgtctctgtgctgtgtgcttgccaaagtaccagagctgccagggacaacgccaggtgctgcagcagtgtc

SEQ ID NO: 9484 - DNA, 420 bp, Zea mays
  Clone ID: MRT4577_108641C.1
atggtgctggcggtcgtggtgttgctgggcgtcgtggccgtccttgtggtggtgctgctgctgcagccccgtgcgccgtacgtggcggtgcgggcggcgagcctgtacgcgctggtgtacgggcagacgggggcgctggacgacgtgcaggtcacggtcctacccgttctgcgtgcccgccaggggcgtcctcccgctggcgtacgtggggcgcgcgcagggcgcgccatggaggccgcgctccgcgacggcgtggtgccgttccgggtggagggggaggcccggacgcgatggaaggtcgcggggatcgtcggcgtcgaccagtggacgcgcctggcgtgccagctccgcttcttctggcccaacggcaccgtgctccccttcagatgcagctccaagtccaagctcttgttcttctga

SEQ ID NO: 9485 - DNA, 818 bp, Zea mays
  unsure (1)..(818): unsure at all n locations
  Clone ID: MRT4577_108642C.1
cccgcgtctacgcgtgagcctgttgcgcgtggtggcttgttgttcgatcatattcgtgtacgggcaccccgcacggccggagaatcacttgccagccccagccccgttttccggggctcctcatcccccgcctcgccggtacgtacggtgttgcttcccggaggtttccgctgccgctgcgtgccggtgccgcgggcaggcgcaggcggctcggctcggttgtttcctcctcgtgccatcatccatggaggcgaagcagcgcccgcggcacggcggggagaggaggccgccggcgacggacaacggcggcggcggcggcgaggagtacgacccatggacggcgtggctctacaagccgcacaccatctcggtgctcctcgtcggcgcctgccttctcatctgggcaagtggagcactcgatcctgaaggcgctgctgctcacagtagcttgacatcaatcaagaggggtgtctgggctatgattgcagccttccttgcctactgcacgcttcaggcaccttcaacgatacttattaggccccatcctgctgtctggcgcctggtacatggactggctgtcgtttacctcgttgctcttaccttcctccttttccagaatcgtgacgatgctcgccagttcatgaaacaccttcaccctgatcttggagttgaattgccagagagatcttatggagctgattgccgtttgagacattgtttgatgaatttgttgttgcccatatccttgngtggtttggcaaagctgtgatgatacgaaatcaacttctactttgggtattgtcgatcggctttgagct

SEQ ID NO: 9486 - DNA, 480 bp, Zea mays
  Clone ID: MRT4577_108643C.1
ttgactatagtcctcggattatggtgcaccataaactaactatgtaggagttaccataagctctttcttctaaacgcaagggatggaggccggatttgtactgcgaattttgataattttactacaggctggaccccttacctgattagcatattcctacatatttaactactacatgctctaggtcttccgatactttactctaatgactgggacgattctatacattctgtcctatgctattttatttggagattgttactatcatatacattaactaggaacgtccgctttaggttctctatgctctttcttatgagatcttagatgaatgagtcttctttgaatcttgatatcctgaatcataattctgaaatagagcgttttttttagatgactcctgattatgatgggatatcaatccccgattcaaacagattaaccatccaagtttaacacgttgtgctccactaaacgaag

SEQ ID NO: 9487 - DNA, 300 bp, Zea mays
  Clone ID: MRT4577_108644C.1
gccgccaaattcacaacctgcctgtgtcggcctctggcaggcatccactgcaagacggcggaatgtacagcgaggacggtgaatgatgtcaacccgcacgagttcgtcaaggcctactcctaccaccttaagcgctccggcaagatggaactccctgagtgggttgacattgtgaagactgcgagggtcaaggagcttcctgcttatgatcctgactggtactacatcatggctgcatacattgcaaggaagttctacctaaggcaaggcatcggtgtgggtggctttaataagatctac

SEQ ID NO: 9488 - DNA, 433 bp, Zea mays
  Clone ID: MRT4577_108645C.1
agaagaagactaaaatataagtacttgcatccgtagttatggacatgaaaaagtgttatataaggtttgagtgcacatggatagatgagagctggcgggtcaaggttgaaggactatgggggtacctggaaggtgagcaatacatctgattatgggccaaatacagggcgaaatatgagggaggggcaaccaggggtgcaaatgctgagagatcatcatgaagggaatggtgatggatcatgagctggaagattgtaatcgggctttagctcccaagtgagtggattggtgttcgtcaaattagatttggaaatgtacaacgccttgatgtggaagttgagaagtgttttaaggggtccgatggttacatatgtaatgcggggaacttaaatttaactgtatagatgagggtggttggatttatttagtgggc

SEQ ID NO: 9489 - DNA, 473 bp, Zea mays
  Clone ID: MRT4577_108646C.1
attttgtgatgtgttctttttgtggtgcattttttaattttttttatgtatctctagtggctaaaaatactgatggttattattgatggagatggacagtggggacattaaatacagcgggcatagactggtcaatatcctattcccatggattggggttaacaaaggagaaccgtttggcaagcaatttacgagggaccggcttgttaaagaggtgccctggtggaagtgtccatgacataatgttataaaaggaaaagatgtcatgacttttcctctacgccagcagcataaaaaggatgaagagacttccataattttcaaataggagaaataattgggaacacttaaccctgatggggatgattctgacaaaaagaaaaattgggggtgctcccatatggatgttcactattcagggcgccatgtaacaaccacaacattattgggaacataaaggtcccaactttttg

SEQ ID NO: 9490 - DNA, 460 bp, Zea mays
  Clone ID: MRT4577_108647C.1
cagacacgttcgctctagcccagggggggctggggggcatatgccttgtggcctagccgacgctgttgctgcgcacgagggaacgatactaggggaggacctatacccacgagcctgagccactgtacccagaccaaactgctaagcatcactgcggagcatccaacccatcaatcatatcggcggggctagcaacctcgaggacacatgagacgtctagcatgacatgggtctcagcaaggagacgtgcacgcgcatatttgtcccaccagcgcaactcaacaatactatacacacacctggaatgatgataactgtaccaaggaacatcaaaactaatgtgaaacccagcacagactgcataaatgttgcgactgatgctgatgatatacaaaaattaaatgtggcacataccagacttgaatcctaaatactaaagaatggactgggtcgaatcgta

SEQ ID NO: 9491 - DNA, 445 bp, Zea mays
  Clone ID: MRT4577_108648C.1
actcaacaatatatatatgtgtgtgtatgtatgtatgggagacacacaaaaactaattaacaaagagaacattataaaaatcctcaccagcaaagcaagcaaaacgtcgtacggaatccctagctagcagacggactataacgaactactgaatcgatcaagcaaccaacaaaactgccacgcacaacagttaactgctaagcaagtactctctactaacacgactgaaattctcagcagcatcagtactggcttgtacggtaacctgcagcgtagtagtttcccccgtcgtcgtagtagttgtagttcccggcgggaagcctctgctgctgcagcacaccatgctgctgggaactacgctgcgcagctccggcgcccgccgccgacgcacacgcactcggcaaaccagcggcggcggcgaacctcgggggtgcgaccatttcct

SEQ ID NO: 9492 - DNA, 160 bp, Zea mays
  Clone ID: MRT4577_108649C.1
aacagcacatgtttaaatttccctatttaagctagcattaatggcctatcctggtacaactctcaaccacatgagcaaaaatggcctataagccaacaccaaaagcacagccggacagaaaaatcacgaaaaaaacgcacaggcatactcgttacatgcc

SEQ ID NO: 9493 - DNA, 182 bp, Zea mays
  Clone ID: MRT4577_10864C.1
atgtcgctcggaggaccgctgcgttggctctcggctgggttctttacaacgagcctgaacagacacccacaatcgcgtccgtactgacggaatcatacaatccacatgtccggtacggtgcatctctagctgtcacgatctcctgctccggaacaggattaagtgcagccatctgcttactg

SEQ ID NO: 9494 - DNA, 384 bp, Zea mays
  Clone ID: MRT4577_108650C.1
acccacgcatccgagtacgcatccgctcctcgcaacgcaagggctccacagaaaggctatgatcgatccccacaggtgacagctgagtatgctttatgctacatgcaatttaactggacggcacaaccacaatgatgcgggggtcctccgctgtactcggacacagtcgccaggagcgacacctcacgagatcaatcaggcgcagatacaaccacatattccatcgccacctgcttccccagcacttcaacattcagctattgatgtatctggacatcatagcttaccccatccactgggtcccatcagttcaggacatctcgtcatagcactagatttagttacgccagggacgatccctgctgacttcccccatggcattct

SEQ ID NO: 9495 - DNA, 231 bp, Zea mays
  unsure (1)..(231): unsure at all n locations
  Clone ID: MRT4577_108651C.1
cagccctccaccaccgaccacctcctctggggggctcattcactcagagtngcactcggccggcanggcatnaatcccccagggacaancncaggcaanccgccannacngagagccccaancgcacagcgggncgnggcaagcccgcgacgcggaagcgccaccgccccccaggacgagcccgggcacccccaacacaaacgggggggggggggaaaaantttttttttt

SEQ ID NO: 9496 - DNA, 318 bp, Zea mays
  unsure (1)..(318): unsure at all n locations
  Clone ID: MRT4577_108652C.1
ctattncaacaactcgntcattaggaatagagattccttctgtgattgatgaataaatccctagttcacctaagaaaaacaggcgggggtgcggcctcggatccgatggacacgggcgcagatcctccacgccaccgccggctcaggaaggcctccatctccgcaccgccgccgcctacccacacccgaaacggatgcgtctgagcgaggaacacagcagncgctgcgaggacaacatccgcagcttacctgacgagacgtccatctcgatcccccacaacccacacgcacggatagcaaatacccccccctatcccc

SEQ ID NO: 9497 - DNA, 783 bp, Zea mays
  unsure (1)..(783): unsure at all n locations
  Clone ID: MRT4577_108653C.1
gccgggnaaaaaaaaaaaaaaaaaaactaagaggatgatttcattcagggggagttttgtttagtcaaaggaaagacatttgaaacagggggaggaaaatttcaaaacttgaaaatgccttgcaaactcttattcatttacctttgactatttgcaaaagaactttgaaaagatttacaaaagatttttgcaaaaacaaaacatatggtgcaaaatgtggtccaatatgtcaaaaacaaagaaacaatccatgcgtatcatgtaagtattcatattggctcaattccaagcaacctttgcacttacattatgcaaactagttcaattatgcacttctatatttgctttgttttgtgttggcatcaatcaccaaaaagggggagattgaaagggaattaggcttacacctagtccctaaataattttggtggttgaattgcccaacacaaatctttggactaactagtttgctctagtgtataagttatacaggtgcaaaaggttcacacttagccaataaaaagaccaaaagttgggttcaacacaagagcaaaggagcaacagaaggcttctctggtctggcggcacccgggactgtcccgggtgtgccaaaccggacatgtccggtgcaccaggnggactccaaacttcgaactgctcggcttcgggaatttctagagggcactccgctaaaattcaccggacagtgtccggtgctccaagggaggtcgtcctcaggaactcgccagcctcgggttttcactccagccgctccgctataat

SEQ ID NO: 9498 - DNA, 605 bp, Zea mays
  Clone ID: MRT4577_108654C.1
gcggccgggccgacggactcgttttctttatgcatattttttgcattggattaagtttaccgatctttattcccgaagattaactatgagtcaagtgatctatgtgtaagatggagtacaaaaagagctatttccatatcagtaactaaatcatttatcggtctgaaggaaaagcaagcccattagctaaaaaactgagtggactttggttcactagagccaacaggatattatattgtttcaactctgcggaaacccaccttttttcctcatgaactcttgaatgaaattacggaacagaagtgagttatccgtaagatattcaagagaatttctatctcctattctataggggtcatctaaaaagcggagaggctcccctccatgcttactagaacagctgacatagatgttaagaggggagaatatacctataggcgccgattgatatctaaacttgatgatcagacttgaatttgagacgtgaaagaaatcaaccaacgtcgatcataacccctagccttccaagctatcgatgcggcttcgaaccccgctacccgctgcattctgaataacaagactattccattacgattgtctagaca

SEQ ID NO: 9499 - DNA, 555 bp, Zea mays
  Clone ID: MRT4577_108655C.1
gaacattatgcacctgtataacttattcactagagcaaactagttagtccaatatttgttgttgggcaattcaaccaccaaaattatataggaactgttagcctaattccctttcaatctccccctttttggtgattgatgccaacacaaaccaaagcaaatatagaagtgcataattgaactagtttgtatgatgtaagtgcaaaggttgcttggaattgagccaatataaatatttacaagatatgcatggatcgtttctttcttatttaacattttggaccacgcttgcaccacatgttttgtttttgcaaaaatcttttgtaaatctttttaaagttcttttgcaaatagtcaaaggtaaatgaataagagtttgcaaggcattttcaagttttggaatttcctccccctgtttcaaatgcctttcctttgactaaacaaaacttcctcttaatgaaaatatcctcttagtgttcaagagggttttgatgattcaaattgaaaaactttttctcccccttttgttagataccattgaaaaatattttggaa

SEQ ID NO: 9500 - DNA, 244 bp, Zea mays
  unsure (1)..(244): unsure at all n locations
  Clone ID: MRT4577_108656C.1
aaagatgagatcattttattgttggttagaaattnatcccnnnnccangttcttcctcccccttaccaaatcttaaaacaattcttttactttttttcctcaaccctcttcaccattaacttcttcaattcttcaactaccatttttacttacccttaatttaccccccccttatttcatcatttttttattcaaatcattcaacttaccaacttaatttacccaacattcaacntaattcccc

SEQ ID NO: 9501 - DNA, 160 bp, Zea mays
  Clone ID: MRT4577_108657C.1
aaaaaaacatgacacagggtgcacacccacacaaaacctgaaaataggtttagagccggggccaaattccattattccgaaatggggatcggttcaaaggcttgattttagttcttcttcaacttaacagtaattttttcatcccggccgaagaagaacc

SEQ ID NO: 9502 - DNA, 441 bp, Zea mays
  Clone ID: MRT4577_108658C.1
attcggctcgaggtgaaggaaaaagaatcacttttcgatgttgtcaacacccaggttgctgtcattcgagacgctatggggaaaattgttattggatcatgaaaacagatacaccatttacgagcatgcatcaagaggtataccgcgtaatacaggagcaatactcgctggcagtgatgttagaatgaaataggtgatatagcgcacgatttctatgctggttgccgaaaagaggcttttggactatgccctacaagatcctgaacaccatcattccgtatggctctctgagagcattgagccgcatcatgacttcgattatatatgtacctatctcatggagacagacgggagccattaagagcagcttgatgatgctggtccacatgtagcaggcatactttctgagcatacgctaactgaagctgtggagaaagattg

SEQ ID NO: 9503 - DNA, 821 bp, Zea mays
  Clone ID: MRT4577_108659C.1
ggacgcctgcaggttccggtccggaattcccgggtcgacccacgcgtccggcgagttccgtctgctgtgtgaggactgccgccaccaccgctgacgatgcagatctttgtgaaaaccttaactggtaagaccatcaccctggaggtcgagcccagtgacaccatagagaatgtcaaggcaaagatccaggacaaggagggcatcccccctgaccagcagaggctgatctttgcaggcaagcagctggaagatggccgcaccctgtcagactacaacatccagaaagagtccaccctgcacctggtccttcgcctcagaggtggcatgcagatctttgtgaagaccctgacaggcaagaccatcaccctggaggtcgagcccagtgacaccatagagaatgtcaaggcaaagatccaggacaaggagggcatcccccctgatcagcagaggctgatctttgcaggcaagcagctggaagatggccgcaccctgtcagactacaacatccagaaagagtccaccctgcacctggtccttcgcctcagaggtggcatgcagatctttgtgaagaccctgacaggcaagaccatcaccctggaggtcgagcccagtgacaccatagagaatgtcaaggcaaagatccaggacaaggagggcatcccccctgaccagcagaggctgatctttgcaggcaagcagctggaagatggccgcaccctgtcagactacaacatccagaaagagtccaccctgcacctggtccttcgcctcagagtggcatgcagatctttgtgaagacctgacaggcaagacatcaccct

SEQ ID NO: 9504 - DNA, 370 bp, Zea mays
  Clone ID: MRT4577_10865C.1
cgtaggcttctactcccccttcgggtcgggatggagatcaggaggttctcccgagctcgaattcggggatgagcggctcgagatggcgacacccaatgttgtgcaccggtggttaagcgacggcctggcctgggccacaaacaaccactctctgcacaacgccttgagcacctacggggaggtgctttagtccaaaatcatactggaccgggaaacgcaaaggaccccaggctttgggttactgaccttgtgcacactggacgcgatgcggaacgccacctaagacatgaacggcctggaactgaacgggctcttcatcaccggcaacaaggcccaacccctggggtggcgtggaagcggcagctgagga

SEQ ID NO: 9505 - DNA, 1085 bp, Zea mays
  unsure (1)..(1085): unsure at all n locations
  Clone ID: MRT4577_108661C.1
cgggccgggntataagtccctcctccgctctcctctcccacctcaaatcccagacgccacgccacccaacacatacaaacacacgcacgcgcgcgcgcgcgcctcccgctgttccgcaaaacaaaggaaacgaaggagaggaggccatggcgccgagaacgtcagagaaaaccatggcaccggcggcggccgctgccacggggctcgcgcgtggcgccggcccgcactacagaggcgtcaggaagcggccgtggggccggtacgccgcggagatccgcgacccggccaagaagagccgcgtgtggctcggcacgttcgacacgcccgaggacgccgcgcgggcctacgacgccgccgcgcgcgagtaccgcggcgccaaggccaagaccaacttctccttcccttcgtgcctgccgctcgccgccgcggacgtcggcggcgcctgccggagcggcaacagcagcagcaccaccaccaccgtcgactccttcggcggcgacgtgcaggcgactctgatctttagagtgaaactacgaacatgtggtttaaatggttcaaagttaactctatatggtttatactcatgagaaacggctaaaaaatattgcaagctgttgcagatattcggacggctaacagaaactatttatttcctgttctcataaactgaagtgagatctacgagctgcaaagatcagtaaggcgtttccttcatgtatggcttgcttgcgatctatgcaacgtcgcctttattggtcgattaaagatgtacttaccaaacggagtcgtctcatcccgcgtagacaggctcgcagctcgctcggtcatgtacgttgtccacttcagaacaacgagcagtgctacgggtagttggcacgaccagtggacggaggcggcgaataatataatttcgccgctacagtcgccgtgccgacggagaataatataaactagtgaatggggcgcgcccttgggcgcgcttgagttagtttgtaagtattgtcgatggtagtagtggtaggtattgtaataaattgtattattaacttatgcttaaagtaaaaaaaacttaacctgtgggagtt

SEQ ID NO: 9506 - DNA, 901 bp, Zea mays
  Clone ID: MRT4577_108662C.1
ctccagcctgagaagcaaggacgtgagggggaagtacgtgctgtgcaccggcggcccgagcaccgagatcgagcagcagatggacgaggtgcagagcaacggcggcctcggcgccatcatcgcgagcgacatgaaggagttcctccagccgacggagtacaccatgccgctggtgctggtcacccagccggacggcgcggccatcgccaagtacgcgacgacggcggcagggtcagccagagccggaggaggggcgcccagggcgagcatccggttcggcggcacggcgctcggcgtcaagccggcgccgaccgtgtcctacttctccgcccgcgggccgggcctgatcagcccgacgatcctgaagccggacatcgtcgcgccgggggtggacatcctcgcggcgtgggtgcccaacaaggagatcatggagctcggaaggcagaagctctacaccaagtacgcgctcgtgtccgggacgtccatgtcgtcgccgcacgccgccggcgtggccgccctcctgcggtcggtgcaccctgactggagcccggcggccatcaggtccgccatgatgacgacggcgtacgtgaaggacagcgccagcaacgtcatcgtcagcatgccgagcgggtcaccgggaacgccgctggacttcggcagcggccacgtcagccccaacgaggccgtggaccctggcctcgtgtacgacgcggcggccgacgactacgtcgacttgctgtgcgccctacgctacagcggcagccagatatccaccatcaccgggcggccgaaccccagctgcgccggagcaaacctggacctgaactacccgtccttcacgatcatcctcaacaggaccaactcggccacgcacacgttcaagagggtactcacaaacgtc

SEQ ID NO: 9507 - DNA, 322 bp, Zea mays
  Clone ID: MRT4577_108663C.1
aaagggggaacgcttacaaatacattaatgctgaaaaacctgggactgaaacaacaaacccacagccttaaaccatgtgggggcgggttgtcaacccgaatttgggatgatcccagttattttccggcaaaaatactaaattttcaagttcctaaagaatgggaaaattgcaaggggggagaaacaatttttttccacaacaggggcattaaatttaagggggccatttcaatccggggcgccggatttatagagcaagcttgctagctactaggcgggtagggtagggtactggggaaaggtcacaataaagaaccttttt

SEQ ID NO: 9508 - DNA, 385 bp, Zea mays
  unsure (1)..(385): unsure at all n locations
  Clone ID: MRT4577_108664C.1
cccacagagcccgccgactccagaggccgacgccctacagccgggcatgagccgcccgcccaaccatgggggcgccggagcccgagcgcgcctgtttggcggagctagcgctggtgctgtcatgcgcgctgagccagccgcttgcgtccnnttttagggggaggttgacccgcagaaagcggcgttttcggtgtaaaactcccccancaagaggaagggcgagaccgccatttttatcaaccacacgagcagcgccagggccgagcacgacccagacaggcagnaggaggagggctaaagagacgaccatgacgcgcccgacgacgtgcccgacgacgcagacaacgacgaaggcagagactacaacgacccggacatgcacaac

SEQ ID NO: 9509 - DNA, 337 bp, Zea mays
  Clone ID: MRT4577_108665C.1
tcgagccacagcacgagagggccccacggggccaattacaggaggacgcccccagcgcgcctgggagcaagcgacgtgaaaggagatcagggggaggaccacagccggaacacgaacctcgaggcagcgccagggggcaccacgcagcaacagccaagacacctagacgccaccaagacgaccgatcccgacgagggagggacacaaaaacgggacggcggcaaccggacagaagaactgtgagaggaagacaaaaaagacgcacaaaatcagccagaggcccgagagctggggccggaccccgaggagcacaacacagcaaggatacgagggaaca

SEQ ID NO: 9510 - DNA, 551 bp, Zea mays
  Clone ID: MRT4577_108666C.1
aagcagtggtaacaacgcagagtacttttttttttttttttttttttttttttttctttttttttttttttttttttttttttttttttttttttttttttttttttttttttttgggggccacggcactacattacccttaaaaagggggaaaagaaaaaaaaacctttttggggggggaaaacgtttgacccacaacaaaaacaagggccccccgaaaaaaacaagggcccaaaaaggggaaatggccaaaaagggaaatgggtcggggcaagaaaaaagggggccaggtttcgaccccatttggacaaaccccctaggccctaaaaaaaccaaatggctccattgctcgagggctaaaggggggaccgcttttaggagctaaaaattcactggggggggaaacaaatcctaaacctcaaaaaccaagggaggccccaggacaaaaaaatcatgggaatcgaaattcgttttgggaaggcaaacatgccaaagcagggggggcaaacccccaggtgggggaacaacataaccttcagcagggcccaaaa

SEQ ID NO: 9511 - DNA, 330 bp, Zea mays
  Clone ID: MRT4577_108667C.1
atattcttggggtcaaatcagtagcatctcatggctgtgaagtcgatgatgttcaacgagtagcagtgcaggatgaatttacccgcatctcagttccacaaaaacatattggcaacaagggatcacgtgattcttccccggataatgtttgcaatgctgcgattccgtctgctatggagcaaggatatacattgatgactggcacacataatccttctgttaatgtcgttaccgtcacagtccatggtgttggtgttctagtctttgcttcagggttggtatcgcgaacatatacagtgggaactgtgatgagtggatgcattccacaag

SEQ ID NO: 9512 - DNA, 983 bp, Zea mays
  Clone ID: MRT4577_108668C.1
gccggccgggtcgggaccgctagggttagtacgcgtccacggcgacgacctctgcgcggagtgtgctccgattggctggcctcctcgatcctccttcccgcgaacgcacgcgcgcgcgagggagaggttgagacttgagagatagacgaaagacgaaacaagggaaggagacgccgtgctcgcctattggccgccgcctccgctccttcgcgcccaatgcgacggccgcggctgccagcaaggcggcgagcgtgagcgcagcatgttgtcgcggccgggcgggacgacgaacctggtggagcccagagggcaggccgccgctctgccgtccggtggcccggcggtgcagccgtggtggaatattaagcttctgcagcatatcaatatcatgcagcatagcagtactcagacccttactacgcaggcgttgttgctccctatggaagtcaagatgtgtgtccgaggagcctgtctatgtgaacgccaagcagtaccgcggcattctaagacggcggcagtcacgtgccaaggccgagcttgagagaaagcgctggtcaaagcaagaaagccgtatcttcacgagtccccgtcatcagcacgcgatgacgaggagggcgagagggaacggtggacgcttcctaaacacgaagaagagtgaccgtgtccctcctgatgacttgatacagctacgacgacacaacgaggcttgaagaggtagcggtctggctggcatcctagagcagcggtttctgtccacaggcacgtgcatctgagaccggatccgtagctccactccacagcatatgcgcagcccatccatctcgtgcacacttgtgtagctgctgtgttgtaacttgtaagtggaaaactgagcttgtgtccgattgctatacacaacctaagtttcctgtgacctagctctatgtggctctgattaactgcaccaaatcatataaatccctcggaaaaaaaaaaaaaaaaaa

SEQ ID NO: 9513 - DNA, 243 bp, Zea mays
  Clone ID: MRT4577_108669C.1
gatttagttctctttatacttcatttctagcccagttgggttttgatttatataagtagtttagaccttctcttcataatcttgctctgagatggggaacagaacacacaagtatgaagtttctttcaggtgtaaataatgaaaaataaatgcctcataaatgatagtacaatgtaactatcaaagttttataattcattatgagttaaccattttaatgtttccaattaaacctcatagtgc

SEQ ID NO: 9514 - DNA, 325 bp, Zea mays
  Clone ID: MRT4577_10866C.1
aactccaaggaagagggagacaccactgttaggaaaagccaccatattcccacctattgtcctcttctgcaggggtagcagattcaggcccggggctaaggaaaagacctcctcaaaagctgaggaccagctcccagtgggagaaagaagagcagatctcccctgtggcttctgatccaccttactcccctcatctattctgtccctcaactagtgagctggctcagtgataaaatgaacaataaatctgggagtttttcctggaagagacaaattcataatttctcaaaaacttagctatgtgccaggtaatttaaaaactttt

SEQ ID NO: 9515 - DNA, 741 bp, Zea mays
  Clone ID: MRT4577_108670C.1
aaaaaaaaaaaaaaaaaaaaaaaaaaaaaaaaaaaaaaaaaaaaaaaaaaaaaaaaaaaaaaaaaaaaaaaaaaaaaaaaaaaaaaaaaaaaccccaccctggggttcgttgggggggcacacacacacaaccagatttccccaaaatccacccgtgggaacctccgtttaaagatgcaaatttttgggaaaaccttgacgggaaagattataaccttggggggggagtcgtttgacacctttgacaacgttagggccaagatccaggacagggggggcttccccccaaaccagaaggggttaattttggttggaaaacagtttggggacgggcgcacgtttgttgattacaacatccagagggagagccccttccactttgggctccgcctaaggggaggcatgcaaatttttgggaaaaccttgacgggaaagattataaccttggggggggagtcttttgacaccattgacaacgtaagggccaagatccaggacagggggggcttccttccaaaccagaaggggttaatttttgttggaaagcagtttgaggacgggcgcacgcttgccgattacaacatccagagggggagcaccctccatttggggctgcgcctaaggggaggcttgcaaattttggggaagaccttgaccggaaaaattataaccttggggggggagttttaagacaccatggacaacgtaagggccaagatccaggacagggagggctttccc

SEQ ID NO: 9516 - DNA, 271 bp, Zea mays
  unsure (1)..(271): unsure at all n locations
  Clone ID: MRT4577_108671C.1
tcgcgctcctgtccaccctgccaccgncgactcctctccgncgcagcaactggcaacctccgtatggcccctattaaggggcgccaagctccgggggaaaagcaagacggacctgcaggcgcagttcaaggagctgaagtctgagctctccctcctccgcgtagccaaggtcaccggcggggcacccaacaggttttccagatcaaagtggtgcgcacctctattgcgcgcgtgctcacagtgatctcgcacaaacagaaatctgcgtttc

SEQ ID NO: 9517 - DNA, 226 bp, Zea mays
  Clone ID: MRT4577_108672C.1
gggtgagcaaaggacactttacatgggtgcgaagtggttcacttgatagcttgctgtgaaaggtctacacattggctggacagtttgttcatacacgttcggggctaagattcacactgatgtaaacatgctcgtttagtgtttatatcaaatggaaaatgtaaccgtggaggcgcgtctttactacaaccacatatatcttgtgcatacaaaggaacaaccgctg

SEQ ID NO: 9518 - DNA, 514 bp, Zea mays
  unsure (1)..(514): unsure at all n locations
  Clone ID: MRT4577_108673C.1
gcatgtcacgnncgtaccgtaagtcttggnaatcctctagaaacgnngccgcccttgtttgttttgttgtttntgtttgccanggtaatccaagtctaagtcaaataccccacaatattaacaaaagtttgcaaaaatcttgcnnttcgtttacaaggtatcgnnacaaccaaacctgcattaccggatacccagctttcaattaaccgctttcaccagcttagaagtcatgcccatcgctactaaggtgatgtggcttacanggaaccttatnntaacaaataccccacggtgggggagcttcactcanntttcatttaatagaagtttgcatttctgggaccgaaggggttcacggggccctccacaaggnntcccttcaaagggcggaaccatgtcttcatgtggatgcccgtctcccngnngagaacgtcaatggtccaacctnnctgtcgggnntcggtcgcctnnggactctcgtggtgggaaccccnngtcgagctcgtgccttgat

SEQ ID NO: 9519 - DNA, 553 bp, Zea mays
  Clone ID: MRT4577_108674C.1
gccatcacacatatatgtctcccaaatataatttgtatctgctctatacatgttttatagatatactttaaaaatcaaatgctaatagaatgttaaatcattatttacagggaaatagcatatatgctgagattccaagcgacatagtagatgagcagaatcctctaattgatgtgaacaaggtgtacattataaggcgctttcgagtcatctatgcaaaatcatcttacaaagttgttgatgctccttttatgatatgcttcacaaaattcactataattgagctatgtcgtgaaccaccaacaacatttcctcaatatgtttatcgattgacaccatacaatgaaattgacccatttggtccaaaagctaaaacattccatggtatgttcctgcaattgtgcttttacacttctactcattctctacattttaccatatttctaatatttacagagaaattataaccattacaaagttttcttttctaaaattccactagatgttattggtctcatcaaggaggttactaaaatcaacccgatatattctg

SEQ ID NO: 9520 - DNA, 378 bp, Zea mays
  Clone ID: MRT4577_108675C.1
atcgctttccgaaaggcggattgatgggtggtgggtctggtgcgcggtagttgtcggtccaccctcaccctcaccagtgggcagtgcagtggccagtcactcactcctacccacctgccgatcttggctgccatggctcgcttgctttggttctcactcaaaggaaaggaaccctctctccacggtacgaccgggaccagaagcatccgcgtctgccgggccccacctaccgtcctttggcatccggagggccgtgcacgcctcggcgtacgacaagaacctggaggaacaggtgcgcccggcgttcgtgccggacgatgtgatcggcagcgccgggagccccgacaagtactggagcccccaccccaagaccggcgt

SEQ ID NO: 9521 - DNA, 844 bp, Zea mays
  Clone ID: MRT4577_108676C.1
attgggacctcgagccggccaggaaaaagaatcgaagaggggtcgcgttgcctcccttccttaccctgtcctctctcatccttatcttgacggcggaggcaagcgaaaggagcggcgcaggcgagcggctggccacgcaagcgaccgtccagtcgcgcgggcagcagggcacaggcgagtagccgtccaagcgagcggtcgaccaagcgctccaaccagcaccggcagcagcatggcaacaccgtccgggcgagcaaccgtccaagaacaggaacttttctacgcacagcacagtccaagaaccgatacttttctatgctccttttctttgtgctactagatcaggtaaaattgagatgcttccgtttgatggagatgcagatagacaatgttcggctccttgttttcagggattttacgctctagcaagccacaagccagttaacaattttatattttattatttactagatagaatagaacgtacttttctagctaatatgatttaattcttttacatttcaatcacacatcccctcgttgttaattggttatactaccatttaattgttatgtgttcttaacctaccggttattttttcccatcaaattagagaatcaattctcgatgttaatcattcaagtctcttactagtactgttctatgcatagtaacctagtaaaaactggagcatagcctagtagcttggtacattgaacttcaatcttgcgtatgtgttgtagatggacaaggcgaccaagcttttgatttatggtgcttcagcacacatgttgttgcccatgatggccatggttattgagtctaggaaagaaaaaagatagt

SEQ ID NO: 9522 - DNA, 1081 bp, Zea mays
  Clone ID: MRT4577_108677C.1
gcgcgagagagaaagagagcagcttctccatctagctagtagttagagagatgtagtactagctagctagctagtaccaccggcgacaaggtagttaggtttctcctctttctctctctagatctgtgctgctaggaaggatcggagatggggagagggaagatagagatcaagaggatcgacagcgcgacgagccggcaggtgaccttctccaagcgccgcagcgggctgttcaagaaggccaaggagctcgccatcctttgcgatgccgaggtcggcctcgccgtcttctccagcaccggccgcctgtatgacttcgctagcaccagcatgaaatgtgtgattgaaagatacagcgaggcaagagaggaacaccgtcagactatgagcgcaagtgctgaggccaaggcagttgttgggtcagcagctttctggcctgaacgtgggagatttgcagaatttagagaataagctggagacgagcctaagaaatattcgtctgaaaaaggaccaacttattttttatcagattcaagaattaaacaggaagggaagcctcatgcaccaggaaagcatagaactatacaacaaagttaaccttcttcatcaacataacactgaattacagagaaaggtgtatggacaaggagtaaataatgagcaaacaagtactactgttagacacagtacccgggatacagagaatcttccgatcaatcttgagctaagtgtgcaaagggacaaatcagaaacaccaagtgtaggcctgtagggtgagatttttgtccaaacttcaggataacacagagtcagtaaaccagatgatttaataaagaacactgaaagtgccataagactttaaatgcagtgaggatactaagccgagtgataagaaatggatatcgttggtggaattgtaagacctaacagctaaactttaagctgctagatgcgattgtttatgtatgaagaagaatgttgattttaatttagcttttcatataaagcttgccatcgcatgctattgtaaattgtactctgaattataagtcctcttggttttctaggtacatagtttttt

SEQ ID NO: 9523 - DNA, 3143 bp, Zea mays
  Clone ID: MRT4577_108678C.1
cagaaacagcaataagcaacgatctgcttcattattattctatttgattaagagtgtgtccttactccacacacaaaggaagttatgttattcgttgattaattcaactgtacacttgatggctacaaaaaatggtactttattttaatgttctctcttacatgtgaaattggtttgtacattgtacaataacatttgcattctcagaaatgcataagctaatgttctatgcaattttccactgcaggcagttgttgggtcagcagctttctggcctgaacgtgggagatttgcagaatttagagaataagctggagacgagcctaagaaatattcgtctgaaaaaggtttcattgcagattcttcagactccatcacatatttaacaacatatatagataccagttgctactttgtttaataactgccaatttgcaggaccaacttattttttatcagattcaagaattaaacaggaaggtttgtctacacgacttattcacaattaataacatattttacggtctcgcttcactacaaaaacttcttgtttgaattatagggaagcctcatgcaccaggaaagcatggaactatacaacaaagttaaccttcttcatcaacataacactgaattacggagaaaggtacatgcatctagaaatagttagacgaaataggatgcaattagtagaactcatctttaattttgttttgttttattccacatgtctagtgtatgtgaatcacaaaacatcgtttctttttcattttcaggtgtatggacaaggagtaaataatgagcaaacaagtactactgttagacacagtactcggaatacagagaatcttccgatcaatcttgagctaagtgtgcaaagggacaaatcagaaacacgatggttgaattgcaagacctaacagctaaactttatgctgctagatgcgattgttagatgatttaataaagaacactgaaagtgccataagactttaaatacagtgaggataactaaaccgagtgataagaaatggatatcgttggttgaattgcaagacctaacagctaaactttaagctgctagatgcgattgtttatgtattaagaagaatgttgattttaattttgcttttcatataagcttgccatgtatgctattgtaaattgtactctgaattataagtcctcttggttttctaggtacatagttttttctatacacctagatatactatgtctcttgagctaaaaccgcttataatttagaatggagtaacttcaaaagatagttataagttaaatattggatgaccttttaccattggaacttaacggaaaacaatgcactcatcagatatttacaagatatcagaaggagctattgagacataaataacgataaaacaacgagctacatgattttttttcttacaagaaatgctcttacaaaagtctataagacaagcagtacatgaacttgtcaatggcaaccagtacgtgaatttgtcaatggcaaccagtacgtgagtatagcctcactgagctttcttgaaaggtcatatcatgtccagcctcagtatgcaaatggccatgttacaggaatggtctgtagctgctgtgcggataaatgttgtttctttgataagaattgtcaagcttcacatctatggactaactcagcagcatcactcttcgttgttggccaatagaaaccaaatctgaaagccttcccgaccagagttctggacgctgcatgtgcttcgcactgcccgacatggatttcgtctaacagttgcttcccaatagccgagtgaatgcacttcatgaggactcctgtcgcacctcttctgtacagtatgccccctatgagggtgtagtgggctgattgccttgcgatgcgttccgctgccgccttgtcatccggttcttcttcattttctatgtacctgatgataggctctctccagtcattggggtccgactcaggttggctcaatgagaggatacttggttgtgatattttttgtacgaagatcccgggtggagcctgggcccgactggatcatagctttgacaacgcgtctgctgttgcgttgcggtctctttccacgtgatggaactccaatccttcgaacttgtactccgattttcggacggctgcacggtacttactcatggaatcagtcgagcaatcacaatctttgttaatctggcttatgaccactagcgaatctccatataccatcagcttcttgatgctgagtgatacggcgatgtttaatccgtggatcagtgcttcatattctgctgcattatttgatgccggaaacaatagttggagtgcatacttgagttgttcacctccaggagcaataaagagaatccttgcacctgctccttgcaacttcagcgagtcatcaaagtacattctccatacttcggtagtctccaggttgtctaggacctggtgttcagtacactcagatacgaagtcaaccagtgcctgagtcttgatagccgtgcggggccggaactctatgtcgtgagctcccagctcgcacgcccacttggctatccttccgatagcttctttgttgtgaagaatgtcccctattggaaatcctactatgactttgtggtcgtcaaagtagtgacggagcttgcgagcggttagaagtaccacgtatagcagtttctggacttggggatacttcattttttaagggcccgagaacttcgctgatgaagtagaccagatgctgcaccgggtatgtatgtccttcctccacccgctcgactactaacgcggtgctcaccacgtgagttgtgcaggagatgtataacaacagatcttctgctggctgattcggcgtggtggcttgagtactggtgtagtcaggaactttttcagtgcctctagagcttcatgtgcctctgtggtccactgaaacttgtccacctttttgagcaatttatagaatggcatgcatttctcccctagccttgatatcaacctgctcagggctgccatgcatccagtaagcctatgtacctttttctgtgatcgtggcgcttccattctcatgatggcctcgattttttctaggttagcttcaatttctcggtgactgacaatgaatccg

SEQ ID NO: 9524 - DNA, 584 bp, Zea mays
  Clone ID: MRT4577_108679C.1
cattgggtacctcgaggccggccgggggatgaatcttgtgacacacatatattctctcttctcctcatctcgccttgagggcgcactctgcatgctagcatcctgcctcggataaacttctgacctccccggtgtctttctctcttcctcttctctcagaaaaataggatgaagagttcagggtactagcatctgggcagggcttctcttgatttcttgccacaggggcatatctcgctcagtaacatactgctcatataataagaatctacactgctatttccctcttctttttcctggacgtgttccagctccctgtcgatggaattcattctacaacatggacctgatcctgtctactggatgcatgatatcctcccatcaaatcgcgaaaatgtgatggacgtgcgtattactccaattgtgacatctgagatgctaatgctgcttcttgtcggactgaagatcattgaagttgactacagcgtgagagaagatcgtgctctgctgaatgacgctcaagaaccgcttgctatcctgattgctatcgaggaagctgtggcatatgtcctgtctgcaatgta

SEQ ID NO: 9525 - DNA, 282 bp, Zea mays
  Clone ID: MRT4577_10867C.1
tgtcacatgcatgcttcatgacattgctgactgcataacgaaacagatcgtcgccagatctgagatgatgagtgccgtcgacgtggatgctgctgctaacagctgcaatgtgcagaagacgtacaggacgcaggtgggtgctcatgctgatagggtggcgactgaaactatgggcacggacatgcagcacgagtacatccaggctctggctgacattgcgcacgtgacgctggatgttcgatgcaagggcatcagtgttgtacatgacactgaagctatgac

SEQ ID NO: 9526 - DNA, 999 bp, Zea mays
  unsure (1)..(999): unsure at all n locations
  Clone ID: MRT4577_108680C.1
gcacgaggcaggctctctcctctcttccgccacccgcggataaacaaagcgcggtcgcgtcgcgcaccacctctgtcctcgcagagacacgcacgcaacagcatcactgaccctcaccaccgcacctggcatcgaccgatttcatctatagtagctgaccctcgtcgatcgtcaccatggaggacctgcagcaccacgtcgagggcgtgagggcgcgggggcgccatcaccaccagcaccagctcgtgcgcgagcgcggccgccgtcgcatcgtcaaggccgctgccgcggaggagcgcgccctcgttgtgccgccggaggaggagacctcgacggaggacaagctgctggaggggccacgggatcatgaaggagacgatgaagaggtggtggtggagcagaaggtggcgctgctgcggcagctggtgccgggcggcgagggcatggccgtggagggtctgttggaggagacggccgactacatcgctgcgctcaaggcgcaggtcggcgccatgcgcgcgctcacctgcctgctgtccggttccggttccggttccgacctcgacgcgctgcggccagagtcgctggctgctggcgtcctcacgccggacaaccccatgtgagatccagatccacagcaaccagcgccattcctggactctggaggacgtctgttgctgttgctttccactgggtggattggttttaatttacccaagtctatattagagtttttgtcagattcgtttccacatctgtgcaccgaagcaacgttttggatgacaatacgagactgttgaaggtcttacggagtgctttattcgaagcacgcttggttgtcgaaagagcttagttttgtccaaaggcaccaggagaaagcaaagtgcgcaacaaacggagcgggagagcgggcatgctggcgggtgccaacaaccttatctttctacgatctataatacagnatactaaataggaatagtttttttttttgcatatata

SEQ ID NO: 9527 - DNA, 323 bp, Zea mays
  unsure (1)..(323): unsure at all n locations
  Clone ID: MRT4577_108681C.1
gggcgggagaagcggggcaggggcgangggcgcggcagcgccaggggccccgncaccaccaggacgcccacgcagggggccagccacgcccagaagnncnnccnccggcagaacggcgccggcgccggcgccggcgccacgaagaagagcaggaagggcgggggggggcgcnncgacanggnncaggaangngagagnggaagcagacacggngngcncgnngggnncaacacggcagggngcaaggccgncggaagcncgaacncncggggngccagggcagcagngncagagagggacgaggagcagcaggcacaggggcg

SEQ ID NO: 9528 - DNA, 468 bp, Zea mays
  unsure (1)..(468): unsure at all n locations
  Clone ID: MRT4577_108682C.1
ttattcngcacgaggcccggtgctcgtctcccgggccctcacctctctctgccgtctgcactgccgcctgccgcgcgcaaggacgcccatgggtcgccacgggcaagcgctgctcgccgcgctcctcgggtccgcgggcggggcagccagcgcgcagccgagctacgatgacggggggggggggcagggcancacgggcatgatcgcgctcctgggcgccggcatcgcggggggcgggtgcatcgcctcattcaccggctacctccggcactgcaccgggtccgcgggcacggcggacgactacgaccgcgccagagccgtgcccaatttcgacgccttcatctcncggtcncggaggcagcggcggccgcgcgggctggacgccnaggtggtcnaggctttccccaccatgaagtacgccgaggccaaggcgctccgggtgggcaagggcggcgcgctcnagtgcgc

SEQ ID NO: 9529 - DNA, 665 bp, Zea mays
  Clone ID: MRT4577_108683C.1
acctcgaggccggccgggcgaatgttgcccagacactgctgcaacgatggaggctacttgtggggacctggaacgtgtgaaagcattccattcatcattccttgagcatgctgacgaagatgtgcattgaaacaattgctagacgatgatgatattcatggagaaaggaacaaaaaacgccattcgtctcctctatgatactgtatgatacgcactagtgtctagcatggttagatgagatatcgagcggaatcgttgcactgatgccctgagcatctgtgaacacaaccctgaaatcaaatatggatgatgctgaactcgttggagacgtggcctgcctgtcacatgatctgtggaagcttgaaagaaccctggggtctcggtaacgaatgcaaagtgctgcatatggtgagtcatggtatctcgtgccgatccgtactgatctcgtctattgctgttcatgatgcgactgatgctacggaacaagatatgagggatatcatcatactgcgcgaatttggtccacaggagataccattgagtatgcaccatgccctgtctaccgacatgaccagcaacaaactagcctatgcagcgatagattctgcgcagagcgacgtttagatcattcatctagcttcggaaagtgccattacgatgccgac

SEQ ID NO: 9530 - DNA, 147 bp, Zea mays
  Clone ID: MRT4577_108684C.1
gatatagtggaaggaacgcaaacaccggatcgagaacgatatagctcgcgatgccgacgacgtgcacagcgctcaagcacctcgcctgctgcgagctcgcgcagcaacgccaccatgaagttcaacatcgcgaacacgtctaccggg

SEQ ID NO: 9531 - DNA, 291 bp, Zea mays
  Clone ID: MRT4577_108685C.1
agaaagctcactcctcttccctctctctttcctttcttgcctccgtagccatgacccagcggctacttctcctgctgctgctgctccctttgatagcgccgcctgctgcgtctgcacgccagggcgcagggcaggattttgtacactgccccgggctggattacggtctggcggctgaagtctgcgatctgcgggcaagatgaccccatttggccggggggtacctccccccccagtgagcaccgaaccacgaaggaacttctaactggctcgctcgacaagaccaaccca

SEQ ID NO: 9532 - DNA, 289 bp, Zea mays
  Clone ID: MRT4577_108686C.1
ttctgctcgagcccatactctttttaatggactggtttggccaatacattagtcagttatttcaaccatattctctctttcaattatgctacttttcatggtttcattaccaatcaacttatcagcaacatggcataaattataaacactcttcttggtggtcatggaaaattcatgcttgaaatgacacacctgctcttgactttttgttcaacgatggcaatttgtaacaaagatatttccagagttcaatgtctaatcccttcttgatttccattcacatttattt

SEQ ID NO: 9533 - DNA, 300 bp, Zea mays
  Clone ID: MRT4577_108687C.1
ctgatctcggctcccccacgcgactccagccgtcactctgccgtcccctcgccacgtcgccgccacagatgctgtcactaccaccgccgtccttcgctccagaactacagaggggatccgcgcccaccagagcccgcccctgcgctgtaccacgtggtgagcctcaagtcctaccccctcgctgacgcccaatcgtctatccgaattcgcgatgtccccccacaccccggcgagtacggtcggcctcgccgccgagggaaagatgcttcatctaccctcaaaaggcccatctcttttttt

SEQ ID NO: 9534 - DNA, 330 bp, Zea mays
  unsure (1)..(330): unsure at all n locations
  Clone ID: MRT4577_108688C.1
ccccctctaataaaaaaagggaaaaatccgccttcttgtctttgggtttgggttggggtgaggctttgcccctgtgggggtgggacttggaccaacgagctttggagggctcccccaacgtcagcccggtttgcccttcaagctggccctttttttttttttaaaaaagggggaattgtgcgcataaaatttgcatatcaactaatgcatcgttagcccttcgggaaaaaaacggcctttatccttttataacggagagctaaaattttttgnaattcattgttttcctcccaatatccaaagttgtcacgtgttattcccctttttttc

SEQ ID NO: 9535 - DNA, 337 bp, Zea mays
  Clone ID: MRT4577_108689C.1
cccacgcttccgaagaacttggattcagatatagaagttcctaaagctatacggcttgtccatccataatgctcgcttaacctggatgcctatgaatgatacacagcagatcaagcaattgacgttctagatagacttaacgatatgggagtgtaccctgttgctattttagcatccatatcacagagacgattgggaaggtcatcgagatgtcagctctgtggccattgaaaaatacaaatgcgttggtgctgctgatgagagctgtcataatatggtcgatgctcatgacataatacacgggaatattgcccatgttattaacatcaagctggct

SEQ ID NO: 9536 - DNA, 347 bp, Zea mays
  Clone ID: MRT4577_10868C.1
ctttaagatacgcagactttgtctaccatacacaacaacgaacaactaatactctctctacctcaacataaccacttacaccacccacctactttacacccaccacacacatcaaaatgcgcgccaacacctttgctctcgccattgtcgccgccgccgcctcgggcgcccaggccgacctcctgtctgatgtcacctccgtctttggtgacgtgacctcgggtgccgtctctgtcgcgaccaacatcgcctcgcatgccacctcggcctttggtgacgtgacgtctggcggtgcttctgtcgccacgacattgccctcaaggcacatcggcgtcggtgatgcactc

SEQ ID NO: 9537 - DNA, 794 bp, Zea mays
  unsure (1)..(794): unsure at all n locations
  Clone ID: MRT4577_108690C.1
ttgggtacctcgaggccggccggggctcgaggcagactcaacactactcgccttccttcgtgtagctctctcacccccaaccccaatggtcagcccgtgagggtgaggccgtgaccatttaaaagtcgttctctctccctctctctccaccacaccggcacgagggtgaacctaaacccccacgccccactcaatccagccgaccagccaccctcaccatgcctcgccgcgcaggagccgcctggccatgcttcctcctgctccacattatcgcccacctacacctcgccgtcaacgccgccgacgccgacgctctgctcaccttcaagtcctccctcgaccgctccgaccgcctcccgtggcgccccgacacggcgcccgctttctgcgcctcctggcccggcgtgcgccagtgcgcccccgccggccgcgtcaccaagctcgtcctcgagggcctcaacctgacgggctccctcaccgccgcgctcctcgccccgctggccgagctgcgggtcctcagcctcaagtccaacgccctcacaggccccatcccggaggccctcccgcgcgcgctcccaaatctcaagctgctgtacctcgccgacaaccgcctccagggccgcgtccccgccaccctcgccatgctccaccgggccaccgtcatcgtcctctccggcaaccgactcacgggccagatcccgccctccctcgncgccctggcacgnctggactcgctgctcctcgaccgcaacctgctcaccggcgccgtgccgccgctggcgcagcgcacgctc

SEQ ID NO: 9538 - DNA, 434 bp, Zea mays
  Clone ID: MRT4577_108692C.1
aaaaaaagcttcaaacctccaagcaattttgggggcagggggacaggataccccaccaaagggcagctccccggggggccagagaccaaaaaaaagacctggaaagattgggggggggggggaaaaacccaaaaaaatggacaaggggccccccagcttccatttaaaaggaaacaaaagggttttgcccacccttactagaagggctaaaaggttttattttcccccgggaaaggggaaaaaatccccaaacccaaaaggccccgaagggaagccgggctaagggttaaccaagctcgaaaaaaaaaaaaagggcccccccgaaaagggggtggtggcctcaaacccccgccatttttttaaaacccgggggagggacatgttaaggggaataccggagctggcatcccaatccggatcggggggtttccaaa

SEQ ID NO: 9539 - DNA, 193 bp, Zea mays
  Clone ID: MRT4577_108693C.1
gtaaagtgccatagtctttctttatgtgtagcatatttaaaaatatatatgtatattatacatacacaagtttgtgtgaaagatgtgcaataacaaaggtgtatgtatgtattgttgttctgttttggaaactggacaggagtcagaacagggatgtatgtctctgttttggcaaaggagagttccacatttt

SEQ ID NO: 9540 - DNA, 763 bp, Zea mays
  Clone ID: MRT4577_108694C.1
ccggccgggtgcccgcgttcgtttcttgctactgaatgatggtagatctagattgacggtaaatgacagtacgagaaggatgaaaggtagagataatcttgtatattactgtagtagtacatatggctatcctattgaagaggtagcactactccctcaggtaggggttgattagtgtcctgacagaatttgtgtttttttttcgtcctcttgtgttttagaggaggttctcctgtcctaacaattgtaggttgctgtccataagccctagtgtaagcagcatgttggttagcagtggaaaagaaagttgagatcaaatcactccactgagtccactccctccgatttggctccgatggctcccacgttctcgcggtggcctgtggttgcggcggatcccagttcggttgtgccgccgtgtccctttcgtcggggccgttcagcgttgtcgtgatgcgaagcaaagggcggggggtcctagtgcgaatccctcccggtcccggagtaggcttgctgacaaactaggatgctggacggcatctgctatctcgctggtagccggtgcttatcatagttgttaacaaggagatgtgaattttagctcctttcagaaggtggttgtcatatatatttttattttaaaattacaatgtaagttttggtgtaggagatggttattatagatttatatatattgaaaatacaatataaagcttggtgtactgatatagatataagatataatcccgaatttttagtcagc

SEQ ID NO: 9541 - DNA, 221 bp, Zea mays
  Clone ID: MRT4577_108695C.1
catcctggagcttcgctacggaccaggtatagagaaaggtctatgcagaaatagggcagagtctccctaacaaaaaagctaacccaggtcccctcattccttcaacttgtgcctgggagtgtgtggtgttagggtgcagccacactcttctatgacccagcatgggctagtgctatggtgagagagtacattgaaggcctggaattagcttggagccaggg

SEQ ID NO: 9542 - DNA, 475 bp, Zea mays
  Clone ID: MRT4577_108696C.1
ttgggaccctcgaggccggccggggagctcgccatggcctccctctcctctgccgccggcaccggcccttccttcgccgcaccagtgccagcccgcgccgtggtcagaaggaggtccttcaccgtgcgcgcctctctccgcaagggcaccggcaccggcgccgtggtaatggatgccagcgccctgcttgccggatctgcacatgctcccaggacgtgctgctgttttcaggcgaacgttgctgtcgacatcaaagccagtcagatcttcgtgatggacgactaggccataacattcgggtgcaacggcttattccctgaccactgctactgcaaccactgccaggagcacaattcggcccttgacacagcaaactgaaacatgatttaccttgctacatcaggggtctcctactcggtgatgctcaccatgtcgagatcctatagctgcttctgcaaactccataaaagatgcg

SEQ ID NO: 9543 - DNA, 425 bp, Zea mays
  Clone ID: MRT4577_108697C.1
aaaaccgggaaacccccaaaagaaagcaaacccccattttcatcctttttttacccattcaaaaggcaaatggggcttttttaaagcaagacggcacccgttgacccaagcccacaatttttgttgcaactccgacggttacaaatccccgacgacctccaacatggggatgacaaaggtccctggggaaacaaaaaaaaacaaactttgggcaaactgccctccaacacgggggggcaatcccttcagggggggcttcaaaagggatttcacgttcagttttttaagggccgggggggactgaccccagccaacaaacatgacgggggctccaaatttgtaaaccatggaaagggctgctccaaccttgggggggaggggggaaaacttggggagcaggatacccttgatcaatttaggggggg

SEQ ID NO: 9544 - DNA, 1554 bp, Zea mays
  Clone ID: MRT4577_108698C.1
tccgccgtcgatggagttctggggtctcgaggtcaaacctggatccactgtcaagtgtgagcctggacatggctttatcctgcacgtttcccaggctgcccttggggaatcaaagaaaagtgacagtgccttaatgtatgtcaaagttgatgacaagaagcttgccattggaacactctctatcgacaaatacccacagatacaattcgatttggttttcaataaagagtttgagctgtcacacacatcgaaaactaccagtgtatttttctctggttacaaggttgagcagccaattgagggagatgaaatggatcttgattctgaggatgaagagaaggttataaaatatctctaagcattgattcattgttgtagccatggtccattcatcgccagaaggaaaaatcttttcataccttcggcgatctttagacctgagcctcacaatatatcatggtagtacagtatatcatttagcatcatataagttgagttccatctgttgaaacatctttgcgctgttatatagcttccctcgcttctatcttaactccccaagcaatttccatttccaccgcaaccagtctcttcctcgcagctcgcaccaacccgccgccgtctacttactgccactccgcctcctcatggcctcccctacggcagatgggtttatctgaggagcagcagaagcaagctctcgagcttcggagcatgacaaatggtggcaaagaatcccttgaagaaaccgaaacagacggtgcttcttgtaaccctgcagcaactggtggatgctgccaaggcaatggtggcttcactcgagctttggagcagcagaagcaagctctcgagcttcggagcatgacaaatggtggcaaagaatcccttgaagaaaccgaaacagacggtgcttcttgtaaccctgcagcaactggtggatgctgccaaggcaatggtggcttcacttgctgccatcctgacctgccaaaggaaaaacgggacaagagcatcgcaattgagcagaaccctaagagctgtgaggagaatggcaaggatggtggtgctggcagcaagaaggggaattcaaagacttgcccgatgcccacctggtttgagacctgggagagagctgacacctatgctgctcttgctgttgtcgcagctgccgcagctgtgtttatctctttcagaatctacaagaacctcaactgaagagcttgagagatctttgaagaggtgcccgaaacaagtctaggtgaatcagcgtactggtggtaaaacaatccgggacgagaataatctttacctgtgtatagtaatgtgaggtttagaacctcaaagtagcttatctggagatggtgataaaaaggtgttgtggctacggtgttttcgcgtgtgaacgtccactgctatcgaagtttggatgccttagctgctggtaatcgtaaggcatcaagtaagcaacattcactgtgatgatgttgtcttttgtttgggtttttggatgttctggagattctaggttttgaaacaatatcaggttgattgaaaaac

SEQ ID NO: 9545 - DNA, 202 bp, Zea mays
  Clone ID: MRT4577_108699C.1
tcgcggacactggcgaggcaccagatgaccagctaccagaccaacccctgtggtatattgcagctgccattaccgtcctactactgattcatgaactacgggaaaactgctatatccatgcctctatatatataaatgcactagcgcaacatgaccacacacactattaggggaggaatgaccaagaccatatcccatcata

SEQ ID NO: 9546 - DNA, 1977 bp, Zea mays
  unsure (1)..(1977): unsure at all n locations
  Clone ID: MRT4577_10869C.1
natcctagtagcggatggtttatactttatagtctagtggttgtgactcctgtagcacctcatgcacctgggtttgatttctgagcgaatttcaggtctggctaaaagacctcccttgctggcaacaccaagtagtggctgggcgccggtctatggtaatggtgtcagtcggcctgtgtggtcatgtagtcctaccacaggggggggatcagtactggcagggcgccaaactaggtgggtggctctggccactgaccttgggtatggagagatcagatattcactgtcagggttttggagtttgcttgatcgattgaaggctgaggtttcttcttccatgcaataccatcagggcggtctttaccctgctgctgaagtaccccccccccccccccaaaaaaaaacctagtatccttgctaaggctaatagccttcctaatactggtgcatgcatggtttccatatcaggaccacattctgtataaatgacgagtttcctgttgcaatgtgcatgaaattgttttttggggtacctggctctgtaaactttatggccttatcttcattgcaggtaagtctgaggtgtctgccattgtttataaagccggagagtgcatgcaggagcttctgaaatcatggaaagattttgaagcaactcaggaggctacaaatgttgaaagtttacaaaacggtcctactcttgaaattcggatacctgccgaatttgttacttccactaatcgtcaagtaaagggtgctcaactttggggaacagatatatatacaaatgattcagatcttgtggctgtgctaatgcatactggctattgctcgcctacgtcctcccctcccccatctgccatccaagagcttcatgcaactgttcaagttctaccaccacaagagagttatacttcaacattgaggaacaacgtacgctcacgtgcttggggtgctgggattggttgtagcttccgcatagaacgctgctgcatagttaagaaaggtggtggcaccattgatcttgaaccacgccttagtcacacatcagctgtggagcctacacttgctccagttgcggttgagcgcacaatgacgacaagagctgcagcttccaatgcattgcgacaacaaagatttgtccgtgaagtgacaatacagtacaatctctgcaacgagccatggttaaaatatagtataagcattgtggcagacaagggattgaaaaagtcactttatacttctgctagactgaagaaaggagaagtaatatatttggagacacattttaataggtacgagctgtgcttcagtggagagaagcctcggggtattggatcgagctctaatgcatctgatgcagaacctgagaaacaccagagcagtagtcaccattcgcaaaacggctctgtggagcatgaactccgggatgtgttccgatggtcccggtgtaagaaggccatgcctgaaagtgccatgcgctccactggtatcccactaccagcagatcagctcgaggtgttgcaggataacctagaatgggagagtatcccctcgcccgagttcacttcctctcggggaactagcagcagctgatgttgcagccaacgaaggagctatcgtttcttgtggacagaagaggagcttgccaacactgtaggtttttttttttgctactgtataatgtatgatgcaccctgtcatgtgtacaaagaaagctcaactgttgtaggctgtttgtgttgtgtggcattctactagtagtagtcttcacattaaccatatttgttagggttgcttgctcctgcccatgcctgaaagatatattgttggttttaggtcctgaaaaataattggcgatttgtaacttaagttagtattgacaattcaaggtagtaaagaaaccataactctaattttgtcagaaaaaaaaaaaaggtcggcccccgaaatgagggcctggcgaccccggaaatt

SEQ ID NO: 9547 - DNA, 361 bp, Zea mays
  unsure (1)..(361): unsure at all n locations
  Clone ID: MRT4577_1086C.1
tcgggcaccaacccagcgcggcgccaccggcgacccgtaccccctttcccggagagcgatggcgacggaactgacgggggggcaactgcgcgcgtaccaagggaccgacccgttcaagcccatttacgttttcgttcggggnanngctcnacgnaccttcgggcgggggttctaccggcccggggggggctacgccgtgttcccggggcgggagggcaagcgggcccttgggaanannnnccaggaccaaggccacctcttccgggaacttttcgggcttaacgaccaggaacttggggttcttcgcgactgggagaaccaggttcaaggcaaggtccccggtgttggccgaattggcggc

SEQ ID NO: 9548 - DNA, 437 bp, Zea mays
  Clone ID: MRT4577_108700C.1
agctcggaattcggctcgagacctataaaccgcctcttttggttgaacgatcatggaccccacctgaggtagggtctgttctaacataccttcacttcaccagcgcccatcccatgataaaggcagacgtgtacgtgaccaacacgccgctggtcgtcgccaacgcaacaccattggcaaacacctgtactacgcgcccgacccacttaagaaccttggacgatgataccatcagaccccctcacgacctcaacgggcacgtccccggcacactacacgcctggtacacctcatgagctgtccagctcaccacgaagctcctacgtcgacacatggcgctagaggatactcaagatccttacgcgactgttggacctcaacgcagcataacacccgcgcgactggataaatatgtacgccttgcacaaaatgatcca

SEQ ID NO: 9549 - DNA, 285 bp, Zea mays
  Clone ID: MRT4577_108701C.1
tcagatataaagggctgacccattttgacgtggacaactttgttgaagaagtgcttgtgaaggatattgactggcttcctagatctcctgagcctatgagtggttcctatatttttgtttgctcccatggaagcagggacaaaaggtggctgtcagtgcatgctcacacgtgggaggtcataagtatgcaggaaacgtcatcattttcagttctgatgccaagggagaagtgactggtcattggtatggttatgttgttcctgatgatgtgcctgttttgctgca

SEQ ID NO: 9550 - DNA, 677 bp, Zea mays
  Clone ID: MRT4577_108702C.1
ctcgaggccggccgggccgggcaaaactcctcaagcaatttccatttccaccacgaccactctcttcctcgcagcgcgtaccaacccgccgccgtctactgccactccgcctgctcatggcctcccctacgcaaggtgatgcccccctcgcggctccggctccggcggctgacgctacggacgcggccttcgccgccgcggccgcggtgccggatccaggcgcagagttcgggttccagcgtccggagctcgggaaggagaagctggtcgggacggtggggttccacgagcgccatgtgttcctctgttacaagggcccggatttgtggccgtcccacctcgaggcctctgagtctgaccgcctcccccgcctcctcgccgccgccatcaaggcccgaaagcccaatctgaagaggaccatcaaattgaccatctgtgaaggagaagatggcactgaatcatcaaatggagatgtgttgatctttccagatatgatcagatataaagggctgacccattttgatgtggacaactttgttgaagaagtgcttgtgaaggatattgactggcttcctagatctcctgagcctatgagtggttcctatatttttgtttgctcccatggaagcagggacaaaaggggtggtgtttgcggacctggtttgattaaaaggttc

SEQ ID NO: 9551 - DNA, 1646 bp, Zea mays
  Clone ID: MRT4577_108703C.1
attcactttccatttccaccacaccagtctcttcctcgcagctcgcaccaacccgccgccgtctacttactgccactccgcctcctcatggcctcccctacggcaggtgatgctcccctcgcgtctccttctccgtctccagcggctgacgcgacggacgcagcccttgccgccgcggccgcggtgccggatccagacatatctttcgggttcctgcgcccggagctcgggaaggagaagctggtcgggacggtgggattccacgagcgccacgtgttcctctgttacaagggcccggaggtggggccggcccacgtcgaggccgcatactctgaccgactccctcgcctcctcgccgccgccatcaaggcccgcaagcccaatctgaagaagaccatcaaattgaccatctgtgaaggagaagatggcactgaatcatcaaatggagatgtgttgatctttccagatatgatcagatataaagggctgacccattttgacgtggacaactttgttgaagaagtgcttgtgaaggatattgactggcttcctagatctcctgagcctatgagtggttcctatatttttgtttgctcccatggaagcagggacaaaaggtgtggtgtttgtggacctgctttgattaaaaggttcaaggaagagataaatgaactgggacttgatgatcaggtggctgtcagtgcatgctcacacgtgggaggtcataagtatgcaggaaacgtcatcattttcagttctgatgccaagggagaagtgactggtcattggtatggttatgttgttcctgatgatgtgcctgttttgctgcataaacatattggacaaggagaagttgtggaccatctatggaggggacagatgggtttatctgtggagcagcagaagcgagctctcgagcttcggaacatggtaaatggtggcgaagaatcccttgaagaaaccagaacagatggtgcttctttcaaccctgcagcagctggtggatgctgccaaggcaatggtggcttcacctgctgccaaactgacctgccaaaggaaaaacaagacaagagcatcatagctgagcagaaccccaagagctctgacaaggagggtggtgctggcagcaagaagggggatacaaagacttgcccagtgcccatctggtttgagacctgggagagagctgacacatatgccgctcttgctgttgttgcagctgccgcagcggtgcttgtctccttcagaatctacaagaacctcaactgaagaacatgggagatcctggaagaggtgaccaaaacaagtataggtgaaacagcgtactgtgataaaagtctgggatgagaataaatttacctgtgcataatgctaggcttaggctatggctagcaaatcgttgtgcaaaatattgttgtgcattgtttacaaagtgatgtttgaaatagaagataacggcgatgaacaagccgttggagataaccttagaacctcaaagtagcttatctggagatggagacggtgttgaaaagatgttgctgccagtgttctcgtatgtgaactccttgtgaacctccactccactgcaatcgaagtttcgatgccttagctgctgtttatcataagcaaggcgatgggatcggcat

SEQ ID NO: 9552 - DNA, 362 bp, Zea mays
  Clone ID: MRT4577_108704C.1
aaaaaccccgggttaaaccacgaacatttaagggggttttgtggggctactgaaaattcgattatagttggaaaaacattttttagcaaaggaaaattttgacccaaatttggtggccccccagttacacgtaattgtttataaaaaatttcttaatgtcctcaaaaatgggagggggttgcctttttttaagtttgaaaaccttttcaaaaactgaaagctcgggggttgttgtttccaacccaaaaaaggcagcccaggcgttaattggaatgcctgcagaaatgaccttttttcttttgttaacagttcctgcaaaaaaaggaatttggaggagcggggaaagcttgtaaaggttttaa

SEQ ID NO: 9553 - DNA, 1922 bp, Zea mays
  unsure (1)..(1922): unsure at all n locations
  Clone ID: MRT4577_108705C.1
aagcaatttccatttccaccacaaccagtctcttcctcgcagctcgcaccaacccgccgccgtctactaactgccactccgcctcctcatggcctcccctacggcaggtgatgctcccctcgcgtctccttctccatctccagcggctgacgcgacggacgcagcccttgccgccgcggccacggtgccggatccagacatatctttcgggtttcgcccggagctcgggaaggagaagctggtcgggacggtgggattccacgagcgccacgtgttcctctgttacaagggcccggaggtgtggccgtcccacgtcgaggccgcatactctgaccgactccctcgcctcctcgccgccgccatcaaggcccgcaagcccaatctgaagaagaccatcaaattcaccatctgtgaaggagaagatggcactgaatcatcaaatggagatgtgttgatctttccagatatgatcagatacaaagggctgacccattttgacgtcgacaactttgttgaagaagtgtttgtgaaggatattgactggcttcctggatctcctgagcctataagcggttcctatgttttcgtttgctcccatcaaagaagggatataaggtgtggtattcgtggacctgctttgattaaaaggttcaaggaagagataaatggactgggacttgatggtcaggtggctgtcagtgcatgctcacacgtgggaggtcataagtatgcaggaaatgtcatcattttcagttctgatgccaagggagaagtgatgggtcattggtatggttatgttgtccccgacgatgtgcctgttttgctgcataaacatattggacaaggagaagttgtggaccgtctatggaggggacagatgggtttatctgaggagcagcagaagcaagctctcgagcttcggagcatgacaaatggtggcaaagaatcccttgaagaaaccgaaacagacggtgcttcttgtaaccctgcagcaactggtggatgctgccaaggcaatggtggcttcactcgagcttcggagcagcagaagcaagctctcgagcttcggagcatgacaaatggtggcaaagaatcccttgaagaaaccgaaacagacggtggtgcttgtaaccctgcagcaactggtggatgctgccaaggcaatggtggcttcacttgctgccatcctgacctgccaaaggaaaaacgggacaagagcatcgcaattgagcagaaccctaagagctgtgaggagaatggcaaggaggggggtggtgctggcagcaagaaggggaattcaaagacttgcccgatgcccacctggtttgagacctgggagagagctgacacctatgctgctcttgctgttgtcgcagctgccgcagctgtgtttatctctttcagaatctacaagaacctcaactgaagagcttgagagatctttgaagaggtgcccgaaacaagtctaggtgaatcagcgtactggtggtaaaacaatccgggacgagaataatctttacctgtgtatagtaatgtgaggtttagaacctcaaagtagcttatctggagatggtgataaaaaggtgttgtggctacggtgttttcgcgtgtgaacgtccactgctatcgaagtttggatgccttagctgctggtaatcgtaaggcatcaagtaagcaacattcactgtgatgatgttgtcttttgtttgggtttttggatgttctggagattctaggttttgaaacaatatcaggttgattgaaaaacataaacatctggaaaaggttaacgcctttcttgtgccaaaaaaaaccaaaccaaaaaaaaaaaaaaaaaaaaaaaaaaaaaaaaggaaggccgctcgactagtgaaagcgatgcttagcgnacgggacggcagtgcatcgtcatagctcttcta

SEQ ID NO: 9554 - DNA, 406 bp, Zea mays
  Clone ID: MRT4577_108706C.1
ccgacgcgtccggtcagccgagtccgcgctgcggccccatcggttctcacgctcgccacaccatgcggacgcatcatccatgttctgccgctgcagcattgagatcgcggcggccttcccctgcatcgacgacgacaacctcccggcatctgctgcatgcgtccgcctcgtgccgccaccgcgggcgtgctgctgatcgtgtcggatgctgtgctcgagtcccgcgggttcactgtgctgcgcacggcggatggcatcgacgtgtcggcgctgaccaaggtgttcttgctcatgggcttctcgctacgtcaggaggagcagctgcagcacgcgctggagcatatccgtctggtgtggctgtcaagcagtgaggacgaagggcggcccgtggcgttcgcgcgctcgg

SEQ ID NO: 9555 - DNA, 416 bp, Zea mays
  Clone ID: MRT4577_108707C.1
aattcccgggtgcgacgagctcatatgtcggcgggcgcccttttttactcctttggtgctttttttgttggttgtggctggttaggaccttttggcttttactgcctgtcgacttcctgccgcctccacagttagggaacataactgcactcgtcagatacgatgccgcaggtgcccatcccaaagcccccccagctgccgacttaacatgacatgctatgatacccctccccaagactggaggacggagcacccttaactgttaaagaccaaccgggccgaaagttaaaccagccaccgggcccaaccgactttatagtttaggtaaacccctaaaccaggccccgttggttgtttgttttttaccaacaccagaatcgggaaaccccccgctgggggaaagccaaccacctttt

SEQ ID NO: 9556 - DNA, 255 bp, Zea mays
  Clone ID: MRT4577_108708C.1
aaggacgcaacagaccctctcctccaccatggcagctaggcagacctgagcaagccggcggatccgagccgggcgcgcgccccaagggcgtgtgcgtgtgtgcgcgccacgccggggggtggcacaagaggaccacagttcacgcgcccacggcgagacaggtgatgaacaacaacctcgacgagacacacaaagacggcgggcctgacaagccccactgcgcacaccaggaagcccgaaccaggcaccgtcaag

SEQ ID NO: 9557 - DNA, 363 bp, Zea mays
  unsure (1)..(363): unsure at all n locations
  Clone ID: MRT4577_108709C.1
acacgatctcggnaanggatatctcggttctcgnattgatgaagaacgtagcaaaatgcgatacctggtgtgaattgcagaatcccgngaaccaccgagtttttgaacgnaagttgggnccgaagccttctggnggagggcacgtttgcctgggngtnacgccgtgctctctcagaggtgggttggtttctcctccccctcttaccaagtcctcctcgggttagggttccttagggttttgtggagggggaagaatgggggggggttgatgtggagtaccgttggtttcgttgggggggttttggctggggncaccagnaaagaagtggttggagaattgcttttttcctcctacggtggaga

SEQ ID NO: 9558 - DNA, 786 bp, Zea mays
  Clone ID: MRT4577_10870C.1
gctagactgaagaaaggagaagtaatatatttggagacacattttaataggtacgagctgtgcttcagtggagagaagcctcggggtattggatcgagctctaatgcatctgatgcagaacctgagaaacaccagagcagtagtcaccattcgcaaaacggctctgtggagcatgaactccgggatgtgttccgatggtcccggtgtaagaaggccatgcctgaaagtgccatgcgctccactggtatcccactaccagcagatcagctcgaggtgttgcaggataacctagaatgggaggatgtgcagtggtcgcagaccggtgtttgggtggctgggaaggagtatcccctcgcccgagttcacttcctctccgggaactagcagcagctgatgttgcagccaacgaaggagctatcgtttcctgtggacaggagaggagcttgccaacattgtaggttttttttttttgctactgtataatgtatgatgcaccctgtcatgtgtacaaagaaagctcaactgttgtaggctgtttgtgttgtgtggcattctactagatcttcacattaaccatatttgttagggttgcttgctcctgcccatgcctgaaagatatattgttggttttaggtcctgataaaataattggcgatttgtaacttaagattagtattgacattaattcaaggtagtaaagaaaccataactctaattgtgcatattgacatactgttctgtggaaaaaaaaaaactgtcttcagttgctatggagaggcaccgttt

SEQ ID NO: 9559 - DNA, 256 bp, Zea mays
  Clone ID: MRT4577_108710C.1
cccacgcgtccgcggacgcgtgggccgccatcttccagggcggagagcacatcatcggatgtgtgcgcagggtgctcgcaatagacaatcgatgctactacgattaagcagttgtaagaggatttataatatggctgatagtcaatttgagagctgcagtggtatagctcaagattatcagtgtaatacttatatttgacctgtgaacagacaaacatactctcgacattattggttagttctgataactgtactg

SEQ ID NO: 9560 - DNA, 467 bp, Zea mays
  Clone ID: MRT4577_108711C.1
atcgactccagattggagaactcgacaccatgaaggtgctgatagatgcccttgcactgctggcgctcgctgcaagcgccgcctccaatacaagcgggggctgaggctgcacagacaccaccgatgcatcaaccgcctccgctctatatgccgcctccgttcaatctgccggcggagcactattcgcagacatggcaataacccactcaaccacgcggactaagcccgtgccatcaggctagatcctgtgacgtgggcagcgacggaagccggtgcctgagacaacgcgacgagttcctgaggcaccaaagcagcccggcggcgacaccctactgctggccacatggccaggcgctagaacatcagcgctgccaccaaatcaggcaggaggagccgctaaaccggtaccaggccacatacgcagtggccctgcaatgattcctgcaacagcatccacatggagagct

SEQ ID NO: 9561 - DNA, 274 bp, Zea mays
  Clone ID: MRT4577_108712C.1
attattttagccaccagaacacagaatgttcttggggagaagggtcgtcggatcagagagctgactgcagttgtccagaagcggtttggcttccctgaaggcagcgtagagctgtatgcagaaaaagtggccacaagaggtctgtgatgcattgcccacgcagagtctctacgctacaaactcttaggagggcttgaagttcgaagggcctgctatggtgtgcttcggttcattatggaaagtgggcgcagaggctgtgatgctgtggtctctg

SEQ ID NO: 9562 - DNA, 795 bp, Zea mays
  Clone ID: MRT4577_108713C.1
cattgggaccctcgaggccggccggggaaatcacgctcttccacacgattacctttcaactactccaatcaccaccaccatcaccatcgtcaaaatgaagtttgcaactgctgccgccgtcttcgctggccttgctgccgcaggccctgtcgaactcagtgagcgccagagctgcccaaaggtctacatcttcggtgcacgtgaaaccactgttcctcagagcaacggatacggaactgctggtggccttgtcaactctgtcaagtcagccttccccggtgctggctcagaggccattgtctaccctgcatgtggtggtggatcagcctgcggtggcatcagctatgacaactctgcttcccagggtaccgcagctgttgtcaaggctgtaactgcctaccaccagaagtgccccagcacccaaatcgtcctcattggatactctcagggtggccaaatcatggacaacgctctctgcggtggtgcaggctccactcttactggcagcgctctcaacgccgtcaaggccgccatcttcatgggcgacccacacaaccgtgccggtcttccttacaacgtcggcacttgccgagcccaaggcttcgctgcccgtcctcaaggcttcacctgctctcccgccaatggcagcatcatccagagctactgcgactctcaggacccatactgctgcaacggcaacgacggtaaccaccaccagcaatacgtcaacatctacggcaaccaggctcttgcctttatcaagagcaaggtcactggcttagacgcggttttttt

SEQ ID NO: 9563 - DNA, 1121 bp, Zea mays
  Clone ID: MRT4577_108714C.1
aaggtcggagcttgtatcaatgacaaggagagcaagctgatgcgtttggaggacagggtggatgaactgattaaagagaaggagcacattagtgtgctgctccggagcgcgctgcaggcaaccaccagtgaggtgttaaaggttgcagaggatggactgagggaagctggcattgagattgggcttgatgagcgaaaggtgcacgggccagggaatgtggagaaggacgaggtctataccctggcaggggctctcgagaataccatgaaggaatcccaggtcaggatcattgagctccaacatcttgtcgaagcactaagggcagaatctggtttacttagaacaaggctagaaggacaagaaaaggagattggtcagctaagaaagcaaataaagcacgttgaagagaaggaaagggtggcaaatgaaagtgttgagggtcttatgatggatgtgacagctgctgaagaggagattaaacggtggaagatggcagcagaggaagaagctgaagctggtagatcaattgagcaagagtttcaaattcagatatcatccctccgcaaggaattggacgaagctaaacaagctatggtggagctagaaaacaagctgaagttcaaggaagagacagctgctgctgcaatggcggcgcgcgatgctgcggagaagtctctaaagctagcagacatgcggtcgtccagactacgcgagaggctggaggagcttaacaggcagctcgaagaatcagatagtagaatagactcggtaaatcgcaatggccataggaggtacatgtgctggccatggcagtggttgggactgaactacaactacgtgcggttacctccagtggaggcagatgagacgtccaatgagatggagctatctgaacccctaataatataggtgctccggcctccacatttatacagatcccgctctttttcagtagataaaggggaacagtagacttttgttttttttggtttgggttcttgtgtagatgtttttttcctaatttattgatgcatgttttgcggaaaactgacgggtaattgtaaaaaggtaccacttgggacatacatagtaaaaaaaaaatgagaagttcattcttaaga

SEQ ID NO: 9564 - DNA, 363 bp, Zea mays
  Clone ID: MRT4577_108715C.1
tctgtttcccacgcgtggccagatttatgttacattacatggtgaattatttcacatcaaacaacaaacatgtaacatactccgtaaatataaatccgattaatcgcgcgcttatgggcgtccagaatccagatacagagccggctacgcgatgacgtggctgctatgctagcacttactggcggggtcctcgggcgcgaacgtgaagtcgccagccgagtagagcgcctgcatctcgccggagagcggcacgaacctgcggaacttgagcggcgcccccttattcgggctggggttgacggccaccgtgcaggcgcgcgccgcgggcggcgacgaccgtggcgcgtacgccttgactcgtgc

SEQ ID NO: 9565 - DNA, 299 bp, Zea mays
  Clone ID: MRT4577_108716C.1
gcatgcgcgcgcgcgcgtgctcgtgtcctctatagcgggcgcgctctttttttttattgtacaaaatagaacctgcattatccattcaggaacttatgttaatttaaaacggcagcgaattctgacgatatgtatgtaaagagatgaacaggggggagcgaggagatgacaccccagttgatggcgcccgccagaccatcagatgggggcggcggtggcaaactgattgctcagcgcaatgcatacgggctgatcgtattggtggggagccagcccactctagtatagctagtataggc

SEQ ID NO: 9566 - DNA, 551 bp, Zea mays
  Clone ID: MRT4577_108717C.1
gggtacccctcggagccggccgggctaaacgcgcataacctaaaaggcagtcgcgctcttgtctaccttcgctggtcaaaccattaacgcattccaccaagtccatgcggagatcgccgctcacactccccgaacgactagcagcacacggagatgactgcagtctcgttatacacataggatcgatccgctatccacggtacgaaacgcatgctgacagctgcactatcttgagacattgctttaaggcatgacgaaacacaatacgcacagacaacatcatcaatataggggaggaggctgttaacaccttgtttagtgagactgtcgctggtaagcacatgccactggctgttgttcatgaccataatcccactgacatcatataggagtggacctagcacctaccgatcagctcttaccaacctgagcaactcattaataacaaggacgaggactcacaacaactctttcacgagctactacaccgtaggcaagtggattgctgacctgtgtctctatcttatcatgactcttgccgaccactgctc

SEQ ID NO: 9567 - DNA, 217 bp, Zea mays
  Clone ID: MRT4577_108718C.1
gggtgggttcaaataaaaactgttgggggataaaaaccattttaaacgccaattgcaccacctccaaccgatacggaggactaaccatggctagcaaagtggccacctccctccaaggagccatggccaaaacacactttttcagcatcatgacacgactgggcaaacacaataaacaatgccccaggccccaaaaagacccccgcccttttaaaaa

SEQ ID NO: 9568 - DNA, 470 bp, Zea mays
  Clone ID: MRT4577_108719C.1
gccggccggtttcagaaaccatcagatagagagagcatattcgatcatgaaggatggctccctcgccacgacgcccaaggtgacgatgctgtcggccacgctgtgctacacgggggagacatgcaaatacactccctgcttcactcctgcttgctcctgcagctttagtgatcgcctctgctacgtcatatttactcctgttgcttgagttgaggccattccgcgaagccacaactcttacatgcatgcgccggccgacgacgacgacgctgcctctcgtgagcttctgttcaagtgatgcatgtttcaaggcatccatggatgctttacgtatatgcgtattaattagccgtgtcagggaaccggacgaagggggtgttgttttatttacgtcttctggtgatcaaataaaggggaaatatatgttggatgtgtgcaatgcagaaaaaaaaaaaaaaaaaaggccccta

SEQ ID NO: 9569 - DNA, 402 bp, Zea mays
  Clone ID: MRT4577_10871C.1
ggttctggtgcggcagatggcgctcgtaccaggatctgtcgagcggagctccataactcgagaccgcgtgagcgtcacgaccgtcctctgagattcgcctgtcgcctgtgccctgtctcctactcgggtagcatgaatgatgatgaactgtcaagcatagcctctaagctgtatcatcctctatctggttctgtctgtactaggatcgtggaaacagaggatgaagcgcacacaacacgctggatcctgaacagactaatgggctgggagcagtcatggctcgcatgacttagggtgtgccatggtccacgtggacccagtggtgggttcgcccctgcttagaagccatgggcattagctctagtgaatacactattcttagagattgatgacacaaacccc

SEQ ID NO: 9570 - DNA, 558 bp, Zea mays
  Clone ID: MRT4577_108720C.1
actccatcagatatagagagcatcgtccatcatggaggctgcctggaaggaactggccgctgcggtggtggccatactgctggttctgcatgtcatggcagctccaccgacggacatggccgaccgctcgccgcgcgaatccgtgcctgatggctccctcgccacgacgcccaaggcgacgatgctggcggtcacgctgagctacacggtggagacatgcacatacactccctgcttcactcctgcttgctcctgcagctttagagatcgcctctgctacgtcatatttactcctgttgcttgagttgaggccattccgcaaagccaccactcttacatggatgcgccggccgaccactactacgctgcctctcgtgagcttctgttcaagtgatgcatgattcgaggcatcacagtggatgctttacgtatatgcgtattaattacccgtgaccggcaaccggacagaagggggtgttgatctatttacggcttctggtgatcaaataaaggggaaatatcatcgtaggatgtgtgtatgatagaaaagaaaagaat

SEQ ID NO: 9571 - DNA, 563 bp, Zea mays
  Clone ID: MRT4577_108721C.1
ctcgaggccggccgggccgggacttcccgtgtttctatctccggcgtttcctgagtactgacccggggagtgagcccaccccgaccactgccatgtacgagttgcggctactggatctactacaactagggagcgacctgcgagtgcatcgacatggacgatgactgggacgacaagagggacacccgcctctctgtcagatacagcatcctcacgctcgaccactctactagctagcaacatggctgacaaatgcgtactagcatcttctggttttcagggcgatattaaatgtctgtgcaagaacctatgtgacagagaattgctataccgactgcactagtatgcaaaaggatgagctgccctggcatggcacagctcctctccaatactcgctggactacgagcgcttcttccgcatattacacctgcaagtgagctccgtgtgcttgacatctaggtcaaaggcagggatgtcagctatgatgcctgatgttcctatgatagaactggttatagtgctcaagcaacacgatccacgtatatcatgtcactcctggaca

SEQ ID NO: 9572 - DNA, 752 bp, Zea mays
  Clone ID: MRT4577_108722C.1
gtatcctctcgaggctcggctcgggaaaaaaaaactccggcaaagcagccgagaccccaagcaccagcgcggcggcggcggcggcggcgaccatggctgtcgggaagaacaagaggatctccaagggaaagaagggtggcaagaaaaagacgttagtttgcttgcctgttatatcccagttcttcagatctagcttgggtcgattgctttctttctttatccgttgctgctgcggttgtgtggttgcgttacttcttttatgcagcgtcgaccctttctctaagaaggattggtatgacatcaaggcaccgtcggtgttcagtgtgcgcaacatcgggaagactctcgtatccaggacacagggtaccaggattgcttctgagggtctgaagcacagagtctttgaggtttgcctagctgatcttcagggtgacgaggatcaagcttacaggaaaatcaggctccgtgctgaagatgtgcagggcaggaatgtgctcacaaacttttggggtatgaattttaccactgataaattgagatccctagtgaagaagtggcagacattaatcgaagcccatgttgatgtcaagacaaccgacaactacatgttgcgtttgttctgcatcggcttcaccaagaggcgcccaaaccaggtcaagagaacctgctatgctcaggcatcccagatccgtcagatccgccgtaagatggttgagattatgatcaaccaggcttctacatgtgacctgaaa

SEQ ID NO: 9573 - DNA, 260 bp, Zea mays
  Clone ID: MRT4577_108723C.1
atagtatatataccgcctgggtattctgaggttgcgagagaacatatatataaaaaacggcgcacctcacaagaagacgaccaccacaaatccattaatgactccactaatcaaaaacatgtgtactgaggctacacatggataaacgacaaaccctgcacaaacttcacatatggactattatatattggctagacatataaatctataggagacctaacagaacgccacaagcaactactgtttatcatgcacaacgc

SEQ ID NO: 9574 - DNA, 607 bp, Zea mays
  unsure (1)..(607): unsure at all n locations
  Clone ID: MRT4577_108724C.1
gagcagtctgacactctctaccgtccgagaccccaagcaccagcgcgggggcgtgcggcggacggcgaccatgagatgtcgaggaagaacgagaggatctccaagggaaataagggtggtaagaaaaagaccgtcgaccctttctctaagaaggattggtatgacatcgaggcaccgtcggtgttcagtgagcgcaacatcgggaagactctcgtatccaggacacaggttaccaggattgcttctgagggtctgaagcacagagactttgaggtttgcctagatggtcttcatggcgacgaggatcaagcttacaggaaaatcatgctccgtgctgaagatgtcgagggcaggaatgtgctcacaaacttttggagtatgaattttaccactgatgagttgagatccctagncgaagaagtgggaaacattaatcagaagcgcatgttgatgtcaagacgaccgacaactacgtgggttgcgtttgttctgcatgggcttcaccaagaggcgcccaaaccaggtcaagagaacctggctatgctcaggcatcacagatgcgtcagatccgccgtaagatggctgagattatgatcaaccaggcttc

SEQ ID NO: 9575 - DNA, 442 bp, Zea mays
  Clone ID: MRT4577_108725C.1
ggggggacgcgtccgcccacgcgtccgaaatgatgcgtggaccaatgtttgatgctggcgctcttgccctcgggataatggattagcgggtggcttgttaaaaaaaaaaaaaaaaaaaaaaaaaaaaaaaaaaaaaaaaaaaaaaaaaaaaaaaaaaaaaaaaaaaaaaaaaaaaaaaaaaaaaaaaaaaaaaaaaaaaaaaaaaaaaaaaaaaaaaaagggggggccgttttaaaggaccaaagtttacttacccgggcatggaaagaaataacttttttatgggggcaccaaaattaaattcacgggccggggtttaaaaacgtggggactggaaaaaccctggggttaccaaattaaatcggtttggaaaaaatcccctttttcccagttggggtaaaaaaaaaaagggccgaaccaatcgcccttccaaaaaggtggg

SEQ ID NO: 9576 - DNA, 586 bp, Zea mays
  Clone ID: MRT4577_108726C.1
cttttcgatctcgcccactccgtctcccttacaggcggcggcggccagggctagcgcacgcggcggcaaccatggcagtcggcaagaacaagaggatctccaagggaaagaagggtgggaagaagaagaccgtcgaccccttctctaagaaggattggtatgacatcaaggccccgtcggtgttcagtgtgcgcaacattgggaagactctcgtgtccaggacacagggtaccaggattgcatctgagggtctgaagcatagagtctttgaggtttgcctagctgatcttcagggtgacgaggatcaggcttaccggaaaatcaggcttcgtgctgaagatgtgcaaggcaggaatgtgctcacaaacttttggggaatgtcatttactactgataaactcagatccctggtcaagaagtggcagacactcattgaagcccatgttgatgtcaaaacaactgacaactacatgctgcgcttgttctgcattggcttcaccaagaggcgtccaaaccaggtgaagagaacctgctatgcccaggcttcccagatccgccagatccgccgcaagatggttgagattat

SEQ ID NO: 9577 - DNA, 431 bp, Zea mays
  unsure (1)..(431): unsure at all n locations
  Clone ID: MRT4577_108727C.1
acgcgtccgaaaacgcggcagaccccaagcaccaggtggcctcggcggccgcgggtaaccagggttgtcggaaagaacaaacgttgttcgcggggaacacagggggtcacaaaaaaaccggcaaccctttctcaaaaaaggtttggtatgaaatcaaggcaccgtcggtgttcattgtgcgcaacatcgggaagactctcgtatccaggacacagggtaccaggattgcttctgagggtctgaagcacagagtctttgaggtttgcctagctgatcttcagggcgacgaggatcaagcttacaggaaaatcaggctccgtgctgaagatgtgcagggcangaatgtgctcacaaacttttggggcatgaattttaccactgataaactcagattcctagtgaagaagtggcagacattaatcgaagcccat

SEQ ID NO: 9578 - DNA, 1253 bp, Zea mays
  unsure (1)..(1253): unsure at all n locations
  Clone ID: MRT4577_108728C.1
gggtacctcgaggccggccggggccaggccactcgcacaccaagatatagagattgctggtcgagaagaagagatgttacatatataataactactgtaggcagcggcatctcctgctgggacgaagattcaagaagctagctaagagagaagggcataacgagataataagcagcgcgcgaagatgcaagactgggcgccggtgttcgtctcgctggtgctcttcatcctgctgtcgccgggcctgctgttccagatgccgggcaagtgccggatcatcgagttcggcaacttccagaccagcgccatctccatcctcgtccacgccatcctcttcttcgccctcgccgccatcttcctcgtcgccgtcggggtgcacatgtacctcggctcctaggcggcggcgcggggcgccgtaccttctctctctcgccgcgcgcgccatcgttctcttcttttatgttctctctctatatatatagtctgtatgaatgaatgatatcatataataatgtacgtaccgtcgtccatgcatttgcccttanagcagagccgccgacaacgctctctaccgtccgagaccccaagcaccagcgcggcggcgggggcggcggcgaccatggctgtcggaaagaacaagaggatctccaagggaaagaagggtggcaagaaaaagaccgtcgaccctttctctaagaaggattggtatgacatcaaggcaccgtcggtgttcagtgtgcgcaacatcgggaagactctcgtatccaggacacagggtaccaggacagattgcatagctagagtgtcccctgaagatggcctagtggtgggttggatctttcttcatgagctgaggcggcagttgtggaactcaggcaacacgaatattgacgtcttaaacgggatagcttgggatgaaagaaggcacagattatttgtgacagggaaactgtggccaaagctatatgagatcaagctacgggcagtagatggtccagcagatggatctgtagaaaagctttgtccaaaagccagcttctatcgctgaagagtgtagaaccgcatatacactgggtgtgctaacatgggccttcatttgtttaaacgcacgatgcgaaggatgtggagatgtgagtacgtacatgtttgatctggtaccactgtcatatatatatacacccatgagttagtagatgtagctgtacattgttgtgacctgtatgaattttgatgatggctgtgttgtttgtgtt

SEQ ID NO: 9579 - DNA, 1455 bp, Zea mays
  Clone ID: MRT4577_108729C.1
ctcgaggggccggccgggaaaaaaaaaaaaaaaaaaaaaaagggcctcgacttctctccactccaaacggccgcatatgggccgaactgacttcaggtagcgcaaacatgcctgaaagcacgcatatgggccacaccgcatcctctgcgtccatccgcctcttgggcgcctgcgtaccgcacgatcgaaccctggaaaccctcgaatcaaatatatatgtagtccgccagccaaactgaagttctcgagcacctgcagcgccgccagacactccgtagtctgtaccccaagcaccggcgcggcggcggcggctaccatggcagtcgggaagaacaagaggatctccaagggaaagaagggtggtaagaaaaagaccgtcgatcccttctctaagaaggactggtatgacatcaaggccccatcggtcttcagtgtgcgcaacattgggaagactctcgtgtccaggacacagggtaccaggattgcctctgatggtctgaagcacagagtctttgaggtttgtctagctgatcttcagggtgacgaggatcaggcttacaggaaaatcaggctccgtgctgaagatgtgcaaggcaggaatgtgctcacaaacttctggggcatgaattttaccaccgataagctcagatctctagtaaagaagtggcagacattgattgaagcccatgttgatgtcaagacaaccgacaactacatgctgcgtttgttctgcattggttttaccaagaggcgcccaaaccaggtcaagagaacctgctatgctcaggcatcccagattcggcagattcgccgcaagatggttgagattatgatcaaccaggcttctacatgtgaccttaaagaacttgtttctaagttcattccggaagttattggcaaagagattgagaagtctacctccagcatcttcccacttcaaaacgtcttcatccgcaaggtgaagatactcaaggcccccaagtttgatctcgggaagttgatggaggttcatggcgactacaaagaggacgttggtgtgaagcttgagaggcctgtcgagggtgatgaggctatgcaggaggttgctgctgccgagtagtttatttgctacttctttatctagacgaatctggacaggaggtcccttatgacgcgaacttcataaaattcccaagtttgatctcgggaagttgatggaggttcatggcgactacaaagaggacgttggtgtgaagcttgagaggcctgtcgagggtgatgaggctatgcaggaggttgctgctgccgagtagtttatttgctacttctttatctagacgaatctggacaggaggtcccttatgacgcgaacttcataaaattgtctggcgacatgttttcttctgtccctgccctaaactctaaacccaaaggttattcgtaacaagtgctttaagattattttgtttaaaaaaa

SEQ ID NO: 9580 - DNA, 233 bp, Zea mays
  Clone ID: MRT4577_10872C.1
attcggctcgagccgggacgacctgtacactagacggcggccgcccttgataaatggatggtttctaagaagctaagcatgtaaacagacagggtagaaccagcctatgcgctatccaacacgaacatatattacatcctaatagaagaaccattgaaagatgccgggaagaataggtatctcgaactcacacacactgagtcagcaaaagtatataacaaaagtgcaagaaa

SEQ ID NO: 9581 - DNA, 272 bp, Zea mays
  Clone ID: MRT4577_108730C.1
aagagcaaccacatgttttctttgcataaaatattaccagggttccatgggcaaagagtgagtttaagcttccaagcaccataaaaaaattgtttaaagaaacgaacaaacctttatgttggcctaggggaggctcacttcaaacccatgggccatggcccggcccctatatgaaatggcttagacagagccttatcaggcccttggaaaggcacaacttctaatggattggccccaaaagaagggtttaccccgagcccgagctaagtttt

SEQ ID NO: 9582 - DNA, 1344 bp, Zea mays
  Clone ID: MRT4577_108731C.1
ggcaatatacggtgcgtgtgggggcggcggcgacgagggttttgctgctccgtacaccgcgtgcagcggcgactcgaccgcagctggtcgccgccccggatcgaggagggggaggagccggcggaggctcctgtggtggctgcgggggcgggagcgggagcgccatgaggggcggtggccgacaactctctctaccgtccgagaccccaagcaccagcgcggcggcggcgaccatggctgtcggaaagaacaagaggatctccaagggaaagaagggtggcaagaaaaagaccgtcgaccctttctctaagaaggattggtatgacatcaaggcaccgtcggtgttcagtgtgcgcaacatcgggaagactctcgtatccaggacacagggtaccaggattgcttctgagggtctgaagcacagagtctttgaggtttgcctagctgatcttcagggcgacgaggatcaagcttacaggaaaatcaggctccgtgctgaagatgtgcagggcaggaatgtgctcacaaacttttggggtatgaattttaccactgacaaactcagatccctagtgaagaagtggcagacattaatcgaagcccatgttgatgtcaagacaaccgacaactacatgttgcgtttgttctgcatcggcttcaccaagaggcgcccaaaccaggtcaagagaacctgctatgctcaggcatcccagattcgtcagatccgccgtaagatggttgagattatgatcaaccaggcgtctacatgtgacctgaaagaacttgtttcgaagttcattccagaagttattggtaaggagattgagaagtctacctccagcatcttcccacttcaaaacgtcttcatccgcaaggtgaagatactcaaggcccccaagttcgatcttgggaagctcatggaggttcatggcgactacaaagaggatgttggtgtgaagcttgagaggcctgtcgagggagatgaggctgtgcaggaggttgctgctgccgagtagtttgtttgctacttctatatctaggcgagtctggacattaggttgcttatgacgtgaacttagagttgtctacttgttttcatctgcccctaagattttgtctggaaacaagtttaaaatttaagattattcgcaacaagtgtttaagattactcgtggtgatcttctgagttcgcgtactgcttttctaagttccttgcaccctcatttttgtttggccatggataatttacgttctcgttctgtgctcttcttatttattgttagctgacactggtcatccagaattgtaacttttaacactatcagttaaactagtactacctcc

SEQ ID NO: 9583 - DNA, 594 bp, Zea mays
  Clone ID: MRT4577_108732C.1
ctgattacatcctttttttttctcaaaacaaaaatatgattacgtactggttgatgatgatggcatgtcactgcaattcaatcaaaactggcacaacaaaagaattacattctttacacttaaatcctcactaggatctttactctgtttaggagtagattccaatttccaaatgctgcgagataaaggggggtccttgaggaggacatcctggaaggagatcttcccctcaatacgcgcaggcacggcactggcaggacttgaatcgcagtgcaaccgacagaccttggcactgtacaaatccactgccagatttcatttctgaggagataggccaagtgaagacgcaatttctgccaagtgctgccctgttgaattcgttatgaatgctatagggactacaggctgaaacacgaactcatcatccaccacctggaggtcatagcatgttttgagttccattgctttagactctgcagcttcagcctccttacgtagtatctcagcttcttcgttatcatctgtttcagctgcagcagtcagttctgctctagcagcagcacagtctaaccgtagtcttctgtaacttgtcaa

SEQ ID NO: 9584 - DNA, 1148 bp, Zea mays
  Clone ID: MRT4577_108733C.1
gggaccctcgaggccggccgggccgcagagccgccgacaacgctctctaccgtccgagaccccaagcagtcaagcaccagcgcggcggcgggggcggcggcgaccatggctgtcggaaagaacaagaggatctccaagggaaagaagggtggcaagaaaaagaccgtcgaccctttctctaagaaggattggtatgacatcaaggcaccgtcggtgttcagtgtgcgcaacatcgggaagactctcgtatccaggacacagggtaccaggattgcttctgagggtctgaagcacagagtctttgaggtttgcctagctgatcttcagggcgacgaggatcaagcttacaggaaaatcaggctccgtgctgaagatgtgcagggcaggaatgtgctcacaaacttttggggcatgaattttaccactgataaactcagatccctagtgaagaagtggcagacattaatcgaagcccatgttgatgtcaagacaaccgacaactacatgttgcgtttgttctgcatcggcttcaccaagaggcgcccaaaccaagtcaagagaacctgctatgctcaggcatcccagatccgtcagatccgccgtaagatggttgagattatgatcaaccaggcttctacatgtgacctgaaagaacttgtttcgaagttcattccagaagttattggtaaggagattgagaagtctacctccagcatcttcccacttcaaaacgtcttcatccgcaaggtgaagatactcaaggctcccaagttcgatcttgggaaactcatggaggttcatggcgactacaaagaggatgttggtgtgaagcttgagaggcctgtcgagggagatgaggctgggcaggaggttgctgctgccgagtagtttgtttgctacttctgtatctaggcgagtcaggacatgaggttgcttatgacgtgaacttatagagttgtcttggctacgtgttttcatctggccctaagattttgtcttgaaacaagtttaaaattaagattactcgtggcgatcttctgtgttcgagtactgatgtactaagttcctttgcatcctcatttttgtttggtcatcgataatttactttctcattcatatgagatgctgttctctgcttatttattgtt

SEQ ID NO: 9585 - DNA, 186 bp, Zea mays
  Clone ID: MRT4577_108734C.1
ggcctgcttttttttttttattttcttaattgtcccgctgtcattcaccattgtcagcgtagatgaaaagaccacttttttatgcacgtgctccgacaaccggtacgatgtactctgacactcattgctctctatgtaaggttgtggacaatgtaagtatcttggctttcagtaagaagaccatcc

SEQ ID NO: 9586 - DNA, 1175 bp, Zea mays
  Clone ID: MRT4577_108735C.1
ttgggaccctcgaggccggccgggctcccgcatacccgccgacaactctctctaccgtccgataccccaagcaccagcgcggcggcggcgaccatggctgtcggaaagaacaagaggatctccaagggaaagaagggtggcaagaaaaagaccgtcgaccctttctctaagaaggattggtatgacatcaaggcaccgtcggtgttcagtgtgcgcaacatcgggaagactctcgtatccaggacacagggtaccaggattgcttctgagggtctgaagcacagagtctttgaggtttgcctagctgatcttcagggcgacgaggatcaagcttacaggaaaatcaggctccgtgctgaagatgtgcaaggcaggaatgtgctcacaaacttttggggtatgaattttaccactgataaactgagatccctagtgaagaagtggcagacattaatcgaagcccatgttgatgtcaagacaaccgacaactacatgttgcgtttgttctgcatcggcttcacgaagaggcgcccaaaccaggtcaagagaacctgctatgctcaggcatcccagatccgtcagatccgccgtaagatggttgagattatgatcaaccaggcttctacatgtgacctgaaagaacttgtttcgaagttcattccagaagttattggtaaggagattgagaagtctacctccagcatcttcccacttcaaaacgtcttcatccgcaaggtgaagatactcaaggcccccaagttcgatcttgggaagctcatggaggttcatggcgactacaaagaggatgttggtgtgaagcttgagaggcctgtcgagggagatgaggctgtgcaggaggttgctgctgccgagtagtttgtttgctacttctatatctaggctgagtctggacatgaggttgcttatgacgtgaacttagagttgtctacttgttttcatccgcccctaagattttgtctggaaacaagtttaaaattaagattattctcaacaagtgtttaagattactcgtggtgatcttctgagttcgagtactgctgtactaagttccttgcatcctcatttttgtttggccatcgatattttacgttctcgttctgtgctctgtttatttattgttagctgacactggtcatccagaattgtaaactttt

SEQ ID NO: 9587 - DNA, 488 bp, Zea mays
  Clone ID: MRT4577_108736C.1
aataaagaacacatataataacacaatgacacaaacggaaatgcgaacgaacgaacaccataaaagaccctataccaataccatcacccaaactgccatgcgtcgaaaatagatagaacagaaagaacaggaacgaaccaacacaagacacaacaagctggagacgcggcaagcatggggcaccagcgccactgaaaccgtgcccgaccaccattacaacaaagacgcacacttaatttagtccatatcactatcagaccgcaccgaacaagaccacccaacagttactgatatatacgcacctgtataggcactaaatacacacacagagagagacgccagtaaccttatcatactgaacatcaaaaatccgagtacatacttacatgtacactctcaagaaagtaccccatcacgaaagcactccgattccctgagtcctggccgacgccgttcagttcgcacaggctcactcgataaccttcttt

SEQ ID NO: 9588 - DNA, 313 bp, Zea mays
  Clone ID: MRT4577_108737C.1
agtatatatatagtatcaaatcatatcatcggggaccaattaatatatgggtacaggagatgcaatcggatcaaccaacatgcagggagacacacgttccttcatgagcacaaagactggcgccaaacatgccgagagaggtaggcaaccggagaactctggtttttttttttttaacacaccacacaatacctatgtatgggaggcaactcgggctcgcttattattggtcaaccaccaccacaagctcgatagataataatcatatccacgggcgccgatcgatgtgatcagcagatgcaggggtcgcact

SEQ ID NO: 9589 - DNA, 420 bp, Zea mays
  unsure (1)..(420): unsure at all n locations
  Clone ID: MRT4577_108738C.1
cggaannccagggtccgagcccacgccgtacggcgtgcctgttgtacccggctttttagaccgcaactatccattcgcttgcgaaactatcgcattgggtggttcgtcatggcgcgccatgcgtcacccgtggcaaatactttaacacccaagggtcttataaatggtgagtattgcagtgcgcgtgggggagatttgtcatctcatgccttcagacgcctgcagcgaacatactaccaaacacannaccagggtgctcttctctttttgatgaagatccttcnttattgcaatantgtggagaatccctcaatctttcttggtcagcgaacctcgtgacatnnntcttcagggagggttcttcgctcttttgtgatcaatcccgtgccttcttggaaaaaaggaggaaaccacaatcat

SEQ ID NO: 9590 - DNA, 956 bp, Zea mays
  unsure (1)..(956): unsure at all n locations
  Clone ID: MRT4577_108739C.1
acggcggcaacgccactgctcgcgctgcagctggccctgctggccgccttggttatggcgacggacccttcaccttctccggagctcgtcgagctgacgctcctcaccggcgcgcgggagaagggcgcagtgtgcttggatggaagcccgccgggctaccacttgcagagaggcttcggctccggatcccacagctggatcgtctatcttcagggaggagcttggtgcagcagtaacaccacagacacagaaacttgttccgagcgtaagatgaccgcctatggctcgtccaagcttatgggagcagtaacctttgatgggatattcagaaaccagcagcctcagaatcctgatttctacaactggaacaaagtctacgtaaggtattgcgacggggcgtcattttctggggacgcggagcggacgcgtggggacggaactaagctgttcttcagaggatcgcgcatctgggacgcagtcgtcgatgaactcatgggaaaaggaatggacgccgctgaacaggccttgctcgcaggctgctctgctggcggtctagctacgctactgcactgcgacgatttccgcgcgaggtttccgcaagaggtcccggtcaaatgccttcctgatggcggattcttcctggacataaaggatttatcaggagaacggcacatgcggtcggtgttcagtggagttgttcagcttcagaatgttagcggagttctgcccaagcgctgcctggcgaagaaggaccagcagaggcactgtttcttccccgctgaacttatcaagagcatcggcaccaacacgttcatcgngaactcggaatacgattcttggcagatcgcgaacgttgtcgcgccggacggatcctacactggagacgcgtggacatgctgcagagacaacattctgaactgcagttccgagcagatggacgtgctgcatggttcagg

SEQ ID NO: 9591 - DNA, 203 bp, Zea mays
  Clone ID: MRT4577_10873C.1
cttcacaggtccacttccttgcagttgaactcaagcaatataataagtcaacgggccgaaattactcttgagaggaccttcactaccacgtgagcgggcagcaggtcaaatacaatcaatattgacaacgaccctgcaatcactagaaacaagcacaacaatagggttgcaattttcacatatcctcaatcacagcccaacga

SEQ ID NO: 9592 - DNA, 417 bp, Zea mays
  Clone ID: MRT4577_108740C.1
ttccttttttgtatttaagtattcattatattttgggggcgggggactttctaatcgggaaaaacaccctctgactaggaaaaatattttaatttttttttttctattggggggcccaaaaatctgggatataaaagtctcggaaaaaaaaccctcgggtttcaccccacgtttataattcttaacaagatacactccccctttgtttgtaaaaaaccgggccccctttcttaatgttttcgaagggttaacccccccttttgcaaaccttttggggaaaagggtggggccctccccccccccgttctttttaattttgaccccaaactcttggccccttggaaatattttgaaaaccctcggggctcccttttgaaaaaaaaaaaaaaagccccctttcttttttccccctcaggg

SEQ ID NO: 9593 - DNA, 294 bp, Zea mays
  Clone ID: MRT4577_108741C.1
tatgatgaaaagttctgccacttgatttcagttcctcaaaactctgaatccctacgctactgtgctggcatggaaataaaatgaagagtgcatttctgttcataagagcctgttgcgttcctacggaacggtggccctaaggattctagatcggattgtttgcctaattaatataagtatccataaattggaatggatcctggttgcattctgaaacaactgaacagctctaaggtcttattcgtttgtatcggattgcatctgtaatcgtttcaactaattaaagtttatatt

SEQ ID NO: 9594 - DNA, 594 bp, Zea mays
  Clone ID: MRT4577_108743C.1
atgccgccgcgcacaaggaaaatcgcgcgcaagtctacaggaccaattggcgtgcctcgccatcaactagctccatggcatgaggatagtagtagtggtagcaatgatcccatcggagatctggaagctcagatcctgtcggaatgggagccggaccttctggagcagcggcttgctagccatcaagttacctgggacgaattcaaactggcatttcgggagcactatattcctgaaggagtgctccatatgaaacaagaagaatttatgaagcttaaacaaggtggggatactgttacacagtatctaaacaagttcaaccgcttgtcccagtatgccatcgatcaggtcaacactgatctgaagaagagaaattgttttatgagaggtctcaatgaccggctgcagcgaaaaatggccacctgcctcgacctctcttatagcagggctgtcagcacggcgctggcagttgaagccaaatatgcaggcccaggaaaatcaaagggctatggaggtgacaggcccaaccaggggcctgagaagagacaaagagtatatgaagccatcataccggagatccaagatattccggtg

SEQ ID NO: 9595 - DNA, 413 bp, Zea mays
  Clone ID: MRT4577_108744C.1
ctcctctttcatctcttccacagggggctccataattcttttccctctaaccggccgacctttcttttttttttttttgccatcaacctttcagagtctataaattcatgttacttcatatactcttcctcataattacactaacccaggcaggccatcattactccttttcctcttacccaaactcaccagacaaacctttatcattacacatgctaacttattcatttttaactaactctccccatctcatttcatctcccacctattatttcaacattcagacgcgtttactcctcattccttttcatacacatacatacccagctaactcctcacctttacatttaatcatcttcacaaatacttcctacataaaattgttatcacctcacaaatgcacacaatatact

SEQ ID NO: 9596 - DNA, 463 bp, Zea mays
  unsure (1)..(463): unsure at all n locations
  Clone ID: MRT4577_108745C.1
aatgatttagaacagaacgnagcagccaaggaggccgggctccaagggagccaggaagccgaaacaccccccacccggccaacaccaccacgccaacaaagccaccgaggcgaacgcggcgacggcgacggcgacgcgcgcggcggccgacgacaggggcgcgggcgccccgacgcagacggaganggaggcggacccggagaaccagngcgagcacacggngaacgggcggacggggcccaacnggaagggcggcacggacncgaccaacggcgagacgcagcngggccccgacggcacgggcaaccggaaccgggaccnggcggggcggggcggccncaagggcgccggccacgacaaccacgagcgcggcaaccnggacaacaacagcggacggggcccccgcaggagccaggcgcccngcgccaggaaccncaccnccgacggcaccggcgcgcaccac

SEQ ID NO: 9597 - DNA, 1436 bp, Zea mays
  Clone ID: MRT4577_108746C.1
aacaccaacggcgtatgtaagcgcgcagtggtatgtagctcgagagggcagatcagctgtatctgtcaataatctacacaagggctctcactccagaagggaggtggtgcttagattacagcctaagatttctcatagcatattctttgcgaccacggccggattgggacagtattgctgcatcatggcaggctcaggtgtctgtgcctagcaagggggcgcaatcacagtcatcacatgcacaggcaatggattccattggcaggatggcagtgtgcctgccggacatgcaggtggtgcagagtttcacatggcggcggtctcctcctcctcctcctcctgctgctgccgctgtatgctgccgagaatctcgtgcacggcggtggcaatgtcctcgacagagcccatcttggagtcatcctccaccttgaggctgaaggtgtagaggaccatggcgtcgacggcggcggtgacgttgaggtggagcggcgggacgcgcagctggtgcagcccggcgacgagcttcaggagctgcttgggccggcggcgcgccagcaccttgaggctggcgtggccttccaccatcgtcacctcgatgtccgcggccgcgacgtcgtggccgcggcatttctctccgccgctgctgctcgtggagcttgaggcggtggagtactgcgggaagctgaagaagccggcgaacgggggggagcagctggcgccgcctgctgctggccgccgctcccggctctgcttcaggctcttttggacctccagcgactggagcagctgctccagctccctcacgtagttgatcgcgccacccacgatcgatgcttggtcacccctgtgcgcgtgcgacggcggcatgagggagcggagcacggcgaggtactcgttcatctggcgccggcggttgcgctcgacggcaatgtgggtgatccgctggctctcgatctcctccttgttcttgacgaccttggtgcgcctccgcttcctcctccccgccgccggctcgggcgccgccttcctgctgccgtggtccgtggaggcggcgtccgaggaggagtggtcccgcgagagcgcctccccccagtccctgtcgtcccccacggtgggcgcggcccagcaggtgtcgaggtcgtgctggtcgacccactcacccgcggcgcagacatcgccaaaccctcctcctcctcctccccctccctgcagcaggtcgctccacggcaccgcgtacggcgagtccccgcggccgcagccgaagtggcccgcctggggctgggagaacaccacggcctccagcgccattgcttgctactcgatcccagacccagatagacacgcccgcgcgggttggtggtggtggtgtgcgtgtgacggatggacggatggatgcgaacgaacggctaggtggcgcgcacgggcacgggggcgag

SEQ ID NO: 9598 - DNA, 225 bp, Zea mays
  Clone ID: MRT4577_108747C.1
tacgtaccactataaacagaacaagcacaatcctgcaccagcaaccgaagcataaagactgcgggtgcttatgctccttggtgtatgtgcaggtgctgctaccgctaccattcaacgactatgctcacacgatcctatagcttccttccttaacctgtcactatcaccaactgtgtcttcggaatgagacaaccctataccctaccctaccaatccaacatgcaa

SEQ ID NO: 9599 - DNA, 343 bp, Zea mays
  Clone ID: MRT4577_108748C.1
gcgagcgagagggatcggtcgtggtcggacggcgccgcctacgcctgctgcgtcccggatagccccgcgcgcgtgcagtcttcgcgtgcggcacgcgctccattctctacggcctccttgttccagctccaggcggacaacacagatggcctgtctagcagggtgacgtgcggactacaccggcgaacactggcacccagtctgctcaggagatgcctcccccatcaaccccacgaaatcaacgggatcaagggcgtctgcccgtcaggacactctccccacgacggaggttgtacaaaggcacgatccaggccaccactcgaccctgctgacaccccgcgct

SEQ ID NO: 9600 - DNA, 244 bp, Zea mays
  Clone ID: MRT4577_108749C.1
cagctcgcttcatctaccacttccttctccaccaactactcatcttccattaagccggataactttaaatttacgacgtcctccaccgccccgcccgccccttcttcttccacctccccttacaacgaataattcctcctccgccaccttaacaacccctttcaactctccgctatccttaacttaccactaccacccacaccacatacccccggttacctaaagatcacataaaaagcaccat

SEQ ID NO: 9601 - DNA, 295 bp, Zea mays
  Clone ID: MRT4577_10874C.1
gtcctacatcgcaagaagtgtgtctctcacaaccacgcttacgaacgcgggcatggggcttaataactcttacatagaattaccttgattcattgcactacccgacgccgtcttactcgataactcgaaactgcttgtctttacaaacgtcattaagcttggcacatatataacctgctgcagctactgtaactataaatagatccgtgatctatctgctcttgcaaaaaatgaaaaacatgtactccgtatttcatcccgcctataattgagcatttaatacattatttttaac

SEQ ID NO: 9602 - DNA, 160 bp, Zea mays
  Clone ID: MRT4577_108750C.1
cccatgcatccgcggacgcatgggctgacgcctgtgctacttcatagtaccgtgtactcctatcctattgtactaataataataatagtataatacgataggagtacacggtactatgaagtaccccacgcgtccgcccacgcgtcagcggacgcgtgcg

SEQ ID NO: 9603 - DNA, 191 bp, Zea mays
  Clone ID: MRT4577_108751C.1
gtacgtaagctcggaattcggctcgagggcacaacagcggcttgtgcccacgacacaaaacaccgctcaaccggcagccacatctgcgacagccgacaaaccggcgttgggcagcatagcccacacaggacagccaccgctactaccacatgtgctcacctgagcaccgcaatgcatgaacggcagcaccg

SEQ ID NO: 9604 - DNA, 276 bp, Zea mays
  Clone ID: MRT4577_108752C.1
agcggacgcccgacaggatgagcattcaaaacacaccaagcgaagctcactaggggcgttttatacaacaatggctaccaagctattaaccctccttgcgcttattgcccttattgatagcgcaacaaatgcgtatatttttccacattgcatatttgctcctagtgccattattccacaagtcctcccacctagatcttaaaagggcttctgacacctagctgtgcaagcctacaggctacaactagcgctaacggagaagtgtcttataacaac

SEQ ID NO: 9605 - DNA, 235 bp, Zea mays
  Clone ID: MRT4577_108753C.1
cattgggtccctcgaggccggccggggatgctcctcattcttcctcctgtgctctctctgattgtggctcccctttgtgggaaggaacgatgtactagatctttatcatggttgagtatgacgttggacttggagggctgccttctatatcatcatcttgcgattctcgaaaaacagggctcttcctcaaggagtatgataatcatgaatcggaacaggtccttctctactctct

SEQ ID NO: 9606 - DNA, 309 bp, Zea mays
  Clone ID: MRT4577_108754C.1
aaacacggttggtcttaacggtgccaactccttagctggcaatcccatgacaaatagccctggaatcatcaacggaatgggattcggggctatgggtggccttggtcagcagatgagaacagggaaccacttttttttggatcgactctatacttttttgtcgatgacgaccgaacctctctgcataaaaaaaaaataataaaaaaaaaaaaaaaaaaaaaaaaaaaaaaaataaaaaaaaaaaaaaaaataaaaaaaaaaattaaaataaaaaaaagaatagaatattaataaattaataataatatt

SEQ ID NO: 9607 - DNA, 154 bp, Zea mays
  unsure (1)..(154): unsure at all n locations
  Clone ID: MRT4577_108755C.1
cccagcgtncgngaaagggattgtcaggaggacttggaagcagtcattacatgaagactttatgtcgacaattccttaaggtagcaagccaacactgttggaccatacacacttggacctcctttgcgcgtctgacgctgtaacaaactatgtt

SEQ ID NO: 9608 - DNA, 210 bp, Zea mays
  Clone ID: MRT4577_108756C.1
cgggtcgatcccatcgcgtccgcggacgcgaggagcctgcgttatatgctaaaaaatatttaaaattttattataattaaaatataaaaaaaatttttatttagggctgacaacaaaaaaaatccaaaactataaaatcacatacttgcgacgtccatcctataatatcagggcccccaaattcatgtttccggccaactttcttcttct

SEQ ID NO: 9609 - DNA, 331 bp, Zea mays
  Clone ID: MRT4577_108757C.1
ctttgggctgatttatgtgcttgtggatgtgcgggtggatgtgcgggccgatcagcattctcctgtgtctcctaatgagagttagccgtttgggttgattcctgagtgtaatcatggtgctcctcatttaaattagtacaaggcgcatgattctgagcctgcatctggtgtgcgtagtcgtcgttagggtactggaggatctcggcggtagtgagaatggtagggtgagtattagtattcaatcgctgagttccgcgaacgtgatcattacgtaggtgcggagtgcggtggatgtaacgcgtcgcgagtactggtcttaggtggtgtcgga

SEQ ID NO: 9610 - DNA, 428 bp, Zea mays
  Clone ID: MRT4577_108758C.1
cttggttattgtttagcgaaccggcttcagttaaaccacaatgcttgtgcgcacataacaagcgaaccttcctttgggttccgaagatattcagctcaccctacttgggcgataatagcactcaaggagttgcattggatctccaatagaataaacctctttccaaaaaaaaaaggacgctctaaaactttccatgagcggttattctgtgccagctatttttttattgaagggctcaaggacgggggccaactctttcctgatttccttgaaaagaaggacctggtacacgaaccagccgggggagccaagcccaacagagctccatgattttggggagcagcggcactgtactgatggcgcccaccaccacggaccatcacccaaagggggataacggggccgcctccgtacaataggactggggg

SEQ ID NO: 9611 - DNA, 2277 bp, Zea mays
  Clone ID: MRT4577_108759C.1
atggcgtggcaaggatggagtcatcgacatagccaaatatccaactacggatgcagcagtccgcctaatggccctaatcccattgaggataaagcggagaaattggtagcagaagcagctgggtatggttcacagttggttttgtttccggaagtctttgttggtggctacccacatggatctacctttggactggttgtcggcaatcgcactgccaagggaaaggaagactttcagaagtatcacgcatctgccatagatgtgcctggtccagaagtgtcccgcttatctgcattacccggaaattcgcccacgcgtccggtgataggggtggttgagagggcaggatatacactttacaacacggtgctctccttcgatccactgggaaaatacctagggaagcaccgcaaggtcatgcctactgcactagaacgtgtattctgggggtttggagatggatctacaatacctgtctacgatactccgattggaaaaatgggtgctctcatttgctgggaaaacagaatgccacttctcaggacggccatgtatgccaaaggtattgagatatattgtgctcccacggttgattgcatgccaacttggctgtcttctatgacacatatcgcccttgaagggggatgctttgtgctgtcagcgtgccagttctgtcgtagaaagaactaccctccccctcccgagtacacattttgtggcctagaggaagagccatccccggaatccgttgtttgttctggagggagtgtcatcatctcaccattgggaacagtgttggcgggtcccaactacgaaagtgaggcccttctcactgctgacctggaccttggagagattgttcgagccaagtttgattttgacgtggtgggccactactcgcgacctgaggtgctgagtttagtggtgaagagcgatccaaagcccgccgtctctttcatctcagccgctggtagggatgatgactatgtgcagacctaatgacaaacatatctttggtctttagcttccttatacggcaatcgcatgcatctgtataattgtgggtttccggaacgttgcacgttccgtcagaataataataaactgttatgtacaataaaatagtaacaataaggctttgttcggttattcccaattttcctcgaggccggccgggcgcctcgaggccggccgggctagcttcagaacgaactaaaacccgcgatctgaagcgactagtcgaaggcggcggcggcggcgatggggagcgacctggagacggagaagaagaagaccccggtggcgctgatgcccatcgcgaagcccctcgctggaaagaagctctgcaagcggaccctcaagctcgtgcgacgagcctctgaggccaagtgcctcaagcgcggagtcaaagaggtagtcaagagcattcgccgcgggaacaaagggttgtgtgtgattgctggaaatatttctcctattgatgtgattacacacgttccaatactatgtgaggaatctaatgttccttacatatatgttccatcaaaagaggatcttgcgaccgcaggaaccactaagaggccaacttgttgcgtcctggttctgaccaaaccaaacaagggggagctcagtgacgaggtgaaggataaactgaagtcagactatgaccaagttgtaacggaagttgctgaggctacatctgcaatgttctaaggaccattcagggaccacatcatctgagaatcatgcagctcgctgtgcgcattcttggcgtactatgtaacctgatccctgtcagtctgccctgcttgcgtgaaccgcaccagtatgctttgcatggtggctggagggatatgactatatgagtttacctatatattatggactatccttgttggcgtattgttttattaacgattatatttagccagttataatccgttaggtgagcagattgtttgcttgggttaccagatcttggtagccagtgggtgcggttccaggtcttctgttgatgacttatcacaagatgtgcttgtgattcccgtgtatgaggaattgcgacatcgtagaggcgtaggctatgttcagtagatcgtgccttgcctcgtgtataataatactgttttgtatcgtagacaatattgtttacagagatgatgatgagtaagctgctggacatagccagtgccttatatcagggttagtttttggccaaaaaaaaaattatatatttttttttattatataataattatattattaattaattaattt

SEQ ID NO: 9612 - DNA, 796 bp, Zea mays
  Clone ID: MRT4577_10875C.1
ggtaccctcgggttcggccgggacaggactttcctactaatatggttgttctgaaaagccaagacatagatgtcatcttgggcataaactggttagtccagcaaaaagcaattctcaaccctgatctgagaaccatcaggttgagttatgaccaatagagagttggtgacttgattgcctaaaccaagattaggctatattcgtatttagtgaaccatgatccgacccaaagtgaaattcttatcactctatgaccaaacacatacaaataaatgcctagataatttccttgtcgaacctaaagtgtacctggacttcaaacaaggaactcaagtcatgtctccttttagcaccattctcctgttcagctgatgcaggctgaggtctccgttgtatttggcctctccttgcggatcaccatgttgctttattaacccaacttagaaaagacatgtccgaccattttcttgaatttgatgcctttggttccttcatatctatcgaaggcataccaacttaagtcttgaccttgtgatctctgcaatgggcatagaaatatgcttggtgctgaattaacagtctcccatcgtacttctttcatcaagcttaggtcatagccataccttgttcacttcctcgggccatgatctatttggcgctctacttataaccatctttacagggggagtctcttttgtaccttgtcatccttgaccagtctatttgtgttgtgtgagattccttattggttatgtctgggattggcgttatgactaaaatgatgatgccacgccaa

SEQ ID NO: 9613 - DNA, 511 bp, Zea mays
  Clone ID: MRT4577_108760C.1
cgcataagcaatacttgaggcctatggtgcatcatatcgactccatgccatggacatattgcatgagtgctatgaaaacgatgcttttggaaatgagattagaagtgccgaggagactgaataggaaattcaatgagacaggaagggctccatgctgtccctatgaaaaaaatcctcaaacacacatgcggaaggggggctaaaggaaccggccaaacatcccacaaggcgatattaacccactgcttcccttcaatgctcaagaggatgaggaactaatgaaggatcaaattgacgaccttaagaagaaggcctctctcttactcaaacataatcaatgagatcctgatcagagctccgccgactataccaacctgttctatgcatgctaggccagtatccttcatagtccataactgcttcacacctgcttgaacaaggatctacgaagtgccaccatgctactaccataatgacccaacagcatgtgagactgactacagcaaaccac

SEQ ID NO: 9614 - DNA, 1236 bp, Zea mays
  Clone ID: MRT4577_108761C.1
ctcgagccggattctcagataatgtggtcctcagaacattgcagatgtagcctcagcgacttcttgggtacctcgaggccggccgggggacccgacctgccattttatagcaacttcagcgcggacgcggccgggaggcggcaaaccctagctccaaaaaacgaactagaaacgaccgcgaagccacaggtcgaaggcggcggcggcgatggggagcgacacggagacggagaagaaggcctcggtggcgctgatgtccatcgcgaaacccctcgctggaaagaagctctgcaagcggaccctcaagctcgtgcgacgaggcctaagctaatgttccttacgtatatccgaggcgaagtgcctcaagcgcggagtcaaagaggtagtcaagagcattcgccgcgggaacaaaggattgtgtgtgatcgctggaaatatttctcctattgatgtgattacacatgttccgatactatgtgaggaagctaatgttccttacgtatatgttccatcaaaagaggatcttgcgaccgcaggaaccactaagaggccgacttgttgcgtcttggttctgaccaaaccaaacaagggggagctcagtggagaggtgaaggataaactgaagtcggactatgaccaagttgtaacggaagtcgctgaggctacatctgcaatgttctgaggaccacattatctgagaatccggcaattccctgtgcacgtctttcttggtgtagtatcctgcccagcttctgtgaaccgaaccagtatgttttgcacggtggctggagcgagatatgactatgagtttacctatatgctatggaccatccttgttggcggcatatgattctaccagtgattagatctagccaattacaatcagttctgtgagcagactgtttccttgtgttgtcagatctcggtagctagtgtgtgcgttccaggtctttttgatcttatcacaagatgtgctcgtgatacttgtgttgaaggaactgtggtatcttagcgccttatatcaagattagtttttggcttccaaaaaaaaaaaaaaaaaaaaaaaaaaaaagtactctgcgttgttaccactgctcatcgcgaagcccctcgcaggaaagaagctctgcaagcggaccctcaagctcgtgcgacgaggttcgtgagacttccttcctcgccctcgccctcgcccaattagattacgtgtttgttctatttggtcccacgcgtccg

SEQ ID NO: 9615 - DNA, 682 bp, Zea mays
  Clone ID: MRT4577_108762C.1
tgcgcttcctcccgatctgcagctgcggcggcagcagcgggggcaacgcgttcgctcggccagagcaggggaggaagaagcgcgtgcggccatggacagaggaggagcacaagttgtttctcttaggcctgaagaaatatggcaagggggactggaggaacatatcgcgcaacttcgttcagacaaggacgcctactcaggtggcctctcatgcacagaagtacttcatcaggctcaacaagaaaagatccagcattcgcgacactaccacagttaacctgacggacgatcagccaacctcgccatcccagtcctctctgatcactgaccagttcagcgcactagctctggcaaccgacgttaaccaaaacagccgtgcgaattcgccctcgatcgaattagcctagatggccggactattgggataagccaacttaaaaaaaagtgggatggggtttgcaagatctagttctgcagtgtggctcattgatatgatcagttggatggaagccagaacatgttgtttttaggtgcaatccagtctgccccatgaatctatcagatgtttagttgtatataaatataatacggccaatctggagaggccgggagtgttttcaagtttgctgtatcgtcttgatgtaataaactttaaatttaataaaatcttcctttatggaag

SEQ ID NO: 9616 - DNA, 236 bp, Zea mays
  Clone ID: MRT4577_108763C.1
cgggcctaactgcatccgccgccccaggagcagagactttcgacatctcttctgcggcgaagaacccccagtggcccaccagatcacttgataaactttgatgaggggtgatggcggattctttcgcaaacctgaactaggaggcagggctgaaaaagctggatgagcacctgctgactctgagctacatcacgtggctaccaagcgttgcaaggatgacgtggcagtgcgtacac

SEQ ID NO: 9617 - DNA, 251 bp, Zea mays
  Clone ID: MRT4577_108764C.1
tttcgcttttttcttcggtggctctacccgtggggcgtatctaatggaccgggtgtcaagttattactacggccacataataaaggtgcactttgtatcatggaactgctatatcacacaaatttggtttaaatctattgatcttatcccacatgtttgtagaacattaacacatattccttctaaagttaaagatatttaactgtaataccacacacatatagtttattcatctcttctgttatccaaaa

SEQ ID NO: 9618 - DNA, 436 bp, Zea mays
  unsure (1)..(436): unsure at all n locations
  Clone ID: MRT4577_108765C.1
gggtaccctngcagtcctgccggggatagtccatgcacgtctagtgttaatggcacgcagaggacagccgcgacgcacttggggaggacacgagatagcggcagaggacacggcgagtgcacgggctccaacggcaatggagatagctgcaggaaggcggtcaagtccgagttgaggcgctggtgatcaagccgctaggaattgacgtacgcacggctagggctaagtttcggcataaataccacgaggggctggtgtcccaagcggaagtcaccatgacgctccgtcatgtacgcagtcactctaggagagcttcagggcaaagacccacacgctcctcctcttctttaacaaatgcaccttcagggtatcatcctacagaaggaaagcggatcgagcggaaagagtaagcatgagaccttctaaggtgatgtca

SEQ ID NO: 9619 - DNA, 430 bp, Zea mays
  Clone ID: MRT4577_108766C.1
agctagaaacgcgcgctttattggcatgagcgcattaaaccagactagttttttaaaaaactttgccacacgggggaacaaagcgcccgatcgatcgggccgggggggaccaccaccacaacattattacgactaccacgctgtttgtacttggaactcctactggtactaccgggtagtataatacacggaggggcccgcggggggaccaagacggccgcccttaattaagcgctggccttgttgacctttttgccggcacccaaagcgggggcgcgggctggcttgggcttgggctgcgcgggccccggggccacctttcttgtttgttttgggcgcaccttacgtgccttcctttaaggggccaaggcaacggccgccggttttattttgggcggggcgggggccctcttgcgcttggcccccaaaa

SEQ ID NO: 9620 - DNA, 274 bp, Zea mays
  Clone ID: MRT4577_108767C.1
gcaggagatcaccggcctccccgcccctgggccctcctcctcccccgccgccgccgtcgccgcgcccagctggacgcccgctgcgcccgcgtgcgtgctcccgacgctggacacgtccgctttcttcctgctcgaccgtgccgccgctgcgccagcgtccggtggacaggagcccgggcgcgcgcgcatggaccgcgacgcacacgcacgccgccgtggcagctggggccgacggctcggactcggcggcgctgctagagctggaggcactggt

SEQ ID NO: 9621 - DNA, 381 bp, Zea mays
  Clone ID: MRT4577_108768C.1
ggggggaatttttttgttatttacgtttttaaatacaataaaaggagcaggtgctggagggggaacataagaagaatctaaagggaaaaaaaacagggggggggaaaatggacaggaaaaaacagacaaagggaacaaaaacaccaacaaaggaagaaaaaagggaacagcaataggacgccactaaagggggcccgggggggaaaattcggccacacaagagagaaggggacaacaatcacaggaaagaggggagggctgtggccgggtgccaggtcggtggccgggttagggacattaaaacaacaccctcattcgtttgaccaagtcatggacgcatcaacccacacaaaagggcaccaaaaagaatccgaagaaaag

SEQ ID NO: 9622 - DNA, 778 bp, Zea mays
  unsure (1)..(778): unsure at all n locations
  Clone ID: MRT4577_108769C.1
cctcgaggccggccgggacaatgactctcggcaacggatatctcggctcttgcatcgatgaagaacgtagcgagatgcgatacttggtgtgaattgcagaatcccgtgaaccatcgagtctttgaacgcaagttgcgcccgaagccattaggccgagggcacgcctgcctgggtgtcacacacaacacacaacaagcaaagcgaagcgcgcgcacagagatctagctgagctactagctatagcagcagctgctgcaggtctcctgacatggcgaagcaggacatcgaagcatcggggcccgaggccggcgagttctcggccaaggactacacggaccctccgccggcgccgctcatcgacgcggatgagctcaccaagtggtccctctaccgcgcggtcatcgccgagttcatcgccacgctgctcttcctctacatcaccgtggccaccgtcatcgggtacaagcaccagacggacgcggcggcgtcgggccccgacgcggcgtgcggcggcgtgggcatcctcggcatcgcgtgggccttcggcggcatgatcttcatcctcgtctactgcaccgccggcatctcaggtgggcacatcaacccggccgtgacctccggcctgttcctggcgaggaaggtgtccctcgtccgcgccctgctctacatcatcgcgcagtgcctgggcgccatctgcggcgtcggcctcgtcaagggcttccagagcgcctactacgtgcgctacggcggncgcgccaacgagctcagcgacggctac

SEQ ID NO: 9623 - DNA, 322 bp, Zea mays
  Clone ID: MRT4577_10876C.1
acccacccgtaccggctagatctcctagctggatgacctattttttttttttattaatacctagggcaggcgcaaaggagctttacacaacaaccacagaaaggaggctattacaccgggaacgagggtgctctacatgcatgggggggctgaaccttacctaccccagggccatgcggaaacctagttaggagaagcctgttaatggggcctggcgggccaccacctccaccaacattgctgtgcttattgtaaccccaaccaaggctgggctgttcctgtgtttacaatacaactgaaaaactaggagaggggggatttg

SEQ ID NO: 9624 - DNA, 354 bp, Zea mays
  Clone ID: MRT4577_108773C.1
gaattcggctcgagggaatactatgggatcatgtctttttacacaccggcaccttgctcaaaccctttttttatacttattcattattccatctggctcttctggactctatgttatcaaagcagttttgtgaatcgaagccctccttgtccgagcaattttccgctccaccggggtcacgtcacggcggaaacaaaaacaaaaggcagtcttgtaaagacgaggggcggggcggctgcctgcgcggacaccggacagtcaaagcgctcgatcctgactggtgactgcgccgagagtgattgcttgctgccgctacaccacccgctgtaggcattgccaccctctttaaccccc

SEQ ID NO: 9625 - DNA, 346 bp, Zea mays
  Clone ID: MRT4577_108775C.1
attccccgacccacccactcttccgcaacaaacactaaatacccataaaatctatttacaaaaaacaaaaaaaaacaccaaagaacgcttacataataaaattaaacaaccccctacctacttactaacctcacctcccaactttcaaccaccctacctaacactccacaccctacaacttaatcactttcctataaacttcccaaattcaatatcactctccttcttttcaaacttacctatcttcacaaaccctaacttatcccaactaaatcccataacactacatcccccttatcccacttttcctaatacccaaaatccccaaaccaatctccttttcaaa

SEQ ID NO: 9626 - DNA, 198 bp, Zea mays
  Clone ID: MRT4577_108776C.1
tggcaaattttctgttaagatagagggccctggaaaacctgtgggtgagatgtgtcatactcctgaacaaaaagatagttgttctggactgtttggtgattctatcaaattgcagggcgatatatacattgaagagataagtgacatttgatcggtgatttcttccgaagataatggagaaagtggttattacgcatt

SEQ ID NO: 9627 - DNA, 314 bp, Zea mays
  Clone ID: MRT4577_108777C.1
acgcgtccgatcagaagtcacaacatcaaattggatataattgaagagaattcacacaaaatcaggggggtgaacatattcagaggggggcattatatcctgaattgattggtggtcttagtacagaacctgatgttatacgacatacgtgatgagtggccaacatttgtcacgaaagtgagccaatggacggtgttatttaagtccaagtgttcttgtttaaacatgtggcaattttttttggattacattccatccaaacacctttgtacaatcctcgtatgtaaaatttttcatcgggttttgtattttta

SEQ ID NO: 9628 - DNA, 285 bp, Zea mays
  Clone ID: MRT4577_108778C.1
ctacctaccgcacactaaggggggttcccccttctcccaaaaacttccgccgggcgacgctccacccgtacaacgacaccatgagggagtgcattactaaccacatcgcccaagccggtatccagtgccaaaacccagactggaagctgaactgccttgagcatggcattcaacctgagggggggatgccctgtgacaacaccattggtagacgtgaacagcctgaccagatgttcatgaacaggacagacaccaactagaacgaattcaggaatgccttcccac

SEQ ID NO: 9629 - DNA, 525 bp, Zea mays
  Clone ID: MRT4577_108779C.1
gcccacgcgtccggtttttacacttatgttactctggttgtcaatttgtgtagttttgattttcttgtttgcttgttagtggatgttatgaatagtgaatactggccaaggataaaataaataccagattgaaattccaacctttgctcacataagctgcatacttccagactagttgtttctttccttgcaagttgcaacaaagtgcctattgtttataaagtgtgctaagatatttcctggtcataggaccacaacattttaaaacaattatacttgttctttgagagcagatctctgtataatgtatcctcttaattttagttgagcttaaggtgttccattggtttgcttgtcttgtttgacatcacttcattatgctatacagcttctgttttgctgaataacatcaaagaatcttaagttcttaaattgtagttctttctgtatcatatttacttaattaaatgaagccatgtttttttgaaaaaaaaaaaaaaaaaaaaaactagttctagatcgcga

SEQ ID NO: 9630 - DNA, 321 bp, Zea mays
  unsure (1)..(321): unsure at all n locations
  Clone ID: MRT4577_10877C.1
cccacgcctccgcccacgcgtccgcccacgcgtccgcccacgcgtccgtttangngtgagtggacgaagcggggatatctatatgcctgccttgataaaggnaatgagagacggcaccgcagganccagacaanaccncctccaaaacagcctgaaanngaggcgcgannnnnnnggnnnaggttttgggttgaaagaacccccgngagcggggagggggggcccccatctctcagacaaccgcgccaaagagagaagcggagagggcttgtcgggcggcaggggcagcaccttccgccgacggtgcatctgcactaggca

SEQ ID NO: 9631 - DNA, 317 bp, Zea mays
  unsure (1)..(317): unsure at all n locations
  Clone ID: MRT4577_108780C.1
acccacccnccacgggggggcacaagaagggacgaccgggcccgcacacccaaaacgagagagggcgggcagggcagcaaggagcggcgcaacaatggaaaccccaccacgccgaacaaaaggaggcaaccaaacatgccaaaacgggccgagccaagcccatgcacgcacagaacaacggacaaagccaaacaacaggacacggataaaaaagaagacaaacgcacggaaaatgaagagagacacagactaccgccgagccaacagacagagggccaaggcaacaacagcgacaaaagcgccgaagagagcacgaa

SEQ ID NO: 9632 - DNA, 390 bp, Zea mays
  Clone ID: MRT4577_108781C.1
gcgcgtttcccacgagagccgagtactgtgttactcctggaccgcgggaccgagggagtcgacacccagatccccaagttcttcgacaacgaccacaccgacatcagcctcaccggcgtcgtcgtcgccgacggcgtctggtgcatctgccacagccacagccccaacaactccatgacgtccactgctgctagtcctgttcctcttctgaatctgaagcatatctatcaatacaatctatatacttatcatcctcgtcgtcgtcgacggcaaaccgcgtgagcatggagggaatgactgaatctacgtatttgtatcacttgcatgcccttcaggcactattgtatatataatgtatatatcgtctattttgtccactttgaccaaaaa

SEQ ID NO: 9633 - DNA, 797 bp, Zea mays
  Clone ID: MRT4577_108782C.1
ccggccgggataatcaagctttccagtgaactgaaaaaaaggagcaattcattttttttcatttcgtgtactgtttggacttggttttgcagaaggatgttcgtgtgcagaaaaaatggttctgaaaatcgttgaccttgtcctgtcatgtcgatctttctatttgtgttaatggacttcatgttagcagaaaaacgaagtacatcaatcaacaaatcacttcaatgcgaaggtaaaaaccaaccttcactacatgtgtagcgtttacaaaacgtcttcagtaaacggcggcttacaagctagagaagtaaatagtgataacgcgcagaatgccctatacaacgccccctgcacccctagcgtgtagggccgctacgatccggcctaacttccacccgacacactacagaattttggattacaaactcaacgcctatcactggctcaagaccggcctttctgaacgcagccgcagtgatttcctatgaaaccgacgtcttaaccaactgctacagctgtaaaaagccatcttttactaccctagcaggagcaaggaggctcgtctactctgacctacgcctttcctcccgaatttcagcaggaaaaacagggcaaggagctactttgagcccgagactgaactgaagaagatgatgatggccgaggtggccaaccacagcaagaggaaccacacggacagctacttcagtggcaagcccgtcgccgtccccgccgcggccaccagctcggaggagttcggcagcatgtccctcgagtagccgaggaatgccagcccg

SEQ ID NO: 9634 - DNA, 225 bp, Zea mays
  Clone ID: MRT4577_108783C.1
atggggaagcttgtcccatcactcctcatgctcctcctcagccgagtgatcgcacttgtacccaccataactagaatgggagaccacgtctcaggtcgcgtgaggcgcaaggtctgctgccaggttcaatcaggtatccgcacgttaatccttattccaatttcatctcgtagaccacgcatccccatggatccgtgtccacaaaccatcatcattctgatataa

SEQ ID NO: 9635 - DNA, 2141 bp, Zea mays
  Clone ID: MRT4577_108784C.1
gacgctggcggcggcgcgtcgccaatacgcagcgcggatgtggagcctgatgcaagcgtgtgtccgcctgcgtggcgtcctctctccctccacgtttcggcgtcctcgtcgccttcctgggaaatctccaggtactgcccactgccccttcccttcagtccctttccccgggctgtggtactagtactagtaccagcatctcttcaggtctccaccaagcgcagacaccgcagcagcggcagcagcacgatccggtgaccccccgccgcgtcaagcctgctcctccggtgatcgccggactggcggggtaggaaccagcggagcgcagcccgcctccttccgctgtgtctgacagcagcagatcctcgatggagatggatggggttctgcaagccgcggatgccaaggactgggtttacaagggggaaggcgccgcgaatctcatcctcagctacaccggcacgtcgccctccatgcttggcaaggtactgcggctcaagaagattctaaaaaacaagtcgcagcgggcaccaagttgtattgtattctcaagtcatgagcaactcctgtggggccatatcccagaactggttgagtcggtcaaacaagattgcttggctcaagcctatgcagtgcatgttatgagccaacacctgggtgccaatcatgtcgatggtggggtccgtgtacgtgtttctagggattttctggagcttgtcgaaaagaatgttcttagcagccgtcctgctgggagagtaaatgcaagttcaattgataacactgctgatgccgctcttctaatagcagaccactctttattttctggtaatcctaagggtagcagctgcatagctgtagagataaaggccaaatgtgggtttctgccatcatcagaatatatatcagaagataatactatcaagaaacaagtaacgagatataagatgcatcagcacctcaaattttatcagggtgagatatcgaagactagtgagtacaatcctcttgatctattttctgggtcaaaagagagaatatgcatggccatcaagtcccttttctcaactcctcagaacaacttaaggatttttgtcaatggatctttagcttttggtggcatgggaggtggtgcagatagtgttcatcctgctgacactcttaagtgtcttgaagatctcagcaagattagtggcctaaaactccctgacttcactgagctcctgtcagagacaatttttaggtctgaggtattaggcaacctgttggccactcaaaagctggatgatcatgacattgaaggggtaattcatctgtactacaacataatttctcagccttgtttagtctgcaaaaacctaactgatgtagagctattgcggaagtacactttcttgcattctcttcctttggacaaaagtctgaagatcgttagggacttcctcatttctgctaccgcaaaggactgtagcctgatgatcagctttcggccaagagagaatggtagcacagattctgagcatgattcagtgtttcttgaatcagcgaagcgaacctatgagtacaaggcatatttccttgatctggatgtgaaacctctggataagatggagcattattttaaactggatcagaggatagtcaatttctacacaagaaatgggggaggtcttgccatctccaaagggcagtaataccaaagacacttcgaggattcggctccaagaatggggagcctctcttcctgtatacatctggagaagggtgcatcagggagtgttggttgttgttcctgctgcttggtgctgctgttgtaacttcatgagtacagtcccaaggttgggaggctcgaccttaacgcctggaaagggcatagggagctgtgttgtccgtcagtcgctgtggcttgtcacagtaatttccgaagatgtccaacgttagttgagacaactgaactgcttaccgtggcaatcactcattgtaacatcaagttgaaaatgagggctgaagtttccctcataggctaccatatgtgagatatgtcctttgtaccactaagtgtccctgtgtcatgtatgaatgtatcttaatttgctgttgcagaaatgtttggtgaaactttcatcctccaaaaaaaaaaaaaa

SEQ ID NO: 9636 - DNA, 710 bp, Zea mays
  unsure (1)..(710): unsure at all n locations
  Clone ID: MRT4577_108785C.1
cattgggtacctcgaggccggccggggtcgggttttgctagggtttactgcttgtcttcctttctcggcagtcggcaccttcgcggcttcgcctgatcgcctacgccgcttcgtcctgaggctgattctctggtgctcccaagaagaaagtcagggaatgaaggaccgccacctctcgctgaaccagacccagcgggtccgcctcgaggccgcgcttcaagagctccagtccgttgcgcccgccgccgcgtccgccgccgccgtcaccgtcgcggacaccattcccgtcaatcaagaggacaacatcctcaaggggcatgggacgtcggatcaggacggggaggtggttgcgacgctctgcggggtggtggagcgggtcaacaagctggtctacgtccgcactcttcgcgcgagatacaagccggaggttggtgatatcatagttggccgtgtgattgagattgctcctaagcgatggaggttggagataaattttagccaagatgctgttctgatgctttcatctatgaacttgcctgatggtattcagagaaggagaactgctgttgatgaacttaatatgcggagtatctttgaagaaaatgatgttatctgtgctgaagttcgaggcttccaacatgatggatctctgcacctacaggcaaggagtgaaaagtatggaaagctggagaggggccaatngctgatgg

SEQ ID NO: 9637 - DNA, 176 bp, Zea mays
  Clone ID: MRT4577_108786C.1
attttacaacctaacatgtaaaatgagatggaatgttttgcaaccaatctaagactggctagccctcgagccttcctgcctatgcatggatgcaaccagtggccaaaactggtggaggaggaggtcttttaacaacagaaatactaagcaggggctggcctggtttttaagctggg

SEQ ID NO: 9638 - DNA, 1675 bp, Zea mays
  Clone ID: MRT4577_108787C.1
gcggttgtaacctgaaatcattgtagtttcctcttagttctttagatatttccagcactctatattagattcaatttatgtttgcttactaagtctttcttaatctcaggtactccaaagggtagcagctgcatagctgtagagataaaggccaaatgtgggtttgtaccagcacgagataatcagaagataacactatcaagaaacaagtaacgagatataagatgcatcagcacctcaaattttctcagggtgaggtgtgtagattggaatgcttgatccaagataaaattccactctcttttgcgcacttaaaaaacatccatcgatgatacaaacttgatcaaaataccttaaggcttgttatttacggcactcttgtaatattataccgtctcttgctttttgacatcaggttgattcccaatacattcttgcacacatttcagatatcgaagactagtgagtacaatcctcttgatctattttctgggtcgaaagagagaatatgcatggccatcaagtcccttttctcaactcctcagaacaacttaaggatttttgtcaatggatctttagcttttggtggcatgggaggtggtgcagatagtgttcatcctgctgacactgataagtgcattaaagatctcagcaaggtcagtggcctggaactccctgacttcactgagctcctgtcagagacaattttcaaatctggggtattgggcaaactgttgaccactcaaaagctggatgatcatgacattgaaggggcaattcatctgtactacaacataatttctcagccttgtttagtctgcaaaaacctaactgatgtagagctattgcggaagtacacactcttgcattctcttccgttggacaagagcttgaagatcgttagggacttcctcatttctgctaccgcaaaggactgtagcctgatgatcagctttcggccaagagagaatggtagtacagattctgagtatgattcagtgtttcttgaatcagtgaagcgaacctatgagtacaaggcatatttccttgatctggatgtgaaacctctggataagatggagcattattttaaactggatcagaggatagtcaatttctacacaagaaatgggggaggtcttgccatctccaaagggcagtaataccaaagacacttcgaggattcagctccaagaatggggagcctctcttcctgtatacatctggagaagggtgcatcagggagtgttggttgttgttcctgctgcttggtgctgctgttgtaacttcatgagtacagtcccaaggttgggaggctcgacccttaacgcctggaaagggcacagggagctgtgttgtccgtcagtcgctgttgtaactaagtagtgcatacaccgtggcttgtcacagtaatttccgaagatgtccaacgttagttgagacaactgaacttcttaccgtggcaatcactcattgtaacatcaagttgaaaatgagggctgaagtttccctcacaggctaccatatgtgagatatgtccttcctttgtaccactaagtggccctgtgtcatgtatgaatgtatctcaatttgctattgcagaaatgtttggtgaaactttcctcctccaaaaaaaaaaaaaaaaaaaaaaaaaaaaaaaaaaactcgagggggg

SEQ ID NO: 9639 - DNA, 327 bp, Zea mays
  Clone ID: MRT4577_108788C.1
ccagcctgcgctggccgccgacgttcttctggcggcgtgatcagcttccacctccggttctcctcctccgtatattactcaaaaccaactggtagaagagaggagagaactccagaggcccaactggaagaagagaggaggcaacgtttggagttggatgcgaggatgaggtccgagcagcagaggacggaggacattcttcgttacatacagtccgcaacgggtgtagctccaccacctttgctattcactccaaatccacctccatctaatttttccactcctggggttggaactactgtgattcaggatgagaaggaatctttg

SEQ ID NO: 9640 - DNA, 2243 bp, Zea mays
  Clone ID: MRT4577_108789C.1
gccgtcccgggagtcggcaccttcgcggcttcgcctgatcgcgtacgccgcttcgtcctgattctgattctctggtgctcccatgaagaaagacagggaatgaaggaccgccacctcgcgctgaaccagacccagagggtccgcctcgaggccgcgcttcaagagctccagtccgttgcgcccgccgccgcgcccgccgctgccgtcaccgtcgcgggcaccattcccgtcaatcaagaggacaacatcctcaagtacagagcctccatctctctctctctctctctgtttctttcttccccttcctgtccatctgtgagcagccgatgggtgggtgctcgtggcgcagggggcatgggacgtcggaccaggacggggaggtggttgcgacgctctgcggggtggtggagcgggtcaacaagctggtctacgtccgcactcttcgcgcgagctgcagattctcgatggagatgaatggggttctgcaagccgcggatgccaagtactgggtttacaagggtgagggcgccgcgaatctcatcctcagctacaccggctcatcccctactatgcttggcaaggtattgcgggtcaagaagcttctaaatgacaagtcacagctgccaccaagttgtatggtcttctcaagtcatgagcaactcctgtggggccatatcccagaactggttgagtctgtcaaacaagattgcttggctcaagcctatgccggccgcgttatgagccaacatctgggtgccaatcatgtcgatggtggggtccgtgtacgtgtttctagggattttctggagcttgtcgaaaagaatgttcttagcagccgtcctgctgggagagtagatgcaagttcaattgataacactgctgatgccgctcttctaatagcagaccactctttattttctggtaatcctaagggtagcagctgcatagctgtagagataaaggccaaatgtgggtttctgccatcatcagaatatatatcagaagataacactatcaagaaacaagtaacgagatataagatgcatcagcacctcaaattttctcagggtgaggttgattcccaatacattcttgcacacatttcagatatcgaagactagtgagtacaatcctcttgatctattttctgggtcaaaagagagaatatgcatggccatcaagtcccttttctcaactcctcagaacaacttaaggatttttgtcaatggatctttagcttttggtggcatgggaggtggtgcagatagtgttcatcctgctgacactcttaagtgtcttgaagatctcagcaagattagtggcctaaaactccctgacttcactgagctcctgtcagagacaatttttaggtctgaggtattaggcaacctgttggccactcaaaagttggatgatcatgacattgaaggggtaattcatctgtactacaacataatttctcagccttgtttagtctgcaaaaacctaactgatgtagagctattgcggaagtacactttcttgcattctcttccgttggacaaaagcctgaagatcgttagggacttcctcatttctgctaccgcaaaggactgtagcctgatgatcagctttcggccaagagagaatggtagtacagattctgagtatgattcagtgtttcttgaatcagtgaagcgaacctatgagtacaaggcatatttccttgatctggatgtgaaacctctggataagatggagcattattttaaactggatcagaggatagtcaatttctacacaagaaatgggggaggtcttgccatctccaaagggcagtaataccaaagacacttcgaggatttatacatctggagaagggtgcatcagggagtgttggttgttgttcctgctgcttggtgctgctgttgtaacttcatgagtacagtcccaaggttgggaggctcgacccttaacgcctggaaagggcacagggagctgtgttgtccgtcagtcgctgttgtaactcaaactagtgcatacaccgtggcttgtcacggtaatttccgaagatgtccaacgttagttgagacaaccgaactgcttaccgtggcaatcactcattgtaacatcaagttgaaaatgagggctgaagtttccctcacaggctaccatatgtcagatatgtcctttgtaccactaataagtgcccctggggtcatgtatgaatgtatctcaatttgctattgcagaaatgtttggtg

SEQ ID NO: 9641 - DNA, 356 bp, Zea mays
  unsure (1)..(356): unsure at all n locations
  Clone ID: MRT4577_10878C.1
tctggatcttggaccccttcatcattttcttggcatagcagtggaacgccgacctgctggcctctttctacagcaacacacttatgctatttatatcattaatcgtgcaggtatgactggttgtaaaccttgctctacgccagttgatcttcaggccaagctatctgcggacagtggacctgctgttcaagacgccaattagtaccggagtctggccggtgccctgcagcatctgacgttcactagacctgatattacctatgcagttcaacaanatttgtgtcatatgcatgacccccgggaaactcatttgacaacacttaagcgtattattcggcatcttcgtgatactgctg

SEQ ID NO: 9642 - DNA, 351 bp, Zea mays
  Clone ID: MRT4577_108790C.1
ttccccggcttccggtgcctagggcagttcaacaggtttggcgggggtattggcggcccgggttaccaaaccaattgcccttaataagctagggggccagttcacacctgagctccagtttttttgaaggggaccggccccgaaccatttgcctttttttttaatttatgaaagggggattggccacagggaactccatacccacaagctctgggggcctctaatgtgttgttagcgtgggcataaatgttccagggatgccatctccttttttggccaaggctcacagttgagaaaggtggcaaactctatgagatgagatcatatagaggcgcggtgttagatgctgtt

SEQ ID NO: 9643 - DNA, 2246 bp, Zea mays
  Clone ID: MRT4577_108791C.1
tagttcacactgaatctgcttgtgaatttatttgttggcttatttttttctcctggcataaatggtgttaaattgcccattcattttgcgtcggtccataggcccagttgaagccgggtcgggttttgctagggtttactgcttgtcttcctttctcgggagtcggcacattcgcggcttcgcctgatcgcgtacgccgcttcgtcctgattctcaatctctggtgctcccatgaagaaagacagggaatgaaggaccgccacctcgcgctgaaccagacccagagggtccgcctcgaggccgcgcttcaagagctccagtccgttgcgcccgccgctgccgtcaccgtcgcggacaccattcccgtcaatcaagaggacaacatcctcaaggggcatgggacgtcggaccaggacggggaggtggttgcgacgctctgcggggtggtggagcgggtcaacaagctggtctacgtccgcactcttcgcgcgagctgcagattctcgatggagatgaatggggttctgcaagccgcggatgccaagtactgggtttacaagggtgagggcgccgcgaatctcatcctcagctacaccggctcatcccctactatgcttggcaaggtattgcgggtcaagaagcttctaaatgacaagtcacagctgccaccaagttgtatggtcttctcaagtcatgagcaactcctgtggggccatattccagaactggttgagtctgtcaaacaagattgcttggctcaagcctatgctgtacatgttatgagccaacatctgggtgccaatcatgtcgatggtggggttcatgtacgtgtttctagggattttctagagcttgttgaaaagaatgttcttagcagccgtcctccttggagagtaaatgcaagttcaattgatatcactgctgatgccgctcttctaatagcagaccactctttattctctggtactccaaagggtagcagctgcatagctgtagagataaaggccaaatgtgggtttgtgccatcatcagaatatatatcaaaagataattctatcaagaaacaagtaacgagatataaaatgcatcagcacctcaaatttcatcagggtgagatatcgaagactagtgaatacaatcctcttgatctattttctgagtcgaaagaaagaataagcatggccatcaagtcatttttctcaactcctcagaacaacttcaggatttttgtcaatggatctttagcttttggtggcatgggaggtggtgcagatagtgttcatcctgctgacactgataagtgcattaaagatctcagcaaggtcagtggcctggaactccctgacttcactgagctcctgtcagagacaattttcaaatctggggtattgggcaaactgttgaccactcaaaagctggatgatcatgacattgaaggggcaattcatctgtactacaacataatttctcagccttgtttagtctgcaaaaacctaactgatgtagagctattgcggaagtacacactcttgcattctcttccgttggacaagagcttgaagattgtcagaaacttcctcatttctgctactgcaaaggactgtagcctgatgatcagctttcggccaagagagaatggaagtacagattctgagtatgattcagtgtttcttgaatcagcgaagcgaacctatgagtacaagacatatttcgttgatctggatgtgaaacctctggacaagatggtacattattttaaactggatcagaggatagtcaattcctacacaagatatggggaggtcttgccacctccaaagggcaagtaataccaaagacacttcggcgattcagctccaacaatgaggagcctctcttcttactatatacgtctggactatggagaagggtgcatcagagagctccagcccactacgcccttaggttctgtgcatatattgttgtatctcttaactgtttgatgatatggaatattcttttcccaatatggtaccgagcctttcttgagcctcctcctcgctgccgctcttcttcggaatgccgcggcatttgccctcccctcatgtttggcgagccggctgcacgtacagcacgacagtgagtgccagggacatgcacatcatggcgacggtttaagcttgtggacactcagcagatagggtgatgaccgccattccctgtatgacagacacgatgtgcatgcaacatgatcagccattcgatgc

SEQ ID NO: 9644 - DNA, 405 bp, Zea mays
  Clone ID: MRT4577_108792C.1
actaaaacaaaacaaaacaaaacaagtaataaataataagggggaacaagctgtgctctagttattttctttaatttgaaagtgacccatctaaaaaataaagaaaaaaaaaaaaatttttgaaaaatcatagtaatacctacctcgtgggggggatagttatcctctcactcgtccacaccttcttcgggggcgggagttatacccccaaaaggtgggcttcataataagtgcactcactaaaattaatggcggcgggctctcttactggtttacattcagaaaaattgttgtgccctctttattggcgtttctgccggcgggcgtgcagaggcggtttgtttattggcctctctcccccttgcgagagaataactgtgtgttgtgggctgttcttctgcttcc

SEQ ID NO: 9645 - DNA, 454 bp, Zea mays
  Clone ID: MRT4577_108793C.1
ggaattggcacattgatttacattttttaactctggccccgtatcggagggcatgagcgaaaaaatgaatatgcctgcatgaggcatgttatcatctgcatgggtgcttgggggcatgcaggttgaaaaaaaggggggaaaggggctacttaaaagtttttggacccctggtacgtgacccccaactttcagtcaggggggaaaacgtgccatgggggggccttgggggggtcgtttttcattacccggaacgttagcgactcgcaggggagggccttcttgggttgccacacttgcccccaggtgggcttaatttccggccaattgacgcgcttggttcccttaaccgacaccgccgagatgtccccggccccgcccacgttggggatcgtcaccatgttgaagtacttgttcccggtgatggggtaccggatgcccccctgttttgggcatg

SEQ ID NO: 9646 - DNA, 450 bp, Zea mays
  Clone ID: MRT4577_108794C.1
catacacacgctcgtatcctttaatcctgtacacctttcttctcttttttttttttagtttttctctcctctgaggagggggcataaagatacttatttaccccaacaccccttcatacacatttccaccttcatcaaatccaatttactttttcaactttaaatacaattttactgcaaacctcctaaatattcctacaactttaaatactcctccctaccccaaacccatcacctcatccttcttatccttcttttttacaccacccattctaattactattattattccaaccacacaaactttaacacgtctccatacatcctatcccacaacccaactaaaaactccttcatttctcttcttaaacaatataccttatttcttttccccaaataaatcccccctctccccttttttttattacaccttatctttttaaacttact

SEQ ID NO: 9647 - DNA, 438 bp, Zea mays
  Clone ID: MRT4577_108795C.1
cctgcgatccaccatcacacagcaatccacacatgcacttcgacgtcacacgggcgctgcgcacagacacacctagcgtcggcaccaatggtttactaccaggaggtggactactgctcggaggaggtgaggtcggtgtccccggccggcttcggacgccacgaaggcgacgtccagcaatacgtcgccaatgataagttcaaggaatgcgacacgttctcacgcgtcctacaccaaccaccaccatcacgatgctcactaatgctgacactgcttcgtggtgtgaaaaatcagggtagaataatacatcaacacctgcaccgaccagttccactagctgcaagaagagcttcctctgcagggctaactgaaccgcccggcggccgacatccacgcacatttcatgcttgcctgagagccttatgtatgtctgtgatg

SEQ ID NO: 9648 - DNA, 257 bp, Zea mays
  Clone ID: MRT4577_108796C.1
atccgcgataccgatcggggggattataaaaacattatgtcgtcgaccccacgcaactcatggagtatcctcgcgctggcctccgtgctcctgctgtcattcctcggctaccgggcgtggggaagcgaacatgcgagctcaccgtcttctggggccggaacaaggaggagggcacactgcgtgaggcctgctacaccaggctctacaacaccgtcatcatctccttgtaaaacgtcttcggccacaaccgctacgcc

SEQ ID NO: 9649 - DNA, 594 bp, Zea mays
  Clone ID: MRT4577_108797C.1
aaaacacaaacggggttttgtttttaaaaattccccaatttaaatttttgcccaaattatgaaaaggacggggggaaaaaaccccttttataaattaaaaaaggcccgcttgttttttaacaacaaaaattttataaaaaaacccggggggggaataaaccccttttccctttaaaaaaaagttttttttaggggggagcctagggtggacccaatcatatttttttttcatttaaggggggaagggaaggcccccccagggacccccatttactgggccttgtttttcccgggaggggggccagccggtttaagttaatcccaggccttgatccaggggaccttggggtccccgagtttaaaaaaggagggggtggattttgccaagtttttctttcacctgtccaaagaggtaaatgtacccttttgggacgggggcccaatccttggaaagggccactttttgaaaaaaggggaatgatgtcctcctgccaaaaaaggcccttgttttcttttttcaagtaaaaaaaggggttgttagccttgttggcccaaatgtagggcaagccatttttgactcccaggctaaagggg

SEQ ID NO: 9650 - DNA, 168 bp, Zea mays
  Clone ID: MRT4577_108798C.1
gaatttaaaaaatacatccctgatactttattactgacaggtcgcccttttcagcgtgagaactttattattgccgggtaaagccttaaaaatctccaagatggcaccaccaatcggggggcggttgccataaagtgggaggattcgtcaaaaaatgttggctaaatg

SEQ ID NO: 9651 - DNA, 614 bp, Zea mays
  unsure (1)..(614): unsure at all n locations
  Clone ID: MRT4577_108799C.1
gaggctggccgggaacgactcgcgccgcctccggtcgcgccgggtccaggtaaagcggcttccatctcctcggtctcagcgcgtcatcccctcctccttcctcttccgtttcccttagggttggagtagacacgtcggctcaaggatccttcgaggacacttattgattttgaacaaagatctagcatggaaccatcctcacagcctcaaccaatgatgggtgttgggtcacaaccttatcctgctgctgctccctatgtgccagtacctggatctcttgctgttcctcctggctcacagccagcagcagcattccccaatccaactcaactcagtgctcagcaccagatggtgtaccagcaggctcagcaatttcatcaacaacttcagcaacagcaggaacaacagctcagggagttctggactacccagatggatgagatcaagcaagcaaatgacttcaagatccacaccttgccacttgcaaggataaagaagataatgaaggctgatgaggatgtgcggatgatctctgcagaagctnctgttgtgtttgcgaaggcatgcgaggtattcatattagagctgacattgaggtcatggatgcacacaga

SEQ ID NO: 9652 - DNA, 885 bp, Zea mays
  unsure (1)..(885): unsure at all n locations
  Clone ID: MRT4577_10879C.1
ctcgaggccggccgggccgggttatgcacttttttccttgataaactggtgaaatacaaaggttcgtttatattatagtagctttttatagacaacgaatatattatataccttacctttgtcacaaatacgatctttcctgcctttctgtgttatctcgaaccagcggcttcagtttcgttctttcttggaccacccgttggttggtcctacagaggagaggacaagacgtcccggattgggttcactccgagctgagcctgagaccgtgagacgaactggtcaagcaaggtgacaacactgttgttaactaacgagcaacgactaacgacacctccatccccatggctgtgctgcactgcagacgggcggttcatgatgcggctgaagctgcccaacggcgtgacgacgagcgagcagacgcggtacctggcgagcgtcatcgaggcgtacggcgccgacgggtgcgcggacgtgaccacccggcagaactggcagatccgcggggtgacgctcccggacgtcccggccatcctggacggcctccgcgccgtcggcctcaccagcctgcagagcggcatggacaacgtgcgcaaccccgtcggcaacccgctcgccggcgtcgacccccacgagatcgtcgacacgcgcccctacaccaaccttctctcctcctacgtcaccaacaactcccagnggaaccccacaatcaccaacctgccgaggaaatggaacgtctgcgtcatcggctcgcatgacctgtacgagcacccgcacatcaacgacctcgcgtacatgccggccgtcaaggacggcgagttcggcttcaaccttctggtgggcgggttcatcagccccaagaggtgggccgaggcgttgccgctc

SEQ ID NO: 9653 - DNA, 720 bp, Zea mays
  Clone ID: MRT4577_1087C.1
ctcggccggggcccctgcactcgtaccctcacagaagcgcggctgctctacccgaacgccgtcgacggcgtgggtgctatggaacggagcgcagccatggtgcacgtgagcattataccgcagcagtggcgagacgtccagagaccacagaggacttatgagaaggagcgcattgatgctcaactgaagctgcgcgtcaagcatcggctgaggtgcaagacggagctgtggagggccagtatgcactgagcaagatccgatatgctggcggcacttgctcacccttgacaagaagaacccacacaggatctttgacgcagaggcgctcatgttgcgcatgaaccgatatgggctgcttgctgcgggtcaaagcaagcttgattatggtcttgccctcaccggtggaaacttcctacaaagggggatacaaacacttgaatgaactgctgctatggacacacacattccaccatgctcaggtcctgatcaagcgagctaacatcaagggtgtcggtccgattgaaagagccccatgattcatggcgagggcggaaggctgataagcacatatgactattcactgactagcccattcagaggaggccctgcatgaagggcgaatggacatgatccaaagatgcaagctgatgcatgatgatgctctaccagatgatcaagagcgtggatggactcacagccagacccaatatcagaagctta

SEQ ID NO: 9654 - DNA, 904 bp, Zea mays
  Clone ID: MRT4577_108800C.1
gcacgagctgcccactccgactaatatcctggggccgcgcggctatgggcggagtgaaggacagggaagcatcagcagcgccgccgccatcactgctacgctgccggcgctagagccctaaaccctagctagggctaggccatccatggccgcctctccccagactctgtcagctcccccgcccgccgccgcggccgtcccgaacctcggcggcaagcgcaagaggcaacccaagggcaagaagaataagaagaacaaactcgcgcgctccgaccaggatgactccgtccgccgccgccgcaacaagccgagcgccaagttcctcaagctgctccgcaagcgggcccgcgactacaactccgacgacgaggatgaagctggtgacgaccggcagcaggagcacctgccgaatcctcaacgccgcgttgacgaggacgacgacgaggccctctctcactccgagccggaggagggcgaggacgaggacgaagaggagggggcctccagctcggccgtcacgaggttcgagcaaggctgcagggcgttccgcgtcgcctttctcaagatcatggccaagaagctccccgatgatcccctgggtccaatcatgtcagcgcacaagacattagttgccgccaagttagccgaggaggtggaggagcacaagcccaagcgggaggctcggccaaggaagcgcgtggcagcagagaaggggcatgtcatacctaaagaccacttggacagcaaagagaaggagctcatcaaggttgcaaccaagggggttgtcaggcttttcaatgcggtgagcaaggcacagaaatctcgaaaagatttgaacccatcaaggactaaagatgccaaagttatagctaatgaaagaaaaacaccttctatcagaactgag

SEQ ID NO: 9655 - DNA, 673 bp, Zea mays
  Clone ID: MRT4577_108801C.1
attgggtacctcgaggccggccgggagccgccagcgatcccaacccccgactcctccggcagcccgcaacgactcgcgccgcctccggtcgcgccgggtccagggtcaggacacttattgattttgaacaaagatctagcatggaaccatcctcacagcctcaaccagtgatgggtgttgggtcacaaccttatcctgctgctgctctctatgtgccactacctggagctcttgctgttcctcctggctcacagccagcagcagcattccccaatccaactcaactcagtgctcagcaccagatggtgtaccagcaggctcagcaatttcatcaacaacttcagcaacagcaggaacaacagctcagggagttctggactacccagatggatgagatcaagcaagcaaatgacttcaagatccacaccttgccacttgcaaggataaagaagataatgaaggctgatgaggatgtgcggatgatctctgcagaagctcctgttgtgtttgcgaaggcatgcgaggtattcatattagagctgacattgaggtcatggatgcacacagaggagaacaagcgccggaccttgcagaaagacgacattgcagctgccatcacccagactgatatatatgacttcctggtggacataatcccgagggatgaaatgaa

SEQ ID NO: 9656 - DNA, 1528 bp, Zea mays
  Clone ID: MRT4577_108802C.1
ttttataccaatgcgctattgcaccactgcagctgctttaagatggatttttgcttaagatggaattttacaagcaagcatctttagtaacttcagttcgattatttgctgctctcaagagtagcgtccaagctacaagaataaataagataaaggccagcgatttttttcatacacaaaaggcattcccaatcccatccatcaacatagatctgagaatttttagtgttgtaccctgaaatacatcttttgcattgacggcaggagcgatcccaatccccgactcctccggcagcccgcaacgactcgcgccgcctccggtcgcgccgggtccaggtaaagcggcttccatctcctcggtctcagcgcgtcatcccctcctccttcctcttccgtttcccttagggttggagtagacacgtcggctcaaggatccttcgagggactgactggttgtgcaaatacctacttttaaattattgaaagtgggagcatgaaagggtcaggacacttattgattttgaacaaagatctagcatggaaccatcctcacagcctcaaccaatgatgggtgttgggtcacaaccttatcctgctgctgctccctatgtgccagtacctggatctcttgctgttcctcctggctcacagccagcagcagcattccccaatccaactcaactcagtgctcagcaccagatggtgtaccagcaggctcagcaattttatcaacaacttcagcaacagcaggaacaacagctcagggagttctggactacccagatggatgagatcaagcaagcaaatgacttcaagatccacaccttgccacttgcaaggataaagaagataatgaaggctgatgaggatgtgcggatgatctctgcagaagctcctgttgtgtttgcgaaggcatgcgaggtattcatattagagctgacattgaggtcatggatgcacacagaggagaacaagcgccggaccttgcagaagaacgacattgcagctgccatcaccaggactgatatatatgacttcctggtggacataatcccgagggatgaaatgaaagaggaggggctcggacataatcccatagttggcctgccgcctgctatgggggctccagctgatcatggttctcatccatattactatgtgccagctcagcaggtgcaaggagcaggtatgatgtatggtggccagcagggtcacccagtgacttatatgtggcagacgccgcaagggcaagcggcagagccccccgaagaggagcagcagcagtctgcctgaatgtagcaaatagacgagaacagcaaagcaattacatcttgatctgaagttctgaacttagggcctgtttggtgtggcgccgaaaccgccgcaccgcgtctaagccgcgacgctcgatttggtcgccacaactgcggcacaaaatctgtggcgcgtgtgggcgtgggcggcggtcaaccaaacatgctcttagttctctaaacaaacaaatatgatttggttatgttaattgtgc

SEQ ID NO: 9657 - DNA, 837 bp, Zea mays
  unsure (1)..(837): unsure at all n locations
  Clone ID: MRT4577_108803C.1
cttatcaaatcgctgtcctcctccacccaatcctaaccctagccacgccgcgccgccccgccccgccatcctcgatccccaaatcccttctcctccaccaaaccctaatccctagctacctagctagccgccatggcccctccgatggttctgctcgaccgcgaggttgagttgtgcgacgaggaggcggggatctgcgaagggccaatccgctcctcgtggggaggactaccagcaagaagatcagccaagggccaggaaaagttgagtgacgcagtcgccgagtacctgcagacattcaaggcccagccgctcgtcgccgatccgccggaactctcctccctcaacatacggccgccgaaatccgccccggtcccgccgacatccggcctggaatcgggccgcatctccagcgcggacaagcacctggtcgccctctacgccggaggctaccgccctggctacagcttgccggggagctatctcatctacgacgccagcaaggactccatctccgccatcccttgcatcccccccgacacctgcaggactagagccatggggtaccagtcggccgtcgtcatgtgcggcgccaccnggggaaggcggttaccttcttgctgagctcgtctgggtctgtccacaagactcccaagccgcgctctgggctctgggagtcgtccgccaaacaatgggtcgtcaagctcagggacctgccccttccacccggcaccaccgctttcaacttctccgtccactcggctttctcttttgggggctctttccntctgctgngtggatctacaccgtggcatggntgctctgtgatctgcgcaa

SEQ ID NO: 9658 - DNA, 1608 bp, Zea mays
  Clone ID: MRT4577_108804C.1
ccggccgggactgccgtttgcttggccatctccagctcactcccccctcgctagaggtagagcctgctctgctctgagctcagccgcatccttgcctccactgcaaagatctctctcccttcttcaatggcatctgcctgccctcttactctcagattcctcttctcctgcatcctccttcaaacaatctgctgttcaggagtatctgtggagctatcatacgattcagcacaggtcaaggcgctgtccagctcagccgtcaccgagtacagagtcacggtcaccgacaagcggcgtgcctattacgtcttccagaagccgtttgtgtgcagagccagagccaagccatgcagatcgtcggagcctatcgccgccgccggctcatttgtcaacgaggctattgctggtgccaaacggcatgagccagaggcaaacggcgagctcgccgtggttgcggagatcgaaggggccggcgtcgtgccccacgtcaagagccgtgtggctccaagcgcggtggcaatgggtagcggccgggagaagaggctcttgggtgtcctggtcgacgtgccatcccctcggcgggagctcggcgaggcaagagccacggcgcgcgacgagttctctccggtcagcaacccggcgacgacgcccgtgagcaacccagtcaccgtgccggccaccaacccgatgcccccgggcttcgtcaccgtgccatcgaccaacccgggcaacgggatcgcgaccaacccgaacctgccgccgttgtacccggagccgacgacgccgggcaccatgcccatgcctgacccgacgacgacgcccgtgaccgtgccacccgccttcacgaatccggtcgccgcgccgaacaccatgccggggacggcggtgacgaacccggcgacgacgccgacgcagttccctggctcgtcgcctgtcaccaacccggtgaccacgtatccgtacccgcagcagggcggcatgccggcaacaacgccgccagcggtgtaccagcctccggcgacggcgatgcccggcacggtgcagccgggcgcgccgaccgtggcagggcaggcggcgtggtgcgtcgccaagtcggggctcatggacaccgccctccaggacgggatcgactacgcgtgcggcgtcggcggggccgactgctcggccatccagcccatgggcgcctgctacaaccccaacacgctgcaggcccacgcctcctacgccttcaacagctacttccagcgcaacccgtcggcggcgagctgcgacttcggcggcgccggcatgctcgtcaatgtcaacccaagctcaggaacttgcgtgtaccagacaccagcaggtttcggcgccggttacagcccggggacgacgggcgtcggtgtgcctagcggttacactccggggatgtcgggcgccgtgggagggggctccggctccacggtgctgaacgccaacgaccccgggggtaactccatgtacgacgacggctacgacaacccgacggggctcaccgccggctcggcgtcgctgtcctgcggcggccgggtcgtcgtgtgcctcatctggatggtcacctttgcatttgtcagggagaaaatgttgtag

SEQ ID NO: 9659 - DNA, 525 bp, Zea mays
  unsure (1)..(525): unsure at all n locations
  Clone ID: MRT4577_108805C.1
ggatgcaaaatacttnggggttntttattnantgtgtgcagattnaaccaagtatncgttgtnttttnggnaagaatttttnnataagattgagagacagtatatgcttggacttatagctaaagatccagaaatgaggaagggggggggtcaagctttaccatgatacagngggaaaaacattattttctagattgcaatttataatacagttacaggactgggaagctgtgagtgatgttttctggttgaagcaaggtcttgatctcgttttggcaatattagtagaaaatgaaccaattacacttgcagcaaattctgctcgagtaccaacgcttatgatagctgggcctgttccagatcgcatcaccatgccacagcaggttcctgatgctcaggaaagcatggatggtacaacactatcggttgactctcttgctgcaaggcatgctcagttcttaaatgacgcgaacaagcttgtggtggcagaaatcatggctccattgaaggaaccttgctttgctg

SEQ ID NO: 9660 - DNA, 397 bp, Zea mays
  Clone ID: MRT4577_108806C.1
cggattggcatttcgaggcagacgtacgcgtgcgaataccggacgacgagcgagcagtctatttattacacccattaactaataacagctaactggaaaccttactcctcggaccactatattcaggagctacgaaatgatccactcgccagccatggagacgaacaaagtaatctgcgccgatgtagtcgtcgccgtctataccaccgacacgctggccatagtcgatttcgaggcgccctcttaggcgccctgatgcgcatccggagattcggttggccctagaacaagcggtgccgtcgccgacgacgtggccgccggctgagcgcttgtaagcttattactgggctactacctacactgagcgactacacgcggggcggcaacgtcgggatgc

SEQ ID NO: 9661 - DNA, 332 bp, Zea mays
  Clone ID: MRT4577_108807C.1
ctaacttaaacttcatactggaaccattcgtcttatttcacgatcataaaatctatagtaaaaatagtgattttgctcaccgttatcaactttattcaatatttgcgagaacggcggtagtcttcgtttgaagtcttcggtcagacaactgatgagtatagaatggagctttactttctcttccatccacaattcttggaatctctccatattaacgacgacaatcggccaggtcgacgacacgatggggattaaggccgagcgagcccagagggcgcgcttgcgagcagaaaaccacgtgagcactggacagagagaacgacgggctcgat

SEQ ID NO: 9662 - DNA, 178 bp, Zea mays
  Clone ID: MRT4577_108808C.1
ctgaacaaggaggaaggatcttttgccctttttataaaaattaataaaataccatataaatggatggatattaatcacctctccatcaacaatttcatattcaaaacatctaatttccatctttatatcttgtaaaatcaatggggcggcccctctaaatgacccaactttccttacc

SEQ ID NO: 9663 - DNA, 732 bp, Zea mays
  Clone ID: MRT4577_108809C.1
gtcggggtcgccgctggaccagttgctggaaaggattagctaacgagggagcagagaggtgggcgcgtgtttcctggctggaacgaggggaggatctacttcccaccgacctataaatactccaacaactccgacaaatacgcgggagaagacatgaaccagaaggagaagaagctcgtgccagcatggtgcgacctccctttgtggtacgggagggggctcagccagctctcctacgtccgttcggagtcgcgcttctcggaccacagccctgtctacagcatgttcattgccgaggtggagtcgatcaaccacagccagatccagaagatgagttcttggagctcccagctggacatagaggaactgctgccgtactcgtatgggtacacggagatcgatcactatgggtacacagacctcaatttctactgagaaaccggcagaggaactcgcatgctgctgagctctaatagatgcctctagttactgcgacttggacactgtgtttgccagcatgcatgcagttgaggagcttgttctgtagtacccgcgcactaggttttcttcaggaaagcaaatctggaacttcagcgttgcagttttctgaatgttcagattggctatcagagactttacatatgcccagcagtcaatgtacaaaacccggccgcatctgcggtgacatgagatgagcccctggatgatctcttttgctgttttgcaggtgtc

SEQ ID NO: 9664 - DNA, 2938 bp, Zea mays
  Clone ID: MRT4577_10880C.1
gtcggcagcgactcgcacctggccgacgtctacaggaagtccgtgccgtgcaaggacctggtgcccatcgtggccgacctcctggtggagcggttcggggccgtgccaagggagagggaggaggatgaggagtaggaccttcgtcaagcgccggctgggacgaagcccctccccagcacacgcgcgccccctccccgccccacaataaaacagccacacgctcgccacccatggccaccaccaccaccaccaccacagcacaggcccactgccaccgctaccgctaaccatggcctcctcagcgtccctgcagcggttcctcctgccctcctcgcacgcggcggcgacggcggcctcgccgtcctcccggctgcgccgcacagggcgcgcccgcgcggccgtctccgtgccgccgccggcggcggcgggggagcaggtcccgacggagcggctggagccgagggtcgaggagcgggcgggcgggtactgggtcctcaaggagaagtaccgggcggggctgaacccgcaggagaaggtgaagctggagaaggagcccatggcgctgttcatggagggcggcatccaggacctggccagggtccccatggagcagatcgacgccgccaagctcaccaaggacgacgtcgacgtccgcctcaagtggctcggcctcttccaccgccgcaagcaccagtacgggcggttcatgatgcggctgaagctgcccaacggcgtgacgacgagcgagcagacgcggtacctggcgagcgtcatcgaggcgtacggcgccgacgggtgcgcggacgtgaccacccggcagaactggcagatccgcggggtgacgctcccggacgtcccggccatcctggacggcctccgcgccgtcggcctcaccagcctgcagagcggcatggacaacgtgcgcaaccccgtcggcaacccgctcgccggcgtcgacccccacgagatcgtcgacacgcgcccctacaccaacctgctctcctcctacgtcaccaacaactcccaggggaaccccaccatcaccaacctgccgaggaaatggaacgtctgcgtcatcggctcgcacgacctgtacgagcacccgcacatcaacgacctcgcgtacatgccggccgtcaaggacggcgagttcggcttcaaccttctggtgggcgggttcatcagccccaagaggtgggccgaggcgttgccgctcgacgcctgggtcgccggggacgacgtcgtccccgtgtgcaaggccatcctcgaggcgtaccgggacctcggctccaggggcaaccggcagaagacgcgcatgatgtggctcatcgacgagctcgggatggaggtgttccggtcggaggtggagaagaggatgccgaacggggtgctggagcgcgccgcgccggaggacctcgtcgacaagcgctgggagcggcgggactacctcggcgtgcacccgcagaagcaggaaggcctgtcgtacgtgggcctgcacgtgcccgtgggccggctgcaggccgcggacatgttcgagctggcgcgcctcgccgacgagtacggcaccggcgagctccggctcacggtggagcagaacatcgtgctccccaacgtcagcaacgagaggctcgacgcgctgctggcggagccgctgctgcaggagcagcggctctcgccgcggccgtcgatgctgctcaggggcctggtggcgtgcacgggcaaccagttctgcgggcaggccatcatcgagaccaaggcgcgggcgctgcaggtggcgcgggaggtggagaagcgcgtggccgtgccgcggccggtccgcatgcactggaccggatgccccaacagctgcggccaggtgcaggtggcggacatcggcttcatgggctgcctcaccaaggacagcgacggcaagatcgtcgaggccgcggacatcttcgtgggcggccgcgtcggcggggccgtgcccagggagagggacgaggaggatgaggagtaggaccagtcaagcgcggacttcccggtgaccatccagggtttgatgtaaagtagacgcgctgccttcttccatggcacgatttgttttggtattgtcgtagcaacaaaatgtccccttattcacgtcacagagaataagtgcccggcttcactgtcatctatgtctctagcaacagcaacatgccacggaaatctgtcctgcgccctcgttctcctccttgtcgtgttttcatccatcctgtgtttccctctccccgtttcccttgttcgcgtgtgtgtatgtttttgttttgcgtttgtatttgttctgcatcgctctctgctttcccgcttgtgtttctcttgtcctctctctggtttttctggagttcggagcactctcttcgtcccagttagtgttttctcttatttttaaaaaaatttatacttagtagcgagctctttctttgctccgctttctcgctcagtcagtgggggggttgccaacccgtccgttttccctctttcttttcccctgccctgttcgctcaaaaaaaaaaaaacccccatttcctctcttgtcctgacctattttatgaggtcttgattggatgtatatatatattcatcttaatctatatggatttctgaagttttaaaaaaaaaaaaaaaaaaaaaaaaaaaaaaaaaaaaaaaaaaaaaaaaaaaaaaagggcggccgcccttttttttttttttttaataaaaaggaaatcttttgtatttttttaattaactttttaaaaaccccttaaaaaaccatatattgaatggtattgtacatgccctaatgccacgacgttaaacattaattctaaacccgatcgcaacaaccccattacacaccccgaaggcagaaccgatacaataccagtgcagcagtgctgtaatggatgcgtaaatccaccttttacatttacacatg

SEQ ID NO: 9665 - DNA, 323 bp, Zea mays
  unsure (1)..(323): unsure at all n locations
  Clone ID: MRT4577_108810C.1
gcgggatcaaccatattattgagaccaccacgcaccatataaagtggaatccacaagcaccactagagcaccactggggaccaaaatatattccctccttatgcgcctcgcgctctctgcatgtgttgcgaacgcgacacttttccctcgggcgcacaaacccgaatangactttngcccctacctccataaatgagagcgccagagtgtgaaaacccagcgctgcaaccctatatgctccaacacgcactcgcagcaagcaacatacccctatcacactcgtgtcaacactcgccagacctatctttgtggcgcacattggg

SEQ ID NO: 9666 - DNA, 545 bp, Zea mays
  Clone ID: MRT4577_108811C.1
ggtgaaaaggcaacacgtgatttgaggtaattatagcataaaatgcaagctaaccatcaaaacaaatgtttcagattttacttctacgtgccaccattggatcggatgccataccaacaccaccaagaactcgttgattttgcagtaaaatttgaaccttcaaaggtagaaacacaattgatttcttttataaaaattattaactattgaaatattgctatgatgctgaacgccttggatttggattgaggattcttggtaataacctcttggtaggaaaaggtgtccacggtgaaaatgtaaactctgcatttgatatcaactcatatcctattaaattctgctggattgatggttggatattattagctcctattactccttcgtgttggcgaatctaaggagcccagtgaggaaggggaatctgagcatccctgtagaggaagacacgagcacggcatccacaccaccttccttcccggtcgttggcaaccagtagtgtggcaccacatggatgagacccctgcatcacaggcgaggggcac

SEQ ID NO: 9667 - DNA, 1633 bp, Zea mays
  unsure (1)..(1633): unsure at all n locations
  Clone ID: MRT4577_108812C.1
gccgtcgccagccttggagctctcggacacggcggctcctcctccactccccctcgactcctcctccatccccgacgcgacggctccatccccgacgctgagctccatgtcttccctcacctcggtcctagactcccaggtgaaaacttcagactctgaccctgtccccataacgtgtgcctcctgccctcctcgcagatctgcttgtccgccggcggcggctaccactcgccagcaagccatctcctggagctggaggggtctgcttcctccttgactgcccatcgacatcttcgccctcgtggccttcgcgtcggtgcccctcgcctgtgatgcaggggtctcatccatgtggtgccacactactggttgccaacgaccgggaaggaaggtggtgtggatgccgtgctcgtgtcttcctctacagggatgctcagattccccttcctcactgggctccttagattcgccaacacgaaggtgcttccctgtttctgcttatttatctctgtaccatactagcacttattaggttgtagcttgatagtttaggtactagtcttaaattttcttgctattacagttttgttagaggtgcactatgtttaaattactgttagtataagctaataactattgagatgtgcaacaatataactaaaataagagcttaaatactgtaggaaacttaactatattggagatgagacgtaatcattttgctcactgtaaaatgttttatgcgatgtgacctaattattttggagtcttcgcttgttctgtatggttaggtatatgtgacagaggtagcagcaaggatgggagctaataatatgatttgacttctctggtgtctctatatatgtctgtacctgttcatacatacatgaagtacatacctgttcttggtatatacgactcaaaaagactaattcaattttttaaattttaggagtaataggagctaataatatccaaccatcaatccagcagaatttaataggatatgagttgatatcaaatgcagagtttacattttcaccgtggacaccttttcctaccaagaggttattaccaagaatcctcaatccaaatccaaggcgttcagcatcatagcaatatttcaatagttaataatttttataaaagaaatcaattgtgtttctacctttgaaggttcaaattttactgcaaaatcaacgagttcttggtggtgtggtaggcaaaaaaaaaaaaaaaaaaggaaagaaactttaatggaagacatgagcttttgccagtgtcctctgcagggtgttgaacatgggacgatccctcgacttcgttgtcgccgccaagatacactgactggcctagatctgacctgttaccagtagatgcctacaaccatgccaggttaaaagccccctttcagagttctgtcgtatggtgtccgaccatcttttggctgaaggngaactaccaatttacattgtcttgcctggtgtctgcctcctcattttgatatgacaactccaaggcttagctaatgctatagtaaagttgtgggagaaaagttctattgctaaaattgctttgaagagaggagtatagcttaccacagtgagaggatgtcgaagatattgaagtaagt

SEQ ID NO: 9668 - DNA, 108 bp, Zea mays
  Clone ID: MRT4577_108813C.1
tttcagaggaggtatgccttcctcacaccagacaatgacatactacatatctgaatattggcgctagcagacggaccacttttatggtgctgtagaaaaccgcctgtg

SEQ ID NO: 9669 - DNA, 419 bp, Zea mays
  Clone ID: MRT4577_108814C.1
ccggggagcctttttttttttttacccaaatcttttttacacccccggcccccaaaaaggcaaagggaaaaaaaccccccttggctccgggctaaaaactataaaaatttattccctggggaattctgggccccctaacattgccgtggccgaccctttgttttggaccccggggaacccccccctttcaaaaacctgggtgtgggccatggggggggcctcgccgccgccggccttattgttccccacgccctcggggttaagaaagaagggttgttttgtaaaacaaaaacccctcccccacatcggggcggggacccccactttgtttggtttttgggggaccctataaaacggaatgtaggcgtccctgccgttacccggaccaaccgtaaacccggggtcccccccctgggccc

SEQ ID NO: 9670 - DNA, 819 bp, Zea mays
  unsure (1)..(819): unsure at all n locations
  Clone ID: MRT4577_108815C.1
cggggccgcaacccagttcgttcggggcctgctcttttcgacgtttctctgctccagcgcccagcctgcaagcagccaaacttcctcgcgtctcctatggccgagcgccctccccatctccttcctcgccctcagcttggaccgtgtcctgctctcagctcccttgccgtggagttctctgtgtacgttctggttcctgctccctctcctatgggggccgcgagctcccctgccccatgatgccgtcgccctcaagctcgtgccccgctcgccatggccgccgtcaagttcctccctgaagcttccctgcgcacggatctctcctttcccctgctcatcttccccgcgcgcgcctgctctgtccatggccgcgtctagcctctccagcacccggccggatcttccatggtgcgtgccacctgctcctccctgccccagccgcgttcgaccaaacgttcctgcgccctgctcgctccctggagcttcttcctgcgcacgcgccgtgctctcagctcggaattcccctgttgttcagctcatcgcgcccggctgtttctcccctgcgcgcagctgtgccctctactcggattcctgttggccgtgccccctgttcctccgggccgatcaagttctttctggccgcgagctctctcatgtgcgcgttcagccgaggctcctgctccccacgcgcgtccctcggtatctgctcggatttcggccctgcccagctgttcctcctctctgctcgctctcctccatggccgctgtgggctcaccggcgtggtccctgccctggccgncgtggtggcgcgcgctgct

SEQ ID NO: 9671 - DNA, 809 bp, Zea mays
  Clone ID: MRT4577_108816C.1
aactacacacagacagtagcttagctgggtttcacattccatcggatcgacctagcctcggactcggagaacatgggaggtggaagggacaatcatcatgttgataaaggatgttatcctccaactgtctatcctccagtacattcaactggatcatatgcatttgcgcctccagttgcatatccatattcgtatgcacaacatggatctatggctccacccccattaggatcatatccatatccttcacctatgtactcttcacatagtggttacccaccatctggatatccaacatacaatcaaagtgtttacccatcaatgggtggctatcctggtgctagtttgcatgctactcaacatcatggtaatggatataacatgggggcaacactcattggtggagcagcagccgcagccgccgctacctatggtgtgcatcacttaacccatggccatcaccctcacaatcaccatttagggcattttggcaagtttaaacatcattataatggacactatggcaagttaaagcatggaaaatttgggaaacacaatgggttaggaggaaaacatggccttctagggtggaagcatcaccgtcatgggttctttggaggaaaatacaagaggtggaagtagttaaaatatagggaagggtatgcaattggatcctgcaagtatgataactaacatatgtaaaataaaaatggttggtttgtgttaatgctatacatgcatgtaatatttttataagttacttgttgtatgtgtcattatcaatatataataagaatacatactttgtt

SEQ ID NO: 9672 - DNA, 478 bp, Zea mays
  unsure (1)..(478): unsure at all n locations
  Clone ID: MRT4577_108817C.1
gtgcagnaatcagcgacccagtactgtagacaccaactaaactggctgcagatacacgaccgcttacacatgatttggcataggcatatggatgatgttatgatgtcctatactgcctgccgcactggtaaacatgctcaaaacatacatggcgggtgtagatgaagagctccacgtgagctacccatgatatcaccggagaatgacatttaccttccaacctttaacaaaagacaagaagctacacacgggttaccacaagacagacgttgctacatctcgccggccatactatccttactataccaaccagccagtcgagaaggcaactttaccatatgtatgatcgaatatcattgtgctacactatgatggaccctgctacactaatccacactcttgcagggatagtgccgaaaaaaggaaaaattacatggatagggacaagctttaccaaaacaagcaatctactaagaac

SEQ ID NO: 9673 - DNA, 303 bp, Zea mays
  Clone ID: MRT4577_108818C.1
aaaaagagaggggttacttttaactcattttacttctctttttatttattctacaaggcgcccctttttttttttttggcaaaaaaacaaaacctttttttaaacaagggctttattacaaaaaaccttcttttacagcccccctacaacatattcacttaaaatcttttaaggccaatttggccaaaatcacccttcttaaaatcctaacccttgggtttcccacaaaccccattattccccctaaaccctctttaccaaaaaaccctcctggtgaccccaccaaataccccctcaacatca

SEQ ID NO: 9674 - DNA, 366 bp, Zea mays
  Clone ID: MRT4577_108819C.1
cgcggtctcgccccgcgatgtctctctcccccccagcctctttctttcttccggtctctactcgtagtcaccgtcagtccgtcaccaccctcctctaccccggccgccgaaccgcctgctctcctctgcgtcgtcagctgcccgaagcgctgtctcccgcctctaccccggctgctggaccgccgctgccacccggccgcccgaaccacccccacacgccctcctctaccccgtctcctcacggcctcgcgccctcgcccaacatgccagactgtcctcgcctctaacggttagaagcgaattaaaaggattgaagaagattaaatctcttattaatcaaaattaaataaaaataaatttaatttc

SEQ ID NO: 9675 - DNA, 323 bp, Zea mays
  Clone ID: MRT4577_10881C.1
tgaaattcatctttactgatcggaggaagattatgttattcagcccgagactcgagatgggggagcttgaaatgataagagaaggacccacccattaattaaactattccatggactttgtccgcttcccttaaggcaccggttgtctccggaacaaaactctcttataaacaagattttttaatccaaccaaatgcctattggtgctacactgtattctgatatgccacttaatgacactggcttccacatattgactcatgaaaaataggttctctatggaaaagaaacactcctaggaaaatatgaagctcctatcataa

SEQ ID NO: 9676 - DNA, 259 bp, Zea mays
  Clone ID: MRT4577_108820C.1
tccttctggcagcagagcggcagccaatggccatagagacggacgcggcggcggcgagggcgagggcgtcgggctcggtttcagatacggcgcccatgtccccggccgccgaggcggcagcggctgcggcggccccgggcccggcgcgcccgcgcgggggggtgaggaagctcatccccacggactacctgccccggagcaaacggcgctggaggctggccgccccgtccggcgacggcgcggacaggctcgcctcgac

SEQ ID NO: 9677 - DNA, 357 bp, Zea mays
  Clone ID: MRT4577_108821C.1
tttttgtttttttttttttttttttttttttttttttgtctcatttttttttttttttgagggtaatgggcctgtatttacaaaacatgggacaaaaactttttcagaagagaaaggggctttgtcagttggttttttggccaacttttaaaaaactggggggatacaggggttggccatcgctcaattggatttcggggaaaaagggataaacttggaaattgcgggcttttgcaatttaacctatccggacaccaataaagggtttccttagaaactttttttttcggaattatttttgaacaaaatttcaacgaggttacaaaggccaaggggtccaatatggggaaaaacttg

SEQ ID NO: 9678 - DNA, 255 bp, Zea mays
  Clone ID: MRT4577_108822C.1
cctcgaggccggcctggccgggatgctccttctgtgacataattttcacgtactggccatctatgggctacacggtagttctttcttgtaatgtatgaaagttttcttttgttgctttggcctttaatttcttaaatctgatggttttagaacaatccttgtaagaaatgggaacgcagattcaagaagaatttgtaagtgtaatcagctgcaggtcattccagaaaaaaaaaaaaaaaaaaggcccctagggcc

SEQ ID NO: 9679 - DNA, 306 bp, Zea mays
  Clone ID: MRT4577_108823C.1
actatataatagaattagaaatatgtttgttcaaaatgcttgttgttctattgtacctgaactatcttatatttcatttataaataatgaaataatgataaccaaggtgaccgattggaaatgattatagctgagagttattggatccagtattattagtagtttggtttacacagcagaaattaagaaatctgtgcatttgctgatatgagaacagaagggtactagctggttttggttagattttgggcccctgaatacattgtgatgttttgccccctcgattagtgcagtctgcttggtacg

SEQ ID NO: 9680 - DNA, 614 bp, Zea mays
  Clone ID: MRT4577_108824C.1
gcgaagaaggcgatgtctgccgcaaatcttgccgagcttgccctaatcgatccaaagaaagcaaagaggattataaataatagacagtcggcggcaagatcaaaagaaaggaagatgaggtacattgctgagcttgagcggaaggtgcagttcatgcagagagaagccacagcactggcaacccagctggcattgctacagagagacacggctgggctgactgttgagaacggcgacctgaagatacgtctggagagcacagagcagcagatccacctacaagacgcactgaacggggccctgaaatcggagatgcagcggctgaagatggcgacagggcaggcgggcaaccagatgatgaacttcgccgaaccgccgcacacgttcggcggtgcgaaccagcaggtcttccaccacccgggccaagcagtgccgccattcctggtggcgatgcaacagcagcagcagttgctgctgccgcacatgaaccagccgttgcaccctctgcagagccagccgctgcatcaggcggcgacgctcagcatcgacatggccgggctgccggcgcctccacctggccagtggcaatggggtggtgacacgtggtcggagag

SEQ ID NO: 9681 - DNA, 176 bp, Zea mays
  Clone ID: MRT4577_108825C.1
tacgtcgtccgggcgcggggtagttggttcttaacatgaagcacatcacctacaacaacatatgctttcttaccctgctacttacaataaatctcatagagggctccacctctgacgggttgttgctataacactggtgtgttagtcaaaacaacttcgttggggggggacacttg

SEQ ID NO: 9682 - DNA, 154 bp, Zea mays
  Clone ID: MRT4577_108826C.1
cttgcttgtcctctacgtataaccaagtgctgtgagggataagggtacttaaggacatgtggatgagcgaccgattcggatgatgtgttatgcacgacgcttaaactgcggggtcgcatgggacaccagaaaaaagtccgtggacaatgtctta

SEQ ID NO: 9683 - DNA, 174 bp, Zea mays
  Clone ID: MRT4577_108827C.1
acctacacatcgcgctcgtgaactactgaaagagccgcgccggattctactctagcggtgtatccttacaccattttaactcgagaatggcttccgtcccttggtggcgggaaagggagccttaccccgaagtgtccggaaaggtgagctccccttaaaacgaggcatgagcta

SEQ ID NO: 9684 - DNA, 404 bp, Zea mays
  Clone ID: MRT4577_108828C.1
ggaaaaaaaaaggccggggccaaccttggggggggatttttttttttccggttttttccaaatttaaaaaacccccgggggccttaaaaaagcctccaagggttggggctaaaacccggggccccccataaaacccggaggccccccccccttttttttttatgaaatttttcccccaagccccgggggggccccccccccaaccatttggggggggaaaaatttttttttttccccggggtggactttgaggggaacccggcccccaaattccttaaggattttgttttcgcgaaaccctgtttggggaaaaagcccccccctttttttttaattttttggccgccctttgggaggggccaaaaggccgaggtccataggggggggggttcccaacatacccc

SEQ ID NO: 9685 - DNA, 354 bp, Zea mays
  Clone ID: MRT4577_108829C.1
tgcttttcttccggcactggaaccggcggggggcagtgacttgatggtgtacgtgtctgttgaacatagacaggtcataggcggatgcatcacggtggagtctatagtttagatccccgtgatggcgatggtcgaacgttctgcaacgtcatgctattagaggctgccgatggaccaggcagacgcataggatggctcctgtactattccattcttcaaaggatgcctaccttcgaaagatcgagcaacatcagatcagtgctagatcctttgtaggtacaagcatgtacgccgtcaatgacatgcggatagaaagagacagcatattgggcgctagctgttctggtagtgtga

SEQ ID NO: 9686 - DNA, 160 bp, Zea mays
  Clone ID: MRT4577_10882C.1
acgaatcaacgttccttcaaatcaagaagaggctctggttatagtacctgtcgcatgtaaccatggtaccgcggagatgcctatgactcgagtctcgagtgtgccacctcatagatcttagtgggcacaaaacggggcgcttgctcaaaacggcggttgt

SEQ ID NO: 9687 - DNA, 415 bp, Zea mays
  Clone ID: MRT4577_108830C.1
ggctgaaaaaaacaatggcgatgatgcttctgcaaattcctccttcgtcttccttgttgagcaccagaaaccttcaaatccgattcttccactcttcagtttcagcttcctcgaagaaattcagatgcagagccgtccgtgagaaggcggaggacattgataagaacatttcgccgccgtcttcttctcctcctcctccttccgccgaagaagttaccaagaaatatggccttgaagttggtctatggaagatattaagctctaaggatgatgaaggaagtgatggagacaataagaagaagaaatcaaaaacagatgaggctaaagagttacttgcaaagtatggtggtgcttatctcgctacatctattactctttctctcatttccttctcactctgctatgtccttgtgac

SEQ ID NO: 9688 - DNA, 207 bp, Zea mays
  Clone ID: MRT4577_108831C.1
tacatatttacatttctagaacctgttcatctgcaaaacacccaggcacatcctttttgcaagtgcgagactctgagtgaagctctctaagtctcttagaaacttaacatctctgcaaaaatgaagatgtattatagccttggggcagggaagccatctcccaggctttcacttcctcccttcgtcccttcttaggaacagtattgg

SEQ ID NO: 9689 - DNA, 513 bp, Zea mays
  Clone ID: MRT4577_108832C.1
gggcgattgggattctcgaggccggccgggacttggcgagctgattagatgggaatcgcaaattaggaactcagttgccgggcaaccaagacgaccgatagaagaaaccctcatacacaagccagccaactcgtcctccaacaactatggctccggcgaccaactcaacgctcctggcggtaccgtgaacaagagcacaggcagtggcaaccaattccctggcgctgctttccatgggagtgtctcttttgggtcgccctcgccacaaaatccgccctccgaacattcgaagtaacccttcacaccaccgcaacgctagttagaggccaaggatcaagttctcgatagcatgtcgttcgttgttgactgggccttgatgcttaggtggtgggagcaggcgttagtgcgcgtttggcacagtagctcgaagactatcattttcccgatagggttaggattaaataaatgaatcacggcaagaatcggaaaaaaaaaaaaaaaaaacccgcggcc

SEQ ID NO: 9690 - DNA, 717 bp, Zea mays
  Clone ID: MRT4577_108833C.1
gcccccgcccccgcccctgcccctgcctctgtatccatcccacgtcttcttccatgccctcgcctcagtgccccctcctccctgtcccgcacgtgatgccccaccatgacagccgccgctccatcaacgacctcgccctccttcctccaccgtcccgctcgcacgaatctccttcgttgcgacactatcgtgggcctgcggtgcaaggagatcgccacgctcgttgttggggcctctgcgctctcctcctggcacgacggcagtcgtggtgagccccgaccctacttcattcttgaaagcttggcacctccgcgcgggattgggtgggttggttttctagcagactggtgaggttggtggcccgcgccttctacgatgaccacgatgggtgcaacccgccacatgacgccaacactcggtatgccgtgcagctgctcgacgtctgtgtgtgttcgttttctggtaggctggcggaccgtgccttctacaatgaagtctctatgaacggcgacaaccaaccattgaatatttgtaagcttttttgaccttttatatggcctggcacttcaatggtagactagtatagaaggcaaattaatgaaattggttgcaattacagatagtgggttgcaaatagcttccttccatgtgaaaaatgtttttttttcaggagcagatccaggattttgatgcactgcagcacacagcctttaaaga

SEQ ID NO: 9691 - DNA, 463 bp, Zea mays
  unsure (1)..(463): unsure at all n locations
  Clone ID: MRT4577_108834C.1
cgaaaaaaaaaaaaaaaaaaaaaaaaaaaaaaaaaaaattttttaaattatttaaaaccaaaaaaaaaaaacaagaaccccaagaaaaaatttacaaccggnataacccccccaccctccccaacccggccaggcccaccataaccacttttataacttcccttaatttccactttctggccttacttcacatcctcctaactcgaaaaacccaatattttcccaacttaatacctttggccctcatccccctttcgccacctttgatcattactaataggccccttatgttcccccttccaaccctttgctccttctttattgcccattttaaccccccctttattgccccttttaccacacccgtttctttgggtttaatctcttttctctttcttctttcacccctttacccccctatcctttaattccttcccttctttacttccacattacccctttt

SEQ ID NO: 9692 - DNA, 413 bp, Zea mays
  Clone ID: MRT4577_108835C.1
aaaaaatcttgacactttatagtacagtcaacagtcattataaagggaataagcatacaagccttagtcatcaaacctatttctttatttcgtagctgcatccaccaacttatagtgaaatatcttaatccaccaaagatatttttccttattggtccacatatgaacatagcagtggcatccatatacatttccaacatttgtgtcactgaaattcataaataagaatataaagaggaaatacaatatttaccaaagaagagtttgttgtcacttttagactggagtatccgagcttgcagggtcttgttctgaaaaaattataactagcttatcatgatccaaaactgtagttttaaagtagactaaataaaaccaagattaatttgagaaacgacacaaaacaaattttg

SEQ ID NO: 9693 - DNA, 274 bp, Zea mays
  Clone ID: MRT4577_108836C.1
gcgcccacgcatacggctgaatctagcaggccacgcgcactcccagctctgctgttacgcgcccaatggcaacctgctccatctcctgctagcgttgatagcttagcaccgtaagacacgcatccttggccattatggagaactagtaagtgtcgcgccgagacagcgcaaagtgagggcgcagagcgagggagtccacaagcaggtgtgggtcccgcttccctcccatgctacgggcgatggaggacgtcatcacccccgcaatagaagaaca

SEQ ID NO: 9694 - DNA, 323 bp, Zea mays
  Clone ID: MRT4577_108837C.1
gggagtcaccaaaaaaaaccaaaacccccctgcaaaatcaataaaactttacttttttttctacctctaatcctgggggggaatcttttatggcattggactacaacggtttttgatcattttcaacccccaacctttcgtttttgataaagggacccccccttggaaaaagctttccctgaggtttgtcttgaacaaatccttgaatttcacctttgacttttaaaaaaaaaaccccccaaccgttcctttttttcttttttcaaaaaaaccccttccaaccccttttgttttttaaaaattttttcttttatcccaggctt

SEQ ID NO: 9695 - DNA, 392 bp, Zea mays
  Clone ID: MRT4577_108838C.1
aactatcgtcgtttcactgaggcccaacaggtgttgtaagtcacaaaggttctgcacggtggcgcgggggtcaagtgcctgcccctaaagaatgtactagaaccaggtgacatccgcacgcttgctgaactcgggctaactgaactaccagccatgttacaggactcacatcctgctgttggctctactcttattggtggtgaaacagaacctctttacaggtatgaacaattttgctgcacaattctatatgcacccaaacaaagtatacaaaaacaatacccaacatagcatatatgatgctaattcttcttgcaaaaattgtccatagcttgctacaagacatctatctacacgtgacatgtatgaggagtttaagaagcatgctacta

SEQ ID NO: 9696 - DNA, 748 bp, Zea mays
  Clone ID: MRT4577_108839C.1
aaaaaaaatagagttccgtttcttttctccccctcttcctcgcagaaggagcagcaggtaatccggtcgaattgataggggagacgaggagcagcgatggccgccgctcgagcccgatggcggctcctcgcgctgcccctggcgctgctcctcgcgatcggctcgtcgcgcggcctcgacgcggcgcccaagccccccgtccccaaggccatctccgacctgagggaggcgatcgtcaaggggctggggctccagtcggaggagctcaaggtgtccgggttcgacgtgagggacgcgctggtggggcatgcggtggcgtacgagttcgacatggaggtcgggaggaaggccgtgccggtgcggctgctcgaggacgtcaaccggtgggacttcgtcgacctgcccatcttccggtcccaggccgacgccgacgacacggcgctcgccgagatcgggcggggtagcttcgaccccacactgccgcccttccagctcgccgggcccatggagctatggatccaggacggcgacgacgtcaggctcgctttgccgcatgatgtggaagctggaaccctgaagaaagttgttcttgctgacggtgcggtggtaacagtgaaaggtgctagggcggtgagcctccgtttgcccctcgaactaccacttcctctcaaccgcaccacatacaagggacgtctgtctagcttgctttccattgctcgagccctacgcggtgcagctcggtctaatc

SEQ ID NO: 9697 - DNA, 1053 bp, Zea mays
  unsure (1)..(1053): unsure at all n locations
  Clone ID: MRT4577_10883C.1
cattgggtacctcgaggccggccggggaaagatagtccattctgttttcgcgcaaaccatagatcgtattattatgccattacaagagagttttgctccttatagagatgtgcagcactcagaggtggaataggcattctgatcgtagtagtcatcttggatgcgacgttgcaaaggatgggatagaagaatcgcacatctgacgggagaaaacgcgagcaagcccttccttgaccagtctcaagaaagctcgtctacggctctgctcctcgccggcgatgacgcccgcggagacctccccgccggcgccacctccacgtgcttctcaccctgtctcctccccgctcctcctacaagaccccacaacccaggccacgtgcccttggagggagcagctcaccgtccgtggcgtcgccgtggcggcggcgctgggcgcgctgctctgcgtggtaatccaccgcctcaacctcaccgtcggggttataccggcgcttaacgtcgcgtcgggcctcctcgccttcttcctcgccgcggcgtggcgtgctgccgccgggtggctagggtttggccgcgggccgcccttcacgaggcaggagaacaccgtcatccagacgtgcgccatagcatgcgccggcctcgcgtttagcgggtgctccgcctcctacatctttgctatggacaggaagacttatgagctcgtgggaccagactatcccggtaatcgagccgaagatgttaaggatccttcacttggctggatgatcagtttcttgttcctcattgctctcgttgggccatttagcattgtcttgcttcgaaaggtaatggtgattgattacaagcttgcattccctggtggaacagctacagctttgatgatcaatagcttgcatgggaaaacggatggtgatcttgcagggtaaggcaacaggaaaaagctgcactgccttgtaaaaacatgggcattagttntgtttggagcttctttaaatggttctttagtggtgttggtgactcttgtggttntgacaatttcccaacatttgggcttga

SEQ ID NO: 9698 - DNA, 302 bp, Zea mays
  Clone ID: MRT4577_108840C.1
cgctcgtcgccgcgcagcattagtcgccgagagcgccgtccgcgccgaatggtactcgccgtcgaactccgtcatggtggtgatcgcaatctgtcttcaagcttcgagggatcaaagatcaagcgttggcgaccaagtgatccagttcttcgagttccgcgagattgaagatcctgagcatctgtttggtgaaggttgtccacattgcaaccactgctcaggagaagacgaacccgtggaaggagacttccaggagttccaagactacgacgagttctaggtatgggttggcggcaaccccc

SEQ ID NO: 9699 - DNA, 535 bp, Zea mays
  Clone ID: MRT4577_108841C.1
gccggccgggccgggacgtcccatcggtttctctcgtgccagtttctctcgccccggttctctctcgctcatcgccacgcaacattagtcgctgagagcgccgtccgcgccgaatggtacacgccgtcgaactccgtcgtggtggtgatcgcaatctgtcttcaagcttcgagggatcaaagatcaagcgttggcgaccaagtgatccagttcttcgagttccgcgagattgaagatcctgagcatctgtttggtgaaggttgtcagcattgcaaccactgctcaggagaagatgaagtcgtggaaggagacttccaggagttccaagattacgatgagttctaggcgtgagttagcggcaaacccccagtcggctgcctatgaaggccgcgtttatctacgtttcttttccgcactttgatttattgtaaagactatgtggatgtctcagacatatgatgtaatcgactattttttccctttttaatactatttgagcattgtgtgacaaaaaaaaaaaaaaaaaaggccccta

SEQ ID NO: 9700 - DNA, 193 bp, Zea mays
  Clone ID: MRT4577_108842C.1
gggaggagcggaggaggagcaacccggggagctagctgctgcggcttctagctggttcgattactcctggagctgacggagcccgaggaggcgatgcggctgctgcatctgctcctgcccgagcttctgacggagcgggtggagcacatgaaagatccaacagtcggcgggagatcactaggtgcccggaact

SEQ ID NO: 9701 - DNA, 3159 bp, Zea mays
  Clone ID: MRT4577_108843C.1
atgaggactcgttctggattggttaatggtgagggaacttcccagaataaggctaacacgtcgaatccacagtcaacatccgcgcttgagaatgcagttgcacaactcatcagtgtaggcattgatcatactcaccttctccatgagttggttcagcgtggtcagtgggatccaaatgctgccagtacttataaggaatttttggacacgcaaccaccaattttcactagagctgaaaatctgcttgaagctgaggattggcttcgaactattgagcagaagtttggactcatccattgtgatggcgttcagaaaacccagtttgctgctcaacaactccagggtcaagctggagcctggtgggcaaaatattgtgcgacccagccagagggatatcaagttccttgggttgagttctgtgaggcatttcgggcacattatattctgaagggtatcatgggtataaaagttgatgagttctttaacctaaagcaaggtgaaggggagagtgttatggagtatttggagacgtttaatcagttatctcagtatgctgcagactatgtcggtactgaagccatgaagaagttctacttcatgcgtggccttaatatgaagctcttgatagcacccaatgtggctgaaagttataatgatgtagtcagtcaggccaatctagtgactctatttgattcgggtgcatctcataccttcatcaatagagcctttgttgtgaagtaccaaccgccaatggaagaacggaaagatactttctgtatacaatcccctagaggacgcatctatactaaggaaatggtggagaatgtacccataaatctggagggtcacatttttcctaccaacttgcttgcccttcagaagcaggatatagatgtgatccttggcatgaactggttacatcaacatggagctattattgatacgttgcaacggacagttcagttggattcacccaatgacatttctaaattgctaatccgattgccgactcctaagagagcagtagaaagagtatgtgctgtcacaattaaagagataaaggatataccggtagtcagagagtttccggatgtgttccccgaagatttgcctggtttacctccagaaagagatgtggaatttgtaatcgaattgcagccaggtaccgcacccatatctagaaggtcgtatataatgccacctaaggagttagcagagctaaagactcagttgcaagacttgctagataaaggtttcattcggccaagttcatcaccttggggttgtcctgccatatttgtgaagaagaaagatcaaacactcaggttatgtgttgattacctaccgctcaatgaggtgactatcaaaaataaatatcctctccctcgcattgatctactgtttgaccagctcgcaggagcaaaagtattctccaaggttgaccttaggtcaggttatcaccagataagaatctgtccggaagatgttcccaagaccgctttcactactcgatatggtctttacgaatatttggttatgtcctttggtctaaccaatgctccagctcacttcatgtatttaatgaactctgtgttcatgccggagcttgacaagtttgtggttgtgttcattgatgatatcctgatatactccaaggccaaggaagaacatgcataccacttatgtattgttctaacacggcttagagaacaccaattatatgctaaatttagcaaatgtgagttttggttggataaagttcagtttctaggccatgtcttgtctgccgagggtgttgttgtcgacccgagcaaggtcaaggatatcctcgattggaaacctcccactactgtgcatcaggtcagaagttctcttgcaatggcaggctatcatcgtcgctttattccagatttctctagaatatccaagcctatcacccaactgctcaaaaaccatgtcaagtttgtttggtcacttgagtgtgacaaagcttttgagaagctgaagaagctattgactacaacaccagtgctagctcaaccagatatagcaaagccatttgatgtgtattgtgatgcttctgtcattggcattggatgtgtactgatgcaagaaggccatgtgattgcctatgcttctcgacaactcaagcgtcatgaagagaattatccaacccatgatcttgagttggctgctgttgttcatgcgctcaagattttgcgccattatctgctagcttggaagtgggaagatatcagtatggatttcattgtcgggttaccgaagacctcaaaagggtatgactctatttgggtaattgttgatcgcctcaccaagctagcacatttcttaccagtcaaaactttatatcctgccaaggcatatgctgaattgtatagtgctcgtatcttaagtctccatggggtacccaaaactatcgtgtccgacagaggttctcagttcatttccaaattttgggaacatttgcataagtcattaggtactaagcttattcgtagttcagcttatcatcctcaaaccagagggcagactgaaagagtgaatcaaattctggaggacatgctaaggtcctgtgttctcgcttattcagctaagtgggatgaatgtttacctttagcagaattctcctataataatagttctcaggacagtatcaagatggcaccctttgaagctttgtatgacagaagatgcagaactcctttaaactggtctgaacgaggagagagatgtttctttgcaccaaacttagtaaatgaagttgaggaaaaggttcaacctatccaacgcaacctcaggatagcacagtctcgtcagaagagttatgccgatcaaagacatcgaccctttgtgttcaaggttggtgattatgtctatctgaatgtatcaccaatgaaaggagttaatcgctttggtgtcaaaggaaagctcccacctcgttatattggtccctttcgaatcatgcagcagtgtggaccagtaccttatcatcttcagttgccagagcatatgtctgtagttcataacgtgttccatgtatcacaactgaagaaatgttttcgagtgcccgaacaagctatggatgtctcagaggtcaatcttgaaccagatctgacttattcagaatatccaatatga

SEQ ID NO: 9702 - DNA, 434 bp, Zea mays
  Clone ID: MRT4577_108844C.1
ggaccaaaaatatccgaaccaaaggaggaccctcattctaaagagggttacccaaaactattgggggggggtttttcaagggggggggggcaacgaaaaaaattaaaaggcatgggggggcccaaacaaacagaggggggtgggtacttttccaactttacaagggaaaggggggggccaaaagaacttaaaacaggtgggcctaatataaagcaaatcctatgaatattaaggggggcaaaaacgggaagggcaaaaaaactaaaaagcccctaaagttaaactcccccccaaaaggaacgggaggagtaagggtgctcctaaaacaaaggctattgggcggaaacccaaccttgaacaaaaatggggaaactaaatttttttaaaaaaaacatggggcagccctataaaccccatccagggacagcacctac

SEQ ID NO: 9703 - DNA, 458 bp, Zea mays
  Clone ID: MRT4577_108845C.1
atgaagattgaaattgctcgttatgtcgccaagtgcgatatttgtcaaagggtgaaggctgtgcacttaaaatttgacggaccactacaaccattgcctattccagcttggaagtgggaagatatcagtatggatttcattgtcgggttacccaagacctcaaaagggtatgactctatttgggtaattgttgatcgcctcaccaagctagcacatttcttaccagtcaaaactttgtatcctgccaaggcatatgctgaattgtatagtgctcgtatcctaagtctccatggggtacccaaaactatcgtgtccgacagaggttctcagttcatttccaaattttgggaacatttgcataagtcattaggtactaagcttattcgtagttcagcttatcatcctcaaatcggagggcagactgaaagagtgaatcaaattctggaggacatgctaag

SEQ ID NO: 9704 - DNA, 210 bp, Zea mays
  Clone ID: MRT4577_108846C.1
cccactcgccgcccacgcgtccgcccacgcgtccgcgcacgcttataaagactcgtgggcggactccagggcggacacgacctagatcacataaggcgtcagcaccgaaccattcaatcatagaaccagcgccagaccaagccgaggacagaaggaggttccttaaccaggcgcgcctactattcgaaaggccaccagcaacatcgccga

SEQ ID NO: 9705 - DNA, 2058 bp, Zea mays
  Clone ID: MRT4577_108847C.1
atgaggactcgttctggattggttcatggtgagggaacttcccagaataagactaacacgtcgaatccacagtcaacatccgcgcttgagaatgcagttgcacaactcatcagtgtaggcattgatcatactcaccttctccatgagttggttcagcgtggtcagtgggatccaaatgctgccagtacttataaggaatttttggacacgcaaccaccaattttcactagagctgaaaatctgcttgaagctgaggattggcttcgaactattgagcagaagtttggactcatccattgtgatggcattcagaaaacccagtttgctgctcaacaactccagggtcaagctggagcctggtgggcaaaatattgtgcgacccagccagagggatatcaagttccttgggttgagttctgtgaggcatttcgggcacattatattctgaagggtatcatgggtataaaagttgatgagttctttaacctaaagcaaggtgaaggggagagtgttatggagtatttggagacgtttaatcagttatctcagtatgctgcagactatgtcggtattgaagccatgaagaagttctacttcatgcgtggccttaatatgaagctccaactcttgatagcacccaatgtggctgaaagttataatgatgtagtcagtcaggccaatctaggtgcccctgttatgatgagtatgttttatgtcgccaaccatcctgcattgactctgtttgattcgggtgcatctcataccttcatcaatagagcctttgttgtgaagtaccaactgccaatggaagaacggaaagatactttctgtatacaatcccctagaggacgcatctatactaaggaaatggtggagaatgtacccataaatctggagggtcacatttttcctaccaacttgcttgcccttcagaagcaggatatagatgtgatccttggcatgaactggttacgtcaacatggagctattattgatacgttgcaacggacagttcagttggattcacccaatgacatttctaaattgctaatccgattgccgactcctaagagagcagtagaaagagtatgtgctgtcacaattaaagagataaaggatataccggtagtcagagagtttctggatgtgttccccgaagatttgcctggtttacctccagaaagagatgtggaatttgtaatcgaattgcagccaggtaccgcacccatatctagaaggtcgtatagaatgccacctaaggagttagcagagctaaagactcagttgcaagacttgctagataaaggtttcattcggccaagttcatcaccttggggttgtcctgccatatttgtgaagaagaaagatcaaacactcaggttatgtgttgattacctaccgctcaatgaggtgactatcaaaaataaatatcctctccctcgcattgatctgctgtttgaccagctcgcaggagcaaaagtattctccaaggttgaccttaggtcaggttatcaccagataagaatccgtccggaagatgttcccaagaccgctttcactactcgatatggtctttacgaatatttggtgatgtcctttggtctaaccaatgctccagctcacttcatgtatttaatgaactctgtgttcatgctggagctcgacaagtttgtggttgtcttcattgatgatatcttgatatactccaaggccaaggaagaacatgtagaccacttatgtattgttctaacgcggcttagagaacaccaattatatgctaaatttagcaaatgtgagttttggttggataaagttcaatttctaggccatgtcttgactgccgagggtgttgctgtcgacccgagcaaggtcaaggatatcctcgattggaaacctcccactactgtgcatcaggtcagaagttttcttgcaatggcgggctatcatcatcgctttattccagatttctctagaatatccaagcctatcacccaactgctcaaaaaccatgtcaagtttgtttggtcacttgagtgtgacaaagcttttgagagctga

SEQ ID NO: 9706 - DNA, 316 bp, Zea mays
  unsure (1)..(316): unsure at all n locations
  Clone ID: MRT4577_108848C.1
gtggggtttttttcaggggggaccgggggctggatgcctcatagaccaggtagacaaggagatgagtaaactatggatgatagactgacaaactaaagggtaatgattatcatgctagctacaaccctggagtgtcgagagaaatgaatataatatagatatgataaactaatgaggtgggggggggacgagccatgtatttattagtagnagccaacttactacacacgctgttactattataaggtcgagtgatgttccaccttgcgcagaagcgagactatcaacaaattgcaggcgtcagatgatgaaccca

SEQ ID NO: 9707 - DNA, 509 bp, Zea mays
  Clone ID: MRT4577_108849C.1
cccacgcgttcggcagccagcacctgcacactaatgagtctacaacagaaaacaaaacttatgtgacacttgtacaagaaaacatcacccctattgaaatattttggctgatgttactagagaagtcactagcctccttctattgccagtaatacagaagcaaagaacaaaccagctatcatcagacttcgtgccacaccatagcaattcaaccaatttgctaagagggttcaaaagataataccagtgctcctatcaaacaagttcaagtcaatctcatcaaaagcttggacattgctactaagatggaggcactaagtctcaaagcccttgaagcatatgtgcacctattcagtaacttactctcttattctcatatcaaggcattagtagctctctttggttggacattaccaaaaaaatgtggaagacatggataatgttcaaatgaatgttggctttggcccatctgatctcaaatactggttgcctttctcatgtcctttttt

SEQ ID NO: 9708 - DNA, 269 bp, Zea mays
  Clone ID: MRT4577_10884C.1
agcgcatcacgggtgcatttttctacgtctctggtcgccgcgatcgcgacgaacaccaccagcacctgtctgtggttgacggcggctccctgccgccccacccggctcttgacccccaggcgggctccccgcgctcgtccctgcccaaccacaccatactgctgcgaccgcgtccgactaccactcccgacgtctgccatcctggccggcagacgtggacacggacaccgcgtctcatggccgctccgtgctgttcccgaccgagagca

SEQ ID NO: 9709 - DNA, 413 bp, Zea mays
  Clone ID: MRT4577_108850C.1
ataaggaaagttcgcacgctctgcagagcatccgaatcggaattaatggctgtgtctacgagcgctattagactggatgtcgccctttcagagctcataggattgcgtgtatcgtgtcacgatgattacctgtaatgaagatcacgcatccaccaacaacatgctaattattactaacatataaggacgatagattctgcattaaactaaaaaccttatattggctacacctatctaaacccacagatccactgaccaacatcactgccgccacagcaccaaaaacctggaggcgaacaagtgcagaagaccacacagacttcgaccgacatacaactgacaaataaccgatacgacttggcgctgccaccaatgaccaggcactacatactgggcaacgcatggctcggcta

SEQ ID NO: 9710 - DNA, 289 bp, Zea mays
  Clone ID: MRT4577_108851C.1
cccacgcgtacggccacgcgtgcgcaactcactagtactgagccgccgaaatcaggggggcaggtagctcgagcgcgcgctccacctgcgccgacgcgatagcgtgccaagtggaacaagaagaggatgcggaggttcttgaggaagcgcgggaaaatgaggcagacatctaatgaggcgcatcttgagaccgaagatggcgagctgctcctgcaccatggctgtgacgcggagggatgataggctccctctgtagacgcgcttcgctgtagacgtaggcgatgcaacc

SEQ ID NO: 9711 - DNA, 380 bp, Zea mays
  Clone ID: MRT4577_108852C.1
gtaggaatcaatggcactcgaacaaataccttggcggcaatagtgtttctccatatactccattgtgctccgccggcgatgctagctacactatttccggatggctggtgcaccacgccagctcaccttacatgtgggggagggatccaagccctggccacctgattcttagcccgaactgacacacgatatataacgcggagatcaatgagcatgggggcgatgacttctcctctaccctgaaagaggacccgaccggttcgtgcacactcgacacgaaggccccggggaagtcccccatatgcatccggcttgctgacaagtctggtggtgaccgaatcgtccacgacgaaatccccgccgattcctaagttggcacc

SEQ ID NO: 9712 - DNA, 639 bp, Zea mays
  Clone ID: MRT4577_108853C.1
aattgctcgctgcgacgacgcctctgacatcgttgcttcttccccacgagtaaccgataatccgccggcgttgagatgttgacttatagggatctcctatctggcgacgagctcctgtcggattcattctactacaaggagctcgagaactgcgtcctgatggaaggcccagggagagtggatctccgcagaggtactgttgatgtggacattgttgtcaatccatccgctcgatggtgatgcgtacgaaagtgatgatgagcaaggtgagaatgagtatgatattgttgacacgttccgtgtacatgagaaaacttcttttgaccagaaaacatttgtgtcttacatcccaaaatatctcaagaatctcgctgctgtggtgcagccaaacaaagcggatgagttcaataagggtgtcgagggtgcaaacaagtttctccttagccagctgaacgacctccaaatttttgttgttgactccatgaatgatgatgcctctgtggtattcggctattacaaagatggtgccactaatccgacattcctctatttctctcatggtcttaaggaaatcaagcgttaggcgtgcggcgaaattagttacccatgttggggactatctatgtactattattatat

SEQ ID NO: 9713 - DNA, 401 bp, Zea mays
  Clone ID: MRT4577_108854C.1
ggttgactgctcaaactggggagctataagccttttaaatagaatgagcagtcaaccaaaaaaaagaaaaagggcttccgatctcacctcacactgctgaaaaactacttcaaaatatcttgaaagagacaggccaccaatagcaggtttatgtaagcccttaacagcaccattaaagggagaaaaaaccatcagaaaattggcatgatgttcctgacagtccggccagcactgctgggacaggacatctctagccaaaccacaagtcctgccataatcaaactgaattatgaaacaaaagaaaacatcttgctctattttaagcaggtcataagccaaattattcttgaaaagtctttgcaggggaaaaaaacaaacccaatttgtagaggagaaaatga

SEQ ID NO: 9714 - DNA, 2739 bp, Zea mays
  unsure (1)..(2739): unsure at all n locations
  Clone ID: MRT4577_108855C.1
gggtcctcttcctcatatccttcagcatcgttcaagtgtttgtggggatggtttggaccagaggcacacgggcggaggaggccgtggtttcagcagcccgtgaggtgcgggagcacgacgatcacacttgatacagatggcaagtttgcgaggtttggagtcggcgatatgggtgtcaccaagcagaagtggaggcagcagccgcctccaaagaagaagatgtcgagaaaggccaaggtcaaccagctcaagtggtaccgcctgaaggccaagaagaagatgaagtcacccaaccccgaagttaggatcagatacaagcttgaaaaggctaagaggaaggaggaatggttgattgagaagctgaggaagtatgaggtcccgaggacaccggagccagttcatgaccctgagattcttactgaggaggaaaagttttatctcaagcgaacgggggagaagaagaagaattatgttcctgttgggaggagaggggtatttggtggtgtggttctcaacatgcacctccattggaagaagcatgagaccgtgaaggtggtttgcaagccttgtcggcctggccaagtttacgagtatgctgaggaattgacaaggctcagcaaaggcacagtcattgatattaaacctaataatactattatgttttatcgcgggaagaactatgtgcaaccaaaggtgatgtcacctcctgaaactctttcgaagcagaaggccttagagaaatatagatatctacaatcccttgagcataccagccagtttattgagaagctggagaaggagcttgaagattacaagaagcatgttgctttattcaagaaccataataagggggttgctattgagaaaatcagcaatgaagatcccactgttgatgatcctgcaactacctcagattttaaatgagctaactatttggacatgctggcatgatagatctttcagtggtcaagtcttgcaagcctacatagctcaatgttcactattcatattaaatatgctggcttcagttgtggtgatatagggagctagcttgaaaactcagattcagatagaagaagtaatagccataggattttaaaggcttgcaagattaaaatcctggttgatggaaagctgtattacttgaaaaatacctcgttcatcaatctatctctataaggaaaggctagtagcatgatactgagtgcagatcagccttttaatatttctgcaatctttcctgtaaacacttttatgataaaataggacattcttttgaattgtggcccccttttatgtaggcttttcacttcttgggccttccttgctacatagaagacaatgaaattgtaattttggagctggaatagttctgcaggaccctctcagaaatgaagacttttactgtgccacacgttcacgtactcagtattcatacaccaatgatggacgtcagaagtgcacaagatttctgtgcgtcatttgggcattggtgcatgaactttgaaacaacttgttggtctacatttgtgtgctttttgcaggtactgggctgttcctgagctgagaagatgggcatgtgcagaagcacaatggtgactttaaggatttggcttgataaaaaggaagcgaaaagacagcttcgtcagagatagagctctagtcctacgggagttgcactctgctgcacagcgcgagtcttgcattgggcaacaagaaattctggaaagagagaacctaccaagagctgagacgtctattcatggaatcgtgacaaacatcgatggttgcagctttctctttccagaaagacctgatctgaagtctgtagtgcttaaagagcaaccattctctttgcagagggaaacatcgatgaacaaaccatttttcatgctgttgacattaaatttcagtgatggttgcagctgtttgagctcctcaattggatggcctgttgattttcagaagcgaaaagacagcttcgtcagagatagagctctagtcctacgggagttgtactctgctgcacagcgcgagtcttgcattgggcaacaagaaattctggaaagagagaacctaccaagagctgagacgtctattcatggaatcgtgacaaacatcgttaggtatgacactgaagatgaaaagttggctccacccaagaatgatttgatgaatcacagccgcagcaaccctgcaaaacggcacgtggaaggcactgattgccactcgtcattgccaaagaaactgaagtactttttgaaagacaagaagctgaactgctaaaagtgtaaaaccgtagaaggtagatagagaatgctgtaggtttgtttattttggttattagacgagttatacatagcatagatgcatgggaagttcgcatgctaaggttgaactcttctgctgcataggaaagttggctgacttcttatattatgcgagcctagcttaggtacctcctgtggggagaagcgattgcaatacatggtagcatgttgtagagctcctcaccccagttagtcagtgatccagcaacgatagtggagctgcgaccggatcctgatgatggtatcctcttaccagtcctctggtggtatcatcttttgttcacggaggtcgatgaagtactgcctccgatnnnnnnnngacgcttttgacattattgctccccaaattcttattttgacggctatactttgcccagcgagtaatatctaataaatatcgttttaacgc

SEQ ID NO: 9715 - DNA, 228 bp, Zea mays
  Clone ID: MRT4577_108856C.1
cccactcgtccgcccagtcgttcggccgagacaccgactacttcgttctcgcatatatatgatagaataggggccggtttcctaggacgtgctgaggtagatgcttctgcggtggcgcctacagacgaaaaggggcagaaaatgcatacctaacatccgctcgttgccctaggtgtgtacccacatgtgtatcgatgacataggcaggctgatgaataatcatcaggg

SEQ ID NO: 9716 - DNA, 329 bp, Zea mays
  Clone ID: MRT4577_108857C.1
gggggaaaggacagcccaattttttaattcaattcccccccgatcatcatcatccatcggtggggggatcacataaactgggccacccctaccggcggcccccacatgaccattacaggggtcctaaaacggggggaactttgtaacggccttagggccctcggaaaccgggtgcttggggagctccccggggaggaccaggcccccccaggtctggatctcccgggaggggatggggggctttttgttgtagccccccaacttgggggactcggccccgagcttttaaaaaagtcgttgatgaaggagttcatgatggacatggcctt

SEQ ID NO: 9717 - DNA, 444 bp, Zea mays
  Clone ID: MRT4577_108858C.1
cggcgctcgagggcggacgggtcgggatctcgaaccccagccccctgctccattctcagacggcgccaatcccttgccgtgctccgcaaccgctgagtgagaagaagagaggccgggaagggcagatggcccgggtatcggcatctatctcggaacgacggactcttgcatcgccgagtgggaacaccaccgcgacgagaacattgccaacggccaggggaaccgcaccacgccctcggacggcggcttcaccgactcccagcgcctcatccagagagcgggcagaaaccagcgcggcatgaactccatcaacaccgcgctttgatgtcaagcgacacatcgacaagaggcccagcgatgcgtgtgcgcaaagtgatagcagagctgtggccctcacaagggcgtttcatggggctggaggagaagccaagtgattgttggtcc

SEQ ID NO: 9718 - DNA, 243 bp, Zea mays
  Clone ID: MRT4577_108859C.1
tttagtcgcgtgggcggacgcgtgggcggacgcgcgggcggactcgtgggctgtggtgatggcggtggaggaaactagattgccttgcttctgctcatcacttgactctgtttcaatacgatccgggatggagaggcagtcacatctatgttcacgcatatggccaagccatgcatgtttatgcatgcatgtgcgtgcagagcaaagataaataaggacgtcgagctaaatttatacaaccct

SEQ ID NO: 9719 - DNA, 630 bp, Zea mays
  Clone ID: MRT4577_10885C.1
tccggaacgccattcctttgatctcgatggccattctttcgaactttctccggctccctgcttccgcattgtcgctgatgtcaagagcaaggatgcacaaaagcggacatgccgtctatggccgctcgcgcattctatccaacatccacgatttcatcgatttatgtacaacgcgcagccctccctcaggtgatatatgtactgaactcagcgcatgatttctgactgaatgcgagcactgctgcctaccagactagcaacacaatctgcgccgacgctggagctcctctcagcacataaagggcttgctgttagatgaggaattggaagagctgctgtttatatgatcccaagaaccgctgctcatggtgcatgaagttgtatttccataccgatgatatcatttgcacttgaccgcgtgattgcctgcctttgctccctgcatatggaagatgatgagtgctataccttgacgtatccaatacgacgcattcgctgtcgtatacactcgagaactgatcctgctctagctgaggatcccatctgtgagtgcaagtattttcaagagatgttaacggtcactacgggactgattcctgtatactggctgatgtctgatcccacatccta

SEQ ID NO: 9720 - DNA, 422 bp, Zea mays
  Clone ID: MRT4577_108860C.1
tcgggataccctggagtcgatcaggtcgtctgatgaggtcctttctttcgctcatcactgcactcgtcagacggggaacaggagcgcatgcggagtactatctagctgactagctttttccttgtggacgcggaattcttcgtgcaggtaggtacgcagcgccctagtggccatgcttttgtaaagtcagctctcccgagtctggtaacgatttaacatgtgtgctttggactcgtaagtttggatagcacagtggtcagtgataccgtgccccaattggagcatggcagccgcatcagaaggcagcacgcacttacacgtgtgaaatcgaggcactgccttctgtgcgtgcatcgagacatctgggcgaggttccgagccgcgacgcttccgtcctcttggggatgggtcctactgccttc

SEQ ID NO: 9721 - DNA, 791 bp, Zea mays
  Clone ID: MRT4577_108861C.1
gggacgaagctccaatttggtttggtgagccacgtccccggccggatccgcggggggacggcgctttcgtccccagcctcacgagatcgggaagggattcccgcacccactcttgtgaacctcgccgccgtctcctctgccttcatgaccccgccgccgcccgtcccctgctcttcctcgcgcacccaccgtcgcctgtcccctcctcttccttgcgcacccgccgtcgccgcctcctactcgccctcgcgcatttgaggccagctgcggaacgaggtcggacggcggagacgaggtcgaggtctgcggcctcctcagcttgcgcaaggcggcctcctcggcgactcgtgcacggcggggcagctgcggacgaggtcggactgcagggacaagctcgctgttgcctcctcagctgcttctcgtgagtacttctttttctttcattcttgccttcgcatccaccacccgcgcctcgctgcaggttagtcgtgcgccatggtttgttgcatgaacccccagaagaaaaaggccgtgaacagcaacacgtacaccttcacggccaccatcttccctatacgctggtttgagtgaaaaggataattgattttgcagcgtgctatgctagcttggaaccgagagatgaatgacgaatgtttgctactgagggaattagctagtttaatgtttgtagcaaggccgaggagctggcaatgtaagtagggttagatgttgagctacatgtgaagttctagtctgaatctcaagaacttcttttgcctttgtttgcaacc

SEQ ID NO: 9722 - DNA, 162 bp, Zea mays
  Clone ID: MRT4577_108862C.1
tatagtgagtcgtattaagacctcacacacacaacatcacatacctggattccaaggcgaaatgtgtgtaccaataaccaagctcgcctcgcgggagcacgtacccatgatgcggctcgagcgggcaccaccgcttcttcaaccgcgagtagatggaccagg

SEQ ID NO: 9723 - DNA, 178 bp, Zea mays
  Clone ID: MRT4577_108863C.1
aaactcacacacatccgcagcgacgccagagtatgatatgatcataatcggaaaactgcaaatacatcacgctatacagaaagagaagggtggcaccggccaacgctctgtgcagcaccacacagggccaggctaatatgcaatcgcctgattttaccacagctgcggcctaccaccc

SEQ ID NO: 9724 - DNA, 325 bp, Zea mays
  Clone ID: MRT4577_108864C.1
caaaacaattgtcaaaaggagaagaatatttccttcctcttctcaggctagaccaagcaagggagttggagggtggagagtggagggacctggtgaatcatccaagattaaatacgggcaggcactgccaggcttgtgtggagatgaggctgggacactgttcgcaggaagagtccggtgttctggccccctgatgtcaccttcacgggcctgactcacagtcctaaatatctgacagcgagatcgcttgtaggtaggcttcttgtcacttgtcatttaagtcccctgcctgccttttttccctgctcatttccatttcgatcac

SEQ ID NO: 9725 - DNA, 567 bp, Zea mays
  Clone ID: MRT4577_108865C.1
gccgtcggctgacgcgttgggtatcgtgtcctgggacagtacaccctcatgggcttacagacgcagggctcctacctcttcgtgcactacaccatgcacatgaagctcgacggcggcgactccgaggacaccgtcacgggcttttacctgccctcccactaactcatgacacgacgagagctagtacgaactcctggacgaccgcacggggcagagcctacatgctgtataccaacttgatgaccggatatcaaggccaacctcgagcacataatctatctgtgcctacccctcgccatgaagaggccagtccacctacgttgtataggacctgtacatgagtcacgttcattcatgagactacactgcccgatccgaagctttcaagaacacgatacactagtgctatggactcgggacccggacactcagacaatagagttctactcaaggctgcggaaatccgcactactgttcaatccgcctaaaccatcgagaagacggactgcgccagcgcgcccttcgtcatctactaccacagctttcacatgcatggatgtgatgcct

SEQ ID NO: 9726 - DNA, 648 bp, Zea mays
  unsure (1)..(648): unsure at all n locations
  Clone ID: MRT4577_108866C.1
aattcggcacgagggcggaaagcaaaccctctgctcctcctcccctcctcgtatattaaccccgcctctgcctcccttcccctctttccccccgtctccgcctcccctcccaccgcaccacggccccaccagattcctccgcaccgccatggacgacctcgagcaggcaatactgctggcctccgactctcccgccgccgccgcggcgtccccgtccgtccgcgcggaggctctcgccttctgcgcccgcgcccgcgacgagtccccgccgtcgtcgctcctccgcctgtgcctctccggcatcgcctcctccccgcacgcgcaggtccacttctggtgcctccagtccctccacgacttgctcctccgccgccgcctcgtgctccccgacgacctcgcgctgctccgatcctctctcctctcgctggcggtttcctctcacgccgcgtcgccgcctttcctccgcaacaagctcgcgcagcttgttgcgctcctcgtccgcctcgactacccccatgtctacccttcctacttcctggacctcctcccgcccgcgccgccgnagnccgggcccacggacatgttcgcgcgggttctaatctccctcgacgacgacctgctctcccaggattacccccgcagntctga

SEQ ID NO: 9727 - DNA, 689 bp, Zea mays
  Clone ID: MRT4577_108867C.1
acttctacagtcagcttgctccagtcggcgcctcatcggactcgatcccaagcgagcagaaacagacgtgtcctcctccgcctcccactgagccacaccccccccgtgaccatacgaaaacgactacgatggctgcatcaaatgtgcacacccttgactaagcgggcgaccaccacacacccagactactgttgtgtcggcctcaccatccaaggggaccatgtgaaccaagtttctagacgaccaccctgaatgagaacatggcctgctgacgtccactgccacatgcacagctaccacacgcatgtcacacatagatgtagagggacatacaccgctccaccctgcaatgactggacgaaggacctctagctaagaaatatatgctaactcaataatcacgaaggcgatgtagcgcgccctcccagatcagccagactactaccagcatgacatgcctgagatgctcttcgacagacaccatgatgatgcctgactgcgaatactgggcctggatgccgctgctgccacctacaccacttctgaatctgactagtgagctgaaccaagttagcgagggtggcatcttgaaccagatacgcatgtcacatagctgagtctgtgatgacccaccgatatatatataagatacatccaccccttttgggtatggatgtcagaaacttcgt

SEQ ID NO: 9728 - DNA, 622 bp, Zea mays
  Clone ID: MRT4577_108868C.1
actctcatttttcccgcgttccacctagaagaggccgaagaatcccaccctcaaggctgacgagcatgagttgaccgcacgtgcgaccgtgggaaggggaagccagcgaccaagtctgagcgctgctcttccaaggctgggctccagctccccgtctgggcgcatctacaagaaacctcaaggcctcctagtacacggagcgcgaaggtgacgtctctgccgagtacctctcctgcgacctcgatcagctccccgacgaggggctgtatatgtccgcgaacgtctgctccttacaacgacaacaaccggatcgtgccccaccacattcatttgcggttgctgaacgacgaggaggtgagcaaggttctgggcactgagacgatcgcgatcggcgtcgagaagtctaacatccaccagaatttgctgccgatcaaggctgacctccaggagcacatcgagtccgactcccaggagctctgaatgcacattctgaacgaggacagacgcaaggcgatgtgtggcatgtcctggatcgacgctgttgaccatgttcttgagactgatcgttgtctgcgacgtgaacaaatgcaatatgctgctccatgaacgaacgcatgaacat

SEQ ID NO: 9729 - DNA, 390 bp, Zea mays
  Clone ID: MRT4577_108869C.1
aaaggggggggcctttatggctaaaccccggtataggagtaaaacgggtggggaaacacaatttttaaattgcaaaccccactaagggcattggggctgcagggattatttggggagaaggaggggcacaagccccacattgaggggaggtattgggctgctgaaaaaaatgccccccccctttgaggagctgggggaaaaccacaaaacccacagggggggggggggggccccccccggattatggattgaaccatgttgaaaattgcttggggaaagtattggggctaaatctgccaaaaaacaagacaacattggtggtgcaaaacccggcagctacttgggtgtatcaaacgggattggaaaaaaggcattaccaaagggctgccc

SEQ ID NO: 9730 - DNA, 313 bp, Zea mays
  Clone ID: MRT4577_10886C.1
ccttattcttcctctctatctccacgcatacctatgagcacagcactgacaaaaatccgcccacacctacaaaaattgatctgatatggcaggccaatggatacagacggctctgctgtatctgccaaaagacccaccgacatcgtgccgtgcagggtctgactagagaggatatattcctctgaggggacacactgatgggtgctagagacagcccctatggaggcggtgttgtctctattaatagccattttcctccagactacccctttgagccttgcacagggggcccacaaacaagactttgtcaccc

SEQ ID NO: 9731 - DNA, 463 bp, Zea mays
  Clone ID: MRT4577_108870C.1
aaaaaaaggggccccaaccacttggttggttgggggaaggcaataatttttgaaaaacgagttatgcttgtttcactggggtttaattttttcgatgccatttgggtaaaattacaggcgggtttgtatccctggcctaaaattagtttgggttccaaaaggggggaaaccagttttttcccctgtttttaaatttccaatttacccccaagagcggggggggaaaaacaccttttttttttccgttccccaaaaaagaaagcccgacctttaccctttgttgaaaccgacctccggatcaacaacttaacctttaaaaaaaggggttttgcccataggggggggagggccctttttttgaatccttttcctgggaagggggccggggatccacgggagggcgtcctttttgattttgatcatgagaaaaaaaaggatgcggtaaataaaaatcatgctgaaa

SEQ ID NO: 9732 - DNA, 963 bp, Zea mays
  Clone ID: MRT4577_108871C.1
cattgggtacctcgaggccggccgggacagtccgtccgcccgcccccccttctacttccaccctaccgagagaggtcgggatggcattggcactcgtcgcgtgcccgcgctgcaacataaccccgccccaagcctccgcttgcggaagccgcggcctactccgcgcgccgagatctgcagcgtccaggcccccgccgtggcgtctccgccgcagccgcgccatggccgtctacgaaggctggcactctgctgccgcaggcgcagacaccgatggaggcgctccagctcctcacgtgcccccgtcgctgctcgttttctcaggcgggacagcatttaacggtgttgttgaagaattgaagaaagtcactactcgagtcgcgcacgtgctccctgtttctgatgatggtggaagcacagctgagattgtgcgtgtgcttggcgggcctgctgtgggagacataagatcaagatgtttgaggttgtctgatgaaagtactgcagaagctctttctgttcggaaattgcttgggcatcgtttgcctattgatccttcagaggcaaagctggaatggtaccagattgtagaaggagaccacactttatgggagggagtctctcgtccatacagggaaacaattcgtgcctttttggtctactttcacagtgagatacttcgacggtcagctgaaatgttttgcttcaccaatggcagcattggaaatttcttttttgctggggcacgcatattcttccagtcgttggatgctgcaatttttttgttttcacgcgtatcacagataccagcagaaagtcttgtgcttcctgttatatccacaaatgacagacttactctgggatgtgaactatgggatgggactatcattggcagaatgaaatatcacatccaagcaatggacgccgagaaatgtcaacaaggattgtaattcatgtagcacacttccc

SEQ ID NO: 9733 - DNA, 483 bp, Zea mays
  unsure (1)..(483): unsure at all n locations
  Clone ID: MRT4577_108872C.1
agcagtggtaacaacgcagagtacgcggggtattcaacttaactaataacttcaaaaagatatccggagcatatcgaactaaaaaaaaaaaaaaaaaacaaaaaaaaaaaaaaaaaaaaaaaaaaaagaaanatgaaaagaaaaaaaagaaaaaagggaaaaaannaggnaccgggggggggaaccacgggtgaagggcgaannnnggaaaaatccaacacacggccggccggggggggatacaaaaagagggcccaanncnccataaaggggggngaaaaaaaaaaaacgggccgccgaaaaaaaacgncnggacgggaaaaacccgggggccacccaacnaaancgccaggaaaaacaacccccnnnccccagccggngaaaaagcaaaaaggcccgcaccggncgccccccccaaaaggggcacaaccngaagggngaagggacgcccccggaaccggnacaaaaacaccggcggggggg

SEQ ID NO: 9734 - DNA, 418 bp, Zea mays
  Clone ID: MRT4577_108873C.1
gctatattcaccttccactggtatactacgagaacgtgacggggctcagcggggggcggacctgggcgaatggccctgcggggtcgttcgtgttggacccgttcacctgctcctgcacgacgatcgacttggacactgtgaccacacggtcaacggcgcctgtagacgcagcgctaggcgaggagttaccgacacacgtggcggcgccgaacgagtacacgtcgctgggcccacaccacatgtgcttcaacatgcacgaggtggcggtgggcacaacagccgcccgtgacactgcacatgtacacgccgcgtgcgacatgacactgtcgatggagaacacgcttgatccacacgacaagccacgccgcttgcgtgtctaggcatggaccatgccacctatctcgtgaacgacgtcgtg

SEQ ID NO: 9735 - DNA, 719 bp, Zea mays
  unsure (1)..(719): unsure at all n locations
  Clone ID: MRT4577_108874C.1
attgggtacctcgaggccggccgggacccttttgctccgggcttaccacggacgctccccgtggccgcgacgagctgttcggcgggctactcccagccggcatggaccggcgggcgtgccggagccggtacgaggcgtggcggtactacaagcacttcccgtacgcggcgtcggcgcacctccagagcaagctgcacgcctacgaggcccggcacaggcggtgcgcgccgggcacgccgctctacgccaaggccgtcgagcagctccggtccggccgcagcgccgagggactggagtgcacctacgtggtgtggctccccttcgacggcctcggcaaccgcatgctgtccatggtgagcggcttcctctacgcgctgctgacgggccgcgtcttcctcgccgcccgncctgccgcgggctcgggcgacctcttctgcgagccgttcccgggcacgacgtggcggctcccccgtggaggacttccctgtgcccgactgggtcccgcgggggcaagncatcgagcggtcgtacacgaggctcccgcgccnnagggggggtcggggccgccgcaaagcgnaagggggtttgggcgtgccttccgtacgtgtacctccagccctggggtggcagctcaaggacccgctcttcttctgcggcgagcaccagcaagtggctccgcgacgtcaactggctgctgctgtacagcgacctctatttcg

SEQ ID NO: 9736 - DNA, 279 bp, Zea mays
  unsure (1)..(279): unsure at all n locations
  Clone ID: MRT4577_108875C.1
cagnaccttggcagctcagcaaacacaaatactgaaccttgtggcttgacgctgattttgaagcccaagtctttcagcaacagaaggatgaagtctcttttcacctcatagtcctagccaaagtcatcacaattgcaaggagctgaatctgttaattttatgtggatatttctaataggggaggcgatgcttgctgctgcacaagcccaaccgagtctccaacctaatcagtccagacaggtcgtttgtcccgtgtcctctcccaggtcttgctctttc

SEQ ID NO: 9737 - DNA, 852 bp, Zea mays
  Clone ID: MRT4577_108876C.1
cggccgctcgagccggcgggccgcttagcgcagtactagtggtctaatcgttcgaagcatagccaactggaaggagcatcaacttctcggtagcttacacgcatgctcgaagcctagcgattaggccatgaagaagcccatggcggccggcagcggccgcgtgaacgtggtgcctatgctgctcgtcttctgcttggcatacgtgctaggcttggtctccaacgtcaccttcgagaacttctacgtccacaacttcctgtcgccattgatgctgcctgcctctcggctgcaaacgccaccgacaacgccggaagcggtgccatgcatcctgccgccgtcgttgccccctcccgagccgaccccgccgccgccggcgtcattggagagacggagaatggagagtggcagcggcgccatgcacaacatgaccgacgaggagctgctctggagggcgtccatggtgccgaggatcaagagcacgcccaagcacgggatcgtgcccaaggtggccttcctgttcctggtgaggggggacgtgccgctgcgtcccctgtgggacaagttcttcgagggccacgaggggctctactccatctacgtgcacaccagccccgactacaccggctcggcgccgccggactccccgttctacggccgtatcatcccgagccagagaacgagctggggaaacataaacctgatggacgcggagcggcggctgctggggaacgcgctgctggacgtcgccaacgcgcggttcgcgctgctgtccgagtcgtgcatccccatcctcggcttccccgccctgtacgcctacctcaccggatccaacaccagcttcgtcgacagctt

SEQ ID NO: 9738 - DNA, 858 bp, Zea mays
  Clone ID: MRT4577_108877C.1
gccggccgggccgggaaagaagaaaccccctctgctccgaatcgcgcgcgtcacagcaatagcacgctgcactgcacgctgcggagtctacctgaccacaccttatccggacggcgcgggcgccatggagcggaggctgtcggcgacgtccaggcggtccgcgccgtcggccatccaacggctgtcccacctggcgcagcgcgtcggcgccgtcaacctcgccgagggcttccccgacttccccgcaccgccccacgtcaaggccgccgccgtcgccgccattgccgcggacctcaaccagtacaggcatgtgcaggggatctgcgacatcctcgccaacacgatgaaacgtgaccatgacctcgacgtggacccgctcacggactttgtcatctgctgcggccaatccgaagcattcgccgcggccatctttgcaataatcgaccaaggagacgaagttctcatcttcgaccctgcttatgaaacgtatgagacaagcattgagctagctcgaggcgtccctgtgtatgtgccattggatccaccttcttggactctgaacgaagaaaaatttctgaaatcttttacaagtcggaccaaggcgttggtcttgaacagcccacacaatccaacagggaaggtcttcagcaaagaggagctgcttattatctcccaagcttgtcagaaaatggactgctttgtgataactgatgagggatgcaagagaggaccatcatcacatcctcactgtcaaaaacttacagtgtgactggttggagactcggttgggcttgtgcagcagcaagcatcgcctcagctattagaaatatccacataaaattaacagattcagctcct

SEQ ID NO: 9739 - DNA, 584 bp, Zea mays
  Clone ID: MRT4577_108878C.1
acgcgaccgcatctgctccgaatcgcgcgcgtcacagcaatagcacgctgcactcctgcacgcagctacctgaccacaccttatccggacggcgcgggcgccatggagcggaggctgtcggcgacgtccaggcggtccgcgccgtcggccatccaacggctgtcccacctggcgcagcgcgtcggcgccgtcaacctcaccgagggcttccccgacttccccgcaccgcctcacgtcacggccgccgccgtcgccgccattgccgcggacctcaaccagtacaggcatgtgcaggggatctgcgacatcctcgccaacacgatgaaacgtgaccatgacctcgacgtggacccgctcacggactttgtcatctgctgcggccaatccgaagcattcgccgcggccatctttgcaagtagtagagtacagcagactaccgggcattccgactgaattattatgctagtttcagaacctcgtggaggcatgtgggcatccttcctgatggatatgcatttgcttccacttccatgcagtaatcgaccaaggagacgaagttctcatcttcgaccctgcttatgaaa

SEQ ID NO: 9740 - DNA, 1449 bp, Zea mays
  Clone ID: MRT4577_108879C.1
ccggccgggaaagcagcaaaccccctctgctccgaatcgcgcgcgtcacagcaatagcacgctgcactgcacgctgcggagtctacctgaccacaccttatccggacggcgcgggcgccatggagcggaggctgtcggcgacgtccaggcggtccgcgccgtcggccatccaacggctgtcccacctggcgcagcgcgtcggcgccgtcaacctcgccgagggcttccccgacttccccgcaccgccccacgtcaaggccgccgccgtcgccgccattgccgcggacctcaaccagtacaggcatgtgcaggggatctgcgacatcctcgccaacacgatgaaacgtgaccatgacctcgacgtggacccgctcacggactttgtcatctgctgcggccaatccgaagcattcgccgcggccatctttgcaataatcgaccaaggagacgaagttctcatcttcgaccctgcttatgaaacgtatgagacaagcattgagctagctcgaggcgtccctgtgtatgtgccattggatccaccttcttggactctgaacgaagaaaaatttctgaaatcttttacaagtcggaccaaggcgttggtcttgaacagcccacacaatccaacagggaaggtcttcagcaaagaggagctgcttattatctcccaagcttgtcagaaaatggactgctttgtgataactgatgaggtttatgagtatattacttacgatgcgaacaagcatatctcactggcttctcttccagggatgcaagagaggaccatcatcacatcctcactgtcaaaaacttacagtgtgactggttggagactcggttgggcttgtgcagcagcaagcatcgcctcagctattagaaatatccacataaaattaacagattcagctcctgcaccattccaagaagctgcattgattgcattaacaagcacagcagattactacatatccctgagaaaagactatgaggtgaaaagagacttcatccttctgttgctgaaagacttgggcttcaaaatcagcgtcaagccacaaggttcagtatttgtgtttgctgagctgccaaggtcctgccaactttcagatgtagaatttgtgacaaagttgatcaacgatgctggtgtggttgccgtgcctggccgtgggttcttccacaagacttgtgactgtgaaagctactgccaccgatatgtcaggtttgcgttctgcaagggcgacgacacacttaaggctgctgccatgaagatgaggaagctggcaagcaggcagggagaaccatggcttactggcagacaataggataagactatgccctcctctaattgatcaaaacccttagatctattctctttttagtttctggatacaactttgatgccatgtaacacggcccatgaaagtgtaacagctaattgcatcttttccccat

SEQ ID NO: 9741 - DNA, 408 bp, Zea mays
  Clone ID: MRT4577_10887C.1
tgttttgacgaaccaccgaaagaagcttccttcaaatcaaaagcaatgccctctgcctccctgaaagatatcgttcacactctgctcaagggttaccaaacagaaaccccaatcctccagaagatcatcgatgtcttcttaatctatattcttattaccgggatcgttcaattcatttacgttgtcctcgttggaacgtttcccttcaattcttttctgtctggtttcatctcgaccgtaggatgtttcgttttgactgtttctcttcgtatgcaagtagatccaaaaaacgagatcaagggagtctcggtcgagcgtgcgtttgccgattacgttctctgcaaccttattttgttcctcgttgttctcaatttcatgggttaaattgaaaaagaaacatttcacctg

SEQ ID NO: 9742 - DNA, 212 bp, Zea mays
  Clone ID: MRT4577_108880C.1
aaaacaacagggttttttacaaatgggtgaacggggcaaaacacccccgggccagcccaaccaatttgtccgagccacggtccttcccttttgcaaccccaaccaacagattttccccccgtcctactgaatcaaatgcccaatggaatatggattttcggatggaaaaaaaaaaaggtgaaaagaaaaaaaaagaggggttcacggccccc

SEQ ID NO: 9743 - DNA, 287 bp, Zea mays
  Clone ID: MRT4577_108881C.1
caagatgctattaagcatgggctacaccgcatggtgatgctgatggacgaccctggagatggaaaatctaaacaagtgccaaaacaaaaggatggtcgtcaagtgatcgtcggctaacaaacactaacgtagtgtttattccaggtactagatttgtgctgttgttgatggtgctaagtgccggtgggctcggccttcttataggttctatacttcttattgaggattgtcattgagctagcatatatttcaaacttataaatagtttataacatttcaaattttat

SEQ ID NO: 9744 - DNA, 736 bp, Zea mays
  Clone ID: MRT4577_108882C.1
gcacgagtgatcacgcatggactgtataggtttatgcgccaccctgggtattctggctttcttatatgggcagtaggaacccaggttatgctgtgtaatccattatcaacagttgcattcacattggtcttgtggcgattcttttcaaaacggataccgtatgaagaatttttcttgaagcagttctttggctctgaatacgatgaatatgcacagagagtacactctggaataccatttattaaatgaaagtatggcacttgcaaaaaagaggatgtaaagggaatgcaggtagagctaatggcccaagctaaaagaatgaatcatgattatcattcgaggcaattcctttatcatatttcatctgctgtattctccaagtgacattttcactgatgtatgctcgataactccaataaaggcataaagcgagagatgctacagctttgttgaatgcaaacaggtttgctcgtgttgaattattgtaaggccgcgcatagcagagcgtgcatatgttgaattattgttgaatgcaaacattgttttgtaccgtagactatattgtctacagagtagagtttgaaatagattagagtttgaaatagagtaaagtttgaaatagagtagagtttgaaatagtaagtaagataggagattagagaggctgctggagatagcctaatgtattacaagtgcagaaacctgctccagcttgcttgggacaaaaggatctgat

SEQ ID NO: 9745 - DNA, 521 bp, Zea mays
  Clone ID: MRT4577_108883C.1
cactccatagggcgattgggttcctcgaggccggccggggccgccagatctcgactgttccccttccttagccgcgggggcaacgcaacgcaacgtcgcccgcgtgttcggacggcggcgaggggatgggcggcggcgtgtggagatgcacttgccgctgactgcaccttcggctcggcagtgcgggaaggatctggaaccttcggtcgctcagctctctcagattgccggcacgtcatggagagccaagagaggcgatagatgatctcatggttgacgtcacgccgcgccgacctagtagtgctgcctctggcttggctcgacctcacattcccacctgtgttgtgtctgtgtgcccgtgcaacactagagagcaatttttattctctgtgtttccaaaatgcaatttttatagagatatgtatgtgatttttatagaaatatgttttttgttatatgtaatcagtttctttaagataatgtgctattacagcgaaaaaaaaaaaaaaaaatttgcggcc

SEQ ID NO: 9746 - DNA, 459 bp, Zea mays
  Clone ID: MRT4577_108884C.1
tttttttttttttttttttttttttttttttttttttttttttttttttttttttttttttttttttttttttttttttttttttttttaaaaaagaaatacgcttaaataagttttttataggggaataagaagtggtaaaagggaggggggtcctcaaaaattaaaaaagggggattcaggatgggacctaaaaaagaaggggattttgggggcaactcctagctggggtttagataagcacaacagggaattggtgaattgataagggctggggaaaaaaagaaacgtccggaaggggaggaaaggggattcacggggtttggacctgaaaagccttggaaaggatgtcgtcggggaggcaaacattgttccgggagttgaagaaactgtaaacgcgggggcccaacagtttcgcaattggggggggccgccccgagggtgtttaccggacccgac

SEQ ID NO: 9747 - DNA, 342 bp, Zea mays
  Clone ID: MRT4577_108885C.1
atattattgcgcacgcacacataccagcatgacacaagtggaatgcagatacgtcaacaatagagcaacaatggagaccaagtagtattctccctacttatgctgattgctctttgctacatgtgttggtaactcgataattctgcctcagtgctcacaatctactatagctttcttttatgcctcataccttgcatgaattatagagtgccactatggtgaaaacgcgagctcttcaaccatatatgcttgaccaagcgatcgcatcaagcaacatacctttatcgcccttgcatgatcaacaatggccagccttatgtttggtgcagtgatcggtacaaa

SEQ ID NO: 9748 - DNA, 160 bp, Zea mays
  Clone ID: MRT4577_108886C.1
tcgtttgaacatgcgggtcgtttcaggccaggacccatcccgcgtgcgggctctcattggacggtcacagcagtctgcgccggcggaacctgtcctccacagtctgcacaccgtctaccagatgcacctaactgccataggtagactctcacacccccgt

SEQ ID NO: 9749 - DNA, 710 bp, Zea mays
  Clone ID: MRT4577_108887C.1
tcggccggatacaagcctacattcttgccttcgcgtactcacgtcatcgacgaccacattcgttcagtactactcacgctcgcgacccgctttcgtctctaattctacgactcgacgttccacaacaccaccaacagtttaataccagacaccaagatgttctccaagactctccttctcagcgttctctccgctcttgcggctgctcagtctactgtcctgaccttcaccaacgtgcccaacccgatcaccgacggtcaggctcaggccatcacctacgcgaccaacgacactgccaaccctgtgaccatcatcttgcgccagggcccttccggcaacctccaggatgtcgagactctgaccaccgacgcgcgcaacggacagttcatctggactccttcgacttctctgcccaacggcaacaactacgctcttcagatcaagcagggtgatgagatcaactacttcggtcccttcggcgtccagggtgccagctccagcgccagcagcgtgtctgtctctgccagccccgttcccagcgccaacagcaccacctctgtccctgagatcgccactcctgctggcactgccgctagcgcttgcggcactggcgtccctgagtgccggcacaccaccatgagccacggcacccttactggcactacttcctcctctcgcagtaccgttactggctcttcttccgatgatgc

SEQ ID NO: 9750 - DNA, 532 bp, Zea mays
  Clone ID: MRT4577_108888C.1
tgtgtaatttcccggtttcgacgccacgcgtccgggtagaggggactcccaagctggtacatctggggggctgagtggagagagagtgaaagacataaaggccaatgtgtaaggggaagagactattagcttttttttgttgatgatgctttttgagatgagactattagtttttaaactcactgaggtataaaacacattcttttgcatgttgcagatatgggaattgaaaaaagattggagtgtaagtgaagccccgaggtaaggataaaagccagttggattgtgagccaaatgacaatgatttttaccatgctacagagctatagatatagaactgaacttgaccacatttattcacatttgctctattacctgcatttaggactatagctgggaagaccatgggtattgtttggtaaattgactttatccacatgtggcacaggcgattgacgaaaaatttcacattgcttacaattttacttataatacaatggcaacgcacaaagatggtgataccttaatgctt

SEQ ID NO: 9751 - DNA, 174 bp, Zea mays
  unsure (1)..(174): unsure at all n locations
  Clone ID: MRT4577_108889C.1
cccactcttacaagaagatccaagctctatgcactaaaccggggnagggcagagggcgcatttcaagacgacgcgcccaaccacgnngatgcacaaaccgaccagacagactatacctgggcacagcattgagcacatggcccaaagctcattgggaccaaaactaacaagacc

SEQ ID NO: 9752 - DNA, 235 bp, Zea mays
  Clone ID: MRT4577_10888C.1
gccaaacaattttaaatggaaagcacaaaatacgggggggaagaatagaggagaaaaaatggactgaatacacctagggaaccgacaaaaaaggatcacagaagaaacggaaccaggggtggtgaacaccaaacaagccccaaaacaggcctgctcagccgctcaggttccaaaaaggatgcataaagacatcgatgggcagaaaaaaggcggaaggcatttacattgtgccacg

SEQ ID NO: 9753 - DNA, 768 bp, Zea mays
  Clone ID: MRT4577_108890C.1
cctcgaggccggccgggatgctgttcgccgaccgcgtccccgacatggtgaatgtgcagctgatgaacctcctcctcctgcgggcatatcgttgctgaccgccggcatggtcgtcccctacgacgccttcttcgtccccgccggctccggcaacggcggcggcgggacctacgccaaggacaagctggtgcacgacatcacggtggaggagtggctcaacacgcacggcgccaacgaccgcacgatcgtgcagggggtcaagggtgaccccacctacctggtggtggagcaggacaagacgatggtcacctacgggatcatcgccgtgtggacccacctcggctgctgcgtgccgtggaacgacgccgacaacaagttcatctgcccctgccgtggatcccactacaacaaccacggcaaggtggtcctcggaccgacgcctctgttgctggtcctgcttcacgccgacgtcgacgacgacaaggacctcttcgtcgcgcggggggagaccgacttcatgaccggccagcacccgcggtggagtgtatgatgaggatcatccgacacaagcggtgatcagcactcatagtatttctcctacgacgatgttgctacaaattcactagtctcttgtctccaaagtatgtatattacacacactgcttgatacaacaacacagctgatggtcatctcttcactatgaccttctgaacactctgacatctgctgcagtcaaatatagactgtctctgccatctgctgatcaa

SEQ ID NO: 9754 - DNA, 370 bp, Zea mays
  Clone ID: MRT4577_108891C.1
ccccggtaatcctggagggggattttttcccgttcctttttttgtttccgttacttttggggaataaaatcccccctaaggggaacggggcaaaccctttctccagggaaaaaggggggggacccgggcctcccattgccctttacgaggggggccccctggttgaaagtggaaactggaaaccttaatttttttggggaaaaaatggtaaacccagtcctaaaaaccccccaaaattggatggaaaaattagggccttgtcctgttttggccccttaaaaaattaaaaaattacccccccccttttttttttttacaaccggttctttttttctcttttgggacagggggggggcctccttgggggggg

SEQ ID NO: 9755 - DNA, 1827 bp, Zea mays
  Clone ID: MRT4577_108892C.1
atggcccaggtggggatccaagtaaatacaatcacgttcaatgtttggattgatggatatgcaaagagtggacagatggatcaggccagtgcagcctatagcgagatgcaagcgaggggattagtgccagactcctgcaccttcaacattattgttgctagagctcacaagttcgggtatgctgcccagttagtccatgaccatgacatgtttagttcacatatgtcggctgatgggttggatatgttggtctgtaggctttgttgggatcatcgattggatgatgcctgggagcttctgcttggtgctattgagcagggtgttccattgcgtgttactggatttaatgcattgatcgctacttatagtaaggagggactccacgaagaagcttctgaactgtatagaattatgaacaagttaggactggcaccatcctcgtctacttttaattacttgataatgggactctgcaatcaagtaaaacttgatgaggcacagcttcttttagagcacatggttagcaaaggatattgtctaagtacatcatttactatcagcttggatgcatacttcagagacggtagccaaacactatcttactcttattttgccaactcatacaatcagccaacagaacttatctttttacatacagctgatgaacatttattgtatcacggccagcttgcaaagaagggagaacaattcattgatgtcccttatgttgtgaagagtatggatgtgtcatttagtggcatattgagctttattgaagctgcggcgattgaaaagcttaaaaataatgagtgcacacctgcggacctatgctactcattgcaggaaactatctttgccatgcttgtcgaaattactgaaagtgccatggcacactgtgattcaaaggacgttcttattgttggtggcgtcggttgcaacgaacgtttacaggagatgatgaagattatgtgctcagaaagagggggtaggctgtttgcaactgatgaccgctattgtatagacaatggggcaatgattgcatatactggtttactggcgtatgcacatggcatgaccactccccttgaggagtcgacatttacacaaagattccgaactgatgaagttcatgcaatttggagagagaaggagatgccggtgctaaataatacccattcagatgcaattgctgaagtttctaaagatgaagcctccatggcaacaccaatcgttatagattactgagacagtaaagagtaaatgcttgtacggtaaagcctagaaccactcctaaggctatctccaactgatctcctatagtcctatctcatctcctatctcaaacttcactctacaaacagatagttccgcatctaaatgtgatatctttgctctgtttgggagaagcctcctccaggcacatggcaggggctcagaatagttgtgctgttgtatgaactgcagcaggtaaaatgaacatgtcgtatgcctgacatacctgaagatagctgacatggatcaaacctcaccaatcgctgacatggatcaaacctcacctatcaccttaacattctagttagttacttcatcgagtgaacttattattgttgtaaactaatagacgcatttctgcaaagctagcttaactcttaagttactcttgtgatggtaatctgttaaggttctaaagcagcctcttttggatcgacattggattcttgggaacgtggggagttatttcgattcgcatccaatgcacatcagctaaggtggtggttttctgtaaaatatatacattggattattatgtgggtgttttgttttgcg

SEQ ID NO: 9756 - DNA, 118 bp, Zea mays
  Clone ID: MRT4577_108893C.1
cggctctgagttccaaaagctgcacaccctgtttggctgcgcgtggtatgttatggtgtgattaccatttacgccaattgttgtaaatgcaataagcggttccccggaggttttatat

SEQ ID NO: 9757 - DNA, 273 bp, Zea mays
  Clone ID: MRT4577_108894C.1
ctattgagatgtttcttgtttgatgtcagggtgctggttgggactagttagtattatttcatcaaacttttaggttggactgctgttttcacagctgtatactattacagatgaggtgccaacttacaacaacagtgccactattagattagatgccttggctttaagccatgcatttggaatatgctgttctagcttgatattctaaggtattaatgttcatttttcttttttttgtggtttaatgtgattattttacatggattttcagta

SEQ ID NO: 9758 - DNA, 324 bp, Zea mays
  Clone ID: MRT4577_108895C.1
gggggggggttttttttgtggtgggtgtggttttttttttttttttttttttgggaacacaaccggattttttttttttttcaacaagcagtcaaaaaaagggggaacgaaacacattctttaggacagatggttttttcctgagccggaaggtatacatttcccgggctctacggttcgtgacaatattcttgaccacttgttaaaaaattaaaatttttgctttccatgcccccaggtgaattcccataaatttcttttccggggccggggccttttatctcgcctggggcaaaaaagaattttttttggggctaaaacggg

SEQ ID NO: 9759 - DNA, 264 bp, Zea mays
  Clone ID: MRT4577_108896C.1
gagacgcgtgcgagtagatcgggcatcatccgtctgcacaaatacagcaggggggtgcagcggattttttaaccgttagagtgttaggacaagattgtgctcaaaggtgatgcaccttctagagtggagcgcggtggaatccgcactgctgcttacgcatacgaccacacgcggtactgatgataatataggcattgccacctcaatgctcctatttacactgacgtggatggcgtgcgcaagatgcaccactcactgctctga

SEQ ID NO: 9760 - DNA, 276 bp, Zea mays
  Clone ID: MRT4577_108897C.1
gggggcaacacattcagttacatttttcacatgaggaatgttcccgggttaaaaaagcttctgaaaaacaacattgtttttttttttttaccacccacaatttaggaattttacacatgcacaaaaaacaattgtttgtttttgttttgccctccccagtttttttttttaaacattgtcccgaacccatgaacttttcagtttttttacaaaaattgttctttgtcgtaaaaatactttggaatccccacactccaaatggggcctgggggattt

SEQ ID NO: 9761 - DNA, 382 bp, Zea mays
  Clone ID: MRT4577_108898C.1
acccacgcgtccgctcctttttcattaatctaagttgatcactaatgtcagcggggtcttttataatctgatgatgccggtcttctgactgacggaacaaatggacagattatgtaggtagagagaggttgactactctgtgccgtatcattgtacatgcatgcagcagaaatttcggtctctgctttctcgcggtcaatagccagccctgagtctgcctcaattgtcataaaaagaaaagaaaagaaaagaaaagaaaaaaggttgctgcaacgagtttccaagtccagtcccacaagagacgttggacagacagggacagggacactacggcaggcactcggtagcaatcaagaagatggccggcgggcacaaggacaag

SEQ ID NO: 9762 - DNA, 318 bp, Zea mays
  Clone ID: MRT4577_108899C.1
ggggggccagaagtttaaggtggggtttccagttccagccctgataaaaacatccaacgggttcagggcccctggtccgtaacgttcccccaagggccccccattacatgctacggggaaaaaaatggaaactttttcttttccttttcgaaaaaccaagcccaaacaactcccaccccgggttgttgttgaacccaaaggcccaaacctttccccacccccccggcctagcccacccactgggttgcccgacaatcccccccccccccccccctgggccggatgctaattttttcggggggggacttttccgggggg

SEQ ID NO: 9763 - DNA, 168 bp, Zea mays
  unsure (1)..(168): unsure at all n locations
  Clone ID: MRT4577_10889C.1
tccttantacacaaattttcaaatcttatctttccaccaaaactcttactattcatctttaccaaacttttctttattanatctttctcattaatacattctcctttatcataaacctcacttatattttcacacaaatttccttattctaacaacattctatatcta

SEQ ID NO: 9764 - DNA, 429 bp, Zea mays
  Clone ID: MRT4577_1088C.1
acagggcccccaacgtcttttatggggaggggccatatacaatatatatactgtctaagttgagggggggccacccaattacagatctgaaggactgaaatgctattggtcctaccagttttaggataaggataatgaaagacagctcgacttgcaaagctatggggatgtgtgacccaccatgtaccaaacgggcaaggcgccgtcatgcatggggtacagccgtacaggtgaaacccgcattccatcactgaaaggaaatggccatctggcccatgaaaaggttgatgactcccaggtagagggaaatggctgccaccacgtactggttgaaggcgtggcgcttaaacagcttgttggtgtcataaacaatgaaccccgaaaacaccacgggggccaagacgccgaaaatggtcatggctacccttc

SEQ ID NO: 9765 - DNA, 361 bp, Zea mays
  unsure (1)..(361): unsure at all n locations
  Clone ID: MRT4577_108900C.1
gcgataagcagcagctcatcacctgaatgagagcagcccggaagaaggggagcaagcagcagccgtcggtggaagatgtcgtacctgctgccgcatctgcactcggggtgggcggtggaccaggccatcctcgccgaggaggagcgcctcgacatcatccgcttcgaacatgactgagacaagaactgcatgcaaatggaccaacngcaagcagcacaagctgcaacaccaagaaacggggcagccggcgacgctgaagacaaccccccgcgacatgcacgagaaccggataccacccaaagagaaccgcgagaacacccacaacaaccaccgcacccacaccagcgacaccagccgcccc

SEQ ID NO: 9766 - DNA, 345 bp, Zea mays
  Clone ID: MRT4577_108901C.1
gcgcgcacgcgtagactgactcgtgtttccagtctctcctcataatttcagcagagaggtatgagcgatgttcaatgggggagatgtccacattagtttcagtgtcacaaatggatatttgtgatctattatagtctctcttgtgtagtttgttgtacattgatcgattattgaatccaatagtcccggattactcctgttagaatcatgtatcacacatgtagtaatacttatcttagttctacataatttgatttaccctaattcatttttaaaatatgatgcgacattctatgtataacggattgagtacttaggatgtgccctattgtttacaatacaaca

SEQ ID NO: 9767 - DNA, 382 bp, Zea mays
  Clone ID: MRT4577_108902C.1
tttttgttttttatcaacaaactcgcgggaccatgacaatagggggagaggacaataccgttttaccattttcaatgcgaatttttcatacaattcaggagcattctgtgcaatagttgtgtaggttgtatcggaattagaaccattgaaagagctccactcttctttgtgggaaggtgcatcctcaagagacagaatcagctggtcttcccaatcagtgcatcatatctgcatacatcggcacttctaagtggacataccctagtaatctcctttaaccatttatctacacatgttagatcaaattctggagggggtggagagatacgaaaacattttcctgtttatattcaacagtgcacaaatagtatttggcaggttt

SEQ ID NO: 9768 - DNA, 423 bp, Zea mays
  Clone ID: MRT4577_108903C.1
aaatgactgcctcacccagttaaatcaccagagcacaccttcaacaaaagcagaagcaacactgccacaccacacattcaatacatcacatagactaagaagtccaaaccatatgtggagacatcattagaatatcgtccaggaacagctcgcactcctaactcaagacttggctagaagtgacaaccaaaacaaactaaccaatgcctgattcactctaccgaccgctgtgacctacttcactactcttctttgcaagcttgaaccaagtttggggcccgtaggaaggaccaagaggtggttcgagacgtgggaaactgcctaccaatcatcatttgtccgccgctcaatctttttcctctgactgagccaaccttccatgccaaacatgtatgcgaacgcctttatgtcacgtgacatcca

SEQ ID NO: 9769 - DNA, 263 bp, Zea mays
  Clone ID: MRT4577_108904C.1
gtgaaagtacacagagtgagtccgctgtgagggggtctatgcgcggtgggctagtcctttttgttcttcttttaccttgcgagtttttcatttcttgcgggcgcgatccattgagagttccatcaattggtacgcggaaccactttatccccaagattctgcgctactacgtctagcccgaagctattgggatgggtcctcatggcgccacggagagttcgatcttcatgttattcccggagctttccccgtcaagctacacg

SEQ ID NO: 9770 - DNA, 377 bp, Zea mays
  unsure (1)..(377): unsure at all n locations
  Clone ID: MRT4577_108905C.1
gcaaagaataaaaggttcgccatggcggtatccaagaacaagaaagcctgccgcggcgaggcagatagatcatcgtgctcacacccacatacatactcctataagaaagcaagagctccaggaccaaggcgcaggccagggagaggcggagaacaagaccaccaagatccaagccggcagattatagcttacctgatgccactgcgccgcatccatgcatgcaaggatcccaattccgctcctcgccagcggttctcccgtgtggtggttgttgcctccgaggggcgaggaagaagacgtacgagctgaggacgactacgacgacgaggacgaggacgaggcgcangaggaaggaggaggaggagcgtactggagct

SEQ ID NO: 9771 - DNA, 347 bp, Zea mays
  Clone ID: MRT4577_108906C.1
aacatgactacatcattgatacagggtaaatgaaggttttcattcacataataaaagcagtaaagtcatccacatcagatgtgtatatttggcccattggcaaatgattagcttgatcataacaaataattttggcaaagagcttgctatacattgttagctaggtcaaaaaaccagcaatgactactgatcttatcgaatgcttgaatttagatggcggtccttcataaaagttaggttgaatatgttcaccacctatcacaatggttaatggacctgttgtcttgtagtctcagcttaaaacccttttctagtgcccatcaaatgcaccaactgtgctgccagag

SEQ ID NO: 9772 - DNA, 845 bp, Zea mays
  unsure (1)..(845): unsure at all n locations
  Clone ID: MRT4577_108907C.1
attcttcctcttccccgagacctattcgacatcaggtattcagttcggttcttgggagagccaatctgctgctgcttgcggtgactggcaccagcgcgcaaggcttcctagagaccatctgcctgcgctgttccgatggattgcttcgggtgcttcgcgccggaggcggacgaggacctcaggccctccaagcacgacgattcgtcaggggctgatgcgaggaggaaggtcgtgccggatgtggccagcggctacgcgcacagcttcaccttcaaggatctgcttgtggcagttggctacttcaacgaggccaatttcataggagaaggtggattcgggaaggtgtacaagggcaagatcaacgggcagatggtggcagtgaagcagctcgctcgagacggagttcttggtcgaggtgctcatgctgacggtgctcaaccatcgcaaccttgtcagcttggtcgggttctgcacgtagggggacgagaggctgctgcctgctggtctatgagtacatgccgttcggaagcctggagagccatctgtttgacaatcctaaggtctaaggatacagccgggtggcgttatggattcacggccttatttctttctatgagatctttagaaatctttcagggaatagaatgcatatggagcttttcttccatgttaaatggcagtgactctgtcatatctttctaccatccactatttgtgggacccatttatacactanacacacttaaatgttttctagaccgcggagcgcacacaatttactagttaagatatagtttagtttcacacatggccgatatagcagaaagcaagtgttatgatgattt

SEQ ID NO: 9773 - DNA, 555 bp, Zea mays
  Clone ID: MRT4577_108908C.1
agacccggggagcgcgtgaggttttggttcttgaatcttgagaggcgaaagagaaagaaaggaagagagagcgacgccttgagagcaccagactgcgcagcaatggcgatgaaggcgaggttgttggcggcggcggcgacgtgcgtctgcctggcggcggcggcctccgccttcgacgtgccgaccgtggccttcgaggaagggttctcgccgctgttcggggacggcaaccttgtccgcgcgcgggatgacagggccgcccgcctcttgctcgatcgccgctccggttcgggattcatctcctcggattactacctgcacggcttcttcagcgcgtccatcaagctgcccagggactacacggccggcgtcgtcgtcgccttctacctgtcgaacggggacgtgtacgagaagacgcacgacgagctggacctcgagttcctgggcagccggtggggcgggcagtggcgggtgcagaccaacgtctacggcaacggcagcaccagccgcggccgggaggagcgctacctcctccccttcgaccccaccctcgag

SEQ ID NO: 9774 - DNA, 890 bp, Zea mays
  unsure (1)..(890): unsure at all n locations
  Clone ID: MRT4577_108909C.1
ttgggtacctcgaggccggccgggtcgacattaggtattcagttcggttcttgggagagccagtctgctgctgcttgcggtgactggcaccagcgcgcaaggcttcctagagaccatctacctgcgccgttccgatgggttgcttcgggtgcttcgcgccggaggcggacgaggaccttaggccctccaagcacgacgattcgtcaggggctgatgcgaggaggaaggtcgcgccggatgtggccagcggctacgcgcacagcttcaccttcaaggatctgcttgtggcaactggctacttcaacgaggccaatttcataggagaaggtggattcgggaaggtgtacaagggcaagatcaacggacagcagctcgctcgagacgctcgagacggagttcttggtcgaggtgctcatgctgacggtgctcaaccatcgcaaccttgtcagcttggtcgggttctacgcgtggacgagaggctgttgcctgctggtctatgagtacatgccgttcggaagcctggagagccatctgtttgacaatcctaaggtctaaggatacagccgggtggcgttatggattcacggccttatttctttctgtgagatctttagaattctttcagggaatggaatgcatatggagcttttcttccatgttaaatggcagtgactctgtcatatctttctaccatccactatttgtggacccatctatacactanacacacttaaatgttttctagaccgcggagcacgcacaatttactagttaagatatagtttagtttcataacaatggccgatatagcagaagccaagtggtatgatgatttgntttttcaattctatggtgnngtattggntcagcatgcacatatattgacatga

SEQ ID NO: 9775 - DNA, 648 bp, Zea mays
  Clone ID: MRT4577_10890C.1
atggagtcagggccacaatcaaatgaaacaaggcttttgtcatacaatattagagttcaagctttcccgatggttgccaacgaagctccattgcgcccttcatctgatccttcgatagggaggggggtgatcggcctgatgcgtcggatgacgatgatgtctcagaccgccatgacccttcgcctcgacgttcgagttccgcccaactccgcctgggtcaaccagtgccgccggggcgcgggagcatcgcgcatgcgcctggggaatcgttggagattgtggctgacgccttgggctcttccaatgtgcatctactaccccaccagattgagaagaaagggaaatccccttcaggatcaagatgtggctgctaacttgtcaggagggagacacaatgacttgggcaacgacttgtgcaagaaccttagtgaggaccttgccattgattctcaaactcatagcaatcaggaccaagcttcaggctgctgcattgatagtggcattgatgcttttatctgcaagatcaacaggtggacggaagtgcttctcccggctcccaaaccttccctgaagactgcatcatctcaggtggttaatgctcctagacgcaacagaagagttgctggcattggtgttgtcagggcctaa

SEQ ID NO: 9776 - DNA, 2538 bp, Zea mays
  Clone ID: MRT4577_108910C.1
atgcgtgttgttgctacatttttcattatgcagccaagcgtgaggggcgggcgatgcggggcctcccttcccttcccttccgtccggtccccatgggccatggcgtcgcccgctatgatttcttggccactcgcggccgcgagccggggtcgccccctctccacagtccacacgcacggcttccctctcctcgccgccggaggcgcgccgcggaagacgccacaatgagtttcgtcccgtccgttggcgcactagaggatgccctgcctgaccctgcactgcaatccgtcgccgggtgctgaccaggcgagctcctgattcggagccattttgcggggttcttttggggggccccatcgccgtgcttcgtttccctgcccgccttggccgtgcattaatacccgcttccttgtgatagtcctctccctccctccctccctccgccctcacttcccactcacctcgcgctcgtcacctcggctggttcggttcttgggagtgtcagtctgctgccggttgcggtgaccggcaccggcacgcagcacttctcggagaccatctgcctgcgccgttccgatgggttgcttcgggtgcttcgcgccggaggtggacgaggacctcaggccctccaagcacgacgattcgtcaggggctgatgcgaggaggaaggtcgcgccggatgtggccagcggctacgcgcacagcttcaccttcaaggatctgcttgtggcaactggctacttcaacgaggccaatttcatcggagaaggtggattcgggaaggtgtacaagggcaagatcaacggacagatggtggcagtgaagcagctcgctcgagacggcgtgcaggggaggaacgagttcttggtcgaggtgctcatgcttacagtgctcaaccatcgcaaccttgtcagcttggtcgggttctgcgcgcagggggacgagaggctgctggtctacgagtacatgccgttcggaagcctggagagccatctgtttgacgtgcctctcggcaagaaaccactcgactggaacacgcgcgtgaggatagccgtgggagtcgcggaaggggtttcctacctgcacaacgtagccgacccgcctgtgatctaccgcgacatgaaggccgccaacattctgctgggcgaggacttcagcccgaggctctccgacttcgggctcgcgaaggtcgggccggttggagacaggactcacgtgtccacgagagtcatgggcacctatggctactgcgctcctgactacgtcgtgagcggcaagctcaccatgaaatccgacatatacagtttcggcgtgctcctgctggaactgatcacggggaggaggatctacgacgcctcgaggcctaaaccggagcagagtctgttgacatggtcgaggccgttcctgcatgacaagaggaagttctacaggctcgctgacccggctctgctgggctgctacccgtcctcggcactgaaccagctggtcgtgatcagcatcatgtgcctccaagaccagccccacgtccgcccgatcatctccgatgtcgtcataggcctgaaccacgtcgcgagccagccatacaccgctgagcgcccgccgcccgcgtccgtgagctccccggtgggcagcgggtcgccgcagctcgtcaggacgccgtccagaaggagaggcggtactggtaggaggagcgcgcagtgcgcttagggcttaggcccacaggctgcattgttgcacgcatgtctcgaagagcagcaagatacgtcgtcagctcagtcagatcagatgaggccggctaggaggagggatgttgaaattgatgaagccggcaagttcagttccgtttagccggccggagcctttttgattggagcggcggggtctcgagtgagtgacctctgccttgacagggagatgtagcgaggctgatggttaggaaggagagttcaggttgactatgcatgactaatgctcttttcatatgcttcttcattgttgttgttgttgtcagttttgaattctgtaggcagtgtacataggatcagtgtcctctgtaggggggtcgtgggatgttcatcatcaattcaccagccatgtacagagctgccatggctggcctgtagatgcaataagaagttcaccagggtttaagcttaagaggcatatcacatgttggtcgaaaaaaaaaaaaaaaaaagcggccttatttctttctgtgagatctttcagggaatgaaatgcatatggggcttttcttccatgttaaatggcagtggctctatcatatctttctaccatccactatttgtggacccatctatacactaaacatactcaaatgttttctagcccgcggagcacgcacaatttactagttaagatatagtttagttccacaacaatggccgatatagcagaagccaagtgttctgatgatttgttttttcaattgtgttttctgttattggttcagcaagcacatacatgatttatgacatggcatctgctatctttgttatatttatgacatcggtcttg

SEQ ID NO: 9777 - DNA, 320 bp, Zea mays
  Clone ID: MRT4577_108911C.1
ggaacaaaatgaaggttttgacgggggcggttcccacctcccatttaacgggggggccccatgggtcgattttttttttacaaacgggttcgatcacccttttttttttcccccgggttttttcagttaaagagaaaggctaatccatttccatggctgaacttttggccctatttttccttttgaaaacattttccctgaataggtgggtttaacccataaggtccatggccggtttttggtgaaggggttccttttggctttccaaaatgcttttccgttttgggggggggttttttgaaaaaaccaccctgtccttt

SEQ ID NO: 9778 - DNA, 227 bp, Zea mays
  Clone ID: MRT4577_108912C.1
cacaaaagttctaaactgtccagttgggctaacctttttttttttcagttcagttcacctttttataacaggcaataacaaacaagactttgaggagcagcggttccaccccccctcagcaggcaggcaaaaacaagcacgactaccaacagaaggggaagggggaggggtgggggaaaaagtatttacaaacaggctccagtgggaacctaatattttagattccc

SEQ ID NO: 9779 - DNA, 306 bp, Zea mays
  Clone ID: MRT4577_108913C.1
ttggcaggccgctacgaagctcggattcgctcgggccaccctgggcactctcctccgcaactctccgctttcctcggcaaccacggccactgcccgatggaacgccaccatctggcgccgcctcgacggaggcaaccccgtggaggctgtgtctgcattcatcaccatgctccggtgcggcgcccgcccggatgccttcacgctcccgctcctcaatcgcgcttcggcgcccctcaccagccttgtcggcgccgcccactgcttcggcttcgggtcggctttggtgaaacgtctacttcggcacac

SEQ ID NO: 9780 - DNA, 657 bp, Zea mays
  unsure (1)..(657): unsure at all n locations
  Clone ID: MRT4577_108914C.1
gaagaaaataatgaagctgatggtgatagcagcatatggcatgctgtggatgaggcgttaggggcaactcatgctctccaaggcagaaatttgccaagattagctgctgcaggtgctgcttcaagttctcggcctcaacgaacctatgttaggacaaggaagcgttcaagaaatgcagcagcacaagatattggagaagatgatagtgatgctcaagaagatggtaatgctacaacagatgcagaagaacaacaagaacaaccactagaagcaactagagatatggaccaagatgaatctgaatctggaggagggaaagctgctgctaatgctttttgcttggatgctgatctgctctaggtagcagactagcaggacttgtagaaaacacttgcatccaaggaaagacagcgaggggtgatgggaaaggactttggaagcatggcccgtgctgctctgaacaagaggaatgtgaaaaagaaaaggaagatcacaataagcaggctctctcatagcaacagtcaacaaagagaagggaaccctcgcgcaaggactctccggtccgacgggcgcagctggacggngccctgcattgttaaatgtgtgcttgtctcgttgctcagatggtcagtatatgggtccatgcacacatgcccg

SEQ ID NO: 9781 - DNA, 403 bp, Zea mays
  Clone ID: MRT4577_108915C.1
tttttatttttttggtccaaacccccctaaaaaccggacacaatcacacttaaatgtttatgaactcaacgcaaatacaggccgactgttagattatctaacactggcatttttaccaacataatagatatcaaaacatacgcttccactgggagcaccttgaacactacaccaaccataatcgcctagcttgatcaagcaatctgaaccaccccatcacttacaccattgtgcatcacgagcatcacccagctgttccttaagatgcagcttgggctcgatttgggttacccttgcaacgtataaaaacctgaaaccatgacaggatgccacagaaagttctatatctctaagctttgaaacgatctcacctagtattctttgcacaagaaccatgttttat

SEQ ID NO: 9782 - DNA, 385 bp, Zea mays
  Clone ID: MRT4577_108916C.1
ttcactcgtcctatcactcgtgacataaaataatacacaaaatactattacaataactaagggaaatttagtaaaaataaacaacgtatgttgtcgttctattatatgatattatgttaatgtatgacatattctatttattaaatttttttgagtatgatctaaattaaataattctatgaataacattcaatatactgataacgtgaaaagcatgaagattacgtatttattctcatatcatcatgtatatctttaaaatggttgcataatttctaatactctgaaaattacatgtattctcaacattttcgctaaccgaatgtgcattgtaataattcatgtagagttacatctaattcagcatataaatacgtttacacta

SEQ ID NO: 9783 - DNA, 665 bp, Zea mays
  Clone ID: MRT4577_108917C.1
acaaacacttcgttttctttcctcttgagccccttttggggagacggactgtttggcatgtaggccgaacggtccgaacggtatgcggtggtggcacggacgattcgcgcgtgcgcagaatcagttatggtttcgatttttttgcgggatttgttagctaaatctgcgagattaactcgtgaaccgacttataacgggtccagacctcccatttatatagatgaagggctacgggcgattgaaccccacaatcgatcaaatcaaatctacttaacgtttttaccttatgcattatgagtagttccagtttagccctagtttagcctccctctgtgtcaaatcttcacttctcttcggctttacatcgactagaggcgtcttgggtggcctatcgacgccaagatacaccttaggatctctcctcatcgacggggcacctctcgagaggcgagatttaggtctgctgcgaagaagacccatacgccatcgcggaccgtccgagtcccaggcgtggatcgtccggacgtatgcggaggaagagtcgctcctgcgccaggtcgcgaaccgcccgggcctgtgccacggaccttgcacgtcaatgcagagagcaccgccagacggtccgtttcagtatttgacgcccagatcagcgccaacacattaca

SEQ ID NO: 9784 - DNA, 448 bp, Zea mays
  Clone ID: MRT4577_108918C.1
ttcacgaaactcaagatcattaagctggtgtatggcatcttgtacttcgggtacatgtttctcgcctcctatgccttctttgtgctgagtggcccaattggtttatgcgcctgcttgtggttcaataggttgatttactcgtcagtgaagatcgattaggtgccaatatatgacagaatagcacgtgtttcagtgatggagacaaaagaactgcaccattgatgtggattgggaataacccccccccccccccccccccttcttttagggttttcagggaaaaaactttcttcttaggatttagtttatgaactattatgttttgttgttgtcagattatacactttagtggtttggaactgagaaaaatataagggtaaacacattgtgatgaggctgtacctttttgacattttttttgtgcggctctatataaattcaattcatt

SEQ ID NO: 9785 - DNA, 710 bp, Zea mays
  Clone ID: MRT4577_108919C.1
agcgtttttccaccgtccgcattgaagacagggggggggggcaggtttattattaaagagattccataccaaactaacaaagctactcttgtacaaaagatagctgagcttgttgaatataaggtattggaaggtataagagaaattatttccggtggggttccgcactggaatgcgtgtggtggtggggctgaaaagaagtgcagatcctgctgttgtcctgaacaacttgtatcgtcatacagctctgcagtctagctttagctgcaacatggtggctatacttgatgggcagccaaaattgatgggactgaaagaaattcttcaggcatttcttgacttccgatgctctgttatcgaaaggcgtgcaagatataagctttcacaagctctagaaaggaaacatattgtggagggaattgttattggcctcgacaatttggatgctgtgattcaaataatacgagaaacatcaaatcacactgcggcaacaagagctcttgtcaatgaatttgatctatctgagaaacaagctgaagcgctgttggatatcacactaaagaagcttacttcccttgagcggaagaaatttgtggatgaagctaaaaccatgtcagaggaaatttctaagttaaatgagcttctgtcaagcaagaaacttatcctccagcttatacaacaagaagccgccgatttgaaaagcaagtttt

SEQ ID NO: 9786 - DNA, 546 bp, Zea mays
  unsure (1)..(546): unsure at all n locations
  Clone ID: MRT4577_10891C.1
catcgatngtcctcactcatatacatatctcattagtttctttgtgtacgcgtgtgtaaacttcatagacatcaagaatcgtagatcgtctagacctttgagaccttcttagacctgtttctcattctggttcattctggggcttctgtaacggtgtgtcacttggcgcaacactaccactgtcatgtgaacttctcctgtgcaactggctcaaaagagccagactgtgcggaaggtgaagcaacttgctatgtagtagttgcactgggtgatgcaacatttgcagcaagggtttcacctccaatcggtacaaccgttggtggaaccgggtattaagaagaatgggtcttcaaccatcggaaatgggacatacgtcctctttttctgaagggcaacctctctaagtgtgatacccaaaaatgtgaaacatatgaaaagaggtgatctccttaattgttttggcatccactcattacaacatgaacacatcatgtttaagttaacaaataactaataaaaatactctatgccccatgttggagtttg

SEQ ID NO: 9787 - DNA, 590 bp, Zea mays
  Clone ID: MRT4577_108920C.1
caacaaaaaaagccttggacccccggaaatcaaaaacggcaacatgggccttaacaaatactttaagaaaattccatcggcccagttcagggagaaacaccagggccagttttttggccagaagtttttccccacccccaaaaccccaaaaaaaaaaaaatctttcggcaccgggggacgggggggaaaaatataccccccaaaaggggaggggcccctccccccaaattccccaaaagggcagccaaccccgggataggcaaccagaaaacaaagccttcttggagcccaaaaaaaaaccagcaccccaggcttggcggggatcaacagcccggtcccaccccataaaagcagcaaaggacaacttggaaaggcccccaaccttttggccgtggaggaccaagggcaaaaacccgggaaagttttccccccattaaaatacccgaggagggcggggaaaccacccaccccaccccccaggctggagcaaagcaaggccccccggacttaattatggaaaaaagaagaataaaacccccgtggaaagcttaaaaaccccgaccaacccagctaacctctggggggggggg

SEQ ID NO: 9788 - DNA, 149 bp, Zea mays
  Clone ID: MRT4577_108921C.1
tggatcacctaataaacctaataacctgctatgccagctccaccaaattaatttttataaagttagatcagccccaaatagaacctaaagcagaacatcaaagcaagtcctccatgttatgtagcttcctctccttgacaaaatcttaa

SEQ ID NO: 9789 - DNA, 2508 bp, Zea mays
  Clone ID: MRT4577_108922C.1
atcgaaacttccgcctcgcagcgcgcccgcgcgtcgccgttgcctctagcggtctagccctctactactcacccgacctcccgcgcgacgccgaacctgcgagccataacgccacccaccgcctcgccgcgcagatctctggggcttatccctacccccgggctgtgattctcccgcctcctcaccgatgcggacgccggcgatgctccggtgggccgcggcgctcgcggtcctgctcgccgtcgccgcgccggccgccgggttctacctccccggcgtcgccccgaccgacttcgccaagggtggtccgcttccagtgaaggtgaataagttgacatctatcaagactcaactcccgtatacatattactcccttccattctgcaagccagatgccatagttgacagtgccgaaaatctcggggaggttcttcgtggcgatcgcattgagaactctccttatgtgttcaaaatgcgagagcccaagatgtgtcagattgtctgcaaagcaaagatcactgagaaagaagccaaggagctgaaggaaaagatagaggaagaataccgagtgaacatgatcctggacaacctcccgctagttgttcctgttaataggcaagataagaacagtattgcttatcaaggtggatatcatgttggtctcaaaggcgtgtattctggaactaagaatgagaaatacttcatccacaaccatttgtcatttacggtgaagtatcacagggatgataattcagaactttccagaatagtgggatttgaggtcaacccactcagtgtcaagcatcagattgatgataaatggaatggtgtagacactcgcttgagcacttgtgatcctcatgcaagcaaatttgtcataaactctgattctcctcaggaagttgaagctgacaaggaaatcatattcacatatgatgttcattttgaggagagtgagatcaagtgggcatcacgttgggacacctacctgttgatgactgatgatcagattcattggttttctattgtgaactctctcatgatcgtgctttttctatctggcatggttgccatgataatgcttcgcactctctacagagacatctctagatacaatcagcttgaaactcaagaagaagcgcaagaggaaacaggctggaagcttgttcatggggacgtattccgtcctccaacccactctgacttgctctgtgtttgtgttggcactggcgtccaattctttggcatgctcctagttacaatgatcttcgctgtgttgggtttcctttctccatcaaaccggggaggactgatgactgcaatgcttcttgtctgggtcttgatggggctgcttgctggctattcttcttcacgcctctacaagatgttgaaaggttcagagtggaagaagatcaccctgcaaacggctttcctgtttccaggggttgcatttgttattttcttcatcttgaatgctcttatatggggggagaagtcatctggtgctgtccctttcaccacaatgtttgcactggtcctcctctggtttggcatctcggtacccctcgtctttgttgggagttatcttgggttcaagaaacctgccatggaacctccagtcaagacaagcaagattccacggcagatccccgagcaggcttggtacatgaatccgcttttcactattctgattggtggcgtccttccatttggagcagttttcattgagcttttcttcatcctcacctccatctggctgcaccagttctactacatcttcggcttcctcttcctcgtgtttgtgatccttgtcatcacctgcgccgagatcgcagtcgtgctctgctatttccagctctgcagcgaggactacatgtggtggtggaggtcctaccttacctcaggatcctccgcgctgtacctcttcctgtacgctgctttctacttcttcacgaaactgcagatcactaagctggtgtctggcatcttgtacttcggctacatgtttctcgcctcctatgccttctttgtgctgactggcacaattggcttctgcgcctgcttctggttcactaggttgatttactcgtcagtgaagatcgattaggtgccaatatatgacagaatagcaacgtgtttcagtgatggagacaagagaactgtaccattgatgtggattggggaattaccccccttcttttagggttttcagggaaaaaagtttcttcttaggatttagtttatgaattattatggtttgttgtcagattatacactttagggcttgttcgttttggtgataatccacatgtattgggtgggattgagctggtttaaatccataacaagtcaaaatccaccccaatcccactcaatacactccaatacacatgtaatatcaataaccgaacaagcccttagtggtttggaactgagaaaaaatataagggtaaacacattgcgaagaggctgtacctttttgacaaaaaaaaaaaaaaaaaagcggcc

SEQ ID NO: 9790 - DNA, 833 bp, Zea mays
  unsure (1)..(833): unsure at all n locations
  Clone ID: MRT4577_108923C.1
cactccacagaggancacgcgccgccccaaaaccctcatccccaccgcggcgcttccggcgacggccatggacacccgggtgccgcccgttcccatggatccggcgacggcggtgatgttccggctcgacggccaggacccggacgagatggaagccctcttcgcccgcgtgctctcctacacccactacgccctcccggacccgcccgtctccgtcgacgctcgcctcttcggtctcctcccccaccactccgtcgacggcttcagccgccttcccgacgtgctcctccgcaacatcgtctctcgcctcccagtcaaggaaggcgcgcgcaccgcggtgctctcccggcgctggcgcggggtctggcgctctgccccgctcgtcctcgtcgattctcacatcctccccgcagccgcagccaccgcggccgcgcgtggcgacgcgcggcgcatcacctctgctgtgtcccgcatcctcgccgcgcacccgggacccttccgctgcgtccacctcaccagcagccacatggaagagttccatggcctgctcacgcgctggctccgcatcctcgccaacaaggggatccaggaactcgtcctcgtcaatcgcccttggncgctcgacctcgttctcccctccaccttcttaggcatgaccaccctcacccgcctctacctcggcctctggaagttccccgacacggncggcatcccgagcgccacctgtctcccttacctccttgagctcgggctctgcagcctcatcatggagagcaaggatctggactccatcctcgacaggagccccgtgctggagacgctttatatccatg

SEQ ID NO: 9791 - DNA, 2430 bp, Zea mays
  Clone ID: MRT4577_108924C.1
ggccgggaataaaaaccctagcggacgcgcccgtcacccgaagcttcctcctcgcagcgcgccgcgcgtcgtcgcctctacccaccggacttcgcgcgccacgacgagcctgcgagccatcagcccatcacccacccacccccccgccacgcagatctagggagcttaccctcccaccgggcggtcattcttccgtcccatcaccgatgcggacgccggcgatgctccggtgggccgcggcgctcgcggtcctgctcgctgtcgccgcgccggccgccgggttctacctccccggcgttgccccgagcgatttcgcgaagggtgatccgcttccagtgaaggtgaataagttgacatctatcaagactcaactcccgtatacatattattcccttccgttctgcaagccagataccatagtcgacagtgccgaaaatcttggggaggtacttcgtggcgatcgcattgagaactctccttatgtgttcaaaatgggagagcccaagatgtgtcagattgtctgcagagcaccgatcactgagaaagaagccaaggagctcaaggaaaagatagaggacgaataccgagtgaacatgatccttgacaacctcccgctagttgttcctgttacaaggcaagataagaacagtattgcttatcaaggtggatatcatgttggtgccaaaggcctgtattctggaacaaaggatgagaaatacttcatacacaaccatttgtcatttacggtgaagtatcacaaggacgataatttggaacattctagaatagtgggatttgaggtcaacccacacagtgtcaagcaccaggttgacgataaatggaatggtgtagacacccgcttgagcacttgtgatcctcatgcgagcaaatttgtaataaactctgattctcctcaggaagttgaagttggcaaggaaatcatattcacatatgatgttcgctttgaggagagtgagatcaagtgggcgtcacgctgggacacctacctgttgatgaccgatgatcagattcactggttttctattgtgaactctctcatgatcgtgcttttcctatcaggcatggttgccatgataatgcttcgcactctctacagagacatttctagatacaatcagcttgaaactcaagaagaagcacaagaggaaacaggctggaagcttgttcatggggatgtgttccgtcctccaacctactctgacttgctctgtgtttatgttggcactggcgtccaattctttggcatgctcgtagttacaatgatctttgctgtgttgggtttcctttctccatcaaaccggggaggactcatgactgcaatgcttctagtctgggttttgatgggtctgcttgctggctactcttcttcccgcctctacaagatgttcaaaggttcagagtggaagaagataaccctgcaaacggctttcctatttccaggggttgcatttgttattttcttcatcttgaatgctcttatatggggggagaagtcatctggtgctgttcctttcaccacaatgtttgccttggtcctcctttggtttggcatctcagtaccccttgtcttcgttgggagttatcttgggttcaagaaacctgccatggaacctccagtcaagacaaacaagattccacgtcagatccctgagcaggcttggtacatgaatccgcttttcaccattctgattggcggtgtccttccatttggagcagttttcattgaactcttcttcatcctcacctccatctggctgcaccagttctactacatatttggcttcctcttccttgtgtttgtgatcctgatcatcacctgcgccgagatcacaatcgtgctctgctatttccagctctgcagtgaggactacatgtggtggtggaggtcttaccttacctcaggatcctccgccctgtatctcttcctgtacgctggtttctacttcttcacgaaactgcagatcactaagctggtgtctggcatcttgtacttcggctacatgcttctcgcctcatatgccttcttcgtgctgactggcacaattggtttctgcgcctgcttctggttcactaggttgatttactcttcagtgaagatcgattaggtgccaagatgacagaacagcacatgtttcaatggagtcaagataattgtatgattaatgtggattggggaattaccccccctcctttttttgaaggttttcaggaaaattttactgtttaggatttagtttacagatggtttatgttttgttattgtcaggttatacactttagtgatttggaactgaaaaaatataagggtaaacacattatgatgaggctgtaccttgtgacaatttttttttgtggggctctatataaattcaattcattgtacaagaaaaaaaaaaaaaaaaagcggcc

SEQ ID NO: 9792 - DNA, 230 bp, Zea mays
  Clone ID: MRT4577_108926C.1
tcaatttccaatttaaatttatattattcattcatgggacatcggtcctttacaacccacctaaacagattgttcgtcatgatccgttctaaatatattcccccttatcttcccctttctaagctttcttataaattattctctggccgtctattcttctaaggttaataaatttttttccacacaggaccatgccttcttaagtttttatcatcaatggcctcctccca

SEQ ID NO: 9793 - DNA, 224 bp, Zea mays
  Clone ID: MRT4577_108927C.1
tgggtacctcgaagccggccgggctctccacgcactccgcaattccgcatcacgcaccccaccccaccgcccgcaaccgcaagctcagattccctcccaccccaccccaccgtcccgctcactccagcccagcccgcgtccctacagcccagcgtacagcaagcaccggctgcatccattcatgtgcggcggtgccattctggcggactcatgccggcgccgaa

SEQ ID NO: 9794 - DNA, 285 bp, Zea mays
  Clone ID: MRT4577_108928C.1
ctctacgctacctccgcgggtcgaacctttctccccttctcccaatttcttccgacggccgccgctccacccgcaggacgacaccatgagggagtgcgtttcagatccagataggtcatcccggtatccacgtggccgaaacgcgcgctgggagctgtactgccttgagcatgccattcttgatgacgctcacatgcccggtgacaagaccattgggagagcagatgatgatttcctcgcaaatcccagagagggtgtggttgccctccgcctgcacccttgggg

SEQ ID NO: 9795 - DNA, 559 bp, Zea mays
  Clone ID: MRT4577_108929C.1
aaaaaaatccaatccatctccacccaaccttcccctcaccaacacaatacccagctctttgcttcgcgccagcagaagcaggaggcggatgtctatgtctcggcaagggcgaggaagggtcatgggctagggcgagggcgaagcgccaccgccaacgtgatccgggaccacatccacatccatcaccatcacgaagatccggatgctgactatgagtagtagggtggaagggatctcgatcttcatctacaacgacaaccacagcgtgctcgagatctttatctataacgacatccgcgaccgcgacacctacacctacaacgagcgccgcaagaccgagaccgccatggacatggactacgcgttcaagctccagggccgcaccctctacctctacggatgctaaggtaagcgtctcttcgtattcggagactgggaatgggacatgtatctgtgtgagggtgtcggatgcagaattgctagttgtagctgtgtatgccatctctatctgctacggaaacgatttgaattatgaccatgatacaaatgaaagagcgtg

SEQ ID NO: 9796 - DNA, 760 bp, Zea mays
  unsure (1)..(760): unsure at all n locations
  Clone ID: MRT4577_10892C.1
tgggctggccggtgtggtytgctctacagcatcgtgttctacttccctctggacctgataaagytcttwatccgcttcgtgctcagcggnagrgcatgggacamcctcctggagaacaagaccgccttcaccaccaagaaggactacgggcgggaggagcgggaggcgcagtgggccacggcgcagaggacgctgcacgggctccagccgccggaggccgccaccagaacgctgttccacgacaagaacagctaccgcgagctgtccgagatcgcggagcaggccaagaggcgcgccgagatcgcgaggctgcgggagctcaacaccctcaagggccacgtggagtcggtggtcaagctcaagggcctggacatcgacaccatccagcagaactacacggtgtaagatgtgatcgagagagcctgctgtgatgtcgacgaaaacacctttggccatgccatgccacccttgttgttcttgcgacgacggagtcatgtgattgttacagaaaaaaagaagaaaattttccggtgatgtgattggagacaatagaagcgtgtacgtacgtacgtgtgtggctgatcctgaccccgagcagagcagccctaggtgaggtgaccattgccaccagatatatacccgtctttctagcttagctagggmgcttcttctttttcccctctcttgttattgtgaagtgtgtgcgcgtgttgtaatggttttactcgcctaactagccggtggtctcgcgaggcgaaga

SEQ ID NO: 9797 - DNA, 256 bp, Zea mays
  Clone ID: MRT4577_108930C.1
cccacgcgtccgggcatcttctagacttgaactatacagtggacatgttaactgttttcagttaactgttttcagtttctgttcatgttttcagtggacatgttttcagttcatgttttccgttcatgttttcagttcatgtttttagctagacttgatagtgggcatgtttcagttcatgtttcagtttctgttcatgtgatctgtttataaatctgtttataaatcagtttctgtttataaatctgtttataaa

SEQ ID NO: 9798 - DNA, 159 bp, Zea mays
  unsure (1)..(159): unsure at all n locations
  Clone ID: MRT4577_108931C.1
cttaaccacctgctttaaatctcccgtgcgcgctctccctcggtctctccggggctccctctctcgctcgtggccacgactgggcgactgcctccgccgcatttcgctaggcgccacacggcccttggccggcgacgagcacccncggaaaaggtgttg

SEQ ID NO: 9799 - DNA, 244 bp, Zea mays
  Clone ID: MRT4577_108932C.1
cctttcaggtttgctcgcgacggagttgccagttgggataagattggcatccttgcagcacctgacgatctcgcagtataaagttgagtgacaaaggtttgttcgctgctgaactagggggcaaaaaattattcagtggatacaaatgctaccggtactagccgcagccaatttaccactgacttatctaagaccgtgcctgcacgtgccagaacgagtggatgagcgctgtaacagcgctcac

SEQ ID NO: 9800 - DNA, 292 bp, Zea mays
  Clone ID: MRT4577_108933C.1
tttgctattttctttttttttttttttttatacagagggaatttctaaccacctaccctcattttccccggaaccctcaaccacacgatacataagcgttacgactgacagaggctaaccatgcaacacgccaccacctcacatctgcccttatgagcggacccgcataaaaacataaaccccaaggaggagacttccacatgtctccgatttatcagaaacattggagcgcgaatccccccctccatcaacacacacccgatattgggtaggaaggaacactgcttacccc

SEQ ID NO: 9801 - DNA, 850 bp, Zea mays
  Clone ID: MRT4577_108934C.1
tgcaatccaaacatccgatggagcccctatcctgcacgcccgcagaaccgtgccaccgcccctcccgagacttccgccacgcctccccaccgtgcgagattgccgcccccggccgcgagtgtgctgtgtgcccgtcgagacaactgttgtctccttccccaacctgcagaatcgtgcccaccaccgccacctctcgcgcgaggcccgggtctgcggccaccggcacagccagcatccttccctgcctgctcgctatgcatcatgtccgcgttcagcgagacaaccgtcgtcctcccttgctgagttaagtctccttgtgtgcagatgaaggcaatggagtatggatctgtgccagtatagataagcttttccagctatgaatcaagaacaatgaccctttgcattgggatcgacagatcaagggtgggatggttaggggttcgttgcggccatagccttcattgcaaggcttattcctccataaggaacctgtgaactgggcatctgcttttgaaccacatgacctacatgaggcaccaactcctgaaattaagggtacaagtaaaatattttttgaggagggaatgcaaggtagagttgccctgggtcccccaatatttatatgttacttatgtgagtatgcgtttttagaaaaaaacaaatacaaattgatgaacagagtcagtgcacttggcacatacacatcattctggacaaacaaacagtacccctccgttttaggggcctttttaaagcgtttttcaaggaataagaactcggataataaatttgcctcgcaattgtaactcatcagcggtatgattaagtactgtatttatagatttaaaaa

SEQ ID NO: 9802 - DNA, 526 bp, Zea mays
  Clone ID: MRT4577_108935C.1
attctgacaagcggccaccaccttgcgttctcagttgcctattcgcctcagcgacagagaggcacattctcctctttcttgctccgtcctctccaccgcgcggcggtacccactttagaacacagcatgaggaagtgcgtctggtcccattccccacatccagccatgcaggtggtatacgcgcgctgccgagtggactgcctcgaatatggcattcacgctgatgaccacatgcccggcgacagcaccattggcacaggtgctgatgatttcaactgcttcttcaccgacattggggctgccacttacgttgccagggatgtctatgctgagattgagatcactgccatcgatgacgctgggatggcaacctatccccgggtctacaatactgagaatgtcatcaacggcaatgaggatgaaggcaacaacgttcctgcgagttcgctacaccatagatgatgatatagttgagctggggcatgaccgtatcattgacgttgcagataagtgctatgtgctccag

SEQ ID NO: 9803 - DNA, 383 bp, Zea mays
  Clone ID: MRT4577_108936C.1
ttggcggttgagatggcggctaatccggcggacgtgccgagcctggatctgatgcactagctgctccgtctcatgaagtgcatgtcactgccccacatgcgcctaatcttgataggcccacctggctgtagcaaggtaaccctatctaccattattaaggatgaataccgcttgtgccatttagccactggctatatgctgagggctgctgtgtcgttcaagacacctctatgtatccaggccctacaagctctggatcagtgatagcttgctcaagatgacatggttcaggggattattgatgaagctctgaacaaaccttcatgccacaaaggtttgattcttgatggcttccctagaactgacactcaagcactgaagct

SEQ ID NO: 9804 - DNA, 277 bp, Zea mays
  Clone ID: MRT4577_108937C.1
aaacaatgttcttcccgtcaggtacactttttaaatgtaaattccgaatttttcgtgtttgtttaatactttgattgtaaaaggtctaccttgttatttttttagggctggacaagcacccccttacgggcatcttctacaaagaaagatttccttggcgcgggcttggtcttgaaggtagaggtctcaaatttggcttaaagcgggccccccaccctaacaacctcttgcttctccaatttaatcccaagacgcaccaccctaaatcccaaggggt

SEQ ID NO: 9805 - DNA, 105 bp, Zea mays
  Clone ID: MRT4577_108938C.1
ttcaagtccaagcagctttagcgccaattctctaatctgctcgacgacggccactcactggtatttatatacaaaacccttaactacaacttactcgcacttctt

SEQ ID NO: 9806 - DNA, 183 bp, Zea mays
  unsure (1)..(183): unsure at all n locations
  Clone ID: MRT4577_108939C.1
cgnagcttgggaactcttttttttttctggtcaaaaaaaacattttttatatcccctgaagcatcaagactcccacatggtgccccttggtgttaaacaccccaaccgggacccgatagaacaggccctttttcaacggagaagggtgtttggtcaagaataaacctcccttttttccaacca

SEQ ID NO: 9807 - DNA, 497 bp, Zea mays
  Clone ID: MRT4577_10893C.1
ccgagatcgcgaggctgcgggagctcaacaccctcaagggccacgtggagtcggtggtcaagctcaagggcctggacatcgacaccatccagcagaactacacggtgtgagatgtgtgctgtgatgtcgacgaaaacacctttggccatgccatgccacccttgttgttcttgcggcgacggagtcatgtgattgttacagaaaaaaagaagaaaattttccggtgatgtgattggagacaatagaagcgtgtacgtacgtacgtgtggctgatccctgaccccgagcagagcagccctaggtgaggtgaccattgccaccagatatatacccgtctttctagcttagctagggagcttcttctttttcccctctcttgttattgtcaagtgtgtgcgcgtgttgtaatggttttactcgcctaactagccggtggtctcgcgaggcgaagaaataatgcaaccgaaagcattggtctaaaaaaaaaaaaaaaaaaa

SEQ ID NO: 9808 - DNA, 424 bp, Zea mays
  Clone ID: MRT4577_108940C.1
cccacacgtacgggctccttgggcaactgcgagttggactaagaggaagagctcgggctcagcggcggctgcggcatcgttaccggcagactctcttcaagggacgcttggagcaacaaaggctaccatgctgttcatcacctacaaagggttttgccgcgaccaagtgacctgcaataaacaccgtcaggcctactacaacaactggcccgtgcctaaggttctcaaacccttccgacaacgttgtttccgaattacaggtttagcccccggtatggactgaaccgcaaaggcgcaggccgtggattgaattgacctctggcttgctgggcccggggcaccgcacttggctggcttcatcggacaacatgccttggccttaacccgggcgggccgccttccggtagaaagtcgggttcgtaca

SEQ ID NO: 9809 - DNA, 1430 bp, Zea mays
  Clone ID: MRT4577_108941C.1
caacgtcgccgctgcggcccaagaacggcgtcgagctggaggtgacggtgctgtcggcggactcgctgcgcctgccgacgtcctactggcctctgccgcggcggctgcggccgtacgtgaccgtgtcgtcgccggacgcgctgcgcagctcggcctacagcacggcggtggcgccggccggcggtacgggtacggacgagcacgcgtggggcgccacgctcgtcgtccccgtgggcgcgggcttcctcgagggccgcgccgacgtccgcgtctccgtgctgtcggagcccgccgcctgctgccggctcgtcggcgccacgccgctgggctggtgcggcatccccgcggccgacgtgctcgacggcctccgcccgccgcgcgcgctccgccgcctcagctactcgctgcgctgcccgcgccgctgcgggggcgggggcgcacccgggcggggccacggcgtcgtgcacctcgccgtgcgcgtgctcggcctgcccggggcccgccgatccaatacggctgcgacagcgccgctggccgcggccactgcgccggtgcagcggggctggtgccgcgtcgcgatgggcatccccgtgtccggggccgcgtcggccgtcgtcggggtgcccttgtcgtcgtggggcgccagcgccacgtcacggtgaggacgcgcggcggcacaggcgcacagcaggaggtttggatggatgaaaggaggatcggcggagagtcggagacgacgaccagccgtggaaaaccgatggaaaaatgtccatcagcgagctcggtagacctggtcctgatcgcggcttcagtcaaagcggggtgccttccgtgcacctgccggatatttgtggccttcgctattttggaactggtactgaaggtaccacgtgtccaaatcaaagtcagcgcggctacgtgccctcgactaaatacgacaagattcatttggttagggggtgtttgcttagagagaataaagattagtctctagtttttagtcttttttgccaaacactatgactaaaatgatttagcctttcacataggtgctaaaatagactaaaagcctataattaccctgttgcccttacattctctctgtagtatttggttgtgagagcatgtttgtatggacaactaatattgtgagtatattccaagggcatttgagtctttagacagtgtatttaatgattttagaatatgtttagtccctaaaaccaaataagtagggactaaagtttagtccaaggactgcggcttgctgggtgttccaggggcacactccagctgacaagattgttgggggtgccacctcataagatttggacggtcctctactggtattaaaactttgaaatttgcgccaatgtggacccacgagaagggccttgttgggctgtgttgatccgtgggatcaagaagag

SEQ ID NO: 9810 - DNA, 2903 bp, Zea mays
  Clone ID: MRT4577_108942C.1
gcttctctcccctgctccaatcccctcccccctgctcggccaggaacggacaatcccgtgtctccggccaccgtgctgcgcaggccgaggcccgagcttgagcgtttggtctgctgccatggatgacgaatctaagtctgctcctaaatcggatgtgaacaccgacgctggcgcggaagccgcggcggccgccgctccgctgccgccctcgagctcagaaacggcggagacggaggcaagggttgaggcggcggatggggagagccaggtggttgagcggttggtcgagcttgtgagcgagatcgcggccatctcggacttcaggaactcgtaccggcgtcagttctgcaacctgtcgcggcggatccggctcctcgtgcccatgctggaggaggccaaggaagcgcccacgccacttacggtggcatcggaggccgcgctacggcggctcagggaggcgctccacgccgccagggatctgctccagctcggcagcagcggcagcaagatcttcctggttcttgatagagagaaaataatgaagactttccaggatgtcactgcaagccttgaacaagccttagctggtatctcgtttgatgaacttaatatatctgatgaagtaagagagcaggttgaattggtgcatactcagttcaaaagagctaaggaacggtcagattcatctgatgatgatctttttaatgagctgatgtctctatgtaattcaagcagcagtgatagtgttgacccagatactcttcgaaggttatctgagaagttgcagcttgtcacaatatatgacctcaatcatgaatctctgaccttgcatgagatggctagtggcggtgatcctggtgcagttgttgaaaagatgtcaatgctcctcaaaaggattaaggattttgtgcagacagaagaccctgagatgggtgcccaagcaagtacagcaaccatttctacaaacgacaattcagcatgtcctgttattcccgatgatttccgttgcccaatatcactggatttaatgaaagatccagttattgttgccactgggcagacttatgagcgggggtacatagagatgtggctggaggctggccatgatacctgtccgaagacacaacagaagcttgccaataaatccctgaccccaaattatgtcttacgtagtctcataactcaatggtgcgaggcaaatggtattgagcctccaaaacgccctgctcaacttagggatgcaccactgtcatgtagtgctgctgagcatagcaatgttcttgagcttcttcagaaattgtcttcccaaaaccttgaagatcaacgtggctctgctggtatgcttcgtcaacttgccaagcgcagtgctgaaaatcgtgcttgtattggagatgctggtgctattcctattcttgttagtctgctatcaaccactgatgttagcacccaggaacatgtggttactgctctcttgaatctttccatctacgaagagaacaaggcaagaataatatcttctggagctgttcctggaattgtgcatgtgttaaagaggggcagcatggaggctcgggagaattcagctgccacacttttcagcctatctattgtagatgagaacaaggtgactattgggtgttcaggggcaattcctgcacttgtgcagctattgagtaatggaagccaacggggtaaaaaggatgcggcaacagcactatttaacttgtgtatttaccagggcaacaaggggaaagctgtaagagctggattggtacctatactactagaactgctcatggagactgaaagtgggatggtagatgaggcccttgcaatattggcaatcctctcaggccatcctgaggggaagacagctatcggcgctgcttctgcaatacctgtacttgttggagttatcagaaatggatctccaaggaacaaggaaaatgctgctgctgttatggtgcatctatgcagtggtgagcagcagcaacagcatcttgctgaagcacaggagcagggcatcgtgtctttgctggaggagctagcagaaagtggcacggacagaggaaagaggaaagctgtgcagctgctcgaacgaatgaatcggttcctaaagcagcagagtcaagccgaagccgaagcagaggccatggcacaggctcatgctcatgcacaagcacaagcacaagcgcagcctcagatcctggttcaagctcaagcacatgcagatatgcaagctgaacgatcactacttcccacatcatctgacatttcggatagatgaggtttttgatcagcagcttgttttgtctagtaactggcttgttttttttaagctcaggctgtcaggtggaagattgcctgcaactgttattgtggaggtttctggtttctgttgaacactgcaaattaggaggtctgggcagcgtgatttaggtccatgagcatgttgacaggtgggttctgagtcagtttttaacctgcgtgtgttcgtaaaatgtaccggtgattgaaggtagtaagtatatcctcgagttttaggaggtatcgttgaacttgtacccggtacgagcccagtacaggactaattctggcgccctaggctaagtgcctgacaaagttgcaggaaagctttagttcagaaaaatgtttgttcatcgagtccggtgcagttggttcagctgtcttctgttctgtgagttgtttgcgttgaaaaaaagcggttggttcagctgtcttgtgtgggttgtttgttgtgaaaaaactgccgcaagctgtatgctgtgaaaagttaaaaatcgtttggcttaagctgctgtgaaacagtagacttaacaagaaaaaaaaaaaaaaaaaaaaaaaaaaaaaaaaaaaaaaaaaaaaaaaaaactcgagagggg

SEQ ID NO: 9811 - DNA, 553 bp, Zea mays
  unsure (1)..(553): unsure at all n locations
  Clone ID: MRT4577_108943C.1
ttnnnnnnnnnnnnnttttttttaaaaagaactcaatgtgctcgtttgaggcgcaccgcccgctgaattttctgtcagttcgccctggggaaaattcaagatttatttttttttaaaaaactttggttgtttcttgaaagtttttccaaacctttaccggggaattggtttaattttcacccccgcaggaccctggttctttgtaaatgatttggttttccaggaaaaaaaatttaccttaccagttccccttgtaccgggttttacctccgattgcagggcctttttaaggttgattagggttccttaaaaggttccgggggggggtttttcccccaggcccttttttttttacttcctggttttgaagcaccattattttgttttgccctgcagggtttttaaccccccttcttttcttaaggggcttggcaatgtccttattcaggggttttttcatgctttcctttagggccacccccaaccttggttgggggttgttctccttcaaattttgcctttgggggatctttttttccctgatttaattttg

SEQ ID NO: 9812 - DNA, 310 bp, Zea mays
  unsure (1)..(310): unsure at all n locations
  Clone ID: MRT4577_108944C.1
aattcccgnnntgactagttcactagttctttggccgccctttttttttttttttttttgtggtttttttttttcttttttttttttttattaaaggaaaacaagggcgggcaatatgctcaaaatattaaagggttacccacttcggacaacctgcaacgtatacctttttccgggggactttaaaaacccaactccttcggaatggcctaacagtcccttttttattaaacgacccccaaccttaaggggggttcttaagaaacccccacccttaagtgtccccgatatttaaaccctttacataccc

SEQ ID NO: 9813 - DNA, 345 bp, Zea mays
  unsure (1)..(345): unsure at all n locations
  Clone ID: MRT4577_108945C.1
gcgagaccaagtgccaaccggctgcgtcgacgtctcncagagtactagcacgtcnngcgcncctggctcaannccatcggcaacctgctgtgctgctcgaggngtncggcngctactgcctgggttaagctgntancaagacngctgatcaggatngagagggatngatgngcncgcncncaggattgaataatttgctgggaagagaagcanctgaggcaggggcgcgcngcagacacgacaccgatcttncttcctcgtgagtatctatagatacggcnacataggtcacaatcgtgccatatacgtacgacaaaangtatacatancgttattagncngtct

SEQ ID NO: 9814 - DNA, 138 bp, Zea mays
  Clone ID: MRT4577_108946C.1
gaactcctgaagcaatggcaatgagagctctaccgctgaccccttccaggagctcatcgtttggtagtcaccaaaccatgccgagaggcggcggccccagattagtgagaggttatgcgcagggagacgaggagggcg

SEQ ID NO: 9815 - DNA, 1072 bp, Zea mays
  unsure (1)..(1072): unsure at all n locations
  Clone ID: MRT4577_108947C.1
cattggtacctcgagccggaggcaaacacacaacacaaccaaccgcctcactcgatctctcatcactcgcacagtcgcaagtccagctatcaccaaccagagctcggctccaagcctccaactccaacccaaggagacagatacgttcgcagatggcgggtgcagcgaaggcgtcgtggatggtggccatgagcgtgggcgccgtggaggcgctcaaggaccaggggggcctctgccgctggaactacgcgctgcggtccgtccaccgcaccgccaaggccaacgtccgcagcagcctcgccgcgcagcgggacaaggagctggccccggcggcggagtcgaagaggcggccgggcaaggccgccgcggaggaggggatgaggaccgtcatgtacctcagctgctggggacccaactaggaggactagctagggttcactgttcagttcattgccggatgccggtgctgggttcagttcagacctggctgtggccggttgcctcctgcgattgtaaaataggaatacggtcacgacgatgaatgatgatgacgatgaaaagttctgccaaaaaaaaaaaaaaaaaaaaaaaaaaaaaaaaaaaaaaaaaaaaaaaaaaaaaaaaaaaaaaaaaaaaaaaaaaaaaaaaaaaaaaaaaaaaaaaaaaaaaaaaaaaaaaaaaaagggaaaaaaaaaaaaaaaaaaaaaattccctgccggggggccccccgggggggcccggtcttttgggatacccggagaatttttagggttaataggggcaaaaaaccccgttttcgggggggggccctttttttaaaaaaaagggtgacgggggttttgccccccgttccggttttttttgaaatcttgcggggtcgcggggcttttggcccggggggccttttttaaatttttggccctttaccttttgggggggggggagggggcccccccctgggggttggggggccggcaaatttgggggttgttagcggggggggcctgtggnncggggtgcggcgccggggggggggggagggggccagtatagccctttggggggggggggg

SEQ ID NO: 9816 - DNA, 434 bp, Zea mays
  Clone ID: MRT4577_108948C.1
gacaaccccaaagcattaacctggagcattgggggaatccgaactaaagcccacacgatcataaaaagccaacgccgcctcttgtggaatacaccctggaaaaaaagaggcgtttgcaatagtctccaactggcataccaaacggagtggtaagcaggggagcaactccgtgtggccgtgaactaaaagccgggcacacatgcaccaggctaacattggagaatcgagatcccatactggcttcactacagtgcgcatagtaaaacctgacttgtgagggaaacatcaaacccttttcctgggaggggtccttggaccagcccttgggggtgatctttagggagtaatggtgggctaagcagggtccactggtagaggcccaatcaacactcattagtggctcataaagctcaactccatccagatactttatt

SEQ ID NO: 9817 - DNA, 975 bp, Zea mays
  Clone ID: MRT4577_108949C.1
attgtcgagctcggccgggcccaagccgccagcttgaacatccaactgatccaaccaccgacccgggcgagcaagccatctccgtttccttgccagtcccgcgagcaccattcaccacaccagcgcagccgccatggccgacgtcgagaaggccacccccgtggccgcaccggccgagggcgcgggcggcgacgtggccgccgggagaaccggcgcggtggccgccctgctgcggcggtggcggacccaggacctgctggaccggtcggggtccgcgctgcgcgccgcggcgtgggcgttctccctgctggcgttcctcgtcatggcctgcaacgagcatggggactggaggcagttcgaccgctacgaggagtacaggtacatcgttgccatcggcctgctggccttcgtctacacgacgctgcagctcctccggcacggcgtccgcctcaccggcggccaggacctggagcccaagaccggcctcctcgttgacttcgccggggatcaggtaaccgcctacctgatgatgtcggcgctgtcagctgcgatcccgatcaccaaccgcatgcgcgagggcgctgacaacgtgttcaccgactcgtcggcggcgtccatcagcatggccttcttcgccttcgtctgcctggcgctctccgccctcgtctccggcttcaagctcgccaagcagacatacatctgatctgatactccgtacacggacacttgcatatacacttcacatatttatttgctccgttgtgtacagtctgaattgcgtgcgttgtgtacagtctgaattgcgtgcgtcatttaccattgttctcattgtatacatagatttggttcattgtgactgtataagagctacctcccaatttgaacgtagacggtgtacgtatgggcgtgtggttagatgaatgaattgaagatacctacactacattgttagatcctagattaatttgttttcag

SEQ ID NO: 9818 - DNA, 368 bp, Zea mays
  Clone ID: MRT4577_108950C.1
aaaggggggcatttttttttggggagaggtcacagggactttttagtatacttccaaagcaaacaaacacccaagtgggggcaccacgcgtctttaaagctggagcctccacacgcacgggtagaaccagcggtttgcatggaatgggggctttgctttggatcacgctcaatggaaagatgttgtcgctttattgtacccacccacacagggggagttgggcgacgcgttcccccacagtggattccatcggaaaaaatccaaccttctttggtgacgagaacaacacatggttttccactaaatagaaaacaggggtttacgcctttcccaacaaagcctccttaaggaaagagggcgtggttagg

SEQ ID NO: 9819 - DNA, 827 bp, Zea mays
  Clone ID: MRT4577_108951C.1
ccggccgggccgggataggtaaactgatagtaatatataaatgcataaaagcatcagcgggggctgaaatactacaatggagctcacgtgggatgtcattgttgtactggctgcctgcagcttcctcattcctctcgtcttcctccgcaacgctaagaagcaccggcggcggcgcgcgccccctgggccggccaccgtacccatcatcgggaacctggcatggctagagttgcgccacgggtggatggatgagatgaacatcctgcgacggatgcactcgcgctttggcccgctgctgaaggtccgcctgggttcctcggagcaggtgaacgtgatggaccgccgtctcgcacatgccttgctcgtggagcgtggcgccgcggtggctgaccgctcgccgctgctggtgtccaccgacaggttcggagtcttcgactctttcagcatacacgtgtccagctacggcccgcggtggagtgttctccgccgcaacttcgcggcggagatcgtgagcccagcgcgcttccggcagatggcggcctcgcgggagctggcgctttccggcctcatccggaagctgcagctggaggagggcggcgtcgtctgcagggacgcgttccagcacgccatgtccagcctcttcatcgccatgtgcttcggcaaggtcctcgacgacttgtctgtggacagcatcgccgtcgcagtgcgcgacttcgtcctccacgacgacgggtcggagacggggatggcgaaatccttgttcctccctgctctcaccacgcgactcttccgtggcttcgggccggaagagggaaaccaagctccaa

SEQ ID NO: 9820 - DNA, 254 bp, Zea mays
  Clone ID: MRT4577_108952C.1
atcacttcttctcaccctccagatcacgcactccttcgagaggctctacggtcttcgttcggttgaatgagcagatggaggatcctcacctgacatgtacattaccgatcattaatgaccctgctcagctgcgacacagactaacactcgctcaacaacaacttctccacctacggcaagatcctatagtcaaagatcatgctcgatcagtagacacatacctcccgccgcttcagctttcttacctactccac

SEQ ID NO: 9821 - DNA, 344 bp, Zea mays
  Clone ID: MRT4577_108953C.1
aaacccaaaattcagttctaaaagccttaacaacaacctcaaaacatacccgggcaaaccccaatcaaccagaggccccctggggttcacaaacccacccctaaaccgctaaattaaactgccagcgatccattataaactaaaaccccccctcaaatcaccccccttttattcaaatccaaaggaacccccccagggggagttcccaataacagagggagggctgcccatcaccccaaatcaaaaaaattttgtaaaccttccccaattcacccacctttcccaccttgaaagtaaacccctttcgcggccccaccttttgagtggccttaaacacattcatt

SEQ ID NO: 9822 - DNA, 246 bp, Zea mays
  Clone ID: MRT4577_108954C.1
tccacacgtactgggacccacgtgtacacatgggccgggccatgcgcgcgcatccgggctgcacgcgtaccatcagcctgctctatgaggcctacaggacaagaaagggggggaccatctgcaggtggataaagaacgtggccaacggcgaccacaaggagcagcatgtacatgacccgcaccgccgcgctgccaagaaagtgcagcgtaagcctgccatgcatgagcagaacctacggcaactga

SEQ ID NO: 9823 - DNA, 117 bp, Zea mays
  Clone ID: MRT4577_108955C.1
cttctcgaagtggcgacagtggcagtgacagttcaagcgaagggagtgaaggagattctcgataatgattcatgacaagcataagtggggacaggaaccaggattggagacgttacg

SEQ ID NO: 9824 - DNA, 805 bp, Zea mays
  Clone ID: MRT4577_108956C.1
ctcccaagaagcagcagctgcgctgctctccgccgccactgcttcgctgctccccgccgtcgcagctccccttctcccccgctctcccgccgccgcagctcccctgctcccccgccgccgcagctcccctgctcccccgccgcagctgcctcctgctccgccgccgcagctaccgctcgcctgcctccccaagcttcccctttctcaaaaaaatccttgatttggatcccatgttagtccaacccacagctaccgccgcgctctgcttcggctgcgtcggaaccgccgtcggagagcccgcaggcaccggatccggaccaccaacaacaacctaaaggccgacgagcagccgggtgtcgtcctcgccgtcgacgacgacggtgccgccgacgccgcgaagcgagggcgagatcctccagtcggccaactttggattttttttgccgacctgctctccgacggcgagttgcagcgctgcttgtctatatccggagaattgggagtgtacgttgccggaacggcggcggggccccctcctctctcggactccacggcgggtcatctctcccctgccgtcgtcgaccacctccccgccggcgccacacgcttgcacctgcacgcatcggcaaggaagccgtcgaccacgaagccagtcccgacgcacctgcatctgcacgccggtgccactcacctgcatctgcacacatctgcatcaaggcaaagagctcgccggagtaaaaagccgctggacgacttgctcggagcatcggcgactccgcgggcacctcaacaaactgcccttgca

SEQ ID NO: 9825 - DNA, 633 bp, Zea mays
  Clone ID: MRT4577_108957C.1
gttccccatctttaaatattaatagagctcctcagagatctggggggggggggggggggactcagtccgacgtccgtcctagggcagtacctctcagggtttttatttgtcctccatccttcctccaacgcgtcgagccatcgacgactggcaccggtgaggtacctacccctccgcccgccacacggccaccagctacacacaaaaagcaacagcgtgacgaacgacgacaacaacaacaacgtcgtacgacccatttaccctacagtttcgaacgaccactgtgacagtcccacattaaccctcccacctccctcccccctctctctccacccgaaggagacacctacacccaccaagaacactccataccgaaggggagaaaaaacaagaaacttccggacagtgacatccgctgacgacgacgcagaggaaaagtagagataactccgactatcattatagcaaacgtaaagataaaggagaacgaaatctcaataaacgaagaggagatgatgaacgaaaaggtcttgtaaattaataaggactataaaatcgtggtagtcatggtaatcctcgactacatcgtcgtaaacttcctagaaatcttccatactactacccttcaaagaa

SEQ ID NO: 9826 - DNA, 555 bp, Zea mays
  unsure (1)..(555): unsure at all n locations
  Clone ID: MRT4577_108958C.1
gactctaccatgtggggtgcattacttggtgctagtaggatccaccgcaactctgaacttggcaggaatgcagctgagaaaatatttgagttggaacctgaaaatgcaggcatgtatgtcttgctttcaaatatatatgcatcatctggccaaatggcgtgatgtggacaagatgagacttataatgcatgagcgtggtgtgaagaaggttccaggattcagttggattgaggtgcagaacaaagtccacactttctcagtgggtgattctgttcatcctgaaagagaggacatatatgctttcctggaagatcttgacatcaggatgaaataggctggatatgtatcagctacagatatggttttgcatgatgttgaggaggaagagaaagagcacatgctaaagtatcatagcgagaagcttgctgttgcttatggtattctaaaaattcctcctgggaggcccatccgtgtgataaagaacctgagagtatgcagagactgtcacactgctntcaagtgtatctctgcgattgagggaagactgatcatact

SEQ ID NO: 9827 - DNA, 570 bp, Zea mays
  Clone ID: MRT4577_108959C.1
cttggcaattaatgaatgacccagaaccactgctaaacgaccaacaaggcagctgttcatgataccctgggcgatccgcgtgccgccaaagctacactctcattgcaggaagctacgtgacggtgctggacgggcgctcgctggccaacgatgtacgcaccagcgctacattatcacgtgcatcattcaaatggtgtccatattcacacaagaggaacgaccggacgtacgcaatggggtggatgccgcactcgcttactctgtgatactgacacgtccaggtcttatcatgttcaaagatttccggcaatagacaatgtacagcatcttgctctagatgatgcttacatatttccagtgatgaacaaactctaacttgctcggcaaatagacaagattgccgctaaaactcttcaagaaaatgctgacaaatactggctgataggaatgctgaatctatggaactgatagtcgatgctagtgacagtgactaacaccatgtgcaaggacacatgatacgaaaggctacttatgcacatctgcacaaactacaacaggagatgagtgatc

SEQ ID NO: 9828 - DNA, 531 bp, Zea mays
  Clone ID: MRT4577_10895C.1
ttgggtacccctctgagggccggcgcggggaaccaggacatgtaatcctaacaagcttatgttcgtgcaaactcacttcacttacacaactcaccacaaatcgcccacaatggctcctggtggtccccctggaacaagctcgcgcggtcgaggaggaaaattcatgaaagcccgttagaggaggtggtaagaagttctaacgcgacatccgacctctcgatgccgatggaaacgaagtcagcatgtgggctgtcgatcatgacaaggaaaacggcgacgaagaggattcttgcgaagaggaatcctctgaagaggaggaggatagcgatgatggtgctggtactgccaaggaacttacccaagagcagacgcgagaacttgacaaagccgagaacaaggtccggcaggaggcagcgttagctcaaattaaggccaagacagatgagggcggcgacctggcctcaagcgactgtgaagagatcgacagcgaggatgaagatttggccgtcatcctgaaccactgtaagaaag

SEQ ID NO: 9829 - DNA, 425 bp, Zea mays
  unsure (1)..(425): unsure at all n locations
  Clone ID: MRT4577_108960C.1
cctcgaggtcccggccggggagccaccacacgcgtagcgcgggaaatgccggcggcggcggccatgacgacgaggcgggtggtgctggagttgctacggtcgncctccccgacgccttccacgtggccttctccttctccgctagtccctccttcttcaccttgttcaatccgcgcctcaccaaccccgtctcctccatctccacctctgccactaatttaaagcaggtttaccagacagagcaacgcacctgccttcctaggcccttatttttaacccctcttgataactaaccttcccttttcttctgtacttttttacttaaatacgcagaccaaaatgtttatctattaaacctttgagcttcagactccacagtttattaaatacatgtgcctatttttgaaagcttctgttgctaacta

SEQ ID NO: 9830 - DNA, 380 bp, Zea mays
  Clone ID: MRT4577_108961C.1
cccagacgtccggtgttttaatttttttttcatggggctgctggacccgaacgcagttgtactgtgggagtggatccaaaacctatatattggcgtatgttttcctacttagaccgtagatctgactcatgctcgatgctcgtccgtatcgggccctgctgttccccccacctcacatgaaccgcttagcttgccaagccgaggaactgatccctaccaaaaacaaaggttgacggaggtctgccccgttcatccagcagctgatcgataacggctagtacaccatcaaccggctcaaggcagcagaagagattaggggccccggcttgtgctcctgcccccatataaagcagctagcaggcagtgatttacacttcctg

SEQ ID NO: 9831 - DNA, 784 bp, Zea mays
  Clone ID: MRT4577_108962C.1
ctcaattcgtcgatcgtacaatacatatcaccacccctgtagccatactcgcaacaagacaacgcgcatccggacaaagcgatcaagtctgaaacagcgtctcggttgactgtgcatctgattgatcgattttaccccttgagccgactgcgctcaaacatttacaccgccgccgccgccgccgccgctcgcatcgcagcactctagggcggactcggcacggacggaccagcacaagtcaacgacctttggacacaacggtgcatagagtggtagctccagcataatccacaccagcattgacgttgacaccaacaccaacatcggcatcggcagcatcatcgacctcgtcatcatcgcttgaaaacaccgcgcaaaactcaatttagacgccaaacatgtactcgacagctttgtccacaaccgcagtattcactctcctgctcgccgtctcggcgtcgcccaacccgatctcccggtcaaatatcggcgtgcgcgaggcagcggcagcgcctgggcccatccggataccgctcaacatccacgacaagcggcagtacgccgatgacttggaaacgaggcaggggtggttgaagcagcagggcaaggggctgcggcgcaagtatgctgggcatctgggagaggcgggcaagaggcagttgaagagggatgcggaggacgacgagcgggacaggctcgctaagcgggccagtggatcggcgacactcgtcgatgtcggcacggatgcgtcttatttcggtcaagtcagcatcggaacaccggc

SEQ ID NO: 9832 - DNA, 463 bp, Zea mays
  Clone ID: MRT4577_108963C.1
aattcggcacgagggtctactgtgactccgggtccagggggggggggggggggggggtaagcgaccgagcaaggcttcgtctccggcggcggaggcggatctgggagggatggggaaccggataggcgggcggcgcaagtcgggggtggaggatcggttcacgcggccgcagggcctgtgaggagcacaaggacatcgaccagaaaaaactgctcaagctcatccttgaggccaagctgccgccctgctacccggccgccgacgacactggacctgagcgaggggacctagaggagtaccatctataatatgtataccaccatagaagtcgtcgtgagaaaggctatgctccatggaccgcctatacatcgtcaccttcctgtacacgcgccaacaagatctgccccctgcggcaggggacctaagtactcccagccgcagctgatgaagctcatcgacgccc

SEQ ID NO: 9833 - DNA, 415 bp, Zea mays
  Clone ID: MRT4577_108965C.1
ggtaccctgtttcggatctgccaacctgcggggatcacatattttccacagttggcatcctggctgaaaaagacgaaaactaatggcctcataactggttgatcgattgaggcaggctacacacgaacacagccgtacgggtacggtaggtgagggagagattttcagtcatcttcagagataccggctgaggcatgctgagcatgcacatggcctattttaagtgtatttgtacagccctgaatgcatgaatgatacgtatggcatccgattgatattgcaacaaagaaatcataatgcatggaacggaaatgctttcaatttattaaagttggtggctctgatagccaagcgccagctgagcttttattgccaccactcactcacttaccacacacaggttttttgattgttg

SEQ ID NO: 9834 - DNA, 228 bp, Zea mays
  Clone ID: MRT4577_108966C.1
cgctcactagtcggggttgaggccgtcttcgcgcatgccgatagttgtatggacctataatactgccggtacaaccgactgaaaccgcgtcccaacttaatcgctgcacatccttgcgtggtatcaagcgacgtgccttcaacggcgcgaggaaggccccctgtcgcattaccgcgtgggggtcccagggccgtcatgcggcctcgcgtcttgttttcttctttgccg

SEQ ID NO: 9835 - DNA, 352 bp, Zea mays
  Clone ID: MRT4577_108967C.1
cattgggtacctcgaggccggccgggaaggcgcggcagtatcccggcagctagcacggctcagggctgagagagccgccacgtggcgtcaccgtccttccacgatggtgacggtgacgtcgttgacggtgcatgtggacgaccactcgccgtcggtggaggcggagccccggtcggtgcagtagcccgggtgcctgggctgcgggagcaccgcgctcgggttgcccagcgccaggaacaccgccgccatgtgcggccggtcgtcgggccgctcctgcacgcacagcagcgccacctgcacgcagcgcagcacctcggagctccggggcgagccggagcggacccccgcctct

SEQ ID NO: 9836 - DNA, 558 bp, Zea mays
  Clone ID: MRT4577_108968C.1
atggagaagcttgagcaacaaataccggttttggtttcttcaatccgatgcaacatctacttgtttacctaccatacgaagctaaggttcgaagctgctcatcctcttgcagccacaaccaattttgaagttgtaactagagctatcgatgatgaagggaaggtgtattatatggcatatccatctaagaagaatattttggttgattggagggtagtgtacaaagttaatcctcgtgagcgactatatgatcctggtgatgctggttatgttgaaagtcaaatcgagcaggagatgtcaaagaaaatgaggtcttttgctcggagtttgcttgggacgaggagcagctcgaggagtgaggacttagtgttttggggcactggttcttccatgagcagccgtagagagatggtacaacttttgcctctaaacgatcaacatgatgatgctgaaatcgagccacagtcgagaggagatgctgcagttggtgcggtggtagaggatgcggtagatgatgcgacagatgttgctagagatgatgcgggagatgatgcttga

SEQ ID NO: 9837 - DNA, 1451 bp, Zea mays
  Clone ID: MRT4577_108969C.1
gtttagcgtggaaccgcaagccagccaagcaacttgcgccactcgcctcgcctcgcctcgcctcgcccctgtttgtttgcttctggccggaccccttccccttctccggtgcacgccactctgcaacccccctcctctcgagcagagcagtcgagcagagcggcagcctcggcgcgcgccggcgccagccgacatgactgccggtcagtgcggcaacatccaggaccaggaggcagctcctggcgccgacctctacgccgtgctcgggctcaacagggagtgcaccgacgccgagctcagggtcgcgtaccggaggctcgccatgatatggcatccggacaggtgctcggcgtccggcagctcggcgcgcgtggaggaggccaaggagcggttccaggagatccagggcgcctactccgtgctctccgactccaacaagcggctcctctacgacgtcggcgtctacgacagcgaggacgacgacgctgacctgtcggggatgggcgacttcctcggagagatggccgacatgatgagccaggccacgccaacggagagcttcgaggagctgcagcagctgttcgtggacatgttccaggacgacctggacggcgccgggttcttcggcgggcttccgacgagccgcagtgcccagggtcctagcagcacctcgttgccaccgtcgacgtcgccattgcggccgacgcctcctgcaagaagtaagggtgcgcaaacaccgtcgtcgtttaacggcgctgggaggcggggttcgacggcgaagcggccgaggaccggttgggctggcctggaaccggatctgggcctctctggattctgtttcatggtgagcaagtcgaaggagaggccggcggcatgggcgtgcgacggcggtgacgagaggagcggcagcaagcagaggctgtcaacgagccgcgacgtctccggctccggtggtgggatgtcgcgctcgcgcggcagagccaaagcagtagaaacttgtgggcagtgaacggcctctagtcttgaatcttgattagagcaccgtttattcacttactggctcgcgtcagtcgtagtagctcgaggcacgttgaaaaggagagagaaaagatctgtttcattcttcaatctattccaagctagccataaatagccaatctcttgctgcattgtttcgatgaatttttatttgggagaaattgagagtggttggtagtaaactagtaacaactttacgaagagatgcggccatcgtgccgaattaattgggcggaggtacggtacggataaatagcgggtcgtgtcgtattcgtggatcaaagtctaagcttaaacacggactaattagtttttaaacggtcatgtcgggctattatatcgtatcgtgctaaatctaaggcctgacttgtaacagagttcaaaaataacatgttttttcttgttttttttct

SEQ ID NO: 9838 - DNA, 418 bp, Zea mays
  Clone ID: MRT4577_108970C.1
gggtcgagccacgcgtccgcccacacttcggcgtaaattaaaagtatcccataatgaacagataccaccaacatagttaaagtttttaccgggattaaagcggccatttttcaaaacggggtcgggtgctgaaaaaactcaaattgttttggggtcccacgctcggtgacgtcagtttggtctgggcaagcgcaggacgataccgatccggccggtcagggcgcacgcgggggcgatccgatccagcgagtctaagggtatccgcaaccgttattcctaaatttttctccctatatcactttttccccctattttccccctatttttcatctctcgcagcggttccccctaaatactccccttataccccactaccactataaaatatcattttctaatacaactatcaatttttttt

SEQ ID NO: 9839 - DNA, 197 bp, Zea mays
  unsure (1)..(197): unsure at all n locations
  Clone ID: MRT4577_108971C.1
atttcggcacgaggatacatggtgcgtccattcccctgcttggccctcgcagcgagcgaacgggaaaacgcgaaggccgagaagcgctctagcgataagactggtgcacccgtagcggcacggcatggcggccacggcgtactccgtggcgctcctcggcggtgcacggttgccgtnggggctcctccctcggccca

SEQ ID NO: 9840 - DNA, 241 bp, Zea mays
  Clone ID: MRT4577_108972C.1
aatttgcctcatgcagcatttaattaaggagactatcaagaggactctaagcaataagatgaagtcaacctgtagtataactttcaactctactccccagggccctggactcagccaattgtacataagtcccaggggaaccaatcatcatcttaactttagatagccagaaagtagtctaaagccagtcagttatccattgtgacccacgtaagggagcttagattgacatactgatctt

SEQ ID NO: 9841 - DNA, 559 bp, Zea mays
  Clone ID: MRT4577_108973C.1
ggccgcttttttttttttttttttccttttttttttttttttttttttttttttttttttttttttttttttttttttttttttttttttttttattgttttttttactatttaacaaaagagaatgtattacataacatgtgaaaaaagacaaatatatggtctagtaaaaaaagaaaacacacgcggggggaaaacaaaaaccacacaaagacccaaaacacacacagcacaaaccaaaaaaaaaaaaaaaaaaaatccccaccaggaaaaaaaaaaaaaacaggaaaaaaaaaaaaaaaaaggacagaaaaaaagaccaagacaaaaaagaaaggaaaacacaccggattaatgtacaagaaagaggggcgaaaaccaacaccggcggagaaaagcagcacgacgtcacccgcagaaacaaaaacccacggcccaaaaaacaaggggggcacgaccaacaccggccgcctggaaggggcgaaagaagtacaccaaccacctgagctcctaaaaaaaaaagacaaaacaggcgtcgaggacgcgcccccccccccca

SEQ ID NO: 9842 - DNA, 396 bp, Zea mays
  Clone ID: MRT4577_108974C.1
acattgggaaaatattgattaacaatatagtttaacactaaatatatatgctaatatcgctgcaagaaagagatagtcatgatctccttccttgtattagactggttcttgtcttatagttgctattaggggtctagtttacatctttctttccactctggttaggtaccttaggcactaactcttactgttccaacttaagtttggcttgtggcgtcttattagtagattgttacttattaacactgaaattgagcttactcttgatgttatcaatactttcagtcttcctttgagttgaattgctctgttttgcatttggagttactaataagttatctttacctttgaattcttcaacctcaatattcgctagtttcttccctactttacttg

SEQ ID NO: 9843 - DNA, 641 bp, Zea mays
  Clone ID: MRT4577_108975C.1
caggtcatattctgataccatggatggctgtaccaagttccccatgactaaaattgactgtggatacgacgacgacagactacatgtttaggcatttcggcgaacacatgacacgtgaggtatgacaccaatggttagcggggtgaacaacgtcgtgaccgaggctgcgcaagcgcgacgtgctgctcgacaaccaccaaggtgctgctgcagggagggaaagaacatttgccatgggggttggacgagctgatacgcgcagaggtggaaaagagggggcgcgagcaggaagatgggcttggccaccaagaagggctgcaggtcgtcgtgtccatggctgaggggaggggcgagctcagcgacggcgtggagaaagggctagagcagaggatgggcgagctcgactggggcgctcggggaagcggtgccaaggccgacgctaggaagggcgatgcagcggcgctggccaccggcgaggacgcggccgggtggaggtccgagcaggggatggatgccgtggcaagagctggaggcgagggcttggggatccgagttgagaggatggtgtgctctgctgctgggcggagagggcggctggaagatgagcccaggtgagcggcatcgcagcctcgtgccgaatt

SEQ ID NO: 9844 - DNA, 309 bp, Zea mays
  Clone ID: MRT4577_108976C.1
tcgattttgatcggcgaacagatagagatttgggatatacatggacatgctattcaaattctagaaacggataatggattatgccacatgggaaaagtatctcaggggatcaatgtaacagaactttaccaacattagatggatatggatgcactttggcttaggctgctctataaaaaatgatgaacttggatcgtccaccggattggctcagtcaagggacctggtgatacatgcacagaggtgcatgtacactcctgtgtaccagaaactaccggtagagctgctgggatcaattttgcaccaata

SEQ ID NO: 9845 - DNA, 523 bp, Zea mays
  unsure (1)..(523): unsure at all n locations
  Clone ID: MRT4577_108977C.1
cggnatcttaggcgcgcacatgggggacttcatcgacctgatcaattaggccgtcaagctggcctctgctgatctggatcaccgggtgactgtccactgcttccctaactcgagtaggtccccttcttggttgctgaacagggaataaggatcccattgtacgagtttgtatcatctcaggtctcactacctccccctcgatgttaacctaaccgactaccttgagaggaaccagcaccacaagaacactggtgaaaaccggtcactactgaaagtctccccactcttcaatctgacaccgatactacccgttggcgtggaaagaccgttggtgatctccaaagaagcgatgagctctgtctctctctaagaaccattgttacgtctacctgcttgctacgtgtacaatcttttctgatgaacctaaatgattacactggccgctgatatacaactttgctattggacaaatccctggggtatccaaccttaattatcttgacatatgctgcttttttctgcc

SEQ ID NO: 9846 - DNA, 766 bp, Zea mays
  Clone ID: MRT4577_108978C.1
cgttgggagtgccaggcccacgccaaatcattcacgtatccatcttcaagccagccgtctccttatccctgcgatgccgctcacctgggctcatcttccagccgccctctccgcccagcagcagagcacaccatcctctcaactcggatccccaagccctcgcctccagctcttgccacggcatccatcccctgctcggacctccacccggccgcgtcctcgccggtggccagcgccgctgcatcgcccttcctagcgtcggccttggcaccgcttccccgagtgccccagtcaagctcgcccatcctctgctctagccctttctccacgccgtcgctgagctcgcccctcccctcagccatggacacgacgacctgcagcccttcttggtggccaagcccatcttcctgctcgcgccccctctttttccacctctgcgcgtatcagctcgtccaacccccatggtgtttcctccctctcggctcccttgctccctccccatggcgttccccctggatgttggtgatctgttccccacggtgcaggcaaatgttctttccctccctgcagcagcaccttggtggttgtcaagcagcacgtcgcgcttgcgcagcctcggtcacgacgttgttcaccccgctaaccattggtgtcatacctcatgtgtcatgtgttcgccgaaatgcctaaacatgtagtctgtcgtcgtcgtatccacagtcaattttagtcatgtaaatctgcacttttaggagactcggagttc

SEQ ID NO: 9847 - DNA, 342 bp, Zea mays
  Clone ID: MRT4577_108979C.1
aggactcgtgggtgggtcttcagaccattatctttatctactccacagcgcagaataaggggatctacaccatgagggggctgctcgccgccctcgctatccagactctcgctgcgatcaccacctacacgcatacaagcggcagctgcagttgtcaaccaccgccgccagttcatataccaacggcggtgcatctgccacctgcggttcacctgccacctccggagcatattccagcgacggtcctactaccaccgactgtccacctgccaccaccagtccatgtgccatcaacaattcatatgacggcgacaccatgacaataccctactcaaccgaccc

SEQ ID NO: 9848 - DNA, 492 bp, Zea mays
  unsure (1)..(492): unsure at all n locations
  Clone ID: MRT4577_10897C.1
tggtttnacttcatgctcgncaggnacaaacaggacaacatcgtgctgccgaccaagaaggtcggagacaaggtgaacctggaggcggatatactggggaagtacgtcgagaagctcctcgctgggagggttgaggccatggcgaaggggtgaagaaaaggcttggattcaatgtctatgccgagctcaggtagggtcttgcgttggagatgtcactgaataaatttgatgcatgggatttttgttatgagttttcggagtgctcatttgcttgctgcagcctgcagctgcaacatggattcttcacggatttccgttattatgttttggagatgttcatttggttgctgcagccagcaaattagaaatgctatttctggtgcacttacccctctattgtctgtatgagacctgagctttgtgattggaacaatgtgaatacaaggcttagcaccatggtaacaaaaaaaaaaaaataatttataaataaaa

SEQ ID NO: 9849 - DNA, 880 bp, Zea mays
  Clone ID: MRT4577_108980C.1
aataacatttttctaattaaggacgatcaagcttcaaattaatctcgtggcaatcttcacccaccattgatagacatcagaacagccatataacatatcaaaaacaacgaacatagtcaaacctccaaccttcagctgacctctccataaccagcaaggtacttttgcatctaggacaaactccgagtctcctaaaagtgcagatttactaacaaatggaagccatgactaaaattgactgtggatacgatgacgacagactacatgtttaggcatttcggcgaacacatgacacgtgaggtatgacaccaatggttagcggggtgaacaacgtcgtgaccgaggctgcgcaagcgcgacgtgctgctcgacaaccaccaaggtgctgctgcagggagggaaagaacatttgcctgcaccgtggggaacagatcaccaacatccaggggggacgccatggggagggagcaagggagccgagagggaggaaacaccatgggggttggacgagctgatacgcgcagaggtggaaaaagagggggcgcgagcaggaagatgggcttggccaccaagaagggctgcaggtcgtcgtgtccatggctgaggggaggggcgagctcgactggggcgctcggggaagcggtgccaaggccgacgctaggaagggcgatgcaacggcgctggccaccggcgaggacgcggccgggtggaggtccgagcaggggatggatgccgtggcaagagctggaggcgagggcttggggatccgagttgagaggatggtgtgctctgctgctaggcggagagggcggctggaagatgagcccaggtgagcggcatcgcaggataaggagacggctggcttgcctcgtgccgaatt

SEQ ID NO: 9850 - DNA, 239 bp, Zea mays
  unsure (1)..(239): unsure at all n locations
  Clone ID: MRT4577_108981C.1
gcatgagccagggctgttcaacaacgtgatggaggagacngcgagcctggtcgtggctnaagccaaaaagagcaaggtgaatgcactcgttggcgcgtttgaaaccggcatctcgctgcaggaaaccagcaaggcttcttcttctgcttctgctccaactattgcaacaagtgtcgtgccattaacccttcttgatccgaaatgtgcgtgatcacaatttttggagttttggacttttt

SEQ ID NO: 9851 - DNA, 140 bp, Zea mays
  Clone ID: MRT4577_108982C.1
gacccacggggaggccaacgggacggcgtgaggccatcggtgcatgcggtcctgaggaggaggaccaggcggctactcgggggaacatggggaagacaccgtgcagctggaaatggacgagggcgcgctgtccccctttc

SEQ ID NO: 9852 - DNA, 980 bp, Zea mays
  Clone ID: MRT4577_108983C.1
acttatccccaaagaagggatgggcagatggccatgacactacgaaacatgaatgttactgaggttgttttgcttcaaaattatcatttttatttgtgcccatctacagtttgaatacatggaatgaagaaatacagtttatgtcatctgagcatgatccttgttagaaaaatatgataaaaggcctgtgacactcacctcatggttagatatcaaaatctccaaaatccattctggacactctagtcattgtagttctgttatctagatgactacaagccaaaaacagaagatcctctgggccattggcaagagaatgcactaatatgtcaatgctaccaaattcattcctcactgattcaacaatgtcctttactgtccagtttgatgcacctgcacatcttttgttcgatttgacctttgtcgttgatccagaccaccctttctaccttcttcaggccaatcaccaatattccaaaggttccttcttcagaaaaagggaaaacatcagcaacaaattaacggtcgcttatttcttctttgggatctgcttcagtaactcatccagaacctcaaacagatcagcaaccactccgtaatctgcaacctgaaatatgggggcatcaacatctttattaaccttcgagtctcattcgatcattcctgccaagtgctgtatcgctccagatactccaaaggcatggcatagagttatggaactatatgacttgtaccgtggtcttgccgtcggtagttcacagttcgcaaccctcaggccgacgccgtacctccttgcaagtgcagaagcaccgccgaggatctcaccgacggcggcgccctcacaggaaagcgctcgccggcggggagttcgacggcagcgcaacaatggacgacggatcagtcctccgcctggccggtgaacagaagggacgaggaatctggctaggtttcaggcgagaggcgcacggctgagaaaaacg

SEQ ID NO: 9853 - DNA, 133 bp, Zea mays
  Clone ID: MRT4577_108984C.1
gttgcatcaaactagaatcataaatagtgcagtaccgtccaaacaattccacgggaaagtttttctttgcttattagctcctggatcttcttacgagatcatggtgccacgcattcttccggcatactatcag

SEQ ID NO: 9854 - DNA, 1231 bp, Zea mays
  Clone ID: MRT4577_108985C.1
attcggctcgagctgaccccacagagactcataggggtggacgttggacgccggagcggcgaccgatacaattcatatagttccataactctatgccatgcttttggagtatctggagcgatacagcacttggcaggaatgatcgaatgagactcgaaggttattgtggctcttaataaaggcgttgatgccccatatttcaggttgcagattacggactggttgccgatctgtttgaggttctggatgagttactgaagaagatcccaaagaagaaataagcgaccttaatttgttgctgatgttttccctttttctgcacctttggaatattggtgattggcctgaaaaacgtagagagggtggtctggatcaacgacaaaggctgccagacggatctcatatggatattgttttaagtctacccacttgatgctgtctacgatttccctgaagatgtcaaatcgaacaaaagatgtgcaggtgcatcaaactggacagtaaaggacattgttgaatcagtgaggaatgaatttggtagcattgacatattagtgcattctcttgccaatggcccagaggatcttctgtttttggcttgtagtcatctagataacagaactacaatgactagagtgtccagaatggattttggagattttgatatctaaccatgaggatgtggaggcaacaattcattgtgcggagtgactgtcaatggttggacgatcttgcactggaggccaaagggatcaggtggtcccttcactcttaaaaagctgtaggttactaggatatcgtggtgaacttcgggctacatcttcaaaggctgctactggatgaagtggtgcttgcaaaaacaactcaacaaactgcagaccaaagaagtgggtgctacaatttcagcaacccgtataacaacacaatatcagcaggaacagctgactgtcagccatgaaacgctgactacactttcagcaggaactcaccacgccatgaaaggatggctagttaaaaaatcacccccaagaagaagaaagtgtgaagtatttgtgttttgtgtgtgaactgaaatctgggaactatgtatctgtggtttgtgtctgtgtactgaaatctgggaactgaaactatgtatgtgtggtttctgtgtgtgaactggaactgagtcacagaactatgtatctgtgatatgtgtgaactgcaatatgaaattgtcagtttattgctg

SEQ ID NO: 9855 - DNA, 317 bp, Zea mays
  unsure (1)..(317): unsure at all n locations
  Clone ID: MRT4577_108986C.1
tttttggggtttttttaatnncacatgggaacgttttttttttggggatcgattgataggaccggaggaacatttttttatttccaaaaactactttgtttattgggccctcaattgaaaaattccacaaccccgatgtgcggtgaacccccttaaaaaagaatgccttgaatggggcaacgagttttttccaacaaaaaattggcattttttgacaaaattttggaacctaatttaaaagcttcccctttgttccctttgcaaccttctttgaaaaaaaaccggggggcttaccaaagccccaacatatttgtggg

SEQ ID NO: 9856 - DNA, 270 bp, Zea mays
  Clone ID: MRT4577_108987C.1
ccggttgtatctggaaacccaataagtcacccgccgctccgataatgccatacttctcgtcctatacagaggaccaccataactgccgcttgatctgaatctccaagggtttcaaggactgttgatgatgtgaccaaagcctctagcacaaagcgtgctgctgctcccatttaaaatatactatcctacggtaccttgaatcatatatatattcgagcgactaactacatgtactgtagcacaaatcttaaataaaattggctttttttc

SEQ ID NO: 9857 - DNA, 2326 bp, Zea mays
  unsure (1)..(2326): unsure at all n locations
  Clone ID: MRT4577_108988C.1
tcgcccacgcgtncgcccgcgcgttccgaaaaaagaattttccccactcgccctcgctctcgctccctctcccgctcccgctcgccagtgggtgggagtgtgcggggctagccgctagggtttccgcgagcccatcgccggccggccacggacgatccgggactccatccggcgcccgccctgaatcggcttcgcggggcgcaaggagcgagagaatgaagtcgtcgctgcggaagctgcggggcttcgcgctgcagcgccaggagcagcgggtggaccgggaccgcggccggggccacgccaccgccgccgccacggcggcggacgagctcctcgcggctgctcaggatatggcagatatgagaagctgttacgataacttgctttctgttgctgcagcaattgcaaatagtgcatatgagttctctgaagcacttcaagaaatgggagcttgtttgcttaaaagagttacgccaaataaggatggaataaatgataaagttttgctgttgcttgggaaatcacaatttgaacttcggaaacttgtagatagttatcgtgtgcatgttcttaatacgatcaccactccatcactgtcgcttcttaatgagcttcaaaccgtggaggaaatgaagcgccaatgtgatgaaaaaaagagaattgtacgaattcatggtaaatgcgcagaaagaaaagggaaggtctaagaatgctaaaggtgataatggagcatcagagcaattgaaacaagctcaggaagattatcaagaggaagcgactcttttcctattccggttgaagtcattgaagcaaggacagttccgaagtctttttacacaagctgctcggcatcatgctgcacagctaaatttgttcagaaagggggtcaagtcccttgaggctgtagagccacatgttaggctcgctgctgagcagcaacacattgatcatcagtttagcgcacttgaggaagaggattatgttgttgaggatgagaatgatgacgagtacaacgacagtcatgatggagagttgtcttttgattatggagaaaataaggaaactgagaaatctggtatcgcttctaggaatcatacagaggatttttttaacagcagcaaagaagattattcttctgttccacatgaaagacagagaattgtaagtcagtcagcaccgctttttcctgagaaaaagctcaatacagaagagagaataaaagatttgcggcgttctgcaacaaggaagttgaatacttatgttttgcctactccaaatgacgttcgagctacttctcagagagcatcaggaaatcctacttctgaacctctcgagagtaaaggtgccttccattcatctccactccactcatctgcagacataagagatttgggagacaataatctacctagtcctacaagattgtctaacgtacagtctgtgctgaaagatagcaataccaataaaacagaaacaaggaaagtactcccagtgggtgatctcgctttacctggctattatgacctgaagacttttgataacaaaaaagtgaaaagagggtcattttctggcccaatagcttccagaccacggccaacagagaacattgatgttatttctgcagcacccaggcatagctctgcacatcagccagtgcacatgagagtatcccccggcaactcgccgccacccatttcctcaccgaagatcaaggagcttcatgagcttcctcgaccgcctgttaatacatcaaaaaacacaacattccccagtttagttgcccactccgccccattggcaccaaatcctgcatctctgactcccaaagttcaagatcattttagggcaaaacaaatgcttcaaagaactgcttcacctttaccaactccaccacctggatctatagcccgcagtttttctataccttctaggggtagttcagacagtaaggagacagaagatcaacacaagggagctgccagaatgagtctttcttctcttccttcagcacaaacattcttggaagatcgtcagccattgtcagcagctgctggatcggtcagcaaaacataggagtattctctattatcattatcaagcagctcgccgagccctcttcctgaaagaatgttgtacatattagcatttgaactctggccagtatcgccgaagaagttggtgtttcgcgtgccctttggttggttaagatgtagcctgtgcaaataatgggttctgcggaaataaaatccccatttttctcacccaaaaaaaaaaagacacgagatttgctgttgcaaaaaaaaaaaaaaaaaaggcccctagggcc

SEQ ID NO: 9858 - DNA, 1025 bp, Zea mays
  Clone ID: MRT4577_108989C.1
agtctgtgctgaaagatagcaataccaataaaacagaaacaaggaaagtactcccagtgggtgatctggctttacctagctatcatgacctgaagacttctgataacaaaaaagtgaaaagagggtcattttctggcccaatagcttccagaccacggtcaacagagaacattgatgttatttctgcagcgcctaggcatagctcagcacatcagccagtgcacatgagagtatcccccggcaactcgccgccacccatttcctcaccgaagatcaaggaacttcatgagcttcctcgaccacctgttaatacatcaaaaaatatagcattccccagtttagttgcccactccgccccattggcaccaaatcctgcatctttgactcccaaagttcaagatcattttaggacaaaacaaacgctccaaagaactgcttcacctttaccaactccaccacctggatctatagcccgcagtttttctataccttctaggggtatttcagacagtaaagagacagaagatcaacacaagggagctgccagaatgagtctttcttctcttccttcagcacaaacattcttggaagatcgtcagccattgtcatcagctgctggatcggtcagcaaaacataggagtattctctattatcattatcaagcagctcgccgagccctcttcctgaaagaatgttgtacatattagcatttgaactctggccagtatcgcggaagaagttgggtgctgtttggttcacgaaatgtaacgtaaagggtaatggtaacggtttacactcgattacggacggtaacaagtttgaatagtccggtatcaaattttagtatggtatctgattacggttggactaaaacaaacatgatttaacgttatcacttacccattacgttacaaatatttgaaccaaacggtaccttggtgtttcgcgtgccctttggttggttaagatgtagcctgtgcaaataatgggttctgcggaaataaaatccccatttttctcaccc

SEQ ID NO: 9859 - DNA, 619 bp, Zea mays
  Clone ID: MRT4577_10898C.1
ccggccgggaagccagcgacacgcacaacgactgacaaacacacgcatcgttctgactaccgaccccgaccgatactctcctgatgtaactatgcccatctccgcggagctctccatcgttgtcaatcccaaccagctctaccgtgcccgcccttcgctgcaaaaaccggtgcaggggcttcgcctagatatgggacgtgagcgcgaccagcggcgcattgcgtgtcacgaggtgagcatgatctccgccgacagcatccccgacatagtacaatcgcaagctgatgaacctcctcatcctcgccgccatcaagatgcccactgtcggcatggtcgcccactaaaacgccttcttcgacactgtcggccccgacaacgccatcaacggccatctacgtcaacgacaagctggccaacgacatcacggtgcaggcgtggctcaacacgcacgatcccaacgatcgcacgcttcgcgcagcgactcaagggtgaccccacgtacctgatggtggagcaagaccagacgctggccacctacgggatcaacgccgcgtgcactcacatcgactgcttcgtgccgtggaacggtaacgagaaaaagtcatctgcccatgccacg

SEQ ID NO: 9860 - DNA, 379 bp, Zea mays
  Clone ID: MRT4577_108990C.1
gcagtggtaacaacgcagagtacgcgggcagtcagcaccactttttcctgagaaaaagctcaatacagaagagagaataaaagatttgcggcgttctgcaacaaggaagttgaatacttatgttttgcctactccaaatgacgttggagctacttctcagagagcatcaggaaatcctacttctgaacctctcgagagtaaaggtgccttccattcatctccactccactcatctgcagacataagagatttgggagacagtaatctacctagtcctacaagattgtctaacgtacagtctgtgctgaaagatagcaataccaacaaaaaaaaaaaaaaaaaaaaaaaaaaaaaagtactctgcgttgttaccactgct

SEQ ID NO: 9861 - DNA, 522 bp, Zea mays
  Clone ID: MRT4577_108991C.1
caccaaaaatgctccaacataatcttattttcctcgtagctggcacagtatgttatcagttggatagtccttaatttacaccgggggaaaatacacaatcacacccttccgtaaccaggttaggttagtttcgacttgaacatggacaatgccaaggcgatggctgaaagcttattgcatgaaagttaagcatccttcatccgtagctctactagatctacctttggttattatttgggcgaaattttaacccaaacattccttgggcgagcgcccttttttacccgctcatagcattttcctgaaaacttgtattccaatcctgaagctgggttaggggttatattcaaagggcaattctcgttgcactgatctgcaccagcactgacaaatgattgctcatgaatgcccgttgttaaatcaacttgaggatctggcggacaagttggagcatcaatgaaacaaataccctttttatctttgttttcccgacttaccggtaccatttttggccccactgcc

SEQ ID NO: 9862 - DNA, 851 bp, Zea mays
  Clone ID: MRT4577_108992C.1
cccacgcgtccgcccacgcgttccgaaaaaagaattctccacttccccactctccctctcccgctcgtggctcgtcagtgggtgggagtgtgcggggctagccgctagggtttccgcgagcccatcgccggccggccacggacgatccgggactccatccggcgcccgccctgaatcggcttcgcggggcgcaaggagcgagagaatgaagtcgtcgctgcggaagctgcggggcttcgcgctgcagcgccaggagcagcgggtggaccgggaccgcggccggggccacgccgccgccgccgccacggcggcggacgagctcctcgcggctgctcaggatatggcagatatgagaagctgttacgataacttgctttctgttgctgcagcaattgcaaatagtgcatatgagttctctgaagcacttcaagaaatgggaacttgtctgcttaaaagagttacgccaaataaggatggaataaatgataaagttttgctgttgcttgggaaatcacaatttgaacttcggaaacttttagatagttatcgtgtgcatgttcttaacaccatcaccactccatcgctgtcgcttcttaatgaacttcaaactgtggaggaaatgaagcaccaatgcgatgaaaaaaaagaattgtatgaattcatggtaaacgcgcagaaagaaaagggaaggtctaagaatgctaaaggtgataatggagcatcagagcaattgaaacaagctcaggaagattatcaagaggaagcaactctttttctattccggttgaagtcattgaagcaaggacagttccgaagtctttttacacaagctgctcggcatcatgctgcac

SEQ ID NO: 9863 - DNA, 260 bp, Zea mays
  Clone ID: MRT4577_108993C.1
gcaggagccagggctgttcaacaacgtgattcaggcgacggccacccggatcgtcgccgaggcgacatcgagctacgtgaaggcactcgttggcgcgtgtgagaccgttatctcgctgcggggtaccagcaaggctgctgctgctgctgctgctcctactattgcagcaggtgtcgtgccatgagcgcttcttgatcggaagtgtccgtaatcacaatacttggagtgtgggccttgtatgtctggatctaagtgccgta

SEQ ID NO: 9864 - DNA, 179 bp, Zea mays
  Clone ID: MRT4577_108994C.1
ttagatgctggtgctgcccctggagaccaccagtcctgctattcaatgggtttacttccagggcgctgtagccgctatcaaacgcaaaaacgaatactaggccggcacatgaccaaggatgggctatgactgcatcacagcagacggttgcaaagagggggactagatcccgctgacaa

SEQ ID NO: 9865 - DNA, 393 bp, Zea mays
  Clone ID: MRT4577_108995C.1
ggtttttgaccccgggcgcagaaagaagcccggcggggggggttgaagacaaaggcggcggttacacccagagggaggagaggacagcgaaaggaaggaccacggcgggacgggctggaacgatggccgaagagcaggcgccaccaaaggccagaggacaagcacaaggagggcaggagggcgcacgggaggaagcaaagacgcgcaccaaagcagcggcagacgccaggaacgggagaggaaccgagggtggcacggaggcacaggacaggaacgccgcaagcccaggcacaagggaacgacgaaggagagagcgggccatggccgacgccggagcagaagaccgaaccaaagaggcccacgccacaagagaagaaaagaaggcacgaagcg

SEQ ID NO: 9866 - DNA, 448 bp, Zea mays
  Clone ID: MRT4577_108996C.1
acggcccgccctttttttttttttttttttatcatttttgaacgggtcgtttttttttttttttctttttgtttttttattttttttcattttttgggccaaaaatttcacttgctttgttttctcccccccgtccccgggaggaccccggttttttataaaaaaccccagggaaaaactattacaaagcgcgccccctcaaattttgaaaaacatgaccggtaaaaaaaagggggagggaaaaaaaaccccctaaaaagagggggccccccccctacccttttttgggcaccttgggggggtatgaaactttacagcccggaaaatttttatttgtaaacaaagggctcccggagaccaaaaaaagggtcgccgtcgacattgcaccagaggggctatacccccggaagttttggggaagggcataatgccaagcccttggggttgc

SEQ ID NO: 9867 - DNA, 896 bp, Zea mays
  Clone ID: MRT4577_108997C.1
atatccaaggtaggcaccaaattgactttatctattctccgacacacctatagtctttccatgccttttggtagtcttggtgtgctggccacggacaagtagaccccagtagtgacaaaccatagtggttcctggtcttcttcagcctagagtcatccctaagctgagcttcttgtcaagggcgttggaaacaacctgagagaacctaccatccttgtagtactttttcctgttgaggaaccagctagggaccttgaactggtgggggttggcaatcaaccaaccacgggattgtcaatcttgaggccacaatggagttattcgtggagcttcgagttattggaggtcgagctgtaaaaagctagcgttttttgcatattgtacacagtatcaggaggatgagccagaagcacaagaatgggctgatgagctatcccctgatgagcttgagcgcctcttgaatcatgaccatggttggttgattgccaacccccaccagttcaaggtccctagctggttcctcaacaggaaaaagtactacaaggatggtaggttctctcaggttgtttccaacgcccttgacaagaagctcagcttagggatgactctaggctgaagaagaccaggaaccactatggtctgtcactactggggtctacttgtccgtggccagcacaccaagactaccaaaaggcatggaaagactataggtgtgtcggagaatagataaagtcaatttggtgcctaccttggatatttattatctgtaggatagatgaaccgttctggtttatgaaacttttgttgcggtattccaagctggttgaattgaatgttcttaagaaccaatgtcattagaaaagttaaaagattcaataatttgaaatggttttacc

SEQ ID NO: 9868 - DNA, 496 bp, Zea mays
  unsure (1)..(496): unsure at all n locations
  Clone ID: MRT4577_108998C.1
gtcatattgagaccattacacctatgcttggactgactagcttgggcaagccgggcatgtaaaataagcttacgacatcacataggacatgccaacggtacctgactatcagctcagaactccacatgcttatgtgcttgaaggctggataatatgttcagtggtaactaacacaccgttggaacaatgttcgacctcgatactctgaactctgtaccctatgaccttatttaaaacttgttcgctgatactgcgaaatcatcagatgatgttaaaggcaggacattcatgaatgtacaagggagacagtaagcaacccgagagtgcccggattcatatagaacgtaaaatgaatgtgtaaatggcacgagaaattaaacattcatgcactaacgacatatacagtgatcctaaaatctttcaaaagactaatgggcagctacgagcactttatngaaatagatgatgactaagatgaattactgctgctgaagcc

SEQ ID NO: 9869 - DNA, 196 bp, Zea mays
  Clone ID: MRT4577_108999C.1
tgcgggagaccaagaaagcgccagggacgaatgagggggcagccgtgcatgcaaagactagcgacgagagcacgtggaaggcggagccctatgagcgagaatgaaaagaagatcgcgaaggctaaggagcctgatgcatgcaacgccacgagttcgcggctgaaaacataagaggaagaacaggatgcacaggatg

SEQ ID NO: 9870 - DNA, 126 bp, Zea mays
  Clone ID: MRT4577_1089C.1
cccacgcgtccgattttctcatatgtttaaactcagaggacagttcctcagatgtttaagatcagacgagagtggatcatagtttttttccttagtgatgattcctggctgctatgtgccttcttg

SEQ ID NO: 9871 - DNA, 295 bp, Zea mays
  Clone ID: MRT4577_108C.1
ccggcgtccggattgcagttgcttgcggcctcctgtcgtcacatctgcaacacctcctggggcctttttcggggcacgagggggcccctaatgcccaagaagatgggtgtcaactccaaggcggaggcggctccgtgtgcgccggtccgccgcggaggccgaccgtcgggaccgtcatcagcgccccaacgaagaccagtactgggccgatgctgagggccccaagtcccgcgcttcctgctcgagcactaactatggcgagcagcgcgcactaacatataatgatgcaggcgtg

SEQ ID NO: 9872 - DNA, 262 bp, Zea mays
  Clone ID: MRT4577_109000C.1
accctaaatgcccagtaagtctgcaactcattgctatgcagttcacttatgctgtaatattatttttttgtgaggatccgttttgatccagaacactgctcatctatagatgttctggatcacttataatcaataactggattatcctttttttatatggctgtatatatcctagcaagggaccacttttgtactcacttagtttcttgagagctgggaccacacttagtgaaggaaactgtgttcaactaacagaagtggc

SEQ ID NO: 9873 - DNA, 356 bp, Zea mays
  Clone ID: MRT4577_109001C.1
tttttttttttttttttttttttttttttcttaggtagttatatggtgcgtcaagtttttaatcgctaaaaacccctattcaaaaatatctgcgattttggttataaagaaagaatagaaattaaaaaaaactgagaaaaatcttctcctacgccgctcatctgccttgtgaccttgtccgttgatttttctgcagccactcttcctctgatttttaccgtccgtcaccagctctcgttcatcctcatctgcctaaaactttttttgccgtcgccggctgatctttttctccagcgaccgagttccagtccggcgttcatctcccaggaaaaagaaaaaaaatctcaccgccgttc

SEQ ID NO: 9874 - DNA, 181 bp, Zea mays
  Clone ID: MRT4577_109002C.1
atgacatctttggcattattgggggggttattacaaatgtacaggggggcactaccacccccaagactgtcaaaggaccgtcagccaaggactggagaggtggaagggcctccagcattaacatcattgccagtagcaccggcattggcaaggctggtgctaattggcatcctttatactg

SEQ ID NO: 9875 - DNA, 568 bp, Zea mays
  unsure (1)..(568): unsure at all n locations
  Clone ID: MRT4577_109003C.1
cacgaatacaattcaggactgctgtgactaagttaatcacatacagtcacactgacccataacagcatggatccatcgcgcaggggcaccgttcacattgattctcatgtttgacagcccgtggagattgtctgcgtccaatggccantggggactacccacggtagggtggctgaaatatgtctctgtcctgggtcttgcacatgtcggggatcaagccgacctccccgccgctgtagccccacctgttgtcttcacaagaacgaccttgctgaagccgtcgttcctggcaatcccagccttggcctggaatatgctaaacctgctgtcaccgaagaagtaccgggaaaccagatccttcttcacctagcccataataccctggagcggaccctcaaagacatgcttaatagctttcttgatcttctcggacgacggccacttctccatattgacattgaggtcaacatctgtcacatacaccttgggaacccggaatgacatgtcatggagctcgccattaaatttaggaagaaccttaccgacaatcttggcagcacccttgctg

SEQ ID NO: 9876 - DNA, 758 bp, Zea mays
  Clone ID: MRT4577_109004C.1
ctcgaggccggccggggcatcctctccgcgtcccatcctcgattgtcgcgctccctcctcttcgggaccccacccgcccccgcttgccggcggctccggcgactgccgctttggactccggttccctccaccgccgctccaaaggtctaggatataagtgaggcgaatgggataaactgtgcaaaaaaaatgttcagactacagcaaagtggaaggttgcgctaaagaggactaatgtccttgggatgaggcagcctccaccacgctggtataatccctaccatggctacccttatagatcatatggagcaccgtacttcccccatatggttatgagagggctcctagattccgttatcttatgtgctacatagcttatcatgtacaaggttaatggacggtatttctcaccgtgaccactcggttagccggtaagaactgagccactaataacgactgaaactgctcacgtgttctgttgtaagcagagtgctcatgattcaaggaagataattttccattttttctgttggttcaacgaaacacacagaatgggaacattgatacactgcatgctgttatttgcagttagtaccaaaccttttctcttttctgctttgtatcctcttgttttctttgacacgtcctatgatcgatcttctctcttcttacttattatgtaaatgctcattccaatattagtcaaaaggtactgcagcttaccaaagtttccagaaaaaaaaaaaaaaaagggctcc

SEQ ID NO: 9877 - DNA, 1081 bp, Zea mays
  Clone ID: MRT4577_109005C.1
ggaccctcattgcggccgtcgagactgagagccacacactgaaattcccctaaaatcactacggaccacttcaccggcggctcgccgtactccgccgccgtaaaccgatgaccctttcattaggcttgttgcggtcaggcctcctcaaccggcgcatcaaccaaccggcgaatcaagtccttcgcctccacctcgcattctcctccgcctcgccgtccccgtccgacccctccgccgccgccgccggcccccagaccaccatcagggaagggaaagtggaaatatttttggacgagtccaactcagtcttctacaacaagacccaggttaacaatagagatatttccattgctgtattgagatcatttattttgaaaagacatgaagaatatgctgcccgatcaagaaaaggaccaggagacactacattgagtgcgcaagctaagtataaagagccgaaagttcttgaggcattagctgcatcagggctaagagccattaggtatgctgttgaggtagatggaattggtgaagttactgctgttgacaataatgaagccgctgtagaagcctgcaagaaaaatatacagcacaatggcagtcttgcatcttcgaaggtggtaccacatcacgctgatgcacgtgtctacatgctcacacacccaaaagaatttgatgtggttgaccttgatccttatgggtcaccagctgcattccttgattcagcggttcaatgtgtagcagatgggggcatcttgatgtgctcagctacagacatggcagtgcttgctggtggaaatgcagaagtttgtttttctaagtatggttcttatccattaagaggtaaacactgccatgaaatggcgctgaggattcttcttgcctgcattgagtcacatgcaatccgtcacaaagcgctacatagttcctataatatcagtacacatggatttctacattagggtttttgtgcgaatcttcacgttgtctcctgcttccatctttttcctgatacattcttttccttatgggtaagatatgctattttctctatgatggtacttttttgggatttaataat

SEQ ID NO: 9878 - DNA, 717 bp, Zea mays
  Clone ID: MRT4577_109006C.1
gccggccggttcgggggcacctcgacactccgacgagcgtcaacctctgcggcgaagatgggaaagatgaaggcagtggcgtgcgtcgcctgctgggcggcattgtcactgatcaatgtcgtgatggccgtcgattacgtcgtcggcaacccggccggcggctgggacgggaggaccgactaccagtcttgggccgcagccgagacttttgctccgggagataccctaaccttcaagtacaactcataccacagcgtcatggaggtgaccaagagcgccttcgaggcgtgcaccacgaccgacccgatcttgtacgacaacagcggcagcaccaccgtcgcgctcaccatgccggggacgcgctacttcatctgcggcgcgccgggacactgcctgggcggcatgaagatgcaggtgcaagtcgccgaccgacccgcacccaccacacccagttcgccgccgccgccgccagcacacgcgaaacagaagcggcatgcaacggcaccatcaccgacgcctatgccgtgggctccagcgccgacaccatggtcgcccgcgccggcacccgcggccgcgccaccgagacgtgcagggcacaagaagaagcacaagaagaggtactgcccgccctgaaccgtgcatgcgcccgcacgggcccccacccccacagtgcaggccgtcgaagcagactttccgttcgcggcgtttgctcctatg

SEQ ID NO: 9879 - DNA, 503 bp, Zea mays
  Clone ID: MRT4577_109007C.1
ctaggacctgtaccaggcgatgtcgctgctcccagcacacctacagtttcaggcgctactgtttccagcgcccaagctattctcgacgccactgcagtaccaggcgctgctcccagcgcccacgctgtccccggcaccactgcaattcctagtgttgctgctccgagcgcccaagcagcaggctctactccaaccagtgctgccgctcctagcacccgagcaggaccaggtgttgctgctcacagcacccaagcagcaggcgatgctccatctagtgttgctgctcccagcatccgagcaggaccaggtgttgctcctggcgcctctgcatcagcaccgacttcacctgacgtccctgcaccatgacgtttcggccaggtcttcacgcgtcgtctggacggctttgccaccacgcctggcagagccgtcgttccacccttatctcccgctcatcttccgcgggcgcattggatcaccctttcccacccagcgcagtggttgtt

SEQ ID NO: 9880 - DNA, 205 bp, Zea mays
  Clone ID: MRT4577_109008C.1
acttcttcacctgcggcttcgtttaatgctggcatgcaccagttaccctaccacttcactcaaaggcctgggaagggagctgaggggtcatttcaaaaaaacaacggagacagggcctgttttccgcaagctgactgtgtccaacgctaaccgaaacctctcggatgtgattgcttacaaacaggcaatgtccttcccctgatac

SEQ ID NO: 9881 - DNA, 557 bp, Zea mays
  Clone ID: MRT4577_109009C.1
aaaaaaaaaaaaaaaaaaaaaaaaaaaaaaaaaaaaaaaaaaaaaaaaaaaaaaaattaaaaaaaaaaaaaaaaaaaaaaaaaaaaaactcttaaaaaaaaaaaaaaaaaaaaaaaaaaggttggtccctgggcccggaccccccctaggggcgaatttggcaaatttccatcacccgggcgggccgttcgaccttgcttttagggggcccaattccccctatgggggggcgtttaacaattcacgggccggggtttaacaccgtggggccgggaaaaccccgggggttccccaactaaatcgcctggcagcacatccccttttccccagggggggtaaaaccaaaagggccccccccgaccgcccttccaaacagtggcccaccctgaagggcaaagggcccccccctgtaggggccctttaagcgcgggggggggggggggttccccccagggggcccgttacatttgccagggccctagcccccgctcttttggttttttccccttcctttttcgccacgttggcgggttttccccgtaaagctttaaatgggg

SEQ ID NO: 9882 - DNA, 1414 bp, Zea mays
  Clone ID: MRT4577_10900C.1
cattgggtacctcgaggccggccgggaactcccccaccggccaccgcccaccgcgaactgccggaggaatctctggcgatggcgccgccagcagctgcggttgccgccgtccaccaccgcagcccgcacctgctcctccgccgcggcggcgggggtctcctcccatctccttcgggtcccgccgcccttcctttctcctcgcggggtgcggcatgcacgcccgcgcgcctgcgtttgccgccgccgcggttctctctctcccccgtcccgaagagcctctccgccgcctcctcctcccacgtccctgtacggtccctcttcaccggcatcgtcgaggaggtcggccgcgtgcgccgtctcggcccgccgctcgcgccgtctgggggcggcggtggcggcgaggctcctggccttgacttggaggtcgagaccaagaacctcctcgctggaacgcagctcggtgacagcgtggcggtcgacggcgcctgcctcaccgtggcggcgatcgacccggccgcgtccacgctcaccttcggcgtggccccggagacgctccgccggacgtccctgggagggcgcgccccgggcgatggtgtcaacctcgagcgcgcgctcacgccgtcgtcccgcatgggcgggcacttcgtgcagggccacgtcgacggaaccggggagatcgctgcgttccggccggacggggactcgctctgggtcaccgtgcgcgccccgccggagatcctccggctgctcgtgcccaagggcttcgtcgccgttgacggcactagcctcactgttgtcagtgtggacgacgagggcggctggtttgacttcatgctcgtcaggtacacgcaggacaacatcgtgctgccgaccaagaaggtcggagacaaggtgaacctggaggcggatatactggggaagtacgtcgagaagctcctcgctgggagggttgaggccatggcgaaggttgattcttgatctaccattgctgagctgctggatcaatcgtcattctataggcatttcagcaatgttatgttcatcaataatagcagttcattccattttgttgcaattggctcgtgacttttttaaaaaaaattcagtgagacagtaataaaacataagttatcgaggaaatgacttatcatttcttttccctagttgagatagatgtacaagtacccatactctattatgcagccacatttacaaaaaaaaaaaaaaaaaaacccgcggcccagcctgcagctgcaacatggattcttccgggattttggttattatgttttggaaatgttcatttggttgctgcagccagcaaattagaaatgctattttggggcccttccccctctactgtatgagacctgagctttgtgattggaacaatgtgaatacaaggcttagcccc

SEQ ID NO: 9883 - DNA, 604 bp, Zea mays
  Clone ID: MRT4577_109010C.1
gtaaaaaaaaaaaaaaaaaaaaaaaaaaaaaaaaaaaaaaaaaaaaaaaaaaaaaaaaaaaaaaaaaaaaaaaaaaaaaaaaaaaaccaaaaaaaaaaaaaaaaaaaaaaaaaaggttggtccctggccgggggggccgtttcaaaggggcaattttgggaaatacccatcccccggggggccgttggaccttgcttttagggggcccaattccccctatgggggggggtttaacaattcaggggccggggtttaacaacgtggggccgggaaaaccccgggggttccccaattaaatcgcctggcagcaaatccccttttccccagtgggggaaaaagcaaaagggcccgccccgatcgcctttccaaacatttgcccaccctgaagggcaaagggcccccccctgtagcggccctttaagcgcggggggggggggggttccccccagggggcccgttacatttgccagggccttagcccccgttcttttggttttttccctttcctttttcgccaggttggcgggttttccccgtaaagctttaaatggggggctccttttggggttccgattaagggtttaacggcccctggccccaaaaa

SEQ ID NO: 9884 - DNA, 517 bp, Zea mays
  Clone ID: MRT4577_109011C.1
gtggatatcaggaaggacctctatggcaacattgtgctcagtggagggtcaactatgttcccgggtatcgctgatcgtatgagcaaggagatcacttcccttgcaccaagcagcatgaagatcaaggttgttgcaccacctgagaggaagtacagtgtctggataggagggtcgatcctagcctcgctaagcactttccaacagatgtggatatcgaaggaggagtatgatgagtctggcccagcaatcgttcaccggaagtgcttctaagtttcaccagttgttgttacctagtctcaagtagtcaagttatgtccccttcatttcttgagatatgtgtggcagatttgcatgctacgtttatttgcatcggacctgagtcttctctgggatagacccttctttgtgtgttgttgcttcatgtgcggtttgtgaggttagttgtcaaacatgcttggcttgattggttgtacctctgagagctgatagttatataaattgcttggattgtgctggt

SEQ ID NO: 9885 - DNA, 872 bp, Zea mays
  unsure (1)..(872): unsure at all n locations
  Clone ID: MRT4577_109012C.1
gggccccataacatgtagccaaaattgagcagctcatcgtttttaagcttggctggctatctaacttacaattatgttgcagaactgtatcagctctctctaattttatgttacattatatttggcaggaaaatctgagttatcaataatcctatgtgtttctactgggtctgaaacttgtaacatacagttctctgaagatctacagaagatagtggatacttatcagctgagtcctttcaccgcaaaatctttaacaggttgccaggtgttgtgctacatcaaaagaggagtgggaggaacagtgcaaactttggccaacatcttaccatcctgcacatgaccttggtattgtccgtggatttcaagaggaggaattaccatcaatatttaattgcatgaaggctgctattcagttatcaaaggcaggcaatgctgcaatcattgttgatccatcaagcatgcaaatagttgcaaaggccactgaccatacacacaagcatgatactcctgaagaagggaacacattttctgaagcgaatgcagatgttacctgctcttggaatgcatcgactgatgatgacaacaatctgtcacttccaggatcctttcttcctaaactcaacagtttgaacatggaaatcccatgtataaatccttggggatggatgaaaaaaaggacttgtgagcagaagccatcgccatgcgatggctgttctgcatggcatcctctgagacatgctcccatggctgccattgaaaatgctgctgtgagggacagaacgatgtttccttcttcgatttcaataccaagccagattcagatggcagtcccgagaactgctgcgnacatgaaccagcaaaaaggctga

SEQ ID NO: 9886 - DNA, 212 bp, Zea mays
  Clone ID: MRT4577_109013C.1
cccgcaggtcgcaaactcaacacacagccagcctcaaacctctttttcgcacggatgcagaacttccatccatggcagggtcatcagggatggatctttccgtacgaccgccggcttcggaccgtgcctgcgcttgctctgccaaccgaagggcgccgccccctcagccaccgaggccagtggtgggccccccttctgggggggagccggcc

SEQ ID NO: 9887 - DNA, 345 bp, Zea mays
  unsure (1)..(345): unsure at all n locations
  Clone ID: MRT4577_109014C.1
agcttatcgcttatcatccgcgcctctacatttcttctctctctgctcctccgcctccgcctccgcctgatccatccaagacagggatcgccatgtncggactcggaggagnaccacttcgaatcgaagggcgacgntaggggcgtcccagaactacccgnactaggttgcgcccgttcgtaagaccggtttcatcgttatcaagaaccgtccctgttaggttgaggaggtttttacctctaagactggaaagtatggcgccgctaaatgccactttgctcccatagacatattccatgggaaaaagcttgaagatattgttccttcctcagacaactgtgacat

SEQ ID NO: 9888 - DNA, 581 bp, Zea mays
  Clone ID: MRT4577_109015C.1
gtaccctgcggagctgccgggttgtgcgcacataccataaatatggctcaaacaggttgattaagctcctttcttggtttatggctgtaattcagagtcttcttataattgcttctcgcaagcactacactgtcgatgttgttgttgcttggtacacggttaatttggttgtattttttgttgataacaagctgccagaaatggcagaccgtacaaatggattgtctctgcttccagtaagcacaaaggataaagacggcaggatgaaggaagaactccataaacttgagaaggacgggaggatgatggatgagttccataaattgttaaatggaaactctatcgatgctacagattggcgacaacgagtgcagatgaatggaaagcacggagaagacacgagccacactgtcgctgatgccacctctgctgggacatgaccagcagcatttctctgtcaatatcgtcttcaatatccacagatggaatctgcgagcaaaaagaaaattgtgtgggggtgctgcctctatcattgtgtgatgaaaggcttctcaggtacccgcgaggttgcgacattcata

SEQ ID NO: 9889 - DNA, 844 bp, Zea mays
  Clone ID: MRT4577_109016C.1
ggtgaattcacaagaatgtcaaacttgcggagaaggtagcagacaagtcgttaagctggaacctgagaacacagggtactatgttcttcttgccaacatctatgctgaggctgagagatgggaggctgtcaagaagctcaagaacaagattggtggtcgagggctccgtgagaacactggctacagttggatcgaggtcagaggcaaggttcatgtctttattgcacataaccggaatcacccagactggaacaggattgcagagtttctggatgatgttgccagaaggatgcggcaagaaggccatgatcctaagaaaaagtatgctctgatgggtgccgatgatgcagtgcatgacgaggcactatgtgggcacagctcaaagctcgccgtcgcattcggtgtgctgaatttaccggagggacggccaattcgtgtgacaaaaaactcaaaagtctgcagccactgccatgaggctgccaagttcatatcgaagatgtgcaacagagagatcattctgagagattcaagcagattccatcgttttgaaggaggcaggtgttcttgcagagggtacctctgaaagaaacagtcatgtgcctgtggttttgtttgttcattagcagagagcacatttattgctactagcagttctagcaccaccatatagcctgcatctgtagtgattttcctttataaggcattaggaggagggaagagacctttagaaggtaacaagtgtgtgtgttcaggaaacagaagctactgtccatagaaatgtgaagattttatatatatgtatgaaggcattttggcatcttttactaaaaatattgttacaaac

SEQ ID NO: 9890 - DNA, 582 bp, Zea mays
  unsure (1)..(582): unsure at all n locations
  Clone ID: MRT4577_109017C.1
ccccggaanacccggaacgacccacgcgcccgcagcancaacggggataaacatttgngcgcacccccaaccagcaaaagcgcggggncgggggcgacaccggcgaaaacccacacaccgcgaagcacanccgggccaagggcaacccgcacnccaacagcgacgcacgcgagcgcgacaagccggaaaggagaagggcaaggaccccgacaagaacaggaagcagcagcaaggggacgacaacggcagcacgacgcccacgggcgggccggacgcccgagaacccggggagcggcaccaacncggcgcgaggaagcagcagcgnccgaacagcgccaacgagcagcagangcgccggaagcnggaggagcagcagcaggcagccgaaccgcagcacgccaaagaccaccagagccgccgccccaaggggcaccagcagcacgaccacaaggcncgcgcagcagcgacagcaacggcacagccaacaccaagggccaaagccaacgcgaccagccaacccaagagcaccacggcagacgagccgccaccagaggccggagagcagccaaagccgagcagggg

SEQ ID NO: 9891 - DNA, 409 bp, Zea mays
  Clone ID: MRT4577_109018C.1
tcttcctgccgagagcacagggaacagacagacatggtcacgggatccatgaagcacctcgtgcaggtggagccggcaagggaggcggcggcggagggcggggcgccatcggcggggcccacgtaccgatgcgcggccggtggcaacgccgcgtcgccgcccgccgtgccggggctcgagtgctgctgggacatattccgcttgtccgtggagaagtgccccgacaacaagatgctgggccgccgcgaaattgtccacggaaaggctggcagctacacatggctgacttacaagcaggtatacgacaccgtgctcgatgttgggtctgccatccggagctgtggcgtcggcaagggcggccggtgtggcatctatggagccaattctcctgagtgggtcatcagtatgc

SEQ ID NO: 9892 - DNA, 3404 bp, Zea mays
  Clone ID: MRT4577_109019C.1
cattgggtacctcgaggccggctggggtctataaagtcgctggcaaactcgacgccggccactactctgccctctcctggctcctctccttcctgcttggtttttgctttcagctcttgaaccgaatccactgccgcggcgcttagcattggggactagggggccgacatggctgccttaggggcgaagatggagcgtctgtcgtcgatcgacgcgcagctgcggatgctggtgccggggaaggtttcggaggacgataagctcatcgagtacgacgctctcctcctcgatcggttcctcgacatccttcaggacctccatggcgacgacctcaaggaaatggttcaagaatgctatgaggtagctgctgagtatgaaacaaaacatgacttgcaaaagcttgatgaactcgggaagatgataacaagcttggatcctggggactctatcgtgattgctaagtctttctcgcacatgcttaacttggccaacttggctgaggaagtccagatagcctacaggaggagaatcaagctcaagaagggagactttgctgatgagaactcggcaatcacagaatctgacattgaggaaacacttaagaggcttgttgttgacctgaagaagtcacctgctgaggtatttgatgccctcaagagccagactgttgatctggttttgactgcacatccaacacagtctgtgaggaggtcactgctccagaaacactcgaggatacgcaactgtttggttcaactctactcaaaagatatcactccggatgataagcaggaacttgatgaggctctgcaaagagagatccaagctgcctttagaactgatgagatccgaagaacacagcccactccccaagatgaaatgcgtgctggtatgagctacttccacgaaacaatttggaagggtgttccaaagttcttgcgccgggttgatactgcattgaagaacattgggattaacgagcgtgttccttacaatgcacctcttattcaattctcttcttggatggggggagatcgtgatggaaatccaagagtgacaccagaggttaccagggatgtctgcttgcttgccagaatgatggcatcaaacttgtactgctctcagattgaggatctcatgtttgagttgtctatgtggcgatgcagtgatgaactgcgcatgcgagctgatgtgctgcatctctccactaagaaggatgccaaacattacatagagttttggaagaaggttcctccaaatgagccatatcgggtgatactgagtgatgtcagggataaactgtacaacactcgtgaacggtcacgagagcttttatccagtgggcattctgatattcctgaggaagctacattgacaaatgttgagcagctgttggagcccttggaactatgttacagatcactctgtgcttgtggtgactctgtaattgctgatggaacccttctggatttcttgcgtcaagtgtccacctttggactctcccttgtgaggcttgacattaggcaagagtcagataggcatactgatgtccttgatgccatcactacatacctggggataggatcttaccgtgaatggactgaagaacgccgccaagaatggttactgtctgaacttaatggcaagcgccctctgtttggctcagaccttcccaagactgaggaaatttctgatgttctagacacattccatgttattgctgagcttccctctgacaattttggtgcgtatatcatttccatggcgacagctccgtcggacgtccttgctgttgaactcctccaacgtgagtgtcatgtgaaaacaccacttagagtagtcccgctgtttgagaagttggccgatcttgaggctgccccggctgcattggccagactgttctcaatagattggtacagacagaggatcaatggcaagcaggaggtcatgattgggtattcagactcgggcaaagatgctggtcgcctctcagcagcttggcagctatacaaagctcaggaggagctcatcaaggttgctaaggactttggtgtgaagttaacgatgttccatggacgtggtgggactgttggaaggggtggtggtcccactcaccttgccatcttgtcccagccaccagacacgatccacggatcactcagggtcactgtgcaaggtgaagtcattgaacagtcatttggtgaggagcacttgtgctttaggacactgcaacgtttcacggctgctaccctggagcatggcatgcacccaccaaatgcaccaaagccagaatggcgagcccttcttgatgagatggcagttgtggcaactgaggaatatcggtccattgtcttcaaagagccacgctttgtcgagtatttccgccttgcaacccctgaaacagagtatggtaggatgaacataggaagcaggccatccaagagaaagccgagcggaggtatcgactcactccgagcaatcccatggatctttgcttggacacaaacgcggttccacctcccggtctggctaggatttggagccgcattcaagaatgtcctccagaaggacatcaggaacctccacatgctccaggaaatgtacaatgagtggccatttttcagggtgactattgatctggtggagatggtgttcgccaagggtaatcctggcattgccgcactgtatgacaaactcctcgtttcagaggaactgcatccattgggtgagaagctgagggccaactatgaggaaacccagaagcttctacttcaggttgctgggcacagggatcttctggaaggtgacctctacctgaagcagcggctccgcctgcgtgatgcgtacatcaccaccctgaacgtctgccaggcctacaccctgaagcggatccgtgacccggactaccatgtcgcgctgcgcccccacctctccaaggagatcatggactcgaccaaggctgcggcggagctggtgaagctgaaccctggcagcgaatacgcaccggggctggaggacaccctcatcctgaccatgaagggcatagcagccggcctccagaacaccggttaaaccacgaagaggggatcttttttctcctcctgatcattggctctaggtccttcgtattttcgcggattgtaacttcggccacctctctacaccgtgaggaaataatggtggtttctgcaaaagtggtggtaaataaaagggcgacaactatcttgtttttcttagtaacttataactttacgatgcgataatggaacatggcttgcgttatctgtttctcgtgaagcatttttgcaggcaggttctgaattggagaaaattgcatttttaacactgccagtgtgcagtcaatattacacagttcagttagaatcttatatattggacggcat

SEQ ID NO: 9893 - DNA, 114 bp, Zea mays
  Clone ID: MRT4577_109020C.1
aacttcgcgaagcagtcatacacgagactgactgctgtttgttgagacgcatagagctagctggaaacgtccagactgtcgctcgtgaggctcagtggcgtgtgcgaccccttc

SEQ ID NO: 9894 - DNA, 562 bp, Zea mays
  Clone ID: MRT4577_109021C.1
actcctatgggcgattgggatcctcgaggccggccgggatgacccagccaccggggtctggtcacctgggcgcgcccgctcgtcaccacccggggactgcagcagctggtggacccgtcgctcccggtcggttacgacttcgagaagctggccaaggcggcggccatcgcgtccatgtgcgtgcacgtcgaggtgtcgcaccggccattcatgggcgaggtcgtgcaggcgctgaagctgattcacagcggcgggagcggcgacggggcctgcagcggctgaggctccttcagagttcagaggcggcgcgacggaggagtcccctggaacgacgccagctggagctcgcggaacgacgaccctgtactgttagcttcctggaggaagggggaggaagcaagacggcggcggggaaggagaagacttgggagagtggaagaagatagtgttttctgttctttttttatatcccacggactgagtgtgtgttggtttgacttttggctttgtcttttgcctcctaaaagccaaaagcaaaaaaaaaaaaaaaaaacccgcggcc

SEQ ID NO: 9895 - DNA, 539 bp, Zea mays
  Clone ID: MRT4577_109022C.1
tctcctagtcggctgtacacatgctattcctagccctccagtgttcctcttgatttgtgcaacttgtcttctcaaattctaagtgtaccaacattaaatcctaattccatcattttttttttataaaaacctcccatctcagatgttctaggaatggcacccttgtcttctttgaaaattcacattccatttcttgacaaatcaatctctaaatatacttcctggtgacagggcaattttacatcccaaaaacaaagcaatttgaataacatggtacgtataatgcattgttttccgctgcaactggctgcctgaaaggatttacctggataatagttggcatccaactaggatatgcagccacacccgcatttggggcaaaaataagttgtggaacggaatccttcaatatatcactgcatctctcatgatagaaacctttccacagtttgagtgtcactgcagtgcaactcaagtctttggaaccaatagaagatttacaacagcaactcttatcagaacaacatgcatatctggaa

SEQ ID NO: 9896 - DNA, 247 bp, Zea mays
  Clone ID: MRT4577_109023C.1
cactggcgcggctggggatactggcacggcggcgttgggatccgtcgctacccgcatcaagggcgccatcaagcggttggatgacgagctggtgcggtccgccattgactacttcgagaacgagaaggccgccgagatgaacaagagacgggctctgagaggcaccctgccaaagacgttcctgaatattacaagctggttgggtaggccacagtacgacgcagattttgggtggggaaagccgcaa

SEQ ID NO: 9897 - DNA, 360 bp, Zea mays
  unsure (1)..(360): unsure at all n locations
  Clone ID: MRT4577_109024C.1
aacccnttggctttaaacccctttttaaaatttttttttttgtgtggatttttagggggtaaaacgggggtttccccaaaaaaaaaaaaacaaaaggaaaggcccacgggggggccaaaaaaaggcagccaaaaaaacaaaaaaacaaactttaaggcgcgcgaaaggacaaaaaaaagggcccaaccggcaaatatttccccaaaaaggggtaggcaagcaaaggctaaaaaaggggaaaggccccgggaagtccgggggccctgaaaaaaaaaggccccaagcccgttaaaaaaaatgagaaaaaaaaagggagaatgcccgcgaccccaaaaaagaactggcggcaagaaaaacccc

SEQ ID NO: 9898 - DNA, 1030 bp, Zea mays
  Clone ID: MRT4577_109025C.1
caaactccaatatatgatggtcaggacaccctatgcattcactatttagggcctgagaaggagctacttcagcttgcagcgtttggggaactacgtgcattgtttccaagtgtccagattcacattgagcttgtcggacccgaagttccaaagtccagggatggagaggttgtgaacatttccagatatgcatgttgttctgataagagttgctgttgtaaatcttctattggttccaaagacttgagttgcactgcagtgacactcaaactgtggaaaggtttctatcatgagagatgcagtgatatattgaaggattccgttccacaacttatttttgccccaaatgcgggtgtggctgcatatcctagttggatgccaactattgaaatgataaggcagactgggattcctgcaatctttacggacttctgtgaagaagctgcacatctagcatcctgctgcataagctccataactggtcaaccccttaaaattccaatccaggtaaatcctttcaggcagccagttgcagcggaaaacaatgcattatacgtaccatgttattcaaattgctttgtttttgggatgtaaaattgccctgtcaccaggaagtatatttagagattgatttgtcaagaaatggaatgtgaattttcaaagaagacaagggtgccattcctagaacatctgagatgggaggtttttatttctgagagatgatggaattaggatttaatgttggtacacttagaatttgagaagacaagttgcacaaatcaagaggaacactggaagggctaggaatagcatgtgtacaagccgactaggagaaaatgtattttatttgaacctctgaaaatatttagatgctgcaattgtaagattttcgcatcaaccgattcttgaaatacactttttcataattgggagatgtatatgttttcttatggtggagctacatattatctaattttgttgttcacagcaatctggaggaccgagattgtaagaactgattttgattcat

SEQ ID NO: 9899 - DNA, 335 bp, Zea mays
  Clone ID: MRT4577_109026C.1
gccgccattgaccacgccattgatgatccaaacgtttccccttctttagagaatggcgcccatggcctgcatggccttgcccgtattgagaacatcctctcccttcaaaaaaggagtgatgcgcgtttcaccgctcgcgagaccgccgaacataaaagaacccggggagagaaccacttgtcaccaaaaataacacggttccggaaaggccagaggatttgcgggcggttgcgggccccctctttttacccctaaaacattgcagcttgtacccctagattctgagaaccttaaagaacaaaactttgcataaaaattgaatcttttttcaaaac

SEQ ID NO: 9900 - DNA, 394 bp, Zea mays
  Clone ID: MRT4577_109027C.1
cccacgcgtccgcccacgcgtccgcggacgcgtggggtcgaggtgtcgagggctcaggctcctggcttcttccgagggatgcccgggttcgagaagttcgcggacgatgtcgagcaggtgctgaccgaggccgacggcatcgtcacgaacagcttcgtcgagatggagccggagtacgtcgccggataccaggaagccagggcgatgaaggtgtggaccgtcgggccggtgtccctgttccaccagcgcgccgcgacactggcgtcgagagggaacaccgccgccatcggcgctgacgagtgcctccgctggctcgacggcaaggaggcggactccgtcgtgtacgttaacttcgggagcattgcgcacgcccaggcgaagcaagtcgtggagc

SEQ ID NO: 9901 - DNA, 617 bp, Zea mays
  Clone ID: MRT4577_109028C.1
atttccatagagctactgactactatagctccatcatctcacttctccagcgcgtcacccaaacacagccctcgacagcctcctggctctcctactttgctattcactcaatggaaagacctgatcctagaatggcagtgctcgtccccccaccacgcaggggtcaggcgccaagcaaattcccttcctagccctgaatatgcccattgctgtccctgccaccatagatatcaccgggacagtgaagggcatccgcccagccgaacacgaaagtcgttgctgacggacccgggtagcatatccgaggcggcaactgccgcctctcgtttcgcctactgttagtggcgcacctggtcagtgacgccaacctcgtggtcaccgtgatggtcgaaaactacagggtaaggggctccgctctcggcatcgacgcaatgtgcactgatagacgcagacgactgcgcgatctaccgtggaaccaccatgttcggcatggtcacacgagtcatgatccatgataaaccgtgcgcggctcagcaacaacaagaactctgacgagcttgccctgcaagttttctgcaccgtgtttgccgcatcgcacctaccgattaacaagcagc

SEQ ID NO: 9902 - DNA, 781 bp, Zea mays
  Clone ID: MRT4577_109029C.1
ctttgttgaggcttgaccaattgcagtaagacgtgttcgtaaggaggatttgcgccatgttgccaaggcaacaggtgcaacaatggtgactacttttgctgacatggagggtgaagaaacatttgatccatcattccttggacatgctgacgaggtcgttgaggaaagaatttctgatgatgaaataattctggtgaaaggcacaaagaacacaagtgcggtttccattatactcagaggagcaaatgacttcatgctagacgagattgaacggtctttgcacgatgcactgtgcattgtgaagagaactttggaatccaatacggtagttgctggtggtggtgctgtagaagctgcattatctgtgtacctggagaatcttgctacaactcttggatccagggaacaactggcgattgctgaatttgcagaatctttgttgatcataccaaaggtcctcgctgttaatgccgcaaaagatgcaactgaccttgttgcaaagcttaggtcatatcatcataaagctcaaacaaatgctgataagcagcacttgtcaagcatgggtcttgatctgacaaaaggtgtaatccgcaacaaccttgaacatggcgtgattgagccagcaatgagcaaagtgaagatcattcagtttgcaacagaagcagccattaccattgtgaggattgacgacatgatcaagcttgacaaggaagagtctggccaagaagagtagccacttgccattttacgacccctggttgctgtttgttatgccatggct

SEQ ID NO: 9903 - DNA, 236 bp, Zea mays
  Clone ID: MRT4577_10902C.1
cagtccaaatgtgcttgtatgcctttttacatttgtttgttgtgggggggaaaccaaccccattttctcgcgcggaaccaaaaaaaatgtacccctcattaattacccaaaccccagcaccaaatgtataacagtttattccccgggcgcaaaaatattctgtatgacaaggttaattaataccgggggaaagcatggaaatgtttaaaacaaaacaaacgacgcttaattccccc

SEQ ID NO: 9904 - DNA, 166 bp, Zea mays
  Clone ID: MRT4577_109030C.1
gttttgtgtaggtccaagaggaggttcattggtagagccattaatgttgtcgaattgaactttgtgaacaatgaagttgagggtttgatgatagaacttatttagaaggatattctggtgaagattgagatcaaatagaacaatgtagtaggagatgatgataaga

SEQ ID NO: 9905 - DNA, 157 bp, Zea mays
  Clone ID: MRT4577_109031C.1
tcccactcgtccggcttgactctctcgtgcttttacccatccgtcgtctagcatgactcatgggagattggcctgactacagcaatgacggtgcagtctcatgatcaccaccaccaccaccacctcgagttccctttcctcgtcagcttctgctctc

SEQ ID NO: 9906 - DNA, 265 bp, Zea mays
  Clone ID: MRT4577_109032C.1
ttgggtacctcgaggccggccggggtggcctgtggactctcccctccccgactccggtgaagggagcagaaacgttggcgggttggatgagatggcgtcggcatggacgaggcaacgaagaagaatgtggaggctacggtgctatgagatcctccgggggtccgatataggagtcgcgtgcacggagtacaagcgaccgcgcgcgctagccagagactgcctcgtgatacgatctctccatactcgacctgaagctcttcgtgcg

SEQ ID NO: 9907 - DNA, 143 bp, Zea mays
  Clone ID: MRT4577_109033C.1
attcggctcgagcggagcttgcttgcaagcgttgttcaacgggacgggtaggatgatcattccctccagctgttggaatctcctgaagacattggtagaagcatgcacgctggacgcctggctcaccacgcagatggagtttt

SEQ ID NO: 9908 - DNA, 402 bp, Zea mays
  Clone ID: MRT4577_109034C.1
gcggcctcccttttttttcttcttctctgcttcgccggaacaacaacatatctcggtcgcttaaacaacatgtcagcctaaaacccccacaacgatcaatacaatgtgcagggcaaacaactgcatgcacctcattcccagaaaaatactccatggctgagcacatacttacctttacgctcatcacacggatcgcctcttcattacgactactaatcgcaatttaagctttttcacacccttttcagcattaccactgacctcacccaacgacatgtagtctactttattggccttagaatttcatattcgcactaagctcccatttttctaaatatgcacttgactttggactacgaactaacccgacaggctgatttaaccttaactttttttctgtta

SEQ ID NO: 9909 - DNA, 571 bp, Zea mays
  Clone ID: MRT4577_109035C.1
tgttttttttttttttttggggggccgcggggcggcgctcggttctttagcgggggggtgttgtctctcactgacgcgcgaccgctcgaatgagtgtcgggtctccggacgatcaaacagcgcgttagctttgctccctcgccgcctttatttatttattgaggacgccctacgtgctaagaaacagctcacctgcgctccttttatttattgatctatcaggtctcacatctgggctgatcgctctccctgatccatggcttacactgacaaccatgatacccgtggatgacgaacatgcatagctagcgaggacattccggctcccgtgctggcgcgctttgcccctcgatgtgcccgattcccccctgggttcgccctgtccctggggcttgtgacctgctgcgtccactgggacactcgaagcggccctcggtctgtatctgcaaaccgttggctcgagccggctgcccttccactctcggcacacgacctctcctgcggacggctattcctcggcctcttggtcggcggtggcgtcacttctctgccgagtcgctgcggcgccacc

SEQ ID NO: 9910 - DNA, 415 bp, Zea mays
  Clone ID: MRT4577_109036C.1
ccactccctatatttccccgaaaaccaccacggcaactcgggacatttttttatatttttttgggccacaacagggattcaaacaaaaaaaagggttttaaaattgggggccccatactcgcgcaggataaaatatataggcctatttgattttacaggcaagataagatttttcaactccaaacaagatttttcaacttccaacacattttttttggcattcacattcaccacacaaagttgggaacccccacgaactggtcattttttcttctttccgaaggccaagttttttacccttaccagaagcaaattttttaccctgccaagaagaggaaaccctgaccacggtgatttttgaattgatcccaaaacgagatttacagggggaccaccacaaaaattggtttttttc

SEQ ID NO: 9911 - DNA, 238 bp, Zea mays
  Clone ID: MRT4577_109037C.1
cggaccaacaatgtaataattaacaaaaagaaaaaacgaaaatgtttggaatacccagggttcggaagggaaagaaaggaaaaaaagaaacgcggcataattttgcaagaggcggatctaaagaagctccacgcatgcaatgcacgagcacgacgcgattgagttttcttagtgccgcagttaactaacacacgccgtagtgggggaacatgagctccggcctcggcccgggggatcc

SEQ ID NO: 9912 - DNA, 252 bp, Zea mays
  Clone ID: MRT4577_109038C.1
gcctctcttccattattggtcaagataaagggaagaccggagctatagggacatgacgaaccctgctgaccctgatatcccgtgacacgaccatgataacagaagctattcccagcttggagaaaggggtatgcgcgaagatagggactaatttcgaaggtctctcggagcccctcaaaaaacaaatctatgccgctcccgcaccggcgggcttcgctataggggccttaccataaagaggtgggtccccca

SEQ ID NO: 9913 - DNA, 492 bp, Zea mays
  Clone ID: MRT4577_109039C.1
gatttccacaggaatggatcacttcatgatctactccacctttcagatgagtacagcaagccacttagctggaacactcgtatcaagatcgcactcggctctgcccgtgcactggaatgctggacttgcaagctttattcctgatgctgaattccaggcagcagaacaaagtgccggatacactgccccagaagtggacatgaccggtcagtacaccctcaagagtgatgtctacagctttggagttgtcatgcttgaactattgacaggacgtagaccatttgacagctctagacccaggtcagagcagtcacttgtgcggtgggcaacaccccagctgcatgacatcgacgcattggacaggatggtcgatcctgcactcaagggtctatacccagccaaatctctatccagatttgctgatgtccttgccctgtgtgtccagcctgaaccagaattcaagccaccaatgtcagaggtggtgcaagcatt

SEQ ID NO: 9914 - DNA, 379 bp, Zea mays
  Clone ID: MRT4577_109040C.1
ggaaagacggacgccggcggaccggccggaatcccgggcgacccacgttcctcccacgccagaccaacagggggagggggggggaaacacacaagacgcccgaggacacccacaaccacaggaaacgagcagaggcccagaggaacaaacggcgggcagggccaaccctcaaaagggacaacaagagctgccaaccggcggagaaaacaggcgacaaaggcgcatcccgcagcatgaacaccaggacggccggccgcgggcggaacaaggacccccagaaaacgacgggcgggccacagaagctggggaaaccgagagctccaagcgacacgaaggcggcgcaaaacgaaccggaagggatgacccgcgaggaaacaaa

SEQ ID NO: 9915 - DNA, 385 bp, Zea mays
  Clone ID: MRT4577_109041C.1
ctctgctcctgctctctctctctctgggcgtggattgggcgaccgccgccgcctcccccgggtcttcgctgggcccgtcgccggcgacgagcacccaccaggagcactctaccatcaataaactcattagcaaggtggtttggagagcctgtaaggcctgctattctgcaaaccgaggcttttcttacaaatgcaaaaggatatccttgtttatcaaagcgccatcagagtctgctaactggattttttaaacattctgttcaggtgttgatggttgtgggagcaggacggggacctctagtatgagcatcggtgcaggctgctgaagaaactggtcgaaaattaaaagtatatgatgttgaaaaaatcctaacgcggtattact

SEQ ID NO: 9916 - DNA, 2393 bp, Zea mays
  Clone ID: MRT4577_109042C.1
tcagtcggatttggaggagtcgaataaacaaggaaactcctcccggcccagaaagcacttcacttgcaacagtccccgtcagggagggagcattgctgtgcgggatggcgataaggaagagcggaggcggtggcggggtggggggtgtggcgcggcggctgctgcttctggcctgctgctgcatttggcctggtggacggatcttcactgctgcggacactgaccccaacgatcttaatgtcctcaatacgctcttcaccagtctgaattctcctgggcagctcagagcttggcgggcgaatggcggtgatccttgtggccagtcatggcagggcattacctgctcaggatcaggggtcactaaaatcctattaccaaacttgtcactcgccggaaatctggcctacaacatgaataacttgggttcattagttgagcttgacatgagccaaaataaccttggcggtggaggccaaatacagtacaatcttcccaatatgaagcttgagaaactcaatcttgcaggaaatcaatttggtggaaatttaccctactcaatttcgacgatgcctaatcttaagtatttaaaccttaatcataaccaactacaaggaaacatcactgatgtattttccaacctttatagtttgtcagagctggatctctcctttaattctcttactggtgatctaccacaaagtttcactggattgtcaagcctgaaaagaatgtatttgcagaacaaccaatttactggttatatcaatgtcttagccaaccttccccttgaaaccctgaatgttggaaacaaccatttcactggttggattcccagtcagcttaagaagataaacaatctacagaccgacggaaattcttggagcacaggaccagcgccacctccacctccatacacagcgcctcctcctccaaaccattggaatggcgcgggtcagaatgctgatggttcatcaagttctggtggaagatctgggataggtggtggaggtgtagcaggaatcattatatcattgctgattgttggatcagttgttgcattttttctaatcaaaagaagaaaacgcaaagctattatggaagaacaatttgaacagcatcagccgttcacttccttcccttcaaatgaagttaacgacatgaagcctatctatgagtccaccacagtagacatagagtctttggcttcacctgcttcgattaatctgaaaccacccccgaagatagaacagaacaaatcatttgatgatgatgatgatttttcaaacaagactgctgcaaatagaagtaatataacacctatgaaggcaactgtttattcagttgcagatctacagatggcaacagatagcttcagcttcgataaccttgttggagagggtacttttggacgtgtttacagggcacagttcaatggtggaaaggttctggccatcaagaaattagacattactgtgatgccatttcaatcgtctgatgactttgctgaactggtctcgaacatttcaaaattgcaccatccgaatctgaatgagcttgtaggctattgcatggaacatggccagcacttgcttgtgtatgatttccataggaatggatcgcttcatgatctacgccacctttcagatgagtacagcaaggcacttagctggaactctcgcatcaagttcgcactcggctctgcccgtgcactggagtaccttcatgaaatatgttctccatccatcatccataagaatttcaaggcatcaaatattttgctggactcagaattcaatccacacctttcagatactggacttgcaagcttcattcctggtgctgaattccaggcagcagaacaaagtgccggatacactgccccagaagtggacatgaccggtcagtacaccctcaagagtgatgtttacagctttggagttgtcatgcttgagctactgacaggacgtagaccatttgacagctctagacccaggtcagagcagtcacttgtgcggtgggcagcacctcagctgcatgacatcgatgcattggacagaatggtcgatcctgcactcaagggtctatacccagccaaatctctatcccgatttgctgatgtcctcgccctgtgtgtccagcctgaaccagaattcaggccaccaatgtcagaggtggtgcaagcattggttcgacttgtgcagagggccaacatgacgaagaggatgcttgatggaggagatacttctcgtggaccagatgatcaggaccaatatttcatatgacaagctgaactcgagcttttcagctacctctcagattgtatttatctcgtctcgttccactagcgcccggcagagacataatcacacaagtggaagagacagaactctgtc

SEQ ID NO: 9917 - DNA, 2562 bp, Zea mays
  Clone ID: MRT4577_109043C.1
gtggtgcgggtgcggcggctgctgctgctgtccctgcactgctgcagcagcatttggccaggcggacggatcttcgctgctgcggacattgaccccaacgatcttaacgtcctcaacacgctcttcaccagtctgaattctcctgggcagctcacaggttggcaggcgaatgggggtgatccttgtggccagtcatggaagggcattacttgctcaggatcaggggtcactaaaatccaattaccaaacttgtcactcactggaaatttggcctacaacatgaataacttgggttcattagttgagcttgacatgagccaaaataaccttggcggtggaggtcaaatacagtacaatcttcccaatatgaagcttgagaaactcaatcttgcaggaaatcaatttggtggaaatttaccctactcaatttcgacgatgcctaatcttaagtatttaaaccttaatcataaccaactacaaggaaacatcagtgatgtattttccaacctttacagtttgtcagaactggatctgtcctttaattcccttactggtgatctaccacaaagtttcactggattgtcaagcctgaaaaaagtgtatttgcagaacaaccaatttactggtaatatcaatgtcttagccaatctcccccttgaaactttgaatgttgcgaacaaccatttcactggttggattcctagtcagcttaagaagataaacagtctacagactgatggaaattcttggagcacaggaccagcgccacctccacctccatacacagcgccgcctcctcctccaaaccattggaatgctgatggttcatcaagttcatcaagttctggtggaagatctgggataggtggtggaggtgtagcaggaatcattatatcgttgctggttgttggatcagttgttgcatttcttgtgatcaaaagaagaaaacgcaaagctgctatgaaagaacattttgaacagcaccagccattcacttccttcccttcaaatgaagttaaagacatgaagcctgtctacgaggccaccacagtagacatagagtctttggcttcacctgcttcagttaatctgaaaccacctccgaagatagaacgaaacaaatcatttgatgatgacgatgatttttcaaacaagcttgttgcaaagaaaagtaatataacacctataaatgcaactgtttattcagttgcagatctacagatggcaacagatagctttagcttcgacaaccttgttggagagggtacttttggacgtgtttacagggcacaattcaatgatggaaaggttctggcgatcaagaaattagatagtactgtgatgccatttcaatcatctgatgactttgctgaactggtctcgaacatttcaaaattgcaccatccgaatctgaatgagcttgtgggctattgcatggaacatggccagcacttgcttgtgtatgatttccacaggaatggatcacttcatgatctactccacctttcagatgagtacagcaagccacttagctggaacactcgtatcaagatcgcactcggctctgcccgtgcactggagtaccttcatgaaatatgttctccatccatcatccataagaatttcaagtcgtcaaacattttgctggactcagaattcaatccacacctttcagatgctggacttgcaagctttattcctgatgctgaattccaggcagcagaacaaagtgccggatacactgccccagaagtggacatgaccggtcagtacaccctcaagagtgatgtctacagctttggagttgtcatgcttgaactattgacaggacgtagaccatttgacagctctagacccaggtcagagcagtcacttgtgcggtgggcaacaccccagctgcatgacatcgacgcattggacaggatggtcgatcctgcactcaagggtctatacccagccaaatctctatcccgatttgctgatgtccttgccctgtgtgtccagcctgaaccagaattcaggccaccaatgtcagaggtggtgcaagcattggttcgacttgtgcagagggccaacatgacgaagaggatgcttgatggggatacttctcggcgaccagatgacctggaccaagatttcatatgacaagctgaactcttgtcagattgtatttatttcgttcgactagcggcccagcagagacataatcacacaagaggaagaaacagaactctgtcagcttcgccagtacataatcacaagtttttcttggtagcaaagttgtgctatatggttgtactgtgtctacaaaatagtaccttgatcttacgctaatggcatattgttataattctttggtaacttatatgcaaatgccccagataaacaaaactatggtgaagtgtgccgaatgttaaaataactgattagtccagtactgctgcatcaactgaaacaagttgcacagtggaaatatttatcttggtccctcaaaaaaaaaaaaaaaaaaaaaaaaaaaaaaaaaaaaaaaaaaaagaaaaaaaaaaaaaaaaaaggccccta

SEQ ID NO: 9918 - DNA, 359 bp, Zea mays
  Clone ID: MRT4577_109044C.1
tctcactcatccgtctccacatacccccttttacgtttcgtccaccaccatctacctatcggaccagtacaatcttcaagaacaacctcattaacctcgaccacatctaccctcatccaccttcactatctcaagcaccataaccattccacaaccttcacttaccccaccttcttacactaacacaccatcactcttcaacccctaccatcccttcttcttcagaaaccacaacttccactactttcacaatctccaaaacattttctactcccacaatctcaacatccagcctcatccctcaatccttcccaccgacactactttttaatccttcaactacaaagacccacatatct

SEQ ID NO: 9919 - DNA, 244 bp, Zea mays
  Clone ID: MRT4577_109045C.1
tttttggtgtggtttttttttttttttttttttttttagaacaagaaaaccggacacttagtggaatgcctcctctatatcctgtcagcatccctgaatgcgctatatagctgggggattccactgggggaacttggcccttcaccatattttatcgatttgggcacatttgccttaccaattgacttgataagcaaagaactttgcatacatataggcgattcggactctagccgaattccgg

SEQ ID NO: 9920 - DNA, 206 bp, Zea mays
  Clone ID: MRT4577_109046C.1
gccggttgggggttggttttcttctttttctgggcgcggggtcccgtctgttggggcgatcccccgctacgtgcaccatgtcccttttgtgttctttttgctgcctgggtgccggcttgctctatgtcggcaccttgtgcggctcccgcgctctagagacttgggggggggtggcggcgatcgttgccatgcgggatgcgcctaag

SEQ ID NO: 9921 - DNA, 1331 bp, Zea mays
  Clone ID: MRT4577_109047C.1
ctatagaagaactttcattaactttttaaactaatttttcgattaacctgtgtaataaatattatgcctagtcaaaccatccatccatccactaacacgaataacaaatttgcttaccctgactactttgacacgatagtcggaagcacgacgacggtttttcgttgatgtcttcgatcacacatgtctggcgagcgatgcacacaacttctactcttggccgtatactcatggaattcctttttgtcgagctggtgacgcgtggccagcacaagagcgtcttcagggcttaggacttaacgtagacgaggatggcgatcaacaatatcgacatgccagcgcaacaatttccatttgacgacgatgatggcagtacgactcgttcgagttgaggcgagcgcgatccaggtatcatagcaatatgccgataaagccacgacgacacaatgaggtgaacacggcaacacacggcccaacgggtaaaaagggcgcgacggctggcgagctggactagcttagatacgaacagccgacgtgataaccatggcgaataggaaaatcgacaaccggcgaaaccgatagccaaatataatggcacagatcgacgacgtgagactcgatctggtgagcatgacgcaagggatcgaagctgctgcttcgacatgaattacatgctgtcgagcacgacagaggccggggagcaggaacgctgtgcagagaaacccacggctgcacgcaggggtgaacttggctgggcgcagggacgcgaatccgagcaagcgtcgactaggagcaggtgttggcgaaatggaatccgagctaggtcgacgactggcgaccactacgaatgggagttggggtgagctgcgcgcgaggaagcaccacgacggggtcacggcagggaacgacggaacgctacgcgcgcgacgaggaagcaggaagccacgacaagggagctcggtggccatcgccatggcgacgagcgagcagaggagaagtaccgcgcgcggttggggaaaaagcagaggaactcgagttcttgggagaggctgggcgtgcgtcgcgagcagagggagctgggctgctgagcaccagagacccgcgcgaggagctaggcgcgcgtctgggaaagcgcgcagggagagagacgaactggagatggaggctgatcctaggaacgacggccacgggcaagcagagccgggcgccatgggagggcttcggcaggggaagaaacgcgtgtgggagctccacggcgcgcaacaggggaagaagacagcgtcgctggaaaaatctaagtggagggcggcggctcgcgatctaaaactagt

SEQ ID NO: 9922 - DNA, 608 bp, Zea mays
  Clone ID: MRT4577_109048C.1
ggcccaaaggggttttaaaataccaaaaaacccaaggttttgggccggggacccccaaaaaattttccaaaccttttttaccggaaacttggcaaaaaaaaaaaaccaaagtcttggggggggggcatccaaaattcggatctaggaccccaaagggaaaaattttggggaggaccaactgggcagtccaacaaactttaaggaaacccttctccctttgaaaaaaaaaaggccggggaaaaaaaaaaaaacgtttccccaaacaaaaacaattttttttgggacgggctggcacctttgggaacccccaacccgggacccccttgggggcagggaaaccatcggggccttaaaccggcccggagggaaaggcgcccaaccccccataaaaagttttaaaccaggagggggggccccaagggattttttagggggcggcaaaagccccaaaggtttttccccccaaaaaagggccaaaaaaccggggggtgttttttaaaagtttaaaccccaggggttccaaggggcccgttttcgccacccacaagaggttgggttaaaaggccaacacctttggccctgaaaaacactggcaaaaaaggggggcc

SEQ ID NO: 9923 - DNA, 680 bp, Zea mays
  unsure (1)..(680): unsure at all n locations
  Clone ID: MRT4577_109049C.1
aattcggcacgaggctggttcgtgctcctgctccctcgcttggcttggccactgcccccgccccgctagtcgcactcgcccaccgcaaccgcgcgagatcccccttctcccctgcgcccgcctcccggcacccggcgcggccgcgtcagccctgccctagggaggagctgaagacttacccgcagatgcgtcccctcctggcccttgccgccgcgtgcgccctcctcgtggccgccggcgccgcggcggcggagcaggcgaagaactccaccaacaagttccggcagcgcgaggccagcgacgacatgctcgcctacccccacttagatgaagatgctttattgaaaaccaaatgtccgaagcatgtggagctgagatggcagactgaagttagttccagcatttatgcaactcctttgatcgctgatatcaacagtgatggaaaattggaagtagtggtgccatcatttgttcattacttagaagttcttgaaggcactgatggagacaaactgccaggatggcctgcatttcatcagtcaaatgttcattcaagtcctcttctgtatgacattgacaaggatggtgtacgggaaatagctttggctacttacaaacgtgttgtaaatttctttaaggtgtcaggttatatgatgatggacaagcttgangtacctcgt

SEQ ID NO: 9924 - DNA, 871 bp, Zea mays
  Clone ID: MRT4577_10904C.1
cattgggtacctcgaggccggccgggaagtgaggaggcataataatccagtagcgatctttcggttttaccatggcagctacgacgagcgctgccagtgccaggggcttgctgctctgcgtgttggtggcctttctccaccgcctccagtttcagatcccgcctgtagcagtagcagctgcgacgccgaagaacaaaaccgagagccgagacgggcacgggaagacgctcagcttcacgctgtaccagcacgagaccatcaacaggaccggctacatcgtggtggacggcgtcgcgggcgcgggcgtcagccagaccaccacgcccttcggcaccatctacgtcttccgcgacgacctgacggtgcgcgcggacagggactcccgggtggcgggagtcgcggaggggacctccatcaccaccagcctcgacgggctgcagagcatgtcgctggccaagatcacggtccaccaccgcggccaccggggctccgtctcggtccttgggggcacctacaacaccaagccgtccgactacccggtggtgggtggcaccggcgacttcgcgtacgctctgggatacgtccggtcctcgccggtggacttgcgaggacgaacggtgacgtacaagatggagcttcacttgtactggcctccatacgcccactacgctcccgttccacgtaaagcgtgaattatagctaccactgcaacgtcctacaagtgtgctcattttattattattttgtcgtacacggcgtgaatcttttatctaattttagagcgcacaataaagttgaaaatagtttggtaacattttcttatatataaaaccatattttccattacaaaaaaaaaaaaaaaaaagcggcc

SEQ ID NO: 9925 - DNA, 1448 bp, Zea mays
  Clone ID: MRT4577_109050C.1
gcgcgtgtataaacactggacgcgcccgcgcgtgcgagaggcccaagaaacccacagcagccgctagccgtacgatggcggacaccggtgacgtcgccgccgccgccgaggcctcggcgcgaccggcgggcagcagcagcacccagccgctggcggggcgcgtggcgatcgtgacgggcgcgtcgcggggcatcggccgcgccatcgccacgcacctgtcctccctcggcgcgagcctggtgctgggctacgcggcgcgcgccgacgaggcgggcgcgctggcggcgtcgctcccgcgcgcggtggccgtgcgggcggacgtctcggacgaggccggcgcgcggtcgctcttcgacgcggcggacgaggccttcggcggcgcgcacatcctggtggccagcgccggggtgctggacgacacgtaccccgccgtggccggcaccgccaccgaggccttcgaccgcgtgctcgccgtgaacctgcgcggcgcgttcctgtgcctccgggaggcggccaaccgcctccgccgcggcggcggcgggcgcatcgtcgccgtgacgtcgtccgtggtggggagcctcccgccgcggttcggggcctacacggcgtccaaggcggcggtggaggcgctggtgcggaccatggccaaggagctcgggggcacccgcgtcacggccaactgcgtcgcgcccggggccacggccacggacatgttcttcaagggcaagagcgaggccatggtgcgacacgccgtggagacaaacccgatgcagaggctcggcgagcccggtgacatcgcgccggtggtcggcttcctgtgcaccgacgccgccgagtgggtcaacggccaggtcatccgcgccaacggcggctatgtgtgatgtgatctttagctttcacagcttcttggtgtccatcgtcgttttcctttgccacgcactgtttcgccatcttgttatctttacctttaaccttattatcattctagcacaaattcataggaatattttctcgaggatcgttgggcggccggcttgacggccttgacctcggctagtggtcattgccataatgccaggtcagccttcaatcatgacagaaatagctcgcccatccaggatccaacatagaatctaagatcatctcaatatatgtaacatcacaagtgtaattatacttagagcaaggttatgtagacgggttgaagatatgccacgtcagatttatgatgatatagaagaaatagaaatagagagaaaatggaatcggactatttactaatagccagctctcaaagcaaggtgctcagtggtagccagcttaaaataaaatgctcacaaactccaagacagattgtaagaggagacaagccaagtattaaatgtacagcttgtgttagtgtatgactagtatgtgacacggcaataatacaaagcccgttataggtt

SEQ ID NO: 9926 - DNA, 437 bp, Zea mays
  Clone ID: MRT4577_109051C.1
acccacgttttctatttattcaagaattacgcttggtgccgacggggaactttaaacggcctatgggggtctttccaggcatagagattgacactagccaggcttcgcactggaactgacttgagggatgcacactaactggtctgccagctggacactaaaatttcactggatatggctagccaaatatgtgaaattttaagaaagccaggttgcacatatctcactcaggtatgagcttcaacgcctgtgcctggaaagaacctactttgcaactccaccctgggcttagaggttttttacaaggggaccccccgagttttcacgaagaagatatgcggagaacttggaatatacaagaagccttttaacttcataaattagaacttgggaatggccaatctgacctctcagaagaggcttaaatcgttggaaat

SEQ ID NO: 9927 - DNA, 413 bp, Zea mays
  unsure (1)..(413): unsure at all n locations
  Clone ID: MRT4577_109052C.1
cgagacgacgaagcgaaccaagaaggccggaanngttggcaaananggaaccaggnagggggcnagcnggcgnaagcaaancaagaagagggaggnancncagcaccccaagnanncccgcgagccccgngggaagcccgcggggaagaggaaagcgcncgcgacccgccgacgccaggaccgcgggaaggcccaggccggnggggcncacaccacgaacaccgcnagngcggccaccgccacgagcacgacccgccccccgagggagcagaccgaagttttttttttctcccgcccccccccccccgggnccactatattggntgcgcagcccagacagcactccagcacaaatgggccatgctctaggatccccaaaggctgcgcgccaacatccccacccgtccaccgcc

SEQ ID NO: 9928 - DNA, 340 bp, Zea mays
  Clone ID: MRT4577_109053C.1
ttggtcccaagccggaaggtatccttcaaggggaggcttactaccgacctcagggggcttttcaaacggccccaccctgctccaagcccctctccttcacctctatgctaaactactcctccgaacagttcactaccccttcctacaccagcgccatcatcaccaactatccaatctgcataaacccccaccaaaccgcaggcaacaactttctaaaacataccacgcacatccttttcatccctcgccatataattggaactacagacaagaatttccagtagacgatatatacattccaaagcataactagcaaaacttgagagacataaagatttta

SEQ ID NO: 9929 - DNA, 2167 bp, Zea mays
  Clone ID: MRT4577_109054C.1
ggagttgccatgatttttttttacttaccattctgcaatcatccttgcttccaaacacagcacgctaatacaggtgcgtacttgtgcaggactggtagagggaaggtttccttggcagccatcactctagatgattaccttccaatgcgaagcactgaagtgaagaaccggtaacttgtttatttctaaaagaatgctgacaatactatttcatctgtatttttggcagtatttttagccttatgccactcgacaagatgttagttttggtgaaatttgccatatacatccatctaatgagaataaatcgcttgcgtaccttatattgtactgatcagtcttttttgattatatattatccctcaaattctgaactttgaaaattaatacaagctgaaaaacattttagacagccatcagttgggagccaggagccagcttttccctcatccaaaatccttgtagaacagttgcaattgatccttgttgcttaggtaaagcaggttcaggatatagctagtgtgaaatcatttcatggagttttttgaacttgagatcaataagttgaagtctgaaacttgaaccatttactcgatagagtaacacaatctgctgttattttcattaagctaatcggtgaagcttgtgtaattatgttgaaacagcaattgtctatgtaagattacaaacactgcagctagaataatctaatcagaaaataatgtgaattgctttgtctagaaaagaatattactagggcttgtttgttttgatcttaaaccatgtggattgggtggtattgagtcggtttaaatccatagcaagtcaaaatacatctcaatcccatccaatccacatggaatgaaaataaccgaacaagttctaaatatatgcttcgttgaatggtaattctactgcaatttgagtctgttctgcttaatgaatgaacatgtacgttctttggcaactgcagttggtatttctctattcatggttttatagcttagtagtcaagtactcaagtgtatcttattcttagttttgtgcacaagtatttgaaggctgtgattcaagttatcttctgctttggtctcatcttcatcttgtctgagatgcaggacatcaacagatgacatcacaaggctgagactaatcacagcagttaaaaccccctatttgccagatgggaggttcgatctggaagcatatgattctctcataaacatgcagatagagggtggtgccgaaggcgtaatagttggaggaacaacaggagagggtcacctcatgagctgggacgaacatatcatgctcattgggcacacagtgaactgctttggctctagaatcaaagtgataggcaacacaggaagcaactcaaccagagaagccgtccacgcaacagaacagggatttgctgttggcatgcatgcggctctccacatcaatccttactacgggaagacctcagctgaaggaatgatctctcatttcgaggctgtcctcccgatgggtccgaccatcatctacaacgtgccatccaggagcgcccaggacatcccccctgaagttattctagcgatttctggctacacaaacatggcgggtgtcaaggaatgtgttgggcacgagagggttaagcactacgctgacaaaggcataacaatttggagcggtaacgacgacgagtgccacgattctaagtggaaacatggcgctactggggtcatttccgttaccagcaaccttgttcccgggctcatgcacagcctcatgtacaaaggcgagaacgccacgctgaacgagaagctgtcgcccctgatgaaatggctgttctgccagccaaatcctattgccctcaacactgctctggctcagctcggcgtggcaaggcctgtcttcagactgccgtacgttccgctccctcttgaaaagagggccgagttcgtccggattgttgagtcaattggacgggaaaatttcgtggggcagaaggaggcccaggttctagatgatgacgatttcgtgttgatcagtaggtactaggaaaatgagtttgccagtctatgtatcttggcgaataaactagtagtttgtaccttgcgttcagacttcgttctgttgttcatcagtcgttgggttcgtctatctatttattaattgccct

SEQ ID NO: 9930 - DNA, 335 bp, Zea mays
  Clone ID: MRT4577_109055C.1
agacgcgcccagcccagcgaacgggcgaccacacagaacgacaacggccgcgacagggcggaaccagagcaccaacacccgcgggcaggccccggccggccgagccgccgccagcaacgccggcaggcgacaacccacgcgccgcaccgccaagagaggacccagaggacacgacacagacccggacgcaccaaagaccggggaccgcgaccagagcagagacggcggcaccggacaggaaaccgccccgggaacgaggggcgggacaccgcgcgccccgcggcggaccgggagacccacgcgcggccgcgggggccagaggggacacacacccg

SEQ ID NO: 9931 - DNA, 1268 bp, Zea mays
  Clone ID: MRT4577_109056C.1
ctccatttcatttccgttccaggtctcctgtttccatcctcttccacggttccacttccacccccatctcctcgccctcggcaagcccagcaaccccaatccccaatcccgtccgcttctttccccgtccccgaccttgccgaggaacctcccgctcccaaatcctagcctctcctccctcgccgctcccctccccatggaggacgaggacgccggcctcggcgacgggggcgaggcctcccctccgcaccatgccgcggcgtcgggcgaccgggcgcgggacttggcggcgtccccgaccagctcgcgctccgtgacgcagacggtgaacgggtcccaccgcttcgtgatccagggctactcgctcgccaagggcatgggcgtggggaagcacatcgccagcgacaccttcaccgtcggcggctaccagtgggcgatctacttttacccagacgggaagaaccccgaggacaactccggctacgtctcggtcttcatcgcgctcgcgtccgacggcaccgacgtgcgcgcgctcttcgagctcacgcttctagaccagagtggcaagggcaagcacaaggggctataaaaggttctttcggcgtaatgctcttgagcaatcagattttcttaaagatgattgcttgaagataaactgtactgtgggtgttgtagtatcaactatggattattccaggccacattcaatagaggttccagagtctgacataggctatcattttggaactcttttggacactctggaaggtgtagatgtcatttttagtgtagcaggagagaagtttcatgcccataagttggtattggctgcccgatcttccttttttagatctgaatttttcgaccatgaatctgatgaagagaagaacgaaactggtacaggggatgaaatcaaggagatcgttattgatgatatggatcctgtagtgttcaaggcggtgcttcactttatgtacagggacaatcttgttaatgatgatgagttgatggcatcaagctctgactgctctatatttgatagtttagctgggaagttaatggctgctgcagacaaatatgagttgccaaggctaagattgttgtgtgaatcttacttgtgcaagcatgtttctgtaaactccgtggcaactactctagcattggctgatcgataccatgctatcgagcttaaatctgtttgcctaaaatttgctgctgaaaacctttcggggtataagacttacaacatgaaaatatgtttaaccttc

SEQ ID NO: 9932 - DNA, 1902 bp, Zea mays
  Clone ID: MRT4577_109057C.1
ctcgaggccggccggggctctgtgtctccgcataaaacccttagctgcctcgcaattctttttttttttcccgttcaccggagaaagaatggcgctgccgacagctaacccgggcttccgtctcggctgccaggagtctcccgcgatggaattgaggtcggcgccgcggatggcactgcgacgtcccggcgcggtctccttgccatgatttttttttacttaccattctgcaatcatcattgcttccgtcgaggccggccgggacagctaatctgtgagcctcgtctactgatagtcctgtcctgtttcactctcgccagccaaagacgaccacgccctccgtgctccagccattccccatgatttcgccgacgaatctcctcccggcgcggaagatcacccctgtctcaaatggcggcgcagcgacggcgagcccctcttctccctcggtggccgcacggccacggcgactcccttcaggcctccaatctgtgactggtagagggaaggtttccttggcagccatcactctagatgattaccttccaatgcgaagcactgaagtgaagaaccggacatcaacagatgacatcacaaggctgagactaatcacagcagttaaaaccccctatttgccagatgggaggttcgatctggaagcatatgattctctcataaacatgcagatagagggtggtgccgaaggcgtaatagttggaggaacaacaggagagggtcacctcatgagctgggacgaacatatcatgctcattgggcacacagtgaactgctttggctctagaatcaaagtgataggcaacacaggaagcaactcaaccagagaagccgtccacgcaacagaacagggatttgctgttggcatgcatgcggctctccacatcaatccttactacgggaagacctcagctgaaggaatgatctctcatttcgaggctgtcctcccgatgggtccgaccatcatctacaacgtgccatccaggagcgcccaggacatcccccctgaagttattctagcgatttctggctacacaaacatggcgggtgtcaaggaatgtgttgggcacgagagggttaagcactacgctgacaaaggcataacaatttggagcggtaacgacgacgagtgccacgattctaagtggaaacatggcgctactggggtcatttccgttaccagcaaccttgttcccgggctcatgcacagcctcatgtacaaaggcgagaacgccacgctgaacgagaagctgtcgcccctgatgaaatggctgttctgccagccaaatcctattgccctcaacactgctctggctcagctcggcgtggcaaggcctgtcttcagactgccgtacgttccgctccctcttgaaaagagggccgagttcgtccggattgttgagtcaattggacgggaaaatttcgtggggcagaaggaggcccaggttctagatgatgacgatttcgtgttgatcagtaggtactaggaaaatgagtttgccagtctatgtatcttggcgaataaactagtagtttgtaccttgcgttcagacttcgttctgttgttcatcagtcgttgggttcgtctatctatttattaattgcctactttggccgcattgtataatgtatatgtatcgcgtttatagttttttacgtgaattgacctaggtacaaggaaaaaatgatcacttcttttttggctaatgacagaacctggtgacaattatatataaaaaagatagcatcatgttatgagaatttttcagttttttgtaaagaaataaaacagctaatcctgattttgctttaaaaaaaaaaaaaaaaaaaaaaaaaaaaaaaaaaaaaaaaaaaaaaaaaaaaaaaaaaaaaaaaaaaaaactcgag

SEQ ID NO: 9933 - DNA, 1042 bp, Zea mays
  unsure (1)..(1042): unsure at all n locations
  Clone ID: MRT4577_109058C.1
ccggccgggatctcctcgccctcggcaagcccagcaaccccaatccccaatcccgtccgcttctttccccgtccccgaccttgccgaggaacctcccgctcccaaatcctagcctctcctccctcgccgctcccctccccatggaggacgaggacgccggcctcggcgacgggggcgaggcctcccctccgcaccatgccgcggcgtcgggcgaccgggcgcgggacttggcggcgtccccgaccagctcgcgctccgtgacgcagacggtgaacgggtcccaccgcttcgtgatccagggctactcgctcgccaagggcatgggcgtggggaagcacatcgccagcgacaccttcaccgtcggcggctaccagtgggcgatctacttttacccagacgggaagaaccccgaggacaactccggctacgtctcggtcttcatcgcgctcgcgtccgacggcaccgacgtgcgcgcgctcttcgagctcacgcttctagaccagagtggcaagggcaagcacaaggtgcactcgcactttgaccgctccctagagtccggaccgtacactctcaagtaccgcggatccatgtggggctataaaaggttctttcggcgtaatgctcttgagcaatcagattttcttaaagatgattgcttgaagataaactgtactgtgggtgttgtagtatcaactatggattattccaggccacattcaatagaggttccagagtctgacataggctatcattttggaactcttttggacactctggaaggtgtagatgtcatttttagtgtagcaggggagaagtttcatgcccataagttggtgttggctgcccgatcttccttttttagatctgaatttttcgaccatgaatctgatgaagagaagaacgaaactggtacaggggatgaaatcaaagagatcgttattgatgatatggatcctgtagtgttcaggcggtgcttcactttatgtacagggacaatcttgntaatgatgatgagttgatggcatcaagctctgactgctct

SEQ ID NO: 9934 - DNA, 440 bp, Zea mays
  Clone ID: MRT4577_109059C.1
tcgaaatagacttccaccgtcctatcctctccgcaagccgcatacggcgttgcctcctgatctccccagtcgagtcggtacacctgcggccgcgtttctagagggatgggttccacttgctcagtagcaagctgcacacagcaccaaatgagttcgtttgctggtaagaatccagttaatcttctgtcatctttttgaggcgttcttcgctgttgggaatttacaccaaactaaaaatcggaagagcattttaagtgtaatgtcattgtcaaattggttgtatagaaacatagctaagatgttctaaatgacatttacgttaaaaggaatcttgtatgtttttggatgaaatcaaacaagttggtgaacattctgtactttcatatcctttccccctcaaagaaaccccttctgttaataaaaataaggacttcttgctc

SEQ ID NO: 9935 - DNA, 338 bp, Zea mays
  Clone ID: MRT4577_10905C.1
tcgaaaatttagaagatcatagaattatatttagaataccaatccctcagcgaagagcgcagcgttgaaacccacagctgagttctacgactcagatgcagtcaataaaaacccgaatagcccaaaagattaggagacatgtcgatgcagcttaagaagtgtggatataggcatggaacacgtgctcatgcaatacgccaacggttccgacaaactatgagcttgaggccatttcacgtcctttcataaacctcggctaatgcctgcgcgcgcagggtatctatggttccttttttctagcatgaatttacgtgaagtgtctgcacatgtagagggag

SEQ ID NO: 9936 - DNA, 606 bp, Zea mays
  Clone ID: MRT4577_109060C.1
cccctcttcgagtttttttttttttttttttttttttttttttttttttttttttttttttttttttttttttttttttttttaaagccaaaaaacaaacaacacattggtttttttaaaaaataaactaaaatcaccaaacccgcccttgacccaaaattttggacaaaaaacaaaaattttttggcccccctttcagcacagggggggggaattacaacccgaggggggggaaaggggggctaacagttgactcgtttttactacccaaaaaaaagggaaaacgtttttatacccgacctgacaaaacgacccatttttatcacttccatcctctgcaacaggggggacaaaaaacaaaacccctacagaaaaggaatccctagcaaaagggacgggtgttaccattttggaccctcgaaaaaaaaaacacagaacacacccccccctatttggtggcatttgagtatgaacaggggggacctaaggcaaaaccctggggtttgccaacactgggttcggttcttcaacttcccagggcatttggaggggaaggatttggaaagcactgccaacggggactggggagttttctttggccttttg

SEQ ID NO: 9937 - DNA, 401 bp, Zea mays
  Clone ID: MRT4577_109061C.1
cattgggtacctcgaggccggccgggatgcgactgccacggtacacggccaatgaagttgcagttgcaattgcacggcagcgattgccagagccggcctcaatgagccacacaaatgtcgccatcctttccccaccatccatatcttcccattcatggacgacgaacgtctccaccctcaccgctctcgccatcatcgtgagcaccgtctagcacgccaccatacaggagaggggaaggggataggttggtcgggacgaaatgcgctgagcgggacccgtgatagaggagggtgctatggtcagcctctgcactctaacctctcccttcccacgatcgctgtgagagggtgtaggccgtgttccgtccgcccgcatgcagacgcgatactggccatgcgtt

SEQ ID NO: 9938 - DNA, 2363 bp, Zea mays
  Clone ID: MRT4577_109062C.1
gtagcaacccacccttgtcgtccgcgtcctccacgccctcgtcggctcgtcctcgccgtcctcctccacaccgcgcgcgcggtggtgttgacccacccacccgttcctctcccaccccatcaccactgcacgcggcgctgcgtaagtccccaggacgggtaccctgccggaagtctcctgtttcagctctcttcccttcactccatcggctcgtctgtacagcatcccgtgtagcgtgtatccacctcgtcgccaccccaatcctcgttccccaatcccgtccgcttctctccccgtcccttacctcgcccaggaggggagcctcccgcttacaaaccctagcctctactcctctgagcttccaccgctccgctccccatggaggacgaggacaccggccccggcgatgggggcgaggcctctcctccgcaccacgtcgcggcgtcgagcgaccgggcgcgcgacatggtggcgtccccgaccagctcgcgctctgtgacgcagacggtgaacgggtcccaccacttcgtgatccagggctactcgctcgctaagggcatgggcgtggggaagcacatcgccagcgagacattcaccgtgggcggttaccagtgggcgatctacttctaccccgacgggaagaaccccgaggacaactccacctacgtctccgtcttcatcgcgctcgcgtccgacggcaccgacgtgcgcgcgctcttcgagctcacgctcctcgaccagagcggaaagggcaagcataaggtgcactcgcacttcgaccgctccctagagtccgggccgtacaccctcaagtaccgcggatccatgtggggctacaaaaggttctttcggcgtactgctcttgagcaatcagattttcttaaagatgattgcttgaagataaactgtactgtgggtgttgtagtatcaactatggattattctaggccacattcaatagaggttccagagtctgacataggctttcattttggaacgcttttggacactcaggaaggtgtagatgttatttttagtgtagcaggagagaagtttcatgcccataagttggtattggctgcccgatctcccttttttagatctgaatttttcgatcatgaattgggtgaagagaagaacggaactgatacgggggatgaaatcaaagagatcgttattgatgacatggatcctgtagtgttcaaggctgtgcttcattttatctacagggacaatcttgttaatgatgacgagttgtctgcatcaagctctgactgctctatctttgatcgtttgtccgggaagttaatggctgcagcagacaaatatgagttgccaaggttaagattgttgtgtgaatcttacttgtgcaagcatatttctgtaaattccgtggcaactactctagcattggctgatcggcaccatgctatggagcttaaatccgtttgcctcaaatttgctgccgaaaacctgtcagctgtgatccggactgagggtttcgactatctcaaagacaactgcccatctctgcagtcagagatactgcggacagttgccgggtgtgaggagccatgtagcagcggcttgaaaagccagagcgtgtgggcgcagctctctgacggcggcgacaccagcgggcgcagggtgaggccaagggtctgagacgcaaaccccggaagcactgacctttgtaatcaaaagctgttgtggtgtaaatgggacggcttttcttaattttcacttgagacaacgatttaaataacatgattgacgtgtttgtggtgctcgcagacattatttggttctgaacaggaattctctgagtctgccgcacattaacgataaacatggtggccttgtgtcttggcaactggtgtttgcagcaggcgggccagcagctgtctgctactaatatggatccgttgattttgttgtattcttctttcgactggaaggtatcataagtcaattaggaggtgattcttatatgtattcgttatgctgcaaaagtgaaggtgacaatatttttggtttattggcaagtacatggaatttacatttttgttgagatggttcgtagatggagtaattttgctgtaaagatatagtggtgacaagttttttttgtttgtttggattttttacatttctgttcgcaagtatcgtcatctgtcaatgttgagaggtgatgatatataggattgtcctttggtggcctccattgaaaaaaaaaaaaaaaagaaaaaaaaataaaaaaaaaaaaaaaaaaaaaacgctctagagacgacaggtttgtttttttccttgtattgtgggccgttttttcttttattaatataatgatatgttcaaggaatctt

SEQ ID NO: 9939 - DNA, 497 bp, Zea mays
  Clone ID: MRT4577_109063C.1
gccggccgggccgggatacggcgttgcctcctgatctccccagtcgagtcggtacacctgcggccgcgtttctagaggtacaataaatgataaggtggagagtttacatgaggcatatcaacaaaatagttgatttgactgaagacaatggacaaaggatagaatggagggtggacttgatcaattggggaaacctgaccaccaacagtttgatctatgtaccggatgggttccacttgctcagtagcaagctgcacacagcaccaaatgagttcgtttgctggtaagaatccagttaatcttctgtcatctttttgaggcgttcttcgctgttgggaatttacaccaaactaaaaatcggaagagcattttaagtgtaatgtcattgtcaaattggttgtatagaaacatagctaagatgttctaaatgacatttacgttaaaaggaacatgatgtttttggatgaaagcaaaaaaaaaaaaaaaaaaggccccta

SEQ ID NO: 9940 - DNA, 354 bp, Zea mays
  Clone ID: MRT4577_109064C.1
gaaaagaaaactgcgctcttaagggcaatagccgtaggggacacaccaccgtcaggtaaaacgtgagctagatttgaaaaaacagggctaaaattgggctgttcaactttatgcatacaggttctagatatctttaacataagcaggcctctcaccaagcatgagggggaagagggagtctgggggtttgggaaaccaaaacaaaccgggaaaatagcttgtatatacattacaaaagggaatcaccctagaaccctgtaaaaaagcggactccactctgattgatcacaacaaaactgaacccgctcattgcctctaatgatgatgagaacgctttttttacattacaagcaa

SEQ ID NO: 9941 - DNA, 261 bp, Zea mays
  Clone ID: MRT4577_109065C.1
actaccattatcaagtccccgaaagcatcgtttcagactagatgctcccactaaagctccggggcttgttctactggttctgaaccaaaccgttcaccagcaaactttcctgatcctctaccaccatcaccttcaatgaaatatgacgagattcttgctccatctcattagctgatcaagcaatcatctatcctgcatgctgttattgaaccaagtgctactgaaattatcaatctcatgcatagcctacatgaatgctac

SEQ ID NO: 9942 - DNA, 358 bp, Zea mays
  Clone ID: MRT4577_109066C.1
cttgttgacaatggaaaaagaagttacaaggaacagggggcacacaacggtttaaaggaaaaaacttttaactgggagggcagaacaaggtggggctgggagagaaaaaaacagagaaaaacagaaactggggcttctggaaaaactgctgttgggggggccggaaccggaaaaaccggggccgctaaagctggggctgcactggtactgaagatgttggtgctgatgctggggctgctgaagctaaaacttgaaccggggaaggaggggcttaaagctgggcgggacaagactgcttaggggctggggaaacaatagccttttgagcagacatcttgtttttatcaacagctttttt

SEQ ID NO: 9943 - DNA, 303 bp, Zea mays
  Clone ID: MRT4577_109067C.1
acaaggcagcggggggggtttaaaaaaaaagaggcgtttataccacacgagaccccacaagacacgatgcctgacctcgctaagcccgccacccgcaccgccaagcccgccgaggctccaaagccgaagcctgccgccgccaagcccaaggccaacaccgctggcgccaaccacccgccttacttcgagatgaacaaggaggctatcacggcgctaaaggagaggaccgactccagcccccaagcgatcgccaagtatgagggggacaagcacggcgcgtacatggcggccaactcaaagaag

SEQ ID NO: 9944 - DNA, 219 bp, Zea mays
  Clone ID: MRT4577_109068C.1
cacgcgtccaatcaatctaaacatcaatcgtaggatcgctaaggaccctcaagccagagagaatggagtccctaaccgccaacgccgtggtcgctgccacgcgagtcgctttccacgacggcagggccctggatagggaagagagcgtggttcgatccagacggtcgagcagccaaagagcaactagacgggtcaattgctctgctgccgtaaaacctc

SEQ ID NO: 9945 - DNA, 302 bp, Zea mays
  Clone ID: MRT4577_109069C.1
gcggggggggggggggggtgttttttttttttttttttttttttttttactcaggcgaatgcgcaaatcttacaaaaccaaacggggccggaattcacggggacaagcagttcaaccttacggggaccactgctgggccaaaggaagcaaacgagggggggggggcgggggcaacgggggccttagacaatcaactattcatgcgcttgcaccaaaaaaactaaaccggggcgagcgggggaaagaaaggtggattcgctaactacgctgggcacccctagggggggggaggttagggtttt

SEQ ID NO: 9946 - DNA, 315 bp, Zea mays
  Clone ID: MRT4577_10906C.1
gaaagggtgggctttgtcttgctacactgatggtgctccgatgagctaacacgagacagctgcgtcgaggcctgctgctgatcgatctacgtctcagggacagcgcatggcgacatggcaaatagacacggtgtctgtacccacggccagcaatactggcatccttgatgaacatgctcaggtctaactattgcctgtttggtgccacggctttctattagacgacgtacgtctgtctacataacctgcctgtttgcgctagtcagaacctgttgtttaggaagggagtcgtgcttccgaacaggctggctagct

SEQ ID NO: 9947 - DNA, 305 bp, Zea mays
  unsure (1)..(305): unsure at all n locations
  Clone ID: MRT4577_109070C.1
ctagttctngatcgngaggnacccccatctcactaattcccatactaatcatcatcgaaactatcagactatttattgcaaccgatagcactagcagtacgactaacagcaaacattacagcaggccatctattaatgcatctaatcggaggagctaccctagtacttatagacatcagcccaccaaccgctacaattacatttattattctacttcttacttacagtacttgaatttgccgtagccttgattcaagcctatgtattcacccttctagtaagcctgtacctacatgatagcacat

SEQ ID NO: 9948 - DNA, 254 bp, Zea mays
  Clone ID: MRT4577_109071C.1
tcgtaatggtcaaccggttgaagggtattggccagtgcatatcgacagctggggtggatgctgaggttattgcaactaagtggattacccaacaaatgggttgtgctagccatataggggatctccgcgcgcctggatacttgcatatatcaagattgtgagcgcataaaagctacactcgagtggatgacaaaataactcttttccgctagtgggcggcttgatcaaacatactagtgacccgaaaaatcttg

SEQ ID NO: 9949 - DNA, 282 bp, Zea mays
  Clone ID: MRT4577_109072C.1
catgaatcaaagaaagccaaaaaacctgcacttgttgccaagtcttccatcttactagatgtgaaaccttgggatgatgagacagatatggcgaaattagaggagtgcgtcagaagcattcaagcagacggcttagtctggggctcatctaaactagttccagtgggatacggaattaagaaacttcaaatacagtgtgtagttgaagatgataaagttggaacagatatgctggaggagcagatcactgcttttgaggactatgtgcagtccatggatgtg

SEQ ID NO: 9950 - DNA, 455 bp, Zea mays
  Clone ID: MRT4577_109073C.1
tttctttttttttttttttttttttttttttttaaaagggaaaaaagtattttctcattccttaaagcaaacacgctataaaaaattggttaaacttctggggattaacataggggctaaataaccacgcataatccccccacgggatcgggaacggggcactaaaaaaatatggggcagagggccgactacagaattacaacaatagctttgaactataaatggaccaaagattcaaaggagcattacgggcaggggacaaaacggggggcagtctctgcatcctgccactgggttccatccattttgcattggccaaaatatcctactaccgcatcaagggccgtcaaaggcctcttgaatcatggccagagagaactgaatcgggcaagaagcctccgaacgaggggcatcctgggattgtaagtgggttggggcccccccccccccccggg

SEQ ID NO: 9951 - DNA, 191 bp, Zea mays
  Clone ID: MRT4577_109074C.1
tgtattgacgcacgtgtacgtctcgagagctcatgtggtggagctgatagtcgacagaatttatgtggcacgacagccgcttggctgtgcctggatctcgttgtagctcctgctgacgaacgcactcccaggcgtcctgtctgtctgcactagatagtgaccgctcttcctggctgggtctggcgtgaact

SEQ ID NO: 9952 - DNA, 332 bp, Zea mays
  unsure (1)..(332): unsure at all n locations
  Clone ID: MRT4577_109075C.1
cgcttctgcgggcacgagcaccacctcggcggaaggggccgcgagctcgacgaggtgcttggccgccgaacgagccgccacgggccgccgcagcaggttgctggtggcgtcgcagagcacgttcagcctggacagctacggcgcccgcggcgacgggaggcacgacgacacccatgcgctgggcagggcgtgggaggcggcgtgcttctcgccgcggccggccgtcctgctcgtccncggcggcaagcgctacctgctgaagatcgtcgcgctctccggcccgtgcaagtncagcgtcacggtgacggtggagggcaccctggtggcgtcgc

SEQ ID NO: 9953 - DNA, 425 bp, Zea mays
  Clone ID: MRT4577_109076C.1
cttttctttcaattgatcttgtatcaaagcttatggcatattattatactgctcaaacaaaggccgacaagcaacataaacgcaagtgtgcgccctagacccctctaagggtatcatccgcaacaaccttgagcctagcacgatagagcccgcgacgagccaaactaatatcacaaacaaaggcccccagggtgcaaaaaactatcctgaggaaagaaaaaatggtcacacgcaccaaggaccatgaggggagcgaacagtagccgcccaccggtggggggctagcggactcccaccggatggttgccatagaatgtagcacatgttgttacacttaacgataactatggctggctgcgagcatacctgagtaagaaaagtgagaacggatgtggatcaatacgcgccgggtgacgaggactcac

SEQ ID NO: 9954 - DNA, 668 bp, Zea mays
  Clone ID: MRT4577_109077C.1
tttttttttttttttttttttttttttttttttttttttttttttttttttttttttttttttttttttttttttttcttttttttttttcttgggagaccgaaccctttttttgtccttttggccaaaaaggggtaaataccttccctaaagggggttggggcgggtttttttcccccccttaagggaaacaaacccctttaaaaaaaatcaggggttaaaactttcccaatcctaaaaaccccaaaacataaaacgggccagccctaaaaacccccctttttttttggggggacatgtggttttttccaaagcccccgttcccccaaatggcccaaatgggttttttagctcccaaaaaccccagcccccttttgccccttttcctttgtttccccaaaaaaagaaccccaagtcctggccaacccaaaacgggggggtgggggcaaactggaaaccccaaaaaaaactggggcccggggaatccctcaaccaaatttctcgggaccaaaaaaccccaattttggccaggggtggctgaaaaaaactcaaaaatgcctcagcggaggttccatcatcacccttgattttgagcgggccctcccctgaggctgggttgcccatcccttcaccagggaaaaaggcgccccccccttctttttgagcat

SEQ ID NO: 9955 - DNA, 782 bp, Zea mays
  Clone ID: MRT4577_109078C.1
cctcgaggccggccgggctcccgctccctcctttccctcccccattccccccctccctccgggctctgcctccgctcaccgctcaccgctcatgggcgagtaccaccgtccctaccggggcgacctccgctcgccgccgtcctccgtgccggacccggccttcacgcacgccaacggctacttctcctcctccgcctccccgaactccaacaacggctacttctctcccgtcttcgcgaagaatgacgctttccctgggaccggcgctggcgcaggcggcgaccggcggatcgagatctacaccacggcgcctcctccgcacctcccgccgccacccggcggcggcaggaaagcgggaggtggtgggggcggggccagcatgtggtgcctcagcgatccggagatgaagcggcggcgaagggtggcgagctacaaggcctactcggtggagggcaaggtgaaggcgtcgctgcggcgcggcctccggtggttcaagggcaagtgctccgagatcttccaccatggatggtaacctccgatggctggctggctggctggctggccggctctccttcttggacggtggcaggccccccccaagaaaggaaccaaacttctgaatatgttcgcgatttacttttcttttcctttttgaaataatgatgctcatgctccagatgcctatctatctatgaatctgttcgcctactaatttcgagatgggattgagactgggagcgtaaattcgtaaagctattttgcccagggatgcgcgctctgaa

SEQ ID NO: 9956 - DNA, 231 bp, Zea mays
  Clone ID: MRT4577_109079C.1
caaagctgaaagaccttcatgaggctaatagtaatggtcctgtcaatgttgacaaaccactagggaggaaagatgatgagcgagaaaacatgatggctgcgatatggtgatattctctttggagaagttaacaagatgagagaagaaaggcaagaaacaaataaataccggaaggttcgtgatgacaagttttatgagcttgagatgaccaaggttcaattggagcgagac

SEQ ID NO: 9957 - DNA, 600 bp, Zea mays
  Clone ID: MRT4577_10907C.1
cggccgcgtgggcctggaataatatttacaatcttttcctaaagttatgactccattcagagtatcaagaggtgatgctgctgttgctgatcaaacacttggtgaaagcagtctggttgatgaaactgaagatatcaatatgagctctgatgcctcagagcacaccagcataaacaacaattctgtcgaggatgaaacagggactgaagatgtgatgcaatttttcctgactaatgagagaatcccagaccaacgcatgaagatagaaatggatctatccattacggtgaatgatccgcataagcgtctgcatgtggctgtgtgttgggaggacagtggactggaccaatacaactttagttctttgaattctcttccagaagtttacaaagcggtgctgttttctaggaggccacaggacacatgttctctatatgcatgtctggaagcttttattaaggaagaaccattaggcccagaagacatgtggtactgcccaggttgtaaagagcatcggcaagctagtaagaagttagacctctggagattacctgaaatccttattatacacctgaaaaaattttcatacagtcggtatac

SEQ ID NO: 9958 - DNA, 277 bp, Zea mays
  Clone ID: MRT4577_109080C.1
ctgtatagcgcacgctcttccgtttagcgccccaactgcttggtgtacatttttatggtgtgcagaccagaaccccgctctaatatacaaccgccaacctatcaatcacaactcttgcgctgggataatatcacttgtgtactctcctggaccacactaatgctacaacacataccaacctgtttgtcaagcttttccaattcatgctaccttactgcgcgtacctggactcaaaacctttggtctttgtaacaactaatccggaacctcacctcct

SEQ ID NO: 9959 - DNA, 1073 bp, Zea mays
  Clone ID: MRT4577_109081C.1
gtcctccgtgccggacccggccttcacgcacgccaacggctacttcgcggccgggccggggcaaaggctgggtcccaccgtccaccaacaaaaaaacgaacgactgttgctcggcccgaatctcccgtgcttccggcttccctcccccatctcccccctccctccgggctctgcctccgctcaccgctcaccactcatgggcgagtaccaccgtccctaccggggcgacctccgctcgccgccgtcctccgtgccggacccggccttcacgcacgccaacggctacttctcctcctccgcctccccgaactccaacaacggctacttctctcccgtcttcgcgaagaatgacgctttccctgggaccggcgctggcgcaggcggcgaccggcggatcgagatctacaccacggcgcctcctccgcacctcccgccgccacccggccacacgctggcgctgcccccgccgccggggtggaaggaggggcgactgggtggaggtggaggcggcggcggcgccggcggcggcaggaaagcgggaggtggtgggggcggggccagcatgtggtgcctcagcgatccggagatgaagcggcggcgaagggtggcgagctacaaggcctactcggtggagggcaaggtgaaggcgtcgctgcggcgcgggctccggtggttcaagggcaagtgctccgagatcttccaccatggatggtaacctccgatggctggctggctggctggctggccggctctccttcttggacggtggcagggcccccccaagaaaggaaccaaacttctgaatatgttcgcgatttacttttcttttcctttttgaaaataatgatgctcatgctccagatgtctatctatctatgtatctgttcgcctactaatttcgagatggatttgagactgtgagtgtatattcgtaaagctattttgccatgggacgcgcgctctgaacactcgagcggattgatctgttagtgctactgctggtggctgtcgtatttgttattaagtaatcaaatcaaacagttaggaattccataaaaaaaaaaaaaaaaaaa

SEQ ID NO: 9960 - DNA, 178 bp, Zea mays
  Clone ID: MRT4577_109082C.1
gcggaatagctgcactttaatgacaaaacgggcaaccaacgatcattacacgaggatttgagcgaaatggatatggaaaggatcctaaattgtaatttacaagtgctttagactctggctcctatgctgtcgaacaatatatagggcacctgcccagacctgcacgagcgggcaaggg

SEQ ID NO: 9961 - DNA, 378 bp, Zea mays
  Clone ID: MRT4577_109083C.1
cggaaagatacaaactgggctgcatatcgaagacaggacaaaagtactacttcctgatgaactacgcatgcaaaggggggcccggcatgctcatacttaccctacacaagactctggttatgacacacatgctagcaacgggcatttttacttacgggactgcacgtcgacacacacattgttcacatgcgccacgacttggtaaaggcatgcacagaggactacctcaggagcatcaaaattagtgcgaacacacacactctacatagggaccgggacaggatgagagggataaagagacacttgcgtacgggcgcctgtcagtaccctgctgtaaatgcacacacaaacaccttcaggtggcaatgcggggggcct

SEQ ID NO: 9962 - DNA, 144 bp, Zea mays
  unsure (1)..(144): unsure at all n locations
  Clone ID: MRT4577_109084C.1
ccggggtcgacgccaacgcgtccggtacatgctcaaaccacagngactgactttactcttggaacaangcnnttggtgcaactccaagcgaaacgagcgatccatgagtggctgatgcacatattcggctgtatcaaagcaggc

SEQ ID NO: 9963 - DNA, 360 bp, Zea mays
  Clone ID: MRT4577_109085C.1
ggaacttgaccatgtataggcccttactaatggcaatgaaaagggggggtacctctccccccgaatttctcaaaaaaaagaataagccatcttcacaaagctgataagatttgccacaccgtcgatgaagctgccagttggccttcttccagtaaacatctccaacaggaccatcccgtaggccatccatggagacatcagatcctgattcatactatgcgttcagcgatggcacgccaccgggcgccgccgcgatgtggtgagccgccacgaagaggagcaccgtctcgccgtgttgacccgtcgcgaccgaaccgcctgccactgcgctggaatgctggataccccgcccggccacca

SEQ ID NO: 9964 - DNA, 1915 bp, Zea mays
  unsure (1)..(1915): unsure at all n locations
  Clone ID: MRT4577_109086C.1
cattgggtacctcgaggccggccgggatgcaccgaatcaccgcctcgtcacactccagcccttccccccgcgccggcgcggcgaggccaccgaccggctggcgggtgttgcttcttcttctcccggcccacccggcctgcccgcacaaccgacccctccgctgagcgcgctcccacgcgcattgaatcatagcgcgccgctcagtcgagcgaggatttctctaggatagcagccgccatcacctcctcgcctcgccgcgctccgctggtgctgctgggtcgctgctgagcggagcgggaatcggaccggactcggttcgaattcgtcctcaccttttcgtcgttctgatgccagaagccgagtggaatgatgaacacactaggattgtctgcgaactctttgaagaacaagttcgggctgggaacaggccaaacacgcatctgaacaacattggttaccgccaagttgcggctaagtttcagcagaggacagagcttctctatacaaaattgcagcttaagaacaaatgggacaagtttaagaatgattacatcacctggaggaagttgcttgtagtagggaagggtttaccctgggacacagcaaaggggacatttgttgctgacgaagaatggtggaagaagatcaataaggagctgccgggtgcaaggaaatttcgacatggcggtctacatcatgaggataagttgaatgtaatgtttgactacatcaccagtaatggtgtggatccttcaccgccagctccggaaagcccgaagaatggggtgaatcattcgccaccggctgcaactggtttgccatctgctccagactgcacgctcaatggagtggatcattcgcctgtgactgcacatggtttgccatctggtccatacagccccatgaatgggatggatcagttgccactacccgcacatgatttgcgaagtgttcaagaaatccccatgaatggtgtgaacctcgatggattggacaacaacactgaagataatgatgacatttatcaagagcctgtgtttcagtatacttcaaacaggaagaagagaccgattagtttcagtgctacaaagaagaacaagaaaaacaaggctgaaactgctctgctcatgcaagctcatttgtatcgcataactgagctggctcagaaagcacaggatactttcaaaaagtttagctcccaagctgacttggtgccatggcctagcatccaggatgttatgacacttgtctggggatgcggagcacggtgtggaagcaatgagcatttcatcgcaactgaactgtttgtcagtagagaacagagggagatgttcctgaccatggaaacggccgaggaacgattccagtggcttcgaagaaagtacattgtcaagtatttgtcaggcgcagggccatgggtcggcatcgctcgctgcactgctgacgaaggcatccgatggggaggcatcgtctttatgcaacgggctagttaacttgaggtccgggctgcaatatcgaatttgtgtcttgtggctgcaagttcttttttttggtgcgcaaggatctttcctggtcttgctcatgcagcagaaacccacttatggcttgaactatcaattaaccatttcatagatggatttggtgaatgtttggctgtacgtatgcatgttattgaatactggccaatattttgtataatatttnaatttatattatagaatataccccccccctggagctgnaacctggagcagtctnaacatccccttaatatccgacatgacacaacatcacattttgtattggatcctgatatagcatgctttgcatcttgacaagtatggttgtatgcatgtatattctgatatatcctctggtttcatctcttaataaaaaaaaaaaaaaaaaagcggcc

SEQ ID NO: 9965 - DNA, 251 bp, Zea mays
  Clone ID: MRT4577_109087C.1
gcacgaggctggctacggcggcgttcaacaaggccgaagacgtgatcatggaggatatgggccggcgagcggtccttcagggcgcgcgcgtcaggaagcacacgaagggcggacgcgcgatgcctcacggcaagtcgctgcgcatagtcactgcggcggacgtgctccggtggggcgagtcaagccggcgcaacgttatctgccgggagccgaggtcggttgcagctcggcgttccagcggcacatgcaga

SEQ ID NO: 9966 - DNA, 477 bp, Zea mays
  Clone ID: MRT4577_109088C.1
gccagccggagaagtgacggcggcgcaggacgcgctgctgctccgcgccaaggctaactccctggcgcagctcggcaagtacacctccgacggcgaggccgccgaggccaaggagggcatgttcgtcaagaactacagctactaatcgcccggccggccgcggccatcaccggaataccgccgacgtacgaccctctccgagatacgtgtactgatgatcatggttaagcacgtactccgatccatctccccgtgaaagccatgatatgatccatggacgaccatgcatggtgctgatcgatgccgtacgtgtcctgttacataaatacatactagtagtattactgctagtcgtttactgcaaagatcaagctcgctactgcaaaagtctgggataatgtatgcgtggcgcggcgagatctgagggaaaataatatatatatgcatgtttcgagatggctccttataataataatt

SEQ ID NO: 9967 - DNA, 248 bp, Zea mays
  Clone ID: MRT4577_109089C.1
attcggctcgagcactggcttacactccttttttccaggtgctgaccaggtaagttggggggggttttgacaacgcgtttcaataagaaccgcatgaagcgcgtacacgtgttcgtggggcacggccgcatgggtatgcacaggaagcacccgggaggtcgcggtaacgccggtggcatgcaccaccagcgtatcctatgcgacaagcaccattcgggctacttaggtatggatggcatgcgtgtact

SEQ ID NO: 9968 - DNA, 315 bp, Zea mays
  Clone ID: MRT4577_10908C.1
gggattatattatcggtggtgggtaggcaaaaacttaaaagccattgttacctgtggcttttttgaaatcccatacccacaatcaaactttgggggcttttaactgctgaaaggttaatatctttgaaaaatgaaaccttgtttgaatgcccttgccccaaaaagcaattttttaacatttttgaagcatagggccaaatataaaactcaaggtgcaatagccctccaaaacaaaaggggcccggccagaaatattcccctagggtgtaaaaaccatgttgggggggacaatgtccccattataagccttggggg

SEQ ID NO: 9969 - DNA, 244 bp, Zea mays
  Clone ID: MRT4577_109090C.1
cggacggtggacgtgacgcgtgggcggacgcgtgggacctgccctgatgatgatatggtgagccgcgaaggtgaagagagtacgttcccgttcatccatcgtccctagtgatgcgcggtgattagtctatgatgaagagtgaagaagactacacaccaacccacacacatttgatcgacccagcgacgtacccgccaattttttttcttcttctttcctttttgcccgcccccttttcttcatt

SEQ ID NO: 9970 - DNA, 275 bp, Zea mays
  Clone ID: MRT4577_109091C.1
cccacgcgttcgtagatcgcgagcggacgccctttggtttttttttggggaatgatggaatggttctacatactcatcattataattaccacgatagatgcaacagctgaattacggtcgcgtacaaccacggtcttaagttacgtttggaccaactcatgcatagatcgatcgaactcacgtgtcagggtgaacaaaaatacaaacttagctagaaataatcgatggttgtcttgaaagtgagagggcggagctcgtttgcttggtaagggtga

SEQ ID NO: 9971 - DNA, 332 bp, Zea mays
  Clone ID: MRT4577_109092C.1
tctttaagcaggggtaacaacgcagagtacttttttttttttttttttttttttttttttattttttttttttttcttttttttctttattttctgttttagttccttgtaagggtagccaaagaagcgcagctacaataacatggggaagggcccccacaggtgaaatacacaccgacgcggacacacagacaagagagggggcatgttttgacaccgacaagcccacgacacagtggcagcaaccatacaaacacaaacatcggcgtgcgaacgaccgatgcaggcacagccacccggcaaagagaccaacacgacaatgccctcatctg

SEQ ID NO: 9972 - DNA, 2908 bp, Zea mays
  Clone ID: MRT4577_109093C.1
ccggccgggccgggcttctcgttctcgtcttcctggctcccggcggcacccacccgttcccggagcaaaaataaaacgatcccaaaacacaaaagaatccgccacctcgccggcgacaggggcgacctcgcgcgccccggccggtgctgaccccgacttctccatgcatccattctgctgcgcgcctctcgtgcccgtatcgcccgcggcctctgccgcccccgctgcgtcctccgctgtggcgggcacccaggccgtgatgccgccaccgcagcccccgccgttgccgcctccgccgcctcgaaacaactccgccactggcggtgagaggcgcgcgcgcgcagcgggggtcagcggtggtggaggaggcgattcctcgccgctcgagggggtgaagctgaacgagatcgtcggcggcggcatctcgggaatcatgtacaagtgggtgaactacgggcgcgggtggaggccgcgctggttcgctctccacgaaggcgtgctctccttctacaagatccacgggcccgaccgcatcatcctatcgcgcgagaccgagcggggcgccaaggtcatcggcgatgattccctccgccgcctcaaccgcccctccacctcctcgtcgtcccactccaacggccaccaccatcctcgaaaccccatcggcgaaatccacctcaaggtgtcgaccgtgagggagagcagatcggacgacaggagattctccatcttctcggggacgaagacgttgcacctgagagcggagaccagggaggacagagctgcgtggctcgaggcgctgcgggcgaccaaggacatgttcccgaggatgtcctccagcgagatggtcgggccaggggacaccgcagcggcagtggccgtctcgaccgagcgcctaaggcagcggctgcagcaggaaggggtcagcgaggcggccattgctgacagcgagatgatcgtgcgggcagaattcgaggctctgcacaagcagcttgtgctctccaagcagaagcacgcgctcctcttggaaactcttcgccagctagagacagaaaaggttgatttggagaatacccttgtcgatgagagtcaaaggcagtcgaaagagtatggatctgcttctaaaccaagacatgagaagtatagtgaaggaagtgccacgcgtcctgatgattataatgaaccacaagatcctgctgaagagactgatgatgatgagaacctttattttgatacaagagattttctatcctcaagctcttttaaaagtagtggatctgatttccaaagatctgaagctggttcagatgatgaagacgattatccaatggatggaattgatccttccatgaagtctattgggattagttatccatatgtaagaaggcggaagaagctaccagatccggttgagaaagaaaagggtgtaagtttgtggtcaatgatcaaggacaacataggaaaggatcttacaaaagtttgtctgcctgtttacttcaatgagccactttcatcgttacaaaaatgttttgaagatctggagtattcctaccttattgatcgtgcatctgaatgggggaaaagggggaatagtcttatgaggattcttagcgtagcagcatttgctgtttctggatatgcctctacagatggcaggagctgtaagccttttaacccccttcttggggagacatatgaagcagactatccagacaaaggcctccgttttttctctgaaaaggttagtcatcaccctatggttgttgcttgccactgtgagggaactggctggaggttttgggctgatagcaacctaaagagtaaattctggggtcgttccatccaacttgatcctgttggtgaattaacactggagtttgatgatggggaagttttccaatggagcaaggtgacaacttcaatttacaatctcatattgggcaagctatattgcgatcactatggtactatgcgcatacaaggtaatcgtgagtattcatgtaagcttaagttcaaggagcagtcaattatcgatcgcaaccctcaccaggtgcaaggtgttgttcaagatagaaatggtcgaactgttgctacactatttggaaaatgggatgaaagcatgcactatgtaatgggtgattgctttgggaaaggcaagggaactgaacagttatcagaggcccatttgttgtggaaaagaagcaaaccacctaagtttcccactagatacaatctcactcaatttgcaattacattgaatgaacttacccctggattgaaggagaaactgccacctacagactcaagattacgaccagaccagagatgtctggagaacggtgaatatgaaagggcaaatgctgagaaattgaggcttgaacagagacaacggcaggcacgaaagatgcaggagagcggatggaagcctcggtggtttgcgaaggataaagctactgacacataccgttacgtcggtgggtactgggaatccagagaaaagagcagctgggaaggttgccccgacattttcggacaagtccctaacgatctgatggtaactgactaggttcgagtaggttataggtcttttgcttctccttatcggtatcacttgattccggaaattttagtggttcatattatagagcaattaagtgcccgttgacaagtaaacattggcagtgcctccggtaatattggtctcgtacataataagaagaaaatggttcggtctcccatgttaccttatttttttttttttggcttttggcaaagtaatagttttttcttcccttgtgaggtttttcagtcttcaaagtggtgtagcgtgggcgatcagtggtcatgcctaaataaatgtaactacgctacgcatacaggaggaggccgtgaatttgttcattttggtgct

SEQ ID NO: 9973 - DNA, 655 bp, Zea mays
  Clone ID: MRT4577_109094C.1
ggaggctggtggcgaggagttcgcgatcggcgtggtgctctccgccaagaccaccctgggggaggagttcgagggccagatcgtcgccttcgatcgaccctccaacctcctcgttatccaggagggcgtggggagggcggagagcggggagcggcggaacgtgagggtgctgaaggcgaactacatccgggagttctctgtgctcagcaagggagacgatcctctcgatcctgccggttgcatgctggaccttaactccatttatgcccgggaggatgctgcactcagaaagaaacttcaagaaagatgctgctggaaggaagctcccttctcagaagaatggttaaggaggtcttcaacaggaattttggctgggcgccgatggataaaagactgtgcaactaacgttgaacgcgatgtctgtttgttttagatgtgtggcttgcctggctctcggaagcccttttggttctagggtatttgtttcacaatgtgttgcttttgtctggtcgctggggctttgtttgtggtcggccttgccaaaaactggttggtagtggttgcagtggttctgcggtatgacttttttgtcagaaactgtagtgatccaccttagcctggatggcttgcttctgctcttttagttctataagct

SEQ ID NO: 9974 - DNA, 1340 bp, Zea mays
  Clone ID: MRT4577_109095C.1
ggaaaccttctctttagccatgcttgtatcaatggtgttcaccttgaggtttatagtcctagttttactgtcatgcacatgctcacaccagtggcagtggactgtaaagctttaaccattagcatgctcataaaggacaaatgagatgaggtaagttatgaagttaggcaaaaactgctttagttaagtgatcttttgttttgagtttcttctgtcactgtttttttggctatcatcatgatggatgctatttgtcttgaatccaaaacgagactactaacttttccaagtcttttacgagccaactgaagctaccaattataggggggttgtaatttgtctggtcatttcttttaattgtagtagaagtttcttaagttaattttttagatagtgcgaacaatggatcttggccaaaacatccccatacttcttctgggcttcaaatggccatcttactttagttattacagtgttctgttctccttatgcaggagcctgttagtatgtaggtgttctgtattagcttattgccattctatcaacatgagaaatgtctttcatgccatttttgtcttctccgccaattcacttgtcacaccacatggatgatatgtaggcaagcagagattgaagctgagaaaattggtgttggtgtcaccccagaagctcaaagtatattcgatgcgctgtccaagacgcttccggttcagtgggacaagactgacattgttgtaatgaaggaggttcgtgtacccagcccgtccctgcctgaaaatgttaatggaggaccacctccagcaaatgaacgcgttaaaaaagtggtaaaaacttggcgcttgacgccaatgttcaaccctctacaaagctggcccagtaaagtgactaacaacttttggtcccccctctgtttttggttgggtttgtctcttccagattgcctttgaaaggaaaagattacattcccgtgtccctggccaattctcttgattaaaaggcttgactattttttacattagcctcgtgttgtatttctaatactgcatccagttttcttattctcatcgatgcggttttctataaaaaaaaaaaaaaaaaaaaaaaaaaaaaaaaaaaaaaaaaaaaaaaaaaaaaaaaaaaaaaaaaaaaaaaaaaaaaaaaaaaaaaaaaaaaaaaaaaaaaaaaaaaaaacctgcccaggggcaattcccaaaaggggcaatttttgaaatttgggtcccgctggggggcccaaccgccttccttttaggggcccaattcccccttatgggggggggtttaaaattcaaggggccgggttttaaaacagccgggcggga

SEQ ID NO: 9975 - DNA, 1476 bp, Zea mays
  Clone ID: MRT4577_109096C.1
ggtaccctcgaggccggccgcgggggccgggcaagtaattagttaggcccataagcgtgcccgttcttttcgcgtttcacggcggcgcggacagagagccatcggcggcgcactgaccgccggcgaagggtacagagatgaagacggttagcctcggcgcctctaggccttccactgtcaacttccgcatgccgacgagggacaacctcgtgcctatacgcgtcgacgtcgaggtggacggccagcgctacagggacgccttcacctggaacccgcgagatcccgactcggagataatcagcttcgctaagcggacggccaaggacctcaagctgccggccaatttcgtcccccagatgctccagtccatccaggggcaacttgcggagttccgctcctacgaggggcaagagatgcaaatcaaagagaagattgtgcctctgaagattgacctccgagtgaacaacactgtaattagggaccagttcttatgggatatcggcaaccttgatagtgaccctgaagaatttgcgaggacgctgtgtgatgatttgaacattacagaccctgaagttgggcctgcaatagctgtttccatccgtgagcagctttatgagattgctagtcagagcgtctctgttatgagagagaagcaaatgtcaaagaagggaaggcgagcaccagaattttcttcaaatagtaaagccgtgaacaatgcagtggatttgttcaagtattttggcagcaaagggagcgtcatccggaaaaggaaggaatggtacctgtatgagcctgttgttgatgtggtagctaatgacgaagacgggaaagaggaggctaataattctagcaggccgaagaaaagagccgacgaagagaaagctgcaagccttcagtccctttgaacacaagctgctgatagttctaaccaaggagggtttctcttgccaatcccagcagatgcctgcctttgacattcgtcgtaggatggcttcatcatagctacatatttgtatgtaagcggtgtgagaggtgttattcctgatgagggtcgggtgctgccctgtcacctagtctgacgacacccgtccagtactccagttgttgtatttgtatattcagttggctttgctgctcttgtttttacgatgcatgtccaaagctaaaggaagcctttgaactgatacccttggaagaacagtggcacatgtaatctcaggtagcattgcaagcgtccgctgccgcctgctggtcagcaatagaaacaataatattctagagttgagttccacaagagttttctctagagttgagttacaagcggcttttaatttctctacccaagacaaggaagaaacactagctgtagaattccaaaaggctcttaattttctccttaatttgtctacttgcaaaccttttggagaacctctatgtttttttggatccccagctttaggagaaggcttctttgtt

SEQ ID NO: 9976 - DNA, 1802 bp, Zea mays
  Clone ID: MRT4577_109097C.1
cttccccatcgcacaagtccagaactgcaatctgcaatcgaccacttccggagattcggtcccgccgagccggccgggagacccgtccctgtctccaacttcagagcatccaatcgctcaacagcgccactgatgagcctctgtcgtcgtcgtcatcagtgaaccaggcgaggcgacgatcggacccgggtcgtaagcggtaagcccaccggctcaacagcaggctgcagatccccccaccccccacgcaactccatctcctctccgcctccacctgcacccatcgagcaccgaacggcggcggcatggaggctggcggcgaggagttcgcgatcggcgtggtgatctccgcgaagaccaccctgggggaggagttcgagggccagatcgtcgccttcgaccgcccctccaacctcctcgttatccaggagggcgtgggtagggcggagaggggggagcggaggaacgtgagggtcctcaaagcgaactacatccgggagttctcggtggtcagtaagggtgacgaccctctcgatcctgccagctgcatgctggacctcaactccatttatgcccgggaggatgctgcactcaggcaagcagagattgaagctgagagaattggtgttggtgtcaccccagaagctcaaagtatatttgatgcgctgtccaagacgcttccggttcagtgggacaagactgacattgtcgtaatgaaggaggttcgtgtacgcagtccgtacctgcctgaaaatgttaatggaggaacagctgcagcaaatgaacgcgttaagaaagtgattgactttgaaaggaaaagattacattcacgtgtacctggccaattctcttgattaaaaggcttgactattttttacattagcctcgtgttgtatttctaatactgcatccagttttcttattctcatcgatgcggttttctataaaatgtttcagcaaaaatctgtcgtaataatcacatcaactagctagatctgtactgtttggtagttattcagatttttataaaaatattttggatccaaataaatgtttaggagataaatcagaatcatttgatgaggccgtttagctgccagcaacctacctatcaaccgtagctctggcaaacctttctccctactctcagcaacaacaatttcttccattcaaccaactgtctacattgaaccgtgctgcttatttgcagcaacaactattaccattcagccagctagctactgcctactctcagcaacaacaacttcttatttaaccatgccgcactgaaccccgctgcttatgcagcagcaaatactactaccacctgcccgtgctttcgcaaaacttcaagaaagatgctgctgaaagaaagctcccttctcaaaaaaatggttaaggaggtcttcaacaggaattttggctgggcgccgatggataaaagactgtgcaactaacgttgaacgcaatgtctgtttgttttaaatgtgtggcttgcctggctctcgaaagcccttttggttctagggtatttgtttcacaatgtgttgcttttgtctggtcgctggggctttgtttgtggtcggccttgccaaaaactggttggtagtggttgcagtggttctgcggtatgacttttttgtcagaaactgtagtgatccaccttaggcctggatggcttgcttccccccttttagttctataagctaagtggtgtaataagtagttttttgcgtttgaaatgttgttaaaactgtggtcctatttcttaatgaaaaagggggggggatcccctttctgtt

SEQ ID NO: 9977 - DNA, 593 bp, Zea mays
  Clone ID: MRT4577_109098C.1
cggcaaccttgatagtgaccctgaagatttgcgaggacgctgtgtgatgatttgaacattacagaccctgaagttgggcctgcaatagctgtttccatccgtgagcagctttatgagattgctagtcagagcgtctctgttatgagagagaagcaaatgtcaaagaagggaaggcgagcaccagaattttcttcaaatagtaaagccgtgaacaatgcagtggatttgttcaagtattttggcagcaaagggagcgtcatccggtatatgatcatttcttctaaaaaccttgatgcgttaatgattactgtagtttggtactttggttatgatggtactggtagggaagtaccgacgaacaatgttcactctgtttggactaacacgttgctagcttactgttctctggtgtcgaaaccgccttgattctgttttttcccctttttggtgtataccaggaaaaggaaggaatggtacctgtatgagcctgttgttgatgtggtagctaatgacgaagacgggaaagaggaggctaataattctagcaggccgaagaaaagagccgacgaagagaaagctgcaagccttcagtc

SEQ ID NO: 9978 - DNA, 1084 bp, Zea mays
  Clone ID: MRT4577_109099C.1
cacaagtgcccacttgcagtccagaacgccaacttgagagcatccaatggcaatcgcttaaacacacaacggctgtcctagtcgtcgtcatcagccccgggtgtgcgctggtcggctggtgaactgggccatctcgtctcgtgacgatcagccccgggccgtaagcccaccggatcaacagcaggccgcagattcccctgtttccagaactccgtcgaatcctccccctcctccacgcagacgcagctccctctcctctcagcccccacccatcgagccgctagcgccggcgcccggcggcggtatggaggctggtggcgaggagttcgcgatcggcgtggtgctctccgcgaagaccaccctgggggaggagttcgagggccagatcgtcgccttcgatcgaccctccaacctcctcgttatccaggagggcgtggggagggcggagagcggagagcggcggaacgtgagggtgctgaaggcgaactacatccgggagttctctgtgctcagcaagggagacgaccctctcgatcctgccggttgcatgctggaccttaactccatttatgcccgggaggatgctgcactcaggcaagcagagattgaagctgagagaattggtgttggtgtcaccccagaagctcaaaatatattcgatgcgctgtccaagacgcttccggtgcagtgggacaagactgacattgttgtaatgaaggaggttcgtgtacgcagcccgtacctgcctgaaaatgttagtggaggaacagctgcagcaaacgaacgcgttaagaaagtgattgactttgaaaggaaaagattacattcacgtgcacctggccaattctcttaacctaaaagtattgatttttttttacattagcatgtgtttctgatactgcggcccgttttattattctcatcggtggggttttccataaaatatttcagcaaaaatgtggtaataatcacatcaactagcttgtttatgaactgtttgatagatgacatgttgtaattgaattgattataagccctctgtatttaggactgttagattgataataatctcctcttttttggg

SEQ ID NO: 9979 - DNA, 406 bp, Zea mays
  unsure (1)..(406): unsure at all n locations
  Clone ID: MRT4577_10909C.1
ggccgcccccctttnctcnttttctttttgagcacaaccaaccaggggggctttttaaaaagataggggcgttcaaccaagacgagagaaataacccgtaataagaaacaggaggcccaggcccaacagggggcaggtcaagggacactcaaacacaacccaatgcgaaacaagaggaatgaacgccacggacacagggctgggtcaggcctgacagaacacggcgagtcaaggaggggagggccaaagagaaaaggcccaccggggggggtaccgattgaccacagccaaaagcacccgatgtcagggggggctagaaagccgaacgggatgcacacccagcggcggggggcacaaaccaagaaggagcgggtgaacagggacgaaaatcacgggcggggggggg

SEQ ID NO: 9980 - DNA, 264 bp, Zea mays
  Clone ID: MRT4577_1090C.1
aaactgctcaggtatttatgtaccatacactaggaatcagatacagattttgtccaagattgtatctatgaatggaagtccctttattactttggggcttcagacaaatataaatctgagctgggaaaaatgatattctcaaatcctgaaatgttactagttacaaccggatcttgccaaaggcatgcatgcactcaggtgggttggcaaattcgccagctgtaaatcttcaactgttcatggttgccgcatggctctagattt

SEQ ID NO: 9981 - DNA, 458 bp, Zea mays
  Clone ID: MRT4577_109100C.1
aaaaaagaaaaatccttgacaaatatgattggcaaattacccctaaatgattttaggacatagccttagggggggtgtacatagtaagaacgggcctgacatgtcttcaggcttatgaaacatgggaaatttaagacccaaaatttttcataggctttttggaagttgtaccaaacctgggcgggtgttcccgtcaaaagggaaccttttttataaaaaaatccctttgacattagcaatcctgggcggggggcccccttttaagctgggcattaacagaagcgtcaagattttgaggaaagaaaagcctgcttgtgttgggggacaaaatttttctcaggcctttttttggagaaatttctttgtttcccgccccttccttaagaacttgcctgactaaaaaagggttattgggaccttttactggggaaattgggtctatctttttttttttttgg

SEQ ID NO: 9982 - DNA, 415 bp, Zea mays
  Clone ID: MRT4577_109101C.1
agccagccctccgccggggggactcattatggggggacaacaaaccaatgctccagagttcaaacgggcacgcacaaccgcgacttgggtgcggggggcgtaccaaaaacaaatcgttagttgtgaaaacagaaaccggcttacaataacttaaaaagaacattacgcccacataaactttggaccttactaaaggggttttggacccccgcgctggtttttggggacctccacccttccagggaaaaaagcttaaggtcgctttggttcgtcatcagtcgcccaataaaataaaaagcaaaaggtcctgcacaaacgtgggtttgacgcgggcttggttccggttcaactccctttttttacttgggagcgacgaggcgatacttaatttccgggcctgagcgggcgctttttt

SEQ ID NO: 9983 - DNA, 2082 bp, Zea mays
  Clone ID: MRT4577_109102C.1
attcggctcgagttattaagtacatgactgatggaatgcttctaagggagttccttggtgaaccagatttggctagctatagtgttgtcatggttgacgaggctcatgagcgtaccctctccactgatatcttatttggtctagtgaaggatatttctcgttttcgaccagatctgaagttgctcatttctagtgccacccttgatgcagaaaaatttagtgactactttgattcagctcctattttcaagatacctgggaggcgatacccggttgaaattcattatacaaaagctccagaggctgattacatagatgcagcaattgtcactgttttacagatacatgttacccaatcccctggcgatatcctggtgtttctcacaggtcaggaggaaattgaaacagttgatgaaatccttaaacacagaacaaggggcttaggcaccaaaatctcagaattaattatatgtcctatttatgcaaatctgcctaccgagcttcaagctaagatatttgagccaacccctgagggtgcccgtaaggtggttctggccactaatatagcagagacttcattaaccattgatggtataaaatatgttattgatcctggcttttgtaagatcaaatcatacaatccccgcacaggaatggaatctctacttattaatcccatctcaaaagcttcggcaaaccagagggctggaagatctggacgcactggacccggaaaatgcttccgtctatacacgagttacaactacatgcacgacctagaagataatactgttccagagatccaacgaaccaatcttgcgaatgttgtgcttacactcaagagtcttggtattcatgacttggttaactttgacttcatggatccacccccatcagaagccctattaagggctctggaacaactttttgctctcagtgcactcaacagtcgtggggagttgaccaagactggaagaagaatggcagaatttccactggatcctatgttgtcgaagatgatagttgcttcagagaaatataagtgttctgatgagatcatctccattgcctccatgttgtcaattggcaattctatattttatcgtccgaaggacaaacaagttcatgcagataatgcaaggttgaatttccacactggcaatgttggggaccatatagcactactaaatgtgtataattcttggaaagaaacagactattcaactcaatggtgttatgaaaactatatacaggtgcgcagcatgaagagggcaagagatattcgggatcaactagatgggcttatggaaagagttgagattgagatttgctcaaacaccagtgatttagatgctattaaaaaagctataacatcaggtttcttccatcactctgcacggttgcagagggatggtacatataagactgtcaagaaccctcagaccgtgcatatccatcctagttcaggattagcggaggtacgtccgcggtgggtagtgtaccacgaattagttctcacgacgaaagagtttatgcgccaggtgacggaactgaagcctgaatggctggtagagatagcaccacattattaccaactaaaggatgtggaagactccggaacaaagaagttaccgaagggccaaggacgagctgcattgtagctatgatacatgaagtttcgatggatgtattgtgttggactcatcgtaggagcatcataggatgtatataactccttatatcacgaacaggatacaagatgtcacttttcattgccctgcttaggtttcagagtaagctgattgtgaatgtaaattgtgacacgaagacatgcatgtgaaccgctataattgtcacactggagggagcgccggcatgcaactttcgtgtcttccagccgctacgcttgacgatcgttcgcatcctgccgccgtcgcgactattatccaagaaaatgcatatgtgcctttcctcgccggcctcttggatatggatgtatgttgaacaaacgcctatcaagggaaggataaatgagggatgagtatgggattttgaaaaaaagaaatcctgaatctttctgta

SEQ ID NO: 9984 - DNA, 636 bp, Zea mays
  unsure (1)..(636): unsure at all n locations
  Clone ID: MRT4577_109103C.1
cattgggtacctcgncctcgaccggggctgggccgggatctttgactgaatgccttttggtatttttttcaagacaatacatgccaccattttttctttgaataattggatctataccattaaaagattgcaactttagatatatactanttggctccacatatcattgactcatgtgaaccatacatgtaagtgagataacaatgatatatatttaaagttgtaatcctttaacgaaaataaaaaaaaaaaaaaaaaaaaaaaaaaaaaaaaaaaaaaaaaaaaaaaaaaaaaaaaaaaaaaaaaaaaaaaaaaaaaaaaaaaaaaaaaaaaaaaaaaaaaaaaaaaaagagggaaaaaaaaaaaaaaagggggggccccaaaacccagggtttcccccccttaagaggtgtttccccccccccgggggaaaaagggggccttgggggatcccgggggaaaatgtgtccccgggaaaaattttaaaacccgtcaagcccgcagcaaaaatggaaccccccgggttagctaaaaggcggggttcccccaaagaaagggggtgccccccatggccggtttgccattcggaaacctttttcggccggtaaaattgggatcccccctctctcaggggaa

SEQ ID NO: 9985 - DNA, 407 bp, Zea mays
  Clone ID: MRT4577_109105C.1
aaacttgaaaatagtatatgtagccgacatcttaaacactaaacagcttgggacactcgcagacaaaccaccgagctgaaaatcaatcaacatacgcataaaggaactttggatgggaagggatgcgatgcgatgcaatgcaatgcaatgcaagggccccttgagattcggatgtggcgccccagatttactagctgatcacatgactctctctagctagaggatgccggatttgatgcccttgcgcaggagcacgacgccatcttggctcgagaacgaacctgagacatggagctcccggccaaggatggatatgatctcgactcgcgcccacttgcctgccgtggagtgccaaccgatgattccgattgagacacaggcttgctgattgacgcgcgccaggcgca

SEQ ID NO: 9986 - DNA, 275 bp, Zea mays
  Clone ID: MRT4577_109106C.1
aatctgctcacgtacgccatttggcctgacatttttatgtatgtactcccgatgcaaatttaaataaacactgccatctactaacaactacgacgacatatttgtttcttgggaaggccaggccaaaaactaaggttcatgagcagttgtctccttccctttgtttcctcatacatcaaagcaggacacatgctactgatcatcctgtcgtccgtcccatgcatatggagccagtagccacacaaagctagctgtaacttttacagttctacctc

SEQ ID NO: 9987 - DNA, 300 bp, Zea mays
  Clone ID: MRT4577_109107C.1
ctatcactgtcatccaaaactttgcaggtgtacggatgcgaggcctcccttttcattgcgatggcatagatataggcgagaactttgtggtaatgaacatagagcactggctactgcttaacacgagggggcgtttaattgttgaggcttttggggtctgtccaacagatatgcaaacagaatgtgatctgcatcgatatacgcagcacatcagccagcaggtatgttttaggtgatcagacctaataagcaccgttatcatacagttgcaattagccaacgtaggtggggccaagtttg

SEQ ID NO: 9988 - DNA, 270 bp, Zea mays
  Clone ID: MRT4577_109108C.1
gacccacaccacccatgcaccgaatcaagtacgacgcctattaatttacgcagaccgaacaccaaccccggggggggctaataacaggaacgggacaccaccccataatctcacatccttcctcaccacatcgcccgtaccattccacacatatctcttgccagacgcccctcacatccgcactctcctcctccagacccatcagatacacaacatgatccaccatgatgctgacaaatttctcatcccactccctcatctcgcacccca

SEQ ID NO: 9989 - DNA, 700 bp, Zea mays
  Clone ID: MRT4577_109109C.1
ccggccgggatcatcgatttcgtccacccatcaacaacgcaccggcaagcatcagcggatcatcatcaagcagatcgaacgaaccccaagacacaaccggccgtcgactagcgcatctccaacgactgaaacaatggcgcaccacttcctgggcaacaagcaccatggaggagaggcggccaaggtgaccgactggcgcaaggaggagaagcaccacaagcacatggagcagctcggccagctcggcgccgtcgctgcaggagcctacgctatgcacgagaagcagaaggcgaagaaggacccggagcacgcgcactcgcacaagatcaaggaaggggtcgccgccgccgccgccgtgggcagcgccggctttgccttccacgagcatcaccagaagaaagacgccaagaagcaccgccaccatggacaccatcaccactagttactgacggcttccattctcatttgttaccgggcgcgcctggcagtcttgctcatatatatgcaccgaccgtcgatttatctaccacttttagtatacaaataaatggggtctctcgaatatgtatgtatatatcatcgtaacgtcctagtatatattattactgtgtgtcacgtactaaaaaaaaaaaaaaaaaagcggttgagtttttattgatttttgttcggttcgcgttaggtagaaaaaaaaaaaaaaaaa

SEQ ID NO: 9990 - DNA, 285 bp, Zea mays
  Clone ID: MRT4577_10910C.1
atggccttcgcggtcagctttttctcagccttctccttgatggacgtgggcgagggctactccgtcgcccgcactgtctgcaatatattcctcgacgccctcggctgcaggggccggtgcgacgacacgccttgcggattctctgagcccgggcaccgacatgcggtgccccgacggttgatagagactcggtggctgccatggcgacacggaaacggtattccatcgagcgcgcttgctagctggcgtgatcttggcgcgggggagctaggtggagcccacgcg

SEQ ID NO: 9991 - DNA, 493 bp, Zea mays
  Clone ID: MRT4577_109110C.1
ggtgacctgtgtcattacgttccattattgaacaaacattcgacttatttgaaacttaaaatggaggattctacgtgaggttcctaggtatgacattactacaaaaaagaagtgttttattcactacaatgagtctacataattttattcgtcaacacaatattaaagactatgagtttgacaatattgatatttcgaatgatgtacaagcacaacatgatagagcaaaataacaatgatgatttcacaatcgtagaatcactgtaagcacgaatatatatgcagatagttactgattagattgttgaacatatatcaatattgtgaaacccaaaacgcttgtaagtgcccaatgaaggcccaaaaagaagactttcctctataattcattcgtccattactatggtcgcaagctattcacggatactattctccgtatggattacgtaaccgcttagctatctatcttttctttacacttgcataaatctta

SEQ ID NO: 9992 - DNA, 115 bp, Zea mays
  Clone ID: MRT4577_109111C.1
gagcccccgaagccaatagcattgcgaatgctgacccgcgacaatcttattgctccgttcggtccttcgcctgctggtcgtgagtcaattccggtaccccgatcaatccgatgcc

SEQ ID NO: 9993 - DNA, 271 bp, Zea mays
  unsure (1)..(271): unsure at all n locations
  Clone ID: MRT4577_109112C.1
gtgagtgggtggcagggtgggtggtggagtccgtgggccctggctgggcacaaagcccacacagatctcgcactagatagacgggggggggggcatgatttgtgggccgtgattcctccaacaagggccgggagttaatgcatgcgggcatgcggcggcaggtcgttcgcggcgaaggacgaggtgttctgcctgttcgagggggtgctggacaacctgngtcgtctgagccagcagcacgggctgtcaagcaaggcgccaacgaggtgct

SEQ ID NO: 9994 - DNA, 297 bp, Zea mays
  Clone ID: MRT4577_109113C.1
tccgaaatattgcaggccgacgatacagctccatggttaatgctgtgcgcttctgtgagaagatctgacattccaatgatgttggttcgtggagcaacctagtagctgtatactgatactagcttcttttagtaacagatgtaggtcgctcacattctctttagatagtctatacagcttccggcacttaagacccataagaaattacacgcgcctactctctataagatcctagctaacgtacacggacatgcaatctcaacattcttttataatgtgaccgatattatcttaact

SEQ ID NO: 9995 - DNA, 361 bp, Zea mays
  Clone ID: MRT4577_109114C.1
aaaaaaaaaaaaaaaaaatataaattactcatcaataaaagtaaaaaaaaaacgaggtaggggaaaatagggtgaagcggatgtgagagaccggtctcactttctgatggccccaatttactacccctccaatccgaggtcaatagacgatcttacgggccgataattcacatcgctgggactgttgaacccttgggctaacccaggtaaatcgggtagaagcatatgctactttgccggggtggctgtacacttaatacgccggaccctaacgggttgaacaccgatggcacactcttcaagaatattgtcacacgccctatagaggtgtataaaacccggggaaggggtgggtaaacgc

SEQ ID NO: 9996 - DNA, 331 bp, Zea mays
  Clone ID: MRT4577_109115C.1
ggggtattgactcatccttcccctccggtgggggctcacagtggagagggggtatcatgatctttttattcaaatgagcggaacgagacggctgctttggatgttgtgtacccatgcttcttcctcgtgctttcctgggccacagacgaccaattcctacacaacaccttaacgacctacggctaagcactttatgtccataatcatgctctaatcggcaaacgcagaagtatcacgacctttttattaacaccttcttcacgaaggaggcgatacacaacaccatcgttaccatcaacggcatgtggcttgacagtcgcaacattaccgt

SEQ ID NO: 9997 - DNA, 375 bp, Zea mays
  Clone ID: MRT4577_109116C.1
aagcagtgtaacaacgcagagtactttttttttttttttttttttttttttttttttttttttttttttttttttttcccgcttccaaaatttaaaaggccacccttgacttaagggcctgctacaatataggccccctttggggtttagggattccacaaaaatcatgtaaaattttcacatgaatcaaggttcagggctccaagaagcatacggggggtattattcacatcaggcacggcacaacgggggctttatgaacccagcctggggaagcggtaggcggggttccccgggttacgacccggcgcatggaaagctagcccgcgtcctttgggttgttccccctgtttaggggcgaccccccccccccgg

SEQ ID NO: 9998 - DNA, 5887 bp, Zea mays
  Clone ID: MRT4577_109117C.1
ctcaaaccagttcggagcagaatgatcttcaaagccatcattgccatgataattgcttgtgtgtagaccttggtgagccccagctgccatcaggttcctttctctttgttcctacaactggcatgaggtacattcttacttgatcctccacaaagccgaatgagagtggcggattcaccccatgaccatgatgtaccatcgaggaaacgaaaacttgctgtaattggtgtagattttttccctagctgttactctttagactctaattcactcacgatgacctatcgctacggacgacaaatctctgtgattctgagctctggggctatcggagggcctagggttgctgcctggttcagggtggtgcgataaatcgccgtgtctcggctaggagggtgaggccagcagggcggcggagatgtctgcagacgaatatgcatgattgccacggcgctgctgggtacgacgtcaggaggcagcggttcgcgaggctcatgtggccaccggcacgagtaggggcagtggcttcatcaccaccggcaaaagtaccagctacttctcattgcggttcagcggctacccagctacgaaccatttatcgactggaatcgagtgaatagctgaagcggtacatctttcttccctatctactcccatcagatttcttggtaagagaagggcccgtgatgatcgttagcgttggcgcttttgtgcagaaagtggcagtgcctcaattcatcggaatgaagcgtatgatggaaaagaaggcacaaggaaatcccaaattacggttaattagactttgtacaccaaagaagatgatgtttaagaagatgatggaactcttcaccacacgaaacatgatggaataactattgcacaaccagatatcatctgggatttagctacggcatcatacaaagggttccaatgtcaaccaaggctctgaccgggaatatgttactccgacatgtctgtgaatgagcatttgccattcatttagagcttgacaggggtgttgtagtgaccgtgaataacacaatggggccaaggcctcagcacattggcgtcgggacaaagcaagctaaaagatccttccatgattgtatgtttaatgctggcgcagatacctgtggatttcgtcttcttaaaccaaggaagattttggagattcctgctgctgaacgcgacattccagtatctcatgctgcagggaagcagtctcgtcacacgcttgtttttgatttaaatgttgcagatgacgaagatctgaagtaagtatatcccacagtgtactgtacagactagctgatttgaattgcgaaataggaaaattcgacacaactagtgaacaaccatacgccaatggagttggcaactacggagctcatagggtcattgatcctacagaagatgctcgacaatatgggggttgagttctactggcatcgattgtttccaacatcgctagaggggatttttctccaatgttggcatgaatagcgcgagttcccgtgttcttcagttggcttcaggcctccatcatcttgaagtctggtgttgggagtagtccttaagtaggaaactagcctattgacgaacttctcttggccctgcttcgtgcactaggtaaattgcctattaatctcagtgcattacaaagttgtagcattgggaaatctgtctatcagctgcgcagccattaaaatcgggagatacaaaagaaggctaagtgtcttcttgagaactagaacaagcgtgttgatgctgagatgaagtcaaatgatgtgaagcctttagtttccggtcaatctgtttcctggtcaggaaaagcaggttttcaagaaatttcaaatgttggaaccaaacgaggtggctcaagtgagaacagtccaaaaaattcagtgcccactctttcatcatcaaaagttttgactgataaacctgggggcacagatgctgcagcgaagttgaatcctggggtatctgcattgtcaaatttacaacatgtgcaatcaacacatgttactaccaacttgaaggagcagccctgcaaatcaactggtgggactggctgtcctgagctgcctactgtaaaagaggagaaaagcagcagttcaagccaatcgccgaacaacagccagtcaatatctagtgagccatcgaaggatgcaagaagttcaactgctgcttctggtggtgctagtaaaacttctggaagctcttcacggagccatcgagcggcaagcaatggtattgtgacagggaacctgaaggaactgtctgtagaaagatctctccacctaggtcgttcattgctgcaatgaaagtcatgaagaacttgctccgcttctgtaataccagttgatataccatcggctcatggaactacagatactgcaatattacgctattcaactcctggtggtagtgttgctacaagggcaagtgcacgatctgtagatgatccatattttttcccgagctgataggcatctcattgctaatttgctcaggagggggtatggctgcggaggaggaatctttgtgatcctgagccctggggctactgtaattaggcggtccgctctgtttgtcggtgatatactgtttatcacatgctgcagctttccattgcataagattatacaccaggcttttcaattggatcagcaacatttaataattctgcatctgcaggagttccatattttccaactctttcctcctctcttgttgggccagccggagcgttgccttcccaacattcaaggcagtatgccataaatcttgctgagggtagcagcagtagtgtacgtgacggtaatcggaaatgggaaagtcagggccttgatcttaactcaggccctggaagtatagatttagaaggaaaggatgaacggatgcctttaccagtcagacaaaatttgatcccacccctacatggctttgtggaggatcaaggaagaatttaccaaatgccagttgtaggaacaaagagaaaggaacctgatggcagttgggactcagaaaggtctacatacaagcagttaccatggcaatgagggctctgaaggagatcattttgcaccgactggtctgcgaatgagcatatcacctgcatgtagagcttggccggtgtgttcttcagtcactggactacactcaggggattcagccccatgacgatggcgtgggattgaggaaagcgaaaacttcctgtaattgttgtagattttttcttagctgttaggcttttggttctaatttactcaggagggtatggctgcggtggaggaatctttgtgatcctgagctctgtggccgctgtaattagaccgtccgctctgtttgttggtgataaactgttgagcacatgctggagctttacataagaatttagatgtgtccttgttccttgtgtggataaacaaacacagggtctgttaaaatcaactaatcataagcatcttctgagtgtgtcggacaacccaggcgcctttgatagacatgacagtatggctggaaaattagatttgttggctgcagaggtgagaaaaactgatgtcgtgggcaatagtaacatagtgcagaatgagactgaaaagaaggaacatgcttgttcctctttggctgatgttccaaaactagtaccagcagcgtccccagttggtgtggcaaatgggaataatgagatgaaagaatcaaacggcagttcaagtgaatccaatagccatgtaaaatctgaaggtgtcaattctcagcaaagcgagcaaagtgcaaagcagagttcaaagaaatccagtgatggtgtgtgcggaaaagaagaccatgtcttatcagacgaagaaggttcttctctagccgctcacaccaagtcaaatgctacagccaagcttgattttgacttgaatgaaggaatacctggggatgatgggcatcagtctgagacaactgcctcacctgttgtatgttcctcagcaatccatttaactgggcttttgccattcacttcgcctactacaagtgggttgccgccagctccaataacagtagctgctccagctaaaggaccctttgttcctcctgaaaacctactaagagcaaagccagagatcgggtggaaaggttcagcagctacgagtgcatttcgtcctgctgaaccaaggaagattttggagatgcctgctgctacacgcgacattccagtatctcatgctgctgggaagcagtctcgtcccacgcttggttttgatttgaatgttgcagatgaccaagctctcgaggaagatatcccacagagttctgcacagactacctgttctgaatctggaaatacgagaagtcgagatggctcttcacgaagcgctggtattgaacttgatctgaacagagctgatgaagttgcagataatggccaatttgtaccaagtgcttcgcacagagttgaagtcccattgttgtcaacaagatcgttacatggagttttctctaatgctggcatgaatagctcgagggactttgatcttaatagtggaccaggccttgatgatgttggcactgaacctgcaccaaagagcctaccttctaaaaatacaagcagtattcaattcctaccacaagttcctgttaggatgaatagtgctgccatgagtaatatatcaccatggcttgcctctgccagcccttgtggtccagtagctatacaatcttttttaccaactagagaacagccatacccaattgaggcagcacctggagcccaaaggatcattgcgcctacagctgatgctggccaattcggaggtgatccctgcaggcctccagttgtttcaacgtctccagcgatggtttttcatccgcctgcatatcagtatccaggattcccttttcctcccagtgttcaccttcaaacaccggcattttcaattggatcagcaacatttaataattctgcatctgcaggagttccatactttccaactgtctccccttcttttgttgggccagctggagcgttaactccccaacatttaaggcagtatgccataaaccttgctgagggtagcagcagtagtgtacgtgacggtaatcggaaatgggaaagtcagggccttgatcttaactcaggccctggaagtatagatttagaaggaaaggatgaacggatgcctttaccagtcagacaaaatttgatcccacccctacatggctttgtggaggatcaaggaagaatttaccaaatgccagttgtaggaacaaagagaaaggaacctgatggcagttgggactcagaaaggtctacatacaagcagttaccatggcaatgagggctctgaaggagatcattttgcaccgactggtctgcgaatgagcatatcacctgcatgtagagcttggccggtgtgttcttcagtcactggactacacttaggggattcagccccatgacgatggcgtgggattgaggaaagcgaaaacttgctgtaattgttgtagattttttcctagctgttaggcttttggttctaatttactcaggagggtatggctgcggaggaggaatctttgtgattctgagctctggggctactgtaattagaccgtccgctctgtttgttggtgatatactattgatcacatgctgcagctttacataagaatttagatgtgaccttgttccttgctggggaagcgttacgtcagctgaccatatgaacactggtgcaacgaacagctcgagttgctacgccatgtatcttggattgcagtgcagctgtatgtataagaattctagcagatcagcagctatatttttttgctgttttttttttgtcaccgaatccatctgcatctggttttttttttttcagtgtaatcgatcgtt

SEQ ID NO: 9999 - DNA, 597 bp, Zea mays
  unsure (1)..(597): unsure at all n locations
  Clone ID: MRT4577_109118C.1
cccagcgtccgcagcccctgttgttgagttttatgcaaactggtatgaagtctgcagggaactagctctagatatctacaaagctgaacaacaatacaagtctgcagggaactagactctgagaacatgttgctgatgcggagagcattgtagccaagggcataagagatggtgcaattgatgccaccatagatcaagcaaatggctggatggtatggaaggaaactggtgatgtctactctacaaatgagccatagatcatacaaatgagcccttgatgccacccaggattggggttttgcagagcctgcgatttatgtgagttaacatatcgatcttgaattcacatcacgggaagacacgtggtatgggagttgggcgcaagctcaagagccaccgcaggaaccagaggtgggctgacaaagcatacaaaaagccacttgggcaatgagtggaaaaaaccttttgctggatcatctcacgctaagggcatcattctggagaaaattggtattgaggccaagcagccaaattcggccatccgtaagtgtgcnccgtgttcagctggtgaaggatggaaagaagattgctgccttt

SEQ ID NO: 10000 - DNA, 3102 bp, Zea mays
  Clone ID: MRT4577_109119C.1
gaatattttcggcctcatttagcatctgatgctaatgcagagtcctggcacagcaacgacattaaaggagctactggttcggaggaaggtgataaatcaccatgtgctatattagatgatgacaacagcaggacacctgatcattctgttaaggatgcacatgcatcgcgagctgcgtgctcgtcatatatgaatgaaaaaggtgtcagtgaaactaaggtgggaacctcattcagcccaatgaatgctcttattgaaatcaagtactctgaagctagtcattcactgcaagctggagatgacacagctatgaatcttcttgctagtgtggcaggagaaatatctaaatctgaattggcttcttcaccaagtacttctgtaaagaaattggtctgtgagggtgtcaatactggaaaggttaaagtagaaagtgacatgggcccatcacatccagggcaagcagatgctaagaaagttgccatggggaatgaagtgaaaaatgatgcttgtttggttccgaaggaggaacaacatcaaactgcgccatctcctgagctagcagattcaaaagcagttaaatcttcagcaaagattgaaatccatgaagggcatgcaaacaaatgcaactcccagcatgcttcaattgattccaaaggcgaaaatcgggatggctgtactgcccatgggaaagttgaagatggcagtacaaacaaggatggtgccatggaatctgcattcggcagccagcgtagcttggttgtttccagtaaaaattcaagattggttcttgctggggaatcttcattgtctgctgctgataaacaaacacagggtctgttaaaatcaactaatcataagcatcttctgagtgtatcggacaacccaggagcctttgatagacatgacagtttggctggaaaattagatttgatggctgcagaggtgaaaaaagctgatgtcgtgggcaatagtagtgtattgcagaatgacactgaaaagaaggaacatgtttctccctcttcggctgatgttccaaaactagtaccagcagcgtccccagttggtgtggcaaatgggaataatgagatgaaagaatcaaacggcagttcaagtgaatccaatagccatgtaaaatctgaaggtgtcaattctcagcaaagcgagcaaagtgcaaagcagagttcaaagaaatccagtgatggtgtgagtggaaaagaggacgaaaaagaagaccatgtcttatcagacgaaggttcttctctagccgctcacaccaagtcaaatgctacagccaagcttgattttgacttgaatgaaggaatacctggagatgatgggcatcagtctgagccaactatctcgcctgttgtatgttcgtcagcaatccatttaactgggattttgccattcacttcgcctattacaactgggttgcagccagcttcaataacagtagctgctccagctaaaggaccctttgttcctccagaaaacctactaagagcaaagcctgagattgggtggaaaggttcagcagctacgagtgcatttcgtcctgctgaaccaaggaagattttggagatgcctgctgctgcacgcgacattccagtatctcatgctgctgggaagcagtctcgtcccacgcttggttttgatttgaatgttgcagatgaccaagctctcgaggaagatatcccacagagttctgcacagactacctgttctgaatctggaaatacgagaagtcgagatggctcttcacgaagcgctggtattgaacttgatctgaacagagctgatgaagttgcagacaatggccaatttgtaccaaatgcttcgcacagagttgaagtcccattgttttcgacgagatcgttacatagagttttatctaatgctggcgcaaatagctcaagggactttgatcttaatagtggacccgacctttatgatgttggcactgaacctgcaccaaggagcctaccttctaaaaatacaagtagtattcaattcctaccacaagttcctgttaggatgaatagtgatgccatgagtaataatatatcaccatggcttgtctctaccagtccttgtggtccagtagctatacagtcttttttaccatctagagaacagccttacccattggaggcagcacctggagcccagcggattattgcgcctacagctgatggtggccaatttggaggtgatccctgcaggcctccagttatttcaacgtctccagcgatggtttttcatccgcctgcatatcagtatgcaggattctctttccctccaagtgttcaccttcaaacaccagcattttcaattggatcagcaacatttaataattctgcatctgcaggagttccatattttccaactctttcctcctctcttgttgggccagccggagcgttgccttcccaacattcaaggcagtatgccgtaaatcttgctgagggtagcagcagtagtgtacgtgacggtaatcggaaatgggaaagtcagggccttgatcttaactcaggccctggaagtatagatttagaaggaaaggatgaacggatgcctttaccagtcagacaaaatttgatcccacccctacatggctttgtggaggatcaaggaagaatttaccaaatgccagttgtaggaacaaagagaaaggaacctgatggcagttgggactcagaaaggtctacatacaagcagttaccatggcaatgagggctctgaaggagatcattttgcaccgactggtctgcgaatgagcatatcacctgcatgtagagcttggccggtgtgttcttcagtcactggactacactcaggggattcagccccatgacgatggcgtgggattgaggaaagcgaaaacttcctgtaattgttgtagattttttcttagctgttaggcttttggttctaatttactcaggagggtatggctgcggtggaggaatctttgtgatcctgagctctgtggccgctgtaattagaccgtccgctctgtttgttggtgataaactgttgagcacatgctggagctttacataagaatttagatgtgaccttgttccttgttggggaagcgtt

SEQ ID NO: 10001 - DNA, 247 bp, Zea mays
  Clone ID: MRT4577_10911C.1
gagcgacctgcggtgcgcgccccgccgggcaagctctaactccaccaatcatgccgcgcgcgccgacgccgccgcgccgtgctggcccccatcggcccagtgctgcaccatcggccgggatcctgggaccgagttgcgctatgcgatgaaactcggctgctgtcatctcgcgaacaataatgtagcgcggcggctatgggtcttagccgcacatgcagcagtgcgtgcgttatacatcgccagacgg

SEQ ID NO: 10002 - DNA, 314 bp, Zea mays
  Clone ID: MRT4577_109120C.1
cgcagatccgtcgtccggtgagtggaagccgcacgaacccatggcctccggcgagcttgcctgcacctacgccgctctcatcctcagcgacgatggcatcgccattcaccgcccagaaaatcgccacaaccgtaaaggcggccaacataaaggccaagtccaactggccggcctttttggccaagttcctgaaaaaccccaacgtcaaggacctaatcctttccgtggaacctggtgccgaacctgttcaagtggttgttgccgaacctgctgggggggctccggttgttgttgccccggtttgtaagggaaaa

SEQ ID NO: 10003 - DNA, 344 bp, Zea mays
  Clone ID: MRT4577_109121C.1
tctcgtactacccttctctctctcttctttctttcttatctccgacgaatgctatctacaccaccgtgtgctttctcttacacataccccgccaccctctccttcttcttcttcccctcctctcctatccctaatctaatgttgagcctgtcgtccgagatgaacgtggtctttttttcctccatgtactccaccggacacctctccccctactcctacaccctcattaacacatgccctgaacatttcgtggtgaatgtgctctactgcagcatctgccacactgacatccaccaatccataaaccacctcgttgcttcaaagtatcctatcttcccttttca

SEQ ID NO: 10004 - DNA, 701 bp, Zea mays
  Clone ID: MRT4577_109122C.1
cctacaaccacccctacgccgccgccgccgccgccgccatgggtatcgacctcgtcgccggcggccgtaacaagaggaccaagcgcaccgcgccaaagtcggacgatgtctacctcaagcttctggtgaagctctaccgcttcctggtgaggaggaccaagagccagttcaatgccgtgatcctgaagcgcctcttcatgagcaagaccaaccgcccgccgctctcgctttgtcgcctcgtcaagttcatggacggcaaggataaccaaatcgctgtggtcgtgggcaccataacagatgacaagagagtttacgaggtgccggcgatcaaggtggcagcgctcaggttcactgagacggcaagggcccgcattgtgaatgccggtggagaatgcctcacctttgaccagctggcccttcgtgctcctcttggtcagaacacggttctcctgaggggccctaagaacgcccgtgaggcagtgaggcacttcgtaaggctcctggtgtgccgcgcagccataccaagccttatgtccgctcgaagggaaggaagtttgagagggcaagaggaaggaggaacagcagaggcttcaaggtctaggttgctgcttgttcatgtgctacacagctcttgtttgagtctgagttatgttataattaagtgctaggatcatctaaattttgttcgaacgtcatgcact

SEQ ID NO: 10005 - DNA, 389 bp, Zea mays
  Clone ID: MRT4577_109123C.1
atgtgattttaccggtttttttgtttttttggcagggcaatcaaacaagccaaaaatgcgttgaaatttgactggataaaagattgcacctaacttcagggaatcggctgtgggttaaatactctacactactccgtaggacgggtcttttaaagcgaataagccggacaatggcccgaatatttgagggggttgatcggatcaaagggtcgtcaggatccagaacgtttatgcgattggcttatagggctggaaccgggtgttgtttaacacatgctcaaaaccctgtttgtcaacctcaaaccttgggcacccccctcttggtacaattcaggtactaagggacgccccactctttgcccacgctgatcccttcttttctcaaaatc

SEQ ID NO: 10006 - DNA, 292 bp, Zea mays
  Clone ID: MRT4577_109124C.1
atccgatccagccgccaccaggagcagagtttttcgtcatctcttctacggcgaacaacccccagacgcccaccagatcacttggtaaactttgatgacgggtgatggcggcttctatcgctaacctgaacagcgtggcagtgcttaaaaagcttgaggagctcgttatgaatcgcaggtacatgactggctaccaagctgtcaacgatgacttggctgtctacacttaggtttcgattgttccctcgtccaacaatatcaacgaaggaaggtggtttaatgacattgatgc

SEQ ID NO: 10007 - DNA, 295 bp, Zea mays
  Clone ID: MRT4577_109125C.1
gtcttcataccataagctggggctactactgtccgcataagaaccccagcgacacccaggagcagtttctacgagccgtggctatcctgtttctggttgccagcaccaactccacccattcatgccgcgggggaggatgccacccaccgccggctgctaatatacgcgccaccagtgaatatgccacaccgcgcgtcaactgccatctgggggcaattccaccacgccgttcagctgtcggcgcctgatgacgtaccacctgctggccatgtgcgcgcaactgttattattactg

SEQ ID NO: 10008 - DNA, 393 bp, Zea mays
  Clone ID: MRT4577_109126C.1
atcaataattattaacctttaaaaaagggaaaaaaaaagggaaaaaaccccccccacccccaaggaagaaacacccccccaaaccaaaaccccgaaggcaacaccccccccacccgccggtcccccccccgaaaaaccaggaccaaccttaaccaacaccccccacccaaaggaggggagaaagcccccccccagacccgaaaaacatggcatccccaacaaccctttccggcaggcccccaaagcaagcaacacgccccaaaaaaacgggatgggacggaaaaaccaagcgggcgggaccacccccccccctaaaaggggcccccgacaaaaacccctcacgcttccttcatgggcggccgaaccaaaggaaaaaacggaccctgaaccaaa

SEQ ID NO: 10009 - DNA, 246 bp, Zea mays
  Clone ID: MRT4577_109127C.1
atgtgtgtgaattgtgcgtcgataaacatcctatctatcaagattgcatgctcggatatcgacttccccatccaagtctatggcaccattgtcgccagggactgcatcgactacaagtgcgtttacctcttccaccgagataatgaccattgccaactcaacagctctaattgctgcttgtttgtagacagtggtggaccgaaccggcattctgttgtggatgctggtactggtacaactacgtaa

SEQ ID NO: 10010 - DNA, 479 bp, Zea mays
  unsure (1)..(479): unsure at all n locations
  Clone ID: MRT4577_109128C.1
ccccggtcgacccagcgtccgggcctatgcctgcagcaacatggttgagcaggtgctgccgtctggtggcttgctcatatatcagagcttcactgctacgggtgcagccacccctgggtcgccgaggtcagtcctgcatgacttcgctggtgacattgtcaagcctggcgatagtggtgaggccgatggcccctgctgggaagctgatgctgtggatgagagcgaggaaagagaggtaaagaagatgaaatgctgatgctgtgatgagctatgctgaaggttgacaaatcagatttagagttgctgcccttggtcatcttgtgtagcagccaagccagattatttatgctgcataacctgtgctattgtggtgtggcacatgcttatatttgcaataaagagctctaggtggttagccttgtctgccacagtgagtagtgtacccannnnnnnnnnnnnnnnnnnnnnnnnnnnnnnnn

SEQ ID NO: 10011 - DNA, 1401 bp, Zea mays
  Clone ID: MRT4577_109129C.1
aatgttggcggcatccctgctgttttaggaataagcctggtggacctcgagggcggcggggcatggtaaactttagaccaagcgtcaatctagttagggaagcccttgcagctggtcaggctaagtttacgctaactgtgattccaccaccgtcaagaaaccaggaatactcacggaattatttagaattagagttagatttcttgaaagatcaacatgcctatgaggaagacttcccgtctgtactaaatgtatccatactggaaccagaatcatccaaacaggctccagagccagtggaacaatcattgttatctgaactttcatgtagacaggctgagaaccgactcaggatagcgtcagaagcttgttatgatggtgaaagttttcattgggcatcatcatctttccacataaatgatgctgcccgccacaaatctggtttgaagtctatagggaagcacaaagcagcatcggaatctggtagacctcccaaatccaaagtccagaagattactgaattgcatcaggaagggccaattgccatgagtaattttctctgtatgcctgctcaactattgccaagtacagctgacttccacattagtgactccctatctgactttggtatcaacgattatgaattcaactactctgaggatctcttgcaagagtttgacgccctcgagttcttcccagatcagggtgactctggtctccttggtattgaagagttagaacctctttcggatttcacagatatcggatgaacatagatgagcaaattatggttgatgggatgctgtcctataccaagaggagacaagatcgcctctggcaggaggccaaggatataggttgagttgctcaaccatgcacagatgtgcagatagcggatgaacatagatgagcaaattattgttgatgggatgccctcctataccaagaggagacaagattgcctctggcaggagcccaaggatacaggttgaattgctcagccgtgcacagatgtgttgcaagcagcaagctatcatcatggctggctggagcaaagcactggcttggtgaggtcacattgatctgacaagctcggaggatgggtttgcactaatggcggcatttgggtaatttccatacatgtatgtatattggtagtctagaatcgtaggatgtagaaatgcctccctcatttgtgtttgagggtaggaccttgtaaatcgaccacatggaaattttgttgagcaggtaccaacatagaagggaaaagaagaggccctcagcatcacccatttgtcgctgtatctcttgttatgttcattctctgtttaatccaatgctgtttggctatcttgccattgaaaacatctcagatgtcaaaaaaaaaaaaaaaaaatctat

SEQ ID NO: 10012 - DNA, 236 bp, Zea mays
  Clone ID: MRT4577_10912C.1
ccacgcgtccgcccacacatccgcggacgcgtggtataaaataaaaaaaaaaaaaaaaaaaaaaaaagaccgtattaaaaaaaaaaaaaaaaaaaaccccacccacaaaaaaaagggcccacctttctaaaacatccaagcttactcccccatccattccacgtctatcccctttacactgccacctaaattcaaaccacttcccaaccttttacaacatcttaactccaaaaacc

SEQ ID NO: 10013 - DNA, 293 bp, Zea mays
  Clone ID: MRT4577_109130C.1
gtctgagaaacccattctgaaattgtatattagaagcaaaatgttgcacattttggtttgtttgccgcaggaggatttgggaaagtggagttggtaccattgagaaggagtttagtttctaactggctaatctagcatgtgaacaaacaggaatccaaataacttgttttcaaagcagagctgtctcaatgtagcaagtataggtagtgcaaaccttacttcaggaagtgtcctcaaattggggtcccacttaggagatggagaaaaagagaaggaaaagtgccagtcgcggt

SEQ ID NO: 10014 - DNA, 594 bp, Zea mays
  unsure (1)..(594): unsure at all n locations
  Clone ID: MRT4577_109131C.1
gctttttcttaaggtagaacttgccctgggcgtggggggggggaccccccggcacattgatggaagcttccgaacccgcctacccttttgatggcggtctaacgctgccatcgactcccccctggccgaagctaatcatgttttgtacccgaaccgacttggactctgtcttgtggggtaagattgggccgtgtcttcaaacattcatcgtccgccagttggcatcctgcaccaccgaccctcgcacgactgagaccaagagaagagacctgctaagacgagttacaccatttcatatctcattttgcgccgacttgaaaccgctactcaacctcgtcgacgcctgcagcgttttagaccttttcaaaaagcccgactgtggtcaggtgccgtcagcgagtatcgcatgctgcaacaccgattngagtgttgtgtgttgcgatatcagaccggtacgatacaccggtccaccaagttgcatattccagagactcacgggcaccctctaagtctaaaagagagaagtctaacaagttatacgaagagcctgccagatcaaacatggataccgacccagtctcctgcaatatggac

SEQ ID NO: 10015 - DNA, 302 bp, Zea mays
  Clone ID: MRT4577_109132C.1
gcgttcatgatggcggttatactgcgaggacggtgaacgatgtgaacccccacgagtttggggggcctactccgaccatctcaaacgctccagcaagatggagcttcctgagtgggtagatattgtgaagactgcgaggctcatggagctccctccttatgaccctgactggtactacatcagggctgcatctgtagcaaggaaaatctacttgagacaaggcattggtgttggtggcttacagaagatttatggtggccgtcagaggaatgggtaccgcccacctcacttctgcaagagca

SEQ ID NO: 10016 - DNA, 289 bp, Zea mays
  Clone ID: MRT4577_109133C.1
ggacaacaaaaggactctacattttattcttaactaggacttgggcagcaaactccagggtaaaagactggaatgagcccagctgattcaggtggagatgctgtttttttggaatctagtgtagctgaaatgtttcaaactaaagcaggccatgagatgaacccttttcatcttcccagttctcaaacacactgagatcttccccacatttcactcctttctggcaattgctcgaggtcatgtaaccagagtgagcccatttgcccgggctgactgctgatctggcctt

SEQ ID NO: 10017 - DNA, 323 bp, Zea mays
  Clone ID: MRT4577_109134C.1
cccccccacaaaacattgaccaaacttggaccttagggggtccccccattaacaacccttcccaataaaataaaggggataattatgagggggggtaacttgaacaaccatcctgctatatatgcctttccccccccatggagctagctaaaaaacatccccccctaatttgctcgggtgaccccaggtgggagggagcttttatttttaggggatcgggccagggttaaacttaaaaaaccccttccaaaaaaactcctttataacttcttcggaaagcaaaggcttttcaaagccaaacctaaaaggcccccgacaaaagg

SEQ ID NO: 10018 - DNA, 611 bp, Zea mays
  Clone ID: MRT4577_109135C.1
aacgactccaaggtagacttagaccgcgtgcacatgtcgcggctctgggaccaaccgctcactaaggtcgacgccggtcagctcccccacaatctccaccgccgccgcaagagacactatgctgcccacttctaccatctcctggccgagcctctcgacattgccgactaccaccaccgcaggccgtccatcgagacgaagaggcagctacatgacccacggccgcgagaagaggaatgacctgctctacaggtggcaggagccagaaggcatgtacgagcgctggctgctacatctgttcctccatgtaggcagcgtcgacgaggacaccgacatccaggacatacgccccaatcactcacgagccgggtttttgggcatgagtgcctcaagcgaggaaggtagacaagagcgctctgcctaccacgacaagtgaacgatctctggatgaacctggacgatgtgcaaaagatatagtgctactcccgtgaactggcgttgacaaagatgtgtctgttgacgcgttcgcgacatgttacagatacacactctgactgagatgagtgccaccaactcaaactccacgatagatgcgaagactctgatgctcc

SEQ ID NO: 10019 - DNA, 284 bp, Zea mays
  Clone ID: MRT4577_109136C.1
aataacctatctaattatgaagcttaatagacgatagcgaggtctctgcgtgcgtttcgagtcagccagtcagttgcctgccatggcatgctctgagtctgtagatgatgatgatgtttgatggcctgtcgtgctctgtcctcctcccctgcccccggccctggagctctctatggcgagcacggtgtagagagagtgcaacacagtagcatgctagtcatgtgccctggtgtgttgtgtcaccatccgtctataataatcttatctataccccaccttttgct

SEQ ID NO: 10020 - DNA, 307 bp, Zea mays
  Clone ID: MRT4577_109137C.1
gggggtgacccacgcgcagctttgtccaaagcactaactgaagtctagaaccaaggtttagccatctacggggtggggggagccctcttaacactaacatgcacctatctaggcttacatgatgtcaaacggttagcacatcaacaactgttgtcatgtcgtcacacattttcttgttgctgcccgcattactatggatcaagccgcctcatttgctgggagacgcggaccgattcgaatcgtagctgtatccttgacgggttatccttcacacacgtcatggggaggcgcttcatcccctcacaca

SEQ ID NO: 10021 - DNA, 290 bp, Zea mays
  unsure (1)..(290): unsure at all n locations
  Clone ID: MRT4577_109138C.1
gacccagcgtccgaaccgttttagaacagcccacagacgggggagcggcggccgccacgcaccggaagcgggagagcccacccccggacaaaacaagcgaggagcggcccccagaccacaggcacgaccggcggcggacaagccgcggccggccggagacccccaaacggaagaaacaccgcccccacnccggggggggggggcgcaccacggcgcccaccgaagaagaccagcgccaaccgaaaaccgccgcccagaggaaggcaacgcacgccggaccgacggaggga

SEQ ID NO: 10022 - DNA, 423 bp, Zea mays
  Clone ID: MRT4577_109139C.1
ccaacacattctcattgcagggcaagcttaaccgaagcagcagaatgatggcaaatcatgccttatacagcgacaaaggagagacgtccatagttgcataacacaaatttcacggcaaaaatattggccggatcagaagagaagcctcggaagaatacagggtgtgtagacaccggaccacgcactggttaacaattaagtgtgcctataacagtccctctcatgacgtgcctcagtttttgcactagttgaactcaggcttctccgggtaagtacagcccggtctctttagatgctcagatttgtaacagtttgccgctgacagatttgcaatcagtgacctttcaccaccaacaacacatacagcacatgtgccagtaggagcagtctcatcctcgtagtaatgagcagtaactcctgcag

SEQ ID NO: 10023 - DNA, 1019 bp, Zea mays
  Clone ID: MRT4577_10913C.1
cggccgctcaggcggcgggcgccccctccccctttctcctctttccctcccaagcaaatcctctgctctccccccgcctcctcctccttcctctgccgcttgccgtgtttggttcggcaccgaaatggcattccacgacgaggcgccgctgctgctcaggatcaacaccgccagaggcggccacatgggcggaggcgagtgcgacgaggcggagaaccagcggtggccgccgtggctcaagccgctgctggcgaccagcttcttcgggcaatgcaagatgcacgccgacgcccacaagtgcgagtgcaacatgtactgcctcgactgcgtcaacggcgcgctctgctcccagtgcctcgcctaccaccacggccaccacgccatccagataaggaggtcctcgtaccacgacgtgatccgcgtgtcggagatccagaaggtgctggacatcaccggcgtgcagacctacatcatcaacagcgcgcgcgtggtgttcctcaacgagcgcccgcagcccaggcccggcaagggcgtcaccaacacctgcgacgtctgcgagcgcagcctcctcgacaccttccgcttctgctccctcggatgcaagatcgtaggcacctccggcgagttccgcggccggaagaggcacgccggcggcaagaagatgaagctgaagctgaagaaggcggcggcgtcggactcggacgactcgtccaccatcaccagcggcgggagcgacaagagcagtaaactgctaagatcctccccgtcttagttttgcttcttctcaggttttgttttgcttttacagttactagcagtggtaccatcagtaagataaccgcgactaagttttgcagccttgtacattgtaatattattactatagaccatgactctccgatgcttagatgtatatagtaatagtatcagaacgtgggggtagcagtcgatcggcagcgaggtgttcgtcgtatgtgcatcataagctgtatgtaataaaaataagaaacgctgctccc

SEQ ID NO: 10024 - DNA, 131 bp, Zea mays
  Clone ID: MRT4577_109140C.1
cttgcctcatacctctgtgctccacactgcggccaggcgagctgagtccctccatccgtggatgctttcctgcagctatgtggtatgggggtcattcctgcctcttggcaccaggttggggggcatgtgct

SEQ ID NO: 10025 - DNA, 325 bp, Zea mays
  Clone ID: MRT4577_109141C.1
ccctgccgcgcacgtaactagaacctttatacggacgcctttttctttttttttaaatcttaaacatctacggggggttccaaaaggaggaaacatatatcgtttggattattgtgttaccagccacaaaaacccaaaaagctcaaaagaagagactgacatcttaaatataactatcaacaattaccaacccgctcgactgaagctgagtacaataaatcacccaaaagaatcaccattcctgagagaacactacaaacaagccttcgtaactaactctacaaaaaattcatgacacactaacacacccaattggtgccaaaaa

SEQ ID NO: 10026 - DNA, 794 bp, Zea mays
  Clone ID: MRT4577_109143C.1
acttcagcgcactcgagctcgagccctcgccctctcctcaacacaagcctcagatctcagtcacctgcgccgccgcttcatttgtgagttcttccgtgatgcccaagagaaggtcctcccgtatgctgactacatcttcggcaacgaaactgaggcaaagatctttgccaaagtcagaggatgggagactgagaatattgaggagattgctttgaagatctctcaacttcctttggcttcaggcaagcaaaagaggattgctgtgattactcaaggtgctgatccagtggttgttgctgaggatgggaaggtgaaaacgttccctgtgatcctattgcccaaggagaagcttgttgacaccaacggcgcaggtgatgctttcgttggaggcttcctctcacagttggttctaggcaagggcattgaagactgcgtgagggcaggttgctatgccgcaaacgttatcatccagcgcccgggctgtacttacccggagaagcctgacttcaactagtgcaaaactgaggcacgtcatgagagggactgttataggcacacttaattgttaaccagtgcgtggttcggtgtctacacaccctgtattcttccgaggcttctcttctgatccggccaatatttttgccgtgaaatttgtgttctgcaactatggacgtctcctttgttgctgtataaggcatgatttgccatcattctgttgcttcggtgatgcttgcaatgcaatgagaatgtgttggaacgaaaaaaaaaaaaaaaaaaaaaaggcccctagggcc

SEQ ID NO: 10027 - DNA, 303 bp, Zea mays
  unsure (1)..(303): unsure at all n locations
  Clone ID: MRT4577_109146C.1
gggcgaatggggnaatccccgaggnncggcgggaacacacacttcnagtagcgagaggcaaggcgacgtaagaagtcgtctanttcnattgnatcgaattttacgccttcttcttccctctcttccttccccccctcnccntcttgtcttctcgcccttctcctccttcctttgtttcctttttggtctgtttgctcggcctcttgttgggccgtgtgcccccgcgctcctcccttgcctcccgcgtctcccgttgctccggtccgtgtgtcttcctgtgccttgctttgtgcttctggcccc

SEQ ID NO: 10028 - DNA, 389 bp, Zea mays
  Clone ID: MRT4577_109148C.1
gttggttcaggcgagcaacctccggcgatgcgacgctgccggcgtcgaggtgccactgcggacgtcgctgtcacgggcgggcgcattcgcatgatccatcatcctgccagcaacgatccatcatccacctctcctaccgtttatgttcttgatttcttgtttttgtttctaagaaaataaaggagagcatcagtttgcattggcgtaatttttttctatagacgagggagtgcaagaacacaaatcactgtcaacactcaatgcatcaccacctcaaaaagtatttttaattttattaagttataagttttgtaacctagcatgtgatgatataataagaaattgaccacgtgcatttgcgcactgttatttaaaaaaaagaaatactg

SEQ ID NO: 10029 - DNA, 1718 bp, Zea mays
  Clone ID: MRT4577_109149C.1
ccgggtaaggaatggagccgatcaataactaaggtatgcatgatctagtggttagctccaattttctagagcaggagggtgtgagttctagtgcttgctctgcactattttacttcacacccagcgcactcgagctcgagccctcgccctctcctcaaacacaagcctcagatctcagtcacctgcgccgccgcttcgttcgtgtggaggggagaagagaggaaatggcggcgaccgagggcgtgctcctggggatgggcaaccccctcctcgacatctccgccgtcgtcgatgacgccttcctgacaaagtatgacatcaagctgaacaatgctattctcgctgaggagaagcacttgcctatgtatgacgagttggctagcaagagcaatgttgaatatattgccggaggagccacccagaactctatcagggttgcccaatggatgcttcaaactcctggtgcaacaagttacatgggatgcattggaaaggacaagtttggtgaggaaatgaagaaaaacgctcaagctgcaggagttactgctcattactacgaggatgagactgctcctactggcacatgtgctgtatgtgttgttggtggtgaaaggtcattgattgcaaatctgtcagcggcaaactgttacaaatctgagcatctaaagagaccagagaactgggcactagttgaaaaggcaaaatacatctacattgctggatttttccttacagtgtcgcctgattctatccagctagtcgctgagcatgctgcagcaaataacaaggtgttccttgatgaacctctctgctcccttcatttgtgagttcttccgtgatgcccaagagaaggtcctcccgtatgctgactacatcttcggcaacgaaactgaggcaaagatctttgccaaagtcagaggatgggagactgagaatattgaggagattgctttgaagatctctcaacttcctttggcttcaggcaagcaaaagaggattgctgtgattactcaaggtgctgatccagtggttgttgctgaggatgggaaggtgaaaacgttccctgtgatcctattgcccaaggagaagcttgttgacaccaacggcgcaggtgatgctttcgttggaggcttcctctcacagttggttctaggcaagggcattgaagactgcgtgagggcaggttgctatgccgcaaacgttatcatccagcgcccgggctgtacttacccggagaagcctgacttcaactagtgcaaaaactgaggcacgtcatgagagggactgttataggcacacttaattgttaaccagtgcgtggttcggtgtctacacaccctgtattcttccgaggcttctcttctgatccggccaatatttttgccgtgaaatttgtgttctgcaactatggacgtctctcctttgtcgctgtataaggcatgatttgccatcattctgttgcttcggtgatgcttgcaatgcaatgagaatgtgttggaacgagatgtttttgattgcgttttgctttgttcctagcaggccagcaaggtagcatcagccttgccctaagttgaaggccgccatctatttatatgttgcagtcatcgatcaatccaattagataacttgctgtttctttttcataaatgagtgttttgtgtgccattgaatacaggtaaaagttatcttgtgccaaaaaaaaaaaaaaaaaagcggcc

SEQ ID NO: 10030 - DNA, 145 bp, Zea mays
  Clone ID: MRT4577_10914C.1
aacaaaccaaaaaaagctgagaattcagaatagccaccagaaagactgaaccaatccataatgatgggccggagaacccaaccgttctatgctgggaccaaccatcaggagaagcaatatgaaggggcacactgatcccaaaaac

SEQ ID NO: 10031 - DNA, 259 bp, Zea mays
  Clone ID: MRT4577_109150C.1
ggggcacaaagggtcttattttgatccctgggcatccacaaaccattggccaaaaaggtacacaaaggtaatgttgatccctaaaaatttttaaattgcccaaacgagttttaattgatgccctaattaaaaaaccccattacgggtttgacataaaacgatttgggatccaaaaaaaaaattcgtttccaaaccgggggggagttcccttaagcgagggcgtcgtcgtaaaaaacggccccctcaaaactttttaaaa

SEQ ID NO: 10032 - DNA, 350 bp, Zea mays
  Clone ID: MRT4577_109151C.1
ggggggggagcaagcttacatatttcctttttttttctccaacaaaaaccaatttacaaatttgggtgggaacaacacaagaagagcatttggtacccaccccaaagtttatacagatccagcgctttcccaaaagcagggttcaactcgtaaaaaaaagacgggaatcaatttagctggcgggagggggggatttaactgacataggggttgagctggcggacaaaactggaaaaattgttgtgcttgaagggcgcggggagcaacctctgcaaaaaaacaaaggggtcggcgacaacaaaactgttgttgccggtgccccagccgatcacccctgcgggccggggggc

SEQ ID NO: 10033 - DNA, 746 bp, Zea mays
  Clone ID: MRT4577_109152C.1
aaaaaaaaaaaaaaaaaaaaaaaaaaaaaaaaaaaaaaaaaaaaaaaaaaaaaaaaaaaaaaaaaaaaaaaaaaaaaaaccccgttccaattcctacctacgcagaaaaggccagccacctccccggcgttttcacgttttttgggcccgccgcctttcctccgtttttgcctttttccctttcccctcccgtttgaagcaaatggcctccatcgccggatttttggccctttccttcgccaggcccggaaaggaaatcaaaaaaaattttttagttttttccccgttgaggaagggaaaaattttcctccccctggaaccaatggctatgaaatttgtttcctgggctgccaaaaaggatacaaaaaaaaaggtttgggaaattgggaaaaaaaagtttgtttttcctgaccaaactgaagtttggggggaatcaaaattttttgaactcggggaaaattccctggacacggttgaaattgggatgagtcccaaggagcacttcaaatttagcggggaggagtccaggggaaaaaaaatccccaaagttgaaaacccccgggacctcatcgaaaagtttgttgttggaaaagggaaattctgaacctcctctatcgttggcctaccactctagggctatccctggattaaggtttctatgggcttaagatttgggattttctccccactggtgttgctatccccgggtcgaaataatacgagaatggtttagccggttgaacctc

SEQ ID NO: 10034 - DNA, 232 bp, Zea mays
  Clone ID: MRT4577_109153C.1
cggccctgtccggctggaccggaccggaggccccgtctgattaggtggaactccgcaccacatattaaaactctccctgcaaccatcctccacttcaacgatctttctccctcagaccctaaccaaccaggcaaccaaaccttctacgatggccgcacccgtctcacaaccgcctgtgttcgacaaggcatccacacagtttttccacagcgggataggctcgctcccggag

SEQ ID NO: 10035 - DNA, 645 bp, Zea mays
  Clone ID: MRT4577_109154C.1
gccggccggtccgggaccagagcaattcacaaagacctactacgatacttgctaccttgcatactacctgaaaactcttgcaatacactgaggtctagaatatgaagaccaatacactgatagtcaaccaagttctccaggaccgtcaggaatctgctcgaccgcttctcggaagagctctgcgaacaatcgagctgtggtccgctccgtcccacctgcgcggacctgccgcaacttccaagaccgcctcctctagtgcgcgcccacctcgaatgactgcataccccccaccaccaacagtgcaacgaccacctccccatggcgcaaattcctcaccgaaaagtgcaggtgcaagatccactaaagttgtccatcacgggacagcccatgaatcctaacgtggtccaccaccacaactgctagcgtactagagcgcagccacgaacaagttagctcgtgcttgccgcctggcatggaacacctgggtgtatcttgccaaggctgatctcataaagccagggctcacgacacacgtgccacttagcatatgtctccactactgaagagaatgctattgagatctctgacactgcatcctatcctttctgttcgattggacgtggaaggttgcctgtatcttctacg

SEQ ID NO: 10036 - DNA, 1009 bp, Zea mays
  Clone ID: MRT4577_109155C.1
ccataatgctgtgattgttatagtaccagcccaaatggcatacttcttcaggatgacagatgatatttatatatgctagaatataagctctgtttgcggtattttcctccagttgctcctgctgtgtttgctgcacttaacaggtatccaagatggatgagtcaatcgatgagatccaacaggatttccaggaatctatgaaggagctggctgctcttcgtggaacactgaaaacggtgattgaagacagggacctgtcgtggcaggaggtgaagtagctgagacgaaacatcagcatcatgctagaacgaggttgtgtcgctgaagaagaagatcgaagccttggacaaagacatacttgtcaaggagggagagatcacgatattgcaggacagcatcgacaagccgttcaacatcatctgcagcccaagtttgatgcaggagttcggcatggcgtgaagacggctgctgttttgttgacatggaagaaatggtggcagcaccagcttaggatggacaacaattgaaatatactacagaagttgtttctaatgtgctactgagctccattgtgtttcggcctacgcaatctaggtctccagtctgcctccaagaaaagctccataaccccatagtttctgcagaggttcaacaacttcaggatcaattataggctgagaagcaaaaaaaatggacttcgtgaagaagcagaaaccattgatagtatgaagaggttgatggaagaaaatagcaaccttcttcgtcaactattaagcttcaattgaagacaagtgcctccatcttaagtctggttgactactataggacctgcaaccttgtggtagctatagtagatatttatagaagctctagatttgaagttataggattattttttaattatgtttaatgtttaatactttgagttgaagttataagatttgctttgaattttaagttaaaggatttgcagatatatggtttggagttatatgattatttggtggat

SEQ ID NO: 10037 - DNA, 1211 bp, Zea mays
  Clone ID: MRT4577_109156C.1
gttgtatctcgttgttccctggaatttggattgcttggatatataatccaaaggtctctacctagtggacctgagatgcagtctacccaggacaagtgatccaggaaggctagcatgtcaatttgtaggagagaggacgtcatacatcaaagatgactgaagaagaggaagatgaagaatacctcgaagaggaagaagatgcccttgctggtgcagggggaacacatttagtttcacagccttcataaggatgagtcaatcgatgagatccatcgggatttccaggaatctacgaaggagctggctgctcttcgtggaatactgaaaaccgtgattgaagacagggacctgtcgtggcaggaggtgaagtagctgagaagaaacatcagcatcatgcagaacgaggttgtatcgctgaagaagaagatcgaagccttgaacgaagacatacttgtcaaggagggacagatcacgatattgcaggacagcatcgacaagccgttcaatatcatctgcagcccaagttcgatgcaagagttcgacatggcgtgaagacggctgctgttttgtaagtgagtcggtggatgaaaattcaagttattgtagaagacaacacatttttttgcttattacagcctgctatgatgttctgaactatgatgggttcagcaggcgccatttttctcttagagctattgttgacatggaagaaatgctggcagcaccagcttaggatggacaacaactgaaatctcctacagaagttgtttctaatgtgctatgagctctattgtattccggcctacgcaatcttggtctcgagtctgcctccaagaaaagctccatagccccatagttcatgcaaaggttcaacaacttcaggatcaattataggctgagaagcaagaaaaaatggccttcatgaagaagcggaacccattgatagtatgaagagccccatggaataaaataacaccccccttcatcaactattaagcttctattgaagccaagggcccccatcttaagtttggttgactactataggacctgcacccatgtggcagctatagtagatatttgtagtagctctagatttgaagttccaggattatttttaattatgtttaatgtttaaaactttgagttgaagttataagatttgctttgaattttaagttaaaggatttgcagatatatggtttgaagtt

SEQ ID NO: 10038 - DNA, 2147 bp, Zea mays
  Clone ID: MRT4577_109157C.1
atgattttggattcaagctgaagaagaggctatggttaatagagtactaaaggagatagtcttgtcaaaggtagttgccattgaacaattgcaatctgatatggcatcttcacttcacatccaagatgttatgagaaatgagatccgaagagtccaggatgaagatgaactttcttgcataacccacaaagctaagcagttggagcttcaggtatcatgtgtaccttgcatatttcatatctattttccctaataaactagcagttcatagtttttatctaatcaaagtaggattttggtaacagtttctctttcataatgaattaaccttagtttgtctagtgttagccaattgtagtggtcaagttgcagtatgtctcaaaatacttataagtaggtaaacctttttgctgaatgagctggttacctaacgggtatttcgaggccaactgatcccactcatctctttgatctataaaagtattagaaatgtattttaatgattgaatcaagttatttgctgcttgtttgtctttagcaaatcattattttgtatttttattttttgcatattgccaatatcctaggataatttttcccaagtggagattaggtctactatgtgagtgttcagttagatattcctttgaatgtttctacaaccagttctaaagttgagataatgtgaggtaccatacaaaacaacatattgttagagaggcataatgtcaacaaacatttattccaggggtcatcttggtggtcatataagaaacactaggcgaaaatgacataaattagtattacactgtcatgtttttgtatataaagtaggccatacagcttcactagaagtctagtctagagacaacagtgggctatcagtgaatgctatgttgttttaaagaccaacccataatgctgtgattgttatagtaccagcccaaatggcatacttcttcaggatgacagatgatatttatatatgctagaatataagctctgtttgcggtattttcctccagttgctcctgctgtgtttgctgcacttaacaggtatccaagatggatgagtcaatcgatgagatccaacaggatttccaggaatctatgaaggagctggctgctcttcgtggaacactgaaaacggtgattgaagacagggacctgtcgtggcaggaggtgaagtagctgagacgaaacatcagcatcatgctagaacgaggttgtgtcgctgaagaagaagatcgaagccttggacaaagacatacttgtcaaggagggagagatcacgatattgcaggacagcatcgacaagccgttcaacatcatctgcagcccaagtttgatgcaggagttcggcatggcgtgaagacggctgctgttttgtaagtgagtcggtggatgaaaattcaagttattgtagaagacaacacatttctttgcttattacatcctgctatgatgttctgaactatgatgggttcagcgggtgccattttttctcttagagctattgttgacatggaagaaatggtggcagcaccagcttaggatggacaacaattgaaatatactacagaagttgtttctaatgtgctactgagctccattgtgtttcggcctacgcaatctaggtctccagtctgcctccaagaaaagctccataaccccatagtttctgcagaggttcaacaacttcaggatcaattataggctgagaagcaaaaaaaatggacttcgtgaagaagcagaaaccattgatagtatgaagaggttgatggaagaaaatagcaaccttcttcgtcaactattaagcttcaattgaagacaagtgcctccatcttaagtctggttgactactataggacctgcaaccttgtggtagctatagtagatatttatagaagctctagatttgaagttataggattattttttaattatgtttaatgtttaatactttgagttgaagttataagatttgctttgaattttaagttaaaggatttgcagatatatggtttggagttatatgattatttggtggatgaaatatttgtgttcaacaaattcatatgatattttggctatgatgtgtaatattctatgacaatatcaattcatatgatgtgttccttttgatg

SEQ ID NO: 10039 - DNA, 966 bp, Zea mays
  Clone ID: MRT4577_109158C.1
cccagcgtccggaaggagctggctgctcttcgtggaacactgaaaacggtgatggaagacagggacctgtagtggcaggaggtgaagtagctgagaagaaacatgagcatcatgcagaacgaggttgtatcgctgaagaagaagatcgaagccttggacgaagacatacttgtcaaggagggacagatcacgatattgcaggacagcatcgacaagccgttcaacatcatctgcagcccaagttcgatgcaagagttcgacatggcgtgaagacggctgctgttttgtaagtgagttggtggatgaaaattcaagttattgtagaagacaacatatttttttgcttattacagcttgctatgatgttctgaactatgatgggttcagcaggcgccatttttctcttagagcaattgttgacatataagaaatggtggcagcaccagcttaggatgtacaacaattgaatctcctacagaagttgtttctaatgtgctactgagctctattgtattccagcctacgcaatcttggtctccagtgtgcctccaagaaaagctccatagccccatagtttctgcaaaggttcaacaacttcaggatcaattataggatgagaagcaagaaaaaatggacttcatgaagaagcggaaaccattgataatatcaagaggtcgatggaagaaaataacaacctccttcgtcaactattaagcttcaattgaagacaagtgtctccatcataagtctagttgactactataggatctgcagtcttgtggcagctatagtaggtgtttatagtagctctagatttcaagctataggattattttttattatgtttaatgtttaatactttgagttgaagttataagatttgctttgaattttaagttaaaggatttgcagatatatggtttgaagttatatgcttatttgatggatgaattatttgtgttcccc

SEQ ID NO: 10040 - DNA, 426 bp, Zea mays
  Clone ID: MRT4577_109159C.1
agacccttagctagcttcttctatctctacctagactcgtttggtgtcagaaggtaacagctagcaggaatggaggggaaagaggaggacgtccgcctgagcgccttaagttctcggagcgccaggccatcagaacgggggcctaggttacgtacgacaagaactacaatgagcccccgccggcgcacgtctgcgagctcggaaagctcgagtactgggacttcaaccgcggcgacatcacctaggtcttcggcaccttcctcttcctctagatctgcatcctcaccgtaatgactatctccgataccagctgcaagaggacgaccatctgcaatcatggcatggtgaggtccttcaggaacatgatcttggccatcgtctactgcaacaacttgttgtcctgtcaagacatccacactgcgtaga

SEQ ID NO: 10041 - DNA, 500 bp, Zea mays
  Clone ID: MRT4577_10915C.1
attcacacacacccatcccgtagctgcttctatctctatatacgctgcgcgtaggtggacaaccgtccactaacagatggaaatgtttgtaaagatgaggacgtccaactgatcgctttgaatgctcagacctccaacacctttgaccatgggaagggcaagatccacgaacaaggatggcatgaccccgcaccagcagcggtttttcttccccgggaagtagatcgaggacggttgtaccctcgccgactacaacatttcgaaggagcccttcctcttcctgtacgtttcgattctgagcggcatgcgagaatcgtaagacaaagacgtttgcgtcgctctttccccacacccgcatggactggaagttgaaggtcttggtgctggagttctataaaaaaaaaacaacatatgcaaggtgaacctcctccgcaaggagagcctcaacactgattgtggcgcgggcgtcttcatgtgacagcacttcgatcgacattact

SEQ ID NO: 10042 - DNA, 2408 bp, Zea mays
  unsure (1)..(2408): unsure at all n locations
  Clone ID: MRT4577_109160C.1
agcttgtgcttgttagcgcccataacaacgggatcatgcggtatgttggcaaagggtgaaaattctagcgtgcaagaagtgctagtgactgatgtcagtcaagacttggagaagcaggtagtgtggggctgatacgtccaataatgcgctagtgactgatgtcagtcaagacttggagaagcaggcagtgtggggttgatacatccaatgatgctgagagggtgagtgaacagcgagcggtcatgatggcacaagctaccttcccttattatctgatgattttggattcaagctgaaagaagaggctatgctgaataaagtactaaaggagacagtcttgtcaaaggtagttgccattgataaattgcaatctggtctggcatcttcacttcgcatccaagatgttatgagaaatgagatccaaagagtccaggatgaactttcttgcataacccacaaagctaagcagttggagcttcaggtatcatgtgtaccttgcatatttcatatctattttccctaataaactagcagttcatagtttttatctaatcaaaataggattttggtaacagtttctctttcataatgaattaatcttagtttgtctagtgttagccaattgtagtggtcaagttgcagtatgtctcaaaatacttataagtaggtagacctttttgctgaatgagctggttacctaacgggtatttcgaggccaactgatgccactcatctttttgatctataaaagtattagaaatgcattttaatgattgaatcaagttatttgttgcttgtttgtctttagcaaatcattattttgtatttttttgcatattgccaatattttaggataatttttcccaagtgcagattaggtctactatgtgagtgttcagttagatagtcctttgaatgtttctagaaccagttctaaagttgagataatgtgaggtagcatacaaaacaacgtattgttagagatgcatactgtcaacaaacattcattccaggggtcatcttgatggtcatataagaaacactaggagaaaatgacataaattagtattacactgtcatgtttttgtatataaagtaggccatacaacttcactagaagtctagtctagagacagcagtgggctatcagtgaatgctatgttgttttaaagaccaacccataatgctgcgattgttacggtaccagcccaaatggcatgcttcttcaggacgacagatgatattcatatatgctagaatataagctctgtttgcggtattttcctccagtgctcctgctgtgtttgctgcacttaacaggtatccaagatggatgagtcaatcgatgagatccaataggatttctaggaatctacgaaggagctggctgctcttcgtggaacactgaaaacggtgattgaagacagggacctgtcgtggcaggaggtgaagtagctgagaagaaacatcagcatcatgctagaacgaggttgtgtcgctgaagaagatcgaagccttggacaaagacatacttgtcaaggagggagagatcacgatattgcaggacaacatcgacaagccgttcaatatcatctgcagcccaagttcgatgcaggagttcggcatggggtgaagatggctgctattttgtaagtgagttggtggatgaaaattcaagttattgtagaagacaacacatttctttgcatattacatcctgctatgatgttctgaactatgattggttcaacgggtgccatttttctcttagagctattgttgacatggaagaaatggtggcagcaccagcttagtatggacaacaactgaaatctcctacagaagttgtttctaatgtgctattgagctccattgtgttttggcctacgcaatcttgttctccagtctgcctccaagaaaagctctatagtcccatagtttctgctaaggttcaacaacttcaggatcaattataggctgagaagcaagaaaaaatggacttcgtgatgaagcggaaaccattgatagtatgaagaggttgatggaagaaaataacaaccttcttcgtcaactataaagcttcaattgaagaaaagtgcctccatcttaagtttggttgactactataggacatgcagccttgtggtagctatagtagtagtagatatttatagttgctctagatttgaagttataggattatttttaattatgtttaatgtttaataatttgagttgaagttataagatttgctttgaattttaagttaaaggatttgagatatatggtttggagttatatgattatttgatggatggaatatttgtgtacaacaaattcatgtgatattttggctanaaaaaaaaaaaaaaaaaaaaaaaaaaaaaaaaaaaaaaaaaaaaaaaaa

SEQ ID NO: 10043 - DNA, 366 bp, Zea mays
  Clone ID: MRT4577_109161C.1
gtcgacccagcgttctttcaaattaagcagacaacaaaacctgtctatagctgcctcgctagccaaacctgactgctacctatcaacgaccaggtggacctgggactgggagggggaggccatctagctcgccccagccgcgatccgctcgatctcggggacccaggggttgatggataaaccacacatggggagggggcaccccaacatgctgctgtcgggcgcatccccggctgatggagccaacgactcaggaaaaggtggggtgccttcccaccgcagccaggtacaggcgacgcatcttacagtactggacaggcggatgtttggaacctgccggggatgccggcagggatacgaagggga

SEQ ID NO: 10044 - DNA, 722 bp, Zea mays
  Clone ID: MRT4577_109162C.1
cccacgcgtccggagttggcggcggtagttatcgcttccggcgatctcgcgcgtggagtcccgagtcgccaaggctgccgaaccctacggccaggccaagatttagtagtagctactataaatctgcagggtcgccagcactttggcctctcaacgcacgccccccgcccgacgtttccgatctcgtttctctcctcccgagtagcgaaatcttcgtacattctgagatgcagatcttcgtgaagaccctcgccggcaagagcatcaccctggaggtggagagctcggacacggtcgagaacgtcaaggccaagatccaggacaaggagggcatccctccggaccagcagcgcctcatcttcgccggcaagcagctggacgacggccgcatcttggccgactacaacatccagaaggagtccacgctccacctcgtcctccgcctccgtggtggcggcggccagtgatctggtctgctgatcgcctcccgccatggggactggctagctcttgccgctgcctgccagtgcgtgctcgtttcgtctttcattacgttatgtcttgctcaggccgtctcatgcatcttcatcagtctcttgtcttaggtcgtcgtttcttcttcacattggtaggaacgcacgttgtgcagtgctttggttaaaacaatttggagtaataaatctggcatattgttctaaaaaaaaaaaaaaaaagcgcccttt

SEQ ID NO: 10045 - DNA, 326 bp, Zea mays
  Clone ID: MRT4577_109163C.1
cgccggctctggtggagtcgccgcgcgcagagctggtgcgcctgcgcgcagcggtccggggttcgcgggtccgcccgcgcgtccggccggttctggtgcctgtgcgtctgctccgcctcgcgtgggcgtgcgccccgagtccgcgtgcgccgctcggcactcgcgctggtcggtcgctcgctcgtgcagcgcgccgcttggtgcagcgaaggaaccgtgccactcaacctcgccggcgtcgtgcacgccgagtctgactcgggcgtcgcgagcgtggcggcgtggtcggtgggtcggtcgccgaagcggggctgctgcggcgccgg

SEQ ID NO: 10046 - DNA, 739 bp, Zea mays
  Clone ID: MRT4577_109164C.1
gattcctatcttcctacgtccataccctatttccgaattcccatttgtcctcctctcctccgagctctagggaccatgctcttggctgcctaaagggaggtaagctactgcgcaaggacggtgcgtaacgtcaccgcatggccctccgcaacaacatccacggcattactaagcaccgcgacctcaggctgaagacaaggatcgctatgaagcgcatctcggggctcatctacgacgagacccgcggcgtgctcacagatcttcctacgagaatgccattcgcgacgatgtcacctacacgaagcacgcccgccgtaataccgtcaccgccatggacgcagactacgccctcaagcgggaggtccgcaccctctacggatttggcgtatgagggctcatgggtgtccgccagctgctgctggactgtgcgtgaagtcttgggtcgtcggcacaaaatgaactgacgtctgagtagtcttgaccatgggcttaggtacgtacgctcatcatgtctagactctagtgccttggtccagtctcaggataccacttgtactgcattctctttgagctgaaactctcaatatgatgaaacgtggattcactatgatctcacagacaaccagtgaactccgatcagcatctttcctgtatgaggtccctaggggcctccagatccaatttttgttccctttattgcagttaaacgtgcgagcttgatgttatcatgcccatagct

SEQ ID NO: 10047 - DNA, 235 bp, Zea mays
  Clone ID: MRT4577_109165C.1
ctcttcgtgccccctcggtcgcagggaacacgcggcgcaggcggccccactgctcgcccgggcggcccctcaatggtgaatggtcttactatgcggaggtggctgaggccgggcggagttatcgaggaaggatatctcctggcgtacggaacggtgcaagcggactaccaaagcagatcggagcctgtcacatatataggtgcgattccggaggatatgcaagttgggtaggctg

SEQ ID NO: 10048 - DNA, 447 bp, Zea mays
  Clone ID: MRT4577_109166C.1
ctactagtttatggacatcatttaagagttaatactgaggttgttgtttagcataagctcaggcaggctaatgttacaaaggtgaatatttttcttgaatacatgtgcattttcatgtctttaactctagatagatgcttgttgatgtggtaaagctgttgatccttatcttgctgattattatcaaaatttactcatgaccagtccatacttcatagcaggtatctttcataaaaggtttgtccttttgttccattggagaagtactaaaatgcacaggtatctaccgtgttccatctgccaagacaccaacgttcaacacaagcagcagttcagatagaccaccatcatcacaattgctcacaggatcatgtcagttcttacatccacatggtgttccttcttgataacggttagtgcctaccatggacagcggctagtacttgc

SEQ ID NO: 10049 - DNA, 383 bp, Zea mays
  Clone ID: MRT4577_109167C.1
ataaaattgatatgaaaaatatgattggtttaatgcaattgaattacaactgagcaagtggttaaaaaaaaaataaagacaaaaaaagcccgagtaaagggagggcaaaaagaacagacaaacagcaaaagaaaaaagaaaaaaaaaaataaaaaaagctaaggggaaagaaagacgtgagaagaaaaaaagaaaaagaggaaagaaaacgggaaagagaaaaaaaaagaactacagaggacctccttgaacaaaaaactgtatgaagcatacttgaagaaaaaaaaacagaaaagcttaagcgaagaaatatgggagggggtaaaaatagacctgaacgggggaattccatatttctctacagaaaaaaccataataagaaa

SEQ ID NO: 10050 - DNA, 1238 bp, Zea mays
  Clone ID: MRT4577_109168C.1
ccggccgggaacggaatttgggatttcggcggcattagtttgggttgcccacagcttccgcgatcccacacgtccgcccacgcgttcccaatttaccgctgacaccctccacaaaccgcgaatttcctccccggctcctctccctcctccccagtcaatccccacacagtctcggccgggccctcgcgaggccgccgtggaaggacccccagcgatgggctccggcgaggaggacacaggaggcggaggaggggcggtgcggggcgcggtgctgaaggcgctcgtggttgtcggcggcgtcctgctgctccgccgcctgcgccgctccactacccgatgggaccacgcgcgagccgtcgccgacgcgctctccggagaaaagttctcgagggagcaggcgaggaaggatcctgacaacttcttcaatttgagaatgctcacatgtcctgcaaccgagatggtggatggttcaagggtgctttactttgagcaggcattttggagatctccagaaaagccttttagacaaagattctacatggtaaagccctgtccgaaggagatgaaatgcgatgttgagttgagttcatatgcaattagggatgctgaagagtacaagaatttctgtgaccgtcaaaaggatcagaggccacaggcagaagaagtaattgcagatatcgcagagcatctgaccaccatacacttgtcacgatgcggacgaggaaagcgttgcttatacgaaggatctaccccacctgaaggttttcccaacaactggagcggcgcgtcgtactgtacgtcggatctgtccatccacaaaaacggcgaagtacatatctgggacaaaggttttgacgacgaagggaaccaggtttgggggaccaaggctggcccctacgagttcaagcctgctcccaaatccaaatatgacgacatgttctcgccgttaaatttctcggctcctttgtcgctagagaagaagctggataaagcatatgtaattgatgaccagtagggcctgccctaaatttttgttcataggaatggaataagtgaatagaatgtatatgtatatactgtactgagttataatgcattctttgttttgagcaaaaaaaaaaaaaaagggcggccgccgactagtgagctcgtcgacccgggaattaattccggaccggtacctgcaggcgtaccagctttccctatagtgagtcgtattagagcttggcgtaatcatg

SEQ ID NO: 10051 - DNA, 298 bp, Zea mays
  Clone ID: MRT4577_109169C.1
ggaaaaaattgcgcaaaaacaagggtttaaaaggaggggcaaaaaaacgggtcaaatttttaaagggaaatttccataaaaaaaatcttttgaggccaaatagggtttaattgggaagccaaaataaacttatttaaaataggattacaaaacttttgaaaaaaagggcatctgttttaaaaaaaaagactttttccaaagggggcaaacaagggaaccccctccttaggtttttcttgccccggggaaattttgtggtttgaaaaaaccaaaaccaaccggatggggccgcccccct

SEQ ID NO: 10052 - DNA, 394 bp, Zea mays
  Clone ID: MRT4577_10916C.1
aaatcaaattccttgttgtaaacctttctttctcgagaagattacaaccttttcaagcaacctgttacagcaaatgcaaaaggctaggtgatgattcagcagtaaaacataatatacaataattgcaggatgttccattattgaacagttctaatgtcgccatctaattcgcttgctatagcattccatgctaataaagctgcaccaacagctggctccaccttgggatgtattggataggcacctgggtaattcttggtaacacaatctatcacttttttcccaatgtcccactttttgtttgcctcaaggactttaccaaccataacaagtggaaatggatgcttgccatcttcaccgccaaggtcaagcctttgcactacagccttgacac

SEQ ID NO: 10053 - DNA, 656 bp, Zea mays
  Clone ID: MRT4577_109170C.1
aattcggcacgaggcaacctcctccagctgatggagcagtcctcccccgctcaggtctcccgccttctgcccccatctcgtcttgtttgggtctagagtgttccgattgtaagcatgattttacagccgtttgctgatcacaagaatcaacgcttttccaaatttgtgcgaaattgacttaatttatgcggtagttcgtgatgtctccctttactctttagattagagacagtatggttaggattttggatggatttacttttgtcttgaaggtgaaatgattgtccaattcatgaatgttattatcttcatcctatactacataacctagaagttattcttttggagtttggcgggttcttcttgcccttgagcctgcgagcgagcagtaggtagttttttttggtcgaggtcattgttttgctgtatacaaagactcaaagagcgcccaaatgtaagggttattgccccctttttttcttaatataaaatttagcagctctcttgagtgctcgatagaagtaaccgctctcctgagtgctcgatagaagtaaccgagaatctgtaggcattcgactgtcattgattaagcagtgcgctttgattgtcatctagcaacttccacaatgctgcgctgaagtgtccattgtgcagca

SEQ ID NO: 10054 - DNA, 220 bp, Zea mays
  Clone ID: MRT4577_109171C.1
acatcttcatctaccacaatctctctaatcatgcgtgtccaaatcacggacgatgactaaaaactcgcgttccgtcaaacgaatcgtaaacgtacatcggagaagctccagtcatctgcagccttccagacagtgactggccatacagctgctctaataggtcatcgtgctgcactaaatatgatcgacaagatgatgtatctcatgcatgaatgcccaa

SEQ ID NO: 10055 - DNA, 682 bp, Zea mays
  unsure (1)..(682): unsure at all n locations
  Clone ID: MRT4577_109172C.1
tcggacaatatctcaagacaccctcgaccttcaagtatatttacctgcccatcgattataaaaagcagtggtaatggagatcaggaccatgtgcctttcctccacgtgccttcgccgggaagggcgtgaacgagacgtcgtgcgtctgacttgcgcgaggtcagcgtgacgaatgccaagacgggggatcctaggggaagacagggacggcgacctcgagccggtggcacgggcctcaccgcgggctgtacctgatcccactgtccggggaggcatctacctacatgtcggcggagataccgcccagactacggtgtgaacatactgagctagtggctatgtactttcataggctcacaaataagcgtaagttgatatagatccactcacggtgggccttgctgatagtgctcgtgtgaatcttcactaagttgctcgtgcgtaacgaagtctagttcggcgaggccgtgtggttcaaggccggctcccagatcttcagcgagggcgggctggactacctcgggaacccgagcctcatccacgcgcataggatccttgctatctgagactgacaggtcccgctcatgggcgccgtttagggctaccgcatctccggcgggccgctctgcgaggtcgtccacccgctctaccccggcgatagnttcgaccagctcgggctctc

SEQ ID NO: 10056 - DNA, 295 bp, Zea mays
  Clone ID: MRT4577_109173C.1
gcggacttgcctgggccaccaacaacgagtcgctggagaatgccttcgcctactacggcgagatcctctactccaaggtcatcaccgaccgggagacggggaggccccgcggattcggcttggttaccttctcctccgagaactccatgctcgatgctatcgagaacatgaactaccctgaactccacggacacaacatccccgttgaccatggccaacccggtggcagcggcggcggcggcggcggtggagactacggcggttgtcgcggcggcggcgattatggtggaggccg

SEQ ID NO: 10057 - DNA, 549 bp, Zea mays
  unsure (1)..(549): unsure at all n locations
  Clone ID: MRT4577_109174C.1
aattcggcacgaggtttgaacccgtgtgtgcctgattgtcgctcaagaaccctgttttttatgaagtaacacagaacacagttttctgctttactatcatccagccttggttctcatgtcattcgttcgttcgtagccccatgggcaaataatatttattgatattcaatggttaaatgctgggccttgcttacctttttatctttaattattcttgacatgctgtaaaagcaagggttgcaagttttagaacttactactgatggcgtgaattcgaatggcttctattctctaaatggtagttccttttatatatgttccatgatccttgcaacattgaattgtgtagtatggaaaaaactttctgtaaagcaacctttattaacgtttaacacaagctatgattttttttgttactcccgttatgattccctgacatgctgacatgatgtaactggnttctctctttatgtttttttgaggaaaaaaaggctgtaaacccctacagcctgattttatttaatataaaaattacacgggaggaaacat

SEQ ID NO: 10058 - DNA, 424 bp, Zea mays
  unsure (1)..(424): unsure at all n locations
  Clone ID: MRT4577_109175C.1
cgatcacacaaggtggcgtgcacaacaatgcgatgattttcttgttcctcctggtcctcttctgcatnggacatggggagaatgaatagtcaaagggcatcaatgcgaaagctgtccgggcctggtgggtccttcgacatcaccaagctgggcgccttcggcaatggcaagacacacagcacgaaggctgtgcaggaggcatgggcatctgtgtgcgggggtactgggaagcagacaattctgatacccaagggcgacttccttgtcggacaactcaacttcacaggcccttgctagggcgacgtgaccattcaggtggatggcattctgctggcgaccacggacctaatccagtacaaggaacatgggaattggatcgagattctgcgcggggttaacctggttatcaccagcaagggaaacc

SEQ ID NO: 10059 - DNA, 389 bp, Zea mays
  Clone ID: MRT4577_109176C.1
cttcggtctgtcgcaaacagagccccagggtcctcactgatcacgacgtgatcagctacacttgaataacaatcattggatagaaaactacgaccatgagagccgagatcgataataattggtgagtcatgaaatgattacattgccggggaatgattccaaaccaaatttgatgcattcacacaatgcagcatttggtgaaagaaaaaaattgggacccgaatcaactcacctgcacccaaatcaatccatgaatgatggggtatttttccgctcacggtcccacggccgtaggtcctccgccatggctgcacagacaatctcccatcataaatcgttgctactgaaagaatcgatggtcttgattacaccagcccggaggatgtact

SEQ ID NO: 10060 - DNA, 585 bp, Zea mays
  Clone ID: MRT4577_109177C.1
atgaagtttgcttcggggcaggaggcggtcgaagccctcttccacaaagacaagggtgatgggaagtggaaggagggaaccctcgaggcatccacccaacgtaacacgaagaaggacggtcaaaatgaaagaactaatcagatcttgaaagatatgttgagagtttgcgcgttgcaagataagttaggatgggacaagaggttaccttatgcaaaattctcctataacaacaactaccagcctagtttaaaaatgtcactgcttcaggcactttacggaaggagttacaagactccgttgcactgggatcaacctggagagaagcaagtgtttaggcccaacattttgctcgaagccgaagagcatgtcaagatggttcaggacaatctaaagatagtgcagttaaggcagcgaagttatgtagatacaagaagaagagaactaagttttgaagtgagggattatgtctacctgaaggtggcgcctatcagaggagtccgaaggttcagagtcaaaggcaagctagcaccccgatatgttgggccatatcaaattcttgctaagcgtggagaagtggcatattag

SEQ ID NO: 10061 - DNA, 440 bp, Zea mays
  unsure (1)..(440): unsure at all n locations
  Clone ID: MRT4577_109178C.1
aataaagcatcgatcacgacaagatggcgtgctcagacaatgcgaagagagccttgatcctgctggtcctcttctgcatcgtgcatggtgagaaggaagagtcaaagggcatcgatgcgaaagcgtacgtgcctggtgggtacttcgacatcaccaagttgggcgccttcggcaatggcatgacagacagcacgaaggctgtgcaggaggcatgggcatctgcgttcggaggcactgggaagcagacaatcctcatacccaaaggcgactatcatgtccgacaactcaacttcacaggccctcgcaagggcgacgtgaccattcaggttgatggcaatctgctggctaccactgacctaagccagtacaaggaacatggtcattggatcgagattctacgcgtggataacctgntcatcaccggcaagggaaaccttgac

SEQ ID NO: 10062 - DNA, 334 bp, Zea mays
  Clone ID: MRT4577_109179C.1
acactcctttttttaggctttaactctggacatacctacccacttgcggattggagacatatgactacctacaacacaccaaaattaaattaaaatgaactgatcaaacctttacacaacattgtaactttgaaaaacacttactacacctatatatcgatagttctatggacacctacataccccaacctgctaaatctgccaccttcatgcccaccgaagatcttacacatggattgatcgaaagttacatcacttcgaatactcacacttatggacactttatcacacattcacgaatcgaattatcacgaatgaggccacgacacaaacc

SEQ ID NO: 10063 - DNA, 474 bp, Zea mays
  Clone ID: MRT4577_10917C.1
gggtacctcgagggcggccgggctcctctctgcctcgacgcagcacggcgcgccggcgcgggacgacggcatgacggcgtcgttcatcttccaccaccatcgctgcctcgtctccctcccctccgcttccccgacctggacctcgttccgtcgtctcatccatcaactcgcaaaaaccagagtcctggccctacatctgtgaccagtcttatcctcttccttcggggatgacgccgtcggcgacgacgaggatgacgcacttggagattgcctcgaggtctacgacgactctttctaggaaccggacctggacctcccctcgtccccgtggccgtcggttattgcctcccgccacgaccggatgtcggaggcaagcgaggagcgacagcctgtagtcgtggaggcggaggcactgcgaggaggagatcgacctggcgtacaatgataatggccgcatctcgcgcgggctgcggt

SEQ ID NO: 10064 - DNA, 362 bp, Zea mays
  Clone ID: MRT4577_109180C.1
ctacaagatggcgtgcacaaacaatgcgatgagagccttgttcctcctggacctcttggggatcgagcatggtgagaaggaagagtcaaagggcatccatgcgaaagcgttcgggcctggtgggtccttctacatcaccaagctgggcgcctccggaaatggcaagacagacagcaccaaggctgtgcaggaggcatgggcatactcgtgcggcggtactggtaagcagacaatcctcatacccaagggcgacttccttgtcggacaactcatctttacaggcccttgcaagggcgacgtgaccatccagctggattgcaatctcgatgcgaccacggttcttaactcagtcaatggaccat

SEQ ID NO: 10065 - DNA, 1492 bp, Zea mays
  Clone ID: MRT4577_109181C.1
ttggtaaatctaagggcggccgggacgaataaagtttcgatcacgacaagatggcgtgcacaaacaatgcgatgagagccttgttcctcctggtcctcttctgcatcgtgcatggtgagaaggaagagtcaaagggcatcgatgcgaaagcgtccgggcctggtgggtccttcgacatcaccaagttgggcgcctccggcaatggcaagacagacagcacgaaggctgtgcaggaggcatgggcatcggcgtgcggcggcactgggaagcagacaatcctcatacccaagggtgacttccttgtcggacaactcaacttcacaggcccttgcaagggcgacgtgaccatccaggtggatggcaatctgctggcgaccacggacctaagccagtacaaggaccatggtaattggatcgagattctacgtgtggataacctggtcatcaccggcaagggaaaccttgacgggcagggcccagccgtgtggagcaagaactcctgcaccaagaagtacgactgcaagatccttcccaactcgctggtgatggacttcgtgaacaacggggaggtgtccggggtcacgctgctcaactccaagttcttccacatgaacatgtaccggtgcaaggacatgctgatcaaggacgtgaccgtgacggcgcccggggacagccccaacacggatggcatccacatgggcgactcatccgggatcaccatcaccaacaccgtcattggcgtcggcgacgactgcatctccatcggccccgggacctccaaggtgaacatcaccggcgtgacctgcggccctggccacggcatcagcatcggcagcctagggcggtacaaggacgagaaggacgtcacggacatcaacgtcaaggattgcactcttaagaagacgatgttcggcgtccgcatcaaggcgtacgaggacgccgcctccgtgctcaccgtctccaagatccactacgagaatatcaagatggaggactcagccaaccccatcttcatcgacatgaagtactgccccaacaagttgtgtactgccaacggcgcctccaaggtcaccgtcaaggacatcaccttcaagaacatcactggcacctcctccaccccggaggccattagcctgctctgcactgccaaggtcccatgcaccggcgtcaccatggatgacgtcaacgtcgagtatagtggcaccaacaacaagaccatggctatatgcacgaacgccaagggcagcaccaagggttgcctcaaggagcttgcatgcttctagaccctcagtcgactgacccatctctctagttataatttttctctcgtccttgaattgtccattagttgctatccatttgtaacgcacaacagtaaaatgatagacatccaacagctatattatgttcgacggtgtaacaccctgaatttgagggtataaaatttcttctctaaatgccaagcaaaaaaaaaaaaaaaaaatttgcggcc

SEQ ID NO: 10066 - DNA, 1488 bp, Zea mays
  Clone ID: MRT4577_109182C.1
gccttgttcctcctggtcctcttctgcatcgtgcatggtgagaaggaagagtcaaagggcatcgatgcgaaagcgtccgggcctggtgggtccttcgacatcaccaagttgggcgcctccggcaatggcaagacagacagcacgaaggctgtgcaggaggcatgggcatcggcgtgcggcggcactgggaagcagacaatcctcatacccaagggtgacttccttgtcggacaactcaacttcacaggcccttgcaagggcgacgtgaccatggtaattggatcgagattctacgcgtggataacctggtcatcaccggcaagggaaaccttgacgggcagggcccagccgtgtggagcaagaactcctgcaccaagaagtacgactgcaagatccttcccaactcgctggtgatggacttcgtgaacaacggggaggtgtccggggtcacgctgctcaactccaagttcttccacatgaacatgtaccggtgcaaggacatgctaatcaaggacgtgaccgtgacggcgcccggggacagccccaacacggatggcatccacatgggcgactcatccgggatcacgatcaccaacaccgtcattggcgtcggcgacgactgcatctccatcggccccgggacctccaaggtgaacatcaccggcgtgacctgcggccctggccacggcatcagcatcggcagcctagggcggtacaaggacgagaaggacgtcacggacatcaacgtcaaggattgcactcttaagaagacgatgttcggcgtccgcatcaaggcgtacgaggacgccgcctccgtgctcaccgtctccaagatccactacgagaatatcaagatggaggactcagccaaccccatcttcatcgacatgaagtactgccccaacaagttgtgtactgccaacggcgcctccaaggtcaccgtcaaggatgtcaccttcaagaacatcaccggcacctcctccaccccggaggccgttagcctgctctgcactgccaaggtcccatgcaccggcgtcaccatggatgacgtcaacgtcgagtatagcggcaccaacaacaagaccatggctatatgcacgaacgccaagggcagcaccaagggttgcctcaaggagcttgcatgcttctagaccctccatcgactgacccatctctctagttataatttttctctcgtccttgcattgcccattagatgctatccattggtaacgcacaacagtaaaacgacagacatccgacagctatattatgttcgacggtgtaacaccctgaatttgagggtataaaatttcttctccaaataccaaccaaattcaggggttacctcttgtctctctctctcttttccttttgattaaaagtaagtgaattaggcgagggtttaattatttattttgtcaaaacttatgtagtcataaatgttgcatcatgctagccaaaaaaaaaaaaaaaaaatttgcggcc

SEQ ID NO: 10067 - DNA, 1754 bp, Zea mays
  Clone ID: MRT4577_109183C.1
tcgatcacgacaagatggcgtgcacagacaatgcgatgagagccttgttcctcctggtcctcttctgcatcgtgcatggtgagaaggaagagtcaaagggcatcgatgcgaaagcgtccgggcctggtgggtccttcgacatcaccaagttgggcgcctccggcaatggcaagacagacagcacgaaggctgtgcaggaggcatgggcatcggcgtgcggcggcactgggaagcagacaatcctcatacgccaagggcgacttccttgtcggacaactcaacttcacaggcccttgcaagggcgacgtgaccatccaggtggatggcaatctgctggcgaccacggacctaagccagtacaaggaacatggtaattggatcgagattctacgcgtggataacctggtcatcaccggcaagggaaaccttgacgggcagggcccagccgtgtggagcaagaactcctgcaccaagaagtatgactgcaagatccttcccaactcgctggtgatggacttcgtgaacaacggggaggtgtccggggtcacgctgctcaactccaagttcttccacatgaacatgtaccagtgcaagaacatgctgatcaaggacgtgaccgtgacggcgcccggggacagccccaacacggatggcatccacatgggcgactcatccgggatcaccatcaccaacaccgtcattggcgtcggcgacgactgcatctccatcggccctgggacctccaaggtgaacatcactggcgtgacctgcggccccggccacggcatcagcatcggcagcctagggcggtacaaggacgagaaggacgtcacggacatcaacgtcaaggattgcactcttaagaagacaatgttcggcgtccgcatcaaggcgtacgaggacgccgcctccgtgctcaccgtctccaagatccactacgagaatatcaagatggaggactcagccaaccccatcttcatcgacatgaagtactgccccaacaagttgtgtaccgccaacggcgcctccaaggtcaccgtcaaggacgtcaccttcaagaacatcactggcacctcctccaccccggaggccattagcctgctctgcactgccaaggtcccatgcaccggcgtcaccatggatgacgtcaacgtcgagtatagcggcaccaacaacaagaccatggctatatgcacgaacgccaagggcagcaccaagggttgcctcaaggagcttgcatgcttctagaccctccgtcgactgacccatctctctagttataatttttctctcgtccttgcattgcatattagttgctatccattggtaacgcacaacagtaaaacgacaaacatccaacagctatattatgttcgacggtgtaacaccctgaattttagggtataaaatttcttctctaaatgcaaaccaaattcaggtgttacctcttgtctctctctctatcttttccttttgattaaaagtaagtgaattaggcgagggtttaattatttattttgtcaaaacttatgtgagtcatgaaatgttgtatcatgctgagcctaaattattcttttgtttaaaaaaaaaaaatcaaaagaggaaagggcttggcggtggatacctaggcacccagaaagacgaggaagggcgtagcaagcgacgaaatggctttcggggagtgaaaataagcatagatccggagattcccaaatagtcaaccttttgaactgcctgctgaatcccatgagcag

SEQ ID NO: 10068 - DNA, 318 bp, Zea mays
  Clone ID: MRT4577_109184C.1
atctgaggaacctaaataatactaatagcagatggtgattatccatgtcaggggaacctgaataataataatacaaacgatctgtgaaacagacaagctgctggagctatactacaactcaaacctaagaaatggattcgatttataaaaaaagaaagaaggactgacggtctagatgatctaagtttacgaacacctgcatgcgaacgtatagctgttctatactataaactaacatgaattcacgtggcgagattttacaaaggagctactggaaaaaccgtctagtctcccaacttaaccgccttgtacaacatc

SEQ ID NO: 10069 - DNA, 1498 bp, Zea mays
  Clone ID: MRT4577_109185C.1
ttgggacttccgagggcggccgggacgaataaagcatcgatcacgacaagatggcgtgcacagacaatgcgatgagagccttgttcctcctggtcctcttctgcatcgtgcatggtgagaaggaagagtcaaagggcatcgatgcgaaagcgtccgggcctggtgggtccttcgacatcaccaagttgggcgcctccggcaatggcaagacagacagcacgaaggctgtgcaggaggcatgggcatcggcgtgcggcggcactgggaagcagacaatcctcatacccaagggcgacttccttgtcggacaactcaacttcacaggcccttgcaagggcgacgtgaccatccaggtggatggcaatctgctggcgaccacggacctaagccagtacaaggaacatggtaattggatcgagattctacgcgtggataacctggtcatcaccggcaagggaaaccttgacgggcagggcccagccgtgtggagcaagaactcctgcaccaagaagtacgactgcaagatccttcccaactcgctggtgatggacttcgtgaacaacggggaggtgtccgggatcacgctgctcaactccaagttcttccacatgaacatgtaccagtgcaagaacatgctgatcaaggacgtgaccgtgacggcgcccggggacagccccaacacggatggcatccacatgggcgactcatccgggatcaccatcaccaacaccgtcattggcgtcggcgacgactgcatctccatcggccctgggacctccaaggtgaacatcactggcgtgacctgcggccccggccacggcatcagcatcggcagcctagggcggtacaaggacgagaaggacgtcacggacatcaacgtcaaggattgcactcttaagaagacaatgttcggcgtccgcatcaaggcgtacgaggacgccgcctccgtgctcaccgtctccaagatccactacgagaatatcaagatggaggactcagccaaccccatcttcatcgacatgaagtactgccccaacaagttgtgtactgccaacggcgcctccaaggtcaccgtcaaggacatcaccttcaagaacatcactggcacctcctccaccccggaggccattagcctgctctgcactgccaaggtcccatgcaccggcgtcaccatggatgacgtcaacgtcgagtatagtggcaccaacaacaagaccatggctatatgcacgaacgccaagggcagcaccaagggttgcctcaaggagcttgcatgcttctagaccctcagtcgactgacccatctctctagttataatttttctctcgtccttgaattgtccattagttgctatccatttgtaacgcacaacagtaaaatgatagacatccaacagctatattatgttcgacggtgtaacaccctgaatttgagggtataaaatttcttctctaaatgccaagcaaattcaggtgttacctctaaataaaaaaagtc

SEQ ID NO: 10070 - DNA, 1943 bp, Zea mays
  Clone ID: MRT4577_109186C.1
tatagattagctataatataatcttttagatatttcaatgattcatgtatcaagccatattctataggtcggtaagactatatattaattctatcactcatgtttgattttttgtaacagtacaagaggtagatagtaaataatatctaaatttggtatatgtataaaaacaagcatatatataatttctcaataaaggtgtatcttttttcggtattcacctaccttcgactcaaatatgtcacaacatgctccttttctttcatctcctgagtcagaacagtttcaataactttattttcagctacaatatataacctggaagacaacctgctcttcggtgcttttaacactagaaccgaagataaataatttttatcgattttttcgatcgaattcaccggtaacggtattattccgataccgattctgtttccgcgtgtatagacaatgcaatgagagccttgttccttttagcgctcttctgtgtcgtgcatggtgagaaggcaaagtcaaaggacaacgatgcaaaagcgtccgggcccggtgggtccttcgacatcaccaagttgggcgcctccggcaatggcaagacggatagcacgaaggctgtgcaggaggcgtgggcatcggcgtgcggcggcaccgggaagcagacgatcctcatccccaagggcgacttcctcgtcggaccactcaacttcacaggcccatgcaagggcgacgtgaccatccaggtgaatggcaatctgctggcgaccacggacctaagccagtacaaggatcatggtaattggatcgagattctacgcgtggacaaccttgtcatcaccggcaagggaaagctcgacgggcaggggccagccgtgtggagcaagaactcctgcgtcaagaagtacgactgcaagatccttcccaactcgctggtgatggacttcgtgaacaacggggaggtgtccgggatcacgctgctcaactccaagttcttccacatgaacatgtacaagtgcaaggacatgctgatcaaggacgtcaatgtgacggcgcccggggacagccccaacacggacggcatccacatgggcgactcgtccggggtcaccatcaccaacaccgtcatcggcgtcggcgacgactgcatctccatcggccccgggacctccaaggtgaacatcaccggcgtgacctgcggccccggccacggcatcagcatcggcagcctagggcggtacaaggacgagaaggacgtcacggatatcaacgtcaaggactgcacgcttaagaagacggccaatggcgtccgcatcaaggcatatgaggacgctgcctccgtgctcaccgcctccaagatccactatgagaatatcaagatggaggactcgggctaccccatcatcatcgacatgaagtactgccccaacaagttatgcaccgccaatggtgcctccaaggtcaccgtcaaggacgtcaccttcaagaacatcaccggcacctcctccaccccggaggccgtcaacctgctctgctccgccaagatcccatgcaccggtgtcaccatggacgacgtcaacatcaactacagtggcaccaacaacaagaccatggctgtatgcaagaacgctaagggcagcgccaagggttgcctgaaggcgctcgcatgcttctagacccaccattgacccatctctgtagttatacaatgtgtttggttgttggatgctgagagactggttctcagctcagatgcaagctgcgcctagcctgtgtaggtttgtgctggtacattgagagctcttatttatttgctttgattgcaattaaccaggatgaccatagcccttgtttggtttgctgtttttataagttgcatgaacacaacttctgtttggtccaaaaaaaaaaaaaaaaaaaaaaaagtcgacgcggccgcgaattccagatct

SEQ ID NO: 10071 - DNA, 115 bp, Zea mays
  Clone ID: MRT4577_109187C.1
tccggccctagaacccgagcgggcgccttttttagggggcagtctgtctgctaacaaagggtcagggtcagactactctcctgaaggatgaaatggtaggctggagaagcctctc

SEQ ID NO: 10072 - DNA, 3000 bp, Zea mays
  Clone ID: MRT4577_109188C.1
gattttgtgatggtcttgccagtcaatgtcttcacaaaaatctgcatgccacccctgaggcggagcaccaggtgtgtgagtgctctccttctggatgttgtaatccgccagggtgctttttttctccattttcttgccggcgaagatgaggcgctgctggtcgggtgggatgccctccttgtcctggatcttggccttgacattgtcaatggtatccgaagactccacctcaagggtgattgtcttgccagtgagtgtcttcacaaagatctgcataccacccctgagacggagcaccaggtggagggtgctctccttctggatgtgctcgtccgcatccgtgccgccatcccggccgggaaagcggtgatccatccgaataaacggcagactgtcatccctgccaaaatctgagctcgcgtccgcagaggtccatggcgtccaagtccgtcgagctgcgcatgacgctgctgggcgtggccctgctagggctgctgctgctgagccagcacgcggcgcccgtcgatgctgccgagagcgacggccccagaaaggaaaagactagcttcagcatgaacgtcgtcggcggccgcactctcagcagcttcagcatgaactccgcatacagcgagaagaagcccagcagcaagggcgcaagcgcaactgatcccgcacacgggtgatgttccacatccatgcctataggccactcacctcaccacgcagcgttaccggccgtactactatatctacatacgaccgtgggacaacgtcgaccggagctcgatcggcgcagttgccgcatgggcgtggctgtcaaagttcctttgtttctttcttgatttgtgcttgcgttgggttcggtgttccactttctttttatgtgattattaatcttgttttcagatgcatgtacgcatgtatgtgccggcaccatttggtcttgtgttaagtttattcttggattccaatctctagtgtagggtcgtttggtttgtgtgtgcatgttgtactcataccaacttctgtctttacatcagtatttattaagaaatagcaatgtgacctatccaaattagatagagtcgctagaattgctaaaaaaaaaaaaaaaatttacgaataaagcatcgatcacgacaagatggcgtgcacaaacaatgcgatgagagccttgttcctcctggtcctcttctgcatcgtgcatggtgagaaggaagagtcaaagggcatcgatgcgaaagcgtccgggcctggtgggtccttcgacatcaccaagttgggcgcctccggcaatggcaagacagacagcacgaaggctgtgcaggaggcatgggcatcggcatgcggcggcactgggaagcagacaatcctcatacccaagggtgacttccttgtcggacaactcaacttcacaggcccttgcaagggcgacgtgaccatccaggtggatggcaatctgctggcgaccacggacctaagccagtacaaggaccatggtaattggatcgagattctacgtgtggataacctggtcatcaccggcaagggaaaccttgacgggcagggcccagcccgtgtggagcaagaactcctgcaccaagaagtacgactggcaagatccttcccaactcgctggtgatggacttcgtgaacaacggggaggtgtccggggtcacgctgctcaactccaagttcttccacatgaacatgtaccggtgcaaggacatgctaatcaaggacgtgaccgtgacggcgcccggggacagccccaacacggatggcatccacatgggcgactcatccgggatcacgatcaccaacaccgtcattggcgtcggtgacgactgcatctccatcggccccgggacctccaaggtgaacatcaccggcgtgacctgcggccctggccacggcatcagcatcggcagcctagggcggtacaaggacgagaaggacgtcacggacatcaacgtcaaggattgcactcttaagaagacgatgttcggcgtccgcatcaaggcgtacgaggacgccgcctccgtgctcaccgtctccaagatccactacgagaatatcaagatggaggactcagccaaccccatcttcatcgacatgaagtactgccccaacaagttgtgtactgccaacggcgcctccaaggtcaccgtcaaggatgtcaccttcaagaacatcaccggcacctcctccaccccggaggccgttagcctgctctgcactgccaaggtcccatgcaccggcgtcaccatggatgacgtcaacgtcgagtatagcggcaccaacaacaagaccatggctatatgcacgaacgccaagggcagcaccaagggttgcctcaaggagcttgcatgcttctagaccctccatcgactgacccatctctctagttataatttttctctcgtccttgcattgcccattagatgctatccattggtaacgcacaacagtaaaacgacagacatccgacagctatattatgttcgacggtgtaacaccctgaatttgagggtataaaatttcttctccaaataccaaccaaattcaggggttacctcttgtctctctctctctctcttttccttttgattaaaagtaagtgaattaggcgagggtttaattatttattttgtcaaaacttatgtgagtcatgaaatgttgcatcatgctgagcctaaattattcttttgtttgatgcacatgtttgaattggtttgaatttgaaatttggtttgagtttgatttgaaaaccataaaaaaaaaaaaaaaaaaagcagttggaaattccaggaaaatagaaaaactgaattcggcccgttcagcccagctaggccgcgcccgcgcgctctctccctctctctcccccgctgcccggtggggccagcttgtcggcgccagttcctttgctcgcgcgcacgccccctcccgttgtccagtgggttcgccctatcagcgctaaccgcccgttcgtgaatcctc

SEQ ID NO: 10073 - DNA, 550 bp, Zea mays
  Clone ID: MRT4577_109189C.1
gccggccgggtcgggatgaattacaaaaagctaaaacctctgatctgaagctgatagtactgctgggtgaccggaatcgggagggcatgtacatactgactaccaagaacagcccacagtgactactgtgcatctgaccgtacctatattcctgtactatctgcatgcacgagcctgctacctgcatactcaagatgctctgatgccacatggccatcgaggcagattcatctaggaagtgatgactcttcaacgagtgaacaaacagctgaataaactggacttgaatactatgccaattgataggtctacacacggtgcaacactatgtgatgaagctacagtgccttacctccatcatccctcatccgaggatcttatccacgagtgaaccactagaaggtcaacgtgatactacatgttgatgatcactgacacaacctttgatgtcatcgactgcgctatgtgtaaaatgaattcttaatatcatcccagtgtgacagaagtgacatctactacttcataaatgtattagctgcactatatggac

SEQ ID NO: 10074 - DNA, 775 bp, Zea mays
  Clone ID: MRT4577_10918C.1
ctttctgcggtctatgtagggctggtccagaaggactgccgctagcggttgtattcgtcggaacatcgctgagtcctccgacgcgctcctggcgctgctctgagaactggatatgctgggcctagcacccctccgctctgcgcctcttcctatccgcgcctccgccaccgcctgcggccgaaatacctcgcagctcgccaatggctgccaactctctcttctcgcgccagaggcggccgaaggtgacacggcgctgccggagaacatgcacaagtggaggatggtcatcgcctacgatggaacaaagttcaaagctattgctcctcatccaggagtggcccatttctctaaatggtcgtgcaaagcaatcaaggggtttgataaagatgagaaaggggctgaattctttgattatcctggacgcctggcaaatctggaagcatcacaatgtatgtgtttttgaaggatcttctcctaatgtccaagaggttttacatgcagtgacaactgacaattgaaggttttttattgtgtatggaactatggatggagcctctgctcttcaagaactgttccttcagttgttaatcacataagcctctgtgtgtttccttggccctggtcatgtagtcgttagtcatggtaattcttgtactgttggtgtttgtggtgtcttggagcctctctaccctgtactaggagtggactcttgtccctctgatgtaacttttttcttctcaatgaaatgacacacggttctcctgtattgttcaag

SEQ ID NO: 10075 - DNA, 683 bp, Zea mays
  unsure (1)..(683): unsure at all n locations
  Clone ID: MRT4577_109190C.1
ctgggatctcatgcttcgatcaaacagttgagcttagattactcataattaacacatcattctcctcaaatatgtgaccacaaggtaatgcgtctactagatctagttcatgaaagacatcgtggtgctgccgaacacctacataaacatccctcgaacgatacaggactacacactgaagcggatgaggcgacccaacttcaaggtgacggcccagccaccactgcgcgagcaggtacgcgaagagatacacgccgcagcactggtcaaactgaaacctgatacactacacccgcccctacgtggaagacactcttatgctcatcatgaagggcatactggtcggcatgcaaaacactgggtacgtgggtgctcttcaatcacctgtacaatgaacagaacaaatcatgttccgaatggtaggggtttgtccactactcgatggaaattgcgaactgacaccacctgcattccctatgcatatgtaatttgctgccacattatattcactcttgtcgtctagagctacaagcaaaaccttgaacatattatacatatagtcccaactaacatggcacgaacagcatgatgatatgttatacgcaattaaatcccagcccattggatggtcttataaatagnggtgncaactctgtatatcattatattacgatgattatatt

SEQ ID NO: 10076 - DNA, 409 bp, Zea mays
  Clone ID: MRT4577_109191C.1
ggggggggggggtttttaaaaagcttgggtcagactcgagcttttatttggtaaaacacatcaaccgtcacactacacactgttctttttgaggacggcaaaggggtctttctggcaacctctttctgcccaccccacccgtttttttgggggggggggataaaaggggggggttcactccctttccttgaccaaaaataagacacccaactggccatcccacatgctgctgcctggggctggtgggaatccttctcccggggtcggccctgggtccctggtttttctgcgtccgtgcgatgctgctctccccgcccggaggggtgcggtttccccccacacgctcgcgggttgggtcccccccgtcccccaaaatggggcgggcctggggccccttcgctttcggggg

SEQ ID NO: 10077 - DNA, 265 bp, Zea mays
  Clone ID: MRT4577_109192C.1
atattctattttttatggtttttttttatgggaccgggtcaatcacaactttaattaacacaaacagccaagggatcatgccccgccgtgtttttatgttcacgggggttgataaaaacaactttttaaaactaaagggcaaattacagggtaatcaaaattgggctatgggggcacccacgaactttttaaatactttgcaaaaaaggttgttaagttgagacccaaatttgggggtacacctggaaggcccgggttgcataaa

SEQ ID NO: 10078 - DNA, 488 bp, Zea mays
  unsure (1)..(488): unsure at all n locations
  Clone ID: MRT4577_109193C.1
ggatgctagcaccaaatccaaaactgaatttttatctgngctggcaagataagactgcaaagatgctatttctgtctcaattggaagtcctttagatagtgcatcttccaatgcaagtgctctctgcaggattcatgcacaaaaaagaaacaggtaagcaggattggaaaaatcaatacaatactatttttccacattgtgttattaagctcctctgttgccgaagacaaatacaaacagcacaaagaaacaggacaaagaataaatattaccaaagcaaaattttgtgtagcatgactttgacgagcttcttcagatcgagcataaaatgccatgcataaggcatttatctacaggaatgaagagaaaaaaattttttaaacaagtcaaatttcaactttgactaaaataaagtccacaaggatgtcaattaataaaaaatccaaatcaacttgctggctaaatatgatgtgaattttgcaactacc

SEQ ID NO: 10079 - DNA, 473 bp, Zea mays
  Clone ID: MRT4577_109194C.1
gggttgcgtgggccgactcgtgggtgggcgcactacgccctgttgacttctttcgccttggagagcactaccacatgggataacgctcgcacggcatagaccgcacattctacaccactctctacggggtagcgttctacattataccatcggttactccaaacctgtggggccttctcattgtcaacttgtacgtcagcgacaggaaacaacaaaccaaaccatttctgtggatagaggcgatgcgctcttctctcgctcctctgatgttatttgtgttaacctagcactatctggattgctgcgtaaagatgaagatcaggaagctcaagctctatgagcagaagctcattaagaggcacaaccatttggagtacatgaggcagggcgtccaccgcgaggcgctcgtgacacaccgcgaccggaatgtggagagggacgactacaagacgtacaacgggatatgcttaatg

SEQ ID NO: 10080 - DNA, 376 bp, Zea mays
  Clone ID: MRT4577_109195C.1
ttttccctttgtctttgtttttttttagatccttttggttttttccagaaaggggagagatggatcatttcattcatcaaaccaaacatggccttggttcacaaactggtaggggggcatggcgttgaaaactgggtgaacccgtgccaaccggatcattttcacatactgggatttctacgggttggcaaatttattttatataaaccgacagggttttttacataaaaactgggtgttcttttgcctgtcctttggggcaacacactggcatagagctctgtgggaatcaatctttttggggccttttcctatcgcacgaaggttccgggcgtccccctggatttcaagaaataggtggatacaaaacttggct

SEQ ID NO: 10081 - DNA, 124 bp, Zea mays
  Clone ID: MRT4577_109196C.1
ctgcggaggtagtcgtagcaacattaacatatagtttttttagacatctgtttagtcttatgaaactccctatatacaaagtcaaggtttagttgtaaaaaccacactaatagaagttgatatc

SEQ ID NO: 10082 - DNA, 492 bp, Zea mays
  unsure (1)..(492): unsure at all n locations
  Clone ID: MRT4577_109197C.1
cttcntttttcatgtcaacaattactcaaatatggcttttttgaaaatatatacacttctgtataagggattaaactatttcatcaacacacaggcctactaatattctgcttggtacactaattcagcgaattgaccgaaatagcgaaatgactcgccatagctgaatctggctcgataatcgtaagaaccgcgaagtcgacgagagtttcatgactcgtgcaatttatcgagcaccttaatgagcatcgcactagcacattaatttatttatcgatcgaactattctgaataatttatcagcttaccatttccatagctgacacgaatccgcgagatcggtagtgattttctgatccaggcaatatgtcgagcgcttggggaataccactcggctagcttcgtcttcactcgacgtttgggatttcttggggatgcacgaacgacgacgagatcgataacgtctaggaaccagtggacgagtagcacgct

SEQ ID NO: 10083 - DNA, 614 bp, Zea mays
  Clone ID: MRT4577_109198C.1
aaatagcggacgaaatctatcaactggttgtctcgaagaaagaaaagccaatgtttccatacagtctgcctccagatattgaaaacatgctttctggatgctttgagtacgacttcagaaccgtcccttgatgaaagatattttgcatgcatttgatagtaataaagatgcacatcatgacaacattggttggcacagtttagaaaatttaatggtagacaagccacccatggaaaatcacattaactggttgcggaagaacaagtttcaagtgggtgacaaggttcgttcaagaaagcttgaaatctcttgtagtcttgaaactatggaaatccctaatggaacagtagttggtgtcgacgatgacgaagggcgcgatgcgtacgttcttgtatgagtctatgggttgcacaatgttttaaaggtccgctgctcgatggtggagaggggtatcatatggtcttgttgctggaaactgggtcactgcagccagaaaaccattgtgcctcaatttgaggagcttttccatctatatttttaccagacatagtgcctatttatctcttgtattcgaacacttggcaattaagcaatagcagattacttcctcggat

SEQ ID NO: 10084 - DNA, 412 bp, Zea mays
  Clone ID: MRT4577_109199C.1
gcgagctgccgccctttttttttttttttttttttttttttttttttttttttttttatgggaccaagagcaggaacagcatagtggtcgaggctgaaacagaagactagtatacagatccgtgtgggaaaggaaaaaaaataaaactagctttgaacacgctgaaactgaaaacgacctggacactgaatacaaacattacccaacgccggggggctctcctaacaggtggtcctccgaccggtactttgccgggtccgcccgccggtgcttccccttgccgtcgacggcggtgacgtcgggcccggcgaccctttcctttaccttctccagccttttcttgggcgtgtccgccgtctcccgcgcctttttctttaccctattatacccttcgccgggctttttcttgggc

SEQ ID NO: 10085 - DNA, 317 bp, Zea mays
  Clone ID: MRT4577_10919C.1
ctcgacttctccgcgggcgtcttccacggcgtgctgctccccacggccggcggcgggggcggcgggcccgggcgtcgggtaccccatgaaccggggcaagtgggacggcgcgacgtctgcggtgctcccctacgatgacggggacggcgacgaggtgttctacacggtggggatcctgcggtcggccgtggcggacggctacctgtgccgcatggaggagcagaacgccgaggtggcgcgcttctgcgaggccgccggcatcccctgcacgcaggacctgccctcctacgccacgcaggcggactgggctgctcgcc

SEQ ID NO: 10086 - DNA, 470 bp, Zea mays
  Clone ID: MRT4577_1091C.1
gggatcggcccaaccttaatttcttactggtggaattagaaaaggttttaacaacaaatacctacatcattttggttttcagggcccacaccataggggcaagggaaataaaaaagggttttatacacataattccccctacaaacctcatatcaatctatcactggtccctcagcgctagagatcatgaacaagggtaagttcgatcttttgggggggacactcccaaccttagccatgaaaagattgtacactggtccgtggtcaaagaagcgagactctccgcggatgtaggaccactgcaagaggccacggaatgtgatcccaccaagcatgtgtcctccgattttttttgggccgcacaccagagtaacgatccgagttgaatgagtatttatatgtcggaggaaaataaaaatgccttctttccatccctggaaaatgcactcgcgtcttcactctatctgaag

SEQ ID NO: 10087 - DNA, 252 bp, Zea mays
  Clone ID: MRT4577_109200C.1
gcgtacggggctaccagagccccccacctacgattcgccctcacatatgacctgccggcccgcgaggtgtaaatttttcatggttagtctcatcatgctcaatgatgcactcaagttcatgtacaatgctgataagatagggaatcgcattgtctcgatcaggctcgttatccaaggtgttcatatatgtttctgacgttcattcagttcctttgctactatgtatgagtttgtgttcttgtatgaccacag

SEQ ID NO: 10088 - DNA, 1622 bp, Zea mays
  Clone ID: MRT4577_109201C.1
attgggtacctcgagggccggccgggcttcgtctcaatcccacgccacatcctcccctccttcctccttgggttcccagcccgtgcgccccgcctgtcgcagtcgcagtcgcgccgcagccgccggccatggcctgcctcaccgacctcgtcaacctcaacctctcggacaccacagagaagatcatcgccgagtacatatggatcggtggatctggcatggatctcaggagcaaagccaggaccctcccgggcccggtgaccgatcccagcaagctgcccaagtggaactacgacggctccagcaccggccaggcccccggcgaggacagcgaggtcatcctgtacccgcaggccatcttcaaggacccattcaggaggggcaacaacatccttgtcatgtgcgattgctacaccccagctggcgagccaattcccaccaacaagaggtacagcgccgccaagatcttcagcagccctgaggtcgctgccgaggagccctggtatggtatcgagcaggagtacaccctccttcagaaggacaccaactggcccctcgggtggcctattggcggcttccctggccctcagggtccttactactgtggaatcggcgcggagaaatcgttcgggcgtgacatagtcgacgcccactacaaggcctgcctgtacgcaggcatcaacatcagtggcatcaacggggaggtcatgccggggcagtgggagttccaggtcggaccgtccgtcggcatctcttcgggcgatcaggtgtgggttgctcgctacattcttgagaggatcaccgagatcgccggcgtggtggtgacgttcgacccgaagccgatcccgggcgactggaacggcgcgggcgcccacaccaactacagcaccgagtccatgaggaaggagggcgggtacgaggtgatcaaggcggccatcgagaagctgaagctgcggcacaaggagcacatcgcggcctacggcgagggcaacgagcgccggctcaccggcaggcacgagaccgccgacatcaacaccttcagctggggagtcgccaaccgtggcgcgtcggtgcgcgtgggccgcgagacggagcagaacggcaagggctacttcgaggaccgccggccggcgtccaacatggacccctacgtggtcacctccatgatcgccgagaccaccatcgtctggaagccctgaggcaccccgtggccgtgtcgtgtcggtttgctccgcgtacggcgctggccgttgcatcgcagggcccagcggttgcgcaactattttcccttccccgttctgtttgcttgtactactactctaccgctagtcctgcatagcattttagctagaacacaacaacagccaaaaaaaagtattgttgcttgcttcgacttcgacgcttgccaccactagttccattccatgccgtccgtccgcttccttcctgtgtaatcctcctccaataatagacgtgccatgttgcatcctctattcctctgcattgtataaaagtggtgtaattcttttgctacgcctccaatgtctgtggcttttagctgctgatgcgatgtcagattcaaaaaaaaaaaaaaaaaaaaaaaaaaaaaaaaaaaaaaaaaa

SEQ ID NO: 10089 - DNA, 277 bp, Zea mays
  Clone ID: MRT4577_109202C.1
cggggacccatgcttattctaaggcgtgggatccttgccgtgcttcgcaactttctgagtggaagagagatgataggctgggcgatggccggtctatgggatgtatctggcacaacggactcttgcagctgtgtgtgtgatcacgaccgcgttaagatattgctaacgaccatggtaaccgcaccacgccctctgacgtcgacttaaccgactcacggcgcctcatggtagatgcgggcagagaaccagaggggcatgaaccccatgaacaccgcct

SEQ ID NO: 10090 - DNA, 1552 bp, Zea mays
  Clone ID: MRT4577_109203C.1
gtaaccctgttgccgtggttgtaatcgtacgtgtaaagcgtacgcctacgtatttttactgcgaccaagggcgagccggctggacgccaacttgtttcgtatccctcggtcgtcgccaatatatatagccgccctcctcccggccgatcccttcgtcctcaatctcaatcccacaccaccaccaccacctcctccggtccccaacccctgtcgcactgcagccgccggccatggcctgcctcaccgacctcgtcaacctcaacctctcggacaacaccgagaagatcatcgcggaatacatatggatcggtggatctggcatggatctcaggagcaaagcaaggaccctctccggcccggtgaccgatcccagcaagctgcccaagtggaactacgacggctccagcacgggccaggcccccggcgaggacagcgaggtcatcctgtacccgcaggccatcttcaaggacccattcaggaggggcaacaacatccttgtgatgtgcgattgctacaccccagccggcgagccaatccccaccaacaagaggtacaacgccgccaagatcttcagcagccctgaggtcgccgccgaggagccgtggtatggtattgagcaggagtacaccctcctccagaaggacaccaactggccccttgggtggcccatcggtggcttccccggccctcagggtccttactactgtggaatcggcgccgaaaagtcgttcggccgcgacatcgtggacgcccactacaaggcctgcttgtatgcgggcatcaacatcagtggcatcaacggggaggtgatgccagggcagtgggagttccaagtcgggccttccgtgggtatttcttcaggcgaccaggtctgggtcgctcgctacattcttgagaggatcacggagatcgccggtgtggtggtgacgttcgacccgaagccgatcccgggcgactggaacggcgccggcgcgcacaccaactacagcacggagtcgatgaggaaggagggcgggtacgaggtgatcaaggcggccatcgagaagctgaagctgcggcacagggagcacatcgcggcctacggcgagggcaacgagcgccggctcaccggcaggcacgagaccgccgacatcaacacgttcagctggggcgtggccaaccgcggcgcgtcggtgcgcgtgggccgggagacggagcagaacggcaagggctacttcgaggaccgccgcccggcgtccaacatggacccctacgtcgtcacctccatgatcgccgagaccaccatcatctggaagccctgagcgccgcggccgttgcgttgcagggtccccgaagcgattgcaaagccattgttccttccgttctgtttgcttattattattatctagctagatcatccgagggtcaggtcgtggtgtgccaaaaacagaacacagaaagaggaagaagaaaaaaaaaacaagacgtgtggcgttaatgttatatcatctaataatggccgtaccacacttgtggtacctttcaagaaaaaaaaaaaaaaaaaaggccccta

SEQ ID NO: 10091 - DNA, 647 bp, Zea mays
  Clone ID: MRT4577_109204C.1
ttccatgtcggcattagctgggtttagtattaacttgatgcgttatctatcggggaaaggaacagcaggacagtcaataatgtatcaagttaaaacttagctgagataatgtcaacttaagcttttccatgtcggcatatgtgcttcccacaatcttcggatggtcttttttttaaaaaaatctttggcctgcttcatcaagaactagatttgatcatgttcttctctgtgttgatgaattatctacagtttagctataaacacatctgaaatgttagtctattgaaggatacttggatactgaagccatgcatctttaaattgttaacttttctttttgtggtttagtatggatgaataaaaggggaaaaagcaaaagggaacaagcatcctctgatttttattttgatgatgcaatcttagaaaccctacctgaactgaacacctcttttggcattttaaaagtgctgcaaaggaaacaagcatcctcttgcttttgtatctttagtatgttgtcggcatatgtacgctattatgtccttttttggttaaatatctattattcatgggtttgctgttcacatgaatcgcatatagctatcacctttgctgcattcaggttgatgctatgctccaagaattagaaa

SEQ ID NO: 10092 - DNA, 360 bp, Zea mays
  Clone ID: MRT4577_109205C.1
tcattcgtccgcacacgcgttctctaatttgtttggtcttacgagtgcgattatgcaaatatacatgactatcaacaaattaacatacctgaatacaaaagacgatgtttttattccacgttatgagatgaaagcctttgtaaaactctaccatgatgttgcaactagcttagatgacgacatttgtcgtaattgtgtaacctaaggaagaaaaattacttccctcgaggtttgttacagaattgaatctgtagacgctatcactctaaaacgttttacaaacgggttaatatttgataaggactgtgttattgatgctatggttccgttccaacggcttgcataattcaaatttgttaa

SEQ ID NO: 10093 - DNA, 223 bp, Zea mays
  Clone ID: MRT4577_109206C.1
ctgggttagaggattgcagaagacgagtgcgaagaaaggcaagcgaaatgcctgtcgggtttttagcacagttcatttcactgggattttgaagcatttctgtctgaacacaaagcctgttctagtcctggcggaacacactgggggtgggggcgggggaagatgcggtaatgagaccggttagtcaattttgatctaatattgttgacaattctgtaaagtt

SEQ ID NO: 10094 - DNA, 686 bp, Zea mays
  Clone ID: MRT4577_109207C.1
cattgggaccctcgaggccggccgggacattgcgcttattcctcctgaccccctgattctatctttgatctcgacgagtagccaagtgtgcggcatgtctgatctgatctatctttggctggtgtgcgcacggcttccttcccgaaaacggatcctctggccgacgggacgaggagactgatgatctgacagaggaccatcccaagcaatgaaatcactgtgtgttaggtgggaaatttccctctctgccttactttgagcgaggatgtaccctagcaaggcatcccaagtgcaataatacctcaaagttgtcgtaccaccctaatagtgaatccttctcgcacacagtcgtgcctgtcgatcctcaaggaatacggtgagagtcacaccaggtattactgcaatacaacattgtctgcggccatccatgctacatgctagatcagacgaatccgtgctgacacctgctcaaagcagaaggatatacacacatgtttatccaagatatcacctaatacatgaggatgatgatactgcgaacgaaatcacaattgtgcattgagaagagagctactacccactatggatccgtgctgtacgtcataacaatagtagctagaggaatgaatggaagaccaaatgtaatctgctgcttgaaaaactaactatcgccattacggactgtg

SEQ ID NO: 10095 - DNA, 269 bp, Zea mays
  Clone ID: MRT4577_109208C.1
cggacattgacatggcagttgcttgataactactcacacaagtggaagaaatgacaatgtggtgacgagcgatgtgtgttattcttggtaccactacatcgtagtcttctcttgctgtcgtcgtagatgtcttgctaatgttgtcgctgttgtgtcgttgcctttcaggcccagggctgccagttttctttcctaatgtgatgtagctatagcgctaccctgttagtcgggtgcgctgactttctgtacctctgttgtatctgatgttc

SEQ ID NO: 10096 - DNA, 440 bp, Zea mays
  Clone ID: MRT4577_109209C.1
cgcgtcatggatgacacgggcacctagcgtacctacatgaacgcgaggattcccaaacggagcacacaggatgaggccaaagaacagattgcataagatctcgcacaagattggaatgctgtgtttcaaaggagcatcaatacatagcttttgactgaaatggtccgagggtacgcatgctaactattaggtactatctttgatacaaatgctacaattaactatccagactagaagggtactctagagaccacggttcacgctgagagcacgctatcagaccttactgaatctggggaagagcgatgctttgcttgcaaactatgcaaatctatatgcacagctcaggcaattacaactgatgctgcagaacgtcttgattgcagtggctgaacctcacgatatgatattgtcatgatcaactgcatttactgaggcct

SEQ ID NO: 10097 - DNA, 1584 bp, Zea mays
  Clone ID: MRT4577_10920C.1
cattgggtacctcgaggccggccggaacgagccgaggtgcagtcgctcgtcatcgagatcatcacctcttcctctgcactccaatcagatcatcagatagatcactggccgcgtaccgagagcctcgcggccatcgccgcctgctctctacctctgcactccaatcagatcatcagatagatcactggccccgtgctgattaccgcgcttcccatctgagcagccagcctcccaggctacagggagagacgcagaggagacagctgctgcctggctgagacgatggccggaggcggcgaccactcccagacgaacggaggccacgtcgaccagagggccttggaggagggcaggaaggaggagttcgctgaccagggctgcgccgccatggtcgtctccgtcccatttatccagaagatcatcgcggagatcttcggcacctacttcctgatgttcgcggggtgcggcgcggtgacgatcaacgcgagcaagaacgggcagatcacgttcccgggcgtggcgatcgtgtgggggctagcggtgatggtgatggtgtacgccgtgggccacatctccggcgcgcacttcaacccggcggtgaccctggccttcgccaccagcgggcggttcccgtggcggcagctgccggcgtacgtgctggcgcagatgctgggcgccacgctcgcctccgggacgctgcgcctcatgttcggcggccggcacgagcacttccccggcacgctgcccacgggctccgaggtgcagtcgctcgtcatcgagatcatcaccacattctacctcatgttcgtcatctccggcgtcgccacggacaacagagcaatcggggagctggctgggctggccgtgggcgcaaccatcctgcttaacgtgctcattgccgggcccgtctccggcgcgtcgatgaacccggcccggagcgtgggcccggcgctggtgagcggggagtacacgtccatctgggtgtacgtggtggggccggtggtgggggccgtggccggggcgtgggcctacaacctcatccgcttcaccaacaagcccctccgcgagatcaccaagagcacgtctttcctcaagagcacgagcaggatgaactccgccgcctccgcctgatggatctccatggccggtaatttagcctacaaaactatatattcacccgtgtcgtcgtgtcagtacgtgagaggatatagatatataattcctgcgtgcgtgtgcgtttgtgtgtggatggaaaacatatgaaagaagaggtatggtttgtgtgtggatggaaaacgtactgtgcctgccttcgaccctgggcaacgtcgctctaccccgtgaacgtgcttaacctgttgccgcatgttttgttaactcaattttaatgtgttggcgagatcatacgcatcaaaaaaaaaaaaaagcggcctggatgcgtctcgatctgttcgacgtggacaggtgctgatcgagtagctagctaatgttaatcgctacagcactgattcacactgtgggactgaattgcaccatgctggcaagaaaggacttcagcagactgtccatttactactctcacat

SEQ ID NO: 10098 - DNA, 391 bp, Zea mays
  unsure (1)..(391): unsure at all n locations
  Clone ID: MRT4577_109210C.1
ccggacctaaaaaaccggggcgggcgcgccttttttttttttttttagcaaaatactattatagcttattttgttcatagaaactggangancatggcgggtaatcacacacgagcggctgtcccaantttttacanncacaaaactaccaccnacactcattcttnanctaccnacnaatctananctacttacaatattacnattttatcaaaatccattaaaaannnnaatctatanncnnaatttaannnnnaatctcnccaacnacaaancaancaaactacttctttnccttccttaccacacccttcctnncctnancnncaacaacaacaaccttcttcnnnntttccaccttcttaaaaaccccccctacctttcccttctt

SEQ ID NO: 10099 - DNA, 654 bp, Zea mays
  Clone ID: MRT4577_109211C.1
agcttgtgaggttttcaaatattctggactggggggccaacaattaaaagagctaaggattctgccaacattcggagatcacagttccatgggaattttgtatgaagatatttcaaagttttataaaatggctcctataacccctgtttggaagagtaatgaagcagcagtgattattcaaagatcccagtgactcactatgatcgatcaaaacacctgctaccacatgattattcaaagttctatctgagctagcttgtgcttcaatttgatctatctgtccgtcctcacggtccacatttgttgcttgcgtcaagactaggccgaggtgatgtcgacgctcatctacagagtgaggaactcgccccccagcaggtgagaacaatgctcacagtgatttcattcatgaactttccttaagtaataacttcgagtttgtcgaggctgttctgaaattgtctttgaaggtaaataatttgtgcattatttggactggtttaaaattgtgttcaaaggcatatggagccaattttcgcagggattttccgggatgaacggattcaatcgaagttcctggagcaaggtttagtgcgagatggtagcgttcctctcttctgcagatcatgtccacatgagattctctcttagaaatat

SEQ ID NO: 10100 - DNA, 1291 bp, Zea mays
  Clone ID: MRT4577_109212C.1
cattgggtacctcgaggccggccgggctaatgacacaagcggcaggccgccgtcgatcgatggggggagcatccggaggcgaccacccgcagcagcacggcggcggcgacgatgggcacctgcagcaaggcggcggaggcgacatggtgatgccggggttccggttccaccccacggaggaggagctcatcgacttctacctccgccgtagggtggagggcaagcgtttcaacatcgagctcatcaacctcgtcgacctctaccgctacgacccatgggatctccctgctctggcttcgatcggggacaaggagtggtacttctacgtgccgagagaccgcaagtaccgcaacggcgaccgccccaaccgggtcacgccgtccggctactggaaggccacgggcgccgaccgcacggtctacgtcgaggtcaagcggccgatcgggctcaagaagacgctggtgttctacgtggggaaggcgcccaagggactcaggagcagctggatcatgaacgagtaccgccttccttcaggcgaggccgaccgctaccaaaaggaaatttctctttgcaaagtgtacaaacgaccagggattgaagacaactttcacctcagcaccaccacagcaagatcatctggctcaaaggctgcagcaaccatggaaaagaagcaccaccgaacatcggcgtcgccccgcatggcgccagtgttcgacggtggccactcatcaggttacatgaacaagccatacacttagcgcaaccaccaccatggaggaggtcgcatcatcagtcgcagctcgagaagctgctcttaacccaccgatgttgccttcttcaacacacgccctgcttaatgcaaactccgctacaatggcaacaattccaatagatgagctgagtagggcaattggatgccaaggagaccctaaccagaccttgccaacacaagctccattgcttccttttcctaacttggaaaagatttgggattggaatccactcctagaatctcccaaggtttgcacaagcttcaagtgactttcaagtggctcgaagcatatatgtgcatgcttgcatgcgtgcacctattatttatgaatacaagtgtgtatatgtgcagacacataattattatttgggctagaatgtggttgagatgtaatggaatatataggatgagatagttctagtcctatctaatgctccactatattaatcaattcaccatcacaaatatgtactatgttgcagtgatcatttgaacttaatttaaaaaaaaaaaaaaaaa

SEQ ID NO: 10101 - DNA, 421 bp, Zea mays
  Clone ID: MRT4577_109213C.1
gatgccaggtggtctctacatgccattaaagtttggggtgacttgctaaacaaaaatgcacttcgctgggtgttggctaaggagaattgtagcataataattgggactatgtttcgacgatttagaaggcaaggtgttcattccaataaacataaaaaattttcactggtacctggcgattgtcaatgctaaaaaaaatgaggtacatatactcgattctatgggaccacaaataacggatcgtcgagacctttatactacaggtttcttgcggtctatggatggtgaactatatggaatattggacagggtcttctttgtctaataacataactcagaatgatataacaaagtttagatttaagctacctgcaatattgtggaactcaagattaaacacaaagaaaggacatcaagagac

SEQ ID NO: 10102 - DNA, 762 bp, Zea mays
  Clone ID: MRT4577_109214C.1
cgcggtgggcggcgggcggcagctgaaccgcggcgagagctggcggatcacggcccccgcgggcacgacggccgcgcgcatctgggcgcgcacggggtgcccatgagcttcctccccgacggcgggtccgggtgcagccgcggcccgcgctgcgccgtggacgtgaacgcgcgctgccctgccgagctgcggcaggacggcgtgtgcaacaacgcgtgccccgtgttcaagaaggacgagtactgctgcgtcggctcggcggccaacgactgccacccgaccaactactccaggtacttcaaggggcagtgccccgacgcgtacagctaccccaaggatgacgccaccagcaccttcacctgccccgccggaaccaactacaaggtcgtcttctgcccgtgaggccgctgaactagcatcagcgtgcgcgcgtcgaccaagaacaagaaataaacgaccgaggctgtgtatgttgcccgccgtgtgctcaactggagcaaaaataaagccaacaaaacaagcacgtgtgatctctatgtcaccaactctatcaccttaattaatggggcattatgaagttgtttcaaaaaaaaaaaaaaaaaaggcccctaaaaaaaaaaaaaaaaaaaaaaatttttttttttaattaaaaaaataaattattattttttaaatttgttagaattttaattatttcctatatttcttattccgttcatttataattgtacttctttttttataatattttcattttattta

SEQ ID NO: 10103 - DNA, 671 bp, Zea mays
  Clone ID: MRT4577_109215C.1
tggtaatcgagggataactggatattttagcggttgagctatccaaaaggcaatacgagttgcttaggaaaaaaaaacagaggtaacaaaaattgcaaacacgctgaaactggttttgagtgatccccagaatagggcggcatatgatcagtagggcaaggaagggctgaaggcctttgcagatatccaggagtgttatgaggctgaatgggtagtagagactaggaccgaatcgatatacttaacaatcgatataaagcctcgctggaagaagggaactaagatcacattccccgacaagggaaacgagcagccaaaccaactcccatgctttggtacagatcgttgtaccgcgcgatgagcggatcgactatcaagcgagcacgggcacaaccacaaagacctacggaggtagcagagtgtagcgctgtgttagcaactctaatttctcaaactcgaaccactagcagcaatggatagaatggaagagaatccaggtacatgagaggagaggaagaagatgaacagtaacataaagtagagacttctgtttgtaaaagtgatagttgttcggttgctccgaaacagtggcctggaattattcctggctggattgtttatctattttatataagattttatcaggttgaataagaaacgcaaatacaaaa

SEQ ID NO: 10104 - DNA, 634 bp, Zea mays
  Clone ID: MRT4577_109216C.1
caaatacttgcataagatggcaggttccgtggcaatcgtgggcatcttcgtcgccctcctcgccgtggccggcgaggcggctgtgttcacggtggtgaaccagtgcccgttcaccgtgtgggccgcgtccgtgccggtgggcggcgggcggcagctgaaccgcggcgagagctggcggatcacggcccccgcgggcacgacggccgcgcgcatctgggcgcgcacggggtgccagttcgacgcgagcgggcgcgggagctgccgcacgggggactgcggcggcgtgctgcagtgcactgggtacgggcgcgcgcccaacacgctggcggagtacgcgctgaagcagttcaacaacctcgacttcttcgacatctccccgccggaaccaactacaaggtcgtcttctgcccgtgaggccgctgaactagcatcagcgtgcgcgcgtcgaccaagaacaagaaataaacgaccgaggctgtgtatgttgcccgccgtgtgctcaactggagcaaaaataaagccaacaaaacaagcacgtgtgatctctatgtcaccaactctatcaccttaattaatggggcattatgaagttgtttctttacatgctcgtactgaaattgggttttatggactg

SEQ ID NO: 10105 - DNA, 365 bp, Zea mays
  Clone ID: MRT4577_109217C.1
aaaaaaaaaaaaaaaaaaaaaaaaaaaaaaaaaaaaaaaaaaaaaaaaaaaaaaaaaaaaaaaacaaaaaagaaaaaaaattaaataaacatacaaaaaaaaatgggaggccgtccaaaaggttccatgctttcatatcaatggggggggcccctcaaaggtttcaaactttccttcccctttcatttcactggcagcctttttaaaaggtccccctagtttcattcccggggttcccattttaaacccccttgccgggaaaccccctggttttacccgctttatcccccttgaaccaaacccccttttcccttcctggcttttccccaaaggggcccccaattttcccccttcccaaaatttgc

SEQ ID NO: 10106 - DNA, 905 bp, Zea mays
  Clone ID: MRT4577_109218C.1
catccgccctgatttcctcctatgcttgctctattccgtataataagcccttctccctggctgtcttcgtcgccctcctcgccgtggccggcgaggcggctgtgttcacggtggtgaaccagtgcccgttcaccgtgtgggccgcgtccgtgccggtgggcggcgggcggcagctgaaccgcggcgagagctggcggatcacggcccccgcgggcacgacggccgcgcgcatctgggcgcgcacggggtgccagttcgacgcgagcgggcgcgggagctgccgcacgggggactgcggcggcgtgctgcagtgcactgggtacgggcgcgcgcccaacacgctggcggagtacgcgctgaagcggttcaacaacctcgacttcttcgacatctccctcatcgacggcttcaacgtgcccatgagcttcctccccgacggcgggtccgggtgcagccgcggcccgcgctgcgccgtggacgtgaacgcgcgctgccctgccgagctgcggcaggacggcgtgtgcaacaacgcgtgccccgtgttcaagaaggacgagtactgctgcgtcggctcggcggccaacaactgccacccgaccaactactccaggtacttcaaggggcagtgccccgacgcgtacagctaccccaaggatgacgccaccagcaccttcacctgccccgccggaaccaactacaaggtcgtcttctgcccgtgaggccgctgaactagcgaacaagaaataaacgaccgaggctgtgtatgttgcccctgtgctcaactggtggagcaaaaataaagccaacaaaacaagcacgtgtgatctctatgtcaccaactctatcaccttaaataatgggagcattatgaagttgttgcgaaaaaaaaaaaaaaaaaagcggcc

SEQ ID NO: 10107 - DNA, 1215 bp, Zea mays
  Clone ID: MRT4577_109219C.1
ccggccggaaattaaaacctcgaggccggccgggacacgcttcagcattcttcaaatacttgcataagatggcaggttccgtggcaatcgtgggcatcttcgtcgccctcctcgccgtggccggcgaggcggctgtgttcacggtggtgaaccagtgcccgttcaccgtgtgggccgcgtccgtgccggtgggcggcgggcggcagctgaaccgcggcgagagctggcggatcacggcccccgcgggcacgacggccgcgcgcatctgggcgcgcacggggtgccagttcgacgcgagcgggcgcgggagctgccgcacgggggactgcggcggcgtgctgcagtgcactgggtacgggcgcgcgcccaacacgctggcggagtacgcgctgaagcagttcaacaacctcgacttcttcgacatctccctcatcgacggcttcaacgtgcccatgagcttcctcccggacggcgggtccgggtgcagccgcggcccgcgctgcgccgtggacgtgaacgcgcgctgccctgccgagctgcggcaggacggcgtgtgcaacaacgcgtgccccgtgttcaagaaggacgagtactgctgcgtcggctcggcggccaacgactgccacccgaccaactactccaggtacttcaaggggcagtgccccgacgcgtacagctaccccaaggatgacgccaccagcaccttcacctgccccgccggaaccaactacaaggtcgtcttctgcccgtgaggccgctgaactagcatcagcgtgcgcgcgtcgaccaagaacaagaaataaacgaccgaggctgtgtatgttgcccgccgtgtgctcaactggagcaaaaataaagccaacaaaacaagcacgtgtgatctctatgtcaccaactctatcaccttaattaatggggcattatgaagttgtttctttacatgctcgtactgaaattgggttttatggactgaatcgcaaagcatttgccagttgccgccggtagcggtagtgatctttggacgaggattgcaagcttcggctacaagcacgacgactacatctctcagcgtgctcaactggtcggggtgcttgagatgttgtagggatatgatggttattgactttaatattatataaaagataggttgctgacgttttaaaaaaaaaaaaaaaaaaaaaaaaaaaaaaaaaaaaaaaaaaaaaaaaagagggc

SEQ ID NO: 10108 - DNA, 493 bp, Zea mays
  unsure (1)..(493): unsure at all n locations
  Clone ID: MRT4577_10921C.1
ggcttggaacctttgggctgatttatgtgcttgtctaaaaataccctagaagttaagcctaagtacactccaaagttcacagtcgacgttcgtacgagagaggaataaaaggaacacgccgaccctgagttacaccacatatacacagctcgctacgaacgtcgttacggaaccggattctacctcactatttccttaagcggcaaaaaaataatagccagaagggaatcctaagaaccttacctagtaccggaggaggtaaaagtcgacacagccggctctcgggtatcgaacccttccaccaagaagggaccgtccttcaagagttcgctataactcacgcacgctctcccttcggtcggtcgtccttggctaacttgtcccgggtcggaagaagtctatggaaaaggataagtctcgtagcccaatcggccgcacgagaaaggggtccccgcgccgtagctcgatgganaacctctagccgaccccataa

SEQ ID NO: 10109 - DNA, 644 bp, Zea mays
  unsure (1)..(644): unsure at all n locations
  Clone ID: MRT4577_109220C.1
agcggtcataggtcctgtctcgtagagggtcggaaaatgatatttctatgtttgattcgattgatgttttgcgagtcttcttggttgatatatcttggtgcctgtaagtttatatgcttttaagcatataatttgaacagtacaagctcaggtttgtttggatatatttttcccctgtcgcaccagtttatgcaattattgtgtagatttttttttattgatattagaatgttctctgctccattgaggatgtacttccaacaacatattgacaatgtcacgtcttttattgcagccttataggaaggactctaataagtggggagcaccaatggatttctgatgacatccccttcagtttctctcagataagcgatgaagataacctaggtttatgtcaggtgcatatttcctttcatgctctcccttgattaggttctctccagactgcagtttttactagattatattaacaacaccctcacatgtgggaacttaaaaaatcaagtggaaaaaagaactatggataagtagaaaggcttacagttgtcgttagattttgcatgttgaagacgcctcgaggctacatgcatggttgntgagcaaatgaacacctatgttgctaaaataaatcactacgcatc

SEQ ID NO: 10110 - DNA, 1935 bp, Zea mays
  Clone ID: MRT4577_109221C.1
cattgggaccctcgaggccggccgggacaccagacagacactccagtcgatcgactggcagtctggcaccagaccacaagtccacaagcttgcagaacgaagctaggcaccaactagtacgtactgcgcatggagcaagcgtcccactatctgtgcctcttcctggctctgatcctaccgctcctgctcctcaggctactcagggggcgccgcagcgacagcggcgtccggctgccgcccggcccatggcggctgccggtgatcggcagcctacaccacctcgtgggcaagccgctggtgcaccgcgcgttcgccgacctcgcgcgccgtctggacgcgccgctcatgtacctcaggctcggcgaggtccccgtcgtggtggccacgtcccgggacgccgcgcgcgaggtcctgcggacgaacgacgtcacgttcgccacgcggccgtggagccccacgatgaagatcatgatgcaggacgggctgggcatggtgttcgcgccctacggcgaccactggcgccagctccggaagatcagcatcctggagctgctcagcgcccgccgcgtccagtcgtttcgccacgtccgggaggacgaggtggcgcgcctcgtcgccgcagtcgccgccaccgcaccaggccagcccgtcaacgtcagccaccggatcgccgtgctcgtcgccgattcggcggtgcgcgccatgatcggggacaggttcagcaggcgggacgagttcttggtgtcgctcgaggaggggctcaagctcgtctccgggttcagcctaggcgacctattcccgtcatcgccgtttatgaacttcctcagcgggacggcacggcgagcgcatgcgaaccataggaagaactttgagctcatggaatgcgccatcaagcagcacgaggaaaggagagcccaagcggcggtgaacggcgctgctgtccaggaggaggaagcagaggacctagtggacgtgctcttgaggatacaaaaggatggcggcctcgacatgcctctcacaatgggaataatcaaagccgttatacttgacttgttcagcgctggaagtgagacatcagcaactacactgaactgggcaatggcggagcttatgaggtgcccggatgtgatgaagaaagcacaagccgagctacgcgacagcctcaatggtaagccgaaagtgaccgaagatgacttggtagagatgaaatacttgaagctcatcatcaaggaaacgttgaggctgcatccagcggcgccattgcttgtgccaagggaagcaagggactcatgcaagatccttgggtacgacgtgccaaagggcaccacggtgttcgtgaacgcgtgggccattggcagggatcctgagtattgggatgatgctgaagagtttaagcctgagcgatttgagtgtggcacggtcgacttcaagggcatggactttgagtacataccgtttggtgccggtagaaggatatgccctgggatggtgtttgcacaggccaatatagagctcgcgctggctgcgctgctctaccacttcgactggaagctcgaagaggggctggagccaagtgagctggacatgaccgaggacataggcctcactgttcgaaagaagaacgacatgcttttgcatcccagcgttagagtgccccataaatattgatgactaaatggaccagcactaagcatgacaaatctagcatggccaagcaccgcattatgttaactaatagtttctgtgtcggcatggaccagtgcatagcgtcgtgtttaggttactacctaaatctctagtgtcggttgaaacacgacacgattaagaagcaggcactattgagtcggattatatgataaagttgtaataatttttagacttgaataatagatttgtaacttaaataaactgaaaaaaaaaaaaaaaaaagcggcc

SEQ ID NO: 10111 - DNA, 147 bp, Zea mays
  Clone ID: MRT4577_109222C.1
ctttattttcgtccaggccgtgtcgaggggtgtaagctgagagtgaatatatgtttgtgtctaaaataaagaggagagaataaatccaacgtcaccaaaacataggcagtagtaggtagaaacgaatggatttattctttcttcttt

SEQ ID NO: 10112 - DNA, 652 bp, Zea mays
  Clone ID: MRT4577_109223C.1
tcggacgcgtgggcggacgcgtgggcagcagcagctgcttgagcgacgagctggtgctgggcgaggagaacaacttcctaggcatctgcacgcaggagctgctcgcgcgcggcaccgagctgctcaagcgcacccgcaaagggtcgttgcattggaaggtcgtctctgtgtacatcaaccgcgcgggtctggtgatgctgaagatgaagagtcggcacgtcggtggcaccatcacgaagaagaagaagagcgtggtggtggacgtgtgccgggacgtggcagcgtggcccgggcggcacctgctggacggcggcgagcaccggcgctacttcggcctgcgcaccgcggagcagcgggtaatcgagttcgagtgcggcagccagcgcgagcatgaggtgtggaccaagcgcgtcgcgcgcgtcctggccgacgcccggaagcgctgagcgtctgctactgacactgcacaggtaccccagggtcgccatgtaatgtaaggctaggtcgctgtaaagagcatgcatgcgtactgacagtgacaggtacccgggtcgccatgtaatgtaaagttaggtcgctgtaaagagcatgcatgcaaatgcagatgcagagatgatgttgtgtgatggcatcccgtcatcatgcatggtga

SEQ ID NO: 10113 - DNA, 1128 bp, Zea mays
  Clone ID: MRT4577_109224C.1
atgacctacacattgcattcctatgcatacattgaagtgatatctgcaggtgaagctcaagaaatcctaaagaattttatgaggcgagcacaaaatgaatttgaactaaagatcaagaagtttctagctgaagagggcatcaagcatgagttctccgttccctacactccacaagaaaatgtcatagaaaggaagaatcgaactcttatcgagacagcaaggaccatgcttgatgaatacaagactctagacaactactgggctaaagttgtcaacactgcatgtcatgcaatcaaccatctctatcttcacaagatttacaagaatacttcttatgagctactcgctggaaatgatgtatcaccctgtgaagcaatcaagaaactagccattggtgaagtgaggccacaagaaaatgatgaagatgaagaattgatttggatgtctaatgaagttgtacatgaagatgcaagaatggaggatgatcaaaacatcacaaaagcaaatcctttaacttcaaatcaaccagatcaagaagaagtcagtgagccacaagatatcttgcaaagggatcatcctatcgacaacatcttgggtaccatcaagagaggggtaacaactcattctagattgacaattttttgtgaattttacacgtttgtttccactcttgagccacttaaggtagaagaagctctaaaagatcctgatttggtgatggcgatgcaagaggatctaaataacttcattaggaatgaagtctggtccttagttgaaagacccaaaaagaacgtgattggaaccaggtgggtatttcgaaacaagcaagatgaacatggcgtgattacaaggaacaaggcaaggctagttgctcaaggattcactcaattagaaggcatcgactttggggagacttatgctccagtggccaggttagagtcaataagaatgttaattacttatgtcactcaccatgatttcaaactctaccaaatggacgtcaagagtgccttcttaaatggacccattcaagaattggtctttgttgagcaacctctaggatttgaagatccaaagaagcccaaccaagtctaccagctccataaggcactctctaggctcaaatag

SEQ ID NO: 10114 - DNA, 188 bp, Zea mays
  Clone ID: MRT4577_109225C.1
gttcttcagttcgatcctaaaaagttaggaccggtaaatatattttagtgtaaaaatgaataggaataggatccgatcctaattcgattggaaacttgaagttagtagggtaaaattgaaagcttattaccacccctatgtccatacatattatgagggcaaggttgggatcatgtgagacatgaagc

SEQ ID NO: 10115 - DNA, 449 bp, Zea mays
  Clone ID: MRT4577_109226C.1
gcgggacacggggcacacgagctcacgggagacggcgaattaggttgctcgcccccgagcgggcgaccaagggcccgccaccggatacggacagcagcgcgcaccaaaacgacaaggggaggaaccagacgcccgacggacgaggcccaccttcagcaccgcctccacgacggccgcggggcccccgctgcggcagagacggacctggtgcacacgtacgtgccgcggagcaagcgcgggcaggggctcgcggcgcggcacagcaacgctgacttcgcccacgcgcaggcccgcggcaagcgcgacctccccacccgctccaacaactccgacacgtacctgcctcggaaaccgccgacgaaggagctcgcggacaaggatcaagaaccccagccccaacccaccaccaggaacaaaggaggtagtccaagacacccaccgccacccaa

SEQ ID NO: 10116 - DNA, 261 bp, Zea mays
  unsure (1)..(261): unsure at all n locations
  Clone ID: MRT4577_109227C.1
cnnngcannggagnagcagcaaagcaaagcagcncggccagccagccagngccgaggggggcagnnccggaggcacacacacacacacgcacaggngcngaagcacacggcagnngccnngccggggcganngcngcnnccnnccnnccnccncccncgaggcnncncncagcccagagagaaagacgccaaggaagagcnggngccgcnggcncngccnccgaaccaacccaacccaaggcgncagcagcagcggcggcg

SEQ ID NO: 10117 - DNA, 167 bp, Zea mays
  Clone ID: MRT4577_109228C.1
ccccggactctccgggcttcctcttacagcaccccgcgcgcgaggatcgccgccccgcgtgcggccctagcagcccgatggcactgcgcgccgacgcacgcctgctaaggggcatcagtcctcggctgatagccggggtatgggagagacttgcctgtgtgtgaacc

SEQ ID NO: 10118 - DNA, 527 bp, Zea mays
  Clone ID: MRT4577_109229C.1
cccactcgtccgctcgcaagccagccccgcaaaccccgccgctaccgcgcgcccgccgtgaccggcgagatccgctcgcccgcccaccgcaacccccgcgcgcgacagctcctgtgcatgccgcatccgccgcgatccgcccgccctcctcaatccgcccgcccaccgcaaaaccgccgtgatctggccgcccgcccacccgcctcccctctcgcctcccctctgcacgtggccggcgcatgtcgtcgaggaggagcggcgacatgcagcggaggaggtccgcggcggcggagggctgaccggcgcggaagagcgcggcggtgaggatgcgggacgtggcggtgtcggggccgcgtgtggcgcggcgcggaggagcatggcgggggctgcgcggaggagcgtcggggacgaccgctatgagcagcacaacgcggccaggatggcgttgagggcgtcggtcgtgcggtggaccgtgcagaacagggtcgcggcggcggcgaaaccgccgtggcgcgcagggtggacag

SEQ ID NO: 10119 - DNA, 188 bp, Zea mays
  Clone ID: MRT4577_10922C.1
accagtctcaatcgaagcagcatgtcggaacgcacatcgatgtcgtcccatctacttgtctcgcgacttcgcagtaggactatttgctcggaggtagcgtctttcgatagggtgcaatgtcgctagtgatgctccacgtcgaggggggcgtactccctgtggatctctaggtcttcttcgacagggtg

SEQ ID NO: 10120 - DNA, 269 bp, Zea mays
  Clone ID: MRT4577_109230C.1
cggacccttggggttaacccagagtaaagcttgaaactttgaactaaaaaattggctttttggggggtgtcggaaatgcttggtcctccctttaacttcagggcagtttcaagatcgtttgttccgttggcatcaagcccatccacgttcaagactgttgtttttttttttaaaaaaaagccagctcctgctaagtccaaggttgtttttgagactagcgatgagctcgccaagtggtttggtcctgacaggaaaattttcttgcctga

SEQ ID NO: 10121 - DNA, 1233 bp, Zea mays
  Clone ID: MRT4577_109231C.1
cccacgcgttcgcccacgcgtccgctttcattcatttctagatattttgctgtgtgatggcatgccaccacgtgtttttcaatgtgaccttgtttattgggttggcatgttctgtttagctatgtccaagttgatatcagtaattctatttagtatatatatcaatatcaagcacttatttcgtctacgaccagtttattggaaattatgtttaactttttcaagtctttgcaatatttcttattggacaaaataaaaaacgttctacttattgggcaagggtctatgatttcttctagatcgcaaccaaaattcaattatgcatcactgggcggcgatcccgaggcgggtggggaagttttgtggctgtatgtcccggatcgagggtaggaatgcaagcggaaagacttttgaaaacaaggtacaaaataattaatgtcttaattttagttactgtcttagttgtacttaatatgcacacaggaaactcatgttttcctatttggacttgtgcagctcactaatgcatgctatttgtacaaagctgaggataaagataacaagtcatttcagttcatacactgctggaatgttttacgacttgaaccaaagtggaatgaaaagatgaatcaattagcttcaacaaaatctggttctggttgcaagaaccaaagtggaatgaaaagatgaatcaattagcttgttgcaagaaacagaaggtaacttaaatggtgatgcaactccaaagggtgatgcacctacaagacccattggcaggaagaaggctaagcaactattacgccgaggtggtgctgatggttacattgaggcattggacaatttgtgggagaaaaagaaacaagctgatgtagacaaagaactgaagaagaaagattcaacgaatcactagaaattgagaaggagagacttgagatagagcgcacaaggattgcaaatgaacaaaaatgtatgcatatgaagagaatgctagagcctagaggaagaataatgaaagtgggcattagcggaatggatgcagatcagcagtcgtactacagaagcctacgaagtgagataaaccgtcgtcgtgggatcaacttttcattgtgatgatttgcttatgtagtcgtagaatcagattgcttgaatcatataccacttcttttatcaaaatttgaacttcaaatttacttgttagatgacatttctgttaaataaattacttgttggatg

SEQ ID NO: 10122 - DNA, 573 bp, Zea mays
  Clone ID: MRT4577_109232C.1
ccaaagtaccaccagccattaacaaattagctgagtttgggggacagctccagtccgtatttcagcaggggcaacaaatccaagcatcccaagcttcagcttcttctaacatgtctccagagtattatcagcggatgtctgacatctaccgcatgggtcatgaaactagcatgggaattttgaacaatatacgctctgatggtgaatggcattacaactatagtaccggcagagatgaataccagtattactaaaggtggataaaccagtccccagcagtaaatttttgccgagcatcaagttttgatagcgctcaggaaataccttggccatagaactcgttggacgtccttccactagatgaggtcattccatagaaagtgcttgaagagttttaggcaagcctttgaaggatgagatggcgttgccaacatcccacggggttagctagcagagcgtcagagaaaactcactacttcaacaccaaaggaaaaaccctcaaccttgcttgcggggaatttggggaatttaatgatggttgccccttgtgtgccgcttggagtttatctgtca

SEQ ID NO: 10123 - DNA, 428 bp, Zea mays
  Clone ID: MRT4577_109233C.1
cctcagatctcgccgccaagcatacatgcattatcccaaactccgcaggggcgagcccgaccggtagaggggggggcgggcaaaagtactaaaaaaggaggggatcagggacacacggacgggatcgaccagagcaccaggcaggggccagggaacaaaaaaacaatatcatggcttcaggggaggggaagggatcggaaaacccgcttaaccaagaacagaacacacggatctctcggaggggcggggggatcccgggggaaggccgggcgaaaaaataggagctgaagtttttgacaaaaattccctcctggggcccgggggccccgccggcgggaggggtacttgcccagctgccccagggagggggccttggggcgcaaaaaaagcgggccccgcgcccccttgaccttgtccgggtgggcgcc

SEQ ID NO: 10124 - DNA, 789 bp, Zea mays
  Clone ID: MRT4577_109234C.1
gttttgatcaaagatacctgtgtagaagtaataaagctatgattaaggaacgattcttgttcatggagatcgatgcactgctacatgattttgggaataaaatcaacttgaattctcgggtgcagtaactttgaagacccctcgtcgctgaaacgagttccttcttggagatcgatgcgatactgcactgaatcagaataaaatcaatggtgaatttgctgtcagtttgctacattggtcggtgggaagttgtctatctgtttcttctatcggcgaataccacctatccgctatccttgttcaccgcttcacggtacaatgccacgcaactgcttgccgcctttgcatcaccacgccatttaccgttcctttctcatcgtccagaggctgttcaacgcttggaagcctccctctctcatgcacgcagcctttgctcccaacttgtgaacgtcgctgcctccttattcctgtgacgcacggtgtttagaggctcccagcgctcgatcgctcgtcgcgtccttgctacagcaccgaccggtcgtctctagggccctcgccctcctacttccttgcgtcgagccgccatcctttccactgcgcccagccactctccatcactaaccctggccgtggctcacccaggtctggcgtctccctgttctcgcctcgtccttgtgctcgtggtcgacctgcaccgtcaccccagttcaccggtgtcatcggggcacgccttcctcaccacgatagcaactttgcccgtgtcggcttctcccaccttcgcatgtttct

SEQ ID NO: 10125 - DNA, 361 bp, Zea mays
  Clone ID: MRT4577_109235C.1
agctaattgttgcacttaccagttgcatgcgtcacgtccgaagcgggtagaggagctcggtttttctttcccatatgtcgtctaacaatcaaggagttaccagctgcgagaaaacatctaagtctaacatggcatgaagttacatagatgtagcactcatggtatcacttcgctagctgaactgaggatgattgattgaccgagttataaaaaagtgtagcatctacaatttaatatttagtatgtggctcatatgtccactttaattttaattttaaatttatttttgtagggagagtattacattggcttaccacgggatgttgtgcaattggtgtactataacatcaaatatgattcg

SEQ ID NO: 10126 - DNA, 1995 bp, Zea mays
  unsure (1)..(1995): unsure at all n locations
  Clone ID: MRT4577_109236C.1
acagctcgcctgcctgcctctccgtcgtcgccgagtccctcgccggctctaccaggcgttgttaaaggatatgggcaagtaagcgctcgacatctaaggctatctacccccctcacataactacaagataagtccccgctcgaggaacaggcgtatggactgattaaatatccaatagatgatctgctagtaaggcccattgcagatatccggctttatctaagggcacttcggcggggacgctcaaccgccccgcgggcggcgtcgacggtcggttcccggcggcctcgcggaggttgcatcccgtgtcgaatcgaggtatttgtcgtgcaggcaggatcctacgccaaatgcctctctttgataagaaacctttctccttgctggagccccctaaggacttggattcaaaggagaaggtgttccaaattcgattcacgaaggagatattccgagattatgaagaatacctgaagaggctaaacctttatcgtcaaagagtttggacatgtaatatatctggaaaatctaatttaacttttgaagaagctttggtatctgagcacaaagcgatggagaaggctcaaaatttgccaactgagctaatggctcaagttcttcggatgactcaatacagccctcttggtttatatgaacttgttgataagatatatgctagtctgctggaagaagtatttgagggaatagaattacatgctaataaggatggtaatgtggcaccttgcaagattttgaagattttagattctggtggcacaaagatgtgtgaagttggttggattcggaagggtaaggctataaccaacacatcagtaatcaaagctgcagatctgttttaccggagggcacctgttagcaggaatacgctgaagttttttattagagatgctacgtcacaaagtaatccatgggttatccatgagaatcttgccaaaaaatttggcataaccatcgagccccctgatagtgtaatgaagaaagggagaaaaagacaagagaatgaaactgttgaagatggaaggaaaaagctcaagacagatgaagaacatgcttatgtgctgattaagtatccaatagatgatctgctagtaaggcccaatgcagatgatccgtctttatttaagagacctcttctggctacagattttagagtaccaagatgttctgtgggagatctccttatggtatgggacttctgctcgtcttttgggagggctctgaatctgtccccatttccgctaacagatctggagaatgcaatttgccacaaagaaagcaatgttcttcttgtggaaatacatgcagctttgtttcacttgcttatgaaggatgaaggtgactatttcactgttccgcagaacaagaaacagaagttaaaggtaagttcagtaacatgggctgagtatctatgtgacttcttggaaatgacaaaaaatgaagaactatccactaacattgcaacagtaagaaggggatattatggtcttattgacactaatataaagcttaagatccttcgggaactagtggaagaagctattgaaacctctgccataagggagatactaagtgatcgtgtggaccagaaacaagtccttaatgcaacaaaaagagagaacaccagaaaggacaaaaaagagcaaaatctgaacactgaaattgccatgaaaaatgaggagaatcagacagatgctgtgcaaggtggccatgaaggtgtagatgagctggttaggagaaaagaagaaaatgacaagagtaatattttctcggggtaaggacagaagtgaaacgacacatggtacagcaccttggagacggagatcgagaaattatccatccgttccagccctcttggtaaagaagacagtacagtaaggtactggtttttcaagcgtgaaggaagactttttgntgaaaactgcagattcagnagaatggggttactacagcactaaggaagagctcgatgcgctc

SEQ ID NO: 10127 - DNA, 196 bp, Zea mays
  Clone ID: MRT4577_109237C.1
attgaatactagaactcagatacagattgcatgtgaacccttttacatagatcaaatttaaatacgtaaagataatatccgtaccatttatattcctacgcggcgtgttaggtggcagccacatatcaaaataaaacctgaaaattattagaaattttaaaagataaatgaattactgactggaaaaaaattttag

SEQ ID NO: 10128 - DNA, 675 bp, Zea mays
  unsure (1)..(675): unsure at all n locations
  Clone ID: MRT4577_109238C.1
ttgggtacctcgaggccggccgggtcgaaacgaggcgccaaccattccccaaacgctctcgcgtccgcccgacagctcgcctgcctgcctctccgtcgtcgccgagtccctcgccggctctaccaggcggtggcgaaggcacttcggcggggacgctcaaccgccccgcgggcggcgtcgacggtcggttcccggcggcctcgcggaggttgcatcccgtgtcgaatcgagattattccatgcaagagctttacgggagaaatgaaagttgtgctttattttcaagtgcaggcaggatcctacgccaaatgcctctctttgataagaaacctttctccttgctggagccccctaaggacttggattcaaaggagaaggtgttccaaattcgattcacgaaggagatattccgagattatgaagaatacctgaagaggctaaacctttatcgtcaaagagtttggacatgtaatatatctggaaaatctaatttaacttttgaagaagctttggtatctgagcacaaagcgatggagaaggctcaaaatttgccaactgagctaatggctcaagttcttcggatgactcaatacagccctcttggnttatatgaacttgttgataagatatatgctagtctgctggaagaagtatttgagggaatagaattacctg

SEQ ID NO: 10129 - DNA, 1015 bp, Zea mays
  Clone ID: MRT4577_109239C.1
ctcctatagggcgattgggttcatcgaggccggccgggcctctgccatacgggagatactaagtgatcgtgtggaccagaaacaagtccttaatgcaacaaaaagagagaacaccagaaaggacaaaaaagagcaaaatctgaacactgaaattgccatgaaaaatgaggagaatcagacagatgctgtgcaaggtggccatgaaggtgtagatgagctggttaggagaaaagaagaaaatgacaagagtaatttttctcggggtaggacagaagtgaaacgacacatggtacagcaccttgagacggagatcgagaaattatccatccgttccagccctcttggtaaagacagacagtacagtaggtactggtttttcaagcgtgaaggaagactttttgttgaaactgcagattccagagaatggggttactacagcactaaggaagagcttgatgcgctcatggactcattgaatgtcaaaggtataagggagagagctttgaaacggcaactagagaagttctatagtaagataagtaatgccctagagaaacgatcaaaagacatcgcaaacaagacgttacttgaagagggtgtgctgcgccgttccacacgtgtccgggcccagccaaaggacaatccgtccatggcattcctcaagtatgtcaacaagtggagggataactgaggtactctgagctatgtaggcttttgctcggttaggtcgttgcagtgactcgccatactcatggctggtttactgacacctcattagctagtgaaacctgtatcagaacctacttttcttctctctcttttttttttaaattttaacttagctttcatgtgtgttcacaaatgaacccctcccccccctccgtaattgaactatgctaggctttaccgtttttagaacagtggccaaattttttgcatggatgatgtaaacgtgacaaggccggtgtggaaatgcttcgatctgcaagggtgggccccgggccaatgttggggc

SEQ ID NO: 10130 - DNA, 329 bp, Zea mays
  Clone ID: MRT4577_10923C.1
cggacggagcatgggattgacccacatacccgccctccgacccgcatgccaaatacgccgcggcacgcgtcggctcgtagccatgccgtcacagtttcgcaccggccgcctcctactccctagtgacaggctgatcacgattctctcccctgtacgcttcgagtccatgtcacctgctcatcgcgccttccggctgccgccgacgcagcttgttcaccgggtcacacgccgccgcggaagcgccccccgtcgacgtgacgggagggggctctagagcatcatggaggctcagtctggaggatatagcctgggatcatatattcacacag

SEQ ID NO: 10131 - DNA, 506 bp, Zea mays
  unsure (1)..(506): unsure at all n locations
  Clone ID: MRT4577_109240C.1
attcggctcgagcgttgttaaaggatatgggcaagtaagcgctcgacatctaaggctatctacccccctcacataactacaagataagtccccgctcgaggaacaggcgtatggactgattaaatatccaatagatgatctgctagtaaggcccattgcagatgatccggctttatctaagagacctactctgctacagattttagagtaccaagatgttctgtgggagatctccttatggtatgggatttctgctcgtcttttgggagggttctgaatctgtccccatttccgctaacagatttggagaacacaatttgccacaaagaaagcaatgttcttcttgtggaaatacatgcagctatgaaggatgaaggtgactatttcactgttctgcagaacaagaaacggaagttaaaggtaagttcagtaacatgggctgagtatctatgtgatttcttggaaatgacaaanaatgaagaacgttccacaaacattgcaacagt

SEQ ID NO: 10132 - DNA, 420 bp, Zea mays
  Clone ID: MRT4577_109241C.1
cgcagcagggagccccagagcaggccgcgccctccccttaaataatccccaccaggggccaaaaggccgaagggggcctttaaagaacatacgcccgcacagcacaagaggcggaaacccgaaacgcgccagaccgaccgggtgaacaccagaacctatacaccaacgcgcaaggaaggccagcaaccaaccaggaaaaaacggtactccccagcccatgaggaaagacaccgaaccaaaacaaacccccacaacagcatgggaagaagacaaaaaaaaacgccaacccatcaacacgcgaaggagcagaaggggaatccaaagaacggaaacacccacacgagggaggacttcgtggagagcccctcagcaacatacccagggacccctgcacaaacaccaacaagagcatgcgcagga

SEQ ID NO: 10133 - DNA, 1200 bp, Zea mays
  Clone ID: MRT4577_109242C.1
cccgggcttggaaatgacaaaaaatgaagaactatccactaacattgcaacagtaagaaggggatattatggtcttattgacactaatataaagcttaagatccttcgggaactagtggaagaagctattcaaatctctgccataaaggagatactaagtgaccgtgtggaccagaaacaagtcctcaatgcaacaaaaagagagaacaccagaaaggacaaacaagagaaaaatcttaacactgaaattgccatgaaaagtcaggagaatcagacagatgatgtgcaagttggtcatgggggtgtagatgagctggttaggagaaaagaagaaaatgacaagagcaatatttctcggagtagaacagaagggaaacgacacttggtacagcaccttgagacggagattgagaaattatccatccgatccagcccacttggtaaagacaggcagtacaataggtactggtttttcaagcgtgaaggaaggctttttgttgaaactgcagattccagagaatggggttactacaacactaaggaagagctttgaaacggcaactagagaagttttacagtaagataagtaatgccctagagaaacgatcaaaagatatcgcaaacaggatgttacttgaagagggtgtactgcggcgttccacacgtgtccgggctcagccaaaggacatggcattcctcaagtacgtcaacaagtggaaggataactgaggtggcggtctgccagcggtggtggtggtctgccagcggtgggaggataacttgagccactgggtgacagggtttgcagtagatgtgtttggtttgaggttaaagtgggatgggacgggggcgacaccgtcctctcaattttttaattttttgggatcacgccgctacaaaaaaactactctggtgtttacctcgtccctacgtgactcccatttaaccactggagtaactgtgaccgtcccatttcatcctttcgtatacttggttaggtcgtcacagtggttcgccatactcgtcgcattagctaatgaaaactgtactagaacctagttttcttccctttgctactgaaatgaacactggttcacaaatgaaaaaatattgctactgaagtgaactgtgccactctttttccacctttgcgttccatgtgtttaacactggttcacaaatgaaaagcctttgctactg

SEQ ID NO: 10134 - DNA, 315 bp, Zea mays
  Clone ID: MRT4577_109243C.1
gcagtggaaataaattttttatttgtacacggaaccatgtaacattccagcttcaatcttcgaagatgggctggattgcccccaaaacaggcaaaaatggatccctccgtgggacgtatgaaaaataaataggggccaaaggacatgcctaaattacccgcctcattctcagtatagactactaaagcttgaataaacgtttataaaaaggccgagccaaacgtaacttaaaaccaggcacaacaaaacaaacttgctacctgctataaacactacggtagcaggagttcaatgctccccacttggagggcagat

SEQ ID NO: 10135 - DNA, 127 bp, Zea mays
  unsure (1)..(127): unsure at all n locations
  Clone ID: MRT4577_109244C.1
gccagacagaggaaaccacgcaagacgcaacgcgacttttcgccgcgccgcgcagacgcgagcagagangagaccgcgacgaacgacgcagaggccggcaaagaacgaacggagacggcagcgggca

SEQ ID NO: 10136 - DNA, 275 bp, Zea mays
  unsure (1)..(275): unsure at all n locations
  Clone ID: MRT4577_109245C.1
aatgnatttaaagaacgcccnncgcgcgtctaagaactaagtggatcccccgggctataagaatgcgggaccagcgcttccccgtgagccgggcaactggtgggtgtcgtcctcctctttgcgcagcaggttactcgcctaccccctccctcgcagaccgcagctatctctactctacccaccggtccacactgctcactccacgcgcgtgtgggggtgtttttatttcttcttcttcagaaaaaaaccgcagcaatcgcccgcggggggggggg

SEQ ID NO: 10137 - DNA, 554 bp, Zea mays
  Clone ID: MRT4577_109246C.1
ttcaacaggatatgctcatcaaactgatgataatacaatacaaaatgtgagtgcagcccaagtttctgataggtgtagacagctatacagcagcagcacccatggatgcacttccgctcttgggcttctggcttctgcttatgaatcatcataatctgatgaagaagcagatgcacctaacaatatatcaaacaattgtgaaaacaataatgcggcaaatggagccacaaatattcagtcctccagaacatcagttcaggatgaaaatacgaatttgcaattgtatgaagaggaaaataactccagagcaatagcatctctgatgcaaccagtggaggataagagtactgctatgactcctgttagtatggaaacaaatattatccatctagcagatcagggagagtcactaaccttccatgagcagtggcatgcgtatcttgactttgatgatctaactgcatcaggtgtaaaagcctctccgaatactagtttgggcacggctaaagctgcaatgaaaacagatgcactgactttgttcaagtacagcaagg

SEQ ID NO: 10138 - DNA, 285 bp, Zea mays
  Clone ID: MRT4577_109247C.1
gggggttccaaagaggcattatggtatccgccctaacgagcaaagggcaacaacccagggaataatcttaagggaaacagggggggggataacaaaaaccgaccccagcttggtccataagaaaaacggggagggtgcctgggggaatggttccaactccccttcctaatctttaaaaatgggggtcgactggattccccactggatccggggcatcgagggaagccacccaaaacaaaccttggagcaatggagccaataaccgggccgccttccatggaaaaa

SEQ ID NO: 10139 - DNA, 317 bp, Zea mays
  Clone ID: MRT4577_109248C.1
gaagctactgcaagcatgtgaattatattcatatatatatacacgtcgccatatgacattttcttgcgtaaaaaaaaaaaaaaaaaagaactaaaattaaaaaaaaaaaaagaaaaaaaagagattgagaaaaaagagagaaaaaatggaactggcccattgaggaaggttgagaaccagttaacaagaattgccaacatatttttggacaaggggggtaacaaagtgataagggtttccaacaaacattcttggagttcaggaagagtgggggcggccaccaatttcattatttggtgacaagcaaggtttagaga

SEQ ID NO: 10140 - DNA, 203 bp, Zea mays
  Clone ID: MRT4577_109249C.1
gcacgagccgaacccaacttcctgattcaaatccgtactgacatgagatggatccatcgatcaggtatggtcgagactgcgtggagccggccgccaagcccggggatttggcactggtaatcatcaggggagtgacatggatcctcgaacgatttccgagccttgcaagaaggctctgatgaccccaaccgagacaatagcca

SEQ ID NO: 10141 - DNA, 633 bp, Zea mays
  Clone ID: MRT4577_10924C.1
tctccatcgcgcgcaccaaatcgcactccgtccgccccgtcgatcgaacagccaccgctcacctctctcacccgccgccaaaacctcctcccctggcctcctctcatactcatatagctgagcagcccctgccacaaggcagagcatcgctcacaccagcgtcgccctgccttgccatcgcgatcgatcgatcggaggccaagagctagctagcacgccggcctccgctcgccggtgccgcgcgcgatggaggccagcgccgggcttgtggccggctcgcacaaccggaacgagctggtgctcatccggggccacgaggaccccaagccgctgcgggcgctgagcgggcaggtgtgcgagatatgcggcgacgaggtcgggctcacggtggacggcgacctcttcgtggcctgcaacgagtgcggtttccccgtctgccggccctgctacgagtacgagcgccgggagggcacgcagaactgcccccagtgcaagacgcgctacaagcgcctcaaggggagcccgagggtcgccggggacgatgacgaggaggacatcgacgacctggagcacgagttcaacatcgacgacgagaagcagaggcagctggagggcaacatgcagaacagccag

SEQ ID NO: 10142 - DNA, 383 bp, Zea mays
  unsure (1)..(383): unsure at all n locations
  Clone ID: MRT4577_109250C.1
tntttttttttttttttttttttttttttttttttttttttttttttttttttttttttttttttttttttttggcggaaacccacacaggggagggcatttttttaaaagctttgatcgaggtttggcccccgtaatttaagggatacaacaccgtgcaacaacgtttttttaaaagctgtccctcggggcccacgggaacataagcaagagctttggcaatcacaattcatgctttcccccggggttgaactggtttaaaagaggggggaagcgacaggaagtttccccacccacatggtccaaaaatccagcccggaggcaggtcttaacggggtccacaaacgttttcctccagggggtgggagtttcacccgattttt

SEQ ID NO: 10143 - DNA, 898 bp, Zea mays
  Clone ID: MRT4577_109251C.1
cgggaaagccttagagcacttttccacatactgacaagtcaagagaactgattgcatgcaacattctaatattttatctttttcaaagaagaaacagctcacagattcatgatttattgaaggacattgaaggtaatggtatttctcttgacaaaaccacatatgatttccttgtctatggatttcacaaatctggggatatcaatgattcagttaatgcgcttgatgcctgcattgctcagggaataaaaccaagcaaccgcagtctcagaatagtgttaagtcattactgcaggctaggaaaccatgagaaatcactagcattatttcacttgattgagcgcaatggatggaagcatggtttaatcattaagaccaccctagcttcatgtctcctttcatttgggagacaattggaagcaaaatcatgtctgaacaacctgagcaaaggtgagtttatcggatgttcaagcaattttgatgatctcatcaaggaattctgcattctaggagatttgaaaatgactctttatctgctaaatacaatgttaaagaaaggcacactgcctaatgaagccagttacagttctgttatatataaactttgtacattgaaggagttcgatcaggcacttgattttcttgctgaaatgcagctggcaagtctaaaatcaagtgaaatctcctgtgatgcacttgtacatggcctttgtgccatgggaagaccttctgatgctagaaaggttttggaaatgctaaccaccttgggatctgcaccatcctatggcatgtttagagttgtttttgataactattgcagaagtagcaatctacagaaagctgcggcacttctgcatgacatgcaacatgcaggacaagtggccaactttgagatgca

SEQ ID NO: 10144 - DNA, 270 bp, Zea mays
  Clone ID: MRT4577_109252C.1
gtggcatcttcggcgatcagtgtcaggagcgcagcatgctggtgacaggcgctggtgactccatcatgatgtctgcgacgctgatcatgatggtcggcgtaaacgacgagttggttcgatctacggggaagccctcaagggcatggacgataaggtcgcaggcctacagtctaagatgaagtatcggcctcggtggagacgacgatgacgatatacgctgggcgacgacggacatatttgatgtacatgtgaataaacagccaagttcgt

SEQ ID NO: 10145 - DNA, 844 bp, Zea mays
  Clone ID: MRT4577_109253C.1
gatcttctcttctcttctcttccctttccttgcagcgagggagaagggaggaggaagagagcgtgcgcgggggagcgtaaggtggctttctggggggatagattccattcctctccttggaggaggaggaggaggagaagtagtagtggggaattgggtagctaggccagatcaattgctttctctcgattctctgcgccttttctccaactttactctcccccgtggttggttggttggttgttccttgcttgcgagggggttctcggttcttggcagaaaagaacgacagatcagtcggtcagtcagtccagtcccctgttcctgtgcgagtggcgagtgaagtgacgggcgtggtttcttgggagtttggagccggaggaagaagaagatggcagccgcgccgccgcccaaggccgacgagctgcagccgcatccgcccaaggagcagctgcccagcgtctccttctgtatcaccagtccgccgccatggcccgaggccgtgattctaggatttcagcatttcatagtcatgctgggcaccaccgtcatcataccaagcgcgcttgttcctcaaatgggaggtggaaatgaggagaaagctcgggtaatccagacgctcttgttcgtcgccggcataaacaccttactgcaaaccttcttcgggtctcgcctccccgtcgtgatgggcggctcctacaccttcgtcgcgccgaccatctccatcatcttggctggacgctatgacaatgagacggaccctcacgagaaattcctacggacgatgagggggaccaaggcgctctcatcatcgccctcacgattcagatcatccttggcttca

SEQ ID NO: 10146 - DNA, 2049 bp, Zea mays
  Clone ID: MRT4577_109254C.1
tttgggatcaatgaaaaccatctttggtctgaaaaaaataaagaaggatgggtcagaaggcagggagattaccttcgggcgtcctggctgacaaagacatccaggccagtgacggtgatcgccttcccccctatgccttgcgatctatctcctgttcctctcatcctcttgtctctcccctgcgtactcccaagagaagaagcggcagactacatcagataaccaaaatatgagaaatgttgtcaagtgttgcaaattgtgagctggttcctttaaatagtgtggtactgtgataccaacatcaaataatttgttgaacctgtgatgtaaattactccatgacagaaccaacctgcacttgaaaaggataggtataaaatccgccaagcttttgttgcagctccagggaacactcttattgttgctgattatggtcagctggaactcaggatcttggcgcatcttgctgattgcaaaagcatgttagatgcttttaaagctggcggcgacttccattccaggacagccatgaacatgtatcagcatattcgtgaggctgttgaagaagagaaagtaattcttgagtggcatcctcaacccggtcaagagaaacctcctgtgccgttgttgaaggatgcttttggtgctgagaggaggaaagctaagatgctaaatttctccattgcatatgggaaaacggctcatgggcttgctcgtgattggaaggtttctgttaaggaagcaaaagatacactgaaactctggtatagcgatagaaaggaagttctggcttggcaaatgaagcagaaacagctagcacatgagaagtgtgaagtttatactttgcttgggcgatcacgccgttttccaaatatggctcatgcaacttctggccaaaggggtcacattgagcgtgctgctatcaatgctcctgtacagggcagtgcagctgatgttgctatgtgtgcaatgcttgagatagacaggaatactcgtcttaaggagcttggttggacgctactcttgcaggtgcatgatgaagtgatactggaagggccttcagagtctgcggagctggccaagtccatagttgttgagtgcatgtctaagcccttctatggcaccaatatcctgaaggtcgaccttgctgttgatgccaagtgtgcacagaattggtatgcggccaaatagacctgttaagtgtcccagaagggcgtcaattccttcggtgaaactcggtggattttgaactggtatctgctggctgctgctagtagcctagtgagctcatctccacgtggatgccatgcactgattatttcgctgttgatctggacagtgaggggtcagcactgagcagcgaaggcactgtacactattccgtattccctataggtcgggtagcttcaccttccacactccctgttaggatctctcgatcattcatgcctgatgtagttggtcgtcctggatagcagtgaagactaagcatgccgtgttcataagatttatttagcatgctgatgtgttgagttgctgaccagttctgctgacgtctaacactgttgcacgcactgcaacaatgttttgatcacaagagaatgtagttgattgtgagcgttcttaatctccttatttctgcaaaaaaaaaaaaaaaaaaaagcggccaaaacacccaaaacatagggcaatcgcgcagttacatcaacctatttcccagtgtccttggcacatctaactacaaaccatccgcacataaattcctaccagcactgagccacctagccacggtgaaccctgccgcctacttgcaacagcagttgcttgcatcaaacccacttgctctggttgccagccaccaaccgctgtttctgccagctcctagccatgaaccctccgactacctacaaacaacttgcagctgccgctgcgcagcccctccccgatgacgatgatgacctgatcgaatacctctggtctacatgaccccttggtgaagactcttggtaaaaaactgcggtggctcaatccttggtagtgttaggcggg

SEQ ID NO: 10147 - DNA, 177 bp, Zea mays
  Clone ID: MRT4577_109255C.1
aaaacaccggggcaagggtttcactttaaaaaagcagatcaaccacccccaaattgggaaagcttgatgcaagctttagcactttacaaaggaatttgcaaacccattctaatatttctcaactcagcgaaactgaggttattgcaaatccacacaaccatctttggtcaaaccctc

SEQ ID NO: 10148 - DNA, 487 bp, Zea mays
  unsure (1)..(487): unsure at all n locations
  Clone ID: MRT4577_109256C.1
ccggccgggacgtccaacacatcctctttcccctcggcgaccgcgatggggcgctgggagcacgacgccggaatctaaagcagcaggaagagatggccgtgtgggaaagctagtgaaggtgcacggtgtgacccgctagagtctccattgacgatctgctcctgcaaccttgaaacttggcgcttgcggcgggatatccggtcggtcgggtcggcgctggccttgaagtgagatcatgagtcatctgaagatcatcctggtacctggaatctcaagtcccaggtcaagaacaggtaccacaggatgaggcacatggaggatgctgcgnttgtgttcgttagaggtctaggtcatcgtctcccagtctactttgggttgctggatcgttgtctgcttacgatgtaattatttatttattttgtacagaactcctattgtataataaagttgtgacattcgtttcaaaaaaaaaaaaaaaaaagcggcc

SEQ ID NO: 10149 - DNA, 360 bp, Zea mays
  Clone ID: MRT4577_109257C.1
gcagctatcccggccgggctggggccctctcctaccggccccactcacatggttccccatggagagccccaccctctggctcccaccggtcgtgcttctacgatggcctccggcggcgttctccggcccactcgacacactacccgccgcgctctacgcgttccactacgtccaccgtacgctggtccacccggtccgcctcgcccgactgcgccgcgccccggcccccgtgccgctcctcatcgacgcctgcgccttgggattcaatatcctcaacgcctacctacatgcccgctccttcgccctacactccagccgccaggcgtccaccttccgctgactcgctgggctggccctctt

SEQ ID NO: 10150 - DNA, 769 bp, Zea mays
  Clone ID: MRT4577_109258C.1
ggtaccctccgagggctcggcccgggaaaaaaaaaaaaaaaaacttaaaatcgtagtattccaaagccatggttttgaaatactttgcttccaacacgcccttacttatttagaccatttatgattagttctcatattgccaattttttatactctgtactagggatggcaatcgggtgggtagtacgtggatatatagttcgtgaatccatacccgcgtgacaaaacccaacccatactcgtgcccataaacgttcgtaggtatggatctctacccatacctgtacccgccgggtatctgctatccggcagatatccattacccgcacgcccactacaattttagcattcaacaccaaacaacaatttaatcacatttcaaaaacaatcatcattccagcagcatcaaaagataatttcagcatcaaacgacatgtcatggataaaaattgaaaaatgagaatttaggataatatattaaattcagatgacccacatgttaaatatccattgggttatccatacctgcgaaaatattatccgcggataccttattatatccataaccgtaccgcggataccaaattctaccgtacctgtcagtaccctgaaacaggggtaccccttactacagtatgaagggcgcggtgcccgcgcggctatctctagtcgcgtggtgaacagcacccgaccccaccacgtggacggctccggggccggcacgtggccagagaagacgatatacttcaaggtatcaacagtggggtcc

SEQ ID NO: 10151 - DNA, 428 bp, Zea mays
  unsure (1)..(428): unsure at all n locations
  Clone ID: MRT4577_109259C.1
ccacgaggaaccgataagccggcggtgataagatgttgggttattatgattttctatatgaagattagatcctgttgtgttctttctcctacaaggagcgcgagaagggtgacttgtgggaggacgagggaaagtgtgtnacacaaggtactgttgatgtggacattggtgtaaatacatccgccgagggtgtcgaggactaaagtgttgatgactcagccgtgaaggtggcagctcttgttgacacattccgcctacacgagctacctccttcttaccttaaatcatttgtgtcttacttcaacaaatacctcaagaatctcactgctgtgttgcagccacagtatagcgtgatgaatacaaaaagggtgttgagggtgcaaccaagtttctccttaatctagatgaaaagacctaaaaattttttg

SEQ ID NO: 10152 - DNA, 246 bp, Zea mays
  Clone ID: MRT4577_10925C.1
gaattgcgtcagccacggtaccggcaaagttttatccagtacgccggatggtgcaggaggtactcatggctgccatacagggtgatcacgtgactgtacaacaggtacataccggactctgtcggtaatggctggggacctaacggagatccactggcctgcgtgtcatacaggcactgtcttgggcggacataatcggcgaggattacggtatatcttgtaatcctccagatgatcttaatagct

SEQ ID NO: 10153 - DNA, 554 bp, Zea mays
  Clone ID: MRT4577_109261C.1
acggcccccttaaaaacttaaatttacttgtttcagtggcatccagcatcaaagtttagaaaaacggactaggggccccaattaaagcttcgacaaattcccaagggcccaacaacagcctaggggctcaacatcgacaatttttttacgaaaaaaacaatacgacaattgggttggtcacatggcccccagaggcaaaaaaccccttgtttccttacgggcagaaaaatgtttccctccaaaatggggtttttttaagcatcaacaacccccatttgggaaagctggggggggccctttttgtagccataaaaaaaagccttttcatccacagaatttttttcgaaaagaggggggaaaacaggggccctcaaaagggttttgtcacttgggagctaaaaaaggccctctttatccccactaaaaatttccttgaagaaaaagttggaaaaaaccaaagggtttggagtccaggccccctaaaaaccaaaccgttttttggggccccttcccaagggggggcccccaaaaagggcaacaatggcctgatcgct

SEQ ID NO: 10154 - DNA, 529 bp, Zea mays
  Clone ID: MRT4577_109263C.1
caaacggggggggggcaccaaaggaaaacccccccccccccatccccggaaaaaaagcccaccgttggcttggtccccccccagaaacccccccgggaaaaaaattttttcggggggggggaaaaaaagagcctcccaaatagggggccaccgaaaagaaaaacccccggggcccccattttatcacctggaagccccaccaaaaggcttccttttatttaaacatggggcccggccccaaaacccgggaaaacccccttcccccccccctaggcggggggggggcccccccaagctggggttccttttttcccacaaaaaggttggaaccccccaaaaaaaaaccccccccccttgggggggctggtaaaaacaaggggctttcccttccattggcgggggccaaagggattttcccaaggggcccttttaaaaccccggggccttttggggccccggaagggccggggggagaaataagccaaccgggggggcacccttaggaagggggggaggggggggccccccc

SEQ ID NO: 10155 - DNA, 558 bp, Zea mays
  unsure (1)..(558): unsure at all n locations
  Clone ID: MRT4577_109264C.1
tttttccagcgtccgcattatacccggggggggggggtgtgctttaaataactcttatgctgcggtttttcccaaccggggctggtgagcgcatggaagatgaggagcatttcgcaaccgcctttacacttgccagattttttcttatataccaatatcacaactcnacccttgggggggggggggactcaatatccatgctctgcaaggcatattgtggtgggggagataagacttaccatgttaagaaagtggcatacccttgctcaaaaggatccttacgagctatctgattcccatattataactattgcatttccagatgaccgtgcatggaggcgcttatataagcaccttcaacattttcctatggttatatgtaacaaagtctgagatagggagcacagaattgttcggtttaatgagggagatcctagaggccgtcatgtggttttagtggatgacttggtccagtctggcagtactttgattgagtgccacaaagtactggctgctcatgtgactgcaatggtcatcgcatatgtgacacatggcatt

SEQ ID NO: 10156 - DNA, 223 bp, Zea mays
  Clone ID: MRT4577_109265C.1
agctggtatgatactatatgcttttaattgttcatgctttatgtgattttactctgatggttgctgatgatgtcatcacatttcatgattcattgttcatgatatggttacttttgtgatcgtagataccgaattcaatgttgtcttcatggtattttttgaccaaggcaaattcaacctatcgagaacattgccttattacaatgctatgatggaccaattg

SEQ ID NO: 10157 - DNA, 169 bp, Zea mays
  Clone ID: MRT4577_109266C.1
ggaggaaaccctttgcataggaacaacatgaaaaattagatacattcgcttaacgacgtccttgatcttggtgatgctaacgagctgccctataaagacggggggggggtgaccaggttttgtgggtgacccgttttattattcttacaaagatggcaaccttttgggc

SEQ ID NO: 10158 - DNA, 1343 bp, Zea mays
  Clone ID: MRT4577_109268C.1
gccgccgtcttcatcttcatcgctgctgcgctcacgcccacacggagcatcagttctggcgcagcggaagcagccaccctcgcccaggctttgcttggcctcctctccttctctctgtgtcggcctctcctgcctgctgctcggtcccaagctcccctgtggccgcgcctggttctctgtttcctctaccaagtccggtcggagctctccctgctcggtccctaccccagcgtctgctccagttcgtcggccgaccatcgctgttcctccggcgctgcaactctctgctcgcgtcgcgcccagtcttcagctcgcggagctctctctcggtctcctatggccgagcttctccaccagacagcgcccgtcctcgccaccaaccctgctcgcccggatccgtaactccctagtacaagtcggctgattcatgcgctggggagccgttctcagttgctcgccagatcgactctcgcgcgtcctcgttctgtgccattatgctcggctatcggtttcgccggttgtcgattttcctattcgctatggtcgtcacggcgactgttcctatctgagctgcctcgctcgtcagccatcacgccatctttacctgttaggccgtacgttgccgcgttcacctcgttgtgtcattgtggacttgtcagcatactgttgtggtacctagatcgcgctcgcctcaactcgaacgagacatactgccatcctcttcaacaaatggaaattgtcacgctggcacgtcaaagatcatcgatcgccatcctcgtctacgccaagccccaaaccgtgaagacactctggtgctggccgcgagtcaccagcttaacaaaaaggaatccaaagggtttttggtcaaaaatagaaactgtgtgcctcgctcgccaaccgtagaccggaaactgtcatagtacttgcggctatcgcgtcaaattagtcaggaagatgagccaagtcgaccccaagcgcgggctaatccacaggatgatgctgatggacaaatcggaagatggataatctgaacaagtgccaagccaaaagttgatcgtcaagtggacgtcacctaacaacactaacctagtgttactcaggtattaacattgtgctgttgttgatggtgttaagtgtcggtgggctcggctttcttataagtctaagtaactcttctatacttcttattgaggatggtcacttaagctagtatatattttaaacttatacataatttataacattttaaagtttattctttgaaccacttttgtaatcactccgataaatacaatgtaaacttgttgtaacttgtaaaatttggtaataagattttccgctgc

SEQ ID NO: 10159 - DNA, 582 bp, Zea mays
  Clone ID: MRT4577_109269C.1
ccggggaaacaaaaaaaagcccaatggggcccccccaggggccccgctttaaaaaaaatttaacccggggaataaacagggggaccaactttttcattaacccaaaaggacaggaaccaggaaagtcggaggggggggggaccaaggggcgggaagacctaaccggggcccccaaacatggtcccggccaaaaaaactttcactggcccggggtaaaaaaaaaagttagggggcccccttgggggagaacccgccccagggcctcccaagggtttttttggggggggattccccaaacattttgggggcccaagttcaggtccccatgaaacccgagggggcccccctaaaccggggggccctttggctaaaaaacccaaattgggaggccccctttgttttggagaaaacgaaaaaaaaggttgaggggcggggcaaaaaacccccgcccctggggggcccccagggttccggggggggggggagcctccctttttctttttttttttaaaacgtaaaaaaccttaaggaggggggcgggggaaaaccaaaaccctagtaacccccccctggggccaaatt

SEQ ID NO: 10160 - DNA, 424 bp, Zea mays
  unsure (1)..(424): unsure at all n locations
  Clone ID: MRT4577_10926C.1
natcatcggcacgccctgtgtgtttgggttgtttttttttttttttttttacagcaaaacatgtcagattaaatcatgtttatttgtcgccttctcttatcaatcaatcgccaacacctccaatgatggggtcctttttctcatgccgggccatgcgtagtagataagtgtgggtgggggggggagcgtttgctcccaaatgtcctctccaactccacctgctgtctccggtttctcccaatccgaattccgcgtcgtcttcatggttggcgcgggcaaaatgctcccaccagctctcgtcgcgcttcgtaacccttgtggcgctcggggcgcttccgttctggccctgttcggtctccgttcctgttgcttttccctccccggtctccctgcttcgctcgggcctctgcttctttttggcccc

SEQ ID NO: 10161 - DNA, 433 bp, Zea mays
  Clone ID: MRT4577_109270C.1
attgaaggcttcatgttccaaacgaggggagcccacagccccacatacattaatacagtattatgcattgcttggaggggttgcatacccactgcgaaaaattcaaaattccatctgctgaattactgctgaaatcaaaataagaattacatgaccctacaaaccacaaagaaatattgcatacccactgaagacaattcaccaaactggtgtgattactgctaaactcaagataaatggtgcacattgcatgtttccacgtagtacacgactacacgttgccagtgcgcgtacgttgccggtgcgcttggcaacttctccatacacccaaaagaatggaaatatcacttcccaagaagtcaagcaatcctaactttgactaaatatttacaaaataagtgctaactacataacaattatcactacattaatc

SEQ ID NO: 10162 - DNA, 356 bp, Zea mays
  Clone ID: MRT4577_109271C.1
cctagattaagaggcggccgtggaaatggacgacgacgaggtgatggaggatgatgaggaggtggaggaggcggaggtccttctactaaaacaactttcctgactcgagtctgatcgctcttctgagcgcaccaaccgtgctcattgttcacctatcctttctcataacctacctgttcttgctaagacccctgcttatcatgattctaccaagaatgcaccttcactatcctcaactgatggtaataatgccgcacatggagtcatcatgcctgaccccaccctacaggcacttgctgccagggccgaatcattcgccgactatgccggccgcaatcgacgaattctggactttc

SEQ ID NO: 10163 - DNA, 719 bp, Zea mays
  Clone ID: MRT4577_109272C.1
ggaccctggttcggccgggaaaaatcttgagctgccaacagaactgggaagctcctgttagtccacatgtgctgtagagcaccttttcctcaagttgcaacgcgtcagcaaagatctacaaaagtggggacagagaaaagtgggtaatatcaaattacagcttgaaatggcgaaggaaatactgcatcggctagagattgcaagagattccagaagcctctacaacagagaagaatggctaagaaagaaactcaaacttcactgtcttggtcttgcctccatggaacgaaccattgctaggttgcgttctaggattctttaccttaaggaaggagatgcaaatacctcctttcaccaacaagcccggtttagaaagaaaaagaatttcattgctaaattgcaaacagaaacttccttggctgtcacacaagaagagaaacatgctgcagtgctggaattttatgaaacggctcttggaacagctgaaaataggtctctaactctagatctcaatgagattggcatgcagcaacatgatctggccagccttgatatcctatttatagaagaggaaatctggacagcagtcaaagatttaccccttgacaaagcccctggtccagacgggttcacaagtcgttttacaaggaatggtggagcatcataaagcatgatctccggggaagtctttgctactattgctaggggacatgtctaca

SEQ ID NO: 10164 - DNA, 202 bp, Zea mays
  Clone ID: MRT4577_109274C.1
cattgtgcaccttggcaacattcccaataacgggacccgcattaagcggggcatgaaccctgggagccgcggtcatttacaacaaggccaaggcctgggacgaccaagggatctttctgggtgggtccactgaattggcgcccgccatcgcccgccgtctactcaccaagtaccgtgcctgaagggccagccgcccacccaa

SEQ ID NO: 10165 - DNA, 279 bp, Zea mays
  Clone ID: MRT4577_109275C.1
gccatccgtaggaaagggagcttgtaggctgtccatcacttcactgtctccgtgcggtctaaggcgatgtcacggtccctaggggcgcgaacaccctatcgtggatctgtgcgtgcggcttacagaggctccgcttgctgagcttggattcttacttagaggcgtggaaacataatccggcacacggtatcttcgttccactggcttttcaaccaatcgcgaggaccatttgtgtgattcaacggggtctgtcgtactaagtagaatttctatcaatag

SEQ ID NO: 10166 - DNA, 575 bp, Zea mays
  Clone ID: MRT4577_109276C.1
tcccgacagacgatggctcccccgcctcagccggagctccccgcggcagcgctcctcgtcctcctcctcgccgccgcggtgccggcgcgcgcgcagcaggagtacgaggccaacaaacagaacgcttgctacgccaccaacgccagctccgtcctcggttacacctgcaacgccaccgccgcctccactccggcctgcgagtcctacctcatcttccgctcgtccccgtcatactacaacacgccggtctccatctcctacctcctcaactcctcccctgccaccgtcgccgccgccaacgccgtacccacggtgtccccgctcgcggcctccagcctcgtcctcgtccccgtcccctgtgcctgcacgcccggtggctactaccagcacaactcctcctacaccatccagttccagagagagacctacttcatcatcgctaacatcacctaccagggcctcaccacctgccaggcgctcatcgcgcagaacccgctccacgatagccgaggcctcgtcgccgggaacaacctcaccgtgccgctccgctgcgcctgcccctcgcccgcgcaggc

SEQ ID NO: 10167 - DNA, 138 bp, Zea mays
  unsure (1)..(138): unsure at all n locations
  Clone ID: MRT4577_109277C.1
cggccagagcacgcccacgccgccggatctcgcatagacccgctnnnagagcatcaagcaggccccgccgacgtgcgcagatcgcccataanactcaaaggcgtggcggcgtgggacgagccggaggagctcagcggc

SEQ ID NO: 10168 - DNA, 2343 bp, Zea mays
  Clone ID: MRT4577_109278C.1
ctcaggcggcggatcctcccgctatctttacttgtcatcgtcttgattacatatagcttattcgcctgatcgaccggccggggacgtggtcctcctatgcgtcagtaactaggattaggttgggctcgagagaaggaacgggaagaacgaggccgacgagaactgggaaggcatggcgatggggttagaggacggcgagtacggcgccttcatggagaaattcaagatgctgccttcgcaatctcagcatcagcagcagctcccgcttcacggcctcaccttcgctatcaaagacatcttcgacatcggcggccgtgtcactgggttcggcaacccggactgggcgaggacgcatgcccccgccggcgccacctcccccgtcgtcctggcggcgctggccgccggcgccatcagcatcggcaagaccgtcatggatgagatggcctacagcataaatggggagaacgcgcactatggcacgccgactaatccgtgcgctcctgatagagtccctggaggatcctccagtggatcagctgttgcagttgctgcaaaactcgtcgacttcgctctgggcactgacactggaggtagtgtgagggtacctgctgcctattgtggcatatttggactcaggccttcccatggattggtttcgacagaaaatgtcattccaatgtcacagatgtttgacactggttggatggtttgctagagatttatctatgttatcttgtgtaagcaacgtgttgttgccactagctgctgacaacactatcaagcaaccaactcatgttacaattcctaaagactgttttgaaatcttaggctctctgagtgaccaaacatatcagattctcaatgcttcggtagctaagagatttggtaacgatgcagtagacaataggaaccttggtgagttcgtctccgccaatgttccaactgttgggaaattcattagcgacttctccagaagcgaagcaccatctgtacctgctctatctgttatttcatatgtcatgcgatgcctccaaaggtctgaattcaaagctaaccatggagagtgggtcaaaactgtaaaacctaacctaggccctggcatccgagagcgggtgcatgaagccattgcatcagaagatggacccatggaggattttcatgttctgaagactgaattcaagtcggcgctttctgctcttatcaaggatgatgggatccttgcgataccgacagttcctggttctccgccaaagctgcgcatggaggctgttgcattagaaaacttccgcgcaagagcattttcattgctgtccatcgccggactatctgggttttgccagctgagcattccacttggagtgcgccatggtgttccagtgtcagtctccctagtggcatgccatggtgcggaccgtttcctcctgagtgtggctcaggagctgtatgggacgctcaaacaggagaccaagaaagcctggagctggagttcatcagactcctctctctgagccatcaatcatgattcatatgcaaagttcaggttccaccggctctcgctcgctccgtgtcctgcacgactgcttgttgatctactctagtagatgtcgatgtggcacaggcgcactcgatccatgtgtaccgaggagacaatatgttttgccacgtaggcacatactacaatttgctgtttctgtatgcatatggtgatagagagtgcctactacaaattcaggcatgttggaaattggatctctggatttcaatatgacagcagcaagtccaaaaatcgtggaataggaatttgtgtgtgaataatttgtgcataaaagggcacagaaaactgttgatatcagtatatgtgtgagaaatggtggaactccataaccttgatatgatactgctttccgtacaatataaatcttatctcaagtggacggctttgttgtcacagacgatgcagtagccaataggaacctttggtcagttcgtctccgccaatgttccaactgttggcaaattcattagcgacttctccagaagcgaagcaccatctgtacctgctatatctgttatttcatatgtcatgcgatgcctccaaaggtttcacttacaacttattcaaactatgtagcagcaataatactaaatactatgcaatattgactacataatttattattcccacaatattaaaataaaaggtcgtaaagatatgctttgctgttgcccacattattgttcataaaacacactccctctaatatcagaatacgacatcaaaatctacatttggaagcattcttctattatagagggagtaaccaccgggaatgcgtgtccggt

SEQ ID NO: 10169 - DNA, 727 bp, Zea mays
  Clone ID: MRT4577_109279C.1
ccccgcgtccgcccacgcgtccgcgggcgcgtgggcgcgccggcgccggcggccaagctcgtgcgcggcgtctccgagggcggcctccaggagtggggcaggctgagggagcaggaggccgccgagtgggccaacaaggaggacgccgccgcggccccggccacgcccaagaagagcagcaacaaggccaagaagccgccaaaccggatcttcaagaaggagctcgcgcttgcgtgcctcctcctcacggccgccacgcggagcctgctctccaagcaggggctgcacttctacttcctgctcttccagggcgtcacgttcctcgccgtcggcctcgacctcatcggcgagcaggtcagctagccggccgccgccacagaagaataaacttaaattagcggccggctcggcatgcacggcctgcaagccacatgcacagggcatgcgtgcaggcggtgtaaccatgcatcaccgtggcagtggatcgacggatcggattaatttttagactttcttccgttaattttatccttttgatattttttgttcagagatcaacaaagagtctgtgtggtgaactctactcttctgtagctagtgcttctttgttggtatattgctagcgctactaggggaggcagtccggttgttccttacattcatatatcagtactacttcatgcatgtattcagtagcctgttttctttcaaacattacattatgatc

SEQ ID NO: 10170 - DNA, 126 bp, Zea mays
  Clone ID: MRT4577_10927C.1
caccgccaggtggaacggcaggtgggttcaggtaccagcctggccgggcaccggctgtgggaccaacgcttccggtgagcgacagaggcagctccccagggcctggagacccgtggggcggactct

SEQ ID NO: 10171 - DNA, 386 bp, Zea mays
  Clone ID: MRT4577_109280C.1
tacacgcatctaaattgagtctgaatatatcgtctcagctgctctacaagacaatgggcaatgacgacgtgatcgagagcggcgctggcggcggcaagttcactgccaatgactagacggacgctctgccggcgccgctaatcgacactggtgagctgaggtcctggtctctgtacggcacattgatcacccagttgatcgcaacgctgctgttactgtaaagcaccgtggccaccgtgatgggatacactcatcagacagacccatccgcgtcgggtgccgaaacatgatccggcggcatagcggtgctgtgcataccctgggccttcaggcgaatcatgttcgtcctcgtctactgcaccgccggcatctcgacgggccacatc

SEQ ID NO: 10172 - DNA, 307 bp, Zea mays
  Clone ID: MRT4577_109281C.1
aacgacgaatgaggaacgaacggacaggttgttgcacagaagcgacatggctttcgcgcccaaaacgtcctcctcctcctcgctctcctcggtgttgcatgcagctcagtcgccgccgctgctcctgaagcggatgtcgtctaccgcaacaccgagacggaagtaagacgcggccgtcgtcgtcactaccagcataactgctaaagctgctgctgctgctgtcacggttcacatcgcaccgacacaagtgtcggcgacggagtcggtctctccatgcacaagatgcatgttacgatgagagacagag

SEQ ID NO: 10173 - DNA, 2919 bp, Zea mays
  unsure (1)..(2919): unsure at all n locations
  Clone ID: MRT4577_109282C.1
agctcgtaatncggctcgagccggctttttcccaacccccaatggtcgcccccgccggacgcgcctgccggggggccttttacggctcctgccccagtccacgcgcccaacagcagggtgcgggtgccctacggcctccacgaggttgaacgcggacttgctgagaagatccgtccgaggaccggccctacggactcgaccagctccaaagcgccctcaagctcgtgggcacgcggcctaaccctggggccaggccctgggtcgccgaccacggcatcatgggttgaggggtgagcgagaaggctaagaggcaaaaacatgacaaccaggctactaatggaaggttgaaggaagacgaagcacgtaaatacttccagcaactgattaatgttgttgattactgccaaagtaggggagtgtatcacagagacttgaaggactctatactgcataatgttgatggacagactgtttgtattctaaatgggtgtctgagttactcatcaaattctaagattggttccaaacattctggtttgtattcttactatacctattttgaagtaaatgttcacagtgtttttattgctggagtaatacagtttgtccttttttatgaacgagggcatatgattgtcttttaataatggtccgacaaccaactacacttgtatttcctacgcttgagcccttgcgatctgcacggtgtgatgctgcctatcacgatagtgctcattatctgtcactttaccctgttaaggcataaacacttgctatcaggttacttggtcggagggttgaatcaaacacaaggcatctaaagcagaacttgtaaattcagaactgaaatatggaccatttcatgatcttccacagttctcctacgtacctgtgattgtgcactttgagaacaacaaccctttttcagttgcaaaggaagtgtattacagaacactacaacattgctcatggtggtgccagattcaaggatggattttcaagttttgtttaaaatttataagtaaccaaacttctaactggatccttttcattattgtgtctctgatttcctttttctaggtaaaacacaatttttcttttgaatcccatgctcatgcttcacaattttcattttaattattatgcctctgtttttttcagttcagaaacccatagaagttaaggttgtactttccgttagtaggttcagtccttgctatttatttgaatttttttcagttcagaaacccatagagtatacccaattctctctatatttttatcctaaatttagaaagcaatattattggggggcacttccattcaaaatcgatgactgtctttttgacccattattatagaggactatacaatctcttatttaattcacctgaccatcaatttgtctatgtagcttaattatcggttcttctatattattgtatcctcgacgacattgctctgcatgtatgtattatccttctattgggtgtatgtgatcaagattagagcagctgagcaattgccaatttgaaggccatgttgaagacaccagcatcaattattttgattatctattgttttctgtgtatggtttgtgggtggtttatttgtcttccatttatacctgatgagcattaacgtggtaggtccaacattgactccaattcttatctcatcgatgctgcaaccacaattcagtagagatacttgaaagttgatattcaaaaatattatttctgggtacacttttagttatttaatttaatagtttattgactaacattctatttgccaagactaacattctaaagggggtgttgcagaagcttgttctgttgtaaaaagagtaggctcgaaacttgatcctgtagatggagcttgtttacctttagatatcatatgccttcaccttgagaaggctgcaatggatagattaagttcaggagaagaattagttggtgatgatgatgttgcaagagctcttcttggtgtctgtaaaggtcttcctggacctgtacttgctgtgtatgatcagctgttatcggacggtgcaatcataccctcactaaatctgaagttgcgcctgctgcgatcagttctagcaatcctccgtgagtgggggatatctgtcattgcacataggctaggcaccacaagtgctggtgcttcattctttcttgatggaacattctcattgaaccaaacaggggctgcgaatcaagattgaggaaactgatgaagcaaggaaaaaattctctaatgctaaggcaatttcgtcatctcagttttttggtactcaaaacaggagaaagaggctcagctatcccttcataaatccgcgatgggttactgggtttactctttaatcaccatgtcattgatattcaaactgaatctattgttgaagggcatccatttcatctgtttgaataatccattttcagaagtttgcttccttcttatatttcatctgttttgaacagggttcttcatccatttcaagctctgatctttttggccgtaccaatgtggacgattctaacctggatctaagcgatgcagatctcatcaacagaatatctttccaggcgtcacaggatctgtcttcactcaaggacatagctggagagactggaaagaagctgacatctttcgcctccaatttcatcagcgacctggatagaatcctttgagcaggcgaggccatgccagcaaagcatttttcctaccttgcaccagaatttcccttctagcttggattgggtcgcggactcgccggtgcatcaccgacagttgaaagtagttcttgcacagctacagctctgtagaggattcctattacgcgtttgtattttgatatttgttgtgagaattgaaggtatttttattcgtgaatacttcacaacggtgaagcgt

SEQ ID NO: 10174 - DNA, 178 bp, Zea mays
  Clone ID: MRT4577_109283C.1
attatcatgagcgatttcgatgacggagacagtgactatgacagtcacaagaggatgtggtcctgtagcaggagcaccaataacaagatgaggcaggacgagccacctcaaggagccccatcctcggatgcatatacctgcagatggacctagccgtccttattctacatttgagcag

SEQ ID NO: 10175 - DNA, 261 bp, Zea mays
  Clone ID: MRT4577_109284C.1
atcgccggccgtagagcgagcggtctcccaattccacccaagaactaacaacatcgccgcgagacgccgagggccgtgggaccactatatttaggagcgacgaagagatccacccgccagccatggagatgaagaaggtcctgtgcgccgcccatggccgccgaccgcctcggacaccgccgcgctggcctcggacgcctgcgaggcgccctccgaggcgcccgccggcgcggccgccggcgcgcctggacctagcgcaag

SEQ ID NO: 10176 - DNA, 338 bp, Zea mays
  Clone ID: MRT4577_109285C.1
caagaatggcccttaaaattgcggaggtgcttctgaattccaacgcttccacagagccgccggcgccgcgtgcgttgctaagctaacccaccctctccgccacggctgacctgctcaaccgcttgctctcgtggatcttggcgtacaccctcttcgtccggacgcagagcaggacgtcgaggccgaacccgacgacgcaggcgagcgccatgatcaggaagacgaggcggtagcagtgtgcgccgacgcatgtgttgccgccgccgggcaccgcggtggcttccgcgtcgtaaaggaggcccgccagcaggcccgagaagaggaaagagccgagcggc

SEQ ID NO: 10177 - DNA, 206 bp, Zea mays
  Clone ID: MRT4577_109286C.1
tccactcgtgcggtcatgacgctctggttgtctgtatctgggatagagacgcaataatacatgggctgtttactgccaacaaggtgaccacgatcttattgtatcgctgtgaattgcttatccctgtggtcgctgtatgccgtacttattgtcgcactgcttgatacttgtccaaatatactgctgcggtcccatgtactcgagtc

SEQ ID NO: 10178 - DNA, 231 bp, Zea mays
  Clone ID: MRT4577_109287C.1
atgaagatgcatcgcttcgctctgcgtggcctggggtttctcgtcctgtggatgctgcattgcggaagcgagctcgccgcggcggtgcctccagatggctggtacgattactccgcctacaccgaccagagagagccggggaagatggcgaagctcaaagccgccattgttgggaccacaaaacaaatgcttcctcttccccacaaggccacaaatccacaatgcacatga

SEQ ID NO: 10179 - DNA, 424 bp, Zea mays
  Clone ID: MRT4577_109288C.1
ccgaatttccgggttggaccaacccttccgttttttaaccttaaagtaatacctgccgtcttacacgccaaaggggctggaggacctgaggaagaaggacctgcaggccctgcccggcaacggcaacggcaggcgcagggggttcaagcgcgtttacaactccaacttgtccaacaacctgggcaacccggccaggaacccggccaacaagcggcccgtgctgggcggaaccaagcagtaccaatacccgggccgttgcctaaccggccgcccaaggaccaaaaaggaccccaggccggaaatccccaagggcaacaactccttgcccggggacaggcagttttggaaggtgaagcagttaacgttcggggccacaacgttgcgttccggcctgaacgcgctgttgccggcgctccgcccgttg

SEQ ID NO: 10180 - DNA, 439 bp, Zea mays
  Clone ID: MRT4577_109289C.1
gggcaggaacattttacttggtcaaaataatcaggacaagcgtataaactactatacaaggggggggtttttttaagcgggggtctccattggtttgggaatggtcggtttgacacaaaaaacccaaaaggataccccccggaaggcttgggaaatttaaagggaaaaaaaagttgggctggccggaaaagaaaaaactcaagaactcctccccggccaagggtttctttttaaacaagaactgggcaaacttggggaggaagtcaaagggcggggggaatatttgccttggtttaaaagagggcttttccaaaaagtcccttaccttgggggccaaaaaaaccggtggtgccaaaaagaaaaccttttgggttgacaattggtgccccaaaaaaggggttccaaccgggcccccgatcggaaattgggcgatcttttt

SEQ ID NO: 10181 - DNA, 377 bp, Zea mays
  Clone ID: MRT4577_10928C.1
gaacctaaacgaattgaatgtttaatgaaccaactccagtgctcatgtcttacatacaagatccatgtggtacgtctggacctatgtatcatctactcaagcattacagggatagactaagaacacgcgttgtacacatttccacaccgtatgccatatccaggctcaagtaaccatccagcataatgatacggcggatgccacctttatgccaccattaatcaaaatattttcttatccgtctctaaacttctgatgctgcttcagaaagtctactcctgaaaatatacgtttctgctttacagttgtctagaacattttcattctggaaagtctagaggacgttgatacgctgcttcaagattacaaaaatgcct

SEQ ID NO: 10182 - DNA, 322 bp, Zea mays
  Clone ID: MRT4577_109290C.1
attgtggtttcatccgtcatcagtggcaatccattatctttgaagaatcaagcttactccttgtgctctctgcctttctttctcttccatttgagatatatttggatagagagcacaaggagtaagcttgattcttcaaccttttctgatttcgcactcctatcggacagatctcttgcgagatcgaccacgattacgttaatgcacgctgtttcaaattagcaactcttacatggattattatgagtgataccaagtgtgaggctgagctattggcaacagctcttatttatggtctatagggacgatccatgtgtttcac

SEQ ID NO: 10183 - DNA, 936 bp, Zea mays
  Clone ID: MRT4577_109291C.1
cggacgcgtgggcggacgcgtgggcggacgcgtgggctctcgtccgcccgccccctccgtgaaaccaacgcccctccctccccgcgccgagaccatcgcgaatggaagttgctcctgcggtgaagcaactcctccccatggcgcagggccccaactccccgtcctcctccaccacctcgccctcgcccgccgcgccgtccccgccgccgcgccagcagcagtcgcaggcgcccgtgccgcgcatcatcgacaccacgcccttccccaccaccttcgtgcaggccgacaccgccaacttcaagcaggtcgtccagaggctcaccggctccgacacgccgccgcctgcccagaagcccgccaagacccacggccaccaccaccaccacggcggcggcggcgtcgggcccaagaagccggccttcaagctctacgagcgccggatcggcaagaacaacctcaagatgatcgcgccgctggcggggccgtcgccgcggaaggcggcgccggaggtgctgtcgcccagcgtgctcgacttcccttccctggcgctcggtagccccgtcacgccgctgctggccgaccccttcaaccggtcggcgtcggcgtccccgggcgagcaggacgaggccgaggccgcggccatcgcgcagaggggcttcttcctgcacccctcgccgaggggcgtcgagccgccgcggctgctgccgctgttccccgtcacgtcccccaagatggcgccgtggccgtcgcagcagtgatcgcgcggggcgggcccccgctgccggagaattcctagtactgccgcttcagatactacttgtttaattaactccttggtgcgtcatgttttttttctttttatttttgctcatggtattcaactcttgagcgatcgcgaaggaacggaaagaatgatcacactcttgagctaaaaaa

SEQ ID NO: 10184 - DNA, 265 bp, Zea mays
  Clone ID: MRT4577_109292C.1
gggggccgctaaatttaatttttaaaggaaacacccgcccccgccattttatttacaacttcctttttgcccccaatcaggtttaccccaacttccaaaaattaaatttaggggagcacaaaaggggtaaaccacaaattctcctggggggggggggggcccccccaaaacacccctattttttttcccactatacttaacacacttttaaaaaggggcccctttaattcttccccatattagcccgaatccaaattacacaaaa

SEQ ID NO: 10185 - DNA, 240 bp, Zea mays
  Clone ID: MRT4577_109293C.1
accaaacacttacctaaaatttatgtgtaatcttgtgaacattccctaagcgaaatcactgctaaacatacaaccaaaatgatactgcacatgccactatatgtataacacaactcatatttccttattctctataacatttgctacaaataaccatgcacacaaattcacttacgtaacaacaacgtaaactcgcgcacatacaaatgcatccacttgtaattcacgcttatatatata

SEQ ID NO: 10186 - DNA, 665 bp, Zea mays
  Clone ID: MRT4577_109294C.1
cgcggatccggaatcctccacgaagtaacgagtttcccctcccctgccgcccggccggcgcgcgcggtcaccatcgtccatcgatcgaagccagtgcgcgcccgcgaccagatccgagcggagggatgacgggggcggcgtcgcaggcgtacggggaggcgtggtactgggacgagcggtaccgcaaggagccggggcccttcgactggtaccagaagtaccctgccctcgcgccgctgctccgcctctacgtgcgcccgcaccagcgcctcctcctcgtcggatgcggcaactccgtttttggtgaaaacatggttcaggatggttaccaggacgttgtcaacattgatatatcgtctgtggtgattgaacaaatgaagaagaaataccatgataagcctcaactaaaatacacgaagatggatgtaagaaacatgtcagactttgagtctggttcatttgatgctgttattgacaaaggaacactagattctattatgtgcggccaaaattcacaagagcatgcagcgaagatgctaggggaggtgaacagaatcctcaacgataagggggtctacattatgatcacttatggggatccaagttatcgattgaatcttctgaaggacctccaattttggacagtaaagcttcacgtcatagat

SEQ ID NO: 10187 - DNA, 266 bp, Zea mays
  Clone ID: MRT4577_109295C.1
aaaaataaaacaatatacacttcagggacaatttacaaagttgggaataacatactacacacagaaaaagccaccctgtgccaacaggatcaaaggggaacaaaagacgatcggagagctgcgagttgcccaaaacacggcattcaaacaacacaatacacacaagaactgacacagatatgtagggggaacccacctgctggcaaaggcttaaatagcgagcctgaaataatagaatgagaaggatggccaaaacgagagccgag

SEQ ID NO: 10188 - DNA, 3200 bp, Zea mays
  Clone ID: MRT4577_109296C.1
tccggctggacccgtccacgggccgcggcggcgtgatcgtggactcgggcacctccgtgacccgcctcgcccgcgcgtcctactccgcgctccgcgacgcgttccgcgccgccgcggcgggggcgctccggctctcccccggcgggttctcgctgttcgacacgtgctacgacctgggcgggcgcagggtggtgaaggtgccgaccgtgtcgatgcacttcgcgggcggcgccgaggccgcactgccccccgagaactacctcatccccgtggactccaggggcaccttctgcttcgcgttcgcgggcaccgacggcggcgtgtccatcatcggcaacatccagcagcaggggttccgcgtggtgttcgacggcgacggacagcgcgtggggttcgcgcccaaaggctgctgagcgcccaggccggagtggtgaacccctcctccctcgagcgaggagagagagagaacgcgcgcggcggcgcagttaattaattagcgagtgattagctggtaatcaagtgagccgccttgttagtcataattaataggatgcggtggcttgtgggttaaaaaaaaaaaaaaaaaaaaaaaaaaaaaaaaaaaaaaaaaaaaaaaaaaaaaaaaaaaaaaaaaaaaaaatccctccacttgctagccatgacgaccctcgccgcgctgctccttctggttgccgcttccaatgtcgccgcgctcgtcaaggccgtggagtaccacagctttgtagccaccccgctgtctccccacgcgtacaccgctccgtccttggacgcggacgaggatgtcttcggcggcagcctcgccgtcgcggaggaggaggccgcggcgtcagactcggccgtgcacttccgcgtggtccaccgggacaccttcgcggtgaacgccaccgcgggcgagctgctgaagcaccgtctgcagcgggacaagcgtagggcggcgcggatctcggaggcggccggcgccggcggtggcaacgggagaaagggcgtcgcggcgccggtggtctcggggctggcgcaggggagcggggagtacttcaccaagatcggggtgggcacgccggccacgcaggcgctgatggtgctggacaccggcagcgacgtggtgtgggtgcagtgcgcgccgtgccggcggtgctacgagcagtcgggcccggtgttcgacccgcggcgctcgagctcgtacggcgccgtgggctgcggcgcggcgctgtgccggaggctggactcggggggatgcgacctgaattaattagcgagtgattagctggtaatcgcgaaaggcaccctgttggtcggcaccccgagatccaccgcatccccgtggactccaggggcaccttctgcttcgcgttcgcgggcaccgacggcggcgtgtccatcatcggcaacatccagcagcaggggttccgcgtggtgttcgacggcgacggacagcgcgtggggttcgcgcccaaaggctgctgagcccccaggccggagtggtgaacccgtcctctctcgagcgaggagagagagaattaattagcgagtgattagctggtaatcaagtgagccgccttgttagtcataattaatggatgcggtggcttgtgggtttgctttgcttggccttggatgctgttaaaaaaaccgcgggcactgggcacttgtcagagttgtcttgtgtctctctgacagtgctgtgtagtagtttggttggatgcgcgagaggagggaagttatcagcagcagcaggcggttggtcgatgaatagctgtaaaaggcactgtcaaaagtgttggggttataaaaaaagcggcgcttttaacttttagaaccgcggcgctcgagctcgtacggcgccgtgggctgcggcgcggcgctgtgccattaactggactcggggggctgcgtttcgcggcgcggggcgtgcatgtaccaggtggcctacggcgacggctcggtgaccgcgggcgacttcgtgaccgagacgctcaccttcgcggggggcgcccgcgtggcgcgcgtggcgctcgggtgcggccacgacaacgagggcctgttcgtggccgcggcggggctgctggggctcgggcgcggcgggctgtcgttcccgacccagatctcccgccgctacggccggagcttctcctactgcctcgtcgaccgcacctcctccggcgcgggcgccgcgccgggctcccaccggtcctccaccgtcagcttcggggcgggctccgtcggcgcgtcgtcggcgtccttcaccccgatggtccgcaacccgcgcatggagacgttctactacgtgcagctggtgggcatcagcgtgggcggcgcgcgcgtcccgggcgtggccgagtcggacctccggctggacccgtccacgggccgcggcggcgtgatcgtggactcgggcacctccgtgacccgcctcgcccgcgcgtcctactccgcgctccgcgacgcgttccgcgccgccgcggcgggggggctccggctctcccccggcgggttctcgctgttcgacacgtgctacgacctgggcgggcgcagggtggtgaaggtgccgaccgtgtcgatgcacttcgcgggcggcgccgaggccgcactgccccccgagaactacctcatccccgtggactccaggggcaccttctgcttcgcgttcgcgggcaccgacggcggcgtgtccatcatcggcaacatccagcagcaggggttccgcgtggtgttcgacggcgacggccagcgcgtggggttcgcgcccaaaggctgctgagagcccccaggccggagtggtgaacccgtcctctctcgagcgaggagagagagaattaattagcgagtgattagctggtaatcaagtgagccgccttgttagtcataattaatggatgcggtggcttgtgggtttgctttgcttggccttggatgctgtgctgttaaaaaaaacgcgggcactgggcacttgtcagagttgtcttgtgtctctctgacagtgctgtgtagtagtttggttggatgcgcgagaggagggaagatatcagcagcagcaggcggttggtcgatgaatggctgtaaaaggcactgtcaaaagtgttggggttataaaaaaagcggcgcttttaactttaaaaaaaaaaaaaaaagcccgggattttaaattatcttttttgggccggtcgtttttgaggatccaa

SEQ ID NO: 10189 - DNA, 1129 bp, Zea mays
  Clone ID: MRT4577_109297C.1
gagaacacgaattagattagatatattttcttcattattaaagtttctaaagattatgcagacattgcaactggatgtgttttatatgctcgttattgctagttgaagaaaagaatagatatgtaaagaaaccctacatagttggtaactccaattgtgtacaagatagtggaaagggtgagaggcaagtaattttgcaatttcttaatttttgttaggttctgattcaatcagtgtttggggtctctttctctgtcgaaggtcctaatgacgaagaaattgcctataagcaatgagactgaatgccgaagctataacaagcatgcctggagcgccgaaggaaggcaacttcggctcaaggcggttacgatgtcaaacacgatgttgagtcgaagaggaaaagactcgtttatccctaatgtttgtattaggattatgtgtatatgtcagggtcataaatgtatttttgcccgggctgcgtcccatgcctataaatagatgaacagtacctggcatacttctcatgatgaatagagattgcactctcactttcacctttgagcaaaccgaaggtgatcaagctgcgtcaccttcggccacgaagctagtgctcccaatcacacgcggttcaagctctgaactagccaataagaagcaaaagaaggaagcacagagaagagtgcagcatgttggagtacaaggacccttcatcaagtccaaatggtcccatgtgccgattacattttctcaggaagaccttcagcttaaggattaccctcacaatgatgccatggtcatatcatgtgtgagcaaagggttcttggttcacaatgtcctcgtagacattagtagtgcagcagacattatctttgcaaaagccttcaggcaaatataccatctgatcatggtcctattgatgtgcatggaagctaagaggcttctagaagggtcgaagggaattggacagattccatggcctagttgttctgtcgctggtactgatttcctatctgttggttgttctggcggtactactgctgctgctaagggaactacctctgatactgctggtgctagcgctgatgctggtgtccttgagaaacagagacagctactgcttcgggcctga

SEQ ID NO: 10190 - DNA, 351 bp, Zea mays
  Clone ID: MRT4577_109298C.1
caaacataaataagacatcctattttgattcgaacaggggcattggcatacacccaacacatccatttttgaataataaggtttatcgtttatgtccatcaccctaacatgttaatgtccaacacgggccctaaaacattgcctgggtaacagttaaaaaagatgaactgtaaattaatcctttatggaaaatcaaaactttcgacatgggccaaaatgtccacccatttaaaccggtgcatgacctaaggtcggggtcttttggtatcaaaacttgggcctaaggaacacccttccacttggtggatgcccatttgtggctttttataacggggcatccaccatgcaggc

SEQ ID NO: 10191 - DNA, 189 bp, Zea mays
  Clone ID: MRT4577_109299C.1
gagctctctagtcggcggccgcctctgcctcggcctcgaggcgcttcttgcttcgctcgagcgcctcggcgacctctttgggcatgtacttctcgtggtgctcggcgagcacctcagtgccgcgcaagaagcacgagcactcccgggccttctgggccaccttcctcccgtcgtcgaggccgaggtcgt

SEQ ID NO: 10192 - DNA, 629 bp, Zea mays
  Clone ID: MRT4577_10929C.1
tcgactctcctatatcccacgactgcggcgatcagggccggcagattgggggtggccgccagccggccgaccttgaatccaccacacaaccatccccacgagcactacgctctatcccccctgctcgcagcgaccggcgacggcggattggaggaggccacccgatcggccgagctcagatccactacatcaaccagcgacagcggattggaggaggcctccccacccgtctctctttccccacagattgcagcgaccagcgtcggctgacgaataaagaccgagtctgcacttgttcgaaactgaataaaggccgagtctgcagttgttcttgtttaactgaattctggatgctccatatttccaacttcagttactaaaatcatgccaccagttctggagagtgatatgcatagcagggaatatcttgcggaacagaaacgcaagggtgaggcatatttgaaggaaaggaatgcaaggattgcggaatgcaaggctgcggagcaggagtctcttaaagacatacaaagcatagctcgtagccttgtatactccagtgctcctaatgcacaactgacacaaaaggcacaaggtgctgatgattgcagtgactcagagtatgaccgaga

SEQ ID NO: 10193 - DNA, 372 bp, Zea mays
  Clone ID: MRT4577_1092C.1
gccacgcgtccgtacacgcgtccgtagcagcattggcgaccaagatatgggccctccgtaagctgaatagctctatctgcatgcagttgctaacacgacaatgatcactcaatgctcacaagctcctatagctacccgtattcacgcataccttccatcaatgatagcttcagtatgtgaaaacccagcatcttcagccctataggctccaacaggcaatctcagcacgcaacatacctttatcacacttgttgttgcaacaatcgccagtcctatctacggtgcagtcactggcacaaaccatcatggcacagcacctgcagcaactagtgctacctgtgatcaaccaagtaactctgacaaacctttctg

SEQ ID NO: 10194 - DNA, 190 bp, Zea mays
  Clone ID: MRT4577_109300C.1
cggcttggggtcacttccttcacacaggacattgggcggaatctctacacccgtgtctcgtcatccacttcgagagcattaactatttaaaaaccaggagagaagcgctgcgctgtccctgctgggctcctgttagctcataaagtccagcttgtcgcctcaatccagaggccattttctcgaggggggg

SEQ ID NO: 10195 - DNA, 666 bp, Zea mays
  Clone ID: MRT4577_109301C.1
ccggccggggcgtgccccggcccgccctgcattttcaggtcaatgttctgcaggacgatgccccggcacgggacgttcctgctgcagctcatcctgatggcgtccctggtgacggtcgtcccccggatgttcctgaagacgacgtcgctgatctgcaccgccgacctccgctcccggcacggcggctcagcctcggccctgtcgcagtagctctggtcgatgacgatcgggttcctgacgccgtgcacggccatgttctggaacgtgatgtccctggcgtacccgctgcctccctgggagagaaattactgcggttgagtgtatcgttttgaagagtaaagcaggaggtgtcatcttaggaaacctacgatcgatcatgtgggcagttgtcacacatggagccaggagaaacgttgctactatgatcatcgcttctaaagcagctccgactatctctaaatgttagaggcaataagggttcttggcgtgtcacctgacttaacctatcaatcagggagggtatgcggcagtcggtgaatcgctctacaggtgtacaacaacaaaaaaaaaaaaaaaaaagcgcttggtcacatggatcgatccgtgctagttgtaatattcaactcccttgagcccattaccaaaaaaaaaaaaaaaaaagcggcc

SEQ ID NO: 10196 - DNA, 414 bp, Zea mays
  Clone ID: MRT4577_109302C.1
gcgttcccgaaccaaaaaggggggaatttttatccaagggcattagggggtttaataaaacttacaaatcctactttagtcatgctccggggggggaagatatgtccttctaccaacttaggggggcccgcacgggtaataagggttttacttttctggctacgacgaaaccacattctggtttacaaaaatgggggggcgggcaggcaaacaggggtcccgttttcacacgggcacggggatcaccggggcagggactggcattttgaacccttcccggagggggcactttcggagggtttacatagccccctttgggactgcccttttgacgagggtggggacgaaccaccactggcatgggcatgacaattggcggacctccgggggtgggttgaggtaccccgccgggaa

SEQ ID NO: 10197 - DNA, 2906 bp, Zea mays
  Clone ID: MRT4577_109303C.1
ccggccgggatccgttgccccctctacccctcctcctccctccatctcttctcgatagcttctcagtgccgtctgccgtggctcattcccaaccttccccagccagcataaaacaagcgaagagccaccctaagccacctactagagcaaatactctcaagtcccaactaaccaaaactgggaggaagagaaaagctgcagacacggtctctctctcacccttcaccgcttcacgtagcagcaagaaaaagaaagaaaataaaaagagagagagagacagagatggcttgcaccttgaaactccaaaacccaccatgaaaaaagagcttctctggcccctgaccctgagagagagttgctgttgctgccattcggtcggtgcctccttttcggtacgccgctgctatgtggtatcactggtatggttgttctcccatcccaaggcgacgagggaataggaagctagaaagttcgtctgcagtctgcacctttgcccatggcctaggcgcctagctcaggccgtagctcagcgtccatgggccagggagtctgaaaccttgcttgcctgcccgctcctctcacttctctctctcctcctcgctcgtgtccccgacgacgtcctgctggtccctggggactggagagcgaaggtctgtctcctttgcggctgcgctgcttcttcttcaatgctgggcatcggtggcttgggctcgggctcgggcatggaagcaggtaccagctgcggtgctctgctcagagagcttcagcaaatctgggcagaagtaggggaaagtgagggcgagaagaacaaggcgttgctggacatcgaaagagagtgcctggaagtctaccgcaggaaggtggacgatgccaatcggactagggtccagctgcaccagtcagtggctgccaaagaagctgaggttgcatctctgatggcaacccttggggagcacaagctgtacttgaagaaagacaagggcgttgtaccactcaaggaacaacttgccaccgtcgccccagtactggagagcttgaaatgcaagaaagaggaaaggatcaaacagttctctgatattaggtcacagattgagaagatccgctttgagttaagtgaatataatgatcagggtgatgacccgagcagtcttgctgctgaggaacacgatttgtcgatgaggaagcttaatagttaccaaacacagcttcgtgcccttcagaaagataagtctgagcgcctccgcaaggttctggagtatataaatgaagtgcattccttatgtggagtccttggaattgattttggaagtactgtacacgaagttcatcccagtttgcatcagaatggtgttgagcagtccagaaatatcagtaacagcacactggagggccttgctagtacaatttataagctaaaagcggaacgaaagtctagaatccacaaggcgagagagatcatggaatcgttgtgtcaactttggaaactcatggactctcctgaagaagaaaagagacagtttagtaaggtaatgagcagcctcatattacctgaggagggaatcacgtcacctggagttctctccgaggaaacaatcgagaagatggaatttgaggtcgagaggttaacaagactaaagaccagcagactgaaggaaatcgtcatgaaaaggagggcagagttagaagcgatctgccagaatgcacacatagaacctgatgtcagcacggcccctgaacagactgatgctttgatcgattctggcctcatcgacccttctgagctcctggcgaatattgagtcacaaatattaaaagcgaaagaagagtctcttagtcggaaagatataatggacaggataaatagatggattgctgcttgcgatgaagaggcttggcttgaagaatataaccaggacccaaagaggtacagtgctggaaggggtgctcatataaaccttaaacgggcagaaaaggcacggattttggttagaaaaatcccaagtatggtggacgacttgataaaccgaacctttgcttgggaaaacgcaagaaataaaccctttctctatgatgggggacgcctaatatctgtactagaagagtacaggcttagccggcatcagaaagaagaggaaaatcgacggtaccgggaccagaagaagctggagagcatcctacttgcagagaaagaagcgatcttcggatctagaccaagcccaaggaagacgagcagcttaagtaggaaggcaaatgggtaccggccaaatgggaacaccaacggactcaagactccaactcctcgccgattgtctctcggcagtgctactcctgagcttttgacgcccagatcgtactctggccataatagatactttggcgatgtgaggcgtctatcgacttcccatctgaacttcggtgatgattcgctgtcaacgtttacatccatcagtggctctgaaccagaatccccctctattggatgaacaccgtactgctggatgactggatggtcagtattgcgtattgtaaatgggcaccatgttaccaagttcttgcactagcatgtacattcctgatgtcatatatttagctcatattggagtactaagtattggacgggttgacttggtttgggttgggtgtggagttgaattgtttcaagttgatggctttgtagattgacaattaggcggaaagatgtaggggagcgatctggatttgggcagtcagctgtaacatatcataacttatgtgtttggtttgtgtgtgcaaccttgtgtacaggtgcaatgaaaaatctgtgtgcagaatctactacttcaaaaataaaaaaaaaaaaaaaaaaaaaaaaaaaaaaaaaaaaaaaaaaaaaaaaaaaaaaataaaaaaaaaaaaaaaaagcggcc

SEQ ID NO: 10198 - DNA, 213 bp, Zea mays
  Clone ID: MRT4577_109304C.1
tttttacgccggacgaaaagggggcgcaggcggggcgttttaaaggggttcaccagataccaagccacaaggacgcccagggcccgaaggaccggacagggcggcaacgaggagaccaccgcgcagccggagctccagagggacaagagctgaaacacaggaaaaagcaaaggaggacgcatagacaggtaccacactgacaagcaccagacg

SEQ ID NO: 10199 - DNA, 305 bp, Zea mays
  Clone ID: MRT4577_109305C.1
aaaaagggtttttattttgacccatttaagcgtacaccaactcatccattttgcataggactaaatccactggccgcccaaaaacggcagaatattaacaccgcaggatcctatctaccaccaggtgggtcttcccccagaggaataaacgccggaggaaataaacggggggggacaaatttccataaaattacagccgctctgcaaatggccaaacccttctcatggttaaggaatgaagcatttgcttggacatacataaatgttagcaggcaacccccgctgggaatgactaaagatttatt

SEQ ID NO: 10200 - DNA, 498 bp, Zea mays
  unsure (1)..(498): unsure at all n locations
  Clone ID: MRT4577_109306C.1
ttttacgcatgtgtgaaatctcgatcacgagatggacctgagaatattgggtgtggctgcccggcatatgaagcttaagaaggatcaacttgctgtagatagacagacaggagactctcgtgagaatgtatttgaccagtctcgtgacatgcccgataacatgtctttgcaatgaattgatgctgaacgggaacccgcatctgcagaggcccgagagaaagatgctttagcatgtgactacccacatggtgtatggtctactggagaaagttggataagagcagagcttccggctttcgttcgagcaactgctgaagctcgctatcaggcgatatcaaaggatacggttgctagaggttttgcagcggcaagagagcggagggaacgatacaaatggtctttgaaggagaaggttcaggccaccgatctcgatacttgacaggagtaacagnttcatagtgcaacttttaggaatttcattcgaaacccagatttcaa

SEQ ID NO: 10201 - DNA, 269 bp, Zea mays
  Clone ID: MRT4577_109307C.1
aattcggcacgaggcgtgcaaacttcgaccgggaccggcattccgccatggcccaccactgccgcctcgctggagctcccgcgtctccgctcctccccgcgttttgcttccccgcctcctctgccgcgccgccagttgtacggggttcagttgggccgacgccctccggtcgtggggacggcgggcgcggcgacgagtcgacttcggactccgaggcaaactcaccgcgatgataaaaagcagtcggagtcttgggagatcagcggggg

SEQ ID NO: 10202 - DNA, 520 bp, Zea mays
  Clone ID: MRT4577_109308C.1
ataatacattttaaggacaataagtaaagcaacatttacaacttttaaacacaaccgtaaacactacgatgtattcaatggcaaagagtattgctcgtaaccgtgagcacaattcaaattgattcatgagtccttgcaagggggtgccactttacccacatgagaaaggaccatataacttatccactgtgaacaaggaggtactcatgtcaaccgtttacaaagagcctcagacatatgaatgcgcacctagctcatgtggatgcctacctaggtccaccggggacaaccctaggcatcctctaccataaaaggtccaccggggacaaccctagtcacatgggaccacatgtctaggactgtgtccataggaacaaatcaacaaaggtaattagctcatccttcccataaagggatatgtggtagcacggaaatttgctcacaacaaaacaacggacggtccttatcaattcaagcggtatatgccatcgagactccattctcatgaccctacaatccg

SEQ ID NO: 10203 - DNA, 976 bp, Zea mays
  Clone ID: MRT4577_109309C.1
aaagtccgtgtctgggatgtttcggagaggcgagtagttgactgggctgatgcaaaggatatcataactgccgtgggttaccagccagatggacagggtcttattgtcggcatagctgcagggaggtgccggttctataaccatgcaggtgaaaacgtggaactggagaaagtactgaaggtaacgaagaagaaatctgctggtagacagatcaccagcctgcagttttcgtgcggcgatcctgctcggatcctgatcgcatcagcaggttctaagatacgagtatctgatggaggagctaagatcaaccgaaagtttgaaggacgtcgaggctccaaggtcctggtgccgccgtctctgacctccgacgggcagtacctcgtgtccgcaggtgccgactccaacgtctacatctgggacttggacagaccagcaaggggcaaaagccgcaccagaggaccaagaagggtgcgttcctgcgagcacttcttctcggagggcgtcacgtccgtggcgacatggcccggtctggcgcaccaacaagaagacctccagtcgccggagaagggggccgcccccacgctctgccgcgaccgcgagttctgctcgttcgggacgtggttctcggcagacggcgcgaggggcgccgcgacgtggcccgaggaaaagctgctgccgtccctcaggtacgtcaactgcgccgggatggacgactgccgcgccaaggtgtcggccgcctggaacaaggtcgtcgtcaccggcggcagcgacggggtcatccggtgcttccacaactatggactgccagtgaagctataggcttgcgagatcagagctgtattactgttccttactttcttgtactgtacagttcatgaaagttctaggacgaggaggggtgtacattggtttgcttgccgacttgctgtgaacgagccgttaattaacagggatattcttggtacattgagctgat

SEQ ID NO: 10204 - DNA, 202 bp, Zea mays
  Clone ID: MRT4577_10930C.1
aatatcgttaggaaatatatctttattgagcatctgttttcaacccacttcaaggcatacaatgattacacaacacacgcattcaacacacttccaagaggctcgttggcccgcctgcagaatgttcgatcaagagtacgccgcttatgcagatcttctggtaagctgatcctttgaagtgctctcaaatatcttgtctgca

SEQ ID NO: 10205 - DNA, 244 bp, Zea mays
  Clone ID: MRT4577_109310C.1
ggtggttgggtttttttttttttttttttgggtttttttttttttttttttttttttgccttcaaataaatatattagacaggcgttgcatcaattcaaaagctagtctgtgaggtcatctttcaccaataaattggtcatgaatcgggcaaattgattaccatgaattcgagtccagggttttgaagggattttcttctatgtatcacttctcgaggtttttcgtcatcctttttgctggagg

SEQ ID NO: 10206 - DNA, 430 bp, Zea mays
  Clone ID: MRT4577_109311C.1
acactcaaagcctctcactctccactctcactctccacaccagagcccaagcattcgcttcccgtcgtctcctctcctctctcgatctcagtgaagttttccgcaaccaacagcagccagatggctcgtttcgccgtgctcgcggccatcatcgcggtcctcgccgtcgccgccaccgctcagggccccatgccggcgcccaggatggccccgctccccgcaccgccggcgaggtccccggccaccgcccctgcgccggtcgccaccccgcccaccgccgcgtcgccatccccgatggcctcgcccccggccccgcccaccgacgcgccgaccgacgctccctcggcgatgacgccgtccgcagtctccgccacacccaccggcgcccccaccagcgcccccgcgagctccgccgtgtactcgtccgccg

SEQ ID NO: 10207 - DNA, 1164 bp, Zea mays
  unsure (1)..(1164): unsure at all n locations
  Clone ID: MRT4577_109312C.1
gtagagcaaacatatatgaagagacaattctgtactacaggaagctcaagggtgctggcttccgaccaaatgcatccaacttttacactatgatcaacctactagcaagacatgatgacaatgaaactgcagctgaaattctacaggacatgagggcagcaggctgtttgtgttcatcaattgttacttttcttgttcgggcttatggagcagtaggaagaatgcataaggttcttccaattctacaatcttgcttcgacaagattttgcttgatgccacctcatgctctattttagtaacatcgttggttcaaaattctttactggaagaagctttgtatattctgcgtgaaaagaagtggaaagattctgcttttgaagacaacttataccatatattgatatgttcttgcaaagagggtggcaattacaatgatgctgttaggatatacaatcagatgcctaagtctgaacacatccgaatccccgtatctcttgcactatgattgatgttttcagcacgatggaaaggtttgccgatgctgaaactattttgcttgaactgaaggcttcagcttctgtacttgatatgattgcttacagtgtcattgtgaggatgtacattaaagcacgacgactaaaggatgcttgttcagttttggcagaaatggagaaacaaaaagaaataattcctgataaatacctttttctcgacatgcttcggacttaccaaaaatgtggtctgctggagaagttggctgatacatattactggatacgtaagagtcaagttaaatgtgatgaagccatgtataactgcattattaattgctgtgggcgggctatacctgttgacgagctgtccagaatttttgacgaaatgcttcaacagggacacttagcaaacactgttaccttcaatgtgttgctagatatatatggaaaagccgggctttttaacagggctgaaaaggtctttatcatggctcgcaagcagggcctggcggatatcatatcatacaatacgattattgctgcatatgcaaaaggcggcaattttctgagtatgaattattttgtccaaatgatgcagngacgcaggtttcctgtttctcttgaggcatacaactgcatgctggatgcttacggaaaggcagggcgatt

SEQ ID NO: 10208 - DNA, 228 bp, Zea mays
  Clone ID: MRT4577_109313C.1
aagctgttgcagaggcagatgatccatccatggaccggattaaagagacaggcaaaaaggcctcgccccttactacaaaggactgaaatcaagaaaaggttgatacgctagccgggggaacccttatatcagtggaagcgaagaggatgcggccatggcacaatccgcgtttctggggtgaaaggactctgcttagacccgtgctctctgcggatgcatacatgatgc

SEQ ID NO: 10209 - DNA, 596 bp, Zea mays
  Clone ID: MRT4577_109314C.1
gattccggccgggagtctacgactcaatagccgtggaatccatcccggccacggtcggaggaagtgactccgccgcgggccgccatcttcgtcggtgatcttttctccttcaacaatcaaggcaacgatctaccacaaaactttgttgatctaccagatggcgatcaagacaacgatcaagaaaatgtacaaggcaataatcttagagatgcaatagcacaagaaacgtggaatgattaccaacaacataaaaattagtggtacatttgttgagctatttgttcgtagaaactgtctttgtttattgttgcttcctaatgaaaaacatgttacagatgagcttactttgaagatatggttccctgtaaccgctatgcctcctaattatgtcatgttgctgtttatgtcatatatgttgcttcctaatagtggtacatttgttgtggtattgttgcttcctaattctgttgtgtgtgtattgcttactctgaagatctggttggtttgtaactacaagtaggacatagattctttattttgtgaaatgtttcagttatagcaggttttacaaaaaaaaaaaaaaaaaatttgcggcc

SEQ ID NO: 10210 - DNA, 417 bp, Zea mays
  unsure (1)..(417): unsure at all n locations
  Clone ID: MRT4577_109315C.1
aaagagggtaaataaaaaaaattaaataattattaaaagggggggggggggaaattattttgaaagtttaaaattnaaattttggaaaaaaaaaaaaaagaggataattaaaaaaaaaaaaaaaaaaaaaagaaaaaaaaaaataaagtttaaagtttttttataaccaaaggattaaactttgaaaagaaccggggacggaatccggggtccaaccagaaaacccgaaccgggacctgaaaaggaaacaacgttccctatagggaggccaaaaaaattttgggggaaggagggtaaaaagagggtcctgggtaaaatttaaaatcggttccgtttccaaaaaagattagaggggggaagcttaaaagaaaaaagggggggggaaaaaggagggaggaaagtgcgattaataagggg

SEQ ID NO: 10211 - DNA, 587 bp, Zea mays
  Clone ID: MRT4577_109316C.1
gcaaagatggttatacagttaatcagatattatggagaggctacataaagatggtatactatcaagggcaagcaaagatggttatacagttaaccaggtcagccccttcagagcaaaataacagtagggatatctgctacacgaatggctacatgtctcaatgggattagttcactgcatagatcgaaccaattgcttcaagggttccaaacatgattgacaggtctaagaaaatggttcttgtcattgtgcatgatgattacatccttgagaagggaagactacacgaagaagaagcatggtgttctttcagcaggaattaaattattttcaattttagacaacgagttccattgatcccaacatgattcaacagggcattcaagctggaacgtgcttggaaaaatttagagcaacactactttgaggtggaggaagtatattttcacgcatttcaaattgtacattgtacactagatagtcaaaagttagaagacgttggttatcatgcctgtcttgctcatatgctcccaatgttcaactacgttggatttagatcaatatcattcttcttgctcattttggtt

SEQ ID NO: 10212 - DNA, 578 bp, Zea mays
  Clone ID: MRT4577_109317C.1
aagaattcggcacgaacgtcatatcacatgtacgcccatttcttgccactacttgctcggttgttcttttatctcggaacgcggtaggggttgcggattgggagcaaaggaggagagggagtactgggccgccgccggctgcgaacgcggaggaggcagcttccaccaatcagtgcaccctcatcctcaaaggctgatgctgacacggtggatccggcgtggctatcgatcaggtgagaagcttaccatcgatcaagaattcgagcagtatttttcgaacctgatgctgtaggatcgaatggatagttttgtgaccaaaaaaatggcgctagctgggacctccaaacatggtttgcttgctgagcgaggtgccgaaccgtggctattagtattattggagccatcggtttatatgtacaccgaatcctatcactgaatgtatgtatctgtggtatgtgtatctttttcagcttgaccatcagatgttagcatcatggtgtatggtaatgtgtgcagataagaacatgtctaagcaatatagtaaatagtgtattccttgtaaaaaaaaaaaaaaaaaa

SEQ ID NO: 10213 - DNA, 411 bp, Zea mays
  unsure (1)..(411): unsure at all n locations
  Clone ID: MRT4577_109318C.1
agcagcagccagcgccagcgcgcagccaggnnggaccggcgcggccaacggcagcccngcagaagccgagggggacgacgngcggcaggagggggcagaagagcccccagaggagcgccacgccggnccccggccggggcggcgccaacanggacaacaggcagggggggggggcgcccgggcggcgcggcgaccgcggggcgacgcgggcgacgaggcacacgggccgcacggcccgcgccgcccgccgcggccgggacgccgccgccgggcggccacccgccggcgcgcaccacgagaggaacgccggagccgccgagcgcgcccaccgcgacggccaaggcgcccacggccgcgacgaagaggncccggnccccgnaggcgccacccggcacgacggggcccggggca

SEQ ID NO: 10214 - DNA, 350 bp, Zea mays
  Clone ID: MRT4577_109319C.1
agaaaacgaaccatcacctccaacgtattcgacaaacattcctgcgaaaacttacgcgatagccatagcaaccacagcggatacccaacattacttagactgtcccaaatctacttgtcaacagagcatttcgcgttcatgagcttcaagatcatttgctgaacgagatccatgacctcatcctctatactgtaaatgctggtacaatactggcatctgatattattgacctgactacatcatatgttgcacaccagctgcacctagtccaattcctaaaactccagtacagtcacgccaagaaggaccattaatttcacatccactattcggacattcaccttaattac

SEQ ID NO: 10215 - DNA, 1334 bp, Zea mays
  Clone ID: MRT4577_10931C.1
aggcatttacgcccgcttgcccttttcctggcattttcttaatccttaaccatttttttgtgggctaaaaccatggcaaatcagaattttccagcccaaaatcatccccaaacggtggtcatagtgggggcatccgggggcattggtttaggctttgtccgttactttttagaacaagtacctttccccgtcaaaatttgggccacctaccgtcaggcgatcgccgagttagaccatttagccaaggaaaatcctgatcgtttaaccctagtgccgttggatatcactgaagagagccagattgcacaatttagccagcaattaggcaaaactgaagtcaattggctaattaattgtgtgggcattctccatgtagaagataacccaccggaaaaaagtctgcgccatttacaaccatcccaattacagcaatattttgccgttaacagcattggcccagtgttgttagccaaacattttttaccccatttgcgccatgcttcccccagtgtttttgccaccatttccgctaaagtgggcagtattggggataaccagttgggaggatggtacggttatcgagcttctaaggcggcgctgaatatgttgctcaaaaatacggcgatcagtattcgaggcatgctcaggggctaaaactaaaggaaaaaaacgattttaaaggggcaacctattataaaggctttcacagtcccagggcctgaaaattagcgccctgtttcccgcggcatttttatagtaattatagacttgcgagcatcatgaccaagaaaaactccatctaaaacatgggtaatcttgtgctgaagctaactatatttttttaaaaatgactaaagtaatgtcatcaaaaacccggctgtcaccaatataagccattaaatcctccaccactgcttgactaatttccaaggctgttgactggtggttggcaatgagcacctcttgaaatcttgccaaaccataaaattgtttttccccgttttctgcttcgggaataccatcggtgtatagcaccaccacatcccctgaatgtaaattaatttgggtgcgggcaataaaggtcgtaatatctttctccaaagcaaggggaaagcctaaatcaatggtatctatttcttctatggcgccatcagcacgaaccacaaaaatggattcatgttggccactaaggattaattcccccgattgataatctaacatcaccagggtcatatttttactcagttccatccgttgggtatttttgtagagaacctgattgagtaaattgtggaattgcactgcttccgtaatttctgccgttagcagagttt

SEQ ID NO: 10216 - DNA, 189 bp, Zea mays
  Clone ID: MRT4577_109320C.1
atgggcggcgtcagcgccgcctctctcgccctgctgtggctcctcctcctctgggtggagtcccgcactctccacgaaatttcaaacggcctaatggtggaagtagatcctacctatgcaacctatattcaacaagccctaatagtgtgcaattgcaaaaaacgccaaagtcttaattcaggaatttaa

SEQ ID NO: 10217 - DNA, 427 bp, Zea mays
  Clone ID: MRT4577_109321C.1
acaaaatccatccatcggatcatcagcatcttcatcacaacaaactccatctatccataccctgatacccatatacacaaacagctagctccactttctgatcgagagctatggcggctccaggtcgagttttcacactactcatgctgctcgcagctgcgggcaccatggccgctagtgacgccgccgtcgtccccgccaccacgtcgccgtctccggcaccgaccgggtggctaaaggcgcacgccacgttctatggaggcgctgatgcctcggacaccatgggcggcgcgtgcgggtacggcaacctcttcacgcagggctacggcacgcggacggcggcgctgagcacggtgctcttcaatgacggcgcctcgtgcgggcagtgctacaagatcgcctgcgaccgcaagagagccgaccccat

SEQ ID NO: 10218 - DNA, 789 bp, Zea mays
  Clone ID: MRT4577_109322C.1
gtcgacccagcgtccgtctccgcgcaccggccggcgaccctgcctcagacctcaataggcaacggaggtacaatgccaagagcaaatgagatgttgagggcagattcaagaatgatggtggtctttggtgccttgacgtcgaaaccagagcagctgacatttgaagactccctcagatttgtcaagaaagtgaaggcccgtgattacatgctgtacttgtcattatttgacattcttggaagaatggaattgtcccagcttgatgcctaccgagagttacagctgctgtttcaaaatcacccagatctgtgtgaagagcttgagaagttcagaccacctgtgcctataaagcaggcgacaaacaacatttggccctgggtcattgtttgtgctgtcccattggttgcagttagcctgatcccggcgcttggaaacccagtactgtggtttgttcaacaaactattggtgaaaaaatagccgtctgattgaagaaccactgcagtgcacatatgtgccatcacaattgaattaatatcatctttatatatttatatatatgtgtatatatatattcgagtagtatcctggaaggaaaacttgtgttcttggtcatcaagtaccactcagcaagaaatttagtcggtacttgctgggagcgcaactgtgcaagcccaccaaacattacccgtttggccatttgagttgggttttaagtgctaaaaaaatcaaacttccatggaatactgaaatctcttttgccagctataactaagcccagcgttgttatt

SEQ ID NO: 10219 - DNA, 446 bp, Zea mays
  Clone ID: MRT4577_109323C.1
aacaagaacggggaaaaacaaagggttttggttaaaaaaatttaaataattatacaaaaggggtcactaaaaaaacaatgctaatggggtttttttttccaaaattaaattttcctatttgagttacatttggagcccttttttaaaaaaatacaaataaaaaaaaggggggggtcgccttttttattatgttaaaaaaaaaaatggtgaaggctcgcctgattttaccaacttaacttttaaaaacccattttccctttgaaaacgctcaaccccaaccttaaaaaagggattgtcatgtcgaaagctttttacttccccttaaaaaggaccatgttctccattctccttttgttaagggacaggaaaaaaagggaattgccctgtgtatggggcaccaaaaaaaacttccctgatgactttttgggcccccaaactgtggaccc

SEQ ID NO: 10220 - DNA, 862 bp, Zea mays
  Clone ID: MRT4577_109324C.1
ttgggtacccctcctcgaggccggccgggcccgggtcacacaacacagtttcgtcgcaaaaacaccatggagaccagctggctcctcctctccggcgccctcctgctttcactcctcgttctgcgcctccacgccaagaaccgccgcctgccgccaggtcctccggccgtcccgctcttcggcaacctgctgtggctgaggaactctgcagtgcaagtggagcccctcctgctgaagctcttcaagcggtacggccccgtcgtcacgctccggatgggctcccaactgaccatcttcgtggccgatcgccgcctcgcgcacgccgcgctcgtgggcgccggcgccgtcacgatggcgaacaggccgcaggccgccacgagctcgctcctgggcgtcagcgacaacatcatcacccgcaccgactacgggcccgtgtggcgcctcctgcgccgcaacctcgtcgccgagacgctgcacccgtcgcgcgtcaggctgttcgcccgcgcgcgcctgggtgcgcggcgtcctcatggacaagctgcgggcgagtggtgccgccggggacgacgagccgcgcgacgtcatggaggcgttccggtacaccatgttctgcctcctcgtgctcatgtgcttcggcgagcggctcgacgagcccgcggtgcgcgccatccaggacgccgagcgcaagtggctgctctacatctcccagcagatgagcgtcttcttcttctttccgtccgtcaccaggcacgtcttccgcggccgcctgcagaccgcgcgcgccctgcaccggggcagacggagctcttcgtgcgctgatcacgctcggcgcgagtacaagcggctcgccaagacggccagt

SEQ ID NO: 10221 - DNA, 366 bp, Zea mays
  Clone ID: MRT4577_109325C.1
tataatttgcctcttctttcaagaatgtgtttttccctgcatatcaattgagggaaaaaggcaacaacaagacattctgcctgatcagccaaggttaagaggcactgagtgcagtagggggccaaatggctattcaatcaggaaaacacatagaaaatttaactgacacagtaggcggttccactactaccatatcaaacttggaatcatgtcaacatgcaacgtgagagggtctctagctgaattggttaggtggtctgagtagcactcaagttgactcctcgtgggagcgaatttcaagctgcggttaaaaaaatcccctcgtctttcccacgccaaagcacagatctaaagcccggccccggt

SEQ ID NO: 10222 - DNA, 348 bp, Zea mays
  Clone ID: MRT4577_109326C.1
cctagtcttgctagctctgatgacatagtcgatctgagcccacggacgagatagtgcgctcacactcacgcatgataccgtttgagagcgcgcgcgcgcatccacatcgtgttcactgtcgtgttgttgtgagagtcattggctcatatttagttgctgcgcctgttcttagaatggatggatgatttagccagagatctggttgtaatcttgtcgttggcttagctgactggctgctgcatcggttttttttttgtggactgagaggctgaaggcgtagtggcaccagtcactccttgataggatgcgtggctaggcgatatctatgtttatgtataggcttgaaga

SEQ ID NO: 10223 - DNA, 846 bp, Zea mays
  unsure (1)..(846): unsure at all n locations
  Clone ID: MRT4577_109327C.1
cattgggtccctcgaggccggccgggatcctttctcggccttttggctaagatcaagtgtagtatctgttcttatcagtttaatatctgatatgtggactatgtgttcacttcgatattaaatttattttttgtgggggaggaatcacaacagtggcttgccactgggttcctcaagcgtcgtccggccgttgcactattggctggaccaggcgcaccccaaccaaggaactcataccagacatattgctgaaccatgattggattcgtgcacttcgtatggcttcctatggatttcttctttatggtccaggttcatatgaatggtatcagctccttgatcgatgcatgcccaagcagacatttgtaaatttgtctgctaaggtcatcctgaaccagatcgtgcttggtccttgtgttattgctgtaatttttgcttggaacaacttatggttggggaaactttcagaactcccatccaaatatcagaatgatgcccttcctactcttctatacgggtttaagttttggattcccgtatcgattgtcaactttggggtgattcctttgcctgctcgtgtcgccttcatgtcctcttgttccattttttggaacttttatctgtcgaccacaatgagcaaatgaaacctccagttagttgtcagttttggttgggttcattacacagaggagcatctgaagaagttagtttcagcaggcataaacagtgttaggtctatctttggacagtcctttgtggtgtagtgacattanactgtgaggccttactcagatngttgatgagcgtanaggtcattcagcaggcatatacagtgttaggtctatc

SEQ ID NO: 10224 - DNA, 1013 bp, Zea mays
  Clone ID: MRT4577_109328C.1
ccgcggtcccccacgggagccgctctcgtcctcctcctcctcggagtccatcgagcagggtggcggctggcccatcgaattccccttcaggcaggctgtcacggccgcctctctcaccttcaccggcgacacaatcgcgcaagtccgcagccgcatcgtcgaccgccgaagatgctgccccgactccaacaccaaggaactcataccagacatattgctgaaccatgattggattcgtgcacttcgtatggcttcctatggatttcttctttatggtccaggttcatatgaatggtatcagctccttgatcgatgcatgcccaagcagacatttgtaaatttgtctgctaaggtcatcctgaaccagatcgtgcttggtccttgtgttattgctgtaatttttgcttggaacaacttatggttggggaaactttcagaactcccatccaaatatcagaatgatgcccttcctactcttctatacgggtttaagttttggattcccgtatcgattgtcaactttggggtgattcctttgcctgctcgtgtcgccttcatgtcctcttgttccattttttggaacttttatctgtcgaccacaatgagcaaatgaaacctccagttagttgtcagttgccaacctatctggaacgaacaatctcatatggaccctgatactctgcaattttgctcagtttggttgggttcattacacagaggagcatctgaagaagttagtttcagcaggcataacagtgttaggtctatctttggacagtccttgtggtgtagtgacattaaactgtgaggccttactcagatgttgatgagcgtaaaggtcaattcagcaggcataacagtgttaggtctatctttggacagtccttgttgtgtaatcatgcatggagcatttgtctctattttgaattcaaaaaaatgtagttgagtttattatgtgcgatgtgtattgaatcaaaaaaaaaaaaaaagggcggccactcgcgatctagaac

SEQ ID NO: 10225 - DNA, 668 bp, Zea mays
  Clone ID: MRT4577_109329C.1
tttttttttttttttttttcttaagcaaagtttgcgaatccttcataaaagatcatggtattacttattatcgttatggtatagagtgcaataacaaactgcacaaatataaaagcatcacaatcaaacagcttaagtccagaatctggtggagggttctctggggaacttcatttcttcgatacacaaaatggtgttttagactgagttattaacgtatccgagattttcaagtgcgggaccttgtctgactcttccgaacttatcatagacagaaccgtggcaaatgcagacccaaccgttataagcacccaaataaggaatggggacgcaacccaaatgtgtgcagacagcagagcagaccaaaagcttggtggcaccagcatcagtcaaaatgacttccttgcccttatccaaaattgtgtcaacagggtattcatcttcttgcttaatttcagcatgagtaagtcttctaacgaagacgggttcaccgttccagacgatttgcataacttcaccgggaggaagttcagagacgtccatttccatatatgtgtccttatcgtatctcttccaaccattaagtctttcgatgacaccccaaagcgtagcatctagcaagggaaagaagaccagcatagtagatggcggaaagaacgtataattga

SEQ ID NO: 10226 - DNA, 582 bp, Zea mays
  Clone ID: MRT4577_10932C.1
ggccgcttttttttttttttttttctttgtttttttttttttttttttttttttttttttttttttttttttccattggaattggacacatcaacagcatattcatttaatataactaaaatttcctttcccccagacgacatacataccgacggacgcgacacacatgattaaaagggggcatatgggatactgcacaattccaagcaatcatgcaaaggttattacaaaaatccttttgttgaccccccgggggagaccgaagacggatccccagccttagtttttaccggcgccgaactcgtaagggtgggggatgatgacgtacccggccttttgggggctttgggagtcggacagccggccctcgtcgtcgttgaaaacgtcgtcgtcgtatccggaggcccaggggggggcgaggagcgaccacacgaggtacatggccgcgggggggagggtgccgcacccgaagccaaagaggaggccggagacaacaaccaggatgtccttggcgcggtcctgggcggacgaggcggcaacctccgactcgacggaggggagcgccacggggcggcggatcgg

SEQ ID NO: 10227 - DNA, 1963 bp, Zea mays
  Clone ID: MRT4577_109330C.1
atcttgacggcgccgccggcgcggcggcggtgctgcgcgccgggacgcccgtgctcaggctcggcctgcacgagttcgtggaggtggtgttccagaacacggaggaggagctgcagtcgtggcacctcgacggatacgacttctgggttgtagggtgggtgagatctttggattgaaccaatccttatttcagagccccacccttctatcaaggttctagaaacaggatatgagttttcctggtctgcctgtctctttaccttttttatttttaacttcattgagtttgaaacttatcaaaatacaatgattcaccatattctttatagctgtatagtttcattagtactgcaattgtatgcaagtattttcatcacctgatgttttgttaagcaatctatgtcacagtgagtcatccatgttttgactgtgttgatctgtgcaataaccaataaaatgcaattatagcttcgaaaactacagaggcctatatcatatttttgagttccttatgtgagtcatccatgttttgacttgtgttgatctgtgcaatgaaatacaattatagcttggaaaattacagaggcctatatcatatttttgacttccctacttttgagtacctttttctttcaggtcatgaatttaattggcgacgtgaaaggaaaagtcgctatcctgattgatgatatgattgatacagcagggacaatcactagcgcagcggctttgttaaagcaggagggagcagaagctgtatatgcttgttgtacacatgctgttttcaggttttctagttggctttattgaatgtacttctggttttggtattttttatggtcacatcctatatgatgtggcttcatctctgagcactttctaatattttgctgcaagaacattcacaacactgtacaaaaaagtacaccaggggtaatagtatctgttaacacctgtagctgtaggccatattaactttgctaatcttgggggcacccatattatcatcagcatcaatcctaacgatatgattgcttgaatcttatgcaatatgttttctacctcgtggtatcttattgtaggaaggtgcctgagcaaatcttttccgcgtagtcacttgtctaaatttgactgcttttaataaatttgcctgtttgatgctcagtatgcttggtgacctgctactttatttcagaaagtagcaggacgctttatttggtttgaacaagttgctgcctttatattccgacatgcttattccttcagaggatttgtgtattaacatggttgacttttcagccctcccgcgattgaaaggctttctggaggcgtctttgaggaagttattgtgacaaactccatcctgctgccggaagacaaatgcttccctcagctgactgtgctttcgatggcgaaccttgtgggggagacaatttggcatgttcaccgcgatggctccgtcagcagcatcttccaatagcagaaacgagcgcgtagcatcgtcacctcgccttgcgttcgtgtgcttggtatagagaaggcacccagtgcctgtgctgcttgcgtattttcgtagggagtcaattttggcggcaaggtataataaggttgtattgcccgatgtacggggtgataaataaggtggttattgccagtgtacgtgggataataaggttgtatgctggtgtaggtgttctgcaggctgcagcgtgttactaattaagtgcatctcttgtcctattatgtattgctgaggtagttgttgtcgagttgaagtttcagtgtctcagatacatggggatagtgatgtacccagcactcggtcactagtgaagtcctggtcattggaaatatgggagcaccaatttctgttttaaggtcggcattgtagctcaagctgttaatactcaaaattgcctgattgtctatgagcaccctgcaatatttactggtgtgatgctgc

SEQ ID NO: 10228 - DNA, 589 bp, Zea mays
  Clone ID: MRT4577_109331C.1
attcttctcttttaactatgtatagcatcgatggagcctggagtctgaactcgatattggcagtgactgttcttggtcagtttacggaagagaaatggtaaaatcccctagctactatgcaggacgatagtactacaaaggaaaaactaaacccccggcagatggaaagaggcggcagctagagatttttttttagatttttccattcctttatttaacagagtatcgcagatattttagaattggggatttttagcgatgaccaaaggatcgacgcgctatacgaatatgcatattattttctcgaattttgaaataggaaaccgaattgtccagcaattattctggtttcggtttatttgaagagcctgcctcaagtagcgcatttaccgaatttatcgagatttctcgaaccgagcgaaatacttaagtgacaattttagttcgtcttaattgattacttttaaatgggcactaggctcgacacttcagaaataactaaattttaaacggtgcgagccgaatgtggcatcgcaatcgaaatttccccgagaagacgtcagctttgtcacaggagcgagatatagac

SEQ ID NO: 10229 - DNA, 375 bp, Zea mays
  Clone ID: MRT4577_109332C.1
tatcatcgcgtccggaagactatgcctgccctcgttgccactgcatggggcggcttgcttcaactcgagctcactagctcacacttagttgaagcagccaaaagacggaagcaacttggtactcacatgaccgtggttgagaaaatgaataaagtcgaaacacagagccatcctaacaagagtgttcctaaataaagacatcttgctgaagtattatcagaacagccctaacagacttgagagacgtgcagcgacactgaaatgtggtaaacagatgacgagccttctgaagggacagacccaaggcgctgacactgaaggtacctaaccaaaggctatgagcagcgggatttactctgacagcaagacaaagga

SEQ ID NO: 10230 - DNA, 1254 bp, Zea mays
  Clone ID: MRT4577_109333C.1
atgtcgggcattgccctcgcacctgagatgacggcgggtgtcacttccccgcgacgtgtcagccccaagcggactgatgacgccagcaccctcgcaaaggatctgttgggcgttaccctcgtacctgagatgacggtgtgctccgcccccgacgcgacctcaccaccgtccatcgaccaagaggaccgattgacagtcgtctcaatcttcggatcgacgggttccaaggaagaggacgaccccgactccggttgggatttctctgacctcagtgaccccggtgccatgcgggacttcatgatcgcatgtgaccactgcctctccggttgttttgacgacggcaatgaccttgacgatgaaggttacggcccaagtcacgaatgttcccacgtcgatcagggagatcacaacgaaggcaaccacctcgatggcaagagccatgacgacaacaagaaggagggcggcaaggaagaggagttcccggaggtccacaactacttcatgatctacggcgggcaggcggcgaacgcctcagctcgacaccgcaagcaggagcgccgggaggtctacttggtgaaggtggcagcgccggtctacctagactggtccgacaagcctatcaccttcgaccgaggcgaccaccccgacttcgtgccaagcctaggaaggtacccgctcgtcgtcgatccgatcatcggcaacgttaggctctccaaagtcctcatggacggaggcagcagccttaacatcatctacgccgagaccctggaactcttgggggacgacaggtccgaggtccgggctggtgcggcacccttccacgggatcgtgcccgggaagcgaatcctacccctcggacagatcgacttacccatctgcttcgggactccctccaacttccgaaaggaagctctcaccttcaaggtcatcggaccatgctacgccaagttcatggccatccccaactacacctacctcaagctcaagatgtcgggcccgaacgggatcatcaccatcggatccacgtaccgccacgcgtacgaatgcgacgtggagtgcatggagtacgctgaggccctcgccgagtccgaggccctcatcgccgacctggaacgcctctccaaggaggcgcccgacgtgaagcggcacgctggcaacttcgaaccagttgaggcggtcaagtccgtctctctcgaccccagcaatgatgccagcaagaaagtccagatcggctccgagctcgaccccaaatag

SEQ ID NO: 10231 - DNA, 375 bp, Zea mays
  Clone ID: MRT4577_109334C.1
caaagcaacaccattatgaatatgaagtgtcccactgccaaggcgctttctgtggccaccctctcagctctgctcatcctcctcttctttgtcctgcgatgtggctcttctgcgtcgccatcgccgcagttgtctattgcgaggaggagcagaaggcttctgtggacgccatgccgtgatgccaactcttgctcgacgcctgtgagcgggttcaggcagttcttcaaggcgccagcgacagtgttcgagagcttgaagaagatgcccaagagcaggtccaatccatcacataattaattaggccgaggtcgtcgatgttcttctcactctagcttacttcgttcttttgtagtggatcacttcgcctgctggtct

SEQ ID NO: 10232 - DNA, 3198 bp, Zea mays
  Clone ID: MRT4577_109335C.1
atgaccctgggtacgtccgatacatggccgaggctcgggctacgctcccgaggtaccctaggacatttccgagaccagcgggaacgatttgtaatggaatcccaccggagggaggcaccgagcctcggaccctatcaaaatggatccgagtccagcaaatcccctgcagaggctcgagggctgccctcgcacccggctgcggccaaaacggttgacagcgtcaacgaaccagctcaaaaactcggagcccgaccatgcacccgagctacggccaggccgcatgagggaacgaccaggccgactgaggcatcacagcaagaattaagacctcagaggagtcaaaccactcctccgaggcctcaggggctacacccggcgggagaacatcgccgcccgccccgctccggttgctgtgccaaccacccgggcgaaaccgacaacgaccaagttcagcctcgggcgcaacaggaagctccgcctcgcccgtccctagggctcggcctcggcatcggcctcgggaggagatctccgcctcgcccgaccccagagctcggccttggcctcggcttcgggaggagatctctgcctcgcccgacctcagggctcggccttggcctcggcctcgggaagagtcacgccctcgcccgaccctgggcctcggccctggcctcggaggagccgccgcctcgcccgacctcaagctcagatcgaccgcgccacaagggacacatcatcaccctactcctggctagcgcaggctacgaaggaacaagactgacgtcccatcaagcttaccccggtaacagcacatgcatgtatggtgttgcttctgagaacatgcaattggctttgttgcttcgtcaaatcaaactgagatgggatggcttggaaaacagcgctgctcgccccgctccgactgccgtgccaaccacccaggcgaagactgacaacaagtcacgatcaaccaccgagttcggccccgggcgcaacaggaagctccgcctcgcccgacctcaggctccggcctcgggagaaggtctccgcctcgcccgacccccggacttggcctcgacctcaggctccggcctcgagaggaggtctccgcctcgcccgacccctggactcggcctcgaccttggtctcgggaggaatcacgtcctcgcccgaccccggcctcggcctcaagagaagtctccacctcgcccgaccttgggcttgggccgatcgcgccaacaggggatacatcattaccctattcctagcctgctcaggctacaaggaacaagaccagcgtcccatctggcttaccccggcgacggccccaagaggactgatgacgccagcaccctcgcaaaggatctgctgggcgttaccctcgtaccagagatgacggtgtgctctgcccccgacgcgacttcaccaccgtccatcgaccaagaggtaccgtccgttttccatcccgtaccttttcgattcagcttagatccacctagcgaccccgctatggtgagcgccttcgtaaaggcgtatccaaaccttccgaggtatcgtatgtggtcgacctgggaccgactgacagtcgtctcaatcttcggatcggcgggttccgaggaagaggacgaccccaactctggttgggatttctctagcctcactgaccccggtgccatgcgggacttcatgttcgcatgtgaccactgcctctccggttgttctgacgatggccatgacgttgacgatgagggttacggcccaagtggcgaatgtttccacgtcaatctgggagatcacaacgaaggcaaccacctcggtatgccagaggttgacgatccccctgggcccgcatctcgcgttgacatcccgcgggagctagctgtggtcccaatccctgtgggggtcaggacatacaactcgagcaaatccgcgagatgcaggcccgggtcgacggggaagcaggccggcttgtgcagctccgacagaacatcgaacaggagtgggcaggccaagcactcaccggaggagcctgtcgtcgggcccaagacatccagcgccgcatcatcgacaatgccagggcagcgctgcccccggccctgccgccagcagccaggggagtccctccgagagtacatccggcggtttttgaagcagcgcaccgagctgcccaacgttaccgactcggatgtcatcggggctttcctcgccggcaccacttgccgagacctgcctcagggagagccgaagatagatgcccccgaggcgtccgccctgcggggcatgaagaagaaggccaagaacaagtcgcaagcgaagcgcgacgccgctgacgcgaatctcgtcgctgcgaccgagcacaggaacctttggaaacctcctagaggggccggcgcgttcgacaaaatgctcaaggagccgtgcccctatcaccaggggcccgtcaagcacaccctcgaagaatgtgtcatgctccggcgctacttccataagaccgggcccccgacggaagatggcaagggccatgacaacgacaaggagggcagcaaggaagaggagttcccggaggtccacaactgcttcatgatctatagcgggcaggcggcgaacgcctctgctcggcaccgcaagcaggagcaccgggaggtctgcttggtgaaggtggcagcgccagtctacctagactggtccgacaagcctatcaccttcgaccgaggcgaccacctcgacttcgtgccaggcccaggaaggtgcccgctcgtcgtcgatccgatcatcggcaacgttaggctctccaaagtcctcatggacgaaggcagcagccttaacatcatctacgccgagaccctggaactcttgggggttgacaggtccgaggaagctctcaccttcgaggtcgtcgggttccgaggaacctaccatgcggtgttgggaagaccgtgctacgccaagttcatggccgtccccaactacacctacctcaagctcaagatgccgggcccgaacgagatcatcaccgttgggtccatgtaccgccacacgtacgaatgcgacatggagtgcgtggagtacgctgaggccctcgccgagtctgaggccctcatcgccgatctggaacgcctctccaaggaggcacccgacgcgaagcggcacgctggtgaaagggaaataggctcaaaccttttcctaaatgattttggtggttga

SEQ ID NO: 10233 - DNA, 417 bp, Zea mays
  Clone ID: MRT4577_109336C.1
tgaagcgctcgggccgcccatgccgtcgtctccgttcgacggtgaggcagtgggcacgttagcgatttcagtctagatgtatcctgagtgcgagatccctttcaaacttctgctgattggtgattcgggtggtgggaagtcacgcttgcttcgcagatttgcatcataattcttatttggacaattagttcaccagggttgcggttgagttcaacattcgtacagtggtccacgatgggaaggccatattacttcggatttgggatactgctgggcaagagcgcttcatgacgatcattagcagctactatcgcggtgctcatggaatcattcatgtatctgacgtgacagaccaagaaagcttcaattatgtgaagcaatggttggtctagagtgaacgttatgcaggtgataatg

SEQ ID NO: 10234 - DNA, 692 bp, Zea mays
  Clone ID: MRT4577_109337C.1
gggccctgcggatcgaaccctggtcgacgcgaccgcgcggcgggggctcgtacgcgaccgatggctttgtcgcgaccggcacggcggcggcgcatagccccgacgacagaccctccccgctgccttctccccggtgaggatctgctctcttccttccctttcctatcctctgctctcgcggcggcgagccccagttgggccggtcgaggccggccaacgtcgaaggtgttcggcgtcggcagccgccactccgaggaggacctgcgggacctcgtgcggttccacgtaggcgcggcgccgtccgcgtcggcctgcgtcgacctctgttggaagtgttggaagggtgacgccgccggctgccaagaggaggcgcgggaccacgccgctacagaggatcgacgaggatgcgggcatcgtgctgcacccaaccagctgacaagctaacctctgtcttggcagcaacttggttcaaaagattcctaggtttgctcgtgtgtatactttgatttggttctctctctttttctcctgcggaacgagagagtagcaagcagttcctaagtcatcgagtgctctggcatagtacattatttgctgcaatttgacatgctgttgaattaggcgaccagacgaacaattttcgctctgtgtaaatttgttgttttccaaaaaaaaaaaaaaaaaaagcggcc

SEQ ID NO: 10235 - DNA, 303 bp, Zea mays
  Clone ID: MRT4577_109338C.1
ccacgcatccggcccatttctgcttgaaaagaattaaagctacaggcctattgggggcctgatggttcttacatgcatacaacaccattaatccatgtacttctccatatattaactgatcactttcatttgattcaaagtgaaacaaatacatgatcagcacttccataatttaaatattattactaatatgaaattttagatcctgcaatacaatccatcaattaaggctaatgtacgttgagaataaaatattaccaaatcattttattttctttaaataaggaaaaatttaattcaagt

SEQ ID NO: 10236 - DNA, 426 bp, Zea mays
  Clone ID: MRT4577_109339C.1
gaatccctgggtcgacccacgcgtacgcacacatacctacactctccaactgttcccgaacgtatggtctaactctgttggtggtcatagatgacaatcgcacgagaacaggcaggacattctggcgataccatcattacgtttgatactatctgttggaattgcattggtggcggttctatgctactggaggcttgtcatagctggtgccgttagccgatattgaggatccacactgcctgatctatgtatgcatagtactaacatcactattgtgttcacattgttgatggagatcaccgaccccaacatcagaagcaaacccgtaggcggtgatgtgacttcagttgatagtttacggcagatgctacatatcggattgctggtactgaaagacataggcgctctgatgaatgattgcaacag

SEQ ID NO: 10237 - DNA, 667 bp, Zea mays
  Clone ID: MRT4577_10933C.1
ctcgaggccggccgggacttctgtctgactgtctccacggctgccgacgagccgtgcaaccgaactcattgcacgaggactcgcacagatcggtgagcgagcaagcgagagatggctgggaggctaaccgcggcagggtcccgcatcctgggcggcggcggcgcacgcgccgcggcttccgccctccgacaccgcgccggcatgggcctccccgtcggccgccacatcgtccccgacaagcccctccccgtgaacgacgagttggtatgggataacggcacgcccttcccggaaccctgcatcgaccgccttgccccgcacatcggcaagtacgaggcgttggcgtggctgtgcggagggctagggttcttcgctgccctcggtatggctgctgttgtgaacgacaaggcctccaatataccatatactcccaaagtctacccgtacgacaactttgacaaggcactttgatgaatatgatctgagatctatatctcctttccatcagagagaagcagggggaaacttatttaccatggttttttttgtgactgccttgttgtaaaccaccgttatgtgatttgctgaaattgtgaagcatgggtttgccctacaataatgcaaccagctctgaacttattctaaaaaaaaaaaaaaaaaagcggcc

SEQ ID NO: 10238 - DNA, 873 bp, Zea mays
  unsure (1)..(873): unsure at all n locations
  Clone ID: MRT4577_109340C.1
aaccgggaccgggcaattcgtccagcagcatggacgcgcctccgccctcacagccggacgatgctgctccggcgccctcctcgaccttggcttctgctccctctccggcgccaacatccaacccacccacttccgccgccgccgccgcacccgccccggactccgccatcgccaaccctaacccgaacctagccacggcctcctcggcatccgttccggccgcatcctcctcggctcctcctataccacgcggaggggttgtcctgggggtgcccgcgccgcgttccgcacagacgcccgctggttacactgggttcgttccgccgcctccgcttgctcaccagtttggatcgatgcatcgaggccccgaccagcccccgccttcatcttcacagtttaggcaaccttcccctgggactcagaatattgggattgttggatcactcaacacatcccagattagtccaggcacaatatctggtccgcagaagcccagacctggtcttccatcatcaactcctattccatctggtagccaaatgctaggttcacaaagacccccatctcagtctttaatgaggccgatgactgtgagttctccttcgctggcttcacaacaaactccacaaagttcgtcttcaacatttaggccccaacagaggccacaagtttcacaaccaagaccacaacaatctcaacttgttactccatctcaacagaacacaattttaacacagcagcagcagcagcagaaacaacaacagagtgcctcacatcanaatcaacaaattgctgcccctaaaatcagccacagctttctcagcatccaactgctcgtactccaaatatcatgacaccaaagncctgattgct

SEQ ID NO: 10239 - DNA, 2860 bp, Zea mays
  Clone ID: MRT4577_109341C.1
cctcgaggccggccgggccggggtcttctgtagatagtctctgccccgcacgcatgtgaccgaacaaccgggaccgggcaattcgtccagcagcatggacgcgcctccgccctcacagccggacgatgctgctccggcgccctcctcgaccttggcttctgctccctctccggcgccaacatccaacccacccacttccgccgccgccgccgcacccgccccggactccgccatcgccaaccctaacccgaacctaggtaccgtcgcaaaccctgctcaaaccctagaggctcctggccccagctctgccgccgcgcggccgccgccgccgcgaatgagaacgccttacacgcacctggccgcgcccatcacgatgtcgtcctcctctgctgccacagccacggcctcctcggcatccgttccggccgcatcctcctcggctcctcctataccacgcggaggggttgtcctgggggtgcccgcgccgcgttccgcacagacgcccgctggttacactgggttcgttccgccgcctccgcttgctcaccagtttggatcgatgcatcgaggccccgaccagcccccgccttcatcttcacagagacccccatctcagtctttaatgaggccgatgactgtgagttctccttcgctggcttcacaacaaactctacaaagttcgtcttcaacatttaggccccaacagaggccacaagtttcacaaccaagaccacaacaatctcaacttgttactccacctcaacagaacacaattttaacacagcagcagcagcagcagaaacaacaacagagtgcctcacatcaaaatcaacaaattgctgcccctaaaaatcagccacagctttctcagcatccaactgctcgtactccaatatcaatgacaccaaagcctgatttgcctgctatacaaaatgttgctgttttacaatctgtggatacagctgcaactgatgcaaatgctagtgaaactggtactcgattactcaccaagagaagtatacatgaattagttgcacagattgatcctaatgaaaagctggatcctgaagttgaagatgttcttattgacatcgcagaagattttgttgagtctgtcacaacttttgcttgttctttagcaaagcataggaagtcaagcacattagaagcaaaagatgtactcctacatgcagaaagaagctggaatatcaccttgccaggcttcagtggtgatgaaatcaaactgtacaagaaacagcacataaatgatattcacagggagaggcttgctctggtacccactttttaagaatttgagcaactacccatctaatttcatgcttgattatgtgcatatagccgtacatctcccatcttatggttgactagttagttgttcgtgcattgctacggtttttatatatcacatggatagactttattttaataaaacacaaaaatatgtgttctattggttaggtgggtgtgaatgtggagccaacgaccagtgaaactggtactcgattactcaccaagagaagtatacatgaattagttgcacagattgatcctaatgaaaagctggatcctgaagttgaagatgttcttattgacatcgcagaagattttgttgagtctgtcacaacttttgcttgttctttagcaaagcataggaagtcaagcacattagaagcaaaagatgtactcctacatgcagaaagaagctggaatatcaccttgccaggcttcagtggtgatgaaatcaaactgtacaagaaacagcacataaatgatattcacagggagaggcttgctctgataaagaagtccatggcgactgacacgagaaactctgctgcccaagctgcagctaaccagaaaaatcagactccgaaaccacctgccccagcttccccgtgaaacatgtccacaggccctgcaaacacagtatcagtgtaccacgcatcacatctgtggtgttcggacagttgtcggttgtatgttggtagtgttgcaatgagtacatgtatagattattctgtcgttactcgttactaggatctggttagaatgttgtttagttaatccaatgcatggtttctgttattgtatattacttctgttctaatctttccaccaaaaggccatgatcatactttaatgcacttaacacaatgtatttattaaaacatttaatctaagacaatgtatttaagagtgtcttgtgtatgttttatgcttgaaaaaccataagagagggttctatgttgtacatgccctaaatcgcccacaatttttgggcggagcggaggtagtatattgaatgttgtttcgaaaaataactatctgcctgagcattcttctcactgttgaatctgctacttgcatcggctgccgtcctttcatgttgggttgatgtgttattctctttttcttgtaatgatcatcagataaagaagtccatggcgactgacacgagaaactctgctgcccaagctgcagctaaccagaaaaatcagactccgaaaccacctgcgccagcttccccgtgaaacatgtccacaggccctgcaaacacagtatcagtgtaccacgcatcacatctgtggtgttcggacagttgtcggttgtatgttggtagtgttgcaatgagtacatgtatagattattctgtcgttactcgttactaggatctggttagaatgttgtttagttaatccaatgcatggtttctattattgtatatcacttctgttctaaactataaatcatttagggctagtctgggggccacaaaacctgagtggattgaaggggctaaaatcctcccattcaattttaaataagaatagtatttttt

SEQ ID NO: 10240 - DNA, 347 bp, Zea mays
  Clone ID: MRT4577_109342C.1
caaatttgctcaaacaatagttaaacttggtatggagtcataacatggtcctggttggtcgagataaaaagtttagatgattataaagaagtatgaatataggtgcttcaaaaatggacacttctcactgtacgtttcatatcattgaactacaacttcacatcttgagctatatttgtaactttttttatgttttttgcctcaaaagtgcaccaagtgttcatctaactgttatagacttaattcatgtaaagatgtccctattttggaccatttactaatttatatgcttcaaatgcctttccaagcgaaataaataaataaatgccaaatgtgctcaaaaatag

SEQ ID NO: 10241 - DNA, 393 bp, Zea mays
  Clone ID: MRT4577_109343C.1
ctgagcagcggtgtcctgagtccgtgaccgtgttctctcccccgcgcttcccttcaacgccggctccctaaagatccgccgctggtctgccctctgctcgtcgattcggcgcctcctctccttcacgcgcccacgctgccgtcgcctcctcctcactgtcgtccatgccgctgtagccgcctacggccatggccgctggagccagcgactatttgacggtggagtaccactccagagagctcccctctttcctctccgacgacgagggagccaccgccggcagcggcgtcctcgtatgcagaacagcagaggacgctcgctcgctctgcgcgcatcgaaccaaaaaccacacctcggcggcagctatataaaagccttcacctgacccgggcg

SEQ ID NO: 10242 - DNA, 735 bp, Zea mays
  Clone ID: MRT4577_109344C.1
tgagtactacatgtcccagcagctgaccgatctaggcgacgtctacagcttcggcgtggtcatgctggagctgatcgtcgcgaagcagccgatcgagaagggcaagtacatcgtccgcgaggcgaagagggtgttcgacgccgacgacgccgagttctgcgggctcaaggacatggtagacgcaaggatcatgagcaccaataaccacctcgcggcgttcggcaagttcgtccagctggccctcaggtgcgtcgacgaggtggccacggcccggccgtccatgagcgaggtcgtcaaggagatcgagatgatgctgcagagcgaggggctcagcagcgcctccacgtctgcctcgacgtccgcgaccgagttcgacgttacgaagggggctcctcgccacccgtacaacgatcctcccctccctaaaaaggacaaggacgtgagcaccgactccttcgagtacagcggaggatattctttccaatcaaaggtcgaaccgaagtagctgatttctggattgaggctatcttcttcgttcggccttttcctttcccaacaattggcttgacgaaatgaagagagatatgggtaacctttttattgcattgagcttaatacttgtgggagactagtgaatttgtatggttaataggagacgcatcaagatcaaactcgtctgcctctaaaaaaaaaaaaaaaaaaaggcccctactagaggaataccaaccgtatcat

SEQ ID NO: 10243 - DNA, 539 bp, Zea mays
  Clone ID: MRT4577_109345C.1
gtatgttgggttttttttttttttttttttttttttttttttttttttttttttttttttttttttttttttttttttttttttttttttttttttttttttttttttttttttttaaaaaaaaaaaacatcccccttttcaaaaaaaaagagagggggggggactttttccccccaaaaaatttttttcccccagggggtgaaaaataaaactagttcggggacccccaaaccaaaaaattggtgccaaaaaaaaaaaatgcatatgcaaaaaaatttgcaaaactaaaccggggaaaaaacccccaaaactaaacaaatttgaaaggatcccctttaactaaaggcccccctgtttgacccaaaaataattgggaggttaaaggaaaaaaacctttccttccccactgggggccgaatttttttttgaaaaaaaaccatctccctttttaaaaaaaaaaaaaagaaatgggggccaaaaaaacccaaaggttttccttattccactggaaattacaggtcccaggttttttccaaaa

SEQ ID NO: 10244 - DNA, 681 bp, Zea mays
  unsure (1)..(681): unsure at all n locations
  Clone ID: MRT4577_109346C.1
tctctcctacttgtgtgttctgttctgttcaccagaaagaaactagttcttccaacacagcggaagccggaggccatgggcgcccggcaggcggcggcgttcctgctcggctgcgtcgccgcgctcaccgtcgtcgtgctgctgctgcagcgccgccccgaggagctcaccaccagggcaccactgctgcaagtctccggagggggaggggcagggccgtcgtcgtcgccgtctcagtccacctcctcctcaccaccagcacataccaataataccactgccgcagccggcgatccacgccttccgccgccgcccaattccacggacgaccatggcgaggacgaagaagaagaagaggagttccgcggctccggnggcgggcgggtggtcgcgcgcgngcgaacggcggacgacccggacggtgatcatcacgtgcgtcaaccaggcgtgggcggcgcccggctcgctgctggacctgttcctggagagcttccgcgtgggcgacggcacggcgcccctgctgcgccacctgctcatcgtggccatggacgccgccgccatggcccggtgccgcgcgctccaccgcactgctacctctactccccggnccgcggcgtcgacttcgcgcccgccaagcccttcctgtccagngactacctggagctcgtctggagcaagctg

SEQ ID NO: 10245 - DNA, 280 bp, Zea mays
  Clone ID: MRT4577_109347C.1
atttgaatttgccatttgtgaagaaagttattaatcacagggctctggctggtggttcttggtggggtcctgtcaacaaatttgtgactgtgcttaaaccgtttgcaaaggtatttgctgatcgacgataatttggaacaggtattgtagaatcattcactgataccttattattagtgaagccccatatatgtgataatgctctgatacattcaatgtgtgcatgacaagcagaccaatttgaaggatattgatttgctcagaatgcattcatcttttg

SEQ ID NO: 10246 - DNA, 397 bp, Zea mays
  Clone ID: MRT4577_109348C.1
aaccgggggggggaggtaaaaaagggaaataaaccaccggtccgaaacgggaggccacttttccataaaaagagaaataaaaaaagttggcacaaatgggcgaaaaaaatggttccgggggaaaagggttttatggacaacactccaaacaagggagggagcagggaacaaaaattagaccccctggggagccccaggaggccaaaaacacacaattgggggggggaccaaattggaccaatcacagacagaaaaggtgtcccacacccggaaagaaaaaataggccaacccggggggaaaggaagtatgagtatggggcaccggggggatccggcgtaaaaaccctgacaagggcaaaaaaaaggggccctttaccccacgcccaaaaaaaagacc

SEQ ID NO: 10247 - DNA, 290 bp, Zea mays
  Clone ID: MRT4577_109349C.1
atgacctgctctatctagcgcaggaaggtttcaaagccgagggtcacccagctagtgctttacaattccgacaaggtagtagctgatccatcgatccagctcaacacgaccgtcggaggaggcaaggtctgagcttctagttcagcttctcaattagaggagatgatcttgtccccacctcaccttggtcgacgccatgccttgaagggatgcctgcttatctgcagcctcctctctggacactgcgagcctgttgggcatgaggaacctccatgcttgtcagaggagcg

SEQ ID NO: 10248 - DNA, 842 bp, Zea mays
  Clone ID: MRT4577_10934C.1
cggaaaaacccacgcggcggcgactcgccatcgtcgtttttttttcggccctacttctgtctccacggctgccgacgagccgcgcaaccgaactcactgcaggaggactcgcacagatcggtgagcgagcaagcgagagatggctgggaggctaaccgcggcagggtcccgcatcctgggcggcggcggcgcacgcgccgcggcttccgccctccgacaccgcgccggcatgggcctccccgtcggccgccacatcgtccccgacaagcccctccccgtgaacgacgagttggtatgggataacggcacgcccttcccggaaccctgcatcgaccgccttgccccgcacatcggcaagtacgaggcgttggcgtggctgtgcggagggctagggttcttcgctgccctcggtatggctgctgttgtgaacgacaaggcctccaatataccatatactcccaaagtctacccgtacgacaacttgagagctgagcttggtgatagaccatagaaggttttttgtctgtttgacaaggcactttgatgaatatgatctgagatctatatctcctttccatcagagagaagcagggggaaacttatttaccatggtttttttgtgactgccttgttgtaaaccaccgttatgtgatttgctgaatattgtgaagcatgggtttgccctacaataatgcaaccagctctgaacctattcctgatgctacagattcgagtattaacaatccgtcaataaaaaaaaaaaaaaaaggcgctggcccacagtaggcaccttctatgtataccatttcctgccccacccggggccagaattttttttgttc

SEQ ID NO: 10249 - DNA, 374 bp, Zea mays
  Clone ID: MRT4577_109350C.1
gagctttcttgtcggcggccgcccgcgatctagaacttggtattttgcatgtttttattttatgatcacgggaaacagatgggaccaagggacagttgaaactttggtgggatagaatgcgacccaaaggcacacttttcaacatgtttccaccgttcttggttgattcacataagctgaacaaaaaagctgctcatgcatgcctagtatgcatttaaagctgtaaaagtctcttggctctctacacgctgtattactatgtacactccactccgcgcttttatctgtaccccaagtaatacatcttgctggtgaaaggcttaatcctgacaccttggggggaacgtgaacctgtgcataaaaggtcaatgagc

SEQ ID NO: 10250 - DNA, 395 bp, Zea mays
  Clone ID: MRT4577_109351C.1
cgggcccgaaccggcccggaatcccaggctcgcccaaagcggccgagcactttttactattctacacgcccaactattagaaataagcgggcctggtgtgaggcgattagcaggctgtacccctcatggacaagatcaaaagcgggatcaatgggtttggcatgatcagaaggctggtggacaaagcggccctgcatagcgacgacgacgaactcgtcgtcgagaacaacccctacatcagcaccgattacatgacctacatgtacaagtatgacactgtgcacggacagtggaagcaccatgaggacaaggtgagggactccaagaccctcttctttggcgagaacgagagtagctgggttgggctgcccgaaccctgaggagaacccatgggg

SEQ ID NO: 10251 - DNA, 568 bp, Zea mays
  Clone ID: MRT4577_109352C.1
ccggccgggatcttcatagagaccacaagcaagcaagatcctttatcagacctaatgaattacggcaacaataacccggggcactagctgaacgagcacctagtgtgtgaggttgtcagtgatctcgtctaccacctgctgccttctcgccagaagtacatccaccgcctctggagctgctacctgttcatgatcatatccacgccccagctgcaaggacgcgtgcgctacatggacatgcacctcactgatacgcaatcccgatgcaccgtggacgaggcctgccgccgtcgctcccgatgaactgacaagcgtgcgctcacgacaactgaagtggtcaaaatcgacaactaattaaggactcagagagggcgtccacaatacatactgatcttgtcataattatatataaatacgatgagcgtggacaacgctacccacatgcatgctattagctgcctcctaatatatatatatgatccgactccatactgccaaattgtttcccccacttcattatatatattccatcactttaatttaatggacaaccgtcactgctgtttct

SEQ ID NO: 10252 - DNA, 2508 bp, Zea mays
  Clone ID: MRT4577_109353C.1
gtcgcggttacgaggccggccgagaggaaagggcggacctgctgccgccgctgcgggaagagcaagtgggagagcaaggagtcgtgcatcgtctgcgacgcgcgctactgcggccactgcctgctccgcgccatgggctccatgcccgagggccgcaagtgtgtcacctgcattggccagcccatcgacgaggccaagcgctccaggctcgggaagggctccaggatactgtctcgcctgctcggccccctggaggtcaggcagatcctcaaggtcgagaaggagtgccaggcgaaccagctccggcctgagcagctcctggtcaatggtttccctcttgacgacgaggagatgaccgatttgcttagctgccaacgacctcctgggaacctcaagcctggaagatattggtatgataaggagtcaggattgtggggaaaggaaggtgaaaagccagacagcatcattagcactaacctcaactttaacggaaagcttcagcctgatgctagtaacggcaccgctcaggttttcattaacgggcgggaaattacaaagattgaactgagaattctaaagattgcaaaagtccaatgcccccgtgatactcacttctgggtttaccatgatggtggctacgaggaagaaggacaaaacaatatcaaagggaaaatatgggagtcacctttgacacgttttgcgtgcgccttggtttcactaccggtgcctcctacaaactttgatgcgacaaaagatgaagccccttattcatcaaaaactgtacctgactacttagatcataaaagaatacaaaagcttcttattcttggatctcctggagctggaacaagcaccatatttaagcaggctaagttgttatacggcaatagatttactgatgaggaacttgagaatatcaaactaatgatccaaagcaacatgtttaagtacctggggattctgcttgagggccgggagcgctttgaggaagaggctttggctgtaccaaatcacccaagctcagtgggcgatgatcctcagcaagatgaaagtaaatcttcaagttccaattcttgcatctactcgataaatgcaaaactgaagaagttttccgattggctcctggacatcatagcgacaggagacctagatacattcttccctgcagctacccgtgaatatgctccagttgttgatgagttgtggaaagatcctgccattcaagcaacatacaaaagaaaggatgaattgcattttctccctgatgctgctgagtacttcttgagcagggctgttgaagtatcaagtaacgaatacgaaccgtcagagaaagacgtgatatacgctgagggagtaacacaagggaacggattggccttcattgacttcaccttggatgaccggagccctatgtcagaatcctttggcgacaaccacgatgcgtaccctcaacaaccagtaaacaagtaccagctgattagagtgagcgccaagggcatgaacgagggctgcaagtgggtggaaatgtttgaggatgttagcatggtgatcttctctgtagcgctcagcgactacgaccagctcggagccccagcgagcggcagtagcaggacactcgtgaataagatgatccaaagcagggacctgtttgaggctacaatcaggcagccgtgcttccgtgacacgccgttcctgcttttgctgaacaagtacgacgcgttcgaggagaagatcgggcggtccccgctgtcgtcgtgcgagtggttcggcgacttctgcccgctgcggacgcaccacaacagccagtcgctggcgcagcaggcgttctactacgtggccatcaagttcaaggacctgtacgcggcgagcacggggcggaagctgttcgtgtggcagacgcgcgcccgcgaccggcccaccgttgacgaggccttccgctacgtccgggaggtcctccggtgggaggacgagcgtggcgtcgccgggtactgccccgacgagtccttctacagcaccacggagctcagctcgtcccgcctcatcgccgctgcacagtgactgtcccagcgttgttttgtgtataatgatcgtatgcttgcttgtttcccgaacaaatcaaatgctatcaaatatagtgatctgagtgatgagcagaaaaaaaaaaaaaaaaaaaaaaaaaaaaaaaaaaaaaaaaaaaaaaaaaaagtccttctacagcaccacggagctcagctcgtcccgcctcatcgccgccgcacagtgactgtcccagcgttgttttgtgtataatgatggtattcttgcttgtttcccgaacagatcaaatgctatcaaatatagtgatctgagtgatgagcagaaaactcgtattgtccttttggtgtatatgttgccgatgtccccttctcttctgattaggtgagtactggtgcgttgcaacgggaacatataataacatactcccccatatacaaaatgtgtcttataatgatataaaaaagaaagaag

SEQ ID NO: 10253 - DNA, 377 bp, Zea mays
  unsure (1)..(377): unsure at all n locations
  Clone ID: MRT4577_109354C.1
atggtggggaaattgttttttttacccttttgtttttttgatgggagaagatgttttttattaccattgttcttactttatattcaaccaaaccccaaaggcttttggccaaaattgcgattcattcggaacccaaaaaaaaaacccgaaggcactgcccatcccgggggggggcggggccaaaaaaacccgacctggaacgggatcaccaaacccctcttgggggttcaaacaaaaccccacataagttatanttgtgccaccccggcctagggtcctccccaacccatatttgaacccattttttttcgggcccccatttaaaattcaacaaagaaatgcccccctccaggtgtttttttttgaatcaagggggt

SEQ ID NO: 10254 - DNA, 382 bp, Zea mays
  Clone ID: MRT4577_109355C.1
ttatcaggaatggcaggtgcatgaggctgatgatctgcttacaaagcgcttgacggtgatggacatggacaaggctgttggtgctttcaacacccttattgctgcatatggacaaaccggtagggtaactgatgcaaggaggttattttctatgatcccaaaaacacaaaaccagcacaaggggcataagaggatggtgtttgagaggaatgttgtgtcatggaactcgatgatgatgtgctatatcagaactggggatgtttgctcagctagggcattgtttgatgagatgccacataaggacttggtgtcatggaacactatgatagcagggtacactcaagcctcagagatggaggaggcagagaagctgttttgggaa

SEQ ID NO: 10255 - DNA, 276 bp, Zea mays
  Clone ID: MRT4577_109356C.1
gcacaccttattacacaaggaaccatttgttcacactttcattaatctcgcttctttgaagagtgcagtagcacgaagctgcggtgcgccatattcttaccaagcacctctaattcataatccattctctcaaccctgctctatgataaaggtactaccccgacccattttcgtgcaattcgcccccaagatcccgttccatttactcacccctaccgaccgacataccgtcgtggcccatctgctgattctccatccatcgaacatcaagctcaa

SEQ ID NO: 10256 - DNA, 265 bp, Zea mays
  Clone ID: MRT4577_109357C.1
cgctaacgcgatgtccactcaggcattcacgctcgatgcctaacccgcaaggcccggtgatccgaggcggcggcatccgatgtcatggagccctcatgcgtcatccacagtggctcggcagagcggtggcgcgcggaggcgtcgcgggcgttccagcactacctggaccgcgcggcgccgcacacggcaaaacgggcggccgtcacgctcgtggacgctgcggtgtacgcgcttgcggtctactacgtgcgcagcttgtacgtca

SEQ ID NO: 10257 - DNA, 201 bp, Zea mays
  unsure (1)..(201): unsure at all n locations
  Clone ID: MRT4577_109358C.1
cggcttcaggtctgtgagtgctcctacgtcctttgtcacagnatgagnatatatacatctattccagacctactctgctagtagggtctatgtcaaatataggtcgctgcatatatcagaataagaacttttgtacaattacaaaaaaaaaataaaaaaaataaacaaaaaaaaaaaaaaaaaaaaaaaaaaaataaaaat

SEQ ID NO: 10258 - DNA, 2352 bp, Zea mays
  Clone ID: MRT4577_109359C.1
tcccctcctgcacgcaacctcatctcgtcctccagatcctggatggccgtcctccttgataccttgcctcgcgagtgctctcggtgagctactttgttttgatttatcaggaaatccgtttgcttcatgttatgcaggctcagatctgattgctggattcggcatcttacgggcttgaatagagctaggactgggagaaaacaacaaacccgcgttggatcctgtatcggttagtccttgccttcaaggttcatgttgttttgttttggtggtcgagcatcgcatgttctgcttctggttccagatctggagaaatttctaagtcgtcgtcgtcgtcgtcgttcggttcggagcggatctgaggcgacgatggctggaggcggcgggatctcttggtctgcagtcctgcttcacctcgatggatgatgtctctgcgctgataattattggatcaatttcgataattattagtagatctatgagatatgccgcctggaagaggcgaggtaagctgcagcatgtaaaagtctgcgtgcgtcgacagcaaaaaagagaaaaaaagatgtgacatcctagaggaggcctttgccatgatgggtgcgctcgcatggcaggccaggtattaataaaaagatgattattgtgtgccgggggaggagatcgcacgggggttgatgtttttggccccggggtctcctccctcatcttgttccgtgttcctgtatccgttgtttccgcgcctgttggtccgctgcgcacgccggatttttgcatcgagcacggagatctacaacaaaaacatggagctacgacgcgactcccaaggtacaatcggtaattatgttcaaacaatttttaagtcgttctgcgctccttctattacgagcaacgttttatattctgtgcttgcataatgaatcgaagaaatcctgacaccaatcgaactgaagatcctgaaacgcacgttaataccgttgacgtccgcttcacccagctcgattttcagtcttgtaatactaatcgctccatgagtctgaagtgtgcaaaaatttaggtcgcagctacacaaatttacatgctggttctgttcaacccgtgaatctcctaaggtcacagcgtttttatttcattctatattatatttcagtctggactaatgttgagatctccatatgtatctacgtctaagcatttttcatttgtatttaccatgttggtcaattgggatatttgtttcttgtatgttagcatgtttgaaccatagcaattggtggacgtgtgtagagaagattgcaaaactgcagtatgatggattccactattcatcaaccgagatcatggcgcgcttcaatcgtggctacgctgatggggaattgatccgttatggctcgtggctgtggagatgtggaactcattggttatagtgtgcttcaatcatgggtcatggcgatgctgatggaactgatttgttaccaaggtttaagttttcgctaccgttggacggcctgactggtactttgccctgttgactgtttgagaacgtactgcccaggtttacttaatacttgctgctttttgacggtactgtacatattgttcgacaatttatttcttggcagttcaattcgtccatttagaatttctaggggcacgagagcatgtgttaccctggagatcaatttcatgctgctttttgtaattgatcatgctgctttttgttacaaagttccctattctattttcaatttgattgagggttgcaaaattcatggcgttgtgagggaattgattccagtgaaggcgatggcgactggtaatttgatatcggtgggttgggaattagactatctccaccagattgtctatattcaaattacgctctacaaacaatataatttacactatgggtctactatattgtagattgtactgtttataaattgtagttttaatatctaattgtagattgcattgtttataaattgtttatagattgtttataaattgtaggtgttttaattatatatggtcattcatataatagagttttgggattaagggcccctttggtagggctctggcttctccaaaaacggctttaactctggctcacgagggattgagggcaggaccaaaaaataataatctggactggtgggaggactatagtgcaaaaataacgtgagccgaagccgggtgagccacttttttttagttcattttggaaaagtacttcactggtgaagccatctgaaaaagaggtgtttgacataacttttgcatgagccagagccgaagctgaaaaacattttttatcatatgcagcagagtatctttttaaaattttagttt

SEQ ID NO: 10259 - DNA, 691 bp, Zea mays
  Clone ID: MRT4577_10935C.1
ttttaaaaatcttttttttttttttttttttttttttttttttttttttttttttttttggcttttttttttttttttttttttttttttttttttttttttttttttggcaaaaaacattgcccccaaaggggggttaacccggagcattccaaacattaaagcccccctatttatggaaaccattattttagcaaatcccaaaaacaaaagttaaaggggccccccctttgccgggggagaattttttaggggggaaaaaaaaaggaaacattccccggtggggggggggattaaatttcctatttcccaggtgggggaaagaaaaaccaaaaaaaactcccatgctttaagggccccccccccccaaaaggccttgaaaaaaggctgttaacgggggggcccactgaactttttgggctccccccggaattttggggccctcctcgaacccccccggggaagggggagcttgtttccggggcattttttcctggaggggggaaaaaaaaggcaaaggcggccccccgaattaatttatttccatgtttgaaaacttggaaaaaggccttgggggaaaaactgttttaaaagccttgcactgttttggggccaaggagtcggggaaccccaccgggaaagggaggtacagcttccccttaaaaaaaggcccttggaaaatgggcacccc

SEQ ID NO: 10260 - DNA, 1248 bp, Zea mays
  Clone ID: MRT4577_109360C.1
cattgggtacctcgaggccggccggggtcgataaccagaacaaccattgttggacgcgttcccctcctgcacgcaacctcatctcgtcctccagatcctggatggccgtcctccttgataccttgcctcgccgagtgctctcggtgagctactttgttttgatttatcaggaaatccgtttgcttcatgttatgcaggctcagatctgattgctggattcggcatcttacgggcttgaatagagctaggactgggagaaaacaacaaacccgcgttggatcctgtatcgatctggagaaatttctaagtcgtcgtcgtcgtcgtcgttcggttcggagcggatctgaggcgacgatggctggaggcggcgggatctcttggtctgcagtcctgcttcacctcgatggatgatgtctctgcgctgataattattggatcaatttcgataattattagtagatctatgagatatgccgcctggaagaggcgaggtaagctgcagcatgtaaaagtctgcgtgcgtcgacagcaaaaaagagaaaaaaagatgtgacatcctagaggaggcctttgccatgatgggtgcgctcgcatggcaggccaggtattaataaaaagatgattattgtgtgccgggggaggagatcgcacgggggttgatgtttttggccccggggtctcctccctcatcttgttccgtgttcctgtatccgttgtttccgcgcctgttggtccgctgcgcacgccggatttttgcatcgagcacggagatctacaacaaaaacatggagctacgacgcgactcccaaggtcgcagctacacaaatttacatgctggttctgttcaacccgtgaatctcctattttggaaagcatgtttgaaccatagcaattggtggacgtgtgtagagaagattgcaaaactgcagtatgatggattccactattcatcaaccgagatcatggcgcgcttcaatcgtggctacgctgatggggaattgatccgttatggctcgtggctgtggagatgtggaactcattggttatatagtgcttcaatcatgggtcatggcgatgctgatggaactgatttgttaccaaggttaaagatttcgctaccgttggacggcctgattggtactttgccctgttgactgtttgagaacgtaccgcccaggtttacttatacttgctgctttttgacgctactgtacatattgttcgacaatttatttgacagttcaattc

SEQ ID NO: 10261 - DNA, 273 bp, Zea mays
  Clone ID: MRT4577_109361C.1
gggacaaaaaaaatgccggcccattcattagttggggttttggtaataaaagacaagacgtgttctggaagcctgttttttaacaaacaaggggagggggcatttgctggattacaggggaagactaaaagcttgaaaatagattcacagcaaggttgttggtccacgggttatttgtttaataaaacaacctggacatacattttttcggaccccccaagaaaaaaaaaaagggaacttggaaatccgagcgaagggggtccttatttcaaa

SEQ ID NO: 10262 - DNA, 325 bp, Zea mays
  Clone ID: MRT4577_109362C.1
cccctccttcacgcaacctcatctggggatccagatccaggatggccgtcctccttgagaccttgcctcgccgagtgctttcgtccttgcctgcaaggttcttgttgttttgttttggtggtcgagcatcgcatgttctgcttctggttccagagctggcgaaatcgcgaagtcgttgtcgttcggttcggagcggatctgaggcgactatggctggaggcggcgggatctctttggtctgcagtccctgctccaccttgatggatgatgtctctgctctgataattattggatcaatttccatcattattagtagatctatgag

SEQ ID NO: 10263 - DNA, 1693 bp, Zea mays
  Clone ID: MRT4577_109363C.1
cgcgctgcataccattggtggacgcgttcccctggtgcacgcaacctcatctcgccctccagatccaggatggtcgtcctccttgagaccttgcctcgccgagtgctctcggtgagctactttgtttcgatttatcaggaaatccgtttgcttcatgttgtgcaggctcatatctgattgctggattcggcaaacccgcgttggatcctgtatcgagctggcgaaatcgcgaagtcgttgtcgttcggttcggagcggatctgaggcgacgatggctggaggcggcgggatctcttggtctgcagtcctgctccacctcgatggatgatgtctctgcgctgataattattggatcaatttcgataattattagtagatctatgagatatgccgcctggaagaggcgaggtaagctgcagcatgtaaaaaagagaaaagatgtgacatcctagaggaggaggcctttgccatgatgggtgcgctcgcatggcaggccaggtaataataaaaagatgattattgcgtgcctggggaggagatcgcacgggggttgatgtttttggccccgggttctcctccctcatcttgttccgtgttcctgtgtccgttgcttccgctcctgtcgatcagctacgcacgccggatttttgcatcgagcacggagatctaccacaaaaacatggagctacgacgcgattcccaaggtacaatcggtaattatgttcaaacaatttttaagtcctcctgcgctccttctattacgagcaacgttttatattctgtgcttgcataataaatcgaagaaatcctgacaccaatcgaactgataatcctggaacgcacgttaataccgttgacgtccgcttcacccagctcgattttcagtcctgtaataataattgtgaactccaatgaacttcaccaaactgagttactaatcgtcccatgagtctgaagtgtgcaaaaatttaggtcgcagctacacaaatttacatgctggttctgttcaaccagtgaatctcctattttgaaaaggtcactgcgtttttatttcagtctatgttatatttctgtaatattcagtctggactaattgcttcgggactaatgttggagatctccatatgtatctacctctaagcatttttcatttgtatttatcatgttggtcaattgggatatttgtttcttgtaagtctgttagcaattggtggacatgtgtagagaagattgcaaaactgcagtatgatggattccactattcatcaatcgagatcatggcgcgcttcaatcgtggctacgctgatggggaattggtcagttttggcgtgcttgaatcgtggctgtggagatgtggaactcattggttatattgtgctttaatcatggcgatgctgatggaactgatttgttgccaatgttaaagattttgctatcgttggacggcctgattggttactttgccctgttgactgtttgagaacgtaccgcccaggtttacttatacttgctgctttttgacggtactgtacataatgttcgacaatttatttcttggcagttcaattcatccatttagaatttctaggggcacgagagcatgagttccccttgagatcaatttcatgctgctttttgtaattgatcatgctgctttctgttacaaagtttcctattctattttcaatatgat

SEQ ID NO: 10264 - DNA, 378 bp, Zea mays
  Clone ID: MRT4577_109364C.1
gcaacccttaatcaaattgaaaattaaataggaaacttcggaaccaaaagcaccatgaccaattacaaaaagccacttgttatcgatctgacggagaactcatgctctggggcccctagaagttctaaatggttgcattgtactgccatgaaataaagtgttcaacattgtgtacagtaccgacataaagcagcgagtatatggaaacctgggccgttcgttatcgatccgtaggcacgtcgaagtaaccaatcaggcggaccaacggatgcgaaatctttaaccttggtaacagattggctccattagcctcctcgtgattaaagcacattatagccaatgagctgcacatatccgcagcctcgattcaagcacgcc

SEQ ID NO: 10265 - DNA, 1664 bp, Zea mays
  unsure (1)..(1664): unsure at all n locations
  Clone ID: MRT4577_109365C.1
ccggccggggataaccaagagcaaaccattgttggacgcgttcccctcctgcacgcaacctcatctcgtcctccagatcctggatggccgtcctccttgataccttgcctcgccgagtgctctcggtgagctactttgttttgatttatcaggaaatccgtttgcttcatgttatgcaggctcagatctgattgctggattcggcatcttacgggcttgaatagagcaacccgcgttggatcctgtatcggttagtccttgcctgcaaggttcatgttgttttgttttggtggtcgagcatcgcatgttctgcttctggttccagatctggagaaatttctaagtcgtcgtcgtcgttcggttcggagcggatctgaggcgacgatggctggaggcggcgggatctcttggtctgcagtcctgctccaactcgatggatgatgtctctgcgctgataattattggatcaatttcgataattattagtagatctatgagatatgccgcctggaagaggcgaggtaagctgcagcatgtaaaagtctgcgtgcgtcgacagcaaaaaaaagagaaaaaaagatgtgacatcctagaggaggcctttgccatgatgggtgcgctcgcatggcaggccaggtattaataaaaagatgattattgtgtgccgggggaggagatcgcacggnggttgatgttttttggccccgggttctcctccctcatcttgttctgtgttcctgtatccgttgcttccgctcctgttggttcgctgcgcacgccggatttttgcatcgagcacggagatctacaacaaaaacatggagctacgacgcgattcccaaggtacaatcggtaattatgttcaaacaatttttaagtcgttctgcgctccttctattacgagcaacgttttatattctgtgcttgcataataaatcgaagaaaccctgacaccaatcgaactgaagatcctgaaacgcacgttaataccgttgacgtccgcttcacccagctcgattttcagtcttgtaataataattgagaactccaatgaactgagagttactaatcgctccacgagtctgaagtgtgcaaaaatttaggtcgcagctacacaaatttacatgctggttctgttcaacacgtgaatctcctattttggaaaggtcacagcgttttgatttcattctatattatatttcagtctggactaatgttgaagatctccatatgtatctacgtctaagcatttttcatttgtatttaccatgttggtcaatcgggatatttgtttcttgtaagtctgttagcaattggtggacgtgtgtagagaatgcaaaactgcagtatgatggattccactattcatcaaccgagatcatggcgcgcttcaatcgtggctacgctgatggggaattgatccgttatggctcgtggctgtggagatgtggaactcattggttagtgtgcttcaatcatgggtcatggcgatgctgatggaactgatttgttatcaaggttaaagatttgagaacgtaccgcccaggtttacttatacttgctgttttttgacggtactgtacatattgttcgacaatttatttcttgacagttcaattcatccatttagaatttctaaaaaaaaaaaaaaaaaaaaaaaaaaa

SEQ ID NO: 10266 - DNA, 112 bp, Zea mays
  Clone ID: MRT4577_109366C.1
tcccagttcttctgctcaataagacttcggataagtcgtccatcgccgggagctagtagtcaaagtcgctcgagaaggccgccaagtgccctaagaatgcatagactgactg

SEQ ID NO: 10267 - DNA, 651 bp, Zea mays
  unsure (1)..(651): unsure at all n locations
  Clone ID: MRT4577_109367C.1
ctattcgataaccaagaacaaaccattgttggacgcgttcccctcctgcacgcaacctcatctcgtcctccagatccaggatggccgtcctccttgagaccttgcctccccgagtgctctcggtgagctactttgtttcgatttatcaggaaatccgtttgcttcatgttgtgcaggctcatatctgattgctggattcggcaaacccgcgttggatcctgtatcggttagtccttgcctgcaaggttcttgttgttttgttttggtggtcgagcatcgcatgttctgcttctggatccagatctggagaaatcgcgaagtcgtcgtcgttcggttcggagcggatctgaggcgacgatagatggaggcggcgggatctctcggtctgcagtcctgctccacctcgatggatgatgtctctgcgctgataattattggatcaatttcgataattattagtagatctatgagatatgccgcctggaagaggcgaggccaggcaataataaaaagatgattattgcgtgccgggggaggagatcgcacggggggttgatgttttttggcccccgggttctcctccctcatcttgntccgtgttcctgtatgcgttgctttcgctcctggtggtccgctacgcacgcccggatt

SEQ ID NO: 10268 - DNA, 176 bp, Zea mays
  Clone ID: MRT4577_109368C.1
cccacgcgtccgcccacgcgtccgatcaaaggaaaaaatgaaggcctatcaaatatgtcatgaggcacttattatataacgtcgtcaatccatttcttaactcttctcttttaaacaacagcgaagtctcactataactatatattcagatgactaatactcagaacgatgatgac

SEQ ID NO: 10269 - DNA, 1115 bp, Zea mays
  Clone ID: MRT4577_109369C.1
aaaaaaaaaaccaagaacaaaccattgttggacgcgttcccctcctgcacgcaacctcatctcgtcctccagatccaggatggccgtcctccttgagaccttgcctccccgagtgctctcggtgagctactttgtttcgatttatcaggaaatccgtttgcttcatgttgtgcaggctcatatctgattgctggattcggcaaacccgcgttggatcctgtatcgatctggagaaatcgcgaagtcgtcgtcgttcggttcggagcggatctgaggcgacgatagatggaggcggcgggatctctcggtctgcagtcctgctccacctcgatggatgatgtctctgcgctgataattattggatcaatttcgataattattagtagatctatgagatatgccgcctggaagaggcgaggccaggcaataataaaaagatgattattgcgtgccgggggaggagatcgcacgggggttgatgtttttggccccgggttctcctccctcatcttgttccgtgttcctgtatgcgttgcttccgctcctgttggtccgctacgcacgccggatttttgcatcgagcacggagatctacaacaaaaacatggagctacgacgcgattcccaagtatgatggattccactattcatcaaccgaaattatggcgcgcttcaatcgtggctacgctgatggggaactgatccgttatggtgtgcttggatcgtggctgtgtggagatgtgtggaactcattggttataatggtgatgctgatggaactgattttgctcccgttggacggcctgattggttactttgccctgttgactgtttgagaacgtaccgcccaggtttacttatacttactgctttttgacggtactgtacatacagttcgacaatttatttcttggcagttcaattcatccatttagctaggggcacgagagcatgagttcccctggagatcaatttcatgttgcttttttttgcgaagttccattttctattttcaatttgattagggctagtttgggaacttattcttccaaggtttcctaaggaaaattagttcattttttttttgggaaaaaaaaaaaaaaaaaaaaaggaag

SEQ ID NO: 10270 - DNA, 706 bp, Zea mays
  unsure (1)..(706): unsure at all n locations
  Clone ID: MRT4577_10936C.1
aattcggcacgagggccactgcaattgtcgagttgcaggacatcgtccacgagcgtggtggcactgttcgtctggcctgggttgccatcaagaaccaatttctcggcaacagcgaggcccatgtcgtccacctcgacgtcgtttttcagatctttgtatagggcgacttctccgtcattgtgtattgtcgccagatgaagggcattgtcagatgctcttcgcgacctcggtgagccggtctccaatcgcacccttgttctcaaccttcttcatggcctcaatgagtgctacgggcctcatcggactaggattgtgtgatatgttgtgttcccctccttccagaaggcttggaatgacctcattcttgaggagctcattgagggggcctcgccttcccctacaaccgcacaagctctctacagccttggtcctagcggaccgaccgtctttgcgcctcgagccctccatttctatcgctaggacctcgtctcctcgtcatcctgccctctttggccctcctgctggctatggtggggacaaccgtcgcaggctntagcgtggcgatggaggcccactggaggcggtggttgtgtgttccgtggtttggacccgacagtgcactacagggcgtacaacgtagtgcttttgggagacgacgagggtcgatcgcagctcgatggttcatgtanggcatgatgagacactg

SEQ ID NO: 10271 - DNA, 1271 bp, Zea mays
  unsure (1)..(1271): unsure at all n locations
  Clone ID: MRT4577_109370C.1
ggtacctcgaggccggccgggccgggaaccaagaacaaaccattgttggacgcgttcccctcctgcacgcaacctcatctcgtcctccagatccaggatggccgtcctccttgagaccttgcctccccgagtgctctcggtgagctactttgtttcgatttatcaggaaatccgtttgcttcatgttgtgcaggctcatatctgattgctggattcggcaaacccgcgttggatcctgtatcgatctggagaaatcgcgaagtcgtcgtcgttcggttcggagcggatctgaggcgacgatagatggaggcggcgggatctctcggtctgcagtcctgctccacctcgatggatgatgtctctgcgctgataattattggatcaatttcgataattattagtagatctatgagatatgccgcctggaagaggcgaggtaagctgcagcatgtaaaaaagagaaaaaagatgtgacatcctagaggaggaggcctttgccatgatgggtgcgctcgcatggcaggccaggcaataataaaaagatgattattgcgtgccgggggaggagatcgcacgggggttgatgtttttggccccgggttctcctccctcatcttgttccgtgttcctgtatgcgttgcttccgctcctgttggtccgctacgcacgccggatttttgcatcgagcacggagatctacaacaaaaacatggagctacgacgcgattcccaaggtacaatcgtaattatgttcaaacaatttttaagtcgtcctgcgctccttctattacgagcaacgttttatattctgtgcttgcataataaatcgaagaaatcctgacaccaatcgaactgaagatcctgaaacgcacgttaataccgttgacgtccgcttcacccagctcgattntcagtcttgtaataataattgagaactccaatgaactgagagttactaatcgctccatgagtctgaagcgtgncaaatttangtcgcagctacacaaatttacacgctgntctatattctatattctatattataatttaaggtcgccagctacccgtgaaatctcctattttgaaaaaggtcactgccttttttatttcattccatatnctatattaatatttttggaacattcagncctcgttttatttgcctttanaacttaatgttaaaaatttgtttacctttttctacaattacaatctgggactaatggctttgggaactattgctgggaaaattcctaagtaatttgcgtcat

SEQ ID NO: 10272 - DNA, 2426 bp, Zea mays
  Clone ID: MRT4577_109371C.1
cattgggtacctcgaggccggccgggaacaagaacaaccattgttggacgcgttcccctcctgcacgcaacctcatctcgtcctccagatccaggatggtcgtcctccttgagaccttgcctcggcgagtgctctcggtgagctactttgtttcgatttatcaggaaatccgtttgcttcatgttgtgcaggctcatatctgattgctggattcggcaaacccgcgttggatcctgtatcgatctggagaaatcgcgaagtcgtcgtcgttcggttcgaagcggatctgaggcgacgatggctggaggcggcgggatctcttggtctgcaggcctactccacctcaatggatgatgtctctgcgctgataattattggatcaatttcgataattattagtagatctatgagatatgccgcctggaagaggcgaggtaagctgcagcatgtaaaaaagagaaaaaaagatgtgacatcctagaggaggaggcctttgccatgatgggtgcgctcgcatggcaggccaggcaataataaaaagatgattattgcgtgccgggggaggagatcgcacgggggttgatgtttttggccccgggttctcctccctcatcttgttccgtgttcctgtatccgttgcttccgctccggttggtccgctacgcacgccggatttttgcatcgagcacggagatctacaacaaaaacatggagctacgacgcgattcccaaggtacaatcgtaattatgttcaaacaatttttaagtcgtcctgcgctccttctattacgagcaacgttttatattctgtgcttgcataataaatcgaagaaatcctgacaccaatcgaactgaagatcctgaaacgcacgttaataccgttgacgtccgcttcacccagctcgattttcagtcttgtaataataattgagaactccaatgaactgagagttactaatcgctccatgagtctgaagcgtgcaaaaatttaggtcgcagctacacaaatttacacgctgttctatattctatattctatattatatttaggtcgcagctacccgtgaatctcctattttgaaaaggtcactgcttttttatttcattctatattctatattatatttttgtaatattcagtctcgtttaattgctttcagacttaatgttagataattgtttacattttctacaattcagtctggactaattgctttgggactaatgttggagatatccatatgtatctgcgtctaagcatttttcatttgtatttatcatgttttgtcaatagggatacttgtttcttgtaagtctgttagcatgtttgaaccatagcaattggcggacgtgtgtaaaactgcagtatgatggattccactattcatcaaccgaaattatggcgcgcttcaatcgtggctacgctgatggggacctgatccgttatggtgtgcttgaatcgtggctgtggagatgtgtggaactcattggttaaagtgtgctttattaataatggtgatgctgatggaactgattttgctcccgttggacggcctgattggttactttgccctgttgactgtttgagaacgtaccgcccaggtttacttatacttactgctttttgacggtactgtacatacagttcgacaatttatttattggcagttcaattcatccatttagctaggggcacgagagcatgagttcccctggagatcaatttcatgttgcttttttttgcgaagttccattttctattttcaatttgattagggctagtttgggaacttattcttccaaggtttcctaaggaaaattagttcatttttttttttttttgggaaaatgaagtttccaaaagggtttcaaatccatggtggtgtgggaattgattgcagtaaaggcgatgggtaagctgataccggtgggttgagaattagaccatcagtagcttactctttcccatatttaaactataatctacactacaaaatagtgcaaaaggtgttcatagtgacctatgaataatataatctacactacaaaaatagtccaaaaggagtttgtagtgaccatatatgggtgtacattgtacctttttacattgtatttgtagtgatcatatatgggtgaactactgtacttttttatattgtagatcgtattatttatagtgtgcagtttgaatataggtaagctgatggtcttattgcctgtcaagttcatatataatagttttgggattaatttttttttgcgtcatagaaattcataagcatgtgagtttatcacatatatacatcagaatattaactagaatatatttaaaattggtttcgttcatatactcggaattgtgcccagcgggattatataatttaacaaagaacatggtacagacttacaagccgtgactttatacc

SEQ ID NO: 10273 - DNA, 440 bp, Zea mays
  Clone ID: MRT4577_109372C.1
acgtatggagaaatgtctgtgaacccattttgtttatgaataagatttgttttttttcgagttaaaaaaaaaaaaaaaaaaaaaaaaaaaaaaaaaaaaaaaaaaaaaaaaaaccaaaaaaaaaaaacaaaaaaaaaaaaagaaccaaaaaaaggaacctggccaaggacaatttttggggaaatccttcacacgtgccggccccccgggcggccgtttaaagggcccattagggcccaaaatgcgccctaaacaattcactgcccgttgtattacaccgcgttgaccggcaaaaccctggggaaaccccggttagcccccaggcaaaacaccccccttcccacccccgttgtaccagcggggaggcccgcaaaaaggccccttccaacagcctttccaacctgatgggcaaccgaacgggccctggaccgcccccttaa

SEQ ID NO: 10274 - DNA, 354 bp, Zea mays
  Clone ID: MRT4577_109373C.1
ggtagccgacgaggagagagtacggggttgatgatagcgagttgcaatgcaataaagggcacctctataacacccatgcatgcaaaaaccattggttgggaacttaacttctactgctaaaattagataataacctacacctacacctacacgcacatcactcctaacacattggcgtcatcccgtatggtgtacttcctctccttcttgtttttgtttttgtcctccctcctggcgtccttgttctccatacgcttgttgcatctctttcgaccatcctcaccatcggcatcctccctagtgctacctagttcaccaccgatgccgaccatgctctttgccgccctagcggtg

SEQ ID NO: 10275 - DNA, 240 bp, Zea mays
  Clone ID: MRT4577_109374C.1
gccggccgggccgggatacgactgcctgtacacccacctccctttttccttcctcttcgccacacattaatgcacgtccgacagaccggattcaccactgaaataagcaccgagagggaaacacagtaacaggaagccagatcactaatatgtcgaccccagttctttacactatgaagactgtccccctctcatcgtgtttcctcaattgcgacggcatcctcattcttctcatgcatg

SEQ ID NO: 10276 - DNA, 220 bp, Zea mays
  unsure (1)..(220): unsure at all n locations
  Clone ID: MRT4577_109375C.1
gacaaacgaagggcgggctctatgtccctgagtgttttttgggaccgctgtcaccacctcgttggtttgttgcgagtgtttctngatctaaggctccattctaaacaaattgcgggaagcaatcctccctcctcatgtgttgtgcatttcttcggtgtggaaggcctcgtcttcacctgttcctgtttgggaagggccgggtgctcacactggtgttgtt

SEQ ID NO: 10277 - DNA, 384 bp, Zea mays
  Clone ID: MRT4577_109376C.1
caaaccctaacttctccctgtttttgtccaccgccgccgccattgaatgcagcttcagcactgcaatggcgtttcaggggaagaatcgccaggtcctcgaggtcgatccggcggacgatcctacagctgaggtggccaccgccttcgatcgtctctccgtttcgcccatccccaatccgtctgcatctgccgccgtcgttcaggtctgttctccttacgccctcaacaacagtggtacccagcagcctcagtcgtcgtccactcgtgatgccaccatggttcctttacctcctgcaagtgtgctgtcttaccggtaccaagaggtccttaattgccttcacgacgccattaacgagatgcaacaagtttcaatgaatttgaagt

SEQ ID NO: 10278 - DNA, 716 bp, Zea mays
  Clone ID: MRT4577_109377C.1
cttttcccttcctcctttgatcctatccccttcccctcctccgttttacctcatctcctccctcgggcctcggctgtcgttcttggctcttgctgtgttcctccatagatagatagatctggcactggggatttgggggtttccaggcgcgcctatgtcgcaagaaccagagcgtgcggcggtgacggctgcgtccggcgagcttccgcctgccaaaaggaagaagactgatccgagttttgcagaatgctcgccggcggttccggccatggcgaccgcaggctggtccacgctcccgcccgacctcgtccgccgcgtcgccgactccctcctggccaccaacgacatcgactgctacatggactaccgcgccgtctgctccggctggcgcgccgccaccgacgaccccaggagcgacgccaccgacccccgcttccgcccgcgccgctggatcctcctcgacgaggtcttccagagccaaggaaaagagatgctcctgctaaacatcgacaccggccgttttctccgtaagaatctcccgcagctcgtggattaccacgccgtggccatcactcacagaggctacttggtcctggcggagaaaagccctcctcacgccggtcgcgtcctcaaccctcttaccgggcgtcgtgatctctttcgcggcgcccgtgccccccgatgtgcggattgctgatggcactttcccgcacggc

SEQ ID NO: 10279 - DNA, 421 bp, Zea mays
  Clone ID: MRT4577_109378C.1
atccatcacttcaaataagcgctcgttggaagtctacgtatgctagtaaaggagttcaaaatgcttccggttctcgctgctggcatgaaccacgctgcagcccatcctgggcttaggaggcacctagtaggacccaacaatgagaagtttctcagggcacaacctgcggtcttcttttccacagacgcagaaagcgaaggtggagccttagctttactacacgatctgaaagagtagggagacaaaatggagtccaaatgaccaccccctcggaaatcccacgggggtggtggttcccctctgacttctccttcggagccgcctcttcagcggactaaagtgaaggtgattggaatggatatgtgaaggggcaaaacaactgggatcagttctgccacaatcatccgaaaaggatactgga

SEQ ID NO: 10280 - DNA, 855 bp, Zea mays
  Clone ID: MRT4577_109379C.1
gagccgagcgttcccctcgttgccgcgggccggccggaggtaggattccttcaaattcccgctgcgtgcgacggcacgccggcggtcgccgctatgtccccctctctcgtgctggtgcactcactcccgctcccttctcgccgcgcgctccccatccagctgccccgccgcctcgcccccaaacacccgtcccagtggtcgctccgcacgcctcgacgtctcgctgtctttgccagggcttcggcgtccgttgtggtgtcgccgcacggcgagggaggtggtggcacggcggcggggcggaagagcacggggtataggaaccggttcctggacctggcgcggctgggggccgtggcggagggcgcggcggaggccttcttccgcagcgagatccggcggcggctggccgtcactgccgcgctcatcgtgctcagccgcgtggggtacttcatcccgctccccgggttcgaccgccgcctcatcccagactcttacctcagcttctccgcgctccctgcagatgaccttggcgatttctcctcagaattgaagctttcttttttccagctggggatcagtcatcaaatttcagcatctattgtcatgcaggttctctgtcatgttcttccatcacttgaaaagctccgcaaggaaggattagatggccatgagaagtaaaaggctatatatggtggcttttctttgtggtttgcaactgtggctgcttttactgtgtcatgcttttccctgcagtattcagtatatgctgcaagttacagggtcaagcatgtaattataacaagtcttctgcttgttcttggtgcatgtcaatgacatggatttgtgcaccattac

SEQ ID NO: 10281 - DNA, 525 bp, Zea mays
  unsure (1)..(525): unsure at all n locations
  Clone ID: MRT4577_10937C.1
tcgtttacgcgtgggcggacgcgtgggcggaggcgtgggctactcagcctctcctgcacgccgccgcccatggtaccaaactcgaccgccaaagcccctggccgagctcccccatggcgtctcccccaaccatggtgctctctgctcctccacggcgctgagctccaccagccgctgctcttgaacgctagcgccaacctcatctttgctcctctctcccgcatctctgcaggtcgcccaggtcgtggcctcgccggatcccgcgcgctcctgtgtcgtggcgttgtccccatgttttctccgcgccagcgcgccaccggctctacttgagctcctccctcgccgtagctcacaggtcgccaccccatggctgctgctcctctctccctcatctctgcaactcggcgcctcctctactcctccacctgcagttcgccccatgttctggacgccaaccctncatccncctacccttcagccatggacgccctagctcccttttggtgctcgctagggaccagctcg

SEQ ID NO: 10282 - DNA, 255 bp, Zea mays
  Clone ID: MRT4577_109380C.1
acatcgacgcccctgtttaactccgggcgatctggacgttaatacgactctccgtggcagagaggcagcgcagcgggggctacgacacctgcacgtgccggtcaccgtgagaaaaggcaaggagaataacggacggcgccaacacaacataagccgggagcatatctccaaacaaaggccccagtcgaacgggaaccttttagaaacaacaaacgagccttcttgaaaacggccctggacgaagcacagaccacg

SEQ ID NO: 10283 - DNA, 1744 bp, Zea mays
  unsure (1)..(1744): unsure at all n locations
  Clone ID: MRT4577_109381C.1
cccacgcgtccgatcctccccatcccgcaggtcatcttctggctggttataccgaagttaattagggaagaacgtgttaggcttatcatgacgatactgctactcatgttcatatttcaatttctccccaaggtctaccatagtatacacatcatgaggaaaatgcagaaggtgacgggttacatctttggatcgatatggtggggatttggtttaaatctatttgcctatttcattgcttctcatattgcaggtgggtgctggtatgttcttgcaatccagcgcattgcttcctgcctccaggaagaatgcaagaaaaacaatagttgtgatctgatatcactagcttgttcgaaggagatatgctttcaccctccttggtcttcgaatgttaatgggtttgcatgtgatacgaacatgacctcctttagtcaacgaaatgtgtctacttgtttaagtggtaaagggtcgtttgcttatggaatctatttgggggctcttcctgttatatcgagcaattcgcttgctgtcaaaattctctatcctatattttggggcctcatgacactcagtacttttggtaacgatcttgccccaacaagcaatggtattgaggtgatattcagcataatcaatgtcctcagtggcctgatgctcttcacattgctgatcggaaacatacaggtatttctgcacgcggtcctggcaaggaagcgtaagatgcagctgcggttccgagacatggaatggtggatgagacggaggcagctgccgtctcggctgaggcagagagtgcgcaaatatgagcgcgaacgctgggccgccgtcacgggagacgaggagatggagatgatcaaggatctgcctgaaggactgaggcgggacatcaagcgctacctctgcctcgagctggttaagcaggttccgctgttccatggcatggacgatctgatcctggataacatctgcgacccggctgcggcccactggtgttctccagcggggagaaggtgatccgggagggcgaccccgtgcagcgcatggtgttcatcctgcagggcaagctccggagcacgcagccgctgaccaagggcgtggtggcaacgtgcatgctaggggcgggcaacttcctaggcgacgagctgctgtcgtggtgcctgcgccgccccttcgtggaccggctccccgcgtcgtcggccacgttcgagtgcgtggaggcggcgcaggcgttctgcctcgacgcgccggacctgcggttcatcaccgagcacttccgctacaagttcgccaacgagaagctcaggcgcacggcgcggtactactcgtccaactggcggacgtgggccgccgtcaacatccagctcgcgtggcgcaggtatagggcccgggcatcgacggacctggcggcgatggccgcgccgccgttggcgggcggacccgacgacggggaccggcggctcagacactacgcggccatgttcatgtcgctccggccgcatgaccacctagagtgatcaggaggggggacgggaccatcctagctgtgccggccgcgtcatggtgtctgtacagtgtacactagtggtatgttgttgtcatcttctgcgtgagtgaactggtggttcgggatttgtcatttaaagaaggtcaataatggagaaatagtttcttaggcccgattcaattgtcggactgccccgattcaattgtgggactgcctctcaaaaaaccccaanacaaggcc

SEQ ID NO: 10284 - DNA, 300 bp, Zea mays
  Clone ID: MRT4577_109382C.1
gctgggggttttttggggtttttttttttttttttttttttttttttttttttttttttatttaaacatcaattcccaaaggggagcccataaaatatacagcgtaatgggtctaatcacgggggggaaatccaccaaaatacatctgttaaaaatgggggggggggggggggtatttaaaaggggcaatgttcaaaaacaacctcctccatacaaacaggggatccctccctctgaggcctacaacatagggaggcgacaaggctgcgacccccaggggttggtatcgcaggggaacgg

SEQ ID NO: 10285 - DNA, 1441 bp, Zea mays
  Clone ID: MRT4577_109383C.1
gtttggtttaatctatttgatatttcattgcttctctattgcgggtgggtgctggtatgttcttgcgatccagcgcatcgcttcctgcctccaggaagaatgcaagagaaacaacagttgcgatctaatatcgctagcttgttccaaggagatatgttttcaccctccgtggtcatcgaatgttaacggattcgcgtgcgatacgaacatgacctcctttagccaacaaaatgtgtctacttgcttgagtggaaaaggttccttcgcttatggaatctatttgggggctcttcctgttatatcgagcaattcgcttgctgtcaaaatactgtatcctatattttggggcctcatgacactcagtacttttggtaacgatcttgccccaacaagcaatggtattgaggtgatattcagcataatcaatgtcctcagtggccttatgctcttcacgttgctgatcggaaacatacaggtatttctgcacgcggtcctggcaaggaagcggaagatgcagctgcggttccatggcatggacgacctgatcctggacaacatctgcgaccggctgcggcctctggtgttgtccagcggggagaaggtgatccgggagggcgaccccgtgcagcgcatggtgttcatcctgcagggcaagctccggagcacgcagccgctgaccaaaggcgtggtggcgacgtgcatgctgggcgcgggcagcttcctgggcgacgagctcctgtcgtggtgcctgcgccgccccttcgtggaccggctccccgcgtcgtcggccacgttcgagtgcgtggagccggcgcaggcgttctgcctcggcgcgccggacctgcggttcatcaccgagcacttccggtacaacttcgccaacgagaagctcaagcgcacggcgcggtactactcgtccaactggcggacgtgggccgccgtcaacatccagctcgcgtggcgcaggtacagggcccggacgtcggcggacctggcggcgcaggccgcgccgccgttggtgggcgggcccgacgacggggaccggcggctcagacactacgcggccatgttcatgtcgctacggccgcatgaccacctagagtgagcactgagcaggagggaccatcctaggctcctagctgtgccggccgcgtcatggtgactgtacagtgtgcactgtaatagtatattgctgccatcttttgcgtaagtgaattagtggttccgaattgtcatttaaagaagaccaataaaatggagaaataatttcttaggaaaaaaaaaaaaaaaaaaaaaaaaaaaaaaaaaaaaaaaaaaaaaaaaaaaaaaaaaaaaaaaaaaaaaaaaaaaaaaaaaaaaaaaaaaaaaaggcggccctgaaccccaactttttttttcttttagggagggtaaatggccccctgggcaaaaaaatggcaaa

SEQ ID NO: 10286 - DNA, 722 bp, Zea mays
  Clone ID: MRT4577_109384C.1
cattgggtacctcgaggccggccgggaactttgcttcacgcacgctgatcttccccgatctgctcccgtgctctctcgatcacgaattcagtaactcacaatacgcgctctgctccctccttggataaatgcacactattatccaatccggctcacgagtgatgacgaccacgactgaggtgatgattcggctatacaggcgcaacatcaagaatcaggttacagtgtctacgtaggagcgacacctctgctgctatgttcaggacgtctgctgggctaaagcgctctatggcccgcatgactccagctgcctacgggtgtggcctacatcctgagtagacaatctctcacgggaagatcgctccattcatgtgactcaccgttagtgagatacatgagttgtccacgagtaactcatcatctctcgatgatcttcgccagatcaatactatagaagtaggccatgggagtcattacatgatccaagttgtcgaggtggtgtttgactcattgcagacactcactatggagctaatgttgcaacattatgacttccatggtaaagcaaataatgagtgtcactggataactagaatggcctggtcataggatgatgtcttatcgatgttggaagatgtcatatggctgtactgggaaggaagtatgtctgataaatagactgcccctaacgtctgaatgaatgcatcatttgtgtctttcca

SEQ ID NO: 10287 - DNA, 757 bp, Zea mays
  unsure (1)..(757): unsure at all n locations
  Clone ID: MRT4577_109385C.1
ggccgctcgaggcnncggccgggtcgcggagaccagatcagatcacggacgacacagacggccaccaaatctgcacctgccccagatgcagcagaggtagtcgccacggcgccacctgcccactgcactgcccccagagcctccaagctgctgtcatactcatcacttccccaccgatttacgagccagcgagaatccgagacatgtatggagacgacgagccttcacgccaaccagaaaggagcaatgaggctgccggcgcttacgcacaggcatgcatagatgttgccacagaattgaaccatccagttatagacatctgggccaagatgcaggaatttccagactggcaaacatctgcattgagcgacgggctccacttcaccccggtaggaacaagatcctgttcgaggaggtggtgaagaccctggagacgagcatcggtttcagccaggagcggctcccgtcggacctcccgctgttccacgagatcgaccccaaggaccccatgaaagccttcggagcttagcttgggccttggaggagacgcacggttggatcagccacgtcttctgcatttgagttcgtcatcagtatatgcacgaggcctgctgaggccattacaggaacagtgagctttaataagcggtgttttcagtaccgtttggttgtcagcgcatcacgtgttgtttggcacactgtggttggataaatcataccatctcggtcccaaaaaaaaaaaaaaaaaaggccccta

SEQ ID NO: 10288 - DNA, 1176 bp, Zea mays
  Clone ID: MRT4577_109386C.1
tctcgccagatgcagcagaggtagtcgccacggcgccacctgcccactgcactgcccccagagcctccaagctgcatatcggaagtgaagcgcctcgcagtcctcctctcggatctcgcggtggaagtcgccggtccactcgatcagcgagcgagtcggtgccgcgcggcggattccccgacccgagcaaaggaaccggacatgcggccgcggctggtgctcttcggcgactccataaccgagctgtccttcgcgtccggcggatggggggccgcgctcaccgaccgcttcgcccgccaggctgacgtggtgctgcgcgggctcagcggctacaacacgcggtgggcgctcaaggtgctgccgcgggccatggagggcgcggcgggcgcgggcgcgggcgcggacccggcggccgtgacagtcttcttcggcgccaacgacgcctctctgcccgaccaggtgcaggcgcaccagcacgtgccgctcaaggagtaccagagcaacctccgcgccatctgcgcctacttcaaggagcgatggccctccactgctgtcatactcatcactcccccaccgatttacgagccagcgagaatccgagacatgtatggagacgatgacccttcacgccaaccagaaaggagcaatgaggctgctggcgcttatgcacaggcatgcatagatgttgccacagaattgaaccatccagttatagacatctggaccaagatgcaggaatttccagactggcaaacatctgcattgagcgacgggctccacttcaccccggtaggaaacaagatcctgttcgaggaggtggtgaagacgctggagacgagcatcggtttcagccaggagcggctcccgtcggacctcccgctgttccacgagatcgaccccaaggaccccatgaaagccttcggagcttagcttgggccttggaggagacgcacggttggatcagccacgtcttctgcatttgagttcgtcatcagcatatgcacgaggcctgctgaggccattacaggaacagtgagctttaataagcggtgttttcagtaccgtttggttgtcagcgcatcacgtgttgtttggaacactgtggttggataaaaaaatcataccctctccgtccgaaattaaaattcattttacctttaaaaaaaaaaaaaaaaa

SEQ ID NO: 10289 - DNA, 542 bp, Zea mays
  Clone ID: MRT4577_109387C.1
cacaggcatgcatagatgttgccacagaattgaaccatccagttatagacatctggaccaagatgcaggaatttccagactggcaaacatctgcattgagcgacgggctccacttcaccccggtaggaaacaagatcctgttcgaggaggtggtgaagacgctggagacgagcatcggtttcagccaggagcggctcacgtcggacctcccgctgttccacgagatcgaccccaaggaccccatgaaagccttcggagcttagcttgggccgcacggttggatcagccacgtctgctgcatttgagttcgtcgtcagtatgcaggagggctgctgaggccattacaggaacagtgagctttaataagcggtgttttcagtaccgtttggttgtcagcgcaacacgtgttgttggaacactgtggttccatatatataccatatatgtatctaagattcatcattatccatttaaatgtagacataaaaatcaataactacagtgaccaatatttgggacggtggttgaagtgaataatgaat

SEQ ID NO: 10290 - DNA, 1634 bp, Zea mays
  Clone ID: MRT4577_109388C.1
gcacgagctcacgtgttttttttggaaaagtttttcttttcttcgtttgtgaaactgcaaggcaaatacttggatcgcagctgaagtggtaagctccaccgaacagcccccgctcatccagaccagatcagatcacggacgacacagacggccaccaaatctgcacctgccccagatgcagcagaggtagtcgccacggcgccacctgcccactgcactgcccccagagcctccaagctgcatatcggaagtgaagcgcctcgcagtcctcctctcggatctcgcggtggaagtcgccggtccactcgatcagcgagcgagtcggtgccgcgcggcggattccccgacccgagcaaaggaaccggacatgcggccgcggctggtgctcttcggcgactccataaccgagctgtccttcgcgtccggcggatggggggccgcgctcaccgaccgcttcgcccgccaggctgacgtggtgctgcgcgggctcagcggctacaacacgcggtggcgccttctgcgcctgtttcaaggagcgatggccctccactgctgtcatactcatcactcccccaccgatttacgagccagcgagaatccgagacatgtatggagacgacgagccttcacgccaaccagaaaggagcaatgaggctgccggcgcttacgcacaggcatgcatagatgttgccacagaattgaaccatctagatatatacatctggaccaagatgcaggaatttccagactggcaaacatctgcattgagcgaagggagacgactcgccccggcgggaaacaagatggagttcgggggctgcgtgcagacgcgcacaggcatgcatagatgttgccacaggattgaaccgtccagttataggcagctgcaccaagatgcaggaatttccagactggcaaacatcggcattgagcgacgggctccacttcaccccagtaggaaacaagatcctgttcgaggaggtggtgaagacgctggagacgagcatcggtttcagccaggagcggctcccgtcggacctcccgctgttccacgagatcgaccccaaggaccccatgaaagccttcggagcttagcttgggccttatcggaggagacgcacggtcgttggatcagccacgtctgctgcatttgagttcgtcgtcagtatgcccgaggcctgctgaggccattacaggaacagtgagctttaataagcggtgttttcagtaccgtttggttgtcagcgcatcacgtgttgttggaacactgtggttggataaaaaaatcataccctctccgtccgaaattaaaattcattttaccttttttataattcgtacaataattaattaatacatgtgttatataaaaaaaaaaaaaaaaaaaaaaaaaaaaaaaagggaaaaaattctcggcgaaaaaatttcgagaaaaccgaaaatcccgtttatcggtgggacccggttttttatttatcggccgaaattttcatcgattttgaattcagttcgtccaaacctactgttatgtatttaggctacaaagaagaggtctaaaacgccaccatatgattcttttagccattccccccaaataatggacacgttgatgtttaaaaagaacccttccgttt

SEQ ID NO: 10291 - DNA, 414 bp, Zea mays
  Clone ID: MRT4577_109389C.1
attcccgacccgacccacccttcccacgacccttcatcccacccctctttttcttactatcctcgaccattctcacacaaggcgatgtcttcccaaaactctgaatgtcaaattcaataaattcaaccaaactcaataaacttctcaattaactattactctcttaacatacccaaattccatttcatttaattattgactcccataaatgacttaactacattacaactatacttctatactatacatccaaaccacatccacattaactaacttaacccaatcactcatcaaataataccctaataatctttactctataccaacttttctaaattacttcatacttttattataatttacatcctccaaccacatttcaaataccactacttttaacgttattttacttat

SEQ ID NO: 10292 - DNA, 1327 bp, Zea mays
  Clone ID: MRT4577_10938C.1
taccggtccgattcggtgcccaccgtcgagtttgtcggccctcgccggcgaggacccaccaggatctaaattgcagaaagagctcgtcgaaattcttgggaaaataattaatgacaatattagattgcataaagaactggaaaccaagaaaaaagaaattggcaggagacacgaggaacttgagaagttagttatgaacagtactaacagagaaaagcttgaagcggcaaaagaagaaattgcaaaggagaacaggcttctcgatttagcaaccctaaagaagaaggaagaagatgagaagttcttaaaacttgtaaaggaacaagagcaagagaaagaaaatgtcaggaagatgctatatgatttagaaatgcagttggcttccaaacaaaaacttgaactggaaagagaacagttgagggggaatcttgaggtatggaagcatatgggaaaggaagatgcaaaatcgaaggaaatgctcgataagttgcatgaagcactgaaagagaaagatgaagaaatggagcatattgattctataaaccagacccttattattaagcaacgaagaaccaatgatgagctggaagaagccaagaaagaactgactactgacctacttaatatgtcatcagctcgatccattgttggtgtcaaaaaaatgggtgagcttgacaataaagctttccttgcctcttgcaaagagaaaacagcagacgagttgtcattgtcaattctgtgctcgaaatgggaagatgagatcaggcaaccagaatggcatcctttcaaagttatagatgttggtggacaggcaaaggaaataattcgggaggatgatgagaagctgcaagctttgaaggctgaactgggtgtgcaggcgcacgatgtggtcgtcaaggccctccttgagatgaacgagtacaatccaagcggcaggtaccccataccggagctgtggaacttcaaggaggaccggagagcaccgatgggcgaggcagtagcctacatagtgaagcagtggaaggcgaacaagaggaagcattaggcgagttcctgatgcctgatggcccttgtctggcttgctctggaccgcgttgtgccattggttcctgggtcgatgtccctgacagtgagagctgagagcctgagaccctgatcccatgacttttctgctgatggaagacctagtactagtagcactactaaaaaaatttccgatctcttggacggttagattggctatggcacctagcgcaatgatctatatgtataaaaaatatctgtagtttttaatgattttaccagaactagataaagattatagaat

SEQ ID NO: 10293 - DNA, 342 bp, Zea mays
  Clone ID: MRT4577_109390C.1
caatggcatccagatgctcaaccatccattactttgacattgactatgatcaaccaataaaaggaaagggggggagggcattttaacagacttcggacccttttatgtcacagaacagttcttgaaaaaaaaaagtggagagggctgcaaaaagaagccttgcctatctgtgacgcgcgctatctttacatgttgcttggaccccttggctactgaatgtgatcatgctcgaggaggctggcacgcacaagcatggacttgacatgttctttaaagtgattgccggtttgaaggacccgctggaaagccccatctctttggtgagcatgccttgcgtaaagg

SEQ ID NO: 10294 - DNA, 345 bp, Zea mays
  Clone ID: MRT4577_109391C.1
tcgagaccattagctttatttacttcagagcgcaaaagaacccgatcgacaccatgagggtgttgctcggtggccttgcttttctggcttttgctgggagcgccaccttcacgcattcaagcggggggtgcggctggcagccaccggcgcccgttcatttaccggcggcggtgcatttggcaccttcggtttacctggcatcctcggtgcattttccaccggcggtccaacttgcggcggcggttcaactttcaccggcggtccatgtgccgtcgccggtttatttttcgtcgtcaccattccactaccctacttaaccgtcccggacttagtcttattcccagg

SEQ ID NO: 10295 - DNA, 674 bp, Zea mays
  Clone ID: MRT4577_109392C.1
aatcatagagggcggccgggacctcacctttaccatgcaccgcagcaactaacacgaaccttgttcacaactaagctgaagtattttgctgcgaacccagtatggaaaacgcgccgaggatcctgatcctcggcctgctactgctcctgtgcgatgacgtcggcccggacgtctcgcagaactgtctgtgccagccaaacttctgctgcagaaagctacgttactgagtaacgaccgacgcctactgcgtatacggacgccagtcgggcccgtgccgctcgcaatgtcaccggagacatcggcggcggcaaaggcagggtaggaagtgacgatttcaacaccgctaatgtggaaccgacatgttcttcaacgacataaagaaccaggacggaagcgattgagatggcaaaaacttctacacacgacgtgcgttactgagcgtcgtcgacgagtacccgggattactccatgcagggacagacgtgcagggacagcgccagatcgccgccttcttcgaacacgtgactcacgagaccggatatttctgctacatcagctagataacaagagcaacgcctactgcgactctgagcaataggtagtcgaacagcgcgactcgggcagaagaactacaggcgcataccgctgcaaatctcacgaaactacaactacag

SEQ ID NO: 10296 - DNA, 841 bp, Zea mays
  Clone ID: MRT4577_109393C.1
aattcaaaaaactccatcctctgttcttcactttttccatctgagccgtccgagccctccgaatttccccggccagaatgggcgaatccagcgcgcttcagtccatcctctacggccgcggcgcgcttcgcctcctcgatcagaggaagctgcccctcgaggaggtctacatcgatgtcaaggactccgcggatggatggaatgcgatcagagacatggttgtccgtggtgctcctgccatagccatagcggcagcactgtcattggctgtggaagttaatgatcacgatttcactggtacacctgtggaagcagcctcattcgtttccaagaagttggaataccttgtatccagccggcccacagcagtgaacctgtctgatgctgctacaaagcttcagaacttagtgtcaagaacagctgaaacagcaaaagatgccaaatctatctttcaggtctttattgaagctgcagaagctatgctagttgatgatgtggccgataataaggcaattggctcgcatggagctgaattccttcaacggcagcttggaagttcgagaaacatctctgttctaacccattgtaatactggcagccttgcaaccgctggttacggaactgccctaggggtcattcgtgctcttcactctggaggagttttggaaaaggccttctgcactgaaactcgtccatttaaccagggttccaggcttacagctttcgagttagttcatgacaaaatacctgcgacgctgatagcagactctgctgcagctgcacttatgaataatggacaagttcaagctgtaattgtgggtgctgatcgtatagctgcaaa

SEQ ID NO: 10297 - DNA, 426 bp, Zea mays
  Clone ID: MRT4577_109394C.1
gcctaacatagcctatcattcatatgccacggggcgagtattggctcattccaaacttgcaacactcaggtcgttctatctcatcagcgcgcgtaaactagctcgtttcacgactcatctagcagaacactcatggtattggcccatccccaacagtcctatgctcagtactagactaaccataacaccttgctaagtgacaccaaggttcgacaacatgtataactcccagagttgatgaagcctgatgacctccaacaaccaaaccatattcactagggatcattcacggctctgtcacccatgaaagtctttatttgaatacatggcagactctaacctcctgcgcatgctacgagattattatggaccgacaatcctgactcctaggcagaaccaccactaactgcaatctctgagatgaat

SEQ ID NO: 10298 - DNA, 308 bp, Zea mays
  Clone ID: MRT4577_109395C.1
cgcctcatcgtcgttcagctcccttcaccgttaactgcaatgatctcaaccgccacgtgctcgttatactcgagcagagcctcaccaacttcaccaagatcctccacatcgacgccagcttcatcaacataatcaaaccgctttcatcgtcacttacagcgcgaactgtcacaccatgatcacctacatatgctcagccagcttcttctaactaacatagctgcatctataataaattgaagcctctaataattagccatcgttctctatagttcctttctttcttcgttttagtatatgcacctttt

SEQ ID NO: 10299 - DNA, 390 bp, Zea mays
  Clone ID: MRT4577_109396C.1
gatcacaacaatactaataattaagtgaaagctggcattgccatgttcggacaaactgcaactcacttcattcctgaagaaccccacaaaccaaaccattcaagaattgtcccctaaatgcctcgcagagttgcagaagcttaaactcaggctatacagtagcaaaatagtgcacaccatactaaagatgcaaacccctacatagtagcctgataaaaaagacccagactcctcaagtttgacgattatactcctcttacaaacgctgtgatattgatacccaggaccagttgcttccttgaaaatcttcagcttattggacccaccacaaccatgaccttaccccacacaccgactagaccaaatggtgacaactgctgcgacaaggga

SEQ ID NO: 10300 - DNA, 490 bp, Zea mays
  Clone ID: MRT4577_109397C.1
tgggaccctcgaggccggccgggaaaaagtaatttctttcccgtttcactcctcgcgtttttacacttcggcccccaatccaatccccgccaggccgccatgccgacgccggtgcccgccgcgcgccagtgcctctccccgcccgccgtcacggccctcgacgccgccgtcgcctccgcgcgccgacgggcccacgcgcagaccacctcccttcacctcatcgcctcgctcctcgcccccaccgccgcgccgctgctccgcgacgcgctcgcccgcgcccgcagcgccgcctactccccgcgcctccagctcaaggcgctcgacctctgcttcgccgtctccctcgaccgcctcccgtccacccccacctccgcctccacccccacctcagtctccgcctccgcctccgccagcaccagcaatgacccccaccagcacgagccccccgtcgccaaatccctcatggccgccatcaagcgctcgcaggcca

SEQ ID NO: 10301 - DNA, 302 bp, Zea mays
  Clone ID: MRT4577_109398C.1
tggccggttggatgcttttgagtggaaccacactagtatcgacctcccacaacaacacccaggttaacgacgtctactccctactggcctgtgctggtattatccctggcgcgccgtctactccacggcggacattctgttatctatcaggggtgaccgacggaggggggaacgactgcggtcgctcacacccagcgttccccttggacccttcatgccatcgcccatttgatgcgaccggggatgtcccatcgcatttgattgccacaaacgacttcttcttgatgactcgttttatgtct

SEQ ID NO: 10302 - DNA, 255 bp, Zea mays
  Clone ID: MRT4577_109399C.1
gttattgcgttccattgtgaggctctatgtgggacaagggaatgggttcgaatcttgcccatgcggcattttttgtccttttttctgcggcatttttctcactatgaagctatgcgggtcccacttgtaagctgtcaggtccacctgtaagaggctttaaaaaaaaaaaaaaaaaaaaaaaaaaaaaaaaaaaaaaaaaaaaaaaaaaaaaaaagaggacgaaaaaaaaaaagagccccccccccccggtttttt

SEQ ID NO: 10303 - DNA, 250 bp, Zea mays
  Clone ID: MRT4577_10939C.1
acaggacctggcgaagaatgtatggactcctcagcgtcgaccggctactggtccggccgatactgatgtcctgcctgtgcaacgcatacagcgacgagcaatacctcatcttcttgagactatggtgtgagcgctactgccatgtccatgttcactatgatctagaggaagcgcacggagcctgccaacttcaatgctttataccctctgcacaaaccaagtgcgacactaggaatgctccagaagaaag

SEQ ID NO: 10304 - DNA, 666 bp, Zea mays
  Clone ID: MRT4577_1093C.1
cttcttcccactggtactggtactgaactttttgctcactggacgactactggtgaggaaaggtgtggccgttggctgcgggtggcaagctatggttgcctacattaacttacgtatgcgtctactgtatcggcatacccctcatcccgctccgctgattcataggcttctacttgatcaagggactgtgggtaggcaggattgtatgatcccttattcctacactcgcttcgtgatcttgatatgtgttacattcaggaccaactgaggcaaggaggttgaagaagcacagaagaggataaacaaatgggacgacggcaaggctcctctgctgtcagcgcaagaatgaaacaactcgtctctctggtgcccaaccaaagaacaacgagacgtggatatatatgacctgtagggaactagggatgcccctcggcaggctcagcggagacgtcgacggagtttgatgtcaagtagcaattccaccatgtcctcaaatggacagaaccagatgcctgaaatagacagaaccagatggctgatgaaattctacgtactccatcggttccaatatataattcgtttaactattttatattaagtttgaccgactcatattattaaaaaatataaaattgtcatcaatttttccgggaaaatggttcccgt

SEQ ID NO: 10305 - DNA, 378 bp, Zea mays
  Clone ID: MRT4577_109400C.1
accccctttcttttcgtgccgtggtatatgacaaacgagggtcactgttttgattactacctccctgacatacagccaaatatacaacaggatagggagccacacatgacacttgaatgcgagatcgagatgaccccaagtgaactaacatgccatgccctggtccaggctatgacagtcacaaagcatagggcttactctactaaaccatatcacggatcatcaagaatactcgatgagcatatatatgagtacatccacagggcaggcgcgcttattttgttccgctacatatgttctaacgagggagaacacactctcagcggtgtttgcagaccaacttcttacaaaaggaacactatgttgtacagtggaaca

SEQ ID NO: 10306 - DNA, 544 bp, Zea mays
  Clone ID: MRT4577_109401C.1
gtccacagaaccaaattaccattgagcaaaaccacagctatagccatggcaagagcaggggcaacgggcgagctggtgaccgacatggttgtcctggcagcgtccaccaagatagcacacggattctgcaacctgtccagcgccagaatacgtgcgtgccagcccgtggcagtaattcgaaacaccaacagaccatacggcgactgagtgctacgccgtgctggcggtggccgacctagagatgtctctgcctgtacaagaacatcaccaccgagtgatataggatctacaagaacgacatcaaccatacaatgaagatggaccgcaagtgcgagcttgccataccggccaactgctgaatgtattcactcacactccaactgcatgcattccgagctatgtgctcccatacttatattacatgagcattaaggggcatggcttactgctatatagctacgacaattatgcaataaacgaaggcatgcacacaatgatacgtgcctcctgcacacagtacaatatgtcaatgaactatggatgc

SEQ ID NO: 10307 - DNA, 778 bp, Zea mays
  Clone ID: MRT4577_109402C.1
agcataagaccatctcctgtcctctcccactccgccgccgctgcttaccgcctatctcgccaagcaccgccgcatcaccgaaggttcgcaaagtgcagatggcggtgccgctgctgacgcagaagatcgtgaagaagagggtcaagcagttcaagaggccccatcttgaccgctacaagtgccttaagccaagctggcgcaggcccaagggtatcgactcccgcgtcaggcgtaagttcaagggatgcaccttgatgcccaacattggatatggctccgacaagaagaccaggcactaccttcccaacaagttcaaaaagtttgttgttcacaatgtctccgagctggagctgctgctgatgcacaacaggacttactgcgctgagattgcccacaacgtgtccacccgcaagcgcaaggagattgtcgagcgtgctgcgcaaatggacatcgtggtcaccaacaagcttgccaggctccgcagccaagaggacgagtgaaatgttgggtagttttgattgtgctctgctggtgttgaagatgttactgagattgatgttcttctgtaccatttctatgcttatgatagacttttcatatggacaaaattatgctatgagtgaaaagagttatggggagtgccatctagttttgaccggactccatgcagtgtggagccttgcaagtaatgataatgaacctcggtctcaatctgcatgcattttctgaggttcagagctggtcttagtaatgaatacaaggtttgagactgaaccat

SEQ ID NO: 10308 - DNA, 341 bp, Zea mays
  Clone ID: MRT4577_109403C.1
tctcctctcttctctaaaaaaaaaaaaaaaaaaaaaaaaataaaattaaaaaaaaaaaaaaaaaaaaaaaaagaaaaggaaaaaaaaaaaaaaaaaaaaaaaaaaaaaaaaaaaaaataaaaaatcccaacgcttcctccaacccttccttttttaattccggtgcgcccgttttaacggctccatgtttacttacacttccttgcaacttcttattttttttttagggtcacttaattttatttccttgcccctttttttccaacttgctaactgggataccctttcctttccctagcttattcgctttgcagaatttccctttttctccagttgccctt

SEQ ID NO: 10309 - DNA, 212 bp, Zea mays
  Clone ID: MRT4577_109404C.1
cgagttgatgacagacatataactgggctatataatgaagggcaatctgcctctttcattgaatcgaccaaatttggcagcgacagacttcaggggggctcaagaattcagggctgatctccgttcttatcaaggattggtgcgtgcttatctaccacttcctaaatgcaaatatgcattattcactgcacccgaggctatgaaggttatgc

SEQ ID NO: 10310 - DNA, 388 bp, Zea mays
  Clone ID: MRT4577_109405C.1
cacaaatatacttctttactacggcttgcttgattaacgttggtgtcgcaaagctgacccgatacaatacacaaaatgagcgaaatcactcggctaaaaagcaccatctatgtgggcggcctcgatcaagctgtaacaacgcaaactctcacagaagccttcctgccctttggcgaaattgtcgatgtgtcgttaccaaagccagacctgccatcgtcaaccgataaccaccgagggttcggatatgtcgaatttgaagtccggcaagacgcaaaggaactatcgacaacatagatcaaagtgaattgtacggacgcataatataaatttccgcgtcaaaaccttaaaaagatgcgaacgaaagtctatgatacaaaacaactatttg

SEQ ID NO: 10311 - DNA, 792 bp, Zea mays
  Clone ID: MRT4577_109406C.1
atgccctcccgcacccacaccacgctgctgccactcatcatcctacctccgctgccctccgtccctgcttcgcttcggacctcccccacctgcacgggacgtgaccaacaatgcacaactaccgtccgaattgttgggtttgttaccattgctcagtccttctttcagcacgtttacaagttgcatgggcttttagttgctattgtgtctaagcgtgataagattttcacgagtattttttggaaggaactcttcaagctaaccggggtcagtctccacatgactagcgcttaccatcctcaaacagacgggcaaacaaagcgcattaatcaatgtctcgatacttatcttagatgctttgttcaaacttgtccttccaagtgggtcagttggattgcttcagcagagttctggtataacaccagccaacattcctctattggcaaatcaccatttgaagcattgtatggatatgttcccaggcactttggtgttcaggtcccgaactcttcttctactgacgcaacatctccaccagaccaaacaacatctgttaccgtagtagcatctccaccgggccatttggcgttcgtcgcgccccgcccgtctctgctgtcatatcgaacttatctgatccctttcaagttcatgtggctattctaccgtgtcgagtggtgtctcccggcgttcgcgtggtgcagcaaggactggtgcaatggtcatcccttcgccagtcgctggctacatgggagtggaaggatttggaagctctccggcaacgctttccactag

SEQ ID NO: 10312 - DNA, 736 bp, Zea mays
  Clone ID: MRT4577_109407C.1
gtcttaagcagtggtaacaacgcagagtacttttttttttttttttttttttttttttttttgaactgtgtgtaccacgaaacagattgtcaaaaggcaaattttgtagagtcgatattcttggggatcagacaaacaacaaacaaaaaaactactatctgagctcaaatttgtacatttagaacggcataatctacttggacctttacagtaaagggcagaatgataaattcttggttgtatcattcacaagtaaatgcatctcctcctcaagatatgccgatcgtcttccctagcagccacattaccagcgagaactcgatcataaacagcgcgtgtagccatgtccggtcgacgacgaaaccgaacaccgtgatccccgcccggttgttctccaagtacgtcactagcgcctgcctcttctggaaggagacgttggtggcgtggaaaggcgtgaaccttgaggtgtccacgccgtcctcgctccgccactcgtcgtcgtcggactcttcgccggacgacgcgcccgccatcgggaagggactcgtgggcgtttgctgctgcaggcacgctttgctgggcgtcctggggttctcctggtcacggcccaggctgttgatggtggcgtcggcgtgccacgccgcggcgacgctggtgatcgactgcgtcttgtgcgtgatcttggccgcgctatggaggcagacgagcagtcccgtgacgaggctcatggagcaga

SEQ ID NO: 10313 - DNA, 114 bp, Zea mays
  Clone ID: MRT4577_109408C.1
attgccccaaattctaatcttctacatggtaccacgaggtcaggtcccgatcccgatctaatctcgtgatctcgccctcagagtccctcccctccccatggcaaccgaatcagc

SEQ ID NO: 10314 - DNA, 641 bp, Zea mays
  Clone ID: MRT4577_109409C.1
ttgggtacctcgaggccggccgccacagccccgtacaatatcagaggatagagctgagctgctgactcaggaacagcctgcaagtctagcgtcgctcgtcgtcactcgctggctatgagcatggactagcaccacaagcacaagcaccacctgcttcgttgctagtcaccggtatgcgcgcttccgcctccgggcattcgtcctgatcatggacttcgtctcgctggaagcgtgtacctgcaccctgcacccctccaacacggccttctacctgcaagacctgcagctgcgcagacccatctcgctgggagacccctccgctgatccgcgacgatgaacgtgacgatgcactccctcaaccccaacgaccacgtgtgcatcttctacaaccacctgaacgggatcgtcacctaccgcgactacggcatgacggtgaccgtgtctctgacgccccagtaccacggccaccgcgacttcaccgactgcgcccccttgctgctgaccgagaccgtgcccgttgccgtctacaacgccgaccacatcaacaagatctcgacgcgcggtcgcctacgactgcagtacaggcggacggccggcaacaagtaaaaggttggacattggctctccggcagataccacct

SEQ ID NO: 10315 - DNA, 316 bp, Zea mays
  Clone ID: MRT4577_10940C.1
acccactcggtcggaccttgacaggcagcctcccaaggcatacgtctgacgttccacggccacgtcatgcgtcataggaattgtgtgatctgatacgagttccgtcgcgactaatgaagaagggcgtgtgaggcataaaattatacttgtatgtttttttcatttgttttttcttttgcttcgctatctttactttttaccagtatattgccgtgagttgacagtgctagcttttggaattcacacatatatttggcgtaaaatgaattccaagagctatcagcgccattctttatcttgtcagcctaccctattt

SEQ ID NO: 10316 - DNA, 400 bp, Zea mays
  Clone ID: MRT4577_109410C.1
actgaatatgaatgtctgaaagtgtctgcttaactgctttgttccggaagacaatcctgaagcaagctaaaaagcttccgaatttcctgcaccaacacatctaagatcatcgtgcgagctcccgcctggcttcatcgtgcgggccctcgcgtcgcgccccatcttcccggtggcgtcggccaacgcggacgccagctcgcccgcgtcggggacaaagccgaggccgcctttgcaagcgcgtaccgcgacgcgggcctcgtgccctcgtccacgagcagccgcgcatgaaagaactggtccgacgtgatttactcgccggccccaagcatcgcggctgctaccgtaatttacagagggagcaggggaggggaaaatggttcatccatccatccatcgatcc

SEQ ID NO: 10317 - DNA, 705 bp, Zea mays
  Clone ID: MRT4577_109411C.1
actttattcgaactacacttattacctccgtcaccatcccaatccctgataccacactgacgaagaagcgattaagatattacggatgaagaagagtggtccgaagccactgctggtaatgcttctggcaacgattctatcaccgacgctgcgcgcaaatgtgctatcaccacacggtgaccgacacaaagcgcatccacaacgtcctgcactaggaggcctacaccatatccggaaacatcataatagcacgtagcactacttcttctgaagctcccaccacccaggaatcgacctcacattaacgacaacatcagaaaagactggggacaccttaaacgtaaaatccgtggacaacattaagttgatagatccatacatgtgggtatgctagaatgactagcttacatatagccgcatatgtactagcctgaaactgtgatctttctagcctccatgatgtccacatgacccaatgagatacaatctggagaaagatgagtcactctgcatcctattcacgataaaatcatgaagctgagggaataatgataatccggtaccgtcgaacagaaatatctaaaagcactcgaatgtcgacaccgacacatctcttgcatgagtaccgtagatgctagccatggctgatacgatggcagagtacctgacttacatgaatgataccgtgatacacggcctcaacat

SEQ ID NO: 10318 - DNA, 600 bp, Zea mays
  Clone ID: MRT4577_109412C.1
atttccagaatccgcgaatcacagactggtctatctcagattgctgcgctgcactaccctgccctgccatcatatcgtacgtgatcccgtccgagcgagagtgatgcagaggcatgtctgctccgaagctctcgacgctggagctggccgtgctcctgtcgcctaccgtgctgcctcccccggccgtggtgcgcgcgtcgatgtcgtgctccaccgtgtacagcacgctgatgccgagcctgccgctcgtccagatgggcagggccatgccgcccctaccgcgctgcggcggcatctcgcattctgctgcagcaggtcaacaacaccccagaccgccgcactcatctgcgtctggctcaagaacgtcgccaacggcgccaacgagagcggcacctacatcagccgcgccgccgcgctgcccaacaagtgcgtcgtcgccctgccgtacaagatcagcaccaacgttaactgcgacacgattaattaaatgaagcgtcctgtgctcgttcgttagagcaatgcatgcatgactcatagtaataaagtaatgctactggtattttaaactacatcgaggagaggctgtctctagtcatttat

SEQ ID NO: 10319 - DNA, 539 bp, Zea mays
  Clone ID: MRT4577_109413C.1
cttattcatttttttatacttttttacactttttaacatttaattttacattttttatgatgttttattaggtaaatgcctttttttaacaaaaacattttgtttttggcaccacagaaaatcccgagcttcttccctagccggttctggcatcctcggcaactcattaacctaagagcttggactgagctgcaataaacaaaagctccccgttcatcacatcctgtttatcagttaaagttgatgacacccagatgaaacacactccaagaaaggggaggctggatctatatggaaaatcgacctagatccaaaatctaaaacatggctgcaaaatacagagctgattccgtttttgcacccaccacaaaccatagagccctatttctaagccccatagtcactcacacttttggaactatcaaaaagctgtacagaaatgaccaaaccttaaaaaccttgtgaaccttggtagttggttgcacttgaaacacacccaggaaactagttgatgcattcacatctttagagcgcatcac

SEQ ID NO: 10320 - DNA, 385 bp, Zea mays
  Clone ID: MRT4577_109414C.1
cgaaggttgtgaacgccgtgaataaggaagggggcagcttaggatacttcgacatcttatctgaccaggaagtggggcggggttagaagacgtactacaactggtccaccttaccacagctatgctccagatgggggctaagagggggatgcgatattgcactcgagatggacaaaagcggacagctgaagtcgaccctgtcagagtagacacctagctagcagtctcgcttcgctggcgcatgtatcacatagtctgcatagaatcagtatactatggcatgcatgccattatattgatagatccacgattgtactagactgaagagccacattggttgaattgtgacacatgtgccgaaggaataactcacgcttgttcacac

SEQ ID NO: 10321 - DNA, 383 bp, Zea mays
  Clone ID: MRT4577_109415C.1
acgcgtaaagctcctctgcctgcctatatattcgccttcctgcagcgatgcccccctcgtgcaagcgcaagcgcaactcgctccccagcgctcctccttaattaatcccttgcatgccttccagccgcgctcgcgcctcatcagggacggcggcggcggccatggacccgtggatcgcgcagccttccctcagcctcgacctcaaggtcggcctccccacgccggccaaggtcgtcttggtcgaggagaccaacaatttcttggccgtcagcaggacgaaagaccgggaggtggaggcgctcgaggctgagctccggcgagtcggcaaccagaacaagcgcctcatagagatgctgcgggccctgctggtcaactacaccgag

SEQ ID NO: 10322 - DNA, 494 bp, Zea mays
  unsure (1)..(494): unsure at all n locations
  Clone ID: MRT4577_109416C.1
gcccaagcaggtggagttcctggaggaggtgatgagggaggggttcggccacccgggcgtcaagggcatcgtcatgtgggcggcctggcacgccaagggctgctacgtcatgtgcctcaccgacaacaacttcaagaacctgccgcagggggacctcgtcgacaggctcctggacgagtggaggaaggtgcccgagaagcccatgacggacagcaatggtgtgttcgaggccgagctcttccacggcgagtaccaggtcaccgtcaagcacgcgtcgctcaaggagcccatcgtgcagacggtggacctcgacaccaaatcggaggccgccataaaggcctagctaattaactgcttaagagtactccacgcatcatgtcggtgtcgctcactgtaacattcccatttgtatgacggtgtcgctaacttgtaacattccaatctgtttttctatataaatatatatacatatgatctttnttattccaaaatcc

SEQ ID NO: 10323 - DNA, 367 bp, Zea mays
  unsure (1)..(367): unsure at all n locations
  Clone ID: MRT4577_109417C.1
aagaaactccattgcccgggctagggacatatgacacaaacagtgtaattatacgggtgcttcacgggatctgctggagatgctgctcntgtctgatgccgtgatgcccccttttgtcatcctgtgatgtgtggcgtgggtgttgggtgtggtgcgcctccagggtgggggggcggggttngcccttcngaattgggtgtgctanaacctcntccatctaagaagaccctttggttttgcatccccagctaagagacagggaagtacttggataattatactggttggggcatatggatttgggggaggaaaataaagaaactccattgcgccggtcggggggaaaaaaaaaaaaagaaccctttat

SEQ ID NO: 10324 - DNA, 1059 bp, Zea mays
  Clone ID: MRT4577_109418C.1
gcgtgggcggggtcgaagaggagcttggagcttggaccgacccgagccccaccgagcgagagagaggaaataatgggtgaagaggccagctgcaacgccgtcagcgcgatggaggccgccaccaacgccaggccggccaaggagaacggacgcgcgccggctgtggcggaggtagtggcccaggaggcggccactgacccccggctgcagggcatctccgacgccatccgcgtcgtgccgcacttccccaagcacggcatcatgttcaacgacatcaccacgctgctgctgcgccccagggtgttcaaggacgccgtcgacctgttcgtcgagcgctaccgcgggatgcgcatcgacgccgtcgccgggatcgaggccaggggcttcatatttggcccggcagtcgcattggctattggcgccaagttcatacctttgcgcaagcctaggaagctccccggcgaggtgatctccgagaaatacgttctcgagtacgggaccgattgcttagagatgcatgtcggagccatcgaacggcctggtgagcgcgtgctgatcaccgacgacttggtcgcgaccggagggacgctctgtgctgcaatcaggcttcttgaacgtgctgaagctgatgtggtcgagtgcgcatgcctcattggcctcccaaaattcaaggatttctacaagttgaatggaaagcccgtctacgtgctggttgagtcccgtgaatcagataaataagaaattatgggacataggaaagctggcggttcattccttgctgttgtgcttgagcagtggagggacatcgagaagccaaccatgggggtgcgttagcgttactaaggctagctgctaagatcgacttggtgagaggagagattagaagtgctgggggggcgttagtcttgtaggctgagtagattttcagagtactgaagagcttgtagttctgccaggaacatggttattagttgaagcaagaatgttgatggtccattgcttgttggattttgtggttttaatttgaagggcgcaaacatggctggatcagcttgacgg

SEQ ID NO: 10325 - DNA, 328 bp, Zea mays
  Clone ID: MRT4577_109419C.1
actaagaacattatatgcagaaaacctgcttctattggcagagagacttcagtcgaggatcaacactgttaccttgcgtcaatactaattctacagttaacattcaagggcaaaaaacagccaatgtttaacattaactagttgctggaaacgcgtatagacgcaaatgactactactacggggcatattcaggttgtgctacccaaagaaagacgcctctgcaggttcctatggccaaatcgcattttctctggggtctcaccgttgacaacctggaccataaggcccttgaaaatggatcgttcgattttccaaaacatgccatgc

SEQ ID NO: 10326 - DNA, 321 bp, Zea mays
  Clone ID: MRT4577_10941C.1
gactcccgggatcaaggacaacgacacgatcacgggaggacgagctctggtgctgatcgtggtctcgcgaaggctcattcagatccgcccctcggacccgctgctgtacgagccgtgcggatgaagaccgcgacgcgagatgaatcatgctcgggaaaaagcgataggaaggggtatgaaggcgcggcaaaagggaggggcatgaggactaggacctccttgtagaggcgcagggaatgaaccgcgacatgatcaaggagctggagcgtttttttttctatgaatccacccaccctgatggtgcagtgggcaaagacactt

SEQ ID NO: 10327 - DNA, 714 bp, Zea mays
  Clone ID: MRT4577_109420C.1
ttctccctacctgactccgccggcgtctacgactctgcctccgcttcaccgctgcggcctccggcacagcgtagcgcgacctcatcgatcaccattcaactttcattcatgccgcacgactatgtcaaatcctactgcctgccccccgtcgctccctccgaagaggacgttcctccctgacagctaccgcgttgtcaacatagatgcgcttctcgacatgcctccttacgatctcgactcggctctatctccgcgcgtgcctccattgcgatgcagatctacctagaagaggaagtccatggcgctcgtctttaaactgatctacgcggaacagcatgctcctgctgccgagacaccacactcctgcaagacacatgtccgtgacgtgatcattgtccctgagatgattgaaattattgttgtcgtctacgacgatcacacattcgaccacctcgtcatcaagcctgagatgatcgatctctaccttgctgatgtctccatctcctatagaacggtcaagcatgtcatcgtccggtatcgtggccacccgctcctcgcgggatattcctgtgatatgatctgtcacccgggtctggattctcccaatagtacgacgttaatgttcattccatctatctacttggtctgaacatgttccatgaccaccacatgttgtatcgatactttcctgttcaagcttctatatatgtttgc

SEQ ID NO: 10328 - DNA, 302 bp, Zea mays
  Clone ID: MRT4577_109421C.1
gttagctttgtaattatcaagcatttggttcaattttgacagaggattgatgtgtgtgtataaaaaaaaaaaaaaaaaaaaaaaaaaaaaaaaaaaaaaaaaaaaaaaaaaaaaaaaaaaaaaaaaaaaaaaaaaaaaaaaaaaaaagataaaaaaaaaaaaaaacaaaaaaaacaacaaaaaagcagaaaaacactctcaacaagaatggatgaaaactccatcccttcattccaggagatgaacatatacaatgacgaggtcactctccagttcttgaaccctaaggtgcacgctatcat

SEQ ID NO: 10329 - DNA, 481 bp, Zea mays
  Clone ID: MRT4577_109422C.1
cattgggtacctcgaggccggccgggagaggaggctctatcttgtcgagggctcctgctggacctctacatcatgagcccccaccgccgccaactcatccccagaccgtcaatgcacccctcgccgcagcgaaatcatatggatgccctctctgccaaacgaggccagccacgcatgatatatagggcatgacatgcgatctcatctcctacagtctataagagaatatggcgagtcataattttgggaccgtaggtttactgaagcaggtaccaaggactgggcgcccgacaatttggatatacagggtcaaagataataatgcccgcataggctcatgtaacagtcccctatgaggatccacatgttgcttcacttgttgtggaacgactgcttaacatggatttccgtggaagaactatttgggttcatatagcttaatcaaacagcagacatgcattcgatagccccacaagaatag

SEQ ID NO: 10330 - DNA, 406 bp, Zea mays
  Clone ID: MRT4577_109423C.1
ggcaaaaaaaattcccaggggggccaaataacaagggggggaccccccccaaggaagggggccattcagtaaaacatttaacaacaggagaccagcgcacccaagcgttccctgggttattccccaccccagcccaacagggccccccgattttgaacacccacccggaaactggccaacttcctaaagccccccgcttatgcttatgtccccaacaaaaggacattggcccgggggggaaacaaacccgcccccggtaaatccccccccggaaaaaaaaagggcttaaaaaacttccttgcccccaaaggcccgctaaaaaaccctttgaacctgctttgggcaaaactaaaaaaaaaagctggaaacaagcccccaaatcccggcattttgccgaaaccgggga

SEQ ID NO: 10331 - DNA, 699 bp, Zea mays
  Clone ID: MRT4577_109424C.1
actccttagggcgattgggttcctcgaggccggccgggaaatcacctttccaacaagctgcaccgcagtcgatcaacacgaaccttggcagaaccaagctgaagatagttcgctgtgaacccagtatggcaaccgcgcctaggatcctgggcctccgcctgctaacgctcctgtgcgctgccgccgccccaggcaccccgcataatgcagctgccgtgcaatatttctgctgcagcaagtacgatgtactgcgtgcacgaccgacccctactgcgtcgacgcgtgccagtatcatccgtgcctctctgccgccgctatcgacgacgtcggagacgcaggcacgccaggctgtgtctgcgcgaacgtggctaatgtgctcaccgacgctgtcttcaacggcatcaagaaccagttcgacagcgggtgccacgctaataacttctacacccgaaacgcgttcctgagcgtcgtcaacgcgtacccgggattcgcccatgccgtgcacggacgtggaggacaggcgtgagatcaccgccttcttctggcacgtgccgcaccagaacgtgcgtctctgctacatcaccgagatcaacaagagcaaagtctactgccacgcgtgctacaggcagtgctcttgcccggctaatcagaagtactacgggcgcgcgcccctgcagatctcgtggaactacaactacg

SEQ ID NO: 10332 - DNA, 545 bp, Zea mays
  unsure (1)..(545): unsure at all n locations
  Clone ID: MRT4577_109425C.1
ggggggggggggttttttttttttttttttttttttttttttnttttttntttttttttttntttttttttttttttttttttttttttttttttttttttttttttggggcccaaaacattttttttttggtacaatttattacacaaacggggttagacgggggcaaaactacaaaacctgaaaacctgggggcccgaactttaaaaaaaaaaaaaatgcaacgttaattttaaaaaaaccgggggccggttttattttttttttaaaaaccccgtccggggaatcatacctcccttaaaaaaaaaagggggccccaactaccttgcttccttttatggaaagggggggttgatttcaaaggcccctttaaaaaaaacctgtttaatttgggtttccccaaaaacctttttttttaaatcaaaaaaaaacgggtccctccaaatgggcttttcggcgaccttttgtaccccttccaggtacgggggctccagccccttttcccctgtgatcctttgcagggggttgaaggggaaacccccctc

SEQ ID NO: 10333 - DNA, 288 bp, Zea mays
  Clone ID: MRT4577_109426C.1
tttttaaatcagttttcaggagacaaacattttttgtgggggagcttttttatatggctactgcgagatctttatactcctaaaattagattttgatttttcccttcttctagtggatctaaccaaaaagactattaaaaccggaacagagcctatacatcaattacctgacagaaaatataggcggccccgcgcacaaacacaataaacatgcacctgaccaaccagataacccaactcctacaaaatggccccacctgggcatcaacgggccgggacatccaaccc

SEQ ID NO: 10334 - DNA, 175 bp, Zea mays
  Clone ID: MRT4577_109427C.1
gctcttccgatattaacaccacccttcactataaagcaggcagacttatccaaaccattatttttccacagctctatctttttcacaaatgggtccccataaacctccattacctatgatcgggggtgggggggtgcccaacttcaattcctgtactaaatcatctctaattcac

SEQ ID NO: 10335 - DNA, 204 bp, Zea mays
  Clone ID: MRT4577_109428C.1
aagaaagggcccggcgccgaccgcccgcctgggagcccgcaaaccggccgcgcccgctgcagtcacggatcgggcaacgcacggggagaggcggcaagcagggtgggcgctccctcgctcgctcgcacgctgacaagctgcgcgccgccgctcgaatgaggacagcggcatcagcctcctcgaaggcggcgctgcggggaccca

SEQ ID NO: 10336 - DNA, 200 bp, Zea mays
  Clone ID: MRT4577_109429C.1
ggttgaatgtctccagcactatgcatccctattttctatttattgtgtacactcactttcagtaatgtgtttcaaactggtgttttttaaaaaacaaatcaatgtaaggactgaagttgaggtagcaatgtaataaagttaatttgtttatttttttgtagcaaaaaaaggtagcgggacaaaaaaaaaaagggggggcc

SEQ ID NO: 10337 - DNA, 181 bp, Zea mays
  unsure (1)..(181): unsure at all n locations
  Clone ID: MRT4577_10942C.1
cggctcgagcggggacctgtagtactgcaataggcagtacacaattgctgatcgctggattgatgtagcactcattcgatggcaatttacttnactcgttgtcctcatcgtcgtcaactgcactaccggatgagttgagttggttgagcctttcaatgatgctggcctacctctgctcata

SEQ ID NO: 10338 - DNA, 215 bp, Zea mays
  Clone ID: MRT4577_109430C.1
tcgtcactcacccagtcacccccgcgcccgtctttgctctgcctctgcgcgccgcagagcagagtatggcgcccccacgcggtaatcctcgccgacgtcttactatgtgtaggaaacattatggactgtgaaaatgggggatgaactacggtgagggaggtgggggtgtaaaagttaaatggttgagataggctggaagaggaataggggggggg

SEQ ID NO: 10339 - DNA, 203 bp, Zea mays
  Clone ID: MRT4577_109431C.1
gcacgcgtatcgtcagccttggattactttggagcgggcggacttgccgtcctttttttttttttttttttcagggtaaaaacggagcttaccaactaaaccggctgggcacgtggaacgaataatccaaaccaagtgagggccggcttaattttacatggacaagcaaaaaagctacttttctttgttgaccaagtggaaaa

SEQ ID NO: 10340 - DNA, 442 bp, Zea mays
  Clone ID: MRT4577_109432C.1
ccggaggagtgggtggaagagcagcagacaacgacaccgaatgattattagacaacaacagcacctcttgcgggggcgagctaaatgacaccgactctgacgactcctcagagacggaaactcgtccacgtatcagacacgaccccaacgccaaccacagcgctgtgggggtggcgaacggccggcgccggaagcagcgcggggcagaggacgccggagccgccggggaaggggaggaggaggccaagaaggacagcatgaagcgggccatcgtcaaactgcttacctctctggaggcgctggaagcggaagagcacgccgaccgcgcggacaccgcggacgcgggcaaaccgcagctggcgctgatcgagttcaacgccgacacccgctcgcatgccaccatggactactacgccaagatggcgagcagcttcgacgtcac

SEQ ID NO: 10341 - DNA, 786 bp, Zea mays
  Clone ID: MRT4577_109433C.1
gtgggtccacgcacgcgtctgcaatgcgtcgtctatacccgcgagggccgcgtcgtccgcgattcggcgggcgaaaacgaaggggggcctctttctcttctctcctctcctcctgtggtctctgcagcagagacactgctctgctcgattgctccgttgcgcctgcgcctgcgaccgccttgtcgaggagggggaggagtgtttgttcttgggcggagccggtgcagagggggcgagagagaaagaggtcaaaagagccgcatcgcattcgcatggggcagtgcgcgtcccatccggggccggcggccggcggcggaggcggcgttgcgaggagggggtgcctggcggtggcgcgggagcagcggtcccggttctacatcttccggcgctgcgtggccatgctcatctgctggcgcaagtacaagaagatctgacctcaccacgccctctcgcctgcacaccaaaacatgcttcagatcgcatgtttcagcgttgctagctcagatcagagcaccaagatcaccaactgattgatcatggggactatgggagtagtgatcaccgcttcggcatatttgtgcgatggaaagtgggtcctagctagtcatttggattgatcagctaggggcacactgtgtattttactatcgatgtcgatggagctagctgcgtactgtatatggtgggagtgggacggtaaaaaattcggggtgtttagtacaacggtcttcttgacaagatggaatacgtttctcctgaatctaaaacttatttcttgtggacttc

SEQ ID NO: 10342 - DNA, 750 bp, Zea mays
  Clone ID: MRT4577_109434C.1
gccggccgggccgcggaaacatacatactctttagctctatcgatctcgttgaaactccagtgctgatcgctgccactgccagcagatctagatgatccgtgtcacaaaccctcttgctttgctgctgcacctgcttgtctgcaaccgcgcacacagagaggtcgacgacggcgagttgtgcgtacctcgaccagaatttcgccctctccatgggttgctccctagaggcgaccctctgcggaaacactggggtagcgcaggttaacatcgcctccgcgattcccaccttggccagcgtgcggatgctgccatgggccaaggccaacatcaacctcaccgggcaggcgctcatcgtatccacgatggaatttgatggcctacttcatcttcgccgactagaagatactgtttgtggagaggcgtcactcgtttgagcaagaccctgaacacctcaagaatacctccttccagggcaccggccgcccccacccagtcttcttcaggccgtgatacgacacctccgcccaaatctagctacctacctctttttccagattgccaatgaaagcaccaaatggccaccgatgcatgcctgaataaactactgtaattgcgatgctgctgaacgtggatgcgctagtattactactactactacgagggtagctgcgcgctgaacactgagctgtaaagtagtgttactgtgctaaattcggaatgtgtaaggctaattgatgttattaccaggt

SEQ ID NO: 10343 - DNA, 417 bp, Zea mays
  Clone ID: MRT4577_109435C.1
atcggggtgggctttttctttttttttttttttttttttttttttttttttgggggacaaccggggttaacaatttatagaaggggcctttaaagtgttacagataaggggcaaaccctgttcaaaaaccaaaagccacaaaacctggtgaaaaacggtggggaagggaatttttttttctggccgggaaaaatttaatttgacattgcaaaaaggccctagccgttcatttagggaacttatgccttggcaggaagccgggcaaaaaatatcccccttctttgcggctcgatgaggcggagctatgaccccttgcccttgggcggggttacccagcggtgggtgcccttggcgaggggaaacaccttgcccatgggggggggaaaaagggggcccatgggggtccttgggtggaag

SEQ ID NO: 10344 - DNA, 455 bp, Zea mays
  Clone ID: MRT4577_109436C.1
gcgagaaaaaaaccatcacactgagctcatgggctaacacagctggtgcctatttcttgcggctccagcaatggcctggtccagagctccacctgcagctcaccctcatgggacagacatcggcgttgcatggccgtgtcaagcatgtgccttgacaacaaccccatgaacggcccagccgagaccatcaataacagcgctgtaccgcgcgcttgacgcctactaccaaatggccggtcgcctcacccgtagtgacgaccacctgaagctcttatggacgggcaagggcatattgctggtcgggcgcgctgttagctgacccctgcacgacgcacaggctctgaaaccggaggtgcgtgctcagtgtcgaggaccttagcttcatctataggcggcacacatggaggaccctgaactgctgctgatgcaggagaccaatgttttctgcgtcggtg

SEQ ID NO: 10345 - DNA, 393 bp, Zea mays
  Clone ID: MRT4577_109437C.1
aaaaaacaaaaaaggccctttttattttggggaagccccaaacattatccaaaaaacctatttttgaaccaaaacccaaaagcaaattaaaaggagggccccccccaagagggggtggggggaaaacaccggtgaatttgtcaaaaaaaggtgggtgaaagggaacaattggtgcaattgtaaaagggggcccccgttaggcaaaacgggcagggaaaacggcaacaaccggtgttgggtaaaaaaaggagaagggctcaaaaaaactagctgggtaaaagggaaaaattgttgctgctgtaaataaacagcaaaagtcaaaggcgcttggtgggtgaaaggaaaaaaatgcggggggggggcaaaaaacaactgggtgaaagggaaatgggg

SEQ ID NO: 10346 - DNA, 460 bp, Zea mays
  Clone ID: MRT4577_109438C.1
accacacgcccgaggcccgactgcaagcgcctgagcccaagacccatggccatggccgccgccaccgtcgcagcgtcactgcccgtggcgcaagggctcgggaagcccctctgcgccggcggcgctggtgctgccggaggtcgcggaggccgcgccggggatctccccgtcgctcaagaacttcctcctcagcatcgtctgcgggggggtcgtgctcgtcgccatcgtcggcgccgtcgtcgccgtctctaacttcgatcccgtcaggcggggttgagctgcatgcgtcgttgtgtgttgttgtacctatgtactgagatctctctccccgtgtgcttcccaatgaaaacagtgtttaatgcgtgaatgtgtaaatttcatttcatgccatctgtatgtatgtatgagacggattcaacagcgcattcggtttccgaaaaaaaaaaaaaaaaaagcggcc

SEQ ID NO: 10347 - DNA, 257 bp, Zea mays
  Clone ID: MRT4577_109439C.1
aaaaaacaggggaaaaaagttttttttccaccaaaataaagggggggcctgaattaaacatcaaatttgttgggcctccccaaatttttgggccaatgaaaagggggccaaacaaacaaaaaagttttgccttcccgagtttttgttaaaatttgtggggtttccctgaaataaaatgcccaaaagggttcctgttcttacatcagttgggggggaaaaaataaaaggggaatgggggggcttaaaaaattttattt

SEQ ID NO: 10348 - DNA, 1237 bp, Zea mays
  Clone ID: MRT4577_10943C.1
cacctcgcggtcctgaagaccgccgcgaacccgcgcggggacgcggagcagaggctggtggccatgatggcgggcgccctgtcgtctcgcatccgacgcccacccgcgtctcaccagcacctcgcgggcctatgcggcgccgagcagcgcgcggaatggcagctgctgcagcacgtctccccctgcttcggcctcgccctccacggcgccaacctcgccatcctcgacgccgtggccgaccagcgcgccatccacctgatcgacttcgacgtcagcgtcgcgcagcacaccgccctcatcgactccctcgccagccgccgcgtggccggcacgtgcctcaaggtcacggccgtcaccgacccgacgtcgccgttcacgccggctctggcgcaggcgctggcggccacgggccagcggctcaaggagcacgcccggcaggcaggggtggagttccggttcagagcggtcagctgcgtcgccggagaggtcgaggcgtccaggtcgaggctcgggtgcgacgagacaggggaggcgctggtggtgaacctggcgttcgccctctcgcgcgtcccggacgagagcgtgtccccggccaacccgcgcgacgcgctcctccggggcgtgcgcggcctgcgcccgcgcgtggtgacgctggtggagcaggagctcggcgcgaacacggcgcctctggcggcgcggttcgccgacgcgtgcgcgcactacggcgcggtgctggagtcgctggacgcgaccctggggcgcgacagcgcgcagagggcccgcgccgaggcggccctggcgagcaaggcggccaacgccgtggcgcgtgagggccccgaccgggtggagcggtgcgaggtgttcggcaagtggcgcgcccggttcggcatggccgggctgcggcccgtggcgatcggccagggcgtcgccgaccgcgtaaagggacggctaggtcccgcagcacgtccgggattcgacgtgaagctggacagcggccggctcgcgatcgggtggatggggcgcgtggtcaccgtcgcctccgcctggcgttagccgtacgtagcacccctagtgatgagctaatcatcagctcccggttatcgacgcctatcattcagagtacctcaggaacagccgttgtgcaaccacgaacgaatgcctagtagttgtaacaataatctctctaattttttacggcaactggtcgttggaaaaaaaaaaaaaaaaaagggcccgg

SEQ ID NO: 10349 - DNA, 649 bp, Zea mays
  Clone ID: MRT4577_109440C.1
taggggcctttttttttttttagtttaggtttttttttttttttaagaaaccgaatgcgctgttgaatccgtctcatacatacatacagatggcatgaaatgaaatttacacattcacgcattaaacactgttttcattgggaagcacacggggagagagatctcagtacataggtacaacaacacacaacgacgcatgcagctcaaccccgcctgacgggatcgaagttagagacggcgacgacggcgccgacgatggcgacgagcacgaccccaccggagacgatgctgaggaggaagttcttgagcgacggggagatccccggcgcggcctccgcgacctccggcagcaccagcgccgccgccacggcagccgcggccgcccactccttggccgagtgctgcttttgcgcggacgcccggacgacggccatcctggtcctggccgaccgacgacggggcgcgcccgcgacggcccggagcgacggcgcgttgctgccggcgcagaggggcttcccgagcccttgcgccacgggcagtgacgctgcgacggtggcggcggccatggccatgggtcttgggctcaggcgcttgcagtcgggcctcgggcgtgtggtggtctgattctgattgccccgacccggccggc

SEQ ID NO: 10350 - DNA, 703 bp, Zea mays
  Clone ID: MRT4577_109441C.1
tcgggggcgtttttttttttttttttttgcaattagatcatatctttttttagtccacaacataaagaaaccgaatgcgctgttgaatccgtctcatacatacagatggcatgaaatgaaatttacacattcacgcattaaacactgttttcattgggaagcacacggggggagagatctcagtacatagggtacaatacaacaacacacaacgacgcatgcagctcaaccccgcctgacgggatcgaagttagagacggcgacgacggcgccgacgatggcgacgagcacgaccccaccggagacgatgctgaggaggaagttcttgagcgacggggagatccccggcgcggcctccgcgacctccggcagcaccagcgccgccgccacggcagccgcggccgcccactccttggccgggtgctgcttttgcgcggacgcccggacgacggccatcctggtcctggccgaccgacgacggggcgcgcccgcgacggcccggagcgacggcgcgttgctgccggcgcagaggggcttcccgagcccctgcgccacgggcagagacgctgcgacggtggcggcggccatggccatgggtcttgggctcaggcgcttgcagtcgggcctcgggcgtgtggtggtctgattctgatgccccggccggcctcgaggtgtgctaatcgccatataaatgaatgcgtgt

SEQ ID NO: 10351 - DNA, 468 bp, Zea mays
  Clone ID: MRT4577_109442C.1
atgctcccggccgccatggccgcgggatttcgagcggccgcccgggcaggcgtgcttattatatccgttgccatattctcatcgcttttcttatttgaggtgccttcacttcttgttcattcatgaagtcatcagtttcagcagcaagaccagccgccggagatacaaatacagagtttataagaacatcatgcaagtcaacaacttatccaaacctctgtttcagctcattgacaagccgttcagctgctattggagtttcccctcaacttcttgcccatgaatccctcaccgtcagtctcgaaactgcccaatcaacatctgctatgatgctaaagctagcacacgtccaaggattgacccctagagaggttggtgccatgcatgactgtgtggaggaactaagcgacacagtcgatgaattgagaaagtccttgggggaaatgaagcagcttatgcgcaaagatt

SEQ ID NO: 10352 - DNA, 204 bp, Zea mays
  Clone ID: MRT4577_109443C.1
accaaaaaactaaaaaaacaatacatcaataatgctatccaaatcgtatgtaccggtagctggattgctgttgtcatccacgtcccataccacctgctcaaggtctttatgaagatccatgtcacactcgtcagggagcttgagaaaaaattcagcggcaaggatgtgagccattgctgctacaaggaggattgtgaggccacc

SEQ ID NO: 10353 - DNA, 366 bp, Zea mays
  Clone ID: MRT4577_109444C.1
ggggacaaaaatattacattcaataaaccgtccataaccgcaaacaccaaaacctcaaggggggggaaatatttttattcaggtccatataaactaaagttttaacttttaagctcaaagacaaaagaaacgagcccccacccatagcacgacacaaactaaaccacatttttttattttaaatcaaaccctaagtcttccttttattttatgaacacatttttattattatgggtttgggatctcaaccttcattcatcgcttttttcattccagttccttgaaaaaatttttgttgtccaccaaaaccgttttccagccatttggatcaaggaatgagacaattttggtgcccagtccaagaaa

SEQ ID NO: 10354 - DNA, 261 bp, Zea mays
  Clone ID: MRT4577_109445C.1
atggcgcaccggacagtccggtgcgccaccggtgcgccaacggtgcgccaccggtgcgccaacggtcgtttccaacggctagttctgacagagagccgttggactcatggcgcaccggacagtgaacagtccactgtccggtgcacaccggacagtccggtgcggtgtccgtttggtattgtgcggtttaattccacacgatgtagaggggtgatgcatggtattagggagatagggtttttagttataatccagctctaa

SEQ ID NO: 10355 - DNA, 185 bp, Zea mays
  Clone ID: MRT4577_109446C.1
gggaaatatctggttgggcattatttattttttcacatataaaaaggcaagtgcacccctgtggttggttcaatcacgaaactcacagggcatattagtttacaagcaccgcattattacaatacagacgctaaaggacatacccaagggtcatggggttactcacgtacttttttgtaaaggag

SEQ ID NO: 10356 - DNA, 343 bp, Zea mays
  Clone ID: MRT4577_109447C.1
gccacgcatgccttcttacttcggattctgcttatctgagctaccttcttggaggcgctcatgatttacaactatgagcatggctaagtacaacaaacgtttaatggatgttgcaaaaagcgactcacaggaccttttgttgaacaaactaatcgcagaagatatattaactgaataagaaagggacatacttctctggtcgcggaatattgcaacgcagataactcgtactacgaagcgagcacgaattgctgtataccacactacgatgttcactcgaaacactaatagcatatatttactttacaaacttcgaactgtcggaacaactgatgtttcaatt

SEQ ID NO: 10357 - DNA, 494 bp, Zea mays
  Clone ID: MRT4577_109448C.1
tatttttttctcgaggaaaaccctctttcatcgattttttcattcaatatggtatgacacagcccatcctctacgaaggcggcatagtctcaaagctatgcgcaacctccttttcccaccccaaccgatccttgcagtaaatctccgccgcaggcttgaactccggctccagcaagcccgtgcgcagcacgatcttgtcgtcgcccatggcctcctgcgcgtggtacacgtgtgcggtgcagttcttgcagtagaagcagtgaacgcccttgcccgaatcgcccttgtacgtgtacttcccgagatcctcgccctgggtgatcttcaagttcgccttggggatgatctggttgagggtgtatgtgccgccggagagctggttgcaggtgttgcagtggcagaggatgtgcgactgctggtcctgctcaagcttcgcagtccacttggtgttgccgcaatggcactttccctggaaggctgtcatgatgcggacg

SEQ ID NO: 10358 - DNA, 359 bp, Zea mays
  Clone ID: MRT4577_109449C.1
ccacgctggagagtatttgcggcggcgttcccatgctgtgctggcccttcttcgccgagcagcagaccaactgccgatacaagtgcacctgcgtgcgcgagggcccaacgcgctcgacggcacggatgggtttcgcttcacctgcctgccccggtttaaggatctcatcgccaggattaacgccgaggctgaggccgagggacaacccaccgtgacatgcgtcgtcggcgacagcaccatgaccttcgcgctccgcgccgcgcgagagctcggcctccgctgcgctacactctggaccgccagcgcctgcggcttcatcggctactttcactaccgccacctcgtcgagcgtggtatgg

SEQ ID NO: 10359 - DNA, 465 bp, Zea mays
  unsure (1)..(465): unsure at all n locations
  Clone ID: MRT4577_10944C.1
gtactctggtaatttgatttttaggttgatttgctttagttccttggttcagttgctttaccattttattacctgacatcactgtcatgtggctaaagagttaacttaactgatacgatgatttctgatggcttgagcaggatgaaggttgttgctgcctacctgcttgctgtcctcgctgggaatgccagcccctccgctgaggatttgactggcattctggagtcagttggctgtgaagttgacaatgaaaggatggaactgctgcttgcccaactgagcggtaaggacatcaccgagctcattgccgcgggcagagagaagtttgcttcaatcccatgtggccgcggccgtgtggctgttgcggcaagtgcacctgcttgttgcggagctgctcctgcagcttaggcaaaaaaaaaagagaaggtggaagagaaaggaaaaagcgattatnatatgggcttc

SEQ ID NO: 10360 - DNA, 345 bp, Zea mays
  unsure (1)..(345): unsure at all n locations
  Clone ID: MRT4577_109450C.1
gggggagggggggggggggggggggggaggggaggaagaggggggggggggggagggagaagggggggggggggaggggaaagacggacgagaggggggagaaggggagggggaagnnnggggggagcaagggcaaagcggcggcggcaagggagggcggcaagccactgacgatcgaggaggaggaggaagcgcctccgcaggccaaggaggagcgcgncaagagcgacaaaacgacggcaggggcacagcggagggtaccggagggagggcaagggggagacaggcgtggaggccgggagcgaggggcacgaggccggaggtatcatagagagcggaggagag

SEQ ID NO: 10361 - DNA, 2474 bp, Zea mays
  Clone ID: MRT4577_109451C.1
gccggcgtctgccggcgctcgtgccacaacacaacatagcctaggatgaggccgggagggacgccgaactggcgggcgctgcagccggcggagagcgcagggcgctcgcgccagcagccggacctcacgctgacgatgccgcagcgggatctgacctcactgtcacgtggctgtggcccttgctccccctacgtcatcggggtcgcatgtcagggccgctgtcgctcggaggagcgaaaccgccgacctcacccgcgggcggcggcgggccacccgccgtccctggggcagctggagcgcgggcggagcgccggtgacggcgcgcttgcgacggtgggagtgccgggaaaaaaaaaaaaaaaaaaaaaaaaaaaaaaaaaaaaaaaaaaaaaaaaaaaaaaaaaaaaaaaaaaaaaaaaaacctttgtttttttctatacgcatagggacacatatgttacgcttataaatatcctttataaatcggttgccccgacggggcggggggggcaaatcaccaattctagcaaggcagctcagcagcttttgtagcgagcttcttggagccttgaaatgagtagtagtggtagcctagccaccacgagtagcaagtaggcactataggcactaggaagtagctaaagcagtcataaccatgggttcgctgccgccggtggacgggcagagacgccccccacacgttgtgatgatcccgtacccggcgcagggccacatcacgccgatgctgcagtttgccaagctcctccatactcgcggcttccacgtcaccttcgtcaacaacgagttcaatcatcgacgccacctgcgtgcgcgagggcccaacgcgctcgacggcacggatgggtttcgcttcgccgccatcgacgacggtctcccgctctttgaagcggacgccacccaggacatccccgcgctctgccactccaccttgaccacctgcctgccccggtttaaggatctcatcgccaggattaacgccgaggctgaggccgagggacaacccaccgtgacatgcgtcgtcggcgacagcaccatgaccttcgcgctccgcgccgcgcgagagctcggcctccgctgcgctacactctggaccgccagcgcctgcggcttcatcggctacttccactaccgccacctcgtcgagcgtggtatggtccccctcaagaacgaggagcagctcacggacgggtacctagacaccatcgtcgactggatcccgggcgcgcccaaggacctgcggctccgggacttcccgagcttcgtgcgcaccacggatccgaacgacgtcatgctcaacttcttcatccacgagacggagggcatgtcgcaggcgtcggcggtggtcatcaacaccttcgacgagctcgacgcgacgctgctcgctgccatggcgaagctcctgccgcccatctacaccgtgggcccgctccagctgacggtgcggaacaacgtgcaggcgaacagtcctgtcgctgctattgggtccaacctgtggaaggagcaggaggcgccgctccggtggctcaacggccgtgcgccgcgctccgttgtgtatgtcaacttcgggagcatcacggtgatgtccaacgagcagctggtcgagttcgcgtgggggctggccaacaccggctactacttcctatggaacgtacgcccggacctcgtcaagagtggcgactccgccgggctgccgccagagttctcagctgcgacagagggacgaagcatgctgtctacgtggtgcccgcaggcagctgtgctggagcatgatgccgtgggggtgttcctgacgcactccgggtggaactccacgctggagagtatttgcggcggcgttcccatgctgtgctggcccttcttcgccgagcagcagaccaactgccgatacaagtgcaccgagtggggcatcggaaaagagatcggtgacgatgtacagcggggcgaggtagagtcgctcatacgggaggccatggagggggagaaagggcaagagatgctccggcgcgtgactgaactcagggacagcgccgtggccgctgcagggcctgacggacggtctatgcgcaacgtagacaggctcatcgaagaggtgctcctagcctagattgagcactggtgagcatcctagcagtcatgtgtcttcgcgtctggcactccaatcgattcaaatcctttgtgttttgatgtcaagcgtttactttcggtacccataaaagtattttctcgtacaaggtggtgattacacgcaaagcacattgttataagttcagtttgtaagatctatgggtaaaaccaagcgttttgtataattaaggaccgtttgagagggctacgactcctttaaaaacagctctagctccggctcctttaaagtaatagctcctccgcaggagcaaatgttatttacttttaaaaaaaaaaaaaaaaaaaaaaaaaaaaaaaaaaaactcgca

SEQ ID NO: 10362 - DNA, 394 bp, Zea mays
  Clone ID: MRT4577_109452C.1
cggacgcgtgggcggacgcgtgggatacaaagcaggtgcgctgaagaagggcatggaacatatatacgccaagcaatgtgaatttgttgctatctttgatgcggatttccaacctgaacctgacttccttttaaaaaccataccatttcttgtgcataacccaaagattgcacttgtacaagcacgttgggagtttgtgaactacgatgtttgcctgatgacaaggatacagaagatgtctctagactatcatttcaaagttgagcaggaatcaggatcatttgtatattcattttttggctttaatggtacagctggtgtgtggcgtgtatctgctattaaccagtctggaggatggaaagatcgcacaactgtagaagatatggacttggct

SEQ ID NO: 10363 - DNA, 431 bp, Zea mays
  Clone ID: MRT4577_109453C.1
ctctataaaagaatttattatggcccaagtgacactttaaatgttgtcttccattgaatgtcacctatatatggaagtgctaatggtaatgggtgagaaatggagaagtatggagttggaaacttggtggcgaatgaaatctgtagtgaaagaagtgtttgtgctctagtcatttccaacgcaccattttttaccaattcgtgggcttaataaagagtgggaaaaatggctgattagcatcaatttattctatactgtaattatgataatattacttcatcacaatactgtagatttttttttatcgaacgcagaagagttgcgtatcattatactaaaaagaaaaaaggtctaaaacagaccgatacaaaccgccgaagcggtaaaagaacgaaaataaaagagggttacaagacatcagagagaacccg

SEQ ID NO: 10364 - DNA, 818 bp, Zea mays
  Clone ID: MRT4577_109454C.1
aattttcacaagcagatctaagctctatttctagttagctacctcagggggtcaaaaatgtctccctttctcgctgttgtcatgaaccacgctgctccccatcctggacttaggagtcacctagtacgacccaacaatgatagtttctcacggcaccacctgccgacttcttctccacagagcagcaatggaatgagtaagctttatctttactacacgatcaggaacagtaagcagacaatatggagaccagatgatgatcccctcgcaaatcccacagagagagtggttcccctctgacttcaccttcgtggccgtcacttcattgtaccaaatggaatgtgcttggaatgaacatggaaataccgaaagctactgcaatctcttctgccactatcatccgaaaaggatactggacgcgagtaattccgacattgcaacgaattcgtaccatatgtacaaaacgtacgtcatattgctcaaggaaatgttgatgaacgcatatatgttctctatctcttggcccagaatactgccgaagggaaccaaagaaggatgtattaacccggatggcatcaagaagtacagaaacctcatcaacttgttgctagacaacggcatagagccatatgtaacaattttccactgggatgtacctcaagcactagaagagaagtacggcggcttcctagataagagtcataagagcattgtagaaagatacacatactttgctagagtgtgctttgataactgcggcgacaaggtgaagaattggttgaccttttatgagcccagacatttactgccttttctac

SEQ ID NO: 10365 - DNA, 220 bp, Zea mays
  Clone ID: MRT4577_109455C.1
gtctccatattttctttttttttctttgacaaaacatcaacggggaaaagaattctcgcctctttaatccataaaacaaaaccgggattctagagggctcctggagatatctaaatgtctaaacaaccaacttttttaagatttgtttgaaaggaaattgaatttttcttttggcaagacatttaatcttcagtcagtgcaacttcttctgggagatttt

SEQ ID NO: 10366 - DNA, 220 bp, Zea mays
  Clone ID: MRT4577_109456C.1
tcactcagcatgattttttttgagattatgctaccatccatgttgttgcccctatcagtacagctggccctccatatctacatgttcctcatccatggattcaactaaccatggatggagaatatttggaaaaaataaaatatataaaataatacaacaataaaacagtagaaatttaaaacaggtacattatttacataccatttacactgtactaggt

SEQ ID NO: 10367 - DNA, 479 bp, Zea mays
  Clone ID: MRT4577_109457C.1
tcggtcttgaattgcctggccgacccactcgtgcgatcggcatcttcctccccaaagtttaccctttcctcaaggaaccttaattttagattcttgaagaatatgagtcaccctgtatttttggtccaatcttttaacaactatggtcctatgcttgctctaatcaacttatttataggcttatattttcttatgtttcataatatttccttgtattcatatttttttgaccttttatatttatttttccaattttttattttattttttgtttctatttttattttctttttttacctttatatcttttttttttttttatttttttttttttatattatttctttttatatttttattttattttttctttttattttttttattttattttttattttacatttttatttttattctatttattttctttctttttaattattttttatttttttatttatttattcttatttttt

SEQ ID NO: 10368 - DNA, 421 bp, Zea mays
  Clone ID: MRT4577_109458C.1
ggcaggcgcgttttggcctgccacatggaacagccctctacgccaggaagttccggctctcctgctcagaaatgaatggtcgttacttcagcaatgaattcatcgtggaggtcagcgttctgcacagcgtgaaccgggtggcccaccccagccacatgctcagctcccagcagttcctgcaccgaggtcaccagccaccgtctgagatggctggacacagcctggccagctcccaccgcaactccatggttcccagtgcggcgaccctcatgatcgaggagtgcgtgggctatctggtgctcatggtcatgctgggtctcgtgcgcattcactgactgcaccgccgcgtctcggaggccagtgggcctgccggagccttcagcgaccccaaggatcccgatctcttctgggatgactcagc

SEQ ID NO: 10369 - DNA, 363 bp, Zea mays
  Clone ID: MRT4577_109459C.1
gggagacaagaaggccccacaagccggaaccagccacaaccacggccaaaaccaggcacgagcacaaggaacacagcccacggacgaaaaagagcaaaacgaacacgcccggcagaccccccgggcatatcagcactcagtttgctggtgggattatcatgacccatggcgatgatgccgggctaaagcttactccaaggattgcacccattcaggccataatagcacccatatggaaaaagggtgatgagaaagctgttgctgtggaagcctgagactcagattcaaaaatactcaaagaaagcaagacttagagttaaagtggacaactcagaactgctaacccccggatggaaattcaat

SEQ ID NO: 10370 - DNA, 261 bp, Zea mays
  Clone ID: MRT4577_10945C.1
attcggctcgagctgacaacaactgattatgtcaaccactcaaagccacagacaatggcgctgcattgttgcgactgactccaactgcctgtggtgtacccaatattccatgtaattctcaccgctactactaaatgtgaagaatttagctccttgaaccatcttactacactacagtctgttgtttatactactactcaacaacctggatgtaaactatttcttgcatcctacagacagaacaacaactctcatgcaata

SEQ ID NO: 10371 - DNA, 284 bp, Zea mays
  Clone ID: MRT4577_109460C.1
ggctgcaccgacggtgcccggctctctctgaatccaccagcgctgcccgactcctagaaatgaacaagacacggttagaagagctgtgcctgaagctatgatgggcgccgccgatgtatcagcctaccacagaggggcatgcccacacgccaatcttacgaaccactagacggcgcgaatggatagaggttcagcttacggcactgaatggtgacgacactcaaggagacccacaaccctcgtgaagatggccgacttcaaagcgtaatctagctatccaccga

SEQ ID NO: 10372 - DNA, 285 bp, Zea mays
  Clone ID: MRT4577_109461C.1
gataaatgaagcccatggttgcttgactgagctctattctactgggagggtgaaagaattgcttgcacaaggtgtgcaacaaagccgataccatgaaaaaactcccgaacaggaaagaacatgatttctacacctgaagacaaatgccttttactgtaccacgatataacttatgggactgctgcgcttggctgtgttttaaaattccactggtcgacatgaccacattgttggtttgtacaacaattataggcaatcacaggattcgattctttgagtatgggt

SEQ ID NO: 10373 - DNA, 178 bp, Zea mays
  Clone ID: MRT4577_109462C.1
ggtccgtaattatctcgttcgacccacgccttctttagcattttattcttaaaccttgtgcaaatacatttgttcactgggatatagggaatgggggctgggcttgagcatgttggttctctaaggatgcaacacacaccgtgtgttgttagagaatgctacttgtttttcttttcat

SEQ ID NO: 10374 - DNA, 1864 bp, Zea mays
  Clone ID: MRT4577_109463C.1
cgaagtcggaactcgactaggcggccaccgccacagccccgccccgccccgcccccgcctcccgagccgagcgagcgactcagcgagcgcgcaacggaaccagccgccgcggcgcgccatggcgccgttccagatgcgtttcgggctccagatctctcccgcgcgctccgacgacgacgaggaggaggacgaggacgacgacgacaacgaggaggagtatgacgagatggcgagcgaggggacggcctcgccgccgatgatgctccggccagggaggggagggggagggctggtgagcgccgtcgtgggcgcgctgcggaggtcgctggtgatgtgcagcgctggcgccgtggatatcgacgacgacgacgacgaggaggagggcgggatcgagatcgggcggcccacggacgtgcaccacgtctcgcacgtcaccttcgaccgctttggtggcttcctcggcctccccgcggacctcgaacccgaagtgccgcggcgcacgccgagtgccagtgtaagcgtatttggggtttcacctacctctctgcaatgttcatatgatccaagaggaaacagcgtgcccgtgggattgctaatgatgcagaggaagttatatgatcgcggaggacttaaggttgaagggatctttaggattaatgcagaaaatagccaggaagtctatgtgagggaccaattaaacagtggagtggttccaaatgaagttgacttgcactgccttgccgggttgataaaggcatggtttcgggagcttccttcaggtgtattggatgcactgacaccagaacaagtaatgcactgcaacacggaaggggggtgcgctctccttgcttctatgctaccaccagtggaagcagcattacttgactgggccattaatctgatggccgatgttgtagagcaagaaaactacaacaagatgaacgcccggaacatcgcgatggtttttgcgcccaatatgactcagatggccgatccgttaactgccctgatacatgcggttcaggtgatgaatttcctcaagaccttaatcttgaagactctaaaggaacgaaacaaaaaggatgaggcacttgaggcgttgcaaccatgctccagctctccaaatgaccaagacgaacatcaggtgtccgagcatttggagaaaccttcagttctgccaaatcaaaaaggcttcggtttccacatgaatgatagtgccactcctgttcaagtccttggagctgagaaaactctccatcatcactcacaaatccgttctcacgagccaaaaaagtttggaaccgatatggaccacaagaaaagacagagtgatgcctcctctctcctcggcagcgattcgagcaaccgattcaacagttctgggagagaattcggtagcagaaatggcgcgtccgacagatttagttttaggaaaggggtggagaggctttgcaggcatcccgtgtttcagttgaataggtccatgaagaagtctgcagatgccgtggtcttcgatgccccccgagaagcaagacaggcttgggtgtgatacaataacgacattgtatgtattatgtagttctgtttccacctgtgtttcagctgataagccgttcccactagtctgtgtgagtagaatcggttagcctgttaggtgttacaaaatccaggttatttggagtgtacattatcgcagtttacttttttccgacgaaagtgtcaggagaagtacacactgtacactagcacgtgtcttgtgcggaacgaacgaaagcgagagtgaactcaggctccatggctgcgcgctgcatacctcaagcgttagtgaccccttgatattataaccttgctgatattttgtaac

SEQ ID NO: 10375 - DNA, 349 bp, Zea mays
  Clone ID: MRT4577_109464C.1
acaacgacttttacgtctggcgcacgcagccgcaggcttggattctctagagggcggccctcattattgttctgttggccacccacagagcggacacagtcaatcagtacatgctgcgtgatggtcttgtccacatgcaaccatggcatcatacaggccatcattaggctggatgaccggactctaactcccatgggtcctacaggaacataaggggggctgcctgaatgatatggatgctactgacagcctcgcgggagggctccctctttagctgctgactggcggacgccagcacgtctttgaactgcacgtacgaagctctgattggttgacgctgggcgaccat

SEQ ID NO: 10376 - DNA, 253 bp, Zea mays
  Clone ID: MRT4577_109465C.1
gcggaggggccggatcaatttcatcggctacaacaacagtaacaactactgaacagtctgcctatttcttcaacttttgctgcccgtctaggttagatttactggctgttgttactttgtttgcaatcctccacattccctgacacaaataatggggtggggaagtgccggcaatataagctatctcctgtttttgactcggttaaaatgaataaaaaaaaaaaaaaaagcacctgcccgggcggccgttcaa

SEQ ID NO: 10377 - DNA, 788 bp, Zea mays
  unsure (1)..(788): unsure at all n locations
  Clone ID: MRT4577_109466C.1
ttcttgagctgacaatgaggagctcacagatcttctagccgcagaggaatcgaaattctccgatgacaagtccaagaagcctttggcactcatggaggatggcaagggtggagtctttgttagagggctcgaggaagagctagtttcttcagctgccgagatctacaggatactggagagaggctctgcaaagagaaaaactgctgaaactcttctcaacaagcaaagcagtcgctcacactctattttctctatcaccatccatattaaggaatgcacacctgagggtgaggaaatgatcaagtgcggaaagcttaatctcgttgaccttgctggctctgaaaacatatctaggtccggtgctagagacgggcgagctcgcgaagcaggagaaattaacaagagtctgcttacgcttgggcgtgtcattaatactcttgtcgagcactctggacacataccatacagggatagcaagttaacaagattgttaagagattctttgggagggaagacaaagacttgcattatagcgaccatttcaccttcagtacactgccttgaggagacgctaagcaccctggattatgcgcatcgtgcaaagcacatcaagaataagccagaggtcaatcagaagatgatgaaatctgcgctcatcanagatttgtattttcaaatggaccgtctcaagcaagaactatatgctgcaagggagaaaaacggtgtttacattccgagggaccatacatagcagatgaatctganaagaaggctatgtcagagaaact

SEQ ID NO: 10378 - DNA, 485 bp, Zea mays
  Clone ID: MRT4577_109467C.1
atgcacgcctgcggatgctcggaattcgtctcgagccgacttttccagctcatttgtccgcggccgcactggatagaggactttcggtggtctttaaactccgccctggggcggcagacccaccacccaccacatggccctcatgccgggtggggcccacggcgccgaagcctgggaccagatgcaggttgaccagacgctaccccctgccaccgcaagcacatcacaggccaccgacgaccccaagcatgctgggactactgatcgacgggagtgaaccggtcacaggtcatcatctctctacaaccattggagggaagaatggaaagcctaaaaggactatcatctacatggcagatacagttgtgggaactgcatcatttggaatcgtgtgccaagctcaatgtctggagactgatgagactgtcgcaattaataagggtttgctggacatgcgctccaatatcatggagctactaatcact

SEQ ID NO: 10379 - DNA, 145 bp, Zea mays
  Clone ID: MRT4577_109468C.1
cacgcgtcgccctcgtaccccgccaccgaggggcgggagacgctctaccgaagcatggtgcgcctataactcaatatgttgcactgagttagcctctatcccgcccacctaaccgaggctgtctccgacaccaccaccagctccc

SEQ ID NO: 10380 - DNA, 301 bp, Zea mays
  Clone ID: MRT4577_109469C.1
gttagataacttttcctttggtttttctcagtatttcggcaaccatgacaagggatgaaacaaggggcgttaacaatggaatgaagctggaccctttaagccctgttccaaagaaatttgcatttttgcagggcgctagtaacaggcccgtttacaaccgtgggggcagtaacacaaggcaccggtgccgcacggttttttttagggaaaagaaaccaatttttgccgggaggggcctaccaaccatggggtttcgggttcaaaacccgttgagcttgtccttgggggttttgttggtgaa

SEQ ID NO: 10381 - DNA, 423 bp, Zea mays
  unsure (1)..(423): unsure at all n locations
  Clone ID: MRT4577_10946C.1
accggtcctaattcccgatcaacccactcttcctcccactcgtccggattcatgcaactgattatttgtgtacatatactgcgagnnnagttnnanaaccatttgtttcgtttttnannnananacacannanactatctacnncaacaactattntcaccccctttttacaaantaccatcaaaataacattcaaaataaaacaatacttcattaaatacatcttcaaaaaatttttctattatatatattttcaaaaaatttattcaatttacaacaatatctttatataataacaataacttaatgcactagattgaatcatgcatttaatttctttaatcaacgtaaccatatatttattatcacattattcatttttttttttttactcaatcatcattttacctaaaaaataatttt

SEQ ID NO: 10382 - DNA, 213 bp, Zea mays
  Clone ID: MRT4577_109471C.1
cttttaattatccctacacactcaacttctaccattaaccaataaatttaatacactacttatcaatcatcccaatacaacactacttcacaacaatctcttacattaactcaatatatctccaacaccattcttacaaaaacttacatactcaacaactactctttccctaaagctaaaacctcttattatttcctcctattaacaccttta

SEQ ID NO: 10383 - DNA, 290 bp, Zea mays
  Clone ID: MRT4577_109472C.1
cgtcgatgctgatcactcatcagaatctcaaagcgttgcacctgctgaggttcgaaaggagcaaccatcagaacatcaaaaggatgtggatatggagcagctattggaccctcaaaatcaggatcatccttggaatccactagatcctgttagtgatacagctgccaaggattcatcagagcctaaaagtgacatagctacagaaaaacctgcagaatctcaaaacaatgcagaacagtcagttgagcagcaatcagaaccgcacagcgataaatcaactgagaggccag

SEQ ID NO: 10384 - DNA, 386 bp, Zea mays
  unsure (1)..(386): unsure at all n locations
  Clone ID: MRT4577_109473C.1
gtgttcatgatctgtactcttttgaaatatctgcagacatggnaacaagcactgttgaaaaaagagccattcagaaattagtgaagttcttccaaaattgcctagaacagtattttggccatatattggacgctttcttgaagataatcacgaaatcttctaggctaaatacaacaatgtctaccaatggtttaacaacattgcacattgcaagacttgacagttcaaatttggtggtcgcaaaagtgtggagacttgaattcatataaagttaggcttaacattagtgcaaacagttgtattttagtttagatttagagtacacttatgtatgcgttatttgacaatgcttatttatgatatattgaatgatacttatttatatt

SEQ ID NO: 10385 - DNA, 1188 bp, Zea mays
  Clone ID: MRT4577_109474C.1
ccggccggggtaaaaaaaagtacgaacaatccaaaaggagtccaaagtccatccatcggtccttccgtctcgacaagcttcttcatctcctccgtccttcaccgcttccttgaccctctctctcccccaccccacccacggaaagcttcgagctttctctctataccccagggagaaggaaggaagccggcacagtctactggccttgtggtgccggcaactgactaggatcgagaaatagggttcttggagagcggccggtccatggcacagcggggcgagctggggcggcagctcccgctgagaggccccctcaaagccctagaggcagacatccaccacgctaacgccatggcagatgctattcagaggaattatggtggcgcatgtgtgcagatgaggctgtcgttcagctccctggctccattgtttttgtacttcatccaatggctggactgcggctgctgttatgcccttcccagctatttaggattgtttcacattctcatatgcaaggtttatgctgatggagatagctcagtgtcgacatatgaaaggcgggcaagccttagggaattctacgcaattatctatccgattctgcagcagcttgagagtagtttgatcgagagggacctgaaagggaagggccgatgcaaggatatagtgagtaggaggaggatggaggattggaaaaaggtttccggtagggatgtggaaagggaggatgaatgcgggatttgcatggaggcatgcaccaagatggtcctgcctaattgcagtcatgcaatgtgcataaagtgctatagggactggtataagagatcagagtcatgccctttctgccgaggaagcctcaaaagaatccggtcgacagacctttgggtgcttacaaattccaacgatgtcatcgaccctgcacatttagaaaaggaaaacgtgaggcatttctatagctacattgacagcttgcccctaatacttcctgatagcattttctttttctattacgagtatctactataacgccaaggcaacatacatcagatgtgtaaattgcgaaaagcagatgaaatcatggttttcttttgtagatgaaccccctctcactctgaccacatgcatgtctatttacccataggctgctaatgtaaacattaatgcatctgtcaataaagttgttaggag

SEQ ID NO: 10386 - DNA, 782 bp, Zea mays
  Clone ID: MRT4577_109475C.1
cctcgaggccggccgggatttctattctcgtgtgcgtttctgtacctaacctagccgccgcacgagcacggcgtcatcgacaaccatcgacgattgctccatccccgccagccgccgaccagctgctacatcctgcaacacgaggacaagtgctgcatcctacagtccgttcgagattgtttgtaagttgtttgtcgaacaagttggcaaagggaatcgaccaaacacttacctcaattcagttgggtacgctgaggtggagaaaggattcaaagataggacaggtattgatgttacaaagtcacaactcaagaataaatgggacaaattgaaagaagatttcaaggcatggaggaaacttaagttgcggcaaacaggaacggttggaaccgtgaaaagggcactattgatatggatgatgattggtggaaaagagctagagcggatataccaggatgtggaaagttcaggaagcttggccttcaaaatgaagatgagatggctaggtgctttggagacatcacaaatattggttgtgatcactggtctcctcgtgttgcaaatgattctattgcaactaatgttgagcaaccggacgttgtaccaatgtttgaaacacaggatgaggaattcattcctgcaactcaagataatgaagacaatgctagcactccatctccaggtagtgggaaaaggttggctaggccagttcaaggaaaaggaaagaaagctaagacaggaaatgcactcctcatccaagaagcagtctcaagcatggctag

SEQ ID NO: 10387 - DNA, 228 bp, Zea mays
  Clone ID: MRT4577_109476C.1
ggctaaatagaacgcattataaggggttcatcaaggctacacaacttgagcatagctgagtgacctttttgcacaatctgtttctagacacccaagcaacaccagacaaactctgggtttacatactggggcaaaacacaataatgatcttttaaagagatatcggaatatagtaaaatagcatatcttaaacaagatctagcctgggaaaaccttgagggtcgctac

SEQ ID NO: 10388 - DNA, 1171 bp, Zea mays
  Clone ID: MRT4577_109477C.1
gatctcacctagccgccgcacgagcacggcgtcatcgacaaccatcgacgattgctccatccccgccagccgccgaccagctgctacatcctgcaacacgaggacaagtgctgcatcctacagtccgttcgagatgccagaaattgattggaaccttgagaatacacagattgtttgtaagttgtttgtcgaacaagttggcaaagggaatcgaccaaacacttacctcaattcagttgggtacgctgaggtggagaaaggattcaaagataggacaggtattgatgttacaaagtcacaactcaagaataaatgggacaaattgaaagaagatttcaaggcatggaggaaacttaagttgcggcaaacaggaacggttggaaccgtgaaaagggcactattgatatggatgatgattggtggaaaagagctagagcggatataccaggatgtggaaagttcaggaagcttggccttcaaaatgaagatgagatggctaggtgctttggagacatcacaaatattggttgtgatcactggtctcctcgtgttgcaaatgattctattgcaactaatgttgagcaaccggacgttgtaccaatgtttgaaacacaggatgaggaattcattcctgcaactcaagataatgaagacaatgctagcactccatctccaggtagtgggaaaaggttggctaggccagttcaaggaaaaggaaagaaagctaagacaggaaatgcactcctcatccaagaagcagtctcaagcatggctagctcggccaatgaatttgttgccaagaaagatggaaaatattctattgatcaagtgatggaaattgttattgcttgtggtgctggctatgagacaaatgagcattacattgcttctgagttgtttgtgaagaaagagcagagggagatgtttatgacattacctactaatgagataaggttcaattggttgaggaggaaatataatgacaagcatgcaaaatagaagtggtcctcaatgactattatcacttgtatcccgtgtttttttattttccagttggtactgccaatgtaattttttgcttaaacttgagtttcggcatgtggaaccaatgtaattttgtcgttaatgcaaaactgaattggaaccaaaaaaaaaaaaaaaaaaagcggcc

SEQ ID NO: 10389 - DNA, 789 bp, Zea mays
  Clone ID: MRT4577_109478C.1
ccgggacctaacctagccgccgcacgagcacggcgtcgttaaccatcgacgattgctccatccccgccagccgccgaccagctgctacatcctgcaacccgaggacaagtgctgcatcctacagtccgttcgagatgccagaaattgattggaaccttgagaatacacagattgtttgtaagttgtttgtcgaacaagttggcaaagggagtcgaccaaacacttacctcaattcagttgggtacgctgaggtggagaaaggattcaaagataggacaggtattgatgttacaaagtcacaactcaagaataaatgggacaaattgaaagaagatttcaaggcatggaggaaaagagctagagcggatataccaggctgtggaaagttcaggaagcttggccttcaaaatgaagatgagctggctaggtgctttggagacatcacaaatattggttgtgatcactggcctcctcgtgttgcaaatgattctattgcaactaatgttgagcaaccggacgctgtaccaatgtttcaaacacaggacgaggaattcattcctgcaactcaagataatgaagacaatgctagcactccatctccaggtagtgggaaaaggttggctaggccagttcaaggaaaaggaaagaaagctaagacaggaaatgcactcctcatccaaaaagcagtctcaagcatggctagctcggccaatgaatttgttgccaagaaagatggaaaatattctattgatcaagtgatggaaattgttattgccttgtggtgctggc

SEQ ID NO: 10390 - DNA, 313 bp, Zea mays
  unsure (1)..(313): unsure at all n locations
  Clone ID: MRT4577_109479C.1
tttnnaaagattagattcntttttattttatttagtcnccccaaacctcnttcccctcccaatccttaacctaaaacaaatttaaaatcttcttacaaatccatttttatttttctcattatttttccaaaatacccctttacacattttaatacctctttacctaaaatttccttaaacatcccctccatttttttcaaacccttttccccaatttcttcaaaacccccaacataataatccccatccacccttttcttttttaacaatatcctacaaatctaaaaattcaaaacacccatcctacaaataa

SEQ ID NO: 10391 - DNA, 323 bp, Zea mays
  Clone ID: MRT4577_10947C.1
cccaaaacccagacatggtgcttttctataccggcccacagcggatcgcccgatgccgctgtcggtggcggcgtgaatgacaacttgcccaaccggtggttcaggccggagaccgactccccgtgctccattcggttcatccatatcgaggagcatgctatgaaggacttgaatcgcttttacaggagcgtgaggatcgtgtagccgaacgtatagtatcactggcggccgttgctgtctttgcggacagtgactgatgtcacacacaccctctttaggctcacccttccatgtgacactggcgtcgtgtacattcgagtgta

SEQ ID NO: 10392 - DNA, 428 bp, Zea mays
  Clone ID: MRT4577_109480C.1
gaatcggagaaacaggaacatttcatagattagaaccatgtacaatcccatggcagcttctcatggccaaaggacattacccaatcggccaatcctaccagaaccataataccccagactcaacatcagataaggaagcacgagcatgaccaagcggccccataactaatttatcatatacttaatagcaggactccctgtacagattagcactggaaatcaagcgttcggcatcctaatccacaggaactagaagaaccatgggatggcgatgttagccatcgcaccaagaaagggacagctggaaacatctgaaaagctcctccgatttgcagcagcagcagcagcacggcgccgaatcacctctgctcctcgatcttgtacgagtccagattgacgtcggcgagagacagccccgggtacagcat

SEQ ID NO: 10393 - DNA, 413 bp, Zea mays
  Clone ID: MRT4577_109481C.1
agaaaatggcacccaattactgccctcgaggtgttgttagacttaatgggtcactacgcgaacggtcagtgtagttctatgcatgcatctacaataacagctgtttaagttgcacaggcgcgagacaaatggggtcgtagcgccatcgttttgttgtcgcgtggtcatgatattccatcggcgaacatcgacaactctgccacgcacatgagtatttgtgttcaacctttaatggtggatctgtttttttagaaatgtgtcaagagaagttgaaaatgatgatactggtcaccaaaactggattggggtataatttgaataccggttattccttgaccaaatgttaacaaccaaagtttttaagaaacttaaattatttattccattagcttgaatcggtcaatggtgggtta

SEQ ID NO: 10394 - DNA, 783 bp, Zea mays
  unsure (1)..(783): unsure at all n locations
  Clone ID: MRT4577_109482C.1
gacgcctgcaggtatcggtccggaattcccgggtcgacccacgcgtccgcttgcatctcgctgctgcagcctcccgggctccggtccatcctttcagtctgagaccggcccagaagaaaaaaaccccaaaaaccttaattttctttcttgttcggtacctacattggaaccatcaaaaacaattatttcagtaaaccgtagccatgagggaaatcgtgcacatccaggccggacagtgtggcaaccagatcggtgctaagttctgggaggtgataagcgatgaacatggcatcgaccccaccggtacctaccacggtgacagcgacctgcagctggaccgaatctctgtgtactataatgaagccacaggtggcaagtatgtccctcgagctatcttggtggatctagaacctgggactatggactccgttcgctcaggtccttttggccagatcttcagaccagacaacttcgttttcggtcagtctggggcaggcaacaactgggctaaaggccactacacagagggagctgagttggttgactctgtcttggatgtggtgcggaaggaggcggagagctgtgattgcctgcaaggctntcagctgacccactcactgggtggaggcactggctctggcatgggcaccctgctcatcagcaagatccgggaagatatcctgaccgtatcatgaataccttcagtgtggtgccctcgcccaaagtgtctgataccgtggtcgagccctacaatgccaccctgtctgtccatcagttgggttg

SEQ ID NO: 10395 - DNA, 308 bp, Zea mays
  Clone ID: MRT4577_109483C.1
tcagcaactacaggctcgcatcctcctttcccccgcaattccgacgatcaacacgagggtacttccataaaactatctccggaattctttccaacagtcaagatcatccttaaccctagctcctctcatgatcaacgttatgtggctctcctctccataagctctgagaccgacacactaaccatgacaacatctgtaaccacctccacctactgctctatgacctccatcttctcataaaccacctcctatcaaaactgacactaccagcaagatgtctactgacataaccagccacaccaataact

SEQ ID NO: 10396 - DNA, 204 bp, Zea mays
  Clone ID: MRT4577_109484C.1
aagatccttatgacatactcgacttctattacgaccgtctcaaatatattactggcgaaggtaactttcataggggtgcgggcacattcaaagactgctacctcctctatcgcctctagctaacactgactgaaccagtccaacttctcataatgctactcctctcatggaatccacactatgaatatgctgagatagctatac

SEQ ID NO: 10397 - DNA, 273 bp, Zea mays
  Clone ID: MRT4577_109485C.1
aaactctagagagctcgcttacacttgagctggacatatcatttacgagggaatactggggcactttatgaggctcaaccatcataacttcatcaatgaaatccagactcacgattcaaagaatgcaatacgttacaattgcctcgtttcttgaaccattgagctacctacactataatgacataacacatactatagcttagatcatgctggacagtgtcactatctagtaatcgacactaattaacttcatatctgacgacattggtacat

SEQ ID NO: 10398 - DNA, 243 bp, Zea mays
  unsure (1)..(243): unsure at all n locations
  Clone ID: MRT4577_109486C.1
cgctgtaagcagctcatctgtgaccccagctacgtaaaagatcgggtagaaaaagtgggccaggtgatcagagttatttgcatcctcagccaccccaccaagaacaccaatgatgccaactcctgccagatcattattccacacaacatatcctgtccagtnnnantntgnnntatnntcttgcttgggattgnacccagagcttcatatatactgggcaagtgctctaccattgatctatat

SEQ ID NO: 10399 - DNA, 720 bp, Zea mays
  Clone ID: MRT4577_109487C.1
ctcggccgggacacagacacacaaacacacgccgctaaagagcagagagcgcgtctcctctctcacgcatggggccaaggaagagagagagatcgccgctccccttctcagcgtggggggtgcggtggccctccctcctcgagcgagatctggctggtcacagatctatctgacaaaatggggaatatctgatgtatcggtgctgactatgtcgttgtcccaaccatggccgacattgccctcaagtgcccagacattgagggcgaagatggtgacatatgcaagccccggattgaagacctggcacacgagactacctctgcacaatctactcagcgctgaacgtagatcgaatgctgctgaaggcaggagaatggagcagagcaaccgtcttcttcagcactgatgatgagaagcacatcgatgatgctgacattatctatgcatcggcgaacacccataccaagaccctctaccttggagctgacaaggctggctacctcacctactgcgagagcgctggccggatgattgcggatgtctacaatactgacacgattgatgacgacaagaacactgtccatgtcaagaccgatggggctattgagaagatgttgacccacaacaccatgggcatcaactaccagatgctttaccacctatatttccttgtggaggtgactgccattgaggacctgctcaagcctgacagagagctta

SEQ ID NO: 10400 - DNA, 310 bp, Zea mays
  Clone ID: MRT4577_109488C.1
gggatatctcccccattctgctgcgccaccattgctgcaagggccaaggggagggggtgaacatatcaacataaactgcagggagaaatagctagtggcatatatatggacgcaggacatcacatggagatcaaggaggtagcagcagcggaggcgatgatgatgggcatgccgacggtgccctctcggttcaggaggatctgcgtcttctgcggaagcagccaggggaggaagaagagctaccaggatgctgccgtcgagctcggcgaggagctggtctcaaggaacatcgatctggtctatggcgggg

SEQ ID NO: 10401 - DNA, 116 bp, Zea mays
  unsure (1)..(116): unsure at all n locations
  Clone ID: MRT4577_109489C.1
tccgtgntccgcgtccagtgtgtgtctttacttccgntccccctcagtggctgcagtgtcctcacgctagcggtagtcgtgccgcgcgtggagacgtaggatggctggttttcgga

SEQ ID NO: 10402 - DNA, 429 bp, Zea mays
  Clone ID: MRT4577_10948C.1
cggacgcgtgggcggacgcgtgggcggacccctgggatgaaggattgggaagacaccaacggtgctttgagcacgggctctgtgacacatccctgaattcccattgagcttctacaccattttgtagtgcatgattctgactgccatccttggtaatctgggatatggtgggtgcgataattcatacttctaattcaaacttctaagtggctggtctcttacttgattcatgataaataccactattgtgtctcgaaataatgtctctatgaccactatttttcccataaaatatggcgtgcctgtttttaaaaaagtcaacacatttaacacttttgactatgtcagtaagcctaaatcgtatgttacagtgtatgcatgctatatattcaaaagtactttaatataatgctcactttgtgtttgttg

SEQ ID NO: 10403 - DNA, 876 bp, Zea mays
  unsure (1)..(876): unsure at all n locations
  Clone ID: MRT4577_109490C.1
acctcgagccggcgggaacccatccctcctggccccatgcccatatctctcacaatggtacgcgcagcagtcggccaaatgcgttccacggcctccatggcctctaatctgactcaagcccaatccctctgccgcaaagcccaccaagccggcgcaaaagccctcttcctcccagaggcagcagactacatcaccacttccggcggcctccaactctgcaagccagtcacaacctctgaatttgtcatcggcctgcaagattgcgcaaaacaatacaatctcgccatctctgtcggtatccacgaacccgtctcctctgatgcgcaaaaagtgaagaataccctcatctggatcactcctcagggagaaattgcccagcgctaccagaaactacatttgttcgacatggatgtcaaggatggcccccagatgaaggagtcggatggcgtcgaacgcggccttgatcttggccatcccttcgacagccccgtgggcaggataggcatgcagatatgttttgacctacgctttcccgagcctgcgcttgccctcaggaagcgaggcgcccaggtgctcttgtaccctgccgcttttaccaccccaacgggtaaggccggtcactgggaaatactgctgcgtgctcgtgccattgagacgcagagctatgtcatcgctgctgcccaggttggagtacacgatgaccagggcaagaggcggagttatggacacagcatgattgtggatccttggggcaaaatcgttgctcaactcggaggcgatgagggcgaagatgggaaatgggccgacgaaggtgagaatgccgttgcagagctggacccttgatacgnntgagatctgcgcaaagatgtgcccatg

SEQ ID NO: 10404 - DNA, 982 bp, Zea mays
  Clone ID: MRT4577_109491C.1
gccggccgggccgggttatcttgcttctatgctagatgcctaaatacatgagataatattgtatttctatgattactggatgtctggatgccaaattgcttgtgtcctacagatacaaaatgacacccatatgctgcaatcctgtactattgcactgacacaattatgtatcttcattgattgaatggtcaatgcagggatgagttcgatgaagaaaaggagcctgacagaatggttcttgttgggtggtctggcccagttgataagcaaaccactaataatggtgagactaaatcagttccatcttcatccaatacagaagatgttgatggtactgccgaggatatatcagcgaatcctggaatgaagcgtaagctgaacgaaatattagaggcaaaggagaattttgatgctctcgagaatccttcggatgttgattccagcggcactcaagttgttgaagacgatgacaacgatgaccttgttatgtttgatgaggacccaaggcaagacaagaagatgagattgcaatagcatcctgttgcggtgataacagctcttgactcccggcatcatggctaacacattgttcgacttcgatcataccatctttgataagtcatctatgtggtgatgtgctaggttgatgttgagacattggtagcaatgcccgggacactttttggcctcagatactggcctgtaggattgtaatttgtaggttttaggcacgagcaacggaaccactgagcaatctgtcatgttaattgttaagtacttaagtggcactgtgtctggaaatatgtaatcctgtaatcttcttagtgctacgctatatgctagaaacaacgcctgggtttagaagctatccctgatttcctgtattttggaccgctttttgaaggaatatcattcataggatatccgcatggtacttcttatttgaatgtcaaataccatgtttggttgttaacccaacccc

SEQ ID NO: 10405 - DNA, 385 bp, Zea mays
  Clone ID: MRT4577_109492C.1
gggagaatgatgcgatgatcaattcaaccatcagaattctttgttctccaacgatgaaaggttttacgcgtgagaataaacagcgcagagtggtgagcgctatataaaagcactgggcttgcactgttgttagtggttcatttgctttcttagattcggatagtacagttggtggatccatgattgatgtggatacatataccatgttgccatggcagcctgtttatcacacattcacttcaactagaacattgcggcgccctcacgggcgccctaccaaaaaaaaaaaaaaaaaaaaaaaaaaaaaaaaaaaataaaaaaaaaaaaataaataataaaaataaataaaaaatataataatttacaatttaaattatttttaatt

SEQ ID NO: 10406 - DNA, 313 bp, Zea mays
  Clone ID: MRT4577_109493C.1
gggaacccccggtccattattggagcccatcaggcttttctcagggaacagggtggggacgacaaaaaaaaagagggccaaaagatcccacccgaagcatcccaaaaaggcttcaaaccctaacccagcatgggcgcaaaacacacgttttcccaaaaagaaggcaaaaaaaaagcagggggcccccccttcaggcaagttgggaaggccctccagaatcccttctaaccaaagttttggccccacagttgaaagggaattgcccgaacggggggaggcgggcggggccccatccccggggtctggctttgga

SEQ ID NO: 10407 - DNA, 240 bp, Zea mays
  unsure (1)..(240): unsure at all n locations
  Clone ID: MRT4577_109494C.1
cccacgcgtccgcccacgcgtccgcccacgcgtccgagaaggtgaaggaggatagaaggcagaagggggatggacgggcgacaacgacattggtgcggcgataaagttggtgagcacagaaggggagctaggtgtgccagtgacactgggccacacagnagggggcaggcgacaaagtcacggtgaagtacataagggtacggcgacgacggagtcgagcgcttctaccttgtgtcgatc

SEQ ID NO: 10408 - DNA, 284 bp, Zea mays
  Clone ID: MRT4577_109495C.1
taaacattaaaaaacacaccaagtctaacctcattaacaacaacctaacaacaagggctacggagatattatccatacttgcgcttctggcgctcctttctagcgcatcaaagcttacttactcttccatacagcttaatagctctaatttccattatcacacattaaattcaatggcctactttaaacaacttcgaacatggaaaaaccctggcctatccgatataactcgcttttgaggacatcctcttttaacaacctgttttaaaattgaaaaggccctc

SEQ ID NO: 10409 - DNA, 118 bp, Zea mays
  Clone ID: MRT4577_109496C.1
aattgaagtgcgattttctttctcaaaaacagtcatgtgcgattttctttctcaaaaacagtgaagatgctcaggctgtatgcgactctgggtgactcttgtcttccacacatcgtaa

SEQ ID NO: 10410 - DNA, 128 bp, Zea mays
  Clone ID: MRT4577_109497C.1
aaattgtaggcggccagcgggcgaatgggggatcggggactggaggctgaccacctaccactataccgtgtcgtgtgacagattggagcaagcatggataaaggtgatagctgtgtgaagtgggaaat

SEQ ID NO: 10411 - DNA, 496 bp, Zea mays
  Clone ID: MRT4577_109498C.1
gagcggccgacctgtagatatttgaagagacaggttttaatgtttttgaagaccaaaagaaaaaaccatcggggacagggggggaaaaaaaaaaaagaggggcccgcacaccccaaaaaactgaaggacaagggcgccaaagggcaaaaaaaacaccagggaccgaaagacggggaacagaacacaccggaaaaagaaagaggaaaaaccacccgcccgaagaaaaaataggcaaaaaaaaaacaaaggcaacgaaagcaaaagcagactgggggaggggcaactgcacacaaaggaacccaaccagaaaaccccggcgaaaaagaacaaaagaggaaaaaacgccaagccagaaacgacaggaaacaaaaaaaaaacagggccaaaaggcccacccggcccggcaaaaccagacaaagaagggaaaacaagaccccccgggacaaaagaaaggaggcaaaaaaaaaaaggaggggaaaaaaacaaagccgccgcg

SEQ ID NO: 10412 - DNA, 2378 bp, Zea mays
  Clone ID: MRT4577_109499C.1
gccggccgggcctggggtactccaacttcttttctggcttcgccccgtcggacgaaccctggaaacgcttcccatctgatgctcgtgctccgccgcgtctccttcctcctctcgtcgccctcccctcgcgcaccgctcgcaaaacctctcctgctcctacgcccgccccaaaccctagccccgacagcgcggcagctcgtggctatggccgcgtcagtcccgtcggcgggtggggcggggacgatgagccgcgacgcgttccgcgcggccgtgaccaacacgctggagcgccggctcttcttcgtgccctctttcaagatctacggcggcgtcgcggggctctacgactacggacccccaggttgcgctgtcaaagctaacgtcctcgcattctggcgccagcattttgtattggaggaagggatgcttgaggttgactgtccatgtgtgacgccagaagttgtcttgaaagcctctggacatgttgataaatttacagacttaatggttaaagatgaaaagacaggcaactgctaccgtgcggatcatttgctgaaggacttctgtaaggataagcttgagaaagatcacacattgtcaccagagatggcagaagaatacaatagagttcttgctatcctggatgatctcactgcagaacaattgggtgctaagattagggagtataagattgttgctccagacaccaagaactcattatcagatccatacccttttaatctcatgtttcaaacttccattggaccatcaggtttgagcccagggtatatgaggccagagacagctcagggtatatttgtgaacttcaaagacttgtattactacaatggcaataagctgccattcgctgcagcccaaattggtcaggccttcaggaatgagatatctccccgtcaaggccttttgagagtccgtgagtttactttagcggaaattgagcactttgtggacccagaggacaaatcccatccaaagtttggtgatgtttctgatctagagttctggatgtttccgagagaggatcaaatggcaggaaggtcagccacaagacttaaactcggaaattctatatctgagggaactgtgaacaatgagacccttggctacttcattggaagggtctaccttttcttgacacaacttgggattgacaaggatcgtctccgtttccgtcaacacctgccaaatgaaatggctcattatgctgctgattgttgggatgcagagattgaatgctcctatggttggattgagtgtgttggaattgctgataggtctgcctatgacttacgtgcccactcggataaaagcggcgagaaacttgaagcacatgagaagtttgctgaacccagagaagtggagaaattagttataacgccatcaaagaaggaacttggtcttgcattcaaagggaaccagaagttggttgttgagtcattggaagccatgaccgagaccgaggcactggacatgaaagccgcgttggaatccagaggggaagtcgagttcaaggtgtgtacccttgggaaggatgtcaccataaagaaaaacatggtttcaatcaacatcgagaagaaaaaggagcaccagaggaaatttactccttccgtcatagagccatcctttgggatcgggcgcatcatatactgcctttttgagcactgcttctaccaaaggcctggcaagaccgaggatgagcagctaaacgtgttcagggtttccccctctcgttgctccaataaagtgcaccgtctttccattggtcaagctcgagaaatttgaggctgttgccaagaagatctccaaggccctgacagcagctgggatttcacatatcatcgacatgacaggtaatacaataggaaaacggtacgcaaggacggacgagattggtgtccccctggcgatcacggttgatcacaccacgagcgtgacggtgcgcgatcgtgacagcaaggaccagatccgcgtggatgtggacgaggtggcctcggtggtgaaggaagtgacggacgggcagagcacctgggctgacatcatgtggaggtacccggctcacacggcctcggccgccgacgaggatggggcacagccctgaagaggcacagccacaacaccacccaacgatcgttggtctctgatagttccttcctgcgttccttaacagaaacagactgcattgttgtgtaagcctacagtagccagattcctgcacatttaaatttccacaaacaaatagtagcctctgtgttataaattctgctacaacatttcatcctgtttcacccttgaaaaaaaaaaaaaaaaaacccgaagccaactcgagactagttctctctctctctctctcctcgtgc

SEQ ID NO: 10413 - DNA, 288 bp, Zea mays
  Clone ID: MRT4577_10949C.1
gcagctgctgctgagtgagcgggtgagcaatctggaggagctgcctctcaatgagtatcgagagtacatcaaagtgcagacggacaaaggcacagaggtggccaccaacctggtgattctctgcaccggcatcaagatcaacagctccgcctaccgcaaagcatttgagagcagactagccagcagtggtgctctgagagtgaacgagcacctccaggtggagggccacagcaacgtctacgccattggtgactgtgccgacgtgaggacgcccaagatggcctatct

SEQ ID NO: 10414 - DNA, 1972 bp, Zea mays
  Clone ID: MRT4577_1094C.1
cccagcgtccggcgagcgcggtgcaggccgggtccataaattatgagctcgccctttggaaccgagaggcgtttcctacccaccttaccttatcattattagctccaagcaagtcgcacacgacacagacacacacacatcatcatcatcaacaacctgacatggccggcgacggggcggacgccgcgcacggcgcgtcggcgcggctggagggcgtgctgacggatgcgtcgaccccgtgggcgcggcgcgcgtggggcgcggccgccatcgagctgccgctgctgacgcggctggcggcgccggcggttgtgatgtacatgatcaactacctcatgtccatgtcgacgcagatcttctcgggccacctcggcaacctggagctcgccgccgcctcgctcggcaacaccggcgtgcagatgttcgcctacggactcatgctgggcatgggcagcgcggtggagacgctgtgcgggcaggcgtacggcgcccacaagtacgagatgctgggcatctacctgcagcggtcggccgtgctgctgtgcgcgacgggcgtgccgctggccgtgatctacggcttctcggagccgatcctggtgttcctggggcagtcgccggagatcgcccgcgcggcggccatcttcgtgtacggcctgatcccgcagatcttcgcgtacgccatcaacttcccgatccagaagttcatgcaggcgcagagcatcgtgctcccgagcgcgtacatctccaccgcgtcgctggcgctgcacctgctgctgagctgggtggtggtctacaaggtggggctgggcctgctgggggcctccctggtgctgagcctgagctggtggctcctcgtcgccgcgcagttcgcgtacatcgtgatgagccccaggtgccgtcacacctggaccggcttcacctggcaggccttctcgggcctctgggacttcctcaagctctccgccgcgtccgccgtcatgctctgcctcgagacctggtactatcaggtcctggtgctcatcgccggcttgctccccaaccctgaacttgcattggacgcgctgtctgtatgcatgactgttaacgggtgggtgttcatgatcgcagtagggttcaacgccgctgccagcgtgagagtgagcaatgagctcggcgccggccaccccaagtccgcgtatttctcggtgtgggtagtgaccgcgctgtcgacgctcatatctatcatgctcggcgttctggtcctctgcctgcgcaactacatcagctacttgttcacggagggcgaggtagtgtccaacgcggtggcggatctctgcccgctgcttgccgtcacgctcgttctcaacggcatccagcctgtgctgtcaggtgtcgccgttgggtgtgggtggcagcagttcgtggcctacgtgaacattggctgctactacatagtcggcgtccccctcggcgccctgctcgggttcgtcttcaagctcggtgtgaagggcatttgggctgggatgatcggagggacttgcatgcagacggctattctagtgtgggtcaccttgagaactgactggaacaaggaggtagaggaagcacagaagaggttgcacaagtgggaggctaacaagacgacggagccccttcttgctggggtcagcaatcacaaataacgtaactgcatgcgcggggatatgatgatcggtcgatccagaatatcaatcaatctccggccttcaccagtactagttcccttcatgcataatgtgtgggaactggcgtctttagatttttctgtgcagtaaattaaatgaaccacggtaacgtcaatgtaaacgaatcacgcatgtttggtttgcttatttcttccgttttaatgcttaacgcacgacgcgaccactccaatgtaaacgaagaatcacgcatgtttggtttgcttatttctcccgttttaatgcttaacgcccgacgcgaccactcctct

SEQ ID NO: 10415 - DNA, 304 bp, Zea mays
  Clone ID: MRT4577_109500C.1
ttttaataatttttttttagtttgtcgttttttgggggtttacccgcgttttctcctattcccggggggccaaaaaaaaacacattgggggacttatgaaactgcccattttatacagggtaaacaaaaggggctgaacaacattttaccaagaatacacccaatactgtttttttttttttcacaggggaccttccttggttacaaaaaaaatgggatttttccaaaaacaattgggagttcggggtttgtttaaacaaaaaatttgggataaccttaagacccaacccccgagagggggggg

SEQ ID NO: 10416 - DNA, 219 bp, Zea mays
  Clone ID: MRT4577_109501C.1
cccagcgttcttatgtgaccaggccctgaggcccatgtgtgaggcagtgaatgattgttgcagttacaccgtgcttcccttgtaataataatgacgtattagttactagcacttgtgtttcttttgtcagattgtcctcttctgcagaaatgcaatctacgaatgagagtggccatattcatacattgggggggggtgcaatagtcatttcagttcctt

SEQ ID NO: 10417 - DNA, 251 bp, Zea mays
  unsure (1)..(251): unsure at all n locations
  Clone ID: MRT4577_109502C.1
ccctaaatgggccccggggccggggcacactactccgcccgtgccgcggggggggtgttccgcgatttccgcgggcgccgcgcgggcattatcaaggccctcaccaacgagggtgggaggggctaccancggtgcgaccccnaaaaggggaacttgtgcgtttatggggaccccaacgaaacatgggaaggaactttgccagcgnaggagggtcctccanagatccctgaaccagcgttggggataaactt

SEQ ID NO: 10418 - DNA, 694 bp, Zea mays
  Clone ID: MRT4577_109503C.1
actcctatgggcgattgggaccctcgaggccggccgggaatccaacaagcaaacctgcagtcttctcctccatcaccaccaaattctacaacagccagctcgggataattccgcatagccgcagcatggaatcatcggccgcgctcttgctgctaaccctcttgctagtggcggacaccgccccacaggtggcggaggacaaacaacaagagagcggggtacagcgtgaacgcctccgatgccatacaatattcgaggacgactgtctgctcgacgctgagggatggcaagaaggggacacgacctggttcagggcaaggagtcctgcgcgctctcctcaccacgtccaacctgagtgctgtacactaggatccagagcaacgtccagagtaccgagcataatgtgatcgctgcgtcgtacttgaaggtctgccaggaggtacgttactacgtgaacttgctgaatgcgttcgaggacaccaaaggctgtcgcgtcgcctgcgcccaggagaagacccgcgcctcagcgagaactgctacaggtcctgcacccctcctccttcttgaagcgaagccccttgaaatgaatgaaccatgcatgcatgcatggatgcatgcgccgccgtgacgagtcgctccgctctggcgctgagcgagtctatacgtacatcctcacctgctgaacacgcatgct

SEQ ID NO: 10419 - DNA, 179 bp, Zea mays
  unsure (1)..(179): unsure at all n locations
  Clone ID: MRT4577_109504C.1
gggacgcgctaccggatgcatggtcagacagccggccncccgctacacggggggggtgtaagtacaggtccccgggtcactacggctcggtcataacagaccggggcactgacggaccaaccccgtggatgagctcgccctgccttatatgctcgcccaaaacacctttcgttcaatcc

SEQ ID NO: 10420 - DNA, 600 bp, Zea mays
  Clone ID: MRT4577_109505C.1
ccggccgggagagtgtcagagtcatcgtcctcagctcaccacgcagccccgtacctagggaagggaagacggaacaatgctattggtggccgcacgctcccgtctcctcctctagctctcctcgccctcctccaccttcctctattcgtcatctcacctcgcattatcccaccctcatctggtggcggcgctacacacggcgccgtcaggacgaacgtgggtgacgccgtcctccgcacgctgcgcggatagggggccaccctccccgtgatctcattcaccggacagaaggtcagacaggtaaccatcgacctctgatccacgccagcctccaccgcgagggctggcgcgcaccgcgctattatcaccgaccgccagaacactcgccgagggacgtgctccacgttcacccgtgttacatgtcagaagcacgaggaggaagtcctatcagcagaagaaaacggcaaaggcgcgaacgggaacgcagcgtacaccgattcataccagtgatggcgacgtgctcggcaccgagacccgttgatgggccatctggatcaaccgtaaggagaagaggcttgccatctccactggcatcgagag

SEQ ID NO: 10421 - DNA, 824 bp, Zea mays
  unsure (1)..(824): unsure at all n locations
  Clone ID: MRT4577_109506C.1
ccggccggggaccgcccctcactcttatacctactatacccatctctctggggaaaataacttgatcaactacatctctctctctctctctctctctctcaacaacgcacatcacacagccatggcttcttcaacacccaaaacacaacacactcataacaatcgctctacagaatggacgagcgagatgcgcgataggcaagcccgtgggaagaatccctacgtcgaagaaaacgacgcaagtgatgctgaacccatgcggcttggagggtatcacatcgcggaatcacacatggagagagaacgaagaggagaagccatgtttgtgcttgacaacccagaagcactcatggctcacgcgcaagccagcggcgacagcatcgctggacaacgcctccgcttcatgcgccaactatgtggcttcgacaatgacaagtacgacgacgcatctacttcaagttcttcaactcggaacacgaaacggcgagtaagcgaccgggtcaatcgatagtgcagtgacacacccctgttgatggttgatgatgttgctcacatggtcatggataatgacattccagggcttaggcgagcaactggtcattggcctgttggaaatgattgtgtaacaaaggtccaactacgatcttttgaatgggccgcnnatgtgattaggttcaaggagatgccgaagcttctgatagnaccagagctgaatagttgaacacactacatcagttggttatgactgaaatgaatcangtttctttatacagtcactatcagtcaataagcagactanattgacaaaacagggatattttgac

SEQ ID NO: 10422 - DNA, 580 bp, Zea mays
  Clone ID: MRT4577_109507C.1
ccggccggatctctgccctaggtctggccctactgctttcgcgccgtcgcttttggaacctctgggggtggccaactccaacatctcggcacacaagcgccccatctctcctcctctaggcaggggtccctactccttcgagctcacgcgtgggtctcccatgtcgtcttcctccccctgctggagcccctcgccgggatgcatgcctgccgaccaccatggacgcgcccagcgccccctccctgcacctcccctccaggccgacgggcggccaacccaacctcccggtactcctcgacgctggcgcgccgtcgcccctggcacgcgcccctctcctctgcttggtcgggacaccgcccctcccctgcatcgtcgtcctcggtccgacccaggcgaccgcgccctcggcgttcgcgcccccgccctcgcgctggcacgcgtcctggggtcgccccaccgcccctgcagtcgcagtcgcccgcttctccggaggtctccctccccgctgctcctacaggcagatccgaccccaactgagctacctcatatctttcctcgcccgaccatgtccgccgggcac

SEQ ID NO: 10423 - DNA, 253 bp, Zea mays
  Clone ID: MRT4577_109508C.1
gtcacaactccggccacatcagcattaaactataccctgtatacatcccacaccatgaaacgtctcatcattaacttccacgccatgatacctcacatccatatacctaatatcctcacgatcatgatctcttagatgatctaactacaacttcactcccacgtcatctacccgatcatgctttaacatcattcactattcattcacaacctaatggacatgaccatttcaaccattttcttacagcaaccct

SEQ ID NO: 10424 - DNA, 333 bp, Zea mays
  Clone ID: MRT4577_109509C.1
caagtagcagcatagatagcacaatagtttaccaactaaggcagccaaaaaattagccggaccatgcaccaagggctatcagcatatgctgctaccgtgagcatcttgcgctaatggtcagcggatcatatacgttcattatttcacaatgatcacttactacaagtgtcattattacacagataactcccaccagttactccaacgggattcaaacagccagcatagcaagcctataagctacatcaagcaattgctgccaagcgtcttacaacacccaatattccagttgcaacaacgatcctttggacatctaacaatacagaccatcgc

SEQ ID NO: 10425 - DNA, 3297 bp, Zea mays
  Clone ID: MRT4577_10950C.1
atgggagacgacatcaagtccactttggagacgctcatggccaatatgcagaccctgcagtccgccgtccaggccaacgccgcagcgatccaggctctgaccgatcgctcgtcgtcgtcctccaacgaacatcgcacgagcacgggcgaacaccataacgatcgtccgccgagatttcagaagatggactttccccgttacgacggcaagtcgtacttccaccagcagtgcatcatggaggaagaaaaggtttggatggcctcatacaacctggaagacggcgcccagttgcggtacatccaaatccaggaggacgaaggcggcgttcccacatggcaccgtttcaagcacctcctcaaccttcgctacgggccgccgctccgctccgccctgctgttcgagctcgccgactgccggcgcacaggcacgatcaccgagtaccaggaccatttccaggcgctcctgcctcgcgccggtccgatgcaggaaatccagcgggtgcagttgttcacgggcaggctggggcctccgctcagtcacgtcgtgcgcatccacaatccacagtcgctcgcagccgccatgggtttggcgcggcagatcgagcagatggagctgtctacggcggcggccgccaaaccgacgcatcgcgacctcctgtcgattccagcaccgcgtcccgccctccctgtttcgacatggtgttgggcactcgctagctggccacgttggggccgatcctctgggatttcgacgcccgctaacattctatcggcagggccagccaatctgctggcatggcgtccaggggcctacggcgcccaccctccgcaccacctcggcgtcaccatccctactggacgagctactcgcgtctttcaccggcgtcttctccgaaccgcgggggctcccaccgccacgctcccgcgaccacggcatcactctcgtccacggctcggagcctgtcgcggtgcgcccctaccgctatccagcgtcccacaaggacgagatggagcgacagtgcgccgccatgctcgagcaagtgctcgtccgccggagtttctcggcgttctcctcgccctcctcctcgtcaagaaacctgatggctcgtggcggttctgcgtcaactaccgcgccttgaacgccatcaccatcaaggatgccttccccatccccgtagtggacgagctccacggcgccaagttcttcaccaaactcgacctacgctcgggctatcatcaagtccgcatgcgtccagctgacatcgacaaaacagcgttccgtacccacgacggcttctacaaattcctggtgatgccgttcggcttatgcaatgcaccgacaacattccaggcactgatgaatgatgtgctgcggccgttcctgcgccgtttcgtgctggtattttttgacgacattttgatctacagtgcgtcatgggcggaccatcttcggcatcttcgggccgtcctcacggtgctacagcagcaccgtctcttcgccaaatgctccaaatgcgtgtttggcgagcgctccattgcttacctggggcatgtcatcttcgatgccggagtcgccatggatcccgccaaggtgcaggcggtggcggattggcccaaaccccggtccacacgggcagtacgggggttcttgggtcttgcgggctactaccgcaaattcgtcaacgactacggcgctattgcggcccctctgaccgcgctattgaagaaggacgacttcacatggaacgacgacgccaccacggccttccaagacctcaaaaccacggtgacctcagctccgatcttggcgctcccgaacttcacgcgcccgttcgtggtggagtgcgacgcatcgacctacggctttggggcggtgttgctccaggataaacaccccattgcatacttcagccggccgatagctccccggcaccgctccctagctgcatatgagcgggaactcatcggccttgtgcaggccattcgacattggaggtcgtacctttggggccggcgtttcacaccgggcgccctcaacacggtggcggatgccctctcccaccacgacaccgaggagactaacggcggcgccgttctagctgtctccacgccgcgcttcgacttcaacacacgtctccatgacgttcaggccaccgacccggtgctagtagctctccacgaggagttggctgctggatctcgagcggctccatgggccctcaccgacgatttggtgacctacgatgggcggctgtacgtgccaccagcatctccgctcttgcaggagctggtggtggcagtacatgaggacgaccacgaaggggtgcagcgcaccttgcaccggcttcgccgggactttcactttcccgacatgcgtcgcatcattcatgatttggtgcgcgcctgcaccacatgccaaagatacaaatcagagcacctacatctggcgggccttcttcatccattacctgtcccgacagctgtctgggcggacattggcctggacttcgtggaggcgctgccacgggttcgcggcaagtcagtaatcctcacggtggtggatcgctttagcaagtactgccacttcattccgctcgcccatccttattcggcggaatctatggcccaggcattcttcactgaaattgtccgcctacacagggtgccgcagtccatggtgtccgatcgggaccccgtgttcacctctacattctggaaggagttgatgcggctcatgaatgtcaagttgcacatgacgtcggcattccatccacaatccgacggccagatggaggttgctaaccgtgttattatcatgtacctccgctgttttataggtaatcgcccccgccaatggctccgatggttaccatgggcagagtacacctacaacactgcctaccagtcgtccctacgcgacacgccatttcgggtggtctatggccgggatcctccgtccatccggtcatatgagcctggggatacgcacgtagccgctgtagccaagacaatggaagaacgggaagagttcttggcggatgtctcctatgaagtgggcgactgggtcctgctccgccttcgataccgcccagttgcatccctgtccccggcggtccaaggcaagctgcagccacggtacttcgggccctacagcatctccgagctcatcaacaacgtcgctattcgcctggagcttccccctcgcgccaagctccatgacgtctttcatgtgggcctcttgaagaagtgggtgggtgttggaacttgctctcagcagcaaggagaccaacaggagtga

SEQ ID NO: 10426 - DNA, 180 bp, Zea mays
  Clone ID: MRT4577_109510C.1
acgccacgcgtcacgtcttcctgtccctctccgatccattctccagggcagctaactatgcatgtgtgaccgtgcaaagatgtcgtggcacgcgtacttggacgagcaccctgatgtgccagatccaggggcaccacctctcggcggcgggcatcgtaggtcacaaccgtgccgcctggg

SEQ ID NO: 10427 - DNA, 312 bp, Zea mays
  Clone ID: MRT4577_109511C.1
agcgctctggcgacgattgtcgcgcgaatattttagcactagcagtaggctctaggaacccaggcgagatcaatgcctgcttgcagtggcactgacaatgcactaacaaaaaaaatgcacgataaagatatgagaccaaacactgatgcagaaaggggacagagggacagtgggaataggaacgctgaggaagagctgagcgaggcagggagtaaaggacaagctggatgtcactgttagcgatcccagagcacagtgaaagtcaggtattgttggtgcccagacacaacaccctgtacgtcacgagctgat

SEQ ID NO: 10428 - DNA, 230 bp, Zea mays
  Clone ID: MRT4577_109512C.1
tctttcacacctcctgcgacggtcatagtggtgcgctggtttggtcaccgacgaatattgcctagctagacgacattaagtataaaccaggtctaacgcaggatcttaggcgcgcgtacgcagaaccatttgggtctcgagagaccaactggactcataggaggttgacatgccacgacgtaactcggctgtagatatggcgcggaacaggcgaggagcacgagcactgt

SEQ ID NO: 10429 - DNA, 434 bp, Zea mays
  unsure (1)..(434): unsure at all n locations
  Clone ID: MRT4577_109513C.1
aactcatgagccatcctntcctccgcagttatctggcagtgtcaacaacactgggccacttagctccatatcactggaatcctcaaactcgatgcttcataatgtttccatctgaggattccaggaatagcactgggaagagctagataaagcatatctgagaggaacaagcacctctgctacaagggatccactaatgctttgaaaaaggatgtgtaaccttgagcccattgtcctagcgagatgaggatctcgcaaaatcgcaataaatctggcatcaaaactatttccgggacagcggcaagatttgaattcagaaattgcaaaaatgaaggggagtcgcatgaacgagatgccacatgactaaaagaagacaccacggaccaccaatcgcctgaaccagtctgccccaaaagatatgggctaatatcaga

SEQ ID NO: 10430 - DNA, 390 bp, Zea mays
  unsure (1)..(390): unsure at all n locations
  Clone ID: MRT4577_109514C.1
gtgcaccttcttctggnatacgctaaggaagccgtgtccttcgccgcgaggcgaggctgctcttcttggggacggttgagcgggtggtcggctggtgctgctgtgcttgctggcggcgcttggttctggccggggccggggtctgtgttgtctccggcttcgtgttccgcggtggggggggggccctgttgggctcctcccttgcgctgagggttggctgcgtgcggtgggctgtctcccggtctcttggttgtggttgttgtgcggggggtgccgtggggtctggggttctgggggagggcgggggcgctgcgcgtgggcgcggcgtgccggcggggggggggggcttcgctcggtgcggggggcgccgtggtccccgggcccgcgggg

SEQ ID NO: 10431 - DNA, 932 bp, Zea mays
  Clone ID: MRT4577_109515C.1
gtatgtcaaagttgatgacaagaagcttgccattggaacgctctctatcgacaaatacccacagatacaattcgatttggttttcaataaagagtttgagctgtcacacacatcgaaaactaccagtgtatttttctctggttacaaggttgagcagccaattgagggagatgaaatggatcttgattctgaggatgaagaggaggagctaaacattccagtaatcaaggaaaatggcaaaggtgatgggaaggaggagcagaaaaatcaagagaaggcagtagctgctacagcttcaaaatcaagtcttggccttgaaaagaaaagcaaggatgactctgatgattctgatgaggatgagtctgatgattctgatgaggatgattctgatgattctgatgaaggcgagggattatctcctgacgaaggcgatgatgattcaagtgatgaggatgataccagtgatgatgacgaggaagaaaccccaactcctaaaaagccagaggcaggcaagaagagaggtgctgaaaatgctctgaaaacgcctctttctgataagaaagcaaaggttgccacaccgccagcccagaaaacaggtggcaagaagggtgccacccatgtggcaactccacacccagcaaaaggcaagacccctgcaaacaatgacaaatcaacggagaagtctccaaaatctggtgggtcagtcccttgcaaatcatgcagcaagacattcaatagtgagatggctctgcaggctcactccaaggcgaagcatggggccaaatgagttgcaggtccaactgagtccatgaaggtgaagcatgggagatccaagcgagtctggaaagattgtcgatgttagtaggctgtccttattttgtttagagacttgtggctatgtgattgatgtagcgaaccaggctgtgatgtgt

SEQ ID NO: 10432 - DNA, 336 bp, Zea mays
  Clone ID: MRT4577_109516C.1
tcccgggttacgacccacgcccgtccgaaaaaaaaaaaaaaaaaaaaaaaaaaaaaaaaaaaaaaaaaaaaaaaaaaaaaaaaaaaaaaaaaaaaaaaaaaaaaatataaaaaaaaaaaaaattaaatacactatacatacaaaaaaaataggggcgttcttttttggggaatcaaatttttttctcctgggggtgggcaaaacaattgtctttttttttaggtgccctggaatttcactaacttgggccgccttttttacacatcccctttttggaaaacccctgggtttccccaatttattcgcttttcagcccttcccctttttgcgcattgc

SEQ ID NO: 10433 - DNA, 296 bp, Zea mays
  Clone ID: MRT4577_109517C.1
aatatattctgtgagataactaaatggaagaccaggaaaaggactttggttttgtgtttgcttgtgtaataaagcatgtccttcgtatgtcacagtttggagcaacggaagtcttttagtgatggctaatgggtctgggcagcatcccttcatgaatttttttttaatccaatatccgttgatttgattgtgattagagaaccttggacattttgctgctaaagaatcttttttcccctgtagcccttcctgaccctacttgcactgctgtggatttttttaagagcatcaaagac

SEQ ID NO: 10434 - DNA, 1357 bp, Zea mays
  Clone ID: MRT4577_109518C.1
cattgggtacctcgaggccggccgggccgggctctccgtcgcatttcccgtccggtctttccgttacccggcggcttaaaccctagttcccattccatcttcgtttccgctccgccgccgtcgatggagttctggggtctcgaggtcaaacctggatccactgtcaagtgtgagcctggacatggctttatcctgcacgtttcccaggctgcccttggggaatcaaagaaaagtgacagtgccttaatgtatgtcaaagttgatgacaagaagcttgccattggaacgctctctatcgacaaatacccacagatacaattcgatttggttttcaataaagagtttgagctgtcacacacatcgaaaactaccagtgtatttttctctggttacaaggttgagcagccaattgagggagatgaaatggatcttgattctgaggatgaagaggaggagctaaacattccagtaatcaaggaaaatggcaaagctgatgggaaggaggagcagaaaaatcaagagaaggcagtagctgctacagcttcaaaatcaagtcttggccttgaaaagaaaagcaaggatgactctgatgattctgatgaggatgagtctgatgattctgatgaggatgattctgatgattctgatgagggcgagggattatctcctgacgaaggcgatgatgattcaagtgatgaggatgataccagtgatgatgacgaggaagaaaccccaactcctaaaaagccagaggcaggcaagaagagaggtgctgaaaatgctctgaaaacgcctctttctgataagaaagcaaaggttgccacaccgccagcccagaaaacaggtggcaagaagggtgccacccatgtggcaactccacacccagcaaaaggcaagacccctgcaaacaatgacaaatcaacggagaagtctccaaaatctggtgggtcagtcccttgcaaatcatgcagcaagacattcaatagtgagatggctctgcaggctcactccaaggcgaagcatggggccaaatgagttgcaggtccaactgagtccatgaaggagaagcatggtggccaagtgagtcgcaggtccattcgagtccatgaaggtgaagcatgggagatccaagcgagtctggaaagattgtcgatgttagtaggctgtccttattttgtttagagacttgtggctatgtgattgatgtagcgaaacaaggctgtgatgtgttaactctgccttataatattttggttgaacgtgctcgattgttgtgctgcgaattggtgcttttttttttgctccaaaaaaaaaaaaaaaaaaaaaaaaaaaagtactctgcgttgttaccactgct

SEQ ID NO: 10435 - DNA, 3798 bp, Zea mays
  unsure (1)..(3798): unsure at all n locations
  Clone ID: MRT4577_109519C.1
acgtacgcgtgggcgtacgcgtgggtttttatcgaaactagttctgacggacggtgattagtccgaactccggaaaaattttcagggaaatagaaagaaggattttggaccagtttcatttttttgaactaaagctcaacgtccaagactttaaagagaagtaatgatcttgttcaaaaatgaacagagaatgtattgccctttttttgggggagttagatgcatgagctgatcttctgggtccaggtgggctaaattctccctttcttcttcctgcattcctcaaaggcgacgtgaagttgtgagatctgggtctccttatgaattgagctggctaaccgtactttaccatttggttaagtccatcattgccaggtgagctgagctacgtactgccggcatgcacgcagccattgtgcaccgaccagtaacagtaaccatatgggctatggcatgcagcacacattcacccctctagctagcattaacatgggggacagaagcacagacgaactttagcccagagttggttggttgccactccgcttcaggggaaaaaaaaaattaagagtcagttgagacagataatcgcttctggcaaaagtactggcggcacaaacagtactgtacatggattagctgctaatcatgcagattcaggcacaggcatcgaggcagggaggcccccacctgccggcaaatctacatgggggtccgtgtgggaacgtgacgtaaaccgtcaaagggaaaaaggtgcggggaatcgagtaccaaccttgggcccctcaccctttccaacgggggagctgactaggcattgctctggtggcccacaaagcagccaatggccttccgatcctacagtcctgctgcggctacaccagctcgctttggctgccaaagacaagaagagaagattgggatatttctattctattcaccgatataaagctactgacgcaggacacagcaaaagcaaaagccaaagtttgagagagagagagagaggggtaatatagcttcatgtgaaagatgacaagaatcccagcataaaataatctcccaaactttgctataaagccacaacccctccccctcctcctttccctccctctctctccttcctcatgcgcgcgcctgccattagcccaggtctccttctccctcttgcctgtctactgcacctcctctttgttacattacatacgacgatctcggttaaatttctgcagcttacgtctctcttctatattttttttgtgtttcaggctgtgtacattatttgtagctgaccattcattcatatagagctagttgagcaggcctggttggctgtccataatttttgcttcggatagcattgctgccaggcgactgcaaagctccaagcagacttttgctgtgaggatttttttgcgaggaagggcagagggagcaatggcgccagtcagtttgcctcctggtttcaggttccaccccactgacgaggaactcatcatctgctaccttaagaggaagatcaacgggagacagatagagctcgaaatcattccagaggttgatctttacaagtgtgagccctgggatctgccagaaaaatcatttcttccgagcaaagaccttgaatggtacttcttcagccctcgggaccgcaagtacccaaatggatcgaggacaaaccgcgcaacaaaatctgggtactggaaggcaactgggaaggacagaaaagtgaactcgcataggcgtgcagttggtatgaagaagaccctggtgtactatcggggccgagctccacatggttctcgcactgattgggtcatgcatgagtaccgcctcgacgagagggaatgcgagactgacactggcttacaggacgcatatgctttgtgccgagtgtttaagaagacagcgcctgggccaaaaatcatagagcattacggcgcagtgcaccaccccatcgagcaaactcagtggatgggaagcagcgttgagcgctccccaacgctggacttgtccagtgatgttagaggcgatgacttcgacagcagcagtttctcgttcccgacagaggcgccaatggactcctccatgcatggtgggttgttcgggatgcagatgagtgcacctcacgaggatgccaaatggatgcagtttctgagcgaagacgcctttaacgcaaccaatcctttcttcacgaatccagcttcttccagcttctcatgcctcccatccaaggtggatgttgcactggaatgtgcaaggcttcagcacaggctctcattacctcccctggaagtggaggacttcccacacgacgtcagcctcgacacaaaggcgagcgtgctccgcagcagcaaccccaacaacgaggttgacatccttcaagagttcctctccgtggcgtcggcctcccaggagctaatcaacggcaccagcagcagctacgctgcagaaatgtgggcaggcgctggcacgagcagcaccagcggcacccactacgtcaacgaactatcttccctctttgagtttggggtgaaggctaaagaggaggccgacaatttctaccacatggactgcattggcacatctgcaggcttctcaccgaagccggtccgtgtcgatgaaccggttaggttggttgagatcgctgacatggaggagttcaaggaagagaagaggcgagtagagaaccttagaggagtgaggctgcacaacaatgacgacctaggagagattccaacagactgctgcatcacacaataccccatatcggacactgctgacatttcaggagaagccggtcacctgaccaatcccactagcgccggcggcctagacactgcacccatcttctcgcaatctcaacctgacgacttcgctattgggttcagtgacgacgccgaccccaacgcatctttcgacctatgcgagagggttgacgtcaagcatgggctcttcgtctcaacggtgggtgcgcccaagacgttcttccaccacgttgagccatcgaagaaggtcagcttccacctgaataataatcccgtagcaagcgacgacgacgtcagcaaggcgaccgggaagtcccgttcccccattattagtgtgatgacaaccaaagatagtggcagcagcttttctgtttttagcaagttgaaggcgctcatcagggacaaattcctggtgaagaagctgccttcatcgtgccagaggtccttgttaggcagcaaagaaacagcggcagtgagcgagctgctgcagatggtggtgtcgtcgctcctcttaacaccaacggaggtgacaggccccacgacgatgactaccgagcaagaagagttggccaggaaggcgatgaagccgggaccccgtcgttgtgatggaagccatgcgtggcttcttccactccccaaaaggagcaaaggcatttccagcatgttttttagtgggaaatgggcatttctgacatccgcattggccatccgcgctccaggtccagggtgcaatcactgaaagaaaggtcttccttctggtcatagctcgtgtaaaaattaaagtacggctctttataatgctactgcttaggaaactcgtatcgggtgccagtgcacgggacgcatagtctttcgtgcatcagacagttaacagcgggtgtataacgggagaaatgtcataattcgtatttattttttttattcgtctttgtattaacacgtctgaagtctagccccctgttgtacatcgaaacacatgcagttcataaattgaaattttaatttatccgnnnnnnnaaaaaaaaaaaaa

SEQ ID NO: 10436 - DNA, 111 bp, Zea mays
  Clone ID: MRT4577_10951C.1
gtcgtcgctcctgcactcgcagtcgcagctatcgcaggcctccctcgacgagaacctcctcacactccacctcgcttcgcccgcgcgcgaccagggattcaggttgcatga

SEQ ID NO: 10437 - DNA, 403 bp, Zea mays
  Clone ID: MRT4577_109520C.1
aaccccaagccgaacgcaaacccttggcgaacgccgcaaggacgggccccgcgacagacgacaccctggcgcgggcgagacagaaccacccgagcccgcggggggcacgtgagagccaacgccgagcacagcgctcccgggccgcgggaggacggcaaccgaggcacaggccgcactacaaacaagacgacctgaggggggggggggggaaagcctcaccagcaacgaaagggaggactgctcccacagcctcggaagcagcacgagtacaccgcacctacacgcccacgagagtggacaaggtgcgcgaggccacggacacaaaagaccaggggacaggcaagaagaaggcaggcgaaccccgcgcgggccaagccccggagaaagccaacacacggagcga

SEQ ID NO: 10438 - DNA, 258 bp, Zea mays
  Clone ID: MRT4577_109521C.1
gtcagtctttaacaacaacttttccaaacttggtcttttctaccaacaattgacaatggccatccaatccgctcaagtgcgacctcagaagggtaccaacgcccccccaaatgagacttatatctcgtgtctgttttggcccaacccttttatcccaaactctatggggcctgttttctcttttcagacaacacaaaagaatgtgcccaaaatcaaagggaagtttggtgaccccatcatatctgacatttttttaaa

SEQ ID NO: 10439 - DNA, 498 bp, Zea mays
  Clone ID: MRT4577_109522C.1
acccctctcgccagtctccagcagctccaacctcaatccatcgcctccaccagcctccagtaccgcgctcccgtcgcaagaggcttcctcgacctctccttcaagcagtgcagaccgaagcctacgcggggcttcgcgccaggagctggctaaccatcagcagtccctcgcggcggcgccggcgccggacgcggagctggccggggagacggaggagcagcgcggcaagttcctcgtgctgcgcctctacgaggcgctcaacgctcgcgacgcgcgccgggcgcaggagctgctcgccccggacctcgagtggtggttccatggcccgcccgcgcaccagcacatgatgcgcctcctcaccggcgccggcaccaacgccgagttcaggttctgcccgcgctccgtcgacgccttcggctccaccgtcatcgccgaggggagcgccggccagctcctctactgggtgcacgcctggaccgtcgggcccgatggggtgat

SEQ ID NO: 10440 - DNA, 286 bp, Zea mays
  Clone ID: MRT4577_109523C.1
tatatgtgggcaactccaggtagaaactttaatcatagattcaaaaagcatccagctacatgcaatagttcccatccctggtggaagtgttgacaaggatattagcttaagccccgatggacaatatgtgctgacaaattctaatgatcggttcattagagtctaccgcaacattctacctgccaaagggtctagagaggagatcaggaacatgagcacgcacagttatgaatgtgggggtcagttcgattccataaaagtacatggtacatgctgccttattttt

SEQ ID NO: 10441 - DNA, 405 bp, Zea mays
  Clone ID: MRT4577_109524C.1
gaaatatattcgataggcttattctgatgcgttataatttgttcacttatgatttgttcacttatgatcttgttcattaacagctcctgcaaagcaacataatttgttcacttatgatcttgtactcaaatatttatgcagctcaaaacgactactgtctatatttatgtacaatttccttatattgcatcatgcttatcaaaagaaaaaaatgcaaagcaatagattttgcttatgccttatcctgttcccaagtgtttatgtgactcaacaattttatacatgttcatgtatactttctttacaataagacatgttaaaggacctaacatgcgcgcatgggcgcgcccagtacactagtattgtacaagaattatcaaagatgttggacgagcagaatccctt

SEQ ID NO: 10442 - DNA, 431 bp, Zea mays
  Clone ID: MRT4577_109525C.1
gcggggactctcaataacatcagcagctttcatacacacacctagctaaatggacattctagctactcttattcagcaacagcatcccataacattaaccctgcttgctgttgtcgaccttcaacagagcgctacatacgcccaaatgattgctcagagctcacttgcttatatacagattattccacaactactattaccacatattatctggggcgtagccagtgttacacttcgttgacagcactactacagctacaagctagcgctacgcaggcacagcctgccttataacgctcgaactgctcttacgcatgaaccattcgtggcccatctaaccctacgatccgtcgaaccgcaccaccttctaccttctatgcctccactgagccacctagcattagagaacccatgagcctacttgcaacagt

SEQ ID NO: 10443 - DNA, 483 bp, Zea mays
  unsure (1)..(483): unsure at all n locations
  Clone ID: MRT4577_109526C.1
cccacgcgtccgcggacgcgtggggttgatgaggatgatggcccggtgaccagcgtaagcggggctcccgatgggaggcacatcgccatcggtctcaactcgtcggacatccagatgtgggatactagctccaacgccctgttgaggactttgaggggtgttcaccaatctcgagttggatcactcgcctggaacaacaacattctgactacaggcggtatggacggagtaatagtgaacaatgatgtgcgtgtgaggtctcacattgtgcagacctaccgtgggcaccagctagaagtctgtggtctaaagtggtctggttcggngcagcagttggctagcggaggcaatgacaatcttctccacatttgngcattgtcgatggccacaaattcagtgcctggtcagaaccagtgggtgcaccgcatggaggaccatacggctgcagtcaaggcgcttgcctggtgcccgttccagagcaat

SEQ ID NO: 10444 - DNA, 463 bp, Zea mays
  Clone ID: MRT4577_109527C.1
aaaaaacaaaaatttggtttggccccatccccatttaagtggggaaaaaaacccggagaacagccgtttttaaaaaacgagggggggaaaaaaaacccaacctacaggggtttggcaacaccaaaggggggtttggcagaaagggcaacacagggaaaacccaaaacccactccggaaaatgggaaacaaaaaaacccaatttccggttggggccccacaacaggaccaaaaaaacacattttcttgggatcctttggccgaacccccggggttcataataaatcatcaccaaagggggtcttttttcctgcacggggagggccagcgttgggtttgtaacaaaagccagggccacaaggtcctgggcggccttccttaccacaaggggggccacggaatgggccgccaccatccgggccccaaaatttttcccaaaattaacaaccaccaggcgggccaaaa

SEQ ID NO: 10445 - DNA, 146 bp, Zea mays
  Clone ID: MRT4577_109528C.1
ttagcccttacagatttaaaggttgacttttaaaatgtcccattgaagtgaggggaaatttgggcctgaaatctttgggctcttcatatggggtgcttccaccggctttttgaagaacttgccatttccggacccctgggttcccc

SEQ ID NO: 10446 - DNA, 556 bp, Zea mays
  unsure (1)..(556): unsure at all n locations
  Clone ID: MRT4577_109529C.1
gtaagctcggaattcggctcgcttatggtgggagtccagcagtgagctaattgctttcaagactgaaatgaagaaggtgttcaaaatgacagacttagggacactatcatactatctgggtatagaagtgcaccaaggagacaaagggatcagcctttgtcaaacttcctatgtgaaaaagttgctagaaaaggtcggactgagccagtgcaacccatgttcaactccaatggaagctaagctgaaactgtccaaggacagtgattcttctcgagttgattcatctgaatatagaagtttgattgggagtctgaggtatttgttgcacactaggcctgaactgaatttcagtgtcagttatctgagccgttttatggaggcaccaagtcaggatcaccttgcagcagttaaacatttacttcgatatgtagctggcacaatggagcttgggctgttttatcccagaggaacacataaaaatgttgtgatcacaggatatagtgacagtgacttgngcggtgatttagatgatggaagaagcacctctggaaccatt

SEQ ID NO: 10447 - DNA, 591 bp, Zea mays
  unsure (1)..(591): unsure at all n locations
  Clone ID: MRT4577_10952C.1
tgttgcttcgttatggnaactatttacatggaagtcttttttttaacttttttttgaacaactacactgatcaaggctctagattttaaggatgtctgcagcaacataaagcttgcaaataaatcatttgcacctcttttcaaatatgtcgaaatcaaggnaaaattgttagttaaaaaacatatcttggtaaacaaaagagtgcatggactgcctttcatatattcaacgcaacaagataatattgtaagcatcatacaggccatgcttctcaatgtcaatctgcttcaagaatttgaaagaaggcctttggaattttttagttgaatcttcaacatgagtagtatagactattagacttgtcttccagtcatccttacattcagtggcaagtagcattgtgctatgcgatgcttcacttttcatcagattcagtaagtcatgttgttgtccttgtaatctcaaatcaaaatgaaatatctttaagctgtccacagtagatcgtgtaaaacatgatatttgcactgtagattacactggttacagagtgaagtttgaaatagatgatagtatagataaaggatgtgatag

SEQ ID NO: 10448 - DNA, 639 bp, Zea mays
  Clone ID: MRT4577_109530C.1
ctctactttggcctgtgctttagcttctgttggagatagggctgatcaaactcggtgctgacgacttcgacaggcagttctgggtcatgtccaaggtgttcttggtcagaatggcgttcctcggcgctgccactgttcagatcctgcactccatattcacctacagggactacgaagtgctgaactacgggctgctccagacgctggtggagaaggtccgggcgctggaggaaaacgccggtgggagggcaccgtcgtacgcctcggagtcggaggagagcctgagggactactcgtgggtcttcgacgagctggcagacgacgtggacagcaagatggacccaacctatgtcgtgccgccggagaggtcacctccaactcgacggcgcgaccaaatcgtcgtggcagaggagactggcgagaactccgtcaccacgtttgtctcccggaaatacaatctgcgggcacgaaaataggcagcggtctggtttttttttagttccgaaagagctattttgagtgccgcatcagatgttggtgaaattttaatttacacgttggtctaccgcattgtaaagaagctaccattcggaaataaaatcacgctggagaaatctcgtgtgctattcagcattttgc

SEQ ID NO: 10449 - DNA, 338 bp, Zea mays
  Clone ID: MRT4577_109531C.1
ttttattgttgccttgttctgattatggttcgacatggttttttgtgggtgtggaaacgccaagtcttaccaggcggagaataaccaaaaatattgggcaagccccaatggcaatctatggtagccagacggccaaatctggtcgtgcgggcccaagttcataacaaggaccggaagaattatgctcggggtaaactccatcgagaggcagaatattaagattagaaacctgcatagcgatgcctcctgcgaaaaaacgtacggtgcaaagggtgacttgctttaagctgaaaggaggaggtggtaaactgttcgaagccggcatctgagcctgcttt

SEQ ID NO: 10450 - DNA, 1072 bp, Zea mays
  Clone ID: MRT4577_109532C.1
cattggcggcctcgagccggccgggactcggtaaaccattcccctccgccccacctcttgtccagtgccccaaatgctggcgaccacctgcagccggccgccgtgcccgtgcccgtgcgcgcggtcgcggcggctccccgcggcgaccttcggcgctaggcgcaccagtagcgcgaagcgaagggcgccgaggagagcggcggcggcggtgcggtgcgggctgctgcccgtggacccgtgggcgccgacgatggactcccagagcgtggcgtcgcagctcttcgccgtctcgctcttcccctacctgggattcctctacttcatgaccaggtccaagaccgcgcccgggctcacgctcttcggtttctacttcctcctcgtcttcgtcggcgccaccatacctgctgggatttacgcaaaagttcattatggtacctcactgtccaacgttgactggctgcacgggggcgctgaatcgctgctgactctcaccaacctgtttatcgttttggggctgaggggagccctgaggaagctggaggaagagggcacagacgagatcgtttctgaagcttctcaagaaaaaagttctgtctagatgggttcatcatcagtacccctgaaggtgcactcagtaactaggagtgcgctgtttttcttcttctgcagctcaactagctcgtagtgatgttttgggtgtaaggaaatctggcagatctactctctgcatactatgctgataagaaaacaatgtacaggcatctcctgcaattctgagtagtaccttcagctgttgatagtagcagtacacagtagcttacacgaacaccaccctcgctctgcaccgctcgagctgagcccggcggagcgcgtgatagatgcgggttctggcagattcgcgaggaggctgtagtggttaggttctggtgtcccctggcccggccgatcgtgggagatgagctcctcgtccgtggccagcatcgggcagcgtcgtctgcgccgtcgtcggaggaagattatgaagaagacctgtcctaatgacttgtggatctatgtcgagggccaagatgtt

SEQ ID NO: 10451 - DNA, 804 bp, Zea mays
  Clone ID: MRT4577_109533C.1
cctgccgggaacgtcgccggcaaactcggtaaacagtcccctccccccacctcttgtccagtgccccaaatgctggcgaccacctgcagccggccgccgtgcccgtgcgcgcggtcgcggcggctccccgcggcgaccttcagcgctaggcgcaccagtagcgcgaagcaaagggcgccgaggagagcggcggcgttgcggtgcgggctgctgcccgtggacccgtgggcgccgacgatggactcccagagcgtggcgtcgcagctcttcgccgtctcgctcttcccctacctgggattcctctacttcatgaccaggtccaagaccgcgcccgggctcacgctcttcggtttctacttcctcctcgtcttcgtcggcgccaccacaaaagttcattatggtacctcactgtccaacgttgactggctgcacgggggcgctgaatcgctgctgactctcaccaacctgtttatcgttttggggctgaggggagccctgaggaagctggaggaagagggcacagacgagattgtttctgaagcttctcaagaaaaaagttctgtctagatgggttcatcatcagtacccctgaaggtgcactcagtaactaggagtgcgctgtttttcttcttctgcagctcaactagctcgtagtgatgttttgggtgtaaggaaatctggcagatctactctctgcatactatgctgataagaaaacaatgtacaggcatctcctgcaattctgagtagtaacatattaagctgacgctggcttatcggcaaaaaaaaaaaaaaaaagcggcc

SEQ ID NO: 10452 - DNA, 421 bp, Zea mays
  Clone ID: MRT4577_109534C.1
ctgatgataaggctgtcatcacagacaaatgaactgtaccatctggaagcgggggcgtgatgaatattattagctaggggataagctggacctgagtgttgagtggcagtgatttgctgctgaagtagtgatatcaacaacagaccttgaacaacatactcattgaacacacattgacgaatgctaaattaagtgtcacatttcgttgacggaagccactgtgcaatataactccattgcagacggtaattcttggtgattaccggacagacatttattgttagtattgtcgtaaaagggtttgggtatagcaacaaaacatgatttcttgtcgggatgtttgttgtacaaataggagagagtgcttatgttcttctaatgcgagctacaaggatgcatctcatctagggcaagctatacc

SEQ ID NO: 10453 - DNA, 2113 bp, Zea mays
  Clone ID: MRT4577_109535C.1
gactagttctgttaagatgtgttgatttgatttagttttttaattaccgtacccgtggtaattaaattatgtacctacttatatatacattacgccgaagaggaaggatcactttgtataaaaaaaaaaaaaaaaaaaaaaaaaaaaaaaaaaaaaaaaaaaaaaaaaaaaaaaaaaaaaaaaaaaaaaaaaaaaaaaaaaaaaaaaaaaaaaaaaaaaaaaaaaaaaaaaaaaaaaaaaaaaggggggggccgtttaaaagaaccaaatttaactaccgggggattgaaaggaaaaattttttttaaggggcaacaaaaataaaataaaggggccgggtttaaaaaacgtggaaatggaaaaaacctggggtatcgcacgagcccgtcgtggcggacgaggcgagcaccgcgcgggaagtgggggtgcgcgctgcggcgtaccggcggcgacgcacaccaccctggcacgaagttcgacggctacgcacggtgacggaggacgtggtgacggggtaccggatgcacatcaaggggtggcggtcccgctactgctccatctacccgcacgccttcatcggcaccgcccccatcaacctgacggagcggctgttccaggtgctccgctggtccacgggttccctggagatcttcttctcccggaacaacccgctgttcgggagcacgttcctgcacccgctgcagcgcgtggcgtacatcaacatcaccacgtacccgttcacggctatcttcctcatcttctacacgacggtgccggcgctgtcgttcgtgacggggcacttcatcgtgcagcggcccaccaccatgttctacgtgtacctggccatcgtgctgggcacgctgctgatcctggccgtcctggaggtgaagtgggcgggcgtgacggtgttcgagtggttcaggaacgggcagttctggatgacggccagctgctccgcgtacctggccgcggtgtgccaggtgctggtgaaggtggtgttcaggcgggacatctcgttcaagctgacgtcgaagcagcccgcgggggacgagaagaaggacccctacgcagacctgtacgtggtgcgctggacctggctcatggtgacgcccatcatcatcatcctcgtcaacatcatcggctccgccgtggccttcgccaaggtgctggacggcgagtggacgcactggctcaaggtggccggcggcgtcttcttcaacttctgggtgctcttccacctctaccctttcgccaagggcatcctggggaggcacggcaagacccccgtggtggtgctcgtctggtgggccttcaccttcgtcatcaccgccgtgctgtacatcaacatcccacacatccacgggcccggcggcaagcacggcggcgcgatcggaaggcacggcggcgacgcacaccaccatggcaagaagttcgacggctactacctctggccgtgaagcgccgagcagccagcatcgtcatgcatgcacatataccgcctgccctgatggtgacgatggtgagccgccaaggtgaagagtgtacacgttcccgttcatccatccatcgtctccttagtactgctgcccggtgattagtcgatgaagagtgaaggtgaaggctacccacacacacacatttggtcgacgtacccgccaaaatttgaattttttttcttcccccttctcccccctccctctcccttctcattcttttttcttttagttttgtccagaaatcgaaaggtgtgttgatttgatttagtttttttaattaccgtgccccgtggtaattaattatgtacgtacttatatatatatatacattacgccgaaatggcttggaggagtcacatgcagagaggggaaaagggccctaggctttggggtggtattcttttggtacatggatcaagaataaattgaatttcattcttgttgttaggaaaaaaaaaaaaaaacctcctccctcctgcactctggctcctgggaccgtcggtaccgttattgtcacggctgcaccgcccggctggtctcggcactgttgttggtttgtatggactacaggcataaaaaaaaaaaaaaaaaaagggcggctgctcgcgatctagaac

SEQ ID NO: 10454 - DNA, 380 bp, Zea mays
  Clone ID: MRT4577_109536C.1
gggggggggaagccaaaactaaccaagttcaggttaattcgggcccaaaaaaagggggaacaggttaaaaaattcgggctgggtttttaaatttatttaagtcccacggggttttggacaggggtaatcgggcccaaccaaaaaaattcccttgggggggacgggggagaataaccccccccgttgggggggcccaagctcaccgcttgttttttccaggagctcccgctccggacatgggcccttttttaggggagaggggaaaaaaatttcccccaattcctgtttgccggacggaaaagggggctccccccactaaagggcctttttttttagggcctaaaaggttcctttcccagccttggtaaagggcccaattt

SEQ ID NO: 10455 - DNA, 1580 bp, Zea mays
  Clone ID: MRT4577_109537C.1
ggccgccgtcgtggcggaagaggcgaccatcgccgaggcagtggcggtgtgcgcggcggcgtacgagaagaagaccgggtggggcagcgacatcgggtgggtgtacggcacggtgacggaggacgtggtgacggggtaccggatgcacatcaaggggtggcgctcccgctactgctccatctacccgcacgccttcatcggcaccgcccccatcaacctgacggagcggctgttccaggtgctccgctggtccacgggctccctggagatcttcttctcccggaacaacccgctgttcgggagcacgttcctgcacccgctgcagcgcgtggcgtacatcaacatcaccacgtacccgttcacggcgatcttcctcatcttctacaccacggtgccggcgctgtcgttcgtgacggggcacttcatcgtgcagcggcccaccaccatgttctacgtgtacattggctacctcgagggcacgctggtgatcctggccgtcctggaggtgaagtgggcgggcgtgaccgtgttcgagtggttccggaacgggcagttctggatgacggccagctgctccgcgtacctggccgccgtgtgccaggtgctggtgaaggtggtgttccggcgggacatctcgttcaagctgacgtcgaagcagcccgcgggggacgagaagaaggacccctacgccgacctgtacgtggtgcgctggacctggctcatggtgacgcccatcatcatcatcctcgtcaacatcatcggctccgccgtggccttcgccaaggtgctggacggcgagtggacgcactggctaaaggtggccggcggcgtcttcttcaacttctgggtgctgttccacctctaccccttcgccaagggcatcctggggaggcacggcaagacccccgtggtggtgctcgtctggtgggccttcaccttcgtcattaccgccgtgctgtacatcaacataccccacatccacggccccggcggcaagcacggcggcgcgatcggaaagcacggcgccgcccaccatggcaagaagttcgacggctactacctctggccgtgaaggatcgatcgattggagcagccaacccagcatcgtcatgcatgcacatacctgccctgatgatgatatggtgagccgcgaaggtgaagagagtacgttcccgttcatccatcgtccttagtgatgcccggtgattagttgatgatgaagagtgaagactacacacccaccaacccacacacatttgatcgacccagcgacgtacccgccaattttttttcttcttctttcctttttgcccgcccccttttcttcattctttttcttctagttttgtccagaaattgaaagatgtgttaagatgtgttgatttgatttagttttttaattaccgtacccgtggtaattaaattatgtacctacttatatatacattacgccgaagaggaaggatcactttgtataagaaaagagagaaatgggggatgtagaggggggctaggggccccggctttggggtggtattcttttagcatatggaacacaataaatttaatttcattcttgg

SEQ ID NO: 10456 - DNA, 495 bp, Zea mays
  Clone ID: MRT4577_109538C.1
gccgcacctctgtgaatggcgccacgacgaggcatgggggcactggggtcgccccttaatatgacgaccaactgctgacgaaacctcatttcgataactggacaaagtggttcggtatcggaggatcgtggtctgccaagaaggacctgccccggttgcgaggagtgttccaacttggggggcaaacacggtcgataaagcattcgctagcagcgcctgaatgcggctgcgtagctcaacgcacatatagccgaaggactctatatgaacctactacaaacctgttcaagatggttattaaggtccgagccgaatacaacgatatcaagaatgagacgctcacgaagatggatccatgctgagaatgaaggaaaaactgatgaattcatgaaaccaattgcagataattctggccttaaccatgtgactcatctcattgagcacatcaaggctcatctcgttgtcataagatcatgatggggatccgactgaact

SEQ ID NO: 10457 - DNA, 813 bp, Zea mays
  unsure (1)..(813): unsure at all n locations
  Clone ID: MRT4577_109539C.1
tcggggccggccgggaagtacatcaacatcccacacatccacggngcccggcggcaagcacggcggcgcgatcggaaggcacggcggcgacgcacaccaccatggcaagaagttcgacggctactacctctggccgtgaagcgccgagcagccagcatcgtcatgcatgcacatataccgcctgccctgatggtgacgatggtgagccgccaaggtgaagagtgtacacgttcccgttcatccatccatcgtctccttagtactgctgcccggtgattagtcgatgaagagtgaaggtgaaggctacccacacacacacatttggtcgacgtacccgccaaaatttgaattttttttcttcccccttctcccccctccctctcccttctcattcttttttcttttagttttgtccagaaatcgaaaggtgtgttgatttgatttagtttttttaattaccgtgccccgtggtaattaattatgtacgtacttatatatatatatacattacgccgaagaggaaggagcactttgtataagagaggaatggggaacgtacttacgggtgggggccggggtgtaagtgtctgcctgtctgtactgtacatggcttggaggagtcacatgcagagagggggtactaggggggcccccttggctttggggtggtattcttttggtacatggatgaacaataaattcaatttcattattgttgtttggaaaagaggtgtacaccctcctccctcctgtactctggctctttgtgttgttggtactgtaattgacacgactacactgatctgctggtct

SEQ ID NO: 10458 - DNA, 294 bp, Zea mays
  Clone ID: MRT4577_10953C.1
aaaggacaatgaacacatttattccttgtggattgaacaatattttacattatggtacaaaccgaaaaccagttcgcgcttcacatgcattcggacacctaaaggtcaccggcggggcctcccttacttgccggggacaaatttggtggtgtaggcccaagtgttgtttgtgtctgggccctgttatgtggtcagcgagtgttttgagcgggcccttatcgggaccatggcctggaccaataatccttacatggataaacatggtaggcggtcgtttttgaccttcttgacctt

SEQ ID NO: 10459 - DNA, 350 bp, Zea mays
  Clone ID: MRT4577_109540C.1
tttgttcgcgtgggcggacgcgtggggggacgcgtgggcgctccgacagcctctcgaaggaggagtgcgactagatcctgtgcaactgttgccagcacggcgagcccaagactgacgagtgggtgcagctgatggtgccagtgggccatgacttcagggtcaagagcgataacagtggcggcatacgcgagaacgtggtagaagtagtgatgcatacatgagtgctggaggtcgactactgcatgagcaggctgaacaacaacgcggcgaggtgggcaatgtacagagggaggtgaagacagccatgtccgacgggcgccaggtgatggaggtggacctgaggctggtgc

SEQ ID NO: 10460 - DNA, 500 bp, Zea mays
  unsure (1)..(500): unsure at all n locations
  Clone ID: MRT4577_109541C.1
gacaagagtatntttgatttaccacacgcacaggacatagtatgaacctttcttccaagaatacaagcaaccttaacgtctgtcaactgttgcaggcgctccaccttttttttttatncacgaataaaataccggtgggggtgacagctgaggtcaaaagacaaatgcgtaataggaattctctacaaagctgtcgctgtgccagaactactctcaactgtcggtgatgcatccgcgaggtcgtgacccaatccaagctagaagggaaattttggtgcaaggtgggaaaaatgctttgccggcatggcctcccctgttcaaaggattctggccaggttgctgatgaaattggcggcgactggatgtcggattatttcctgtgtatcaacctatgtccccgagtgaagacagatcctgcaaacgcctggggaagagacactggtgatgagatctgcggtgcttagggccactgttgaatcgtgcactttggtccggcctgc

SEQ ID NO: 10461 - DNA, 255 bp, Zea mays
  Clone ID: MRT4577_109542C.1
cgcagcgacacaggggagggcatgtgaggttctgctgtgcacaatctcggacaacggttgatcgggatgctaggattcattaatggataccgggagaggtgtctgcggcttgcatgaggcactgagtagcactgctttcttatcatgtggagaacctatagcgaggctcagatgaccaagactatacttcaacatgagagccaagggccatatctgtttgaatttatgatcattgacactgtcgacgcaagtcag

SEQ ID NO: 10462 - DNA, 232 bp, Zea mays
  Clone ID: MRT4577_109543C.1
gtgttttttttgatactattgcttgtttcaccccgacaagcctaaggccggggaggatcgccgttaagcaaagaattatacgaaagtcgaagatgagtgcacatccagtttttaggattacgtacagcgaaaacctgagggatcgacggagctgggaaaacacaaaactatgctagttttccagaagaagaacccgcaacaaatttgaacgttgaagaactagctagctatt

SEQ ID NO: 10463 - DNA, 366 bp, Zea mays
  Clone ID: MRT4577_109544C.1
aagacaagatcgaaagcgatcaaatggtcgtcgataaggtagcatacgatcacagaccacctgccccgtccgcgggtatcaaccttcatgtcggctcatgtcggtcaaaggtgacctgggcacggtggagttcctgcacgggttaaccagagatatggtactcgttgcgccaccatagcttgacgtggccgtggcggggtaccgtgccatcgcgccggactgccgcgggtacggtctgtaagaccagccgacggagaacgaggaggcgtactgggtctgggatgacctcttagaggacgtgctcgccatccttgaagcgctttccatcccaaagctttcttggtgggtaaggacttctgcgccctg

SEQ ID NO: 10464 - DNA, 221 bp, Zea mays
  Clone ID: MRT4577_109545C.1
tcggagtcagagaggtgcagatcaatgcggcggtggtggtgcgccgccggcggtctttcccgctgcgttctctcgttctccacctccggcatagcattccatgcccgcccgctgtcggttaccctgatgccccaataatccttcattaccctgccttttttcctgttctgttcgaggcgccactctcttcagggattctgtcacctggttatcgctttttt

SEQ ID NO: 10465 - DNA, 372 bp, Zea mays
  Clone ID: MRT4577_109546C.1
ggggtggggtttttttttttttttaaaacagttcaaacctttttccgattgaaaaaacaaagctgggccttttggaacctgcattcgaggcaagagattttcttaaccaaaaaggaaaacggggcctcaagtttaaattacttggggtaattgaacttgacggggggttttttttttgccccatttgaacctggtaacacccagacaaagggtgcagggttttattgtttctaaaaacctagggctgtttactttttatacaacattgttttaggacagcaacttttttgggtccgagctccccttgaagttgtacaccgactaaaatgcctccatgcacactctggcgaagccccgcattgcctggaaaac

SEQ ID NO: 10466 - DNA, 255 bp, Zea mays
  Clone ID: MRT4577_109547C.1
gcgccacatcacccgactcctggacgaggacggctaaccggccttcacgctcggcaacagggtcagctgctacgcgctgaagcactggacagagcatgtccaccccgtcaagctagagccctacaacccggactaccaatacgagtacatgctctggacctagagcctctacatccgcaactgctatcgctgcgtccgcatggtcaacaacatctaccttaactactacgccttacacggtgacgaggcccactg

SEQ ID NO: 10467 - DNA, 250 bp, Zea mays
  Clone ID: MRT4577_109548C.1
ccacgcgtcggcgcttacctatgacacggcacatgttctaccccatggcacggccgccatgatcccgatcccactcgtggtgccgagcttaccgatgcgctatctgtgcacctactatggagctgatcagaccggtcacatgagacgcgttacacacgtgccaccgtcggagatctaccacagggccgcggactgccgggctgcatcacctgtcggtgtgcgacgcgctgactttagctacaacgctgac

SEQ ID NO: 10468 - DNA, 1609 bp, Zea mays
  Clone ID: MRT4577_109549C.1
tgggtagctcgagcccggcccgccccgggtttacgtactcctgcacggcgatagcatagcttagcttgcttccccaatgccaatgtcatcgacagcacaaatggcttccctcgccgttctcatcatttccctcgtctttgcggcgcttgcctccgacgccgccgcaggcgtccgcgtcgagctcacgcgcgtccacgccgaccccagcgtgaccgcgtcccagttcgtccgcggcgccctgcgccgcgacatgcaccggcacaacgccaggaagctagccctagccgcgtcgtccggcggcacggtgtccgcgccgacccaggactcgcccaccgccggggagtacctgatggcgctggccatcggcacgccgccgctgccgtaccaggccatcgccgacacgggcagcgacctcatctggacgcagtgcgcgccctgcacctcccagtgcttccgccagccgacgccgctgtacaacccgtccagctccaccacgttcgccgtgctcccgtgcaacagctcgctgagcgtatgcgcggcggcgctggccgggaccgggacggccccgccgccggggtgcgcgtgcacgtacaacgtcacgtacggcagcgggtggacgagtgtctttcaggggtccgagaccttcacgttcgggtccacgccggccggtcagtcccgcgtccctggcatcgccttcggctgcagcaccgccagcagcggcttcaacgcctcgtccgcgtccggcctcgtcgggctgggcagggggaggctgtcgctcgtctcccagctcggcgtccccaagttctcctactgcctcacgccgtaccaggacaccaacagcacgagcacgctcctcctcgggccgtcggcgtcgctcaacggcaccgccggcgtcagctccacgcctttcgtcgccagcccttccactgcgcccatgaacaccttctactatctcaacctgaccggcatatccctcggcacgacggcactgtccatcccgcccgacgccttcttgctcaacgcggacggcaccggcgggctcatcatcgactctggcaccaccatcacattactgggcaacacggcgtaccagcaggtccgggcagcggtcgtctccctggtgacgctgcccaccacagacgggtcggcagccacggggctcgacctgtgcttcatgctgccctcctcaacgtcggcgccgccggccatgccgagcatgacgctccacttcaacggcgcggacatggtgctcccggcggacagctacatgatgtcggacgactccggcttgtggtgcctggccatgcagaaccagaccgacggcgaggtaaacattctcggcaactaccagcagcaaaacatgcacatcctctacgacattgggcaggagacattgtcgtttgctccggccaaatgcagcgcgctctgatcagagctttacagaactgaaaatatgtgcgcgcaattgcataaggatcgtgatttttttaactatatattatgtaaaaatgtcgtgttgcttgggttgggttgtaaagcaggagatatttttccttctcggatccatgtgctttattctttatttttagggtcttctcggacgcgtggg

SEQ ID NO: 10469 - DNA, 291 bp, Zea mays
  Clone ID: MRT4577_10954C.1
caaccacaacaaaaaataatttttcttacttccaaccaacaagcgggaccaacaagcacgcagtacaacatagcaacgagcaaacccgaccaaatgccaccctcccttatgggggacgggaccaccaaaaaaaaaaacatgatgttggggggctccaaaagcagaggaaaaaaaaaaaatcgttgctacaagccacaaggggtatatttaaaagcggtggttgggccacaagtgagcaaggaggcatcaaagcaaatgtttcttccccacgaaagacgtcggggccaaaac

SEQ ID NO: 10470 - DNA, 671 bp, Zea mays
  Clone ID: MRT4577_109550C.1
gagcttaagctctcggagctacctgaagagtgcgagcataagtgcttccaagtgtgtcgttgccacgaagaaacacccggaggacgatggaatcgctgaggaaatggaaggcgccgtcaatggattgtctgaaaaggtctccaggatgcactcgtaagcaggactgcccctggcaacagcaaccttgttgcaaggtttctgtctctggtacactgtattccgacgacagccttggaaaggcaaacactgtatgtcacacagcagtacagcacactgtgctgcgaggttgggttttgcttgcgtacatccatccacagctagttcgactttacctgggtggaagaggaacacaccaccgcctgatggccctttcttcatcgtctgcatttccaccgtgtcatgccagcgctgcgtggcacctctagaaggtagaagccctgcatggattcatgaagaattcctaagatgtagcactagtcagtgcatggaggaaacatagtcggcctgtcgaccatgagatgttttcttgcaaatggagtctggacctatggttttcagttttattacaacggcttctgccgtaggaagtgtcagcagtgtatcatccctgtaatacccaatttataagagaccatataaaaggagaaaaatcatttgctttatgtatgtgt

SEQ ID NO: 10471 - DNA, 409 bp, Zea mays
  Clone ID: MRT4577_109551C.1
ctgtgcggcgctcgaggcggccgtttcaaaagagccattgtagaggttgactattctggaggctctgagctactggttttttaagacaactggatgcatttgattcagaaaacagactattattccacaattttaccgtaggaatggagcttccatttgataattgatagtactgagctaagctatcaaatccaccaaagtgaacctggtgagcggtgaccaacattgacttgtttttaccggttcgctgccctcaatctcacttgattgttagttttttttaaaaaatatatatttacatttacacctctaaaaaaaaaaaaaaaaaaaaaaaaaaaaaaaaaaaaaaaaaaaaaaaaaaaaaggccccaaaaaaaaaaaggagctaataaaaaaaaaagggccccta

SEQ ID NO: 10472 - DNA, 344 bp, Zea mays
  Clone ID: MRT4577_109552C.1
gagggaacagggggcagggccggaggctgtactgcacactcggcccacacagaaaaacaaaacaaagttggactgttttttaacccccaggaaggacaggacaggacacaaaccaacccgacccggggccaaaatttgggaaaaaatattcgttccccccccagtccccccactaaaacaagggttgcgtaaaaaaaaaggggccaaataaagcaggggttgctttgccatggcccatggcacccgggtgactgtttgactgactcaaacaaaacacaacaaacgaccctggtaaaatattatatcccaaaccagcttattaattagctagcccacccctcccg

SEQ ID NO: 10473 - DNA, 361 bp, Zea mays
  Clone ID: MRT4577_109553C.1
gattccccccaccccccattgtgttttttgtctttcttctcggtggggggagggtacacaaagttgcacctgaaaatggcaaaataacttaaagctcaaaattccaagccccaagaactaggggaggaagggccccattctaaattggcaggggagggagcttcatgggaacacccaaaaaggtataccatatatgggccacgcggactgacccaaacacattttcactggtgggagtaaaggggcctgccacaggaatctgggtgtgccgcgtccccatagcctcaagggcaaccgggcccactcagggaaagaaaggcagggtctttccaatgtccaaatgcaaacaccttgggttttt

SEQ ID NO: 10474 - DNA, 1841 bp, Zea mays
  Clone ID: MRT4577_109554C.1
agcagaggcgctcagcacggagcgagaggccgccccgtagacaagaggcgtgcaccagggaggggggcgccgcgccgcctccttttctgccccgcggcaaccggaggccggagcatagcaacctcgctgggctccatagcgggcccgcggagccgggatatactccagggaagtcgagcaaggagagcgtggattgtggactacaggggtaaagatcgagtgagcatcgctgcaccatgcgcccttctctctgctgtgcacctctttttcttctgctactattacatttggcatttgctagacctctctttcctctaccgagtaagacaaagaatgaagagaagaagcccatacagacgtttcggccatataacattgctcatcgtggatcaaatggggaaattcccgaggaaacagctgctgcatacatgagagctattgaagaaggggcggattttatagagtctgacatccttgctagcaaagatggggccttgatttgttttcatgatgtaacacttgatgatacaactgatgttgccaagcgtaaggaatttgccaatcgaagaagaacctatgaagtggagtggtttaatgttactggatggtttgtagtggacttcacactggaggaacttaaaacacttagagtgaagcagagatactcgtttagagatcaacaatacaatggtatgttttcaatcatcacgtttgaagaattcatttcaattgccctagatgcagacagaactgtcggcatatatcccgagattaaagatccagtttttatcaacaagcatgtcaagtgggctgatgggaagaagtttgaggacaaatttgtggataccttgcttaaatatggatacaaaggtcaatatatgtcagagaattggctgaagcagccattgtttatacaatcctttgctcccacctccattgtacatgtatcagattttattgactctcccaaggtatttttgattgatgatatcagtgtgagaacacaagacacgaaccagtcatactgggaaattacttcagatgactaccttgcatacattagtaaatatgtcgttggccttggtccatggaaggacactattgttccagcttcaggaaactacttgatgccacctagtgatcttgtcgcacgggcacatgctcataatctccaggtacatccatacacgtacaggaacgagaaccagttcctgcacttcaacttttttcaagatccctacaatgaatacgacttctggataaacactgtgggggttgatggactgtttacagatttcaccggaacccttcacaggtaccaagaattgacatccccacaccggaaggatgagactgcaaatagcctcctagtaaaaattagccaaatgatctcagcatatgaaggtctctgatcagcacgacgttgctgaaaattgtttgtgcttttgttaatcgatctgcaagagcacacgatccattcatcacggacggtgcaacgtgacactgtgactttgcaaggttaaataaacgagttgtttctggttgggacttgttagcacgagccgtactctccattaaagctcttaaaccctgtgagaaatttctagtgtgggaataattgttttcacgatagaaaccgtatcatggtttagcgtgccaggatggacgagttggtctcgggtctttgcacagttggcctacaattgtacttgccggagtgttgaaatttctagtgtgggaataattgttttcacgatagataaaaaatcttgtcactcttatcctcttttatgctgcttaagtaacacgctgtttgttggtcaaaaaaaaaaaaaaaaaaa

SEQ ID NO: 10475 - DNA, 414 bp, Zea mays
  Clone ID: MRT4577_109555C.1
acccacgcgtacgcttactgataacgtgacaccccagatgaggctgcactaactttattttcactgagccggcccagctcttcgagaagtacatggaccgagggtttgatatgctggctttcctgtgcaaccaaatcgttgagcaggagccttgcaccaatgtggacattgtccagtttgccagtacacactctaatggtgagctccgggtttgctagaggttgacgacagggcgactgtggtatgaaccagcttcatatgtctgaaataaatcagaggcgggcttgtcggcgacggtcttattgggcactatgacacatgctcggatgaccaagacgaacgtgctgtggaaggctatacttcaaccaattggtctttgggcattgagaaggatatcaagaggctgcttgggag

SEQ ID NO: 10476 - DNA, 410 bp, Zea mays
  Clone ID: MRT4577_109556C.1
atcaccatatccgctatatacaccaacgacatagcctcgtcgtgcaccattccgtccagtagactgggtgatcagagatgctctgacgacaacaggcgaatatgagtttcagaagatgcaggggcaagagcaagggtcccaaggatgagtcccgaacaaccaacgccggcatgcagatccccgtcatgacgcatcacgcgctatctcaaggccgcgaagtaggccgagtgctccagtactggtgcgcccggctacctctgagccgcgctaaagtatctctcgacacagcggatgaaactgacaagcaaccggaggaccgactgcaagaagaagcgcatggggacgtgtcatcatacatttcgcatcgcgctactactaagaactcacaaagctgatcggaagtgtcacca

SEQ ID NO: 10477 - DNA, 469 bp, Zea mays
  Clone ID: MRT4577_109557C.1
ctcttccgtaattcccgggcggaccaacgcttccatgtgagatggcttgtgctaactctacgcatctgcttcaattcaatgaggttctacagggttctagctcctaagggagcggatcgtgactgcgcaatctgatgcctaataccgatagcttagttacaggactaggatgctccactgacgcatgctcagtcaagaacgccttcagcacctacagagaggcacttatgtcaataacatccttcgacgtgacacgcaaagggcacacggattatgatgaataaccttctccacttaagaggcgatgacggaacgccatagaggtcatgaacccatgggagctggactgtcgcaccatgaccgacaacgaggcccaatacagatgagaccgttgtggctgcagcggtgggtacggtggcggccgtggatgctgcggctacggcggtggcgggcgccgtgatggcggtgg

SEQ ID NO: 10478 - DNA, 661 bp, Zea mays
  Clone ID: MRT4577_109558C.1
gaagtcccaaacctatcgcggagcggggtggtctcttcgccggacctccagcgccacctgtcggccaaggtctccctcatctgcaacatggagggcgctaacggctccaggtacgggagatccccccagctgaacttgtgtaatcgccagggaggctggggcagccagctctacatcagcgatagacgcctgaccatccacagcttggggagaatgatgatccttctgttgatgtggactgacatgaggtgcacttcaccaccccgaggccatatatcccggtactgatgttgagcaacggttcccccatatgaagatgggtgacgcctgaacttagacacacattgcatggcctgggcgcgaccatcttgttgtgtggaggctgtacgttcccgtgaaatctatgcgccagactggcggacgtgacctgtgtaagcccagagaagaaatcgctgtggtgtccagttgtagtgaggctactgtctgctgcatgaaccggggtgccttccgaactatgttcctcaggaagaacaatctgcagtactatggccctctctgccccgcgagatcccgattttgatccctctattgtggaccttgtgaggagattggctgatgatgcgaatctttgcttcgtgggagatgttgctatcaggtcacc

SEQ ID NO: 10479 - DNA, 354 bp, Zea mays
  Clone ID: MRT4577_109559C.1
ttttttatttattcatatgacttggtttaattatatattttttttctttattaaatcttaaaatcttattctttaatttaaaaaataaaaacctcaaaaatagttcacggaccatgttataacaaaaaaaaatggtttatattaaaaataaaaattcccaatatgcctcatagaaataaattgatgagtgacaataccatgcttgcataaaaagctatggctctcaccgcaacaaaaaaacaatgcaaaaaaaattgcatcaagctttttaaaaactaaaaggagtacttttatttgtaaaatttgcatgaacataagcataaacttataagggagactttatatattcaagat

SEQ ID NO: 10480 - DNA, 808 bp, Zea mays
  Clone ID: MRT4577_10955C.1
taacaggggaaattatttgcatttcccacggaaattcgttcttcacgatacagattcatgtaaacacggaagaagaaaagctaaatcactcgacgggacgagaccattttctaaacaggctgggtgcaataattattagaacggcgccggacgggcaccaccgggggggcccggggggttccatccgttggctgcctttggcgggttttgaacgttgccaatcaggtttgggggcattcccttgtaatagggttggtttcccccgctctcttgtgttttttccgtattttctgttcgtaccttgtatgtgttctagttatccctttttgttgtttttctttatcttgtttttcttatggttttacttgtatttctatttttattattatttttaattcaccatatcttatttatttgtctttaatatttttttactctttgtttctcagttttctcttcattttttttatgtttttcatttttcttactactcatttgtccattttattcttattatttttgttttctttcttttttttttaactattttttttcctctattctatatttttattttttaatcatatttatttgtcttcattttctttattttcttttctattcgtctatttatttcatttacttttctattttccatattattgtttaatttttgtattattctttcttttctatttttttttactcttccctttattttttttattttatcctttttttttctattattttaatatttcatatcttttttttatttttttttttttttactatttttatttttttt

SEQ ID NO: 10481 - DNA, 372 bp, Zea mays
  Clone ID: MRT4577_109560C.1
ggcgaaacagcaaaactgcctgaaaacacatttgcagttttggttgggtggctcaattacagcagagaaacgggggagggaggttagggacgagcaggacaaaataaggcgacgggagaggagagaaaaaaaaatacctgctgtctctctccaccctccctccgtttcgccccttgctgggaatcgattgggccggaagctgattgttgcattgcgaaagaggaagaggacagtggtgctcgccgtcaccatcgaagatgttctcctcgcccttctccgtgacctcttcgcacagcagcgagcatgagccggttgcaagggacagctccatcatcgtcgccgtcgaccgggacaagaacagccagcaggcgg

SEQ ID NO: 10482 - DNA, 966 bp, Zea mays
  Clone ID: MRT4577_109561C.1
gcacgccttatcgccacacagacacagcacaacgcacggagtcagattgcgggcagcgctcgctaatcgccatagcctatagctgtagagaaactgctccgggaggaagtagacaaggagagagagagagaggtcaacagggcactgccggatccggagccaaaaaaaaacccagaaggatccatggctcccggagccggagacgactctgatcccgcctcttatatccacacggtgcagcacctgatagagaggtgcatgacgttcgggatgagcatggaggagtgcatggaggcgctggcgaagcgcgccgacgtccaacccgtggtcacctccacagtgtggaaggagctggagaaggagaacaaggagttcttcgacaagtacaggcagtggatctcggagaagagaagcgggagtacctcctagtcctagtagcacgggactcgatcgtgtctctctgctggcttagctcgctttaaattagcccgtgatgtgtattacgtgtgcttagttattttaggatttattattacttactgtgtttgattagggaggaataagcggtagggagggagggaggcttgtaatgtgattctctgtaagcaagcagagcagtagtcacctgtacggcgcgggctgtggcgttatgtgtacagggtaaagcagggaaagccatctcatcatgcgcagcgcagaactgtacgcaagtagccgttgctggcgtggcgtatgtatgtgtatacacaatttgccccctacttctctaccgtatgggctcatcgtcgctaaaagtacacagcagttgaaaaagctcgtccttttctgacagtaatgtaaaccagaaattgagcttggtacttatcaaggccgcttggtagggtgttgaaattgaacagaagaagcccgtatatatacgcataccatctgattatttcgatatcaaggaaaggcaattcttgcatc

SEQ ID NO: 10483 - DNA, 800 bp, Zea mays
  unsure (1)..(800): unsure at all n locations
  Clone ID: MRT4577_109562C.1
ggattcgcgaaagagacgaccgccgccgcatcggaccgtgcccgaaccccccttctcctcgctgactcggctcccctcctccgccgtcgccggaggcgaagcaagtggggaccacagaagcattagctgggtgaacccactcgaagggggcagggaattgtgtgctagtttgaatggctgctacaaagcttcaggccctttggaaccacccagctggccccaaaaccattcatttctgggcgccaacattcaaatggggcatcagcattgccaacatagccgactttgctaaaccacctgaaaagatatcttaccctcagcaagttggtacggataagctgttcaatcagtttaagttgtaatcctgcattccatataacatgtacatttgttaaagtgcattattgtataattctggtctgcttactcttttacatgatgattagctgttgcatgcactggactcatttggtcaaggtacagcttggttatcacaccggtaagccattagtcagtttgtggtacttgtccattggttctattgttgtacactgaaacatacaaggtggtatggttgtatttgatctcactggaaatttactggaacttctattactcttctgagttctgacccttggtnttttttctaagagtaatttttcactggcggtcctttaacttgtccctgcccttattccagttctgatacttttaaatagcatatttaactctttaaccgagtcctagttcctcatccaggtcccatccctcttaattatgcatttagcccctaaactgac

SEQ ID NO: 10484 - DNA, 197 bp, Zea mays
  Clone ID: MRT4577_109563C.1
tgcgcgcgaagaacagccacccctcaggctacagcggcggacacccgggcatcgattagcagacactggggcctcgccggcgtgccgaacacgtggaaccagatcctctacgcttctctcctcctggcataagaccggggatagataaaacgcgttcttttttccaataggtgctggctattcgcatgtcgtatcta

SEQ ID NO: 10485 - DNA, 169 bp, Zea mays
  Clone ID: MRT4577_109564C.1
agcttgccctgcccctgattgctagttctcgccgttacgtaaggcttgttggccttgcgtactacgtctttcgttggtgatacatggagggattaaagaagctgtctggttacgggcagtagaggtcgacgacagctgcagcaatggacgacttgtactggctgacggt

SEQ ID NO: 10486 - DNA, 402 bp, Zea mays
  Clone ID: MRT4577_109565C.1
ttttttttttttttttttttttttttttttttttttttttttttttttttttttttttttttttttttttttttttttttttttttttggcccaacatgggttattaaaacgggggactttttccagaccacttgcccaaaaatgggtccgggaagaaaacaaacaacttttcccaccgggcccccctacaccctaagggtcggggcggctaaagggaacaatttccgaacaatggattaaaacaaaggccgggacccaaaaaccaggggaggggcgtttaaagggccctataaacattcattacaaacaaagccctaattaccagctaagtagccaaaaaaaaggcaaggccccgcccattttgcaggggaccgttttttttttaaaaccagggacctgct

SEQ ID NO: 10487 - DNA, 2341 bp, Zea mays
  Clone ID: MRT4577_109566C.1
gccggcggccccggagttactcgcacacacactgacacacatacagcttcaatcatcgccttccagcctcttcggctcttcttgtcatcttcgatccatccgcagttcttcctgcattccccatttgcgcgttcttccatctcccagattgatctccttcccgacttgggctttcccggtgggaaagcagctgtacctaggccgcgagccacccgcccctcctgctcttcggcaaacgcggagaaagtgggcaggcaataaagtatccgcggcgccggcacgacctcctgctccgctccgtttggttcgccttcttccagcagcgaggagtggcgcagacctagaggccaagaaccagatcggcgggtccatgaagcccgacgtgaggaaagatgccggctgtggcgtgaccgcattcggcgtctcctgcttcgacatcaagtctttcgtcgcctccctcgcgctgctcacgctcgtcatggcgctctggcagctccacccctaccagccgctcctctccgcctcccgtccgtcttccatctgccccctgctcccccggccgaccatctcagcttcctcccgcgccgcttccaccgccgccgcatttccctccgccaactccagtaccaacgctgccagcaccaaggcggcctcttcggctgctcccgccgttacgacgacgaagccggctgcgtccgtgctgccagctgcccggccgcgggaccccaacaagcgggagttccgttcctacggcagcgcggcggctctgttcgttcagatgggcgcgtaccggggcggcccgcgtacgttcgccgtcattgggttggcctccaagccagcacacgtctatgacaccccctacttcaagtgcgagtgggtgccgaaccaggagccatcgtcgccggcgccgcctcgggccgtccgtaccaaggcctacaagatgcttccggactggggctacggccgtatctacaccgtcgtcgtcgttaactgcacattccccaccaaccccaacgccgacaaccgcggcgggaagctcttcatccaagcatactactccaccgcctcccgccggtacgagcgcttcgtggcgctcgaggaggtgccgggttcctacgacgagtcccggttccggccgcccttcccctacgagtacctctactgcggttcttcgctctacgggaatctgagcgcggctcgcatgcgggagtggctagcttaccacgcgcatttcttcggccccaagtcgcacttcgtgctccacgacgccggtggtgtcagcacggaggtcagggcggtgctggatccgtggatccgggctggacgggtcaccgtccaggacatccgggcgcaggcggagtacgatggctactactacaaccagttcttggtggtgaacgattgcctccaccgctatcggcacgccgcaaattggaccttcttcttcgatgtcgatgagtacatctacctcccagacggccggacgctgcaggaggtgctggggcagctggagccctacacgcagttcaccattgagcagaaccccatgtccagcaaactctgcgtggaagatccaacaatggaatactcaaggaaatggggtttcgagaagctcgtcttccgtaattcgatcaccagagtcaggcgagaccgcaaatatgcgatccgagctcggaacgcgtactccacaggtgtacacatgtcccagaatgtcatcggtaggacaacccacaagacggagagcttgatcctatactaccactatcacaactcgatcaacgtcatgggggagccctgcagggaattcgtgccgagacccaacaatggaagcaaggtgatgtttgaggggataccgtatgtctacgatgacaacatggagcgcgtggcaggggagatcaaacgcttcgaggaggagacacttgggaccgtccgtacataggatcggcgcaaaagcatcgcatcgctggtgcatatacagctctgtaccttgagctcgtgcccatccgttcgttccccgtgactctcgtcttgtgcactttgagctgccattccaacaagcagaatggaagaatctgtctcggggtcgaattagtgtaaagtttcagtttagctttgaatctgtcatctgtgtggagggcaatgcctttatgctgtgttttccgttcttgtctctatgatgttgtatgtatctcattgtagatttgtctagactgactgttgggctttattagatttttctgaatgtcgtatagggcgcagtgtgaagcgtctgaatatttgacttgttaaccaccctctggagtctgtatttgttcctgcacaaactggagcgtcagttccc

SEQ ID NO: 10488 - DNA, 717 bp, Zea mays
  Clone ID: MRT4577_109567C.1
aattcggcacgagcgtcgagcgattacaactgctgactatcagattcagctcacacacctccgttcgtaatagcatagtagccacgctctactcatcttaggtctcgaagtgccactgcagtcttcgccggccagctcgatcgccgcacgatggcgtcacagcagcaaaccaggaagcagcaggccaccaagggccaccaggagaccgaccaaggccaggcgatgaacctggaagagatcggcaagtaccgcgccgaggcgcagcagcggtcggcggacgccatccgcgccgccgaggaccggttccacaaggccaataaccagcaggcgcgcggcgccggggcgcgcgggactgtcaccgtggcccaggcgcccgtcgccactgtggtcccgtatcaggagagcgtgaagcaggcggagacggagagccacggccgcggtagccacggctctgaggcgcagcagtggctagcggacgccgcggccgatgccagggagaggtgcaacaaggccctggggacgagcccggccgcccacgcgacggctggcgcggctccacaccagcaaaccaagaacgagcgggagggtggtcaagtccacggccatctaacaaggcaggacgagatggggaagcacggcagcgaggcgcagaagaactcgaccgcggaggccgcacgtgccgcggtggagaagcacgacaaaggtagggagaccggc

SEQ ID NO: 10489 - DNA, 354 bp, Zea mays
  Clone ID: MRT4577_109568C.1
gttcctaatctaaagacttacaaatactcatggagtatgaactaaaaatatagaataagcaaaccatccaacaatgagtccatatgcaaatatttatcgcaacaaagggatgaaaaggagcatgccaagggtgttcttgaatcttgaagtggagtaaaatctttcgaacaccaatgcctacccatcaaagagcaaagctttaccttttggtgccttcagtatttaacaaatactcttgatatgaatcttttccttgagtcttctagtcctcaacccttggcatctccatcttcaatctttcttgtcttggggcctttttctatgaagggaccgcatactatcgctgacgcatac

SEQ ID NO: 10490 - DNA, 632 bp, Zea mays
  unsure (1)..(632): unsure at all n locations
  Clone ID: MRT4577_109569C.1
ggctgntgggaggcttggttcttaatgcgcgcgtgcgagggagagggacagggagacttgacacctggcttgatggattgagcttggctgcttgatggctgatccatccgatcctcgtacgagacggcgacgacgacgacgtacgacgctgtcgcgattggcaaagcagagtttgatagatggcaggtcattgtcgctgaatccctcatcttccgttggttccgtcagtttctgctttagctttaccgtcgcgatcgcggatggaggagcgtgcagtggaggcggatgggcctggaaggaaaggccacccgtttcaccggccatttatggcagtcaatccggcggccgggggagttcttcttgcatgcgtcggcgtcgtccgcgctcgcgttaccgctggatcgggcggagatggtcgaccgccgtgtggcagccgcagatgcggcgggaacggcaacggcaaccaccggcaggcggcagctgggcaagtaattggaagccggtcgcagaaacacgcatgggttggcacggccgtgtgcttgngttgngcctgccactgccagcctgctgtatggggattggctcctctggccagtgacctcagggacgttggtgccggccagtggaccccg

SEQ ID NO: 10491 - DNA, 208 bp, Zea mays
  Clone ID: MRT4577_10956C.1
tcgcggacgcgttggcggacgcgtgggcggacgcgtggacttcggtccatgctgatcggccaagggtccgagatccgcctgcgtcaggtaacggtcctatcttgatctcgtagtggcacctgcgcctggatgtagggattcggtggaggatggcgtgaaggctgtggggctgatctacgcctttgtcgcgcgcggcatcgcggtgctg

SEQ ID NO: 10492 - DNA, 221 bp, Zea mays
  Clone ID: MRT4577_109570C.1
cataacgatacatacttatcataaggctacatgcatcacaaaattatgtttacacccacacccaatcctttatacaaggaccaaacaaattgaagaatgtttttttacaaattacataaggaactatacacccaaaaccttataaacacctccctaactcctggagcggtaagccaaaccccccctgtggacatccattacgatgcaacatataacctact

SEQ ID NO: 10493 - DNA, 551 bp, Zea mays
  Clone ID: MRT4577_109571C.1
atgtatcttttcctcggagttctctgcttgctctctgtctcctgaatatctattcatctgatcccactgctctctttcgagacataatggatggagggtcccgttgaccacgtgacccctccgtcgagtacgcacacactcaaggaagagcgagcctccgtggaccaccctaacgaggttaccctagaattatcacaatccctgagcatgcttcatccatgtgttattcaccgcttcttccttgcccccctacatctgatgctcactctttgtctagagcttcaatttcatattccagatatgatagctcctcgttgcatttgtgttcagactgtggtgaactatcactatgcaacatactatttcaaactgcgaggtaggcatattactcatgatgatgtatctatcgcgatcatcatggatagacataataattcacattctctgtttaatgactgatatcgaatcatgtatattctacacgactcttgacttatctgctgatgcatgattcagtcttgggatagtctatctcatcgctgttgaggctg

SEQ ID NO: 10494 - DNA, 353 bp, Zea mays
  Clone ID: MRT4577_109572C.1
gttaaccactcatcactcgtatagacaggggcacccgcgatacacaagagtatgcctttcaaaagggggacggcactccttatggttgggcccactcgaaacacttgtattccccaaagtcaaaacaaaaatgctcgccctgaacgtgtttttatggcgggaaccccccaagtagcaaaaaaacggggttatccaaaagaccctaagagttcccttagggtaagcaacccccacacaccgcaggtgaggtccccaggccacaaacggagaacccttgaaatacgggcacgatgccaaaatcttcaaagggtctctgcaaaaacggttcttcaggggacaaggattcctggggg

SEQ ID NO: 10495 - DNA, 431 bp, Zea mays
  Clone ID: MRT4577_109573C.1
gcttcttcctgttcctggtgtgtttctgatgcttcctgacctcggggggaaaaaaaaaaccgggggggggaaaaccccccccccggggagaaacccccaacaagggaaaaagggccccccccccccgtttttaaaagagtcggggggggaaaaaaccaaggccccccccccaaaagggagagcccaagggccaaattaaaattgggggggccccggggccctgggggacccaaaaaaaaaaatttttgggggccccggggggccccccggaatttcccacccggtccccgggggggcccccgtttcccctttgggggggcggtaaaaaaccgggggaaaccaggggaatatggtttcccgggggaaaaaggaaaccccccccccagccccccaaaattatgggccgggagaattaaggggaaccccggggg

SEQ ID NO: 10496 - DNA, 382 bp, Zea mays
  Clone ID: MRT4577_109574C.1
aaaccatattacaatatataaagatacatactggaatttaaattcacatctccctttagagagagcttttaggaccatgataaaggtccgctactgctttcctggagtggttatgggcctgcaagggaaaccagttcattgctcctttgcagaatgaaagtgaccagggataaccacttacactatctaccgtatgcttatcatattgaccctgcggggaagaaaaaacatgcatgattcatgcacatctagctacaaacaaaactattccatgcatattgttgcaaaccctactaaagaaaaaccaggtgaccacacctagcttccaatagcacaatatatcttgtgctggagcctaattcatatctttttatgaccccgg

SEQ ID NO: 10497 - DNA, 534 bp, Zea mays
  Clone ID: MRT4577_109575C.1
aaaaaaaaaaaaaaaaaaaaaaaaaaaaaaaaaaaaaaaaaaaaaaaaaaaaaaaaaaaaaaaaaaaaaaaaaaaaaaaaaaaaaaaaaattaaaaataaaaaggtttgtcctttgggggggacccctttaggggggatttttgcggttttcctttcccttggggggtctttggggcttttttttagggggcccatttcgccttttagggggtggttttacatttcactggccggggttttaaaaaaaccttgttggaaaaaccttggggttccccaatttaatccctttggagcacatcccctttttgccaggtggggtattaccaaaagggccttccccgattgcctttcccaaaatttggcaatcctgaatggctaatggcccccccttttaggggggctttaggcgcggcgggtgtggtgtttcctcccattgggaccgttcatttgccgggcctttaggcccgttcttttctttttgtccccttcctttggcggccccggggggggtttttccccggggggtttttttt

SEQ ID NO: 10498 - DNA, 1127 bp, Zea mays
  Clone ID: MRT4577_109576C.1
gcacgagaaacagggaatcaccaaacaaaccgcgtttgctccgcgcctccactccaccccgcgacgctaattaactcctccagctgtaaacctgcaacacttgggttggaggctagagcttgcaaacaccaccagcgaagacgtcgtggcgcgcatgtgggcggtctctgcacccggcgtcccaccgccaccgctactgtcgtagtcctagatccgacagcctcacgagctacattccctcgaggccggccttcccggtgtctcagcagcggcggcgcatggcgatggctgcggggcgtgggctcttggccctcttctcggtcgtcgtagtggctgggctcacctctgcggcgaatggtcctttcctgtccgatagcgtcttccagccgagcgccggatctacagggaggagcttactgcaggccaagaacagttgccccgtgaactttgagttccaaaactacacaatcatcacaagcaagtgcaaagggccaaagtttccagccggcccatgctgtgccgcactcaaggagttcgcgtgcccttactatacgtacctcaatgacgagagcaacgactgtgcatcgacaatgttcagctacatcaacctgtatggcaagtatccaccgggcctgttctccagcgagtgcaaagaaggcaagcaggggctctcttgcgcagatgtcctcgagagagacagtgccactgcaagcagtggtcatcacgctcaaatcagcttgcttgcgttgattactgtcttgagtgtggtagtagcgttgttccactgaactatatatgcattctccccaaatatggtgtgttacaactaatgaggtttgaattgcaccttttggtgctcatggtgggtgggattctaggttcttcctttttgtgtgtaaagtctcacataatgttattcatggcctattgcatacttttttaattcaatttaatatcgcagcgggtctgattaaggctatgactagtagatcgtccgtatgactgtacaaaatattgtttacattatagactattgttttacattgtgtactttgaaatgagaaataattgtttacattatccaaaaaaaaaaaaaaaaaaaaaaaaaatataaaaaagggcggccg

SEQ ID NO: 10499 - DNA, 1051 bp, Zea mays
  Clone ID: MRT4577_109577C.1
ataatctttgttggattaagtatagtttctggtgatagaaccaataaggatgtttgtagctagctgcaattcacgccccccgcgacgggcgacgctaattaagtagagctgcaacacctgggttggaggctagagcttgcaaacaccaccagcgaaaacgtcgtggccagccatcccggtgtcgtcccgcgttctacagccaccgctgtcgtcgccgtcctagactcctagatccgtcagcttaacgagctccattccttcgaggccagccattccggtgtctcagcagcggcggcggcggcgtcgagctcttgctttctgtgggaggacgcatggcgatgtctgcggggcgtgggctcttggtcctctcctcggtcgtcgtagtggctgggctcacctctgccggcgaatggtcctttcctgtccgatagcgtcttccagccgagcgccggatctacagggaggagcttactgcaggccaagaacagttgccccgtgaactttgagttccaaaactaccacaatcatcacaagcaagtgcaaagggccaaagtttccagccggcccatgctgtgccgcactcaaggagttcgcgtgcccttactatacgtacctcaatgacgagagcaacgactgtgcatcgacaatgttcagctacatcaacctgtatggtaagtatccaccgggcctgttctccagcgagtgcaaagaaggcaagcaggggctctcttgcgcagatgtcctcgagagagacagtgccactgcaagcagtggtcatcacgctcaaatcagcttgcttgcgttgattactgtcttgagtgtggtagtagcgttgttccactgaactatatatgcattctccccaaatatggtgtgttacaactaatgaggtttgaattgcaccttttggtgctcatggtgggtgggattctaggttcttcctttttgtgtgtaaagtctcacataatgttattcatggcctattgcacacttttttaattcaatttaatatcgcagcgggtctgattaaggcaaaaaaaaaaaaaaaaaa

SEQ ID NO: 10500 - DNA, 989 bp, Zea mays
  Clone ID: MRT4577_109578C.1
cggagcctgatcttaggcggaggaaattttgtacataatacacttacctgcaatggagagaaacaaaagggctatttactaacgtctgctgcctgacagaattgaactagatcgcttggtacttgtacatggcccgatggccgccctttgcgattatctttctcactattctcagtctactataaaaaggagtgggggggcttgtttgggtctgtggcaacagatatagtttacttgtgataaactgaagagatagtcatgaacagcgtcctggaaaatcaccagatactgcccaatctgaatctatagagctaagggaattctgtctgtgttatgctcctctaagtgctgagcctcctgatctgatgttgccccgtgaactttgagttccaaaactacacaatcatcacaagcaagtgcaaagggccaaagtttccagccggcccatgctgtgccgcactcaaggagttcgcgtgcccttactatacgtacctcaatgacgagagcaacgactgtgcatcgacaatgttcagctacatcaacctgtatggcaagtatccaccgggcctgttctccagcgactgcaaagaaggcaagcaggggctctcttgcgcagatgtcctcgagagagacagtgccactgcaagcagtggtcatcacgctcaaatcagcttgcttgcgttgattactgtcttgagtgtggtagtagcgttgttccactgaactatatatgcattctccccaaatatggtgtgttacaactaatgaggtttgaattgcaccttttggtgctcatggtgggattctaggttcttcctttttgtgtgtaaagtctcacataatgttattcatggcctattgcatactctttttaattcaatttaatatcgcagcgggtctgatgatcgtccgtatgactgtacaaaatattgtttacattatagactattgttttacattgtgtactttagaaaaaaaaaaaaaaaaaa

SEQ ID NO: 10501 - DNA, 2273 bp, Zea mays
  Clone ID: MRT4577_109579C.1
cattgggaccctcgaggccggccgggagaccaaacaaccgcgtccgcgtcgagtctctagtctctactctctcggctgtcctgtccggcgcggctctcgcgtctccaacctacccatgctgcagctcctccaactccaaggctcacaccaccccgcgacgggcgacgctaattaagtagagctgcaacacctgggttggaggctagagcttgcaaacaccaccagcgaaaacgtcgtggccagccatcccggtgtcgtcccgcgttctacagcctctgcatcccgcgttctacagccaccgctgtcgtcgccgtcctagactcctagatccgtcagcttaacgagctccattccttcgaggccagccatcccggtgtctcagcagcggcggcggcggcgtcgagctcttgctttctgtgggaggacgcatggcgatgtctgcggggcgtgggctcttggtcctcttcttctctgccgccgtagtggctgagctcgcctctgccgcgaacggtcctttcctgtccgatagcgtcttccagtcgagcgccggatctacagggaggagcttgctgcaggccaagaatagttgccctgtgaactttgagttccaaaactacacaatcatcacaagcaagtgcaaaggaccgaagtttccagccagccaatgctgtgccgcactcaaggaattcgcgtgcccttttaacaattacctcaatgacgagagcaatgaatgtgcatcgacaatgttcagctacatcaacctctatggcaagtatccaccaggtctgttttccagcgagtgcaaagaaggcaagatggggctttcttgcgcagatgtcccccggaaggacagttccactgcaaacagtggttatcgcgcccaaagcagcttgcttgcgttgattaatgtcttgagcgtgatagcagcgttgttctactgaactacagctccattcatttcccacaaaaaaaaaaaaaaagagtagtttttatgttaactgcaccaattattgatttagagagtcttttagataattactggtttgactgccccattttttcctttgtaattcattgcctgcatatttcctgagttcgatttgatctgtcagtgtcaatgttagcttgtgtctcagttaacggtgtcattctattgtgagtcccgttgtgataaatttggacaagtatatatatgtcggttataattcgtatgaatggttagcttgtttatgttgggtccgaggaatgtaatcgatggttcaccgttcctctggaaaatgttgtgtttgcaatttaaagagtattgttgcaatgactattatgtttgacaacatactcagaaagtattgttgcaactccaaaaaaagaagaagaaaagagcaactccaatagttatataaattttagccctctaaaccacagatttaagaagttgctaaataactttgagagtaaaaaaatatgagttctcacatagttctctaaatatatgttgtagttttattttgtatttattcacataaaaaaaataagtcacaaatgtcatcaattaccttcattatctacataatgcagccaacattttttatttaacaagttgcaaatggttgtcaaatgtagaaaggaaatgaggttagatgagaagttgctaaatttaggaagttcattagaggaccggtggatgttattcatggcctattgcatactctttttaattcaatttaatatcgcagcgggtctgattaaggctatgactagtagatcgtccgtatgactgtacaaaatattgtttacattatagactattgttttacattgtgtactttgaaatgagagataattgtttacattaaaaaaaaaaaaaaaaaaaaaaaaaaaaaaaaaaaaaaaaaaaaaaaaaaaaaaaaaaaaaaaaaaaaacccccaaaaaacaaaaaaaaaaaaccctttaaaaacggaaaacttgcaccaatcatggaaaaaaaaggaaaaagaggtaccaataagtgaaccccccctccccccccaattctaccaaacataaaagctgaaaagcataaccggggaaaacacggagggcacaatgagccagataacacagattaattgccaacgcactcactgccaaatttgaaagcgggaaaactgtcttgaaacctgcatgaacaaatgggcaaacaaccccccaaaaggtgtgttgactatctgggggcttttccgcttccgaaaaaactgacttccggggttcgaatgatcaactcccccgagcggga

SEQ ID NO: 10502 - DNA, 114 bp, Zea mays
  Clone ID: MRT4577_10957C.1
gttcacccacagagcggaggcatgctatcatatcatcttatagatatggactcgcccactgataaacattggccgcggagggccataatgaccccagttattacggacactaac

SEQ ID NO: 10503 - DNA, 267 bp, Zea mays
  Clone ID: MRT4577_109580C.1
tccacgcgtccgcgacggcgagcggccgccctttttttttttttttttttatgcgagctagacctctaagatgattgacagggttgattccgttcacaagtagcagcagcagggatttgagtagctggtgcttgccgcttctagttacgtgtataccgtacacgtgcggcggcacatcggccgcaggtaagtagtactagtacgtagtagcaaacacccagaaaatcaagcgcagggtccgcacgatggacacgtcgtcacttggcc

SEQ ID NO: 10504 - DNA, 544 bp, Zea mays
  Clone ID: MRT4577_109581C.1
gggggggggggggggggggtcgggtccaacgacgatgggacgacgggcgacccacaacacgtgacggacggatgcgccaccccgcgagctttgggatgtacccagtggccagttacacacactattgttacgtctacacggtactcgctacccgaggcggattattgcagcttctggtgctttgtgccccacacctcttagtctcattacttcttcacgtgctctgttcacatagaccatctaggatcattaggttgggaacaagattggtcgtcggggagatcatgcagaaggaagctaatttctcgttgacgtattcatcggtgcgttgtgaactcacttagacaaacacccgctcatacggtaaggtcgtgctggtgacagcgaaccatgccctatcgtcgcacggaagtacttaccccatcgacgtaaaaagggagggcaatagcacattcgaacagtcgacgaggttaaagacacgaccctctaatgtaagccttaccgctatcgagaggacgactgcgtacctgtggaggaccctccc

SEQ ID NO: 10505 - DNA, 630 bp, Zea mays
  Clone ID: MRT4577_109582C.1
tcggtagctgtcatttatacgagtaagaagaacttcttttcagatttgtaaagaggctacacaccatgagggaactcgatccgtgtgctagatgcttgcatttgcttgcatgaggagagcgaaagagatttggtggagtttcaagctccagcatctgaaaattgctacatatgatttgtcagcgtgcaagaaatttgtcttcatggtgatctccgacgtaaggtattacgtcaggtcgaactctggaagctggtggcgtcatgctcatgcatcaatcctttgtgtcatcgtcgtaagctctaccacctggacttgttgcctgtggcacatggacgagcaggagctgaaagttctgggcaggttgccagagctccgtttccttcaattggatctggggcgcacatcacccacaaccccaatacgcaacatcagtgcctcagactgaacacgttcacttggtcctgttcgttgccaatgaaggggacgacaagaagactgtttcactttaatatctggaatggaaatgggaatgaagatgatgagtggcgacgaatgtgaattttctgtgtctcggtgggagaacgacagaggtccagtcggagaaaagaacgatgatgaattgcagttgga

SEQ ID NO: 10506 - DNA, 253 bp, Zea mays
  Clone ID: MRT4577_109583C.1
gtcttcaactgtttaggctatgttttagctcctaggatatcatgatgcgttaggacgatagaaatattctgtcacttgaacactgcatgatgaaatcatgtattcctctgtttgaaattacaagcttatctcatttacaaaccttggattactgataacttcattaacacatttttttttacacagttgtcattagattcacgtattaaaaaaatcttgcttatgattgtatttttttatctcatgtaaatca

SEQ ID NO: 10507 - DNA, 1758 bp, Zea mays
  Clone ID: MRT4577_109584C.1
ctcatatccgggtataggagtatctctcgcttctctagccatgacgctggtgaggatgccttgccgcctctgctgcttcctgctcgtcgtcgccgcctccgccgtctccgggcgggggcgggtggtcaccaccctcccgggctacgagggccgcctccccttccacctcgaaacagggtatgtggaggtggacgaggacgccggcgcggagctcttctactacttcgtccgggccgagtccggcgccgacgacagcgacaccccgttcgtcctccggatccccggcggccaacgctgctccgccttcagcggcctcgcctacgagataggtcccatcatgttcgtcgtggagccctacaacggcagcttgccgcgcctgcgctacaacccaaactcgtggacaaaggtggcgcatattctttttgtggattcaccagttggggccgggttttccttctccagagatgctaaaggctacaacgctggagcggtatcaaccacgctacacttggcgaagttcctcaccaagtggttcaacgaccatcccgagtaccatgcaaatcctttctacatcgatggagaatcatacgctggaaaaattgtaccattccttgcacagatgatttcagaaggtattgaagcaggaatgaagtcggcacctcgtctcaagggctatctagtgggcaacccgtccacagaggagcgtattgatgttagcgctagagtgccttgtgctcacgggtttgggattatatcacatcagttgtatgagatgatattggggcattgccatggagaggactactccaatcctgcaaaagagttgtgtggtcaggcactgaagaccttcaatgatctcacctcggaagttgcgcaaggccatgtactgcaggagaaatgcgtcgcggcgtcgtcgtctcctgtgctgaacgcaaacagcagggtggccggcggctcgtcgtcgtgggcctcagatggcaggaagatcctacgggaggaagaaatggtgggacgacgcggagtactgggcaagctatttcatccaccggctcttcctccattcagttgcagagtttaccggtactacctgtcgtatttctgggcaaacgacaggcgcacccgggatgctcttgggatcaaggagggcaccgtggatgagtgggtcagatgccacaacgacgaccaagagttgccttacgagagcgagctgaagagtgtcgtcaagtaccaccggaacctgacgtccagaggctaccgagccatggtatacagcggcgaccatgacctgctggtgccacatctgggcacccaggcctgggtcaggtcgctcaacttccccgtcgtggacgactggagggcgtggcatctcggtggccagtcagctggatttacaataacttactcaaacaacatgacattcgcgacgatcaagggcgccgggcatacagcacctgagtacgagccggagaggtgtttcgccatgttcagccgttggatcctcaaccggccactctaatccatcggtgaatgaagagattcgtgtgtaaatctttcttcacgaaactactggctataagatgtacgtggatggaataaaatgctggctatgaacccttgatgctgatgatatatactccatcagtgtggtgaagccagatatgtattgtaggaataaataaaagtacaaaacggatgtacaaaggtacgtacagtgccctctagctacgctacattagcaatatacacgttcatatccat

SEQ ID NO: 10508 - DNA, 580 bp, Zea mays
  Clone ID: MRT4577_109585C.1
ccggcctctgaccagcccgtgctgtctgtatatggattctgataggtcctagacatcgtccattcctacctaggtccattgttatattgaaagccacgactaagaccctcgtgtgctttgacctctccagacgttggacgatcaacaccaacatcaaggtggaggcggactagggcagccagagacgtgcctgaaggacaacgacaacgagctaatctactcgccggaagagtgcaggtccaacaggcggcatcaccccgactccgaggccacgcatacatatgttgatgcttatcggaggtcgtattgccacacatggcgaccccactgcccagacacaccgacagatctacgcccacaaggaagtatgactacaaggccaaccccacgacagagggcaacaccgaggcgaagtacgcgtcaggagtggtcgaccaagcgcctgaagcaatgcattggccgggctttccggcgcaccactctttgcgtccgcgtcatgacggcctgggacctctcctaggaacgccactcgtggctatccatcagaaaaaaggtctctgatgacgtacaggaggaatat

SEQ ID NO: 10509 - DNA, 267 bp, Zea mays
  Clone ID: MRT4577_109587C.1
cgatgacgtctcccaactcgtccctgccttgtccatcgctgtcccatgcctcgctgtgctacgctagccgcagcagcacattacccctatgtcttacccttgtcgtgcttgcgtgctgttcgacaaaatgcccaacagcagcatcccggtgtctagtgtcatcgcttttggtgccctgctccattcctgcatgttgacgctatccttccggttttttttgccacacaaaacagcagccgcaacaactcctctatggcgtgtgctcca

SEQ ID NO: 10510 - DNA, 2107 bp, Zea mays
  Clone ID: MRT4577_109588C.1
gccggccgggcctgggacggatggtataggtggtttcggagagaccgagacagcggacatccgtaccgcgcgccgccgccaccgccatctatcctggaagcctgctgctctgcacgcaaccacgccggcccccgtcaaccggtcgccatctctcctggactcctgctctccacgcaacgccgggcagccccgcctcagctcctcaccctcctcgacaactctccctccggccggtcggcccccacgactccccggggcccgtcgtccgcacgggcacgggctgcacggtggtgggagcagagccagagcagccgaggaggcacatctactccgggctccggacctccctcggcctcaacccctctggagtctggattctgccatttcataccatctccgcttcgccactgccagcgcgctggccctggagcggaggcaagaggggtgactacaaggagcttttcgtcatggcactgcctaaggacggctgcctcgatggtgccaagatcacagaggtaggaggggtcggctacaaggagcttctcgtcatggcgctgcctaaggacgacagcatcgatggcgccaaggtcgcagaggccatcggcgtcaagctgccagacgtcgggggggccataaggactattttgaatagcagagaggccagagaatttgccagtggggcactagctggtgctatgtcaaaggctattcttgcacctctagagactatcaggacaagaatgattgtaggggtaggacctaggcacatttttggtagtttggtggatatcatccaacaaaacgggtggcaagggctttgggcagggaatacaatcaacatgctccgcatcattccaacccaagcagtcgaactcggaacatttgaatgcgtcaagaggagcatggcagaaagcacaagagaaatggaaagaggacggatgcccaaagatacagcttggtaatatgaaaatcgagcttccacttcacctcttatctccagttgctattgccggtgctgctgctggaatagctgccacactggcgtgccatcctctcgaagttatcaaggatcgcttgactatcaaccgagaggtttatccaagcattggccttgccttccgcaggatctataagacggatggtataggtggtttctatgctggcctgtgtccaacgctgattggcatgattccttacacaacatgttacttctttatgtatgacacgatcaagacctcttactgccgcttgcataagaagtcgtctctgagccgccctgagcttctacttatcggcgctctttcaggtcttactgcaagcacaatcagcttccctctggaagtagcaaggaagcggttgatggccggcgccctgcaggggaagtgcccgcctaacatgattgccgccttgtcggaggtgatccaggaggagggcgtcatggggctttaccgcgggtggggggcgagctgcctgaaggtgatgccgaattctggcatcacctgggtgttgtacgaggcatggaaggatgttcttctggctgacaggaacaagccacgctctttagcgaactaaacaggccgtccttgagcaatggaggcgttgctgggattcctgatctattttcagttttggaatcccggctgcggcgagtggggtacatagggcgcgtttctctcttttttgattgactgatgagtggtaagcgttttgttgtgtcatcggcacacagacaaacatcattaatgtgtcaaaaaactaagcgaaaagacaaacccttctgtatttcctgagtggaaagatggggaacctaaccctacctggagcctctgcaggaaccttttccttcatctaccaatcagatacagggagcttcaggttgacagatcgcaccaactgaaggacgaacctgttctgcgacaacaagcaggataagctgaggaacctgttttgcaagctaagttgagatgtaatttttgtcttgggctgggtggttatagtgttttctttcggcttttcttttctttctgcctcaagtctgaagcgaagtttataaattatttttcctcggctaatataatttgggtggcaaagcttttgccgcttcctt

SEQ ID NO: 10511 - DNA, 324 bp, Zea mays
  Clone ID: MRT4577_109589C.1
acatcgcttgctttcataatgccaatcctgggtttgactcccatatcggataacacaggtacaggatgctctaacatcttgaatcctattgattgataaaatcatttgcagctcattaaaaatactccaattcgatgagaggctgacactaaagaaactttccatgaagttcaatctcttcattaaattcctccaaaattcctatgtaacaagccattacataggaattgcacgagatttgtcaaaacccaatccttattccccaacgtgttattcctatattgtttcaatcctatactgatgtttggatactacattgtgaat

SEQ ID NO: 10512 - DNA, 217 bp, Zea mays
  Clone ID: MRT4577_10958C.1
gacccacgcgtcctctcataataacacatcacctttcccttccatttcaacacaaccccaaactccacaggacgagtctttttataactcctcccgctcattacaaaattcattacataatcatcccacaactaaaactattattaacctaaccataatctattctactaaaaacaaatttaaacccttcctcatttaataatttcttaaaattcat

SEQ ID NO: 10513 - DNA, 609 bp, Zea mays
  Clone ID: MRT4577_109590C.1
tgggatctctagaccattagtcttatctactgcagagcgaacaagaacccagttcgacaccatgtgggtgttgttggttgctctcgctctcctggctctcgctgtgagcgccacctggcacgcatacaagtcggcgacttgcgggtgtcagccaccgccgccggtctatttaccgccgccggtgcttttgccacctacgagtcacctgccacctgcggtgcatctctcaccgacggcccacctgccggcgccggaccacctgacaccggcggtccatgtgccggcgacgcctcatctggcgccgtcaccatgccactaccctactaaaccggcccggcctcaacctcataccgagccacacacatgaccgggtcaacaggcggatctaacaccggatcaagctggaggaaaccttgcaccggtaccaggagacatacgctggggcagtgcagtccgtcctgtgaggcatgacggaaggcgagctcgcgacgctgtactgggcccatgaagggcagcagctgacggcgatgtgcgggctgcagctgcagcagccaggtgcctgcccttgcgacgcaagtgccggcggtgtctactactgaggaaactatg

SEQ ID NO: 10514 - DNA, 399 bp, Zea mays
  Clone ID: MRT4577_109591C.1
aattaaccatgaattaaatatgcctatcctaattttttaaaaacaaactaattttactgagggaaatgaaaaccctttccaaactagctctaaaggtagttaaactaaaccccattttccaaagaatttggaaaatctagttcattctctaaatcaagataatttaatacattcattttatacagccaaattaatttaaggtcattcgactattatcctccgttaccaaattggttgtgacgctggttgcttgcatttcattttatacacaaattatcccgaaccacgttcaactaaagcacaatttgatgcatcgcaaaaacaaaacataaaggcatgataacatcttcaatttccagacaatgggtgaatggtcctttagttgaggcccaactaatt

SEQ ID NO: 10515 - DNA, 349 bp, Zea mays
  Clone ID: MRT4577_109592C.1
atggccgagggatttcgagcggccggccctactggtttattcccacaacatggaacgttgtatcttgtactttgaatgaccctgcatgtactttgcacctacaatctcttatattgaacctccataccattactggtcaacctactttgagcttgaacataacttttttgaaaacgctgcagatatagccactcaattcgcatgactgaccgtcatgacatttgcttttctcgtcgctgcgagcacctcccttacacgatacaaatgcattacttactgagaagcttgaatgagacacgtgctcatcaactaaggtggtgatggcactagatcagaaaggatattgttt

SEQ ID NO: 10516 - DNA, 396 bp, Zea mays
  Clone ID: MRT4577_109593C.1
gttttgacatgaaaaccatattaaaatttatctcttaattaatctcgtatcaaatgcataaaaccttcggaaattcataactccttcgttttaattctgaattgactcgttccagttgcgttagcttcgtataaatatttactacacagtaacagcataaagtataccatgtcgcatacttttatagttagatatttatcatcctatgtctactagattagctcttctaaatccaaaccaacctgaccataattataatttggttaaaacatgatctctagttaagtataattaaaattaaagttgagattaattatttatagagtgatctctctcatatgatgtatactaatcaatctataatatttaattcacatagatctcccataaatcata

SEQ ID NO: 10517 - DNA, 474 bp, Zea mays
  Clone ID: MRT4577_109594C.1
cactatctatgagctatgacgcacgctgcccgcggacgggagtcctgtatgagcgtgaccagccctcgtccttttttttttttttttttttttttttttttttttttgggtcactagggcttttaatgagtttttttttttttttaagcaaacagagggggcttttattaagttgggaaaaacccattcaagccatacacgtccgatggccgtgcatttttataatgattccaaaacacattttgttttaagcaaggcccacttgacaataaaaaaatctacttatggtcttataaaaataagcaaagacttggcccttggtcggtcttcaagccccccaaaatggggggggccacaattatgggcgcaaaatttttccgggccctttaaaccccggaaatttgggggtttttttttttgaaaaacccgccttgacttggaaagggggaagcatttttgccttaacccccttgg

SEQ ID NO: 10518 - DNA, 201 bp, Zea mays
  Clone ID: MRT4577_109595C.1
aattcgagaaaatttccagcccaacggataaaactggaagtttacttccaacaacactatttatcagggcatttttttttttggcgccggaggggggaacaggggaaggttttttaaaaaggggccggaatttctcaaagaaaaatttcggggcccatccggcgcccccccgccagctaattgagccttggaggcacccgg

SEQ ID NO: 10519 - DNA, 747 bp, Zea mays
  Clone ID: MRT4577_109596C.1
cggccgctcgaggcggcgggccgggacttgccttgtatataaaacttctctggaatgtcccattggctaagaacttctcaaagttccccatggaaagcttcttgggaaatccgatgctgagtgttcactgcaaagactccagctgtggcaactctcatggatcaaaagtgaatattcggacagcgattgcttgcatcatctcgggcttcgtcatattgctctgtgttctgctattggcgatatataaaacaaagcgaccacagccacctatcaaagcatctgataaaccagtgcaaggacctccaaagatagtgctcctccaaatggacatggctatccatacctatgatgatattatgaggctgacagagaacttgagtgagaaatacatcatcggctatggcgcttcaagtaccgtgtataaatgtgtgctcaagagtggcaaggccatcgctgtgaagcggctctacagccaatacaaccatggcgcccgtgagttcgagacggaactggagacagtcggtagcatccggcacaggaatcttgtcagccttcatggcttctcactctctcctaatggaaacctgctcttctacgactacatggaaaacggttccttgtgggatcttctccatggtccatcaaagaaggtgaaacttgactgggagacccgactgaggatcgcggttggcggccccaaggctggcctatcctgcaccatgatgcaaccctcggatagcccaccga

SEQ ID NO: 10520 - DNA, 166 bp, Zea mays
  Clone ID: MRT4577_109597C.1
cccacgcgtacgttaacacgcgaagaatcgaccatgagggccaattggaagaaggggctcatgatgaggcttatgaggaatctcaaaaagatgaggcataaattcaagtatgcatatcgagatgtattgtggacgtgatgacatgcgtgggtacatacatttcttt

SEQ ID NO: 10521 - DNA, 165 bp, Zea mays
  Clone ID: MRT4577_109598C.1
gggtaaaggccaaccggaatcgaaaccacactataaaggggtatggggttattaaaaattggtactggggatattcggggggcaaacattaccattaccatttacggtacatttggggaaccaaacgggatccaagttcctttttagggtcaaaaattttattta

SEQ ID NO: 10522 - DNA, 960 bp, Zea mays
  Clone ID: MRT4577_109599C.1
ccggccacggctctacggagggataggtcgctcttcttcctcactgagagaccatgagacgggtcgagacgacagcggcggatgcaccccacgacctccagtgactctcccagtcccaggctcccagccccccttcctcccgcctccgcgagaccgcgatggcagtcttgctgtggcggtgcatatgcgggccccaacaatccttcagtaagaatcgaggcgcatccaccccttctcctcttgctggcaggagatccaaatactcgggacaatctgtgaaagcaatgcccatgcgtttgttaacggttggaaagaagaggtctcgggggacacaactccttgttgaagaatacaaggagaagctcggtcactattgcgagttcgaggacactcttatcaggtccaacccaaagcttacaagtgatgtaaaggtgcaagttgaagcagaagacacggctatgatgcagcaactcaagtctgacgattttgtagttgtgctggatgaaaacgggaaggatgtcatatccgagcagatagctgatctgattggggatgctggcaacacaggatcatcaaggctcacattctgtatcggtggaccatacggtctcgggttacaagtgcgagagcgtgcagatgcaacgattaggctgtcctcactagttttgaaccatcaagttgccttgatagtcctcatggagcagctctacagggcatggactataataaaaggacagaagtatcaccattagggctaagtgctatcatcattcgctgctgcatgtaggactttgaaaaatggaagactgcattaataaaattgcagggatagtgttccaggactcattgtactttccattcgtgtagaaccccaaattgctcaaaatggtttctttgacatgttcgaatgttcattatcgatgactgtcagtttacaaaaaaaaaaaaaaaaaagcggcc

SEQ ID NO: 10523 - DNA, 328 bp, Zea mays
  Clone ID: MRT4577_10959C.1
atattgccgggtcgacgagctttcttttcggcggccgcccttactttctgttgtgccctttgtccgttgggcacaaagctaacgccccgcttgtaaaacacggagcatggttgtaagccacatggatccctgcttgtggaatctattctgatgcggacgaaccatcgggggtgaacatgagcagtccaactggatttcaaggatccctgcagccatatgggttatcattattagccctagagaacccaagtcggattgacatgctcccccccctgggcggcctgcctgagctgttactgccacgtgatcagctcgacttggccccggt

SEQ ID NO: 10524 - DNA, 577 bp, Zea mays
  Clone ID: MRT4577_1095C.1
ggaaggggaacatgaaacaaaagcattttgctattacttccatgaatgacatggacataaacaaagtggatgcacatccagaaacgttgaaattgcataagctaaggatggtcagttgatgcagaaccacgaatgggaatggaaccgcacctgctaaatgataaggacatgcctacttccagctaatggaaaacgggttaaaaaaccgtgaaggtgccagcgcattcttattataaaacaattacaaaaacggttactctggaacgggatgccgatcaagaacaagaccacggttcgaatgcaaatgttctctgttcctgagcggctctcaatgacaaagaatacgcaaaaacacggcaatcgtctatttacattaacaatatcatgctgctgatgaagctgaaattcagcgccaggtaagagaaaaactcgacttgtacttgaccatcaaatacacgatggtcaacagatagggtcaggctcatctctgtaactgcattatccttctcatctccatccatgtccacatcaggatcatcaacctcgctacctctacccactgtgacaaagccagact

SEQ ID NO: 10525 - DNA, 371 bp, Zea mays
  unsure (1)..(371): unsure at all n locations
  Clone ID: MRT4577_109600C.1
ttaagcncggaatcntcagctcttctgaagaaacatgttattcgaatgactaaatatgattatagactctcaaataagttggatactgacctgcaaaaactacgttgcagagtcaattatcattctttgagatttactgacccaatacaagaattggctgaaaagctaatacaacgaatgcgagaaaagaacagatattttattgctcttcacctgagatttgaacctgacatgcttgccttttctgggtgctattatggtggtggagaaaaggagaggagagaattagctgcaattcgcaggcgatggagaaccttgcatatacgtgacccccataaaggaagactgcacggcattatttcactaactcc

SEQ ID NO: 10526 - DNA, 493 bp, Zea mays
  Clone ID: MRT4577_109601C.1
cccacgcgtccgcccacgcgtccgcggacgcgtgggcgaggtttctggctgcaactccccagccatttctgtgacacttacatgccaaagcaagactccattatcaccttggtggatgagaaggatgaagaattcgacaccaaataccttgcctacaagaaggggctaagcggcggatgggctggttttgcactatgccatgggatgcaggatggagattcagctgtttttcagttgattaagcccacgaccttcaaggtgtatatcatccgagcagcttctgatgatgtcagtgaggtagatgagtgactgcatcacgcgacggctgtactgagtactaacttagcaggaggaggtggaaagtgggattttgggtagttttaggctttatatatcaggattgccctagtatgtattttatctgtatgtctcgatgctaccagtgtgactcctaagatgcagaagtcataacttgcagaatgcattatgagct

SEQ ID NO: 10527 - DNA, 699 bp, Zea mays
  Clone ID: MRT4577_109602C.1
ctctgcctgcaccgacggtgcccggctccctcggatcctcagcggtgcccgactccaagaaatgtacaagtcacggctgcaggagctgtgccagaagcggcgatgggcgccgccgttgtacgagcctacccgagagggtcctgcccacgcgcccctcttccgcgccactgtcgtcgtgaatggcgagaggttcagttcccgggatgaaggggagaagtcactcaaggaggcgtacaacctcgcggcgatggccgccttcgacaacctcatcgcgctcccggccgcggcccttgcccctgccccggctgctccagcgccgccctcatccggtgagctgccagcttgtcccctgggaccaaatatgcactgttagatcatgaacctccgtgggaaaaaacaaaaaaaattatcttatttttctttcgaaaaacaccatgttttcataaaaaaacaattgaaaatagtttctttccctggatgatggtgtgctagcattggattttcgcacccttgtcgttctgagttccttaccagttacatttaattatttggaggtggcgttggtgcttgtatggtatgggtaggaatcactcccaggtttaagcatctgcctaccttttgaaattaatcttaccagatgaactgaagaagagttgaacttatttagcatccaagtatttacgggtgattttactaaca

SEQ ID NO: 10528 - DNA, 229 bp, Zea mays
  Clone ID: MRT4577_109603C.1
cgcagcagccgtaattcgaccgacctttttttcggtcgtcctccatatcgtctacgctggctgtcgctactatttttaggaatcaagatgagccgcggtgagcagtgcagatggtgatcaaagttctcagaagtatagtgtatggaagaggtgagctgatcaaaccagcagtcacaccaactgcatgtgctgcatctgttgagagaccatctgatgtaaagactgatgc

SEQ ID NO: 10529 - DNA, 405 bp, Zea mays
  Clone ID: MRT4577_109604C.1
ggtgggggggcccggaccgggggggcgggacgggaaccgggggccggccccgggaggcgtaaagggggcccaattagggcggggcgaaaacccgggcgcaaccatgggcgagaggaagttgccgtccgaatgagctaccccacaaaaatcgccccgaaaaaacaaaccggaaaccaagggggaaaaaaggggggccccaaacaaaaaggaaagggcaaaccaacggggcgggggggcgggccgaaatcccggccgggaagctggtttttgcactcggccaaaggaaaagaaaaagcggccgggaaacgccgggcccggttgggttcccttttggccgtcggcccgggccagggggaccgggcaaaaaacatctcgcctggggggtggcgccgggaaaaaacaaaa

SEQ ID NO: 10530 - DNA, 414 bp, Zea mays
  Clone ID: MRT4577_109605C.1
gagctctgttatcaaaaaaaaaaaaaaaatttttataaataaaataaaaaaaaaaaataaaaaaaaaaataaaataattaataaaataaaaatattataattaataaaaaattaaataataaaatttattggggcgtccctctttataaatcaaatctttcttccccttgcttcctacataaatactttttttatgggtcaccaaaaattatttaattggccgctgttttaaataattttaactggaaaaaccttgtcttttcccaatttatattgtctttgtaatcaaaatcccctcttttacccagcttggttttaataacaaaaaaaaggcccccttctcctttatctcttttttactaaaaatttttccccacttctttatattgtatattggtaaccccccccttttta

SEQ ID NO: 10531 - DNA, 393 bp, Zea mays
  Clone ID: MRT4577_109606C.1
gcctaacaacaaggaggtgaactcttttctgcgtggggtggtcggcaagaggatgcattctatggctctgagagaaggatgcgaacgcaccaacggtgccgacgattttctgggcctgttgttggagttcaacaacacgaggcgcgaaggcctgaccggccacgggcagagagtcctgctttgggatgacgatcgacaatgtcattgaggagtgcaatacgttctacttcgcaaggatggacacaacgatagtgctgctgacatcgtccatggacctgctgatcatgcaccgagagtggctggaccgtgcatgggaggacatgactggccttttccatagagacgacaacacgccagggtacgattgactgtggcacctcaagacagtgtata

SEQ ID NO: 10532 - DNA, 501 bp, Zea mays
  Clone ID: MRT4577_109607C.1
atgagtctccacatcgctgctgccatccactgcgggctcggtcgccacgccaacgccatccccgtcctcaagcgcgccgtcaaagtcatgaagccaacacaagaaccgtctgccaacagcaagcttgaggccggtgcagccagcggcgacgacgaagcagctgcaatctgtcgagcccaactagagggagggaaacttaggttgctcaagggctcatcgagggagtggagcattgttgtcggtgttgtggcacaaatgggtgttatgtactgcatgctgttcaagatagacgaggttgcacagttgtttgaggaggcaagggaggttctggagcaggagtgtggcgcttctcatcctaatactcttggtgtgtacaacaaccttgctgcaatctatgatgtcatgggaagatacattgagaaacagagtctgaaagctacatttgcttctgcactagctgatccaacagtagacctaaatatgcaaatatattcttgttga

SEQ ID NO: 10533 - DNA, 651 bp, Zea mays
  Clone ID: MRT4577_109608C.1
aactgaaactcttcgagccttcgacgtgcctcctgcctctcctccgctcgtggccaccgatttcactggcttcatttcgaatacaaatttcatctcctggagtgttgctttgcttgctcctggaatcttcggaaccgaaggccaccgcgccaaccgcccaattaccgaaccaaaccctaccggtcgcggctcctccatagtccatactctcgcgcgcctaaaccctagccatcctcctcgccgcagcgagggggcgttcggaggcgggtcgagggcgttctcggcgccgagcaaggcggacgcttccgcggcggcctcggagctagatgggctgccgcgcttcgagaagaacttctacgtggagtcacccgcggtggccggcatgacggaggaagaggtggaggcgtaccgccgccgccgggagatcaccgtcgacggccgcgacgtgcccaagccggtgcgtgagttccgtgatgtgggcttcccagaatatgtgttgcaagagatcacaaaagctggttttgtggaacctacccctatccaatcgcaaggttggccgatggcattgagaggccgcgaccttattggcattgcagagacaggatcagggaaaactcttgcttaccttttacctgccattgttcatgggaa

SEQ ID NO: 10534 - DNA, 2181 bp, Zea mays
  unsure (1)..(2181): unsure at all n locations
  Clone ID: MRT4577_109609C.1
gttgctttgcttgctcctggaatcttcggaaccgaaggccaccgcgccaaccgcccaattaccgaaccaaaccctaccggtcgcggctcctccatagtccatactctcgcgcgcctaaaccctagccatcctcctcgccgccggcgaccgccgccatgagccgctacgacggccgcgctgcggacgcgggctcctaccgcgaccgccgcaggtaattgaccgccccacggtcaggctctaaagtctgaaccctaagccctggccgcggccgacgcgagtgactgtgcttccccttgtgttccatccagcgagggggcgttcggaggcgggtcgagggcgttctcggcgccgagcaaggcggacgcttccgcggcggcctcggagctagatgggctgccgcgcttcgagaagaacttctacgtggagtcacccgcggtggccggcatgacggaggaagaggtggaggcgtaccgccgccgccgggagatcaccgtcgacggccgcgacgtgcccaagccggtgcgtgagttccgtgatgtgggcttcccagaatatgtgttgcaagagatcacaaaagctggttttgtggaacctacccctatccaatcgcaaggttggccgatggcattgagaggccgcgaccttattggcattgcagagacaggatcagggaaaactcttgcttaccttttacctgccattgttcatgtgaatgcgcagcctattctttcccctggcgatggtccaattgtcttggtgttagctcctacacgtgaacttgctgttcagatacagcaagaagcaaccaagtttggtgcatcatcaaagataaaaagtacttgcatatatggtggtgtgccaaaaggtccacaagttcgtgatcttcaaaaaggtgttgaaattgttatagctacaccaggacgactaattgatatgattgaatcacatcatacaaacttgcgaagggtcacatatcttgttttagatgaagcagaccggatgctagacatgggatttgaacctcagattaagaaaattgtttctcagattcgtccagatcgccaaacactttactggagtgctacctggccgaaggaagttgagcagctagcaaggaatttcctttttgacccatacaaggtcactattggttctgaagacttgaaggctaatcatgccattgttcagcatgtagagatattatctgagagtcagaagtataacaagctggttaatctactggaggatataatggatggtagccgaattttaatatttatggacaccaagaagggatgcgatcagactactagacagcttcgaatggatggttggcctgctttgtctatccatggtgacaagagccaagcagaacgggattgggtcctttctgaatttaagtcagggaaaagtcctattatgacggccactgatgttgctgctcgaggcctagatgtcaaggatgtgaagtatgtcattaactatgactttccggggtcactcgaggattatgttcatcgtataggtcgaactggcagagcaggtgcaaaaggaacagcgtacacctttttcactgcagctaatgccagatttgccaaggaacttattaatattctggaagaagctggacaaaaggtcagctctgaattagctgctatgggtcgtggtgcacctcctccatcttcaggttaccgtgatagatatagggggtatgggggtggccgatcgtggagttgacgttcaaatgcttagttgctgctaagagcaatgctttacgtttgtttgttgatggatatgttgttttggcgcactgataagagcaatgctttacattttggctagtattcggtaatgatggattcacatactcttggatattgacctgtctcgatgctagaaaagtggcatgatatcatgcctgcaatatcattagtttatttttagccatagtttcagattgacagcattgcccataattagctcacatcagaggtaagaatttgtagtaaacatcattccatccaaaaaaaaaaaaaaaaaaaaaaaaaaaaaaaaaaaaaaaaaaaaaaaaaaaaaaaaaaaaggggggacaaggcacanntgatcgaggacgggaggcaagctttatatgcctccaaaatctgaagttacgcgcggggcatgaacatcttcaaggccaaa

SEQ ID NO: 10535 - DNA, 376 bp, Zea mays
  Clone ID: MRT4577_10960C.1
aacaaggcaaaacccaaattaaagactgtttttttttttttggggggattagaggggcccctttaggttaaaaaaggggggcggcccccccttttcccgtttaattaaaaaaaccacccttaaaaaaaggttggggcccaaacatggaaattcccccccttctcaattcccaggggaaaaaaaaaggaaaaacccttggggcttatgcggggaacgcttgaaaaaaaaccaaaaatatccttcaaaaaacgggtggggaaaaaacggacaattttacgccccgtttcccccataactttcccgagaaggggaaaattttttggcccacttttcctggaaatggggacggggaaattgggacaccccaaaagtcttt

SEQ ID NO: 10536 - DNA, 219 bp, Zea mays
  Clone ID: MRT4577_109610C.1
aacgccaattcgacctaggcgtgtcaaaatattctgttaccgccattcgtttttctctttatttttttttttatttttttcaccctctcgttttcatatattcactcgtcctctgctgtcaaaccacactcgcttccacgaagagtcagtattgtctggcagtcactgagggtcaaattctgcctaccctgccgtctcttaatcgacatcaatattttc

SEQ ID NO: 10537 - DNA, 279 bp, Zea mays
  Clone ID: MRT4577_109611C.1
taacggccgccatgtgctggcgaatacgcccttgactatctcgaggaatcggccttatacagataaataaataacggggtatccaggcttttgtttctatttttaattttttatttagattaatttttttattttttttattttttttttttaaaaataaaaaaaaaaaaaattttttattttaaaaaaaaaaaaaaaaatttgtacctggggggggaacacttttaagggcaaattttgcaaatatccacaaaattggggggcgtttaaccatccttt

SEQ ID NO: 10538 - DNA, 444 bp, Zea mays
  Clone ID: MRT4577_109612C.1
gtcatatgatgaaacaacatcgccatgtttacttcaactgggctctaatagctaacactgcgcatgccatgaggcaagaataccacaaccatatcacatatgaaggaaggatcagcatgaccgtaacagagcataatgactgagccccatcttgcagatgtccatacacactagtacttactctaatctgaaatgaggtatagaatctacaccattgcgaagaaatataaacctgaaatgacccacaacactgttctaagtactgcaaaccttgcaatttactggttgacctactggaaagtgcttccgaataaatacacaaatttacatcttctaaatgcagacaagtactggactatacataaagcctctaatgatcgtgcggccaaaacttaaaaaaaaaaaaaatgagatgttctatctaaaagaaccagactaacctac

SEQ ID NO: 10539 - DNA, 482 bp, Zea mays
  Clone ID: MRT4577_109613C.1
attaaaaatcttcaaattaatgatttaggtttaagagaggctaaaaaaaaaaaataaagtataagccccgacaaaacgaggccaaaaaaaaaacaaggaaaaggacaacaaaaaacaaacaacaaaaaaagaagagaaggggaaaggcaacaccaaaaaaaaacaaccggaggccggatactggccactccaccggccctggaagatgctacaaggaagaaaaaacagggaaaaacaacagcaggaacaaaaatcaggcaaaaaacaagcaaaagctacagaaacaatagtttaaatcaagtcttgagcagccggagcagcaagcccctggggagcatctggttgaacaatcagtggcaagtctccggccgaacccccccggcaagcgcccgcgaaaacgacccgccactgaacaccccgaacttggaacactcctcccggacccggaggtcaaaccgggaacccccgaccggaacctggag

SEQ ID NO: 10540 - DNA, 161 bp, Zea mays
  Clone ID: MRT4577_109614C.1
gcgtccggcatgcatatgagtatctccaggcttttaggtgtacgaaccgggaccgggcatagaggaggtgaaatgcttcggactgccgggggcacaatatctgttgccggcatttgcaggaagggggcatgcaaggtcggcccgtggtctaactagcaatc

SEQ ID NO: 10541 - DNA, 560 bp, Zea mays
  unsure (1)..(560): unsure at all n locations
  Clone ID: MRT4577_109615C.1
tggtacgcctgcaggtaccggtccggaattccccgggtcgacccacgcgtccgcccccacanctaattaatataacccttaaaggaagatctagttctgcgacagactctgccttaccgcctcacgtttcaagtatgttactgaaaagagaagtgtgtgtagcggactggccatgatgttggaactgtagcttgacattcttcctccagcagcactcctcacagaggcctcccccagagaaaaacggctctatgcccttgggcagtgatgaacttgcctatgagccagttgttgtagcataagaggcaggagccctaaatggttccccctcttggccagaagtcagggaagcccctccgtgtgtcaccagcacatgtcagatggccttgatatactggctctttcaatgccggtgctgcctttagtaattgagtgaggcaaggcaagggtggcttactatttttagaaggaactgtttgaaatctccaggtgcagtctgggtaacgagagagcattgaggaggggtgtgcacaagcacaggcgcatcattgcaaacacct

SEQ ID NO: 10542 - DNA, 511 bp, Zea mays
  unsure (1)..(511): unsure at all n locations
  Clone ID: MRT4577_109616C.1
cccagcgtccgcccacgcatccgccgagcaggcctcctttgccatcatccgcactgcacactaatgttccaaccgtgcaacattgttcctgtatccagctgtatgatagttactgagcatagggtattttgttttgcacgcggatctactgattgggcggccagcacaactcttggtttgggcattcagaatacactggtttagacttttcaaaaaaaaaaaaannaaaaaaaaaaaaaaaaaaaaaaaaaaaaaaaaaaaaaaaaaaaaaaaaaaaaaaaaagaaataaaaaaaaaaatagggtaagctaaaaattatataatatgtacaaattgtttacggtgtaagtttcttgaaaaaaaagggggggccccccttttgggtccccttttttctcttcccgctgtgccccttcttttctttttttttggggggccctttacccccttccctggccggggttccccccccctccccccggaaaaaccccggccctccccccttttttcc

SEQ ID NO: 10543 - DNA, 172 bp, Zea mays
  Clone ID: MRT4577_109617C.1
gaaagagaacatgcccacaaacatttgcattttcccccaggaacataaaaaaaactgcaatccaggcttactaaatcccaaagcatatttagtttgggtcacacggcaggttcgacaaactttgaacaaatttaacagatttccttccaagacaacaagggttttagggcag

SEQ ID NO: 10544 - DNA, 476 bp, Zea mays
  Clone ID: MRT4577_109618C.1
aaattgcaaaaatcactatggtcttaaagggcccttgttttgtccccgggaaaaaaaaaaaaaaaggccaacaaaattgggccaaaaggggggcaaccaaccccgattttttggacaaaaaaaaaaaaaaggagcggggccgggccccggaactgaaaacaccagaaaccatttgccttaaccaaaaaaaaggggccgaaagggaaacttcggtgcccaaccctgggaaaaacaggcctgcgtaagcctggggggaaggaaaaaaaaaaggggacccgcccaggggtaaaaaaaaaggccccttcccaacccgggggggaaaaaaaaaaaaaacctatatcggggccattccaaggggccgcccacccccaacggaaaccctccaggagggggaaccggcctggtttcccaaaatcaggggaaaaaggaccggccccaaacccggattcaaggggggaggggggaaacccaaaccc

SEQ ID NO: 10545 - DNA, 645 bp, Zea mays
  unsure (1)..(645): unsure at all n locations
  Clone ID: MRT4577_109619C.1
accggtccggcaaccccggggnacggtagctgcttcaattgctgacatcgactttgttcagaaaagaacaacattgagcctactcttgaggatggaacaatctcattcttgagcatatcttctcttcgatatggctttaagataattgatatcctaactatctcagctattgcacggcatactgcatctcttgctacttatgcgagaaacaaaatgctggaattgaagcatagcaatgagaaaaatgtttgcataatctatggacaagattttaaggcaaattatctgaaaatgggtccttcaatcacattcaatttgaaaagagaagatggcacatggtttggatatcgtgaggtggagaagcttgcctcattgtcaggaattcatttgcgtacgggctgcttctgtaaccctggtgcatgtgctaagtatgttggtttgtcacactcagatctagtttccaattttgaggctgggcatgtttgttgggatgataatgacgtaataaatggaaaaccaactggtgctgtgaggatatcatttggctatatgtccacatacgaagatgcagaggaatttcttaagttcctgcagtcatttttttgtgtccaaacctgcagaattgaacaatggctacctggggaa

SEQ ID NO: 10546 - DNA, 615 bp, Zea mays
  Clone ID: MRT4577_10961C.1
tcagttaacttcatattgtccatcatgcataaccgaaacaaagcacaagtttaacagcatgtctaactcctgctcaattggtcgattagaggaaaggcccaagctatatgacgatgaacccatcatctgagctctcacctcagacgagtcagtcattccatcgaaaagtgtgtaccatgcatttagcttttcgaatgtggccctccttgccgaagttatggtttggattggtgcctcgacaagcccagtgttgcatcgatgctttatgaaagccttcagaagcccaacattggcaccaagcactgtaggcatcacctcatgtgcatggtggtcttccttgagagaaacaaacatttttctaggagtgagaggtatgtgccaaagttgtttatgtgcaacctttgtcatcaccttctcccaatcttcatttacaacctcgacataccttgacttgccatgatttaagaacttttgttctctaccatgttccctcttatctatttgtgaaaaggtagttgcacggtccacaaactcatgagtcgtggctaaccactcctgtgagtgaagcccatcttttttgaaactactatacatccaaacacgatcatcgcccat

SEQ ID NO: 10547 - DNA, 509 bp, Zea mays
  Clone ID: MRT4577_109620C.1
ccggccggggctgcttcttcttcacccttcaaagctcgcaaagtaatctctccgttcccacacacaatggccgctatctagtctctcatgacccgcgactcggtcgcccaccagctcgccaagcgccagaactgggcttctaaggaggctggtgttatcgtcgtcttctgcatcgtcggcgttgttgccattggccttctcagtctcttcttttacaagaaggctgctgctcgcaaggctaacaaggcctccgccgtctaaaccgaatgttcggagaagaccgaggttagggagagaatggagggtgacctgaggcatagtcatgagcgtctttcgactatttgcctcaaaagtagacgcggtgttacgtcaaggtgcctcctgcgacacttcgggtgaccgacagtgaccccgtattccagtcaaacatcggctacgtccctcatcagctcatcgcttgccagttgccagtcgaatccccaacggccagcaaggcttggcttgcattt

SEQ ID NO: 10548 - DNA, 577 bp, Zea mays
  Clone ID: MRT4577_109621C.1
attatcctaattttaatttttttactttcttaatcagaaagttttacaacattaggtgatgaaaaccacaaaggggacaagagcaacaaagaagggggaaaaagacagtattaagaaacacaaagaacacaaaaacaaaaaaacaaaactaaaccaaaaaaaacccaccaccaacccccaaaaaacccaaaaaaagcgccccaagacccccacgggccccagagaacaagccaagggcccaaccctcaccgacaaaccagagcaccaaggcaccctaggcgaacacgaaggcacaacttggggcccaaagcgggaaaacacctgcacaacacgggaggagacggagaacaagcacacagggcgcgggaccttggccaggtaaccaccaggcaccacactgggaggccgggagccaacaccgcactaaaagccaggagggcaccagaccacaaaccgaaaggaccgctgggaccacggggggggcagagggggaatcacaaccttgggggccgcaggaccacggtacatgaggcagggggcccaggacttaccagggcgggggagcgcactcagccat

SEQ ID NO: 10549 - DNA, 530 bp, Zea mays
  Clone ID: MRT4577_109622C.1
tcgagcggccgcccgggcgagggacaagctttttttttttttttttttttttttttgtttttttttttttttttttttttttttttttttttttttttttttttttttttttttttttttacaaaaaacaattttttttttaaaatttttaatcattctcaaaaaagagagggggcacttccctcactacatcaaaattcggatttacagggggaaacaactaatccaaattttacaatttaaaacagatgaaacaacaaaaggggaaaaaaagctttaacccctttaacaaacccccttaaaattaaggttggggaaaaaaatgagccctttaaactccacttctttgggggggtaattcaagccgttttgggagggggtgaaaaaaccgtcctttaagcaccaaaaaaaccttcgtttttactccacctcctgggcccctcctgaaaacaaaagaatatgcaaaaagacctttatccttcccatgcctattttaaacaaagaggaggggtttcaccccccccatttaa

SEQ ID NO: 10550 - DNA, 335 bp, Zea mays
  Clone ID: MRT4577_109623C.1
gggattaaaagaaaaaatttttttccctcaaattcaggggggtcccccggcgaacaaattatttatggggaatgattcaccttttaccggtgggcgttgcccacgggcttccaccaaagggccctgctagggccagagaaaaatttttactttagagatgggccaatccacgggggggttaaaagcatgctatcttctttagggcccccttgggggttgccctggggttcgggccttaaaccataggctttttggtggtgccccttttctcgtcctttaccttatccctgggtacccccgtgcactggacctttgctgtttaaaaaaaggttaag

SEQ ID NO: 10551 - DNA, 435 bp, Zea mays
  Clone ID: MRT4577_109624C.1
atatgcttaaacgcgcatgctaaatagtataatgtaaattacacatgagacacctgactcattcatgatgttacatatacaaaagtcggctttatgaataataaagaataaaagcacttgtgcttatttctcatagggctaatataaaatataaaaacttacatatctctgtgatatcacaacattacgtacaaaacaaagcctagaagcatatgcaaagctttgacgccgcctaactgatccatctgaagggcgtttttccctctcgcacggaattgacgacaggaactggtccatgggcatcaacgcgcacagagatctaggacaccgttttcaccgtcttgcagtatgacctgctcatgtaggcggacatgcatacgatgagctccatcacctgcacgttgtatacctggccacccacgtaggcgtgctaca

SEQ ID NO: 10552 - DNA, 428 bp, Zea mays
  Clone ID: MRT4577_109625C.1
gccggccgggttcggcttctctcagatgactctcccccgccgacgcaccacttcccctctcccgacgacttgggcttccgcacgatgtctatgctcgcgtgagtcgatgtcgagacgctcgatgcgatggcgacagagcaaaaggcctgaaaactacaacggagaatgtgatcttggtcctcagcccctacacacccaacttcctcgacatactacagatatgaggctccgagctcgtgtcatctctgagatatgaattgctcgtcaacttgatactgcttactacgcatgaggaagagacactgatgctcaccatacccatagcgtcccccatactgactatgggtctcatgatgatgtcgtgacctgacttcccttgtgattattgctctattgcgctgaacttgtgctgatgcattcaagaattc

SEQ ID NO: 10553 - DNA, 304 bp, Zea mays
  Clone ID: MRT4577_109626C.1
aaaacaaaaaaacaaaaaaaaacaaatataaaatatagaaaaaaaaaatcaaaaataaaaggagtagggtgaaaaataaaaaaaggaagcataaatagaaactaaaaaaacaatgaaacaacaactaacaacatctggtgctagacaaaccttgatgactactctcatcaacatcagtatcttacattcatccaactacatgcattgaactccagcttcttatatgcaccaacagcaactaacatacagccagctacatgattcctaccgtcagcaattcctatcattctaccaactgacagca

SEQ ID NO: 10554 - DNA, 347 bp, Zea mays
  Clone ID: MRT4577_109627C.1
caccgaccgggagacggggaggtctcgcgggttcggcttcgttaccttctcctacgagagactccatgctcgacgctatggagaacatgaacggcaaggagctcaaccgccgtaacatcaccgttaaccaggcccagtcccgtggcagtgacggtggcacgctgtagctactgccgcagtcgctcgcgtgaggcagctatggtggcaatgcgccagtgacaagctggatatggcaagctgtcgtgcggctacggcaatgctgcaccaggtgtataggcatgaggatacatgatgctagtagccggctaaagcggtcttgctctaaaggtaagtgattgaagctttca

SEQ ID NO: 10555 - DNA, 343 bp, Zea mays
  Clone ID: MRT4577_109628C.1
gcttattccacattctaaaacgtataggcaagtgggtcctagctagattgcagatatcttgggcagttgggcatgtgtttggactttggagattgtgtgtgtgtgtttgtttttctctaatgaattactgcaagaagagcgcaggggtactgtactggttcttgtacttggttgggagaggaccgcagcaggatgagcctcgtctgtccctctctgtctatttgtttcacctgctgcagttttaatacctatggagccatgtgtctgaaagattacacgtactacgtaggagtagagccagaagacgatggctagctttagctagctgtggtctgtgggtaaa

SEQ ID NO: 10556 - DNA, 305 bp, Zea mays
  Clone ID: MRT4577_109629C.1
aacatcaccaacaatttttttttttttgcaacaacactaacatagtctgatctattccaatgtcagagtcattatcaacaacatcaacaacaatttcagggtcatgacaagcagcaacatccactacatcctcacaattttatcatgtccagtaaaaatcacatcatctacaatgtcattgtcaggatcttcaacagaccacaaggcgcatctattactactattgcattagctcaaatctaaaaaacttgtcatgaattccatatgcatcattgcagcccctttgttatgccttttttccaatc

SEQ ID NO: 10557 - DNA, 161 bp, Zea mays
  unsure (1)..(161): unsure at all n locations
  Clone ID: MRT4577_10962C.1
cacgcgttccccaaattcgcccacgcgactagaaatccccaaatccgcggcggcgccggccttcggactcgatccgcctagcgagtcgacgccatctgaacggcggagcgnggcaccagccaccacgtgggcggcatcgtgcctggcgtcgtgcagcgcgg

SEQ ID NO: 10558 - DNA, 496 bp, Zea mays
  unsure (1)..(496): unsure at all n locations
  Clone ID: MRT4577_109630C.1
ggaaaaaaaaatgggtttggttaagggcaaaaaaaacaaaggctgggaaatttacattgggaaggttaaaaacataaaaaaaaaactttttttttcccccagggccctcccccgaattccaaaaaccggaaaaaaaacaaaaaacaaaccggtaaaaattggtttttttttcgggaaaaaaatttgttggaaaagcccaaaccnttttgttgaatggaacggccaaaagggaaaaaagggttttttatgggccctttccaaaaaaaaagggtgtggccaaaaacccnnanataaaaaaaaaaaaaaaannnnccnttttaaaccnttttacctttaaattccccaaaaaacntggggggggggttaagaaccaaaagggccttaaaaatncccacgggggaaaaaaaaattnnnagagattttttaaaaagggcccanttncccnanaaacctgtgacccnnnaaaaannntccccctaaaaaaaaacttgagggg

SEQ ID NO: 10559 - DNA, 467 bp, Zea mays
  Clone ID: MRT4577_109631C.1
gggtcttccagtactaataggggacaatttctgatacatagtcataataagacacatcttatccagtcctagtaagttcaaaagacatggtaaaaagatagcaaaattaaatgattttacagaagcattggcgtctttaatatcaccttcagcaagacaaactactgcaaaaacacttttattagcagctcttggtatttctccattggcctaacgttccttgaattcactctccagctgaacaaatgtacgcccgttagaatgttagttataagtttttagccataaatatgctctatactatggaacaaactactaccaaaacactattattagcagctcctgaatgaatataaaggagtgacatcattgttaaaaaagctaggaaacagagtttattccaaagtaaaacactccttaatcacataaaaatgtggaacacaaaggaaccttaatttagagaaacc

SEQ ID NO: 10560 - DNA, 804 bp, Zea mays
  Clone ID: MRT4577_109632C.1
atccatttctcttcttggaccctcgcggcctctccgctttttgacaagagcaccctccgctcacaggaaatccggagactccacttcctcacgctgctcccccgccgtagccgccatggccgaccgcctcgtcctgctcgtcctcgtcgtcgccgccgcatccctcaccgtagcctccccagtcgccgccgcgcgtccctgcaacaccctcttcatctcctcccactcggccaacgctaaccccagcaacgaccccgaccaccgctcccccctcaccacgacggtcgtcaccgtcttccgcatccgccgcttcggcccccacttcctccgcacccaaggccacgcgcacccccacctcaaccaccaccaccgccaccacctacactccatccccgccaacatccagatccgccgccccgagctcccagagcttccccactccgcggccggcgttgccgcgagcatccaggagcgcgtcaaggacatcctcgtggtcctcgtcgggatcctcttcggtctcggctgcggcgccctcaccgctgcctccatgtacctcatttggtccgtaatcgccggccccggcgcgtcctcccactacgacgagctctacggcgacgaggcgtccgactccgagagccccaagaaggtcggctatgtcatcatccccggcgtcgaggcctacgacggtggtaagaactaagtctagggtttccctttcccaggaggggcaagttccatgatatgcctgtgtgctgctgtttgtgtgttgcgtaataatccgtaaaatgcctctgtgatgtgtag

SEQ ID NO: 10561 - DNA, 1726 bp, Zea mays
  Clone ID: MRT4577_109633C.1
cagaaattactcaactgcccagcgcatctcacgacccggcctcgcagctccggcgacgatccctccaatggcctacgccgccgccgttactctccggcgcgtggtgcttgtgtccgctgcgctgcggctcgcactagtggtgttcggggagtggcaggatgcccaccttgaggtgcgctataccgatgtcgactacctcgtcttctccgacgccgctgcctctctggccacaggcggttccccgttcgcccgcgcaacctaccgctactctccaatcctggccttcctgcttgtcccgaactcactcctccatgctgcctggggcaagctcctcttctctgccgcagatttgctcgtagggttgttcataaacaccattctggaactaagaggaattcctgagaaaatgcggatgtggtctgtggtagcttggctgttcaatcccttcacattcaccattggtacaagaggaaactgtgaaccaatagtctgcgcagtcatactctggattctcatatgtttgatgaagggtacccaatgccagaggctgcaaaacaagtcgggtctggggaagggataagctgatgcaagcctttccccgcaaatgcggagaagccgcttcgaacccgcaacctggtagagtgttgcaggcagctttctggtatgggtttattgtgcacttcagaatatacccaatcatatatgcaattccttttgtaatagttcttggcaagggctatgctggtcctgttggtaggcctactcttacgatgtggaggtccaaacaacagttgcaagatgataaagtcagtcaaatagaagaaccaacatcatttctggccactgtatggggttttctttcaaacttcataagcagaaatgggatcctgtttggattactctctggatccatgttctttgcctggaccggtgttttcttctatctgtatgggtgggacttcctaaatgaagcattactttatcaccttactcgtaccgacccaaggcacaatttctcgatatatttctaccacatatatctacaccatcagcaagggttctcaagtattcagaggctcgcttcgtttcttcctcaactgatcgtgcaactggcactcattctacgcttctctagggatcttccattctgcatgtttctccagacggttgcatttgttgcttttaacaaggtgatgacagcacagtacttcgtgtggttcttctgcttgttgcccctcattctcccttggagcagcatgaaacttaagtggaagggtctggcctgcgcggtagtgtggatggggtcccaactgcattggctcatgtgggcttacctgctggaattcgagggccgaaacgtttttgtgcagctctgggttgcaggcctcatgtttctggctgcgaacacctttgttatgctcatggtgatgaagcaccacaagtacactctgctcttctcaacgccgctgaagtctggcaacaaggttgctaccaagaaggaagaatagcagcgtttgggctctttccattttgccgactgatgtatgattaggacatggatcatgtttgtttctctttttttttgtgtttctgtcagatcacatgtgacttgaatcattgtagtttttcccgtacataatgtggtgacattgcatgagaatattttttggttaccagaatttgcaattggttcagattttacaaaaaaaaaaaaaaaaaagcggcc

SEQ ID NO: 10562 - DNA, 171 bp, Zea mays
  Clone ID: MRT4577_109634C.1
agtaccgtcttacgcaatcaacagaaatacgcggagtgacaaactgtacgaaaggcacactacactgtgtgtcttgctaaatcaggagcgtgcgacatataccagacccgtatccaaatctagagcgcgcgagtgcgagctctccagacgctacgagcttatctaccccta

SEQ ID NO: 10563 - DNA, 524 bp, Zea mays
  unsure (1)..(524): unsure at all n locations
  Clone ID: MRT4577_109635C.1
gggagcttcttcccctcctcaagggggaaaagaagctgaaccatggggaanagaaagtganctgctaanccacctcctaagaagcgggggggcaagcgtnacactgtgttttcctgcccattctncaaccaccggagtgntgtggagtgcggagttgacatgaanaatctgagtggggagccatcttntgnaatctgtgaggagaacttcagcacaactgtgaatgcgctcactgagcctattgagatatatagggaatggagtgaggagtgtgagcgtgtcaacactgtgnaaggcgaccaggaggcgtgagcgtnccccatgcgaggaaactgtgacctacaatcgtaatgtgaatggcgtggattctcnaatgccatagcccataggcaggcatgggcttggataacgtggtggcggactgagatgccagtgggcgcctggctaggacttacagaactacaaaaagtgtgtgctatacatatatggacaaccttataagtggggatgggtgtgcctatccg

SEQ ID NO: 10564 - DNA, 268 bp, Zea mays
  Clone ID: MRT4577_109636C.1
cactgtcagcaaggggaggcatccctcgtgaacaactacatgcatacacattgcatggttctagtactgctgaaaacaaacaaactgattgacatcttccaaatgagaccgcaccggtccatcaaacccaaaagttgcggatggcgacgatgtgctttggttcaaagagaaattcacaggcatgctgattgcacttccaaaacccccgacatagcttgagagcaaagaacctggctgtggtaacactaacataggcaatggagctttt

SEQ ID NO: 10565 - DNA, 464 bp, Zea mays
  Clone ID: MRT4577_109637C.1
gcgcggctctacgtgcgagtctacgcatcaggtcccctctcatggccggtggatgcgccaccaaccaagctcatacatatgaatagactagtccaactcatggatcaatttggggaccaatcaaactcacaaactaacttacatgcttgatctcataggttcatcttccatctgattttgaatccggttgcagaggcaaatgctgaggactacactgctggcgctggatcaaaggactatgcacacgtgcgtattcaccagcgcatcggacggaacagcctgacgactggtcagggctcggagaaagagtacagctacaacaagatcctcaaggatctcataaaagagctctgctgcaatggctctggagaccatgatccagagctaggcccagacattcaactgcaaagtgatcagcgtagaaatgacgctacttatgtagttcatgccgtaatccagaaaaa

SEQ ID NO: 10566 - DNA, 194 bp, Zea mays
  Clone ID: MRT4577_109638C.1
caggaaatgcctctggtctcgacgtccaccattccagccgccgccgccgacgcgccgcgcctgttcaagatgaatgtcggcaagctccagcagatggcgggtgctgtgcgcactggaggatagggcaggatgcgcaaggagaagaaggcagtccacaagatcgcagacagcgatgacgagcagcttcagagcac

SEQ ID NO: 10567 - DNA, 254 bp, Zea mays
  Clone ID: MRT4577_109639C.1
cgttgtggcttcgcagaaataagaaagtacatttctactaagaaaggatgcatgtcgctctctggacagtggtctcatatggaggactcgaagggactctggttctcgaatcggctaatacactgaatgaagggcctgtgtcaactggctccatatatggcagacggtgtaatgtggaagcgacagactcggaggggtcaatggatggaagatgattactcagaatgatggagtctatgtattgattacatatt

SEQ ID NO: 10568 - DNA, 301 bp, Zea mays
  Clone ID: MRT4577_10963C.1
gtctagcctcgagccatcgatcactggaccggacggcggaacggcgctcgcaggggctcgagaactagacatcatcaatggtgaccgagaccgcagcggcatttaccgtagctcccacgcgacctacaggcagcagcagcaacaaggaggaagcaagacacccgacgggtgagcaagagaagggcatgctccacgacaagggaccgaccgcactcaaagcactgacggtggcgacactgttccctctggacgggctgatgctggtgctgtaggtgctggcactaacgggctacctggcggg

SEQ ID NO: 10569 - DNA, 683 bp, Zea mays
  Clone ID: MRT4577_109640C.1
cggcccacgcgtccgccctcgtggccggcaggttccacgtcaacctgctcaggctgacgtggaggacggcgttcgtggtggtgagcacggtgctcgccatcgtgttgcccttcttcaacgatatcctgggcttcctcggcgccatcggcttctggccgctcaccgtgtactacccagtggagatgtacatccggcagcggcgtatacagaagtacaccagcaggtgggtggcgctgcagctgctcagcttcctgtgcttcctggtgtcgctcgcctcggcggtcgcgtccatcgagggagtcaccgagtcgctcaaacactacgttccctttaagaccaagtcgtgatgactgactgagcttaaattctccggtcactgtacaatgcaatggcttaccaccttgcagtgctcgctaagggttatagtccacatgaaaaactgatgcacatagaaaatcctgaccttcaaaaacagatctggtgtgtgattgttttgcaccgttatatctgattttgaagactaggattttatatgtgtacatgtataccaaaccttcatgtgtaccaaataccatgggctagtgaaaaactgatgcgtaaaaaaaaaaaaaaaaaagagtcccgtaaaaaaaaaaaaaaaaaaaaaaaaaaaaaaaaaaaaaaaaaaaaaaaaaggggggggg

SEQ ID NO: 10570 - DNA, 217 bp, Zea mays
  Clone ID: MRT4577_109641C.1
tgctgatgcttgagctggctccagagtgagagtgcgcaagcgagagactatgctctggatcagcgtgctgagcagagcatgagctccgctctgaagatcagctttgttcaactccaacgcctgcgattgctgctgcttgcacacgacatggtctttctcaaatgccgtggacacaagagaccacttgctagcgctggcgatcgctgatcttcttcca

SEQ ID NO: 10571 - DNA, 1438 bp, Zea mays
  unsure (1)..(1438): unsure at all n locations
  Clone ID: MRT4577_109642C.1
ccggccgggaaaatctgccagcgcatttcaacaccgaacgaacatatccccacctcgggtttcctctccagtctccacggatcaaaatcgaatccaacgctactgcctagggtttcctctgcatttcccctaccacaccccgcgccgcccacccatggccgccgcagacgcgtccgccgagaccgccgccatcgcgcggcgcctggcctcctgcaacaccggcacccgggagcgcgcgctccgctacctcctctccgactttctgccggcctccgcgccgcgcctctccgccaccgacctcctcaagctctggaagggcatcttcttctgcttctggcacgccgacaagccgctctaccagagctccgtcgccacgcgcctcgcctccgccgtctccgccccgccgtcccccaccgatggcgccgccttcctcgccgcctacctcaccacgctccgccgcgagtgggcccacatcgacgtccaccgcctcgacaagttctacctcctcaaccgccggttcctccaccacgccttcctgctcctccgtgctaactccttcgcccccgacgtcacctcccaggtcgtgtccgtcctgtcggacaaggccctgctcccggaagccgacaacgtcgccgctgccacctcccggggcctcgggtaccacgtcgccgaggcgttccttgacgagctcctgcctgtgctccccgtgagcctggagacgatggacaccctgcttgctccgttcttcactgtgttggagaagtcgaccgatcgggtgatggtgagtaaggtgaaggcaggtgtgtttgagaggttactagacagcggcagtcggttgctggagatggtgaaaaagggggaggatgtggagaagggtgaccccgaggagaagctcggtaaagttgggttgctgtttggattcagcaagaggttcctggatattggtgcaatggcagagacagtgcaatcgaaccggaaggtggtctttgggttgagggatgcgtttgtgaagatcgagaagggtttgcagttatctggtcttgagatccctgcaccaaagtttgaggctactgaggtgccagtgccgccaaatgtgggcaagggaaaggcacaaaagaagaagaaaaagaccaagaaggctgcattggctgaaggtgagatggaggatgacaaggatttgaaacgtgagaagaagataaagaaggaaaagaaggagaagaaaaggaggaaggtggaggttgttgatgaaggggatgtcactgagaagagtactaatgctccaggagctgaccaacagatgggtgatggtactgatggcattacattcgatgcagctttgaagtccaaccttcagaagcagtttgacatggggtcagcctatgctggtatgggccangggggctgcacctcaagtgattcaccattgacaccatctact

SEQ ID NO: 10572 - DNA, 1413 bp, Zea mays
  Clone ID: MRT4577_109643C.1
ttgggtacctcgaggcagttgcttcagagagctaccgccaccagctattgagctactgcctctgaccaagtcccaagctgcgctgcgcctgctatgtcgtcgtcctcgcccgtatcggcggtctcatcagccactgcgccgcacgtcgtggacgactgcctcggcatcgtgcagcttcttagcgatggcaccgtgacgcgctccgcggactactccgacatccctctcctgggcgaggtgccgtccaacctgcccgtccagtggaaggacgtcgtctacgaccccgcgcacgcgctccgcctccgcatgtacaggcccaccgacaccgacggcggcaggacgaccaacaacaagctgccggtgctagtctacttccacggcggcggcttctgcatctgcagcttcgagatgccccacttccacgccggcgggctccgcctcgccgccgagctcccggcgctcgtgctctacgccgactaccgcctggggcccgagcaccgcctccccgcggcgcaccgcgacgccgaggccgtcctgtcctggctccgcgcccaggccgaggccgacccgtggcttgtcgagtcggctgacatgggcagggtgttcgtctgcggcgactcggccggcggcaacatcgcgcaccacatcgccgtccagtacggcacgggccacctcgccctcggccccgtcgtccggcttgccggctacatcatgctgtggccctacttcgccgccgaggagaggacggcgtccgagacggccggtcttgacgtcgaccaccagttcgttagcacggcgctgttggatcagatgtggcgcctggcgctgccggtcggcgcgaccagggaccacccagcagcgaacccgttcggaccggacagcgtcccgctggaggacgtcgccttccagccgctgctcgtcgtggacccagaccaggacgtgctgcacgaccgcacacaggactatgccgctaggttgacggccatggggaaactggtcgagctcgtcgtgttcagaggccagggccacgggttcttcgtcttcgacccgtgtggtgaagcttccgaccagctgatccacgtcattcggcgcttcgtactgttgcataagcatccatgtaatcttgttgatcttagtactaccatgtagttgcattagtgagtcatgtactcatgtgttcgtcagtcggacaagtttgtttcgtagaatcgcggacgagctggagagtgcacagcccgtgcagtgaccgcgtctagggatgtgtttccgccacggtgtgcatgtcatgcacgtcgcacgttcgtccttagaagtcggatcgtgcagctgtattccctggcggggaaacgtggaactaccccagtgtatttggttcacgaaatgcatgtgtgagaggtgcgcgagacgcatctg

SEQ ID NO: 10573 - DNA, 117 bp, Zea mays
  Clone ID: MRT4577_109644C.1
tcccacgctttcgcccacacatcaatcctgctctaaacaagaactccctcctacacctgcgagagctatcaaacaagctaacgcggctaacatacaccccaccagactcaatctctc

SEQ ID NO: 10574 - DNA, 452 bp, Zea mays
  Clone ID: MRT4577_109645C.1
aaacacaaactttttggggggggaaatttttttcccaaattcaacaagtaccatgggggggcctttaggttaatgggggggatcccaatggggatcaaaaaaaaaaaacttggaaaggttaaaaattttttaaaagttggaaaaatatgctacctaaggggcccctcctaaaaaaaaagtttaaaagggttccttaaacttaaaaaagggccggcccccccggcctttaaaaccttaaacggcaccccaaggttttacccgggaaaaaacactttgttagggttggttggggggcaaccacttgacaatggcccttgtccaaacactgagaaaggggggtttggccattagaataaccatgaaaagaaccccgcgctggggggcaacttggtttttgccccccccataacgtaattaattatcgccccaaaagaaaaggtttacgggcccgg

SEQ ID NO: 10575 - DNA, 1752 bp, Zea mays
  Clone ID: MRT4577_109646C.1
atctgtgaactaccgtgtctggttaacggttgtccttccgccgcacgcccgctaaacttcgcgctcgatcaccccgacggcgcacccgccccggccgcctctagccccaccaccggccgtgccctcctcgcggtccggctggccttgcctcctcctcctcctcgcttctctcagcctcaggccgacgcgcagcccagggccgctgtcgtcgcggaggtgaggtggaagggacacagggcctccgcgctcggctcgctgcggcgtgccgcggtcaggcgcaaccgcacatgggaggacgccgacgcagcgtgggaggaggagttcgagagcgtcgacaccctcgcggtcgcgtcgcagcgggagggcgtcgtgttccacccatgggagctcaccttccgcgtcgtcagcgatattaacaaaggcccaaagaacaaaccatcaattctgggaactatttctctcaatctagcagattatgcattgacggctggagagataattctttcgttgtctatacctggtggtgcacctgaacaagcctcatcccttcatctcactctgagtatggttgaattaagagcttttcaagaaacatctgatgcatcacagcgatctgctgcaaccttgccattgtccccatcatctggtgattcttttcctggaggaaaagatgaggttttggttattaaagcagggttgaggaaggtaaaaattctcacagatctggtgtcgacacgaaggcctaagaagacttgccagggaggtggcgaagataagttctgtgttaacagtgatggtgctgaatatccatgcgatactgagtctcttgatgacgatctagatgacagagttgaggaagatgaatttggagattcaactatcaggaagtctttcagttatgggtctctgcaatctgtcaactatgttggtggcctagtttatgcccatgcaaagattgatggggagcatgaggactggatatattatagtaaccgaaaaactgatgtcggtttccatgtagagaaagtattgccatcaaccacagagaatgggttgctaactgctaagcgcagtatacttccttggagaaagaggaaactgagtttacggtcgctgaaggctaaaggtgaacctctgttgaaaaaggcatatggggaagagggaggtgatgatattgactatgatcgacgcttgctaacatcatctgatgaatctgtttcagagggatcaagaggagatggatcagcaaatactatggtgtcagaatttggtgatgacaattttgtcattggaaattgggagttgaaggagataattagccgtgatggccgtatgaagctttcatcccagatgttctttgcatcaatagaccagagaagtgagcgagcagctggggagagtgcatgtacagcacttgtggctgttattgcagactggttccaagcaaatcagaatattatgcctatccagtcacagtttgacagccttatccgtgaaggatcactagagtggagaaacctttgtgagaacgagacatatagaaagcgttttcctgataagcactttgatcttgaaactgtccttcataccaaaattcacccgctgacagtttcccccagcaatcttttatttgatctgtcttattatgactatggatgagacttttgtgatataattgatgagactatggatttaaatattgttcaaaaaaaaaaaaatcgtgaagcaaaaccagcaataatacaagggctt

SEQ ID NO: 10576 - DNA, 177 bp, Zea mays
  Clone ID: MRT4577_109647C.1
aacagttcttacttccagggtggtgaacgtgctttggtgttggggaacaaagatcacattgtaagcttgatagcgtaaaatcactttgttatagttccaatcatatttgaagtgcttgagaggtatatacatagcctctggtatcatttcagctcatgtgtcttactgtaaatgttc

SEQ ID NO: 10577 - DNA, 329 bp, Zea mays
  Clone ID: MRT4577_109648C.1
cagaaatgtataagcacagcggattaacattgtacatcatatagcgtgctccaagtgcttgtaaacaacatgagtattcattagataattcttgagttatagaaattgccgatcaattaagagggatccgcagtaagctaagtaagttatgcattgagctcaattcaaattccttcaaattctactatcaccccgattggatcatttgaatagaattacattctaataatagggatttacgcatatatgaacttataggatcttacttttatttagagccatgtgtatactatcattagcaagatactccgagatatttatgtgccaca

SEQ ID NO: 10578 - DNA, 379 bp, Zea mays
  Clone ID: MRT4577_109649C.1
ttttttttttttttttttttttttttttttttttgaagaacgattgtctcacttatttgatgagcttatttacagaagaggcatgtcccctgaatatgaaagatcaatttacaacttaattttaggcagcagcaagtcaaggcgatagtccagaagggtcatgttctctttatacatggtatgaaaaaataatgaacaaaccacaaatttagtattctctcattcgaagtcgtctccctacaacttgctgctttttttcagctgttaggctatctgcaacagcttaccccatttacataaaaaaaagaaactacttgttaagcatgcatcagtttttttttaaaaaaaggcagacttgacggaggctcctagagtcttg

SEQ ID NO: 10579 - DNA, 268 bp, Zea mays
  Clone ID: MRT4577_10964C.1
gacataccatgcacaagacggtctttggatcttgtggttgtattatgtctgtctcatgtgcaatgactgtacgatgtccttaggtgcttacattattgtcactcagtcatagcttgtgccagtattctatcatgttcccttggttatcaatgagagtctttatgtgatactaatgcttgatgaattgctttcttatccataactcaatgttctcctggtaggactgatgctcaacatttgcataggtggcaagaggtttaggtgtatt

SEQ ID NO: 10580 - DNA, 399 bp, Zea mays
  unsure (1)..(399): unsure at all n locations
  Clone ID: MRT4577_109650C.1
ggcacgcccagcttccacccacaccnccccggcnccggctccggctccggcnccgccaagggcgggggcgacagggnacnccccggccggaccgcgccncgagccggccccncncggccgcggccgcncagcccagccgcgccgcccgcgccgagccccgcacgccaccggccggagcgccgacgacgccaccaagcaggcgcaggagggcgaggcgacggcggncgcgacgaaggcgccggcgncacggaaggagtttttttgggccccccgcggcgggggggacctcaaggcggaggacaagaccaagacgtggaagaagctagagaatgtcgctgagtcaggcgcggccgggatgaaaccaaatccgccgctgggcccacccgctaccaggggagg

SEQ ID NO: 10581 - DNA, 370 bp, Zea mays
  Clone ID: MRT4577_109651C.1
atcgattatcatcctgtccctctacatatcttctctctctgatcctgcgcctccagcactgcatccatccactacaaggatagcctagtcttttactcggcaaggacgcatgtcagatcgaagggcgcgcatgcagggaagcaagaatagaggcgatcgaccgagagctagcagcgcgatggcgaggtcttccatgatgatgcgggcgtgagctctggtggacttggccctggccgtgtcgaccgccgaggcgaggaacatcaagaccacgacgacggagaagaaggacgacgcggtggtgctagcgcagaccttcccgcccttcgaccgtctcggcgtcggcgtgtccccggcgctgggcgtcctcccg

SEQ ID NO: 10582 - DNA, 450 bp, Zea mays
  unsure (1)..(450): unsure at all n locations
  Clone ID: MRT4577_109652C.1
gggcgttcctggaggccgtctggagtgcagtgaaggccgtctgcggaatgctgatggatatgtgctcctctgtggggcagctcttcggaaacctcatccaggtataggagccccagtgattctggaggaactccacctcatccagaaggccctgcacgatccccttcccggaaaccatcttctaaagcgacctttaccctcctgctcacccttgacccatcctttaactgccctcccctcctgtcctgcagggacgacaccacagcatcaggccaggttttccatctccaggtctgacctgtctgtcagggacggggatgctctgctgacctanggatgtgggagaggcttggaagcccggaggcgccaaggaccaaggtgccttccgtgggtcagcatgcctctgtgcctctgcctgtcgctccaaaccatgtcagatggggcgctgag

SEQ ID NO: 10583 - DNA, 356 bp, Zea mays
  Clone ID: MRT4577_109653C.1
tctctggtacttcatctgacacaaggaccgcggggaccttaaggggatgcgcggcatcacagccaccggcagcgggtactggaaggccacaggcaagaacaaggagatcttccatggcaggagaaccagccgcgtgctcgtcagaaagaagaagacgctcagcttgtacacaggtcatgcaccgagcggaggcaagactatgtgggagatgcacgagtgccgccttgagggcagtctgtcgcccaacctgcaccgtggggacaaggacgaatgggctgattgtgaggttatcaacaaagactcggcggccaaggttggatagcaacaaatggtgcgcgccatacgctgattacgag

SEQ ID NO: 10584 - DNA, 506 bp, Zea mays
  Clone ID: MRT4577_109654C.1
cgccaggtccctaacaccgccccttgaagaagctaagccaaaggcaaaatccgcaaagaaggtcttgaagaagccgccttcatctgctgtgaagcgcttgcggaagttgcagagtttctcagcctgagttttttggtgtatgacgtcatgatggtcatgtcaatgtatcttttctgttttagtttatcattacttaattcttatcctttttgtaggttagtttatactgtgttgacttagctgtcagttcatatttggtggattgcttaatgatttgtgtggtcactatgcttttataataaaaaaaaaaaaaaaaaaaaaaaaaaaaaaaaaaaaaaaaaaaaaaaaaaaaaaaaaaaaaaaaaaaaaaaaaaaaaaaaaaaaaaaaaaaaaaaaaaaaaaaaaaaaaaaaaggggggggccctttttaaaggaccaaattttacttcccggggcttgcaaggtaatattttttttttggggccccctaaattaaatcaacgggc

SEQ ID NO: 10585 - DNA, 356 bp, Zea mays
  Clone ID: MRT4577_109655C.1
ggggaaggagagaataattaaaaaaccggggggggggcacatgaacaatctcaaaggggtatgggcgccctaaaactgaaatgggggggggggaaaaaggggggccaaggccacaaaggcgtttttgggaagggattaacaaaaggggggggggaaaaaaaaattaaaggggtgggaaaacgggagtttaattgcgggccatgaaaaaaaaaactgggtacgggcgagtaaaaaaaacgggttaaaaaattcagggggcactaaccggccacaagggggaactgagaggttaaggtaactgaggtccttggaaatatcccccaaaaagggcgcgagaaaatttaagaggtgggggt

SEQ ID NO: 10586 - DNA, 1021 bp, Zea mays
  Clone ID: MRT4577_109656C.1
ccggggtcgccgccccactctcccagcctctcttactctccgccgtcgccctgctcgcccgaagcagctgccggcaaaatggccccgaagagaggcggtagggcgccggtccccgccaagaagaaggcggtggtgacgaacccgcatcctcaagcagcgcctcaaggtgcccccggcgctcaaccagttcacacgtaccctcgacaagaaccttgcaacaaacttgttcaagatgcttcttaagtaccgccccgaggacaaagctgccaagaaggagaggctcttgaagagggcccaggctgaaaacgaggggaaaactgttgagtcaaagaaaccaattgttgtgaagtacggccttaaccatgtgacttacctcatcgagcagagcaaggcccagctggttgtcatagctcatgatgttgatccgatcgagctggtcgtgtggctcccggccctttgcaggaaaatggaggttccatactgcattgtcaagggaaaagcacgccttggatcgatcgttcacaagaagactgcatctgttctttgcttgaccaccgtcaagaacgaggacaagcttgagttcagcaaaatcttggaggctatcaaggctaacttcaacgacaagtttgatgaggtcaggaagaagtggggtggtggtatcatgggctccaaatcacaggcgaaaaccaaggccagggaaaagctgcttgccaaggaagctgcccagcggatgacctaagtcttgccctgttaaattaaaattttcttgtacttgcgattgtgtgcaatcacggtggttgtcagatctagtttttgagagttttgcttcagagagagagaccgagtcaccgaccatgacagaaagacatcatgtaagaattcaaagttttggttctgtaccatctagttcatgtgaatcatcttctatgagggctatgatgtttatgcgcatagctatttcagaacctaaaaaaaaaaaaaaaaaaaaaaaaaaaaagtactctgcgttgttaccactgct

SEQ ID NO: 10587 - DNA, 1140 bp, Zea mays
  Clone ID: MRT4577_109657C.1
cctcgaggccggccgggccggggtcgccgccaccactctcccagcctctcttactctccgccgtcgccctgctcgcccgaagcagctgccggcaaaatggccccgaagagaggcggtagggcgccggtccccgccaagaagaaggcggtggtgacgaacccgctcttcgagaagaggccgaagcagtttgggatcggcggcgcccttccgcccaagaaggacctccaccgcttcgtcaagtggcccaaggtcgtgcgcatccagcgccagcgccgcatcctcaagcagcgcctcaaggtgcccccggcgctcaaccagttcacacgtaccctcgacaagaaccttgcaacaaacttgttcaagatgcttcttaagtaccgccccgaggacaaagctgccaagaaggagaggctcttgaagagggcccaggctgaaaacgaggggaaaactgttgagtcaaagaaaccaattgttgtgaagtacggccttaaccatgtgacttacctcatcgagcagagcaaggcccagctggttgtcatagctcatgatgttgatccgatcgagctggtcgtgtggctcccggccctttgcaggaaaatggaggttccatactgcattgtcaagggaaaagcacgccttggatcgatcgttcacaagaagactgcatctgttctttgcttgaccaccgtcaagaacgaggacaagcttgagttcagcaaaatcctggaggctatcaaggctaacttcaacgacaagtttgatgaggtcaggaagaagtggggtggtggtatcatgggctccaaatcacaggcgaaaaccaaggccagggaaaagctgcttgccaaggaagctgcccagcggatgacctaagtcttgccctgttaaattaaaattttcttgtacttgcgatcgtgtgcaatcacggtggttgtcagatctagtttttgagagttttgcttcagggagagacaccgagtcaccgaccatgacagaaagacatcatgtaagaattcaaagttttggttctgtaccatctagttcatgtgaatcatcttctatgatggctatgatgtttatgcgcatagctatttcagaattaaatgtcattttatcaaaaaaaaaaaaaaaaaaaaagcggcc

SEQ ID NO: 10588 - DNA, 464 bp, Zea mays
  Clone ID: MRT4577_109658C.1
ggccggccacacccttccgttttaatttaaagagcgactaaattgaggaatataccaagcgataacctaatttggaacgcgaaatccttcctcaaggggggggagcctcttcccccgccgcccagaaccatttgaagctgatccctggcatccccaacaacttgtccttggactgcttggccccctttctctaccctttcaaccgatcaaatcgctgggttttctcttgttttctttatccctcttttattatattttctttctttttaattttattatttttattatattactcatttttttaattttatttttatattatttaatgtgtttgggtgttattttttattattaattatattcattttttaaatattttcatattattttaaatttttattatttttttaatttatttttctttttttatcttatttattctatatttatttttttattttttt

SEQ ID NO: 10589 - DNA, 815 bp, Zea mays
  Clone ID: MRT4577_109659C.1
gggtacctcgagccggcgggggatctttgctccctggggcgggtcggggcccacccgcccgcctcggctgctcagctctgctctgctcagctctgctcccttcccttcccttcgcctaccccagccagccaggaatcgccaccggcggaagccaagcatcgtcccagcaccggatcgattccgcccgcccgcccgcccgtccatggatccggcggccgagccggcggcgtggccgccgtggacgtcgctcctgctgcgggcgctgagccggcggcggacctgggtggcgctcttcctcgccgtctacgccgggctgctctcgtcctcctggtccctgctcgcctccgtccgcgcctggtactactccgcctcctcggcgtccgcggcgcccgcctggcccgccgcgctctacgcgtccgtcatgtacggcgccgtgttcggcctgctctccatggccgccgcgctcgccgtcgccgcgcccgccatgctcgtcacctggaccaccgtcctcgtgctgctcgccttcgcgggccgcccgcgcaggtcgctcgtcgccgagggccgccgcgcaaccagggacatcgcgggcctcgcgctccgcgtactcctgcgcgagggcaacgccgtcgccgcgctctgcgccgccgcaagctttgccgcgctcctcctcttccagatcgatcaccagtagtagctctaagcctgttgccgtcctcttcttctcgcgctagatctgctactaccttactggtgtagttgtaaataatcttttgaacctgagcatgatgtgacaagctacattcattacagatgcc

SEQ ID NO: 10590 - DNA, 603 bp, Zea mays
  Clone ID: MRT4577_10965C.1
atttctctagactatacctacctgcgactcactcgccctcatccgcaacgccaacgagaagccacgccgccaccgtgacatcgcacaggcgtaggcgtggtctcggacgatccccaccgaatcgaatgcgctcataatgacgaagcacctgaaccagcggactacacatgtccctgaacaacctcatcaagactactaagtccccactgatgatcaaccccgcggccacgtcgaagactgccactccgagaacaccacgctcgcgccgcgacctacccaacatatcgactcaccaaatgccgtgccgccgactactcgcaccacagccttgactacgagcatgacgcccctataatcgctcacgccgccgctgatcgaccaagcctacgtcaatcgagatgaaatgaatctgacgatctccatcctcgatctccatcgtacggaccatagctgatcgggaactcttcatcatagagtggagagctcgctcattattcaatgctctatgacacggctggtagatccacagtgactgcgctgatttactttgcaaggaaagtgtatgcttttacatgctattccgagacactatggtgatccact

SEQ ID NO: 10591 - DNA, 503 bp, Zea mays
  unsure (1)..(503): unsure at all n locations
  Clone ID: MRT4577_109660C.1
gaggaattgcctctcccgaggatacgagtctgccgattcgactacctacgtgtttcaaatgtttcccccttctcccatattactaccgccggacgccgctccacccgtacgacgacccatgagggagtgcatttcgatccacatctgccaggccgccatccaggtggcaagcgagtgctgagtactgtactgccgtgagcatgggatgcaggccgacgggcacatgcccggggacaagaccattgggggaggcgatggtgcgttcaacacctgcttcagtgagactggagctgtgatgcacgtggcccgtgctgctttgccgacttgacccactgcatcgccgcggtgagaactggcacctaccgccagntcttctcccctgaggaggtcatgagctgggaggatgatgtcnccaacaactttggccgtggccactacgccattggcaaggagattgctgacctgtgccttgatggcatcacgaagcttggcgaaactgcact

SEQ ID NO: 10592 - DNA, 252 bp, Zea mays
  Clone ID: MRT4577_109661C.1
cccacgcgtccgtcgacatggaccccgcagcgctcttctccatgcggtggacggccacggccgcgccgccgccggagagcgacttcgagttcgggcttattattcccggtagcgtgggcaggggcaatgaccccccgtcaccggcgctggtcagcgcgagccgccgggtcatccgcaacggccgcctcgtccccggagaaccgctgttattctcggcccgcaacgcgccgacctccccgtccccgaacccgt

SEQ ID NO: 10593 - DNA, 518 bp, Zea mays
  Clone ID: MRT4577_109662C.1
ctagcaaatatttgccttcgagcggtgcagccatggagagaaccgtcgcccacatcctgctggtgctttcgctcggggcggccctcgtcgtcgccggccgccctaccggtgcctccggcgaggtggcagccattcgcctcccgagcgacggccaaggtcttggtggtgatgcaacaacactcgaggaggatgagaggccgtgggcatgctgcgacgacacccactgcctgagggtgatcccgagggcctgcctctgccgcgacacggtggcgcggtgcgccagcgcgtgccagcactgcgaccaggtcggccctggccgctacgtttgcctggatatacacgaaggttggcccggcccaaagtgcacgcaccaagtggacgtcgccggcgccggtaactagctaccatagctagctacgtttcggcgtgttcccctctcagtaacttgttgctccgtgatccacacagtagttccagtgcctatctatgtactagatccacttcaactcgcttagcat

SEQ ID NO: 10594 - DNA, 330 bp, Zea mays
  Clone ID: MRT4577_109663C.1
ccacaaccattttccaatgggggaaccaattaaaacccattgggggtaaaatccattccaaaacattttgtattcagtttcgccgtcgtaattaaatcaagcccaacttggggaaaggccggctttagacttgtttaacggccaggggggccctggggtaaaagccgttgacttacccggcatggttttcttcgtttttaaaaacaacaaagctttttgggggaattttcccactttttttggccgccagctccagggtcttgaaccaacaattttccccccagaaaaaaatttgcgctaaaataagggtggtttagcccctggggcccc

SEQ ID NO: 10595 - DNA, 326 bp, Zea mays
  Clone ID: MRT4577_109664C.1
agagacaaatactaccagagtggactacatcacagaactggggtgcgcccatatatatagggtactagtactgatacagtaacatgacgtcacctctattcggctcatgtccattggcgtggattattctagatccacgatagtgaaacacacatgctactcgctcgctcggaacatactagggtactactataggtccataggaacagggagaagcattagtataataactgaaacaataataagattcgctcgacacgtaattgagcgagaacatagtctgggccgatttggcccacccgtgtacgtatggtttcagggggcgc

SEQ ID NO: 10596 - DNA, 586 bp, Zea mays
  Clone ID: MRT4577_109665C.1
tccggcgcgcttaattagactgggaattcgttccttgcgtatcgcagacgtagaatatgcccgtgaaattaaaatatttgttaattttggaaaaaaaaaaaaaaaaaaaaacgcccatcatcgagctcctggactcacgagtcgtgtccagccacttcagccccgcgctgccgcactagacccccggccagcgctccgactccgactagacacgcgggccggcgagcggcgaggcgtgtccggccgggtccggcgcgcttaattagactgggaattcgttccttgcgtatcgcagacgtagaatatgcccgtgaaattaaaatatttgttaattttggaaaaaaaaaaaaaaaaaaaaacgcccatcatcgagctcctggactcacgagtcgggtccagccacttaagccccgcgctgccgaactggacccccggccagggctccgactccgactagacacgcggcccggcaagcggcgaggcgtgtccggccgggtccggcgcgcttaattagactgggaattcgttccttgcgtatcgcagacgtagaatatgcccgtgaaattaaaatatttgttaattttgg

SEQ ID NO: 10597 - DNA, 534 bp, Zea mays
  unsure (1)..(534): unsure at all n locations
  Clone ID: MRT4577_109666C.1
aacaaagagaacggaanggccggagaaacccnagagccgagggancnnanggcgcaaacaaacaaaagaanagngccaaagnncacagaaancnnccccgnggaggacgcgaacnacccnnacagcgccnncancgcgncggnccggaaagacgngancaaacacggcaccgaccanaaagggancnnccagcccgagccgccaccggagaagaagggcccggagcnanggnncnacacagagcncaaaacnaggaccagcnccancacgcncgccanacgcanggacaaccngnaccncgngggcnncaggaccccgggcgggggggggngggagnncggcaaggacggcgacacccaccnccncggcgacaaccccaggnggcncggcnncggcggcagggaccaggaccncancggcaacaagggncnggagaccgncaccangggccgcgccgaaaggaccagngccgncaacgacccggcgaagaagaagaagaaggcgacaccggaggaggaggaggggcagangcag

SEQ ID NO: 10598 - DNA, 233 bp, Zea mays
  Clone ID: MRT4577_109667C.1
attctttttttttttttttttttttttttttagggggtctcttttaggggggattgcagtcaaccccttacattacataaaccatccccggtgtgatcaaactttataataaaggtatgtgccaaaacattaattcaaacatacacacaacaaattcaatgtagattcagggggctaaacttcaattagcccaaaaaaaaacctaaactaaacatacaaagaccggattacaa

SEQ ID NO: 10599 - DNA, 238 bp, Zea mays
  Clone ID: MRT4577_109668C.1
gagcttccttcgccggagccgacgaggtttggcttcgccaccgcggtcaaggcagcagttgatggcgtgatgaccaccactccaaaggatgtgcaaggagatagagcagtaaaaaagcgcggtcggaagaaccagtacaggggaattaggcagcgccctttgggcaaatgggcagctgagatcaaggaccccaacaagggcgttcgcgtctgggtcggaacctacaacaccggcgagg

SEQ ID NO: 10600 - DNA, 349 bp, Zea mays
  Clone ID: MRT4577_109669C.1
aggcgaaataagtaccgcaggctatttgaagctaaaatgagcgggggtctctcccccttttcaataaatcacactcttggtaatcagcctttcttttatttacaccttcacacaaaagttttacccgggaaaaaccaacgacgggaccatcgaactaattggatttcatggcgcctggagcctcaaacacaaaggctgtgcgtcatgctccacgtcacgtgataaaaaaaccatactcgtttcatcaaggggggtccaacgtctgtgcagatgttttctatggaccatctgccaaatgcttaaccttgacaagaaaggggtaacatggagaatatggctggacccccct

SEQ ID NO: 10601 - DNA, 260 bp, Zea mays
  Clone ID: MRT4577_10966C.1
tgaggtcggcggaactagccaatcttaaggacggggggggcggtctgtaccagatgcggcaggcccacctgtgctcgcgggcggaacggatatacgcatgaactactacccggggcctaccattgactgcgcctgctcggccagcaagacagccacacagctaagcaccgaatacactcattaagaggtcctgcatcctggtctgacggacttcaatcagcgggtcaaccaatatggcggctgtgatacaaacgcacgca

SEQ ID NO: 10602 - DNA, 255 bp, Zea mays
  unsure (1)..(255): unsure at all n locations
  Clone ID: MRT4577_109670C.1
gaaacacgacccctgcctttctctttcttcctccctgccnccatgggggtggtactaactatgccggattggtacctacagcggaggacgggcgagatagccaggcggctagctccgcacccctcatcaacgagaagagatgcggacccctcatgagtccggtacgaaggcacttcagcggggacatgcaacgtgacatcgagggcgcgaggacccttcgagactatgaagcgaccaagaggaagtggctcacgg

SEQ ID NO: 10603 - DNA, 497 bp, Zea mays
  unsure (1)..(497): unsure at all n locations
  Clone ID: MRT4577_109671C.1
ctgcttttgttttctgtgcgtaccgctccaaggctcgaggttcgtggacatgctccgcatgcacacatacttatgcgagctcacgcacaacaagatgcgccttcggcggcgagacgctgtcaccagatggtctctggcctataacccttacttactacgcgtcaggtatacccggggaccgagatgggaagaaccgtcgccggcgcgggagacacctgttnagacacagaaagtcaccatcggcgacaaacgcaagcagaaccggctggtgatccccaagcaccacgccgagaagcacttacagctgcagatcccgtccgtcggcgatgagagcaatggcgcgctcctcaacctggaggacgaacagggcaaagtgtggcggctccactactcgcactggaacagcagacaaagctacctgctcaccaacggctggagccaatgggtaaaagagaatggccttcaacccggagacgtagtaggcttatagcgctccg

SEQ ID NO: 10604 - DNA, 218 bp, Zea mays
  Clone ID: MRT4577_109672C.1
ggcccacctcgcggtcttgtgtgtttttttttgagggggatgcatggatgaatgtacatccatgtctgtacagcacggctaattcactaatatcaatacataaattgggccactcgagaggaaaaaaaaggcgcagctcattcagggactcacccacacacccatctgaccaggcaaatacaacagatttagggaccggcatcactgtcctctaatta

SEQ ID NO: 10605 - DNA, 2452 bp, Zea mays
  unsure (1)..(2452): unsure at all n locations
  Clone ID: MRT4577_109673C.1
ccggccgggcgacacgactctcggcaacggatatctcggctctcgcatcgatgaagaacgtagcaaaatgcgatacctggtgtgaattgcagaatcccgcgaaccatcgagtttttgaacgcaagttgcgcccgaagccttctggcggagggcacgtctgcctgggcgtcacgccaaaagaagaaaaaaaaaaaatcattgcctcgaggccggccgggtttactgtccgtgacgtccttggcctcgacccctctcgcgcacgcgcgcttgcctgcacgctccagggctccaggccccacaagtcatatgcacaaaatctcatttgagcgtgcaagctccttcgcctcgaaccctctcgcgcttggcttgctttcactctccagggccccactcccacctcgccgccgcagccatggcgatcacagcgccaactcccgacatcctcggcgagcgccagtccggccaggacgtccgcacgcagaacgtgatggcttgcggggcggtggccaacatcgtcaaatcctcgctcggccccgttggtctcgacaagatgctagtggacgatattggtgatgttacaatcactaatgatggagcaaccatacttaagatgttggaagttgagcatccagccgccaaggttcttgttgagttggctgagctccaagatcgtgaggtaggagatggaactacttccgttgtcatcatagcggcagagttactcaagagaggcaatgatcttgtgaagaataagatccatccaacctctataatcagtggctacaggcttgctatgcgtgaagcctgcaaatatgttgaggaaaagttagcagtcaaggttgacaaacttggaaaagaatcccttatcaactctgcaaaaactagcatgtcttcgaaattgattaatagtgacagtgatttctttgcaactttggttgttgaggcagttcaagccgtgaagactacaaatgccaagggagacgtgaaatatccaatcaagagcatcaatattttgaaagctcatggtaaaagcgccaaggatagttatctgttgaatggctatgcactaaacacaggccgtgcagctcaaggaatgcctacgagagtaactcctgctagaattgcttgtcttgattttaaccttcaggatatgtccttgaagcacttgtggtgagggtggtgcgattgcagtaaggcgtgtgcgcaaggaagatttgcgacatgttgccaaagccactggtgcaactatggtgtctacttttgcagacatggaaggtgaagaaacattcgattcatcattccttggccatgctgatgaagttgtggaggaaagaattgctgacgatgatgttattctggtgaaaggcacaaagaacaccagcgcggtctctataatacttagaggcgcaaatgactacatgcttgatgagattgaacggtccttgcatgatgccctgtgcattgtgaagagaaccctggaatcaaatatggttgttgctgggggtggtgcagttgaagctgcgctgtcagtttatctggagaaccttgcaacaaccctgggttctcgggaacaattggcaattgctgaatttgctgagtctttgttaatcataccaaaggtactatctgttaatgctgcaaaagatgcaactgagcttgtagcaaagcttagggcatatcatcatactgctcaaacaaaggccgacaagcaacattattcaagtatgggccttgacctctctaagggtatcattcgcaacaaccttgagtatggcgtgatagagccatcgatgagcaaagtaaagatcattcagtttgccacggaggctgccattactatcctgaggattgacgacatgatcaagcttaccaaggaagaagagggtaacgaagagtaagcagcccaccagtagtgggctagtggactcccatgggatggttgccatagcatgtagcacttgttttttcacttatcgtttacttttgcttgctgtgagcattcgtttgtaggaaaagtgagaacggatgtgtatcaatccgtgttgggtgacgatgactcacggatgaatcaaatatttgcgtatattggggccaaaacagttctatctgaaggatttaagttggaaaatggaatggtttcgtgtagtgattatttgattttgaaattgtaacttcgaattgttccgtgtttagacaacgacccacggatgaatcaaattttgcgtatattggggccaaaacagttctatctgaaggatttaagttggaaaaaaaaaaaaaaaaaaaaaaaaaagaaaaaaaaaaaaaaaaaaaaaaaaaaaaaaaaaaaaaaaaaaagaaaaaaaaaaaaaaaaaaggcccctagggccctagagcatgcctaggaaacaaagtgttgtcgactgggaacttgtgctgaaacggaacnntgaataatatttcagtttaacgg

SEQ ID NO: 10606 - DNA, 769 bp, Zea mays
  unsure (1)..(769): unsure at all n locations
  Clone ID: MRT4577_109674C.1
tgtgcgccgctcgaggcggccgggtgcgnatgcgatgtggtcctctcctcctatcacctgacctccacacacacacagcagacaggcacgcgcaagcaaaaattcattcatatatgcacgctcgttcgttgtcgatctcccccatcactgcacggcgcggcgcaacaagagcgagggattggagctcagctagtcgtctaatcagctagtaggtacgtgtagctaggctgcgctgcaccagctgccgtgcatgcagtgcatggcgcaggagggctctgaggcctccgtcgccagctccccgccgccccagccgccgccgtcggcctcctcctggtggcgcgacatgcagcacccggctgcctacggcgcgtggcctccgtcccccgcggcgaggtggccgcccccggtatcgatggcgccggcagcgacgcagcagcagcagcagcacggcggccgggcgacgacgtcctccgacggtctctcggcctccaacgccaccgtagcgtccttcaccaaccactccgggtccgggctcagcctggactccgcgggtggagctgaggccgccgccgctgccgccgccgccgccgagagccacctctggaaccaagtcctcatgggcgccggcggcgaggttggaaggagcatgcaggccgtgcacgacgcccacgacgacagcgagaacttcctcgacctgctcaactcgagggcgctggcgccggagctcttcgccgagccgccggcctgcgactacctcaagaagatggag

SEQ ID NO: 10607 - DNA, 721 bp, Zea mays
  Clone ID: MRT4577_109675C.1
ggtctctcttcttcctccgccctcctgcacccaaagcatgggcggcgcgaggtagcggccctcgccggcgcctcactgcagctcccctctccctataaccctctcctcgatccatcccccagccccctccgccgcccgaactcgcgtggctgggcagcccggcgcctgtcgatccagcccaagggcgtgtggctgggccgccgacgcctcagttccggcgcaaccggcccgaagccgcagctccggcgccctgctctgcgccgtcccgcctccccgctcgcctgccccggggctcccgcgtgcctccattgcgaagtcctgcaggaaccctagcctgctcagctgctcctctgcagcctcgacctcctccggctcacctgcaacctcgatctcgaccggctcctcttccctgcaccaactagctgccacaacagcagaagcacgatggctgaagaagatgttgactggacaccgatctttgacaggatcaaaggatccatcttcttcgtccagtttgttccgaaacaagacaggcttcaacaactccaaatcgtggctgatacggtcaatacagttacagatgatgaattgcggcatgagaggaccgtcaacggacacgtttcaactggttttgccttcttctctagacaaactgggcctctgattatgactactgcacacggtttaagccatcttttcaacccgtctcggccattgacac

SEQ ID NO: 10608 - DNA, 807 bp, Zea mays
  Clone ID: MRT4577_109676C.1
gggaccctcgaggctgggcgggtgcgcacaagtcatgggcacaaaatctcatttgagcgtgcaagctccttcgcctcgaaccctctcgcgcttggctttctttcactctccagggctccactcccatctcgccgccgcagccatggcgatcacagcgccaactcccgacatcctcggcgagcgccaatccggccaggacgtccgcacgcagaacgtgatggcttgcggggcggtggccaacatcgtcaaatcctcgctcggccccgtcggtctcgacaagatgctagtggacgatattggtgatgttacaatcacaaatgatggagcaaccatacttaagatgttggaagttgagcatccagccgccaaggttcttgttgagttggctgagctccaagaccgtgaggtaggagatggaactacttccgttgtcatcatagcggcagagttactcaagagaggcaatgatcttgtgaagaataagatccatccaacctctataatcagtggctacaggcttgctatgcgtgaagcctgcaaatatgttgaggaaaagttagcagtcaaggttgacaaacttggaaaagaatcccttatcaactctgcaaaaactagcatgtcttcgaaattgattaatagtgacagtgatttctttgcaactttggttgttgaggcagttcaagccgtgaagactacaaatgccaagggagacgtgaaatatccaatcaagagcatcaatattttgaaagctcatggtaaaagcgccaaggatagttatctgttgaatggctatgcactaaacacagg

SEQ ID NO: 10609 - DNA, 2173 bp, Zea mays
  Clone ID: MRT4577_109677C.1
aaaaaattaattagtgatagattttatgagggggtaccctcgtggtacggcggggatatttggcccataacgctgctagggtttcttaacactaaaaacctcatttgagcgtgtgacgtccttggcctcgacccctctcgcgcactcgcgcttgcctgcacgctccagggctccaggctcccctcccacctcgccgcggcagccatggcgatcacggcgccaactcccgacatccgcggcgagcgtcagtccggccaggacgtccgcacgcagaacgtgatggcgtgcggcgcgttgtccaacatcgtaaaatcctcgctcggccccgtcggtctcgacaagatgctagtggacgatatcggtgatgttacaatcactaatgatggtgcaaccatacttaagatgttggaagttgagcacccagctgccaaggttcttgttgagttggctgaactccaagaccgtgaggtaggagatggaacaacttccgttgtcatcatagcagcagagctgctcaagagagccaacgatcttgtgaagaataagatccatccaacctctataatcagtggctacaggcttgctatgcgtgaagcctgcaaatatgttgaggaaaaattggcagtcaaggttgacaaacttggaaaagactcccttatcaactctgcaaaaactagcatgtcttcaaagttgataaatagtgacagtgatttctttgcaactctggttgttgaagctgttcaagctgtgaagattacaaatgccaagggagaggtgaaatatccaatcaagagcatcaatattttgaaagctcatggtaaaagcgccaaggatagttacctgctgaatggctatgcactaaacacaggccgtgcagctcaaggaatgcctacgagagtaactcctgctagaattgcttgtcttgattttaaccttcagaagacaaaaatgcaacttggtgtccaagttcttgtaactgatccaagggaacttgagaagattcgtcagagagaatctgacataacaaaggagcgaattgagaaaattctcaaggctggagctaatgttgtgttgaccaccaagggaattgacgatatgtccttgaagtactttgttgaggctggtgcgattgcagtaaggcgtgtgcgcaaggaagatttgcgacatgttgccaaagccactggtgcaactatggtgtctacttttgcggacatggaaggtgaagaaacattcgattcatcattccttggccatgctgatgaagttgtggaggaaagaattgctgacgatgatgttattctggtgaaaggcacaaagaacaccagcgcggtctctataatacttaggggcgcaaatgactacatgcttgatgagattgaacggtccttgcatgatgccctgtgcattgtgaagagaaccctggaatcaaatatggttgttgctgggggtggtgcagttgaagctgcgctgtcagtttatctggagaaccttgcaacaaccctgggttctcgggaacaattggcaattgctgaatttgctgagtctttgttaatcataccaaaggtactatctgttaatgctgcaaaagatgcaactgagcttgtagcaaagcttagggcatatcatcatactgctcaaacaaaggccgacaagcaacattattcaagtatgggccttgacctctctaagggtatcattcgcaacaaccttgagtatggcgtgatagagccatcgatgagcaaagtaaagatcattcagtttgccacggaggctgccattactatcctgaggattgacgacatgatcaagcttaccaaggaagaagagggtaacgaagaagagtaatcagcccaccagtattggtgtagtggactcttgtgcgctggttgtcatagcgtgtaacttttttttcttcttcccatttttccgtttagttttttgctggctgtgtgtgagcattcgtgtagggtgttgtaggaaaactgagaatgaaggtggtattaacgtatccccgtggcgtgacgttatttagacaacgacccacggatggatcaaattttgcgtgtattggggccaaaacagttctgcttcaaggattgaagttggaaatttgaattgttccgtgtactgaaaaaaaaaaaaaaaaaaaaagggcggccgccaccgcggtgga

SEQ ID NO: 10610 - DNA, 430 bp, Zea mays
  Clone ID: MRT4577_109678C.1
gagctcactagccggcggacgcccttacgaggttttttttttttttttttttttttcaagttttacgacctatttaactggagcaccatatgtaaaccagattaaccacatccaagcctgacttttcacatgcataaaaagggaaaaaaaaccctatcggacaaaacgggggattcataaaagcacaggtacaaaccaccggaaaaggattggccaaattccccaaaaaaggctaagcatcctatgaaagggggaagttaactcacgcacgcggaactggcccaacaagcttaaagtgcaagataccgaagaggtcaagcctaaccaaaatggagacgtgggaaaagagaattctgtgcttaacacttccaagtggacaaccctgggagagctacctggggggcaacctgaacaaaaacatcaaccctgg

SEQ ID NO: 10611 - DNA, 558 bp, Zea mays
  unsure (1)..(558): unsure at all n locations
  Clone ID: MRT4577_109679C.1
gtggggtgtggggttttttaaaatttttttttttgttttttttttttttttttttttttttttttttttttttttttttttttttttttttttaaaaaaaaaaaccccctttttttaaatgccccattaccacatccaaaactcaaaagggggaaagaaggggggggcaattataaacttaaaacacaccccctttttaggggcgtttttgggtcaaaaataacacaaacaagcttttctttttttttaacaatgaaaaccaaaataagcaaccacaccctaaaactttatttttagcaaaaaaaaaccattgaatttgaagttgggccgggtgttttaaataccttgccctttggcaacatccaaaaccattttattggcccccatttttttttnaaccccaagggggaaccccttcacaacaaaaaaaaattccttatttggaaggggtggggaggcatcgttttttccattggaaaattcctcccgacccttggccttttttttggtttttttaccagtgttttaaaaaaccacttcctttgggggggggcaatt

SEQ ID NO: 10612 - DNA, 369 bp, Zea mays
  Clone ID: MRT4577_10967C.1
ccccggcgcgacccacgcgtccgcccacgcgtccgcccacgcgtccgcccacgcgtccgtatggctactaatgtcgagaatcctgatggtagtactcttaagttgacttctgtgtacattgcaattggaatcttctcggtgttcttcttgctatttagatcattagcagttgttgttcttggggtcaagacatcaagatccttattttctcagttactaaactcattattccgtgcaccaatgtccttttatgattctacccctcttggaagaatacttagccgggtttcttcagatctgagtattgttgaccttgatattccgttttgcttcatgtttagcattggtgctggcataaatgcatatagc

SEQ ID NO: 10613 - DNA, 455 bp, Zea mays
  Clone ID: MRT4577_109680C.1
aaaaaaataaaaagctgctcgggcaaaatctgaaacacatttccgggacacaatatacatgattttcggggcgtaacaactttaatttttatcccccccaaccggacaaaaaaaaaaatcaggccttggggcgacctactatcccacctttggccccccaggggaaaggaatccaaccaaagggggatgtccaagtttgcaagcttgggaactggtgggaaaacctactttccccgccccattttttctctcactctaaaggctccttggaaaaaccctaccgcaggaacgggatgaccatgaggatgggatgaccggggggccccaaaaaggcccgtatagccagcctttgggaaaatgggggggggcacccccccccaggggaatgcccccccacctccaaggggttgggggatcaacacaggcagtggccccaggctcaccgaatttggccg

SEQ ID NO: 10614 - DNA, 500 bp, Zea mays
  Clone ID: MRT4577_109681C.1
aaaaaaaaaaccggggcaaaaggggggccttcaaaaaaataacccaacaggatcaaacccaacccaaaaacccaaaaaaaggggcccccttaggcaaacaggaccctaaaaaggacccgggggcgaaaaaactaaaaaacccaaggccggggggacaaagggcaaaaaaaccccctaaaactgggggggggcctggggggaactggggaaccccgccccgggactaaccaagggggccgaaaccaaagccttgggggggggaaaacacgttccccaaaaactggttgggcgggggaagcggccccccgtaaaaaaactcaaaagccccccaaaaaaaaagggggatctttttttcgaggcccttaaactgggaatcgggggggagggccggcccaaaaaaggccctcttcaaggccgggaaaaaacccccggggggggaggggggtttctcaacaggcttccggagccaattgggggcgggaagggagggaccccggaac

SEQ ID NO: 10615 - DNA, 223 bp, Zea mays
  Clone ID: MRT4577_109682C.1
tcgggacgcgtgggccccataagttttttctgaccctgcctcggggacgggttgttaccaaggtcccggcaggcaacatcgccggtgccgacggcgaccgactttgcctcgaagaagcggcgtttcagaggggggacgctagccctagatgtggtgaaaaagtttggaaccgagctcctttcctttttgctcccaccttaaccacgcccccggcctcctaggt

SEQ ID NO: 10616 - DNA, 333 bp, Zea mays
  Clone ID: MRT4577_109683C.1
cgcgctcctttcccacgtctggcgctccgttcccctcccaggatggcgctcacattccatcgacgggcctcaccttccatcgacaccgaggaagttcctgttcccgcatcgcgtggcgcgtgccaccgtttctgcacgaacgccatgtcgggtgtcggcccacctctgtgaagcggttttgccgccggctatggaaggggatctgtgttcgttctcattcctctattcccctcccagatcacgtgctgattccagccggtccctcaatcaacgccattgcccccgcaatcccctttcaccgacggcgcggacctttcaacgacgaagccgatc

SEQ ID NO: 10617 - DNA, 660 bp, Zea mays
  Clone ID: MRT4577_109684C.1
atgccttcacactcccctcatgcattgcgcccttccacctttcgagcccccggatgggggcgcccgcgttgctttcgtcttgctgtcgttggaggagcgcaacttcgcggaagttggtacctttcagccatcgctcggcttcaaggattttcatcaggcagcccgactgcatcccctcgccgatggtcacccaagacggcgacggtggtcagccgcaccgggggggtctcccaacatgtcgtacgccgcgagggcggtactcgtgttctgggacggtttcattctcgttttcgtgacgaggacaggagcgaggacctgccggtgcgctttggggcggccggcgcccgctggtgcgatgttggtgggcaggtggatgtcaccgtcggtgctgaggtggtggcagctggagaaagcttctccgccgacgagaccgtcagcgccacccgcggaccgacctccggctctttggctttaatatctggttctcgtcccccgcgaggggacacgaacgagagccttccagcggtagcgtccgtcctgggaccatcgctgccgctgcagaggtcgctggcgagttacccggagtttgtcgtcccgcaggccctccaatgtggggggttgttcgtacctgcgggggtggaaccggagttctatttgtaa

SEQ ID NO: 10618 - DNA, 624 bp, Zea mays
  Clone ID: MRT4577_109685C.1
tggtacattaatgaacagataaagacgctagttctcagcttcgtcttcctccctgctttcctcgtttccaagtcttctttctcaatcctcactccttcctgctctcttctagaagcttcccactaccgacgctaacatctggtatcagaggtcagcatcgtagatccgctcggagcagtgcatcggcgtccgcaatccactgctatggattcgttcaacgccaccgctcgcaaggtgctcgacgaaatgcgcctaatggaggcccgccttaccgagaaaattgttggtcgctgtgacggcgtcgagcaccgcgtggacgcgcggtgcgacgagctccacaaccacttcacagcgcgctactacaccttcccgcagcaagcagaacctgtcttcgacgagggtcctatcttcgacgaggaacctgtcttcgagggagagtcgtttccctccaccactgactacatcgatggcaagcgcatggtcgacgctgctgagcgccaagacgtggaggccaccaatcaggtcgggtgcaccctgctcgaggacgccgccgcgcggatcgtcgacgagtaccagccgcccctgcagctttcgcccgaccccgactccagcagtccagctaca

SEQ ID NO: 10619 - DNA, 349 bp, Zea mays
  Clone ID: MRT4577_109686C.1
accacgaggagtggtaaacacttgacgagaacaatataacttttattcttggtttcagacagaaagaaaggggcggccgaacccacttttacaactttcaattaacctaataagccacctggtgtggagactcatcctccttatagaacgcccgggcaatcttattgaaatcaggatgctactgggctcctcttctatctcgacgggcctgtgccgcttaagaccatcatcccatttgtggtgaccatgcaccttcatgtgcttcccaagatcgaacctcggggccctgagtatcttaaccttgacggtgaagacgttacgaagtgggaagatgctggaggcggacttc

SEQ ID NO: 10620 - DNA, 273 bp, Zea mays
  Clone ID: MRT4577_109687C.1
catgcctgcagccggttgccatggagacgggctgccacactggaagacagagggtttccatccacctctccctcctcagaaattgcagtttatgcgactcggatcgttctggcttcgtccttggtgctgctttccgtcggttcttcttctgtaagaagacccacgccttcgtcagacttctcgctatcaggaaaaagttgcttttgctgaagagattaagatggcgggagagacagactgcgacttggataagaaaacttctttgacttcaga

SEQ ID NO: 10621 - DNA, 2317 bp, Zea mays
  Clone ID: MRT4577_109688C.1
cctcgaggccggccggggctctgtgctcaccgtgcccctagtcccacaagccaagcaacagttggatcactgacatccgcgacctcgtcgcagggcccacactacatgaccgacagctcgtgggttccgcccgccaggctaccagaagcgtttccggcagcgaggtttcctcccatcgatctgtacgccctccccaccggtgggtcgcgcacctccaccaacctaccttcccgccccgcccgtcgccgtcgacgactcgccgtccgtttccgccctccaaaaccctactacctcttaccttccagccccgcgtcctccatggccaccaacggcagctctccgagggttcgggacacggagagcagtctggagaaggtgaagcggcagctgtcatcggggtctgggaggtacctgctgcaagggcccctgctcaagcgatctgagacgttacggaaatggaatgagcgttgggtcatattggacccgacatcaggaaagatggaatacaaactccggagaaatgaaactgccattaaggggaccattctgtttgacgcctcgagcaccattactttatctcctgtgaactttcaagggatgccaaaatataatggctgctgcttctacatcggaactcctcaaaagaaggattactttctttgtgctgaaactcctggtgctgcgaaagcttgggtatctacattacatgcaactcagttagtcttacgagctcataaagaggcagtaaattctttggctgggaatggctctccagctacattaggcacagttgctactgcagttgctaatgctaatgcaacagccatggaggctaccaaggagatagaagctgcactaaaggtttcaatgagggcagctcttgggttggatacaaataactccaacgagggccaacttgatgacctaacaatcatgaaggagaccctacgagtgaaagatgaggaattgcaacatttggctaaggatattcgttcccgagatgctacaataaaggaaatagcggacaaactaacagaaactgctgaggctgcagaagctgctgcttctgcagctcatacaatggatgaacagaggcagcttttgtgttcggagattgagcgactaaaacaagccttggaaagacaaatagaacaatcagtggttaagcttagacaatccgaagagaaggttatcagcctgagcaaagagaaggagcagttgatgaaggaaagagatgctgcatttcaggaggctcatatgtggcgcattgaactagtaaaagccagggagcaagcagtgatacaggaagcaactattgcccgagcagaggagaaggctagagtttctgaagcagatgccgcagctcggatcaaggaagctgctgaaaagttgcatactgttgagaaagaaaaggaggagcttctagccctggttggtgttctccaatcacaagtcctgagagagcagagcagcacaaagcaagtatgcgaggagaggtctgaatcatgctcaggcgccgataattcacctctgttgacaaagcatgttgacgcatcagacgatgatgtggacaaagcctgcgtaagtgactctagatcggtcccggtttcgagcgatagcactgaggtccagctggctgtggatggggtggacatccgtcctgttggcgatgcagagtggagtagcttccagcagccagaagcgctgatcgctgatgtccgggaggtctccccagaggcggacggcggcagcttggatattcctgtggtcaatcccccaccagtcagtgatcatatccagggaggcggcggcgcaacccatccctgaaggcctgaggttgctgctaccttccgagattggtgtggttgctgagaacccaatagatagggatgtctaaatctggagagaagtgccgttgagagtgtatgcggattgtatgtccattgtattcggagtataagaccgaataaaaagatcgcagctgtgtttggctgtgggattgtaaaaaacttttagcgctacacctcaacaggactgggccctcttgggctaccggccggcactgccctgctgctcgtactcctgctgacttggaaaaacatcaggcagcaagctaggcgagatgttgcttttatctcttgggacagttcactagtgaaaggtgagccctctctgtcatgatagcctcgaaaccaacttcagaagcatctggatgccgagctgtaatggagagcagcaatatcactgttctccaacccaaaaaaaaaaaaaaaaaaaaaaaaaaaaaaaaaaaaaaaaaaaaaaaacctcgaacccc

SEQ ID NO: 10622 - DNA, 1029 bp, Zea mays
  unsure (1)..(1029): unsure at all n locations
  Clone ID: MRT4577_109689C.1
gggtacccttgtgagtccggccggggaggtttcctccaatcnactgtacgccctccccacggccggtcgcgcacctccaccaacctgctcgctccgtccgtcgccgtcgccgacccgccaccatctccgccctccaaaaccctactacccctgtagcctgcagccccgtgcccgccatggctaccaacggcagctccgtgagggttcgggacacggagagcagcctggagaaggtgaagcggcagctgtcgtcggggtccgggaggtacctgctgcaagggcccctgctcaagcgatctgagacgttacggaaatggaatgaacgatgggtcatattggatccgacatctgggaagatggaatacaaactccggagaaatgaaactgtcattaaggggaccattctgtttgatgcctcaagcaccattactttatctcctgtgaactttcaagggatgccaaaatacgatggctgctgcttctgtatcctgttttcctatattttggttaaagagattttgtttcagaaagagtttcttaaatagttatatttagaggaatcacatgttttaaggttgtgctgttcctttactgtatttagacatcggaactcctcaaaagaaggattactttctttgtgctgaaactcctggtgctgcgaaagcttgggtatctacattacatgcaactcagttagtcttacgagctcataaagaggcagtaaattctttggctgggaatggctctccagctacattaggcacagttgctactgcagttgctaatgctaatgcaacagccatggaggctaccaaggagatagaagctgcactaaaggtttcaatgagggcagctcttgggttggatacaaataactccaacgagggccaacttgatgacctaacaatcatgaaggagaccttacgagtgaaagatgaggaattgcaacatttggctaaggatattcgttcccgagatgctacaataaaggaaatagcggacaaactaacagaaactgctggaggctgc

SEQ ID NO: 10623 - DNA, 210 bp, Zea mays
  Clone ID: MRT4577_10968C.1
gggtgcgcgacgacgcagccgccgctctcgcgcgccgtctccgagtgctccgcctgcgcccgaatcgtcctcgagcgccacctccacacgcaccccttcttccccctcctcccatcactccatccgctccaccttgtgaccccgcgaactggccacagcacatcgatgtcagccgaaggatcctgtccccacggcgacgagagatgacga

SEQ ID NO: 10624 - DNA, 337 bp, Zea mays
  Clone ID: MRT4577_109690C.1
gctaatgccggggcgtccccacaaatacatttttccgggcggtggaataacggccaccggggaggggtatctgtttgattggattaagggccttgcaggtggaaaagtttaataggcggaaatcaaccaggtcggtaggggggcagtcatgtaagacctaaggttgttttaatttaatttgcccaatttggaacggattggtaaaatgtttaatttatgaagagggtactctttatggtgtatttctccaacctatcttattaaccttataataaattatattatagggttgaaccttatctcttttataattataacaaaaataaatatagggcct

SEQ ID NO: 10625 - DNA, 590 bp, Zea mays
  Clone ID: MRT4577_109691C.1
agcacgcgcccgccgcctgcttgatgctctccagaatagacagacacggagccgtaatgccgagcggtcccccctacctgatccgtggtggccccgcgcacaggcgcgacacctccggccataccttgatggatatcagcttcaaggagcacgatgagtcgatgtccgtacagcagggcggccctaggaggacattgctcacgaactacataaggctgtgtgcctctctacatgaacgcgctcgatcacttcaaaaaccatcttaagtgcgataagaaccgcaggatcaaggaggccatgaccgacaaggtcaccgattacctacgccgagccgaggagatccgcgcggtcctagatgagggcggggcatggcctgggccgacggtggagactcagctgttggccttatcgccaagatcaactacaagggcggggacggatgcacggaggtaatgactagcagcagcgcactgtgaggtggtgacatatcatcactattatcaaagataatgccaacatgtaatcggaacgacgttgtctgccactgagagcgccaagcaggcactgtaagaagccgatgtattgcccgt

SEQ ID NO: 10626 - DNA, 158 bp, Zea mays
  Clone ID: MRT4577_109692C.1
gccagccgaacaaggtaaaggcggcccagaaccccctgttgttgccccccaaggccaactccttgggccacttgggaaggtccactgccaacggcaagccccccaaggccaaggagggaatgttcgtaaagaactacagttactagttttagatcgca

SEQ ID NO: 10627 - DNA, 559 bp, Zea mays
  Clone ID: MRT4577_109693C.1
cctcgggccggccggcatgcaccaatactcgcaccaaacgcttccgagaacatcacaacactcgtaccctttcgtcacacccgaataccgcaaccatgggtaaagttcacggatcccttgctcgtgccggaaaggtcaagtcccagacgccaaaggttgagcctcaggagaagaagaagactcccaagggccgcgccaagaagagactcacatacacccgccgcttcgtgaacgtcaccatgactggcggaaagaggaagatgaaccccaaccctggatcgtaaacaatggtcgatatattaaaaggacatgcggagcgcatcttcgaccacaaaacatgtatttgtttttttcgggatgaaatggggccatgaatcaggaagggttggaagcttgtcttggattggaatatagccacggcatatctggttgttagagcagcttccatttcgaaggtggcgtttgagtgcactttcatgatataaatgcacgtccagccctatgcgctatgcatggaatacaagcttgtattgctaaaaaaaaaaaaaaaaaagcggcc

SEQ ID NO: 10628 - DNA, 359 bp, Zea mays
  unsure (1)..(359): unsure at all n locations
  Clone ID: MRT4577_109694C.1
aagctaggcctctctgttcctcgccccagcccacggcagccctttccttccgcaacatacatacccactgcacgagccaacgagcgcagccacactcctctcgcccccgccagagcataaagcccttccatgagggtgttgatgtcgcgccggcgcggtgccagcggcggcgggctgtgcatcaacaaaaaggcccgcctattcatgtgcggctgcggcggcaccaaggctgtctccatctccgatggctcctccgacagtcaccaaccgccacgccgnagaccgncgngtnaaccactccgctcaccggcacgtngaccggcaccgtcacgaccgagtcgacgagaagaggagggagc

SEQ ID NO: 10629 - DNA, 522 bp, Zea mays
  Clone ID: MRT4577_109695C.1
ctatttccctttcataaccgaaggcccgcagtaaaaaatgcctcgaacaccctccagctccggaatctcctccgcccccggaactcgtccaactccgttcccaaaataccccagctgctgcatctcttgcacgcgaaccgaggagatccgcgaaacgccaaactccactgtgtggcccgggtgcagctccgccgccagatcgctcatggtttcctcagacgacgatttgcccggcggcgtattcgcagcggatgaagaagaagacgacatggatacgtaccgtcggcggcgacgcgtggtctgcttgacgcgggccagatctccgatgaactagagcaaggagggcaggcgagcgggcgaacgggcgaacagtttcaaaatgctagggtttcacgacgcgcaaaaaggtaagaaagcctgagccacgccgactcccccctttttatacataggacgcgacgcttcaggaagcccgcagtccaacagtacacgttcatcaacggtcacaataaaacccccgga

SEQ ID NO: 10630 - DNA, 330 bp, Zea mays
  Clone ID: MRT4577_109696C.1
tatatttttgttcttttgggtgtgtatgtattttttggggatttaagcccgaatgacatttattagggaggagatattgtggcctcaggtgcacctttttggctatccttataccattttcattcaacaagaaaaacgtgggtcttgacagtggtcacaataggggaatcatataaaacagaagaagaccctcgcaaaagggatgtttggtaagggcaaaaccactgaggcaattgtgtgaaagagcttaatggggatcgttatgtatgatggggttaaaggaaatgcttttaacgagggtgctgaaaaacggggaaaagaattcttcca

SEQ ID NO: 10631 - DNA, 387 bp, Zea mays
  Clone ID: MRT4577_109697C.1
aggggccaaaaaaaaaagggctaaaaaaaaccctaaaaaaacccccctttttgaattccccccccccccaaatcgataaacaaccctgggttgggggtcccggaaaaaaagggtaaaaaggccaaattgcccccaccccttacagggcccccggaaaaaaatcctccccataaaaaccaaaatttttcccctttttcttttggacccccggaaaaaggccctcccccaccaaatgccgggccccccaataagtttcaaaaaaaccggaaaaaaagggcccccctgggccccataaaatgacccccgcccccaaaaaattttaaattttttgggcccccccccccttatttgccaaactgtttttttttcccaacttaaccaaggggt

SEQ ID NO: 10632 - DNA, 226 bp, Zea mays
  Clone ID: MRT4577_109698C.1
ctaaacaaaagagatgtcatagcggtcctcataccagaattttactacacccattacgcggtggaggattccatcgaagagtcagaaatgtaattaaaaatattgagcccttattgattttctgattattcatcgttattaaaaaacgggtcgttcttcgatgactaaccccataaaaaaagggaaccaaaaaacaaaaaaaaactcctccactcccataaatata

SEQ ID NO: 10633 - DNA, 398 bp, Zea mays
  Clone ID: MRT4577_109699C.1
cccctcgccgtcgcctcgctgacctcaaccagccgccggcgaaatggcccctaagcgaggcggcaaggcgccggtcccggcgaagaagaaaacggagaaggtgaccaacccgctgttcgagaagaggacgaagcaattcggcatcggtggcgccctcccgcccaagaaggacctccaccgcttcgttaagtggcccaaggttgtgcgcatccagcgccagcgccgcatcctcaagcagcgcctcaaggtgcccccggcactccaccagttcacccgcaccctcgacaagaaccttgcaacaaacttgttcaagatgcttcttaagtaccggcctgaagacaaagttgccaagaaggagaggcttctaaagagggcccaggctgaagctgaaggtaaaa

SEQ ID NO: 10634 - DNA, 671 bp, Zea mays
  Clone ID: MRT4577_1096C.1
gtttcaaagcctttactatattaaagaaatctagtttctgaatactttgaatttgtatttgtgctgaaatgtatcaaattctttttttcccccacatttggacagtaatactgcttcaaaggattaatttggagaagtagaagtagtaaatctgttgtcatttcagttagacattatcttgatgcgattcaccttgctacactatagaagcataaattatactctggagtctggatcctatgccagcttatcctgaaccttgtatgaatatgaaattaattttcctgtactgtatggttgccacaaatgaattttcatagacatgtttaaagggatgacccagttctggaggctcccacatgagtggggtctgggtaatggataaacaattaaacagagtcgagtcttaccccgagaggctgctttcaaaccatgacctggtgactcattgagacaggtctcaccactactccagggcaggccttgccttctattgatagacatgtttatgatgtagaatttgatctatacacagttgacatgtgttggtgtctgttccttcagtcctctcctgaaaagcttcacctgtcatgtttggatattctgtttcggctaaattcttgacagttggttttggcatgttctgttgtacttatgattccaagtaatac

SEQ ID NO: 10635 - DNA, 404 bp, Zea mays
  Clone ID: MRT4577_109700C.1
tttctttttttttttttaaatacactgggcgttgggtattctgggtgggagcatccatcatcttctttccatatcatatgtgatgactcgggttatatatggctcgccatataaatttgcctcatagggtcgtacttataatttgatctgatggtgttttatgctatttttcgcttttcttcttcagtagaccaccgaatctcttgtgagaaagcttcttcttattctgctggtgctggttattttgtgatgtcctgccactggtcttcttatttggtagcatgccgttgctatcatcacctgcgtctcccctgttttattcctattcttcctgcgtttctccatcgttctccttaaccttatatgattctttttcatcattgtggcttttttcccattctttt

SEQ ID NO: 10636 - DNA, 113 bp, Zea mays
  Clone ID: MRT4577_109701C.1
cgatgttgccacattagacaacttgcttcagggtggtgaagtagaagaggtgattcttcaggctgaaaaagaactaagtctggcgatgaaaatgttgcagtggacgccctggg

SEQ ID NO: 10637 - DNA, 209 bp, Zea mays
  Clone ID: MRT4577_109702C.1
ctttcgcgtgggctgttttacaaccataagatctagcagaactgtcttgacctcaggggggttggccgagcgcgtgttgaccggagatggccccaaacggttggaggaggagcgcggcagcgcgagacgcctggcgcccggacacggtttgcctgtggctcgccgcttaccgccgccgaactgacgcttctcccaggcttaaaaaggac

SEQ ID NO: 10638 - DNA, 381 bp, Zea mays
  Clone ID: MRT4577_109703C.1
agcacgaaaatcgctttacataggatgcagaccagaagagagtgatgggttacttaagaacacaataagaacgtcacagcacccatgatcatgaacaccttgcaaaatctgagtacggatcagggccaccaaggaaacccccctgcctcacgaagagcagaaccgccatcagctgaatgcctgccgctgtcatcgactcatcatctagggagcgcgtagccgtatccgctatccgtgaacgaggtgccagcgacatcgaacgcgtccgtctcgtcgacgtacaggttcaccctgaaggcggcgtgcaggccgactgcgacagcggcgactgcgagggagacgaggaggttgattcccgcgcgggtgagcgcgacggctagc

SEQ ID NO: 10639 - DNA, 731 bp, Zea mays
  Clone ID: MRT4577_109704C.1
taacgaagtgatgtccatcttcagtgcacgagtagctagaaagaggcctgcaaccagtttatccagaacagagttagaccgctacttggatgatgagtatgtgccagctaatcaagagaattttgatgtgttgggatggtggaatgttgctggttcacgctacccaactttgagggctattgcgcgtgatatatttgccatcccagtaactacagtagcttccgagtcagctttcagtagaagtggaagagtacttagtgagcaccgcagtcgtctgacccctgatttgctagaggctttaatgtgttcacaaaactgggagagaaacaaagctaaagatgatgagaagaccgaggctgctagtttctggagttgccttgatgatatacaagaaggtttagagcgcatcacactatagagggggttccttctgtacttcctacaagtcagctcaacttcaacaaacaatgatgccgaacacataccaaggctgtagctgttagcttgctacctctgcaatacttttgcgcacgatcatgtttaccttaagttagttatggccacatggaaccttatgttggagtcaataaattatgtcaagcgagtcagacaaattttgtagtcaataaattatgtcaagcgagtcagacaaatttcgtccttattaaatgtggtgtttgcattgatactctcttcaagcgtgtgctcacgctattcaatatttctatgat

SEQ ID NO: 10640 - DNA, 812 bp, Zea mays
  Clone ID: MRT4577_109705C.1
cattggtacctcgaggccggcgggatctggcagcagaagaacagtagttgagaactaagaaggagaaggaaatggcttcctcaatgatctcttccccagctgttaccactgtcaaccgtgccggtgccggcatggttgctccattcactggcctcaagtccatggctggcttccccaccaggaagaccaacaatgacattacctccattgctagcaacggtggaagagtacaatgcatgcaggtgtggccaccaattggcaagaagaagttcgagactctttcctacctgccagacctcgatgatgcacaattggcaaaggaagtagaataccttcttaggaagggatggattccttgcttggaattcgagttggagcacggtttcgtgtaccgtgagcacaacaggtcaccaggatactacgatggacgctactggaccatgtggaagctgcctatgtttggttgcactgatgcttctcaggtgttgaaggagcttcaagaggctaagactgcataccccaacggcttcatccgtatcatcggattcgacaacgttcgccaagtgcagtgcatcagcttcatcgcctacaagcccccaggcttctaagtgtgaaaaatttgcaaagcatttgtagccgccaccccactttgtttgtttgtacttaaactacattcccatttgtttttgctttttgagatttcatcatcctgtatttttggtttctgttttcggacttcaatggaaattaatggatgagaactaatgaataagctattgtgttgtgctaaaaaaaaaaaaaaaaaagcggcc

SEQ ID NO: 10641 - DNA, 497 bp, Zea mays
  Clone ID: MRT4577_109706C.1
ggtggtgatgtggacggagggtgggtgctagagaaaactattcgactggacagcctcctgtcgctgccacgtcgtagcagcagcacgatggacgacggcatcttgttgtcagcgaggatactggggtttgatgaggataacaacgtcattcacgtatccacctgcaccggcgccttcgcgatccggcttgtcgactccatgcagttcacggaactcttcgaggtcagccggattggttcgtaccattcctgtcatccctacgctggtttctataccggaggaggtgtgcctggtcttttaacaaattccaactatatatgttcagaatagatagataatattgttcatgtgctacgcttatataatgcggttcgtagcaagattcaggagtaataagcattttcgcaaacaactgtatttactgccaggacatataaattgattctgaatatatggaggttgcaagctcggtttggtcgacaaaaaaaaaaaaaaaa

SEQ ID NO: 10642 - DNA, 110 bp, Zea mays
  Clone ID: MRT4577_109707C.1
ccacgcgataagcggacgcgtgggcagacgcgttggctgaagtgtgggttgaggcgtggtcggtgaaggggtacatgatttggatagatttagccatgtaatcatcgatt

SEQ ID NO: 10643 - DNA, 531 bp, Zea mays
  Clone ID: MRT4577_109708C.1
cattgggtacctcccggccggtcgtgatcgtctatcaaacacaaccgccaaaatgacgaagcgcacaaagaaggtcggcatcaccggaaagtacggtacccgttacggtgcctctctccgtaagcaggtcaagaagatggagatcgcacaacacgcccgctacgtctgtcagttctgcggaaagaactctgtcaagcgcgagtccgttggtatctggcactgccgatcgtgccgcaagaccactgccggaggagcctacaccgtctctactcccgctgccgccgccacaaggtcaacgatccgccgtctccgagagattgctgaggtttaagggaacattgggcactagggtggagttcttcgagcgttttctctgcatcggcaatcatggtccgatgacattgctcaaatgcagcattcggatgccgatctcataacgatcatgggtttatcaggaattcatacaaaacaatggcaccttcatgaccaagcagaccactgcgcgacaaaaaaaaaaaaaaaaaagcggcc

SEQ ID NO: 10644 - DNA, 458 bp, Zea mays
  Clone ID: MRT4577_109709C.1
ggccaacgaaaatcctacctcacaataaaagggggttttatatctacagaaaatatactactaaaaaccttgggtttatgtttttttttttacacaattttttagctagcataaagggggcatgttacttaaagggggcttaaaaagatagggaaaaagggcctaggaaggacttcatcatctactatatgtatagggggatagaaagggggataatccattcatccccgccttcctcttgaagggatagggagctgggggccccatggggtagtagtactttagtagtacatgagctggtggtggtggtgggcggaaattgtgccggggacagtattgatgccctggaagcccccatcaaaaatggactgggtgggtccgccgccaatccccaatgcagggacctgtttaaaggggggctgacccattaggggtgggggggtcgaggccattttgct

SEQ ID NO: 10645 - DNA, 350 bp, Zea mays
  Clone ID: MRT4577_10970C.1
attcgatcgttccggctcatcatcctagtctgggagttcgctgatgtcgccgacaccgagcctgacactgtgcaggtaatagatgcccctccgctccgtatcgtgctgaaaggtggcgccaccgccacgaggatcactgtgtcgatcgttgcatggacaacacgtgttacggacacgtacaactggtgtgtacctttgcactaccttctcatggatcacgatacacactgggcgggacggagctttacgctgacctgatgcgcgaggcgtacccccagctttaaccttctccaggcatggcacgtgtatagcactaggacatgcgttgtctcccgcaatctcaatgcagc

SEQ ID NO: 10646 - DNA, 1286 bp, Zea mays
  Clone ID: MRT4577_109710C.1
gggggccggcaggtgcagatgtccgaggccgagatccgccagctctgcgtcgaggccaaacaggtgctgctttcgcagcccaacctcctccgcatccacgcgcccgtcaagatctgcggtgatatccatggacaatttgttgatctcttgaggctctttgatttgggtggttatcctccaacttcaacttatattttccttggagactatgtggatagaggcaaacaaagcttagaaaccatgtctgcttctggcatacaagttgaagtaccctgataatatataccttttaaggggaaaccatgaagatgcaaaaattaacagagtttatggtttctatgatgaatgtaaaaggagattcaatgttcgactatggaagatattctgtgattgcttcaactgcttgcctatggcagcacttattgatgacaaaatattatgcatgcatggtggcctctcacctgaattgactagcttggatcaaataaaagatattgagaggcctaccgaaattccagactatggtcttctgtgcgatctcctttggtctgatcccagtcatgatacagaaggttggggggagagtgatagaggtgtttcttgcacttttggcgcagataagcttgttgaatttttggagaagaatgatcttgaccttgtgtgcagagctcatcaggtggtagaagatggctacgagttctttgcagagagaagactagtgaccatcttttcagctccaaactactgtggcgaatttgataatgcaggtgctctattgagcatagatgaaagcttgatgtgttcttttcagatcttgaaaccaaatgaaacaggtgcaccacattcaaggaaacctcttccaagcaaggcaccaaaaggagagaacgtctaatttgtatccagtgacctaatcacaatcgatgtcagctcgaagggggcgatctcgttgtctcggatccaccagggcatggcattagcgttctacacttgctgaatttgtgtggactcaatcggcagcgcttacattcttctgtacagcagcagtgtttctaacttggcatatcgtccgttctgatagtgacattgccacagctgcaatattttagtcgggtggacaaggcattttgttgggtacagtagctgttgttttgttagcctttttttggtaatgtttgtttggttgattgaacgctgtgagttttgtttgccgcgtatcttcgtcaggctcgggtatttacatcctgcaactgtgtaaatgattttgtctaacgaatgtctgttgacat

SEQ ID NO: 10647 - DNA, 319 bp, Zea mays
  Clone ID: MRT4577_109711C.1
tcgtacagtttcttccaccaggtacttcaatgggcttcggggacccagctgtacaagcctataagctacaacaagctatttgtgcgagcgttttacaacaaccaattttccatgtgcaacagcaatccttgtctcatttaacaatacaaaccattgctatcgcaacagcaacaacaattccttaccagactgagccacctagccaaggtgaaccctgccgtctacttgcaacatcagatgcttgcttcaaacccaattgctctgtcaaacgttattgcaaaccatacattacatcaaatgcaacagtttctgccatctc

SEQ ID NO: 10648 - DNA, 218 bp, Zea mays
  Clone ID: MRT4577_109712C.1
tgcacgcgtgcggagacgtgtgctcaaagctacacagatccagtgtttcacccggggtggagctacaaggagaaacggacaacgctttcgtccggtcatggtggctgcacgccggctctccctgcccctcgtactgctgggcgtcctggccgtcggcgggcgcgcggcggcgcaagactactacttgttttacctcgtgctgcagtggccggtggcct

SEQ ID NO: 10649 - DNA, 400 bp, Zea mays
  Clone ID: MRT4577_109713C.1
gggtggggggggggtttaccatttctaataatactacaaactgttaaaaagggtaaacataacatatatgtggggggaaaccctcttaaacaagaggggtgtgccgtgacaaaaaaatcaaaggccaggggcccccctttttcccgtgtaacaaaagtagggataaaattaaaaagtttcttgaaaaaccactcttattggacccccggggccctgattttaccacaaaaaaactaaatctaatgcacctgaacccccgagaggttgccctccagtttgtatccccttgggggggtaaaaaaaaaaaactggaatttttaaccctttgggattgggcagggtaaaaaaaggcccccggtcccaataccattcccgaagagggggaaaaaaaaattttggg

SEQ ID NO: 10650 - DNA, 600 bp, Zea mays
  Clone ID: MRT4577_109714C.1
cttattttctcatatacactttcctgtgcagactgctaagacagtatacgaatctcttctaggtgaaaatgctagtgagacctcacttgcaaatattcagtttattcgatttctaaggagaactgaaggcactgaagcagcccgtggcacaaagtgtttttgaagcaggtttaaagaggtttatgcatgagccaggatatatccttgaatacacagacttcttgtgtcgtttaaatgacgatagaaatgtacgtgctttgtttgagagggcactgagcttacttcctcccgaggaatccacagaggtatggagacgatttgcacaatttgaacagaactatggggatttatcaagcatagcttaaggttgaacaaagaaggaaagaggctctatctaggacatctgaagatgccttatctgcatcggaaaacacacttcatgacatagtttctcgatacagttacatggatctttggccatgctcatcaaaagaattggattatctagcgagacaagagtggcttgcgaaaaacattgttaagaaggttgagacaccagctatgttaaatagcggtagcatgctagacaaaggtgctgca

SEQ ID NO: 10651 - DNA, 323 bp, Zea mays
  Clone ID: MRT4577_109715C.1
gataaatataaatagtgccctatcataatttgatatgatctttaaattttatagtttaaaatatattgctcattagactgtctttagtaaattgtgtaaaacagagggtgtgaaactgtatatgtattgtttgtaaaatgaagttttaaaatatagaataaaaaaaaaaaaaaaaaaaaaaaaaaaaaaaaaaaaaaaaaaaaaaaaaaaaaaaaaaaaaaaaaaaaaaaaaaaaaaaaaaaaaaaaaagccgccccccgccccccactttttgtccccttaagggagggtaaatccccccctggcccaaaccagggccaaac

SEQ ID NO: 10652 - DNA, 313 bp, Zea mays
  Clone ID: MRT4577_109716C.1
ccttccacgatctaaatctcggatgggcaacttcatcgaacagtggggacgtacttggagatccaagaagctatgatatcttagccaactttgcatccgaacatgcttgatatgtcaactgagactatgctagcactatcctgatgaagaatgtctcaagcggatgttactacaactgcgtgactgctaaatgatgagcattgtacaatgctcctgtacatcgatctcaatgccttcaatctgcaggtgcatactggcctaaacaaacaccttctccttaacagagggattcagtatgacaatattgttagct

SEQ ID NO: 10653 - DNA, 337 bp, Zea mays
  Clone ID: MRT4577_109717C.1
atttttcttcccccaaagaccaataaaaggagaggctactttatcactgggggggacatacttctcaatcaaaaactaaagcccactaatgaaaacaaatcttctcaatgtctcccaaaaataaaccgataactgcgcataactgaaatatacacaaaaaattaaaacataacagttacaagattgtacaaatttggaactacaatgtacctttacttaacaacgcatgcaaggatgcttatccaccaaaccaataaagtaactcatataaagattaaaacattcagttacaacttgaggttttttcaacagggaaaaaaaggaaaccaaattttat

SEQ ID NO: 10654 - DNA, 967 bp, Zea mays
  Clone ID: MRT4577_109718C.1
atttcagcgagctctaaaagaatccatgattctgaagtacttaagtatgcctttgctgaaatggaagagtccagaggggcgatacagactgctaagacagtatacgaatctcttctaggtgaaaatgctagtgagacctcacttgcaaatattcagtttattcgatttctaaggagaactgaaggcactgaagcagcccgtaagtactttttggatgctcggaagtcaccaagctgcacttatcatttgtatgttgcttatgctacaatggcattctgcgttgacaaggatgcaaaggtggcacaaagtgtttttgaagcaggtttaaagaggtttatgcatgagccaggatatatccttgaatacacagacttcttgtgtcgtttaaatgacgatagaaatgtacgtgctctgtttgagagggcactgagcttacttcctcccgaggaatccacagaggtatggagacgatttgcacaatttgaacagaactatggggatttatcaagcatgcttaaggttgaacaaagaaggaaagaggctctatctaggacatctgaagatgccttatctgcatcggaaaacacacttcatgacatagtttctcgatacagttacatggatctttggccatgctcatcaaaagaattggattatctagcgagacaagagtggcttgcgaaaaacattgttaagaaggttgagaaaccagctatgttaaatagcggtagcatgctagacaaaggtgctgcaggatttagtgcgagtgcgaggttattaccacaatctgccaaagttgttcgtcctgagacttctcaaatggttatttatgatccaagacagatgaaaggcccagagtttgcagcaactagcagtgggtacacgaaggaggttgaagccacgctcaaagtgctatcgccgtcgatggtgtcctttattaagaatttgcctgctattgaaggaccat

SEQ ID NO: 10655 - DNA, 371 bp, Zea mays
  Clone ID: MRT4577_109719C.1
acgcgcggtttctaactcgaagcttgcgttcttgcagctgaggtcgctatcacgcggtcgaccgcgaggccgagactaggaagagcagcactctgttggcgatcctagttctccaggcccttctggtctatacggccgcggacaaaggacctgcaaggccgaagaagcagcgctgcatctgcgagcgcaccatctggtcgggcgtgcagacctgcgacgacctcctcaccaagtgcgccgtcacctgcaagaactgcctactcgtctgcatagacaagggcgcgaccaattacagatgcctgaacttccttgccgaaaactgcggctgcatgatccactagactcatacacagtggcacagcctatggatc

SEQ ID NO: 10656 - DNA, 376 bp, Zea mays
  Clone ID: MRT4577_10971C.1
gtttggacactcctagctaatagttagctgcattaggtgggtggagccaactaatagctttttataagctgggtggttggatagttcagtctgctattagctgggttgttcgggtcagctagagcttttcttaatttagttttgaaaggttgtacctttttgggggaatggattgtaaattttgggttttgggggtcaattaaagtgtttggtcatttactggctgaaatcttcacatcttcaacttttggatttgggtattccattctagtgggtttgcaaaagcacttgacttctactttggatatattggtttggagcgatggtaccagaatggaatttgtgaagatcttataactaactatcttttttacac

SEQ ID NO: 10657 - DNA, 138 bp, Zea mays
  Clone ID: MRT4577_109720C.1
ctggtgaaaacaaacaggaatttttattcgacaattccaattcgtcgtatttaacatctatctgactcgcaccatgttcgaatgaaaccttctatccgttggaggagcatggggaggcctatccttgcgagcatggtg

SEQ ID NO: 10658 - DNA, 425 bp, Zea mays
  Clone ID: MRT4577_109721C.1
aaaaaaataaaagaaccttttttttttgaaaaaaaaaaccctgggtttaaaaagttcaggggcgggggggaaatcccaagttaaccgggggaacaaaatttattttaccagtttttccggggggaatacagggaaaccccttgccacgtccaaaaagagggagcttttaattccgtttttttgccctaaaaacggggggggaaatccttaagggcccccggtttttttgaaaaggggttgatcccacccttccgttttgctttagcagttgggacaagtttttcaccaattaacttatgcaaaaccttttttggaaaaagggattttacaaattcctgcaggttctgggggagccttttaagttttgaagagggaccaaaagggtttgattcaattggctcaggcaactaaaggggtttttttag

SEQ ID NO: 10659 - DNA, 774 bp, Zea mays
  Clone ID: MRT4577_109722C.1
ccggccgggcccatcccgccggaggtcttcctgaagccctacgacgccatcttcctcaacaacaaccgcttcacttctggtattccggagaccgtcggcaagacaaaggcatcggtgatcgtcctcgccaacaaccagctgggcggctgcatcccccgaagcatcggcgaggccaccaccacgcttgaccagttcatcttcaccaacaacagcctcgttggatgcctgcctgttgagacggggctcctcaccaacgtcacggtgttcgacgtgagcgacaacgctctcacaggttccatcccgccgacgctggccgggctatccaaggtcgagcagctggatctgtcgcataacatgtttaccggggatgtgcccagtcacgtctgcaagctgccggcattggcgaacctgtcggtctcatacaacttcttcacacgcgaggcctccgagtgcagcagcacagcggacgagaacatggacggaacgtcctttgatgacgatgccaactgcttgggacaatccaggcccatgcagaggggtgcagatgagtgcacaccagtcgtgagcaaacctgtagactgcaccaaagtccaaccaatgtgggtggccatcaccgccagcggtgagctcgccaccacttctctcttcaccaccgccggtggcatcatcaccaccacctagatcatcaccgccgccgccaccgattatcatcccaccagtacggggaaccaagtaccagtcgccgccaccaccgcttttcccagctactaaaaa

SEQ ID NO: 10660 - DNA, 293 bp, Zea mays
  Clone ID: MRT4577_109723C.1
caacaaatgcgttcattattccacagtgctcacttgttgcgctcactaaaagggcaagaagcgcaaggagggctaatatattggtagccattggtgttaggaagataatagagcgcttattgccatttgagggagcgcaagacatgcgctaatgagtatacagagcgcattagctactcgtgccaatattaaagctataggtacacggacatgggaatatgggcacccatcattccgtcacattaggggttaagcatgacgtggcccatcaagcgaggaaaatgtgaaacaaa

SEQ ID NO: 10661 - DNA, 586 bp, Zea mays
  Clone ID: MRT4577_109724C.1
gggtcgacccagcgttctttaggcgacgccgcccagcgcgggctgacgggggggggcggcaacttcacgtcctgctccaagacatcagcgctgccgccggcagcgcggagcgtggccggctggtgttcgtggggaaacacgcgcacctccggtacagcttcgacctggaggacctgctgcgcgcgtccgggggggggcgcgggaagggcggccttggcacgtcctacaaggcggtgctggaggacggcgccaccgtggttgtcaagcgcctgcgtgacgtggcggcggcgcggcgagaatttggcgcctgcgtggaggccgcggccggagccgccgaggggcaccgcaacctggtgccgctgcgcgggtactactactccaaggacgagaaactgctcgtcctcgactaccttcccggcggcagcctctccgcccgcctccacgggagccgcggcaccgggcggacggccatggactgggacgcgcgggtgcgtgccgcgctgtgcgccgcgcgcggcgtggcacacctgcacacggcgcacggcctggcgcacggcgacgtcaagtcgtcgaacctgctgctccg

SEQ ID NO: 10662 - DNA, 552 bp, Zea mays
  Clone ID: MRT4577_109725C.1
ccggccgggattccttcaatggcgcatcccttccttcgatggcgctcctcgcatcccgcctgcccgccgcgctcgattcctccttccttcaatggcgcatcccgcccgcagccaccaatcaacgcccgcggatcctcgtcaatcaactcccgcggatcctccaccctcctccccaccgcggcggatcctccaccctcctcgtcaatcaacgcctgtggtcctcccccacgcggatcctcgcaccacccactcccccgcgtgcgtccctggcccctcgagctcgcgcaggccagaggaccgcgctcgcccccctgaagattactccctccccaaggagctggcggcggcgtgactgtgtcgggagaaggaggccgtagaggacgctgcgcgggggctgcggcaggagctcgactccgagcggtcctccccggagatggcagccagatctgaccattgagccccctaatcgagcggatccaaggtctgtgcgctgggcctgaaggcggacgcgcttgctcatcaaccgcgtgcggtcgagtgctagagccaccg

SEQ ID NO: 10663 - DNA, 153 bp, Zea mays
  unsure (1)..(153): unsure at all n locations
  Clone ID: MRT4577_109726C.1
attcgctaatatctgcgaccaacaaaatatncacgggcgttttttataatccgcagcgcccacaacactcaacttaactttaactccttccacacatacaaataccatccgacctctgcacataaattaacaccccgcaacacacatctccac

SEQ ID NO: 10664 - DNA, 244 bp, Zea mays
  Clone ID: MRT4577_109727C.1
gcgctgcgcggggtcgcgccggggggcgcgcggctgcgctacgcgttcgtcgcctcgctccgccgcctcgagccgcgcgtggtcaccggcgtggaggaggacgccgacctcgtggcggcgtccgaaccgtcgtcgtcgtcggccggggaagccgacgcggatgcggcgttcatgaaggtgttcaccgagggcctccgcttcttctcggcgtacatggactccctcgaggagagcttccccaagg

SEQ ID NO: 10665 - DNA, 460 bp, Zea mays
  Clone ID: MRT4577_109728C.1
ggccctaggggcctttttttttttttttttttccttttttttttttttttttttttttttttttttttttttttttttttttttttttttttttttttattttttttttccccaaataaaaccctccaaaaaaaattggtttggcccccaaatccccaaatttttaattcctccgggaacagttggcaccaaaaacggatgaagacaaatccgttttcctttttcctaaaaaaaaaggcccatgggaagcaaaaaaaaacctaagggggaaaaaacaggggctcctggttaggcacaccttccctgggaagcccaatagcccccaaaggggggggggggttaagtcttcctacccctctttttctttggaaagttttatgatgccccaaacccctaaaaaaaaaaaggcaacccccggggaaaagagaaggttttttacttgggggcccaaaggttaaaa

SEQ ID NO: 10666 - DNA, 235 bp, Zea mays
  Clone ID: MRT4577_109729C.1
atcagagccggccgggacggcatactccccacccccacctgctactacaccccagagcggcatccatggcagaaggagtttatccttgctggacgccaatacagacgactaccacttggagctgacaaaagccggaggctatagcttagaatgcagcctctatgttcctgtttatatcccagagaagactgccctcccatgtgggccctactgccatggaaatagagtatggcga

SEQ ID NO: 10667 - DNA, 678 bp, Zea mays
  unsure (1)..(678): unsure at all n locations
  Clone ID: MRT4577_10972C.1
aattcggcacgagggcggaacggacggagtgggtgcaaatcggattagacggccacgtcccccccgagcctcaccaatcgccggccctccgcaggcagggaagggcggttgggcggccggccggccggagatctgattgctcttatcttctcccctcccgttcatccaatctgctgtcaccatatctgatctccctctccccctgattgcccgcggtggccattgcctcgctcgcgtctccttcgccgcgcttctaggaagattcggcggcgtgcccatttgtcggtcgtagccttaaccagttcttccccaactccgagctccttccttgcttgggagcagctgcacacacatccgcccaggatattagttagcgtggaggatggcgtccagggacttcctccgcgtcttcggcgccggtgagggggcgggcccgccgggggacgccggcgccggccagcccgacgacgacgagctcagcctcggcctctccctgggcggccgcttcggcaccgacgccaagcgcccgcgcctggcgcgctcctcctccatcgcctccgtctgctccgtctcctctctccacgccgacccgtccccgccgcgccgcttgcgctgctgcgcccccctcgctgccccccgggcccggggggggcgctggcgccgccccngatgccgtgc

SEQ ID NO: 10668 - DNA, 347 bp, Zea mays
  Clone ID: MRT4577_109730C.1
cccacgcgtccgcggacgcgtgggtcatcctatgctcacgcatctccgtcgccccgccaccatcctctcccctctcctccgccgcaacatgtccgtctacaaggtcgtctccacctcgtccgcgccctcggctatcggtccttactcgcaggccgtggtgcacaacggcctcgcctactcgagcggctcgattggctttgagccgtcgacgatgcaaattgtcgagggcggcgtcgaggcgcagacgcgccaggcgctcaagaacctcaaggctgtcgttgaggcggccggtgcaagcacggccagtgtgctgaagacgaccgtgttcctgaaggacatgggggact

SEQ ID NO: 10669 - DNA, 1579 bp, Zea mays
  unsure (1)..(1579): unsure at all n locations
  Clone ID: MRT4577_109731C.1
cctcgaggccggccgggaccttcgcaagtttgcgcctaaaccctagctcgcttccaatggcgccgaagaagcgcaaggccgatcccgccgagtccgccgacgctgcggaggcagccgccggcaaccaccgccaggagccagcgccctcggagcccaagccccgcgccaccatctacttccccatcaccgacgacccgccggagcccgccgccgaggaggacgaggaggatggcgctggcgaagacgaggacgacgtggaggacatcggcaagctgctcgagccactgtcgcgggagcagctcgtcgcgctgctccgcacggcggcggagacgagccccgctacgatggcggccgtgcgccgcgccgtggagtcggaccccgccagcaggaagctctttgtccacggcctcggctggggcgccagcgccgaggacctccgctccgccttctcatgcttcggcgagctcgaggactgccgcgtcatctctgacaagcagtccggcagatccaagggctatgggttcgtcctcttccgctcccgccgctctgcactccgcgccctcagccgcccccagctccaaatcgggggccgtcttgctttctgccacctcgccgcctcaggccccgcgcccccagcttctcagtctcagaaccctagctccaacacaaacaccaatgccaactctaactccaataccaccaccaatgcttctggctcatcatcgtcgcaacctgacaatatgccgcgcaagatatttgttggtaatgtgcatgctgatgtggacgtggaccgcctatataactattttgcacaatttggtgagattgaagagggtccgtttggctttgacaagaacactggcaaaccaaaaggattcgcattgtttgtttacaagtctgtggagagtgctcgccgtgctttggaggagccaatgaagaattttgatggcaagacgctaaatgtgcagaaagccatagatgggaggaccaagggctcatctggaacgaatacaaatgctaactccaatcccactactgcatctgtggctgctgctgcagctgctgcgcagatgactgctcctgccactgccgccattagcccatatgatgcatcggcatatggtgccactgcggttcctgacatgagttttgcacaacaagccgctatgctgggatttggtgcacagcaacaggcattcgctcaacccaatgcaatgcttgccatgatagcggcaatgcagaacccagctgcactagggatgacaccagccatgtttgctgctatgaacccagccttcgccgctgctgctttaggtgcaggcgggcagcaggcacagacagctggtcttacgggctttggagctcagggatttgggacgcaagcatttggagctggaggtgcagctttcccaaacgcagccggtgttcaagcagcaacagctggcatatcaaggaggtggggctcctccctggttttcaagggccacctggnnatttcaggttggccaagcaactacccagacaagcactgcagtggcagcagctggttatcaggctgngnccagctgggcagggccag

SEQ ID NO: 10670 - DNA, 385 bp, Zea mays
  Clone ID: MRT4577_109732C.1
ctgtgccagtatagataagcttttccagctatgaatcaaggggggtcagaggtgtatggttgtcgcaatacaacaatgtctctatacatcatctcaacctatggagatttgtctctttctcaagcacttgatgactttaacaatgaccctttgcattgggatcgacagatcaagggtgggatggttaggggttcgttgcggccatagccttcattgcaaggcttattcctccataaggaagctgtgaactgggcatctgctagagaaccacatgacctacatgaggcaccaactcctgaaattaagggtacaagtatcttatttttaaaggagggagagcaaggatctgtagccttgagaccccatacagatagatgcacaatat

SEQ ID NO: 10671 - DNA, 451 bp, Zea mays
  Clone ID: MRT4577_109733C.1
gaattcccggctcgacccacgcgtacgcccacgcgtccgcccacgcgtccgctctgtcactgacgatggttgaacgtcggatcgtttttttgagaagaacctatttggagctggaacagagacgacctcgaccaccgtcgaatgggccatgtcgctgctgctgaacaatccagggacactcgagaaggcacgagaagagatcgacgccgccgtggggcactcccgcttgctcaacgcgggcgacctgccgcgtctcggctacctcaggtgcatcatcgccgagacgctgcgcctgtaccccgccgcgccgctgctgctcccgcacgagtcgtcggcagactgcaaggtcggcggctacgacgtcccgcccggcacggcgctgctggtgaacgtgtacgcgatccacagggacccggctgtgtgggaggagccgggcaggttcgtgccggag

SEQ ID NO: 10672 - DNA, 394 bp, Zea mays
  Clone ID: MRT4577_109734C.1
cacgatggagcttttccacctccccttcgccctcctcttggtaggcaacagacagagatttcgccgccctcgtcggagaaggcgaacacggacgtccgcacatccacctggacatgcacgagacgtacaccgtatctaacaacacggcgcgcagccgcgctgcagaccccactgtagagccaactcgaccttcgggagcatgattcgcgtcgaacgaccagatacgcgtgggaccggaccggacatctcagctcgccggccggaaccctggagtcttcttcgccacgagcgcgacgctgcgcgcctgatacctgtcgtccatcacgctggaggtcaccgccggcgagtacaacgtgagcaccctgtccgcgccggggcccctgataggatacac

SEQ ID NO: 10673 - DNA, 1777 bp, Zea mays
  Clone ID: MRT4577_109735C.1
tcaccttccaactaacctgtttcaatttgtattgggagccttgccgtgccggaatattcccctccggcagcctccctggcttcctccccgcgccgccccgccaaccaaacccaacggtggcaccacctcttccttcctcctcctttccttccgcgacaggagaccccctcgcccccgaattaattgcagctgaaggaacccaaggcggcatccatcgatgatgatgctcaccaaggagttcgccctatcgccgccgccaggtgtcgtgccgcgccggaggccgtcggcgagggtcgcacccaccgccgctcgagggggttcgccggtgcccgacctatggctgcggaccgccgcccccgtccccgcttccgccgccgccggcttcgccagcagccacagccacgacggcgactgcgacctggccatgctcgtcaccgacttcctcgagaacggggccaccgccggttccggagactcccgcaatagcagcgacagtgaatccggtctccctgacctcgcccacctcgcggacacgatctcgatgttgaagcagggtggagacgagaaagaaaacgagctgctcgccatggtccactcgctactcctctctatccatgagccgcagcttcagcctttcaaaacaggccaatgtggaggcagctgcatccgccatttgcttgtcaagctcttgagatactcgggaaacgacgcagcagtttgcacatccaaatggcaggggtttgacaagatacctggaggtgactacgagtacattgatgtcataatgcacggtgatactacagctccagagcgtctaatcgttgatatcgacttcagaagccactttgaaattgccagggcagttgattcttatggcaccctgttgaattcgctcccagtggtctttgttggcacccttccgcgactgaagcagttcctgcatgtgatggtagatgctgcaaaatggtccctgaagcaaaactcaatgccccttcctccctggagatccttgccttacctccaagcgaaatggcagtccaagtatgagaggaaagattccattaccgagggaggcttccagagcacatcttctgatcacgcgctgtgcattgggcacctgaagaggctgaaaacgtccctgcagttagagcttgagaccgcaggattactgatgatgccaatcaaggccaacaagaagaggatgccaaagtcatctgagaggcggaggcggcgttcccttctcagctgttgatttatgttccttggacacataagaatactataaaggagaaggaacaacagcttgctgctggctatttttgtttcctcagaaaatggagaaatgagaggcttttttcatccgtccaatacataatggtggagactcttcttacaggtttggagtttacagattaggtaaaacagaaggtggatactaacaggccatgttagtgccagttttttttttccttttccctttttgaaggcacataagaaaaggacgaagaaaatagtttttttttgtttgttttagtttttgcttctttccggcagagatggatatgctagtggtgaatctgctgcactgcatatgccacgtacaagtgagagttagtattacaaaatcaaactttccccgctatatattgatttttttggtgacccattttggtactccagaaactgatagacacgattgattgccgcattgtaaccgtagaatgcacaagttgggtgatacgcttattgaagttgaagaatattcgttgttcgtttg

SEQ ID NO: 10674 - DNA, 543 bp, Zea mays
  unsure (1)..(543): unsure at all n locations
  Clone ID: MRT4577_109736C.1
cggacgtttgggcggcgccgcaatcgcgggcatcgtcgtgggcgccgtggtggtggtgctcctcctcctcatcgccgtcgtgctctgcgcggtgtccaaacgtcggagcgccggcgcccgtgaggggcccaaggccgcgacgtccgcggcggcaggttcgggagcggccagggggggggcgccgccagcctccggcgagggacgctgtatcacgtcttcagacaaagaggcccctaagtgccacccggccagatattacgaggcccaagtggacataggctcaaacaaaataagagggaatggagtaaatgacccgtcaccgggctctgaccaagaccacagatgcgacatggcctacagcttgtcagattccctgctaataaagacaacaactgcaccaccaactccaaagccaggcgcaccggtgccaggttatcaaaaccatggatcagaatcaacaagacaagatgaacattaagccgcggtctacgaaaaacaaggaacctcaactggagctatcaaatcaggctggcgtcnctacag

SEQ ID NO: 10675 - DNA, 957 bp, Zea mays
  Clone ID: MRT4577_109737C.1
cctgggacagatcgccgagtcgcggcggctcgggcaaacttcccacgctcgtctcgctgtcgtcttcgtttggattcttcggccgcctgctcccgtccttcttggactactactccgcgaagagcggctactccatctcaaggacgggatccatggcgtcgctgatggcgcccatgtccggcgccttcctcctgctcctcaacccgagccacttcttcctgtacctgagcacggccgtgatcggcacgtgcacgggcgccatcacgtcggtggccgtgtcggcgacgagcgagctgttcggggccaagaacttcggcgtgaaccacaacgtggtggtgagcaacatccccgtgggctccctctgcttcggctactccgccgcctacctctaccagcgcggggcgcggggcggcggccaccactgcgttggcgccgcatgctaccgggagacgttcgtcgtgtggggcgccacgtgcgccgtcggcacgctgctctgcgccgtcctctacgcgcggtcgcgccgggaggctaccgggaccgccgccggatgatggagaagtaaggacgtcacgtttcgcccgcttagctaattgcctgccgtcatcgaggtacggtaggtggtactagctagctagcacgcaggctagctccagaagtttgtcatctgagggccggcctgcgattaatcggtcatacaccgtacccatcaatcggccaagcatcatctgcctgtaggcgatgtgtaacttttgatccttgttttttttttcactcttcgagtttctcttgactgatcccggtggaagggggtacagaaaaaaaaaaatccttggtggaggctcatcatgacatgagtagatattgtgcagcaggttagccacctttttaatttgttattagtgcatatagtagtatatatatacatatatgcaatatatatgggtggtacatgcactt

SEQ ID NO: 10676 - DNA, 1951 bp, Zea mays
  Clone ID: MRT4577_109738C.1
cattgggtacctcgagggcggccggggaagtggttcacccaccccctcttatctccttcccccagccgccctccgcctccgcgccatcgacacgctcgagagcgtcgctgcctgctgctcgcgcggctacacgcaagtaataaacatcatatggcgctagtacagttcaacggtgccttggttcctcaactcggtgaaaagcctcggctgctatcctcatcacctgcaatcgcaaaggctacctattctgatgcaagattcctgacaccaaaaactggttcaagaggtagaggtaaacaacttctatcacctagttatagtttgcattcacagacctcttctgaacaactaaaccatgtaccatcgtcaagatttcgccagaaaaggggttcacgttttatcgtcagagctgaagctgatttctatagtgtacttggtgtctcaagaaatgctagtaaatctgaaatcaagagcgcctatcggaagcttgctaggagctatcatccagatgtaaacaaagatcctggtgctgaacaaaagttcaaggatatcagtaatgcttatgaggttctgtctgatgatgagaagcgatcgatctatgataaatatggagaagcaggtctgaagggtgctggcatgggcacaggagattactcaaacccgtttgatctctttgagtccctgtttgaagggtttggtggaatgggtggaatggggggtggccgtgctgctcggaacagaccaatgcaaggtgatgatgagagctacaatctggtactcaatttcaaggaagctgtgtttggtgtggagaaggagattgagataaccagattggaaggctgtaacacctgcgacggaagtggtgccaagccaggtacaaaggcaacgacatgtaaaacttgtggaggtcagggccaggtagtctcctccacaagaacaccgcttggaatattccagcaagtctccacctgcaatacttgtggtggcaccggtgaattctccactccttgcaacacctgtgggggtgatggccgggtgcgaaggacaaagaggatcagcctaaaggttcctgctggagtggattctggaagcaggctgagggtccggtctgagggtaatgctggccggcgaggaggccctcctggggacctttatgtcttcattgatgttctctctgatcctgttcttaagcgagatgggacaaacattctctacacatgcaaggtttcttacattgatgcaatccttgggacaaccgtcaaagtccccactgttgacggaacggttgaccttaagataccctcagggactcagccaggcacaactctggtgatgtccaagaaaggtgtcccgcttctcgggaagtcaaatgcccgtggagaccagctggtgcgtgtccaggttgagattccgaagcgtctgagcagcgacgagaagaagctaattgaggagcttgcaaacctgaacaaggctcaaacagccaatagcaggagatgattgatcgcacaaggcttcgtaggacagcgtgcttgtgtggtaggcaattttgatgcaaactgcagtgatgattggatgaaaagagttggtagtgataaactcttctacgaactacatacagcaaggggtacactggagcaaaaaatgtgtcgttcccacatctgtaacctcgtttttaagctattgaaagttgagtcagtgaactggacgtttttgcaatagcttagcatatgcactaggcgactttattagccatttttttttgttgttatacggcttttgtattcttggaagccttaggcaaaatatctgatggtggaatcaggtttagacttgacatttcttgcacaaatgctgcaccatgcattcatggaatctgtaagctgtaccatggaaatgttaactgtagttttatggtttgtgaaaaagaaaaaaaaaaaaaaaaaaagcggcc

SEQ ID NO: 10677 - DNA, 2056 bp, Zea mays
  Clone ID: MRT4577_109739C.1
agcaaaaaatttgaaaggggcaaacatccttccaagctgcactgtttcacttaagtatacaccaatgtaccaagatccagtttagacttgacgagaacagctaaaacaccaggcatgaaaatatctacattgattgcggaaaaagtatggggaaaaggtttccaggtgccagtgttccctcagatgtgaacaagatgtcaagatgtactaaaggaaaataaaccatcgcaaggaacattaaggcacaaccattccattctattgagaattattcagatctgatggcagatgctctggagccaatgagctccaaaaactttgaacaagacttttccaatgcaaagcacagttagtttggagggatcaatcttctgggattcgccatcttctcaaagccttctcaagtgtctcagctcgttcatggacatgtgctgcttcatcttccacccaagttcttaacatagtaagagcttccttctcagcttcaagatatgatttagcttcattgacagcttgatgcttgctggtcatgtcagacaactggttttcctaaagtgtgctgatcagccagtgtaactcttcgtttctcagttgccaatctatcgtacatgccgtcaatttctaaccttaaatttatgagttcctggttgactggcattctagagctgctctttctttcaacaagtctgctagttcctcttctctgtctgtcctctcatttgcaagctcatgcaacacatgttgaagattattgtcaacttcaagagcccgttcttgctcctttttcatcttttgctcccattgttgttgtatatctcccctactaattaactcttccattatttcagctataagagaaagatgggcttggttttctgcttcaagtttattcaattcttcatgaactgcttccttcattcggccactagtcagtgcagcagctgcttgcgctttagttacaggtttgcccggttgaaggcgtctagtatttccaacattttcgtctattctcaatgcgcgtggatgctcaacaagcactttccagttgacaagatcgaaacgagagaggtaactatcaggtaggaacaaggtatttccctgggaacaaggagagccacttgttaatatttccaaggagtttgataacttgctggatacgataccagattctcctaaagattggatatacaggaagtctgggtcgtcaatatttacatcatcaaaggcacattggactgtgccagaagttaatttattaggaacaattctttgcatctttttcctctcaaactttgagcacaacttaacaaaccatcttgcaaattccttccgtgtacaaaaatcactggagctaacatctttctcaattatctgtagtttcttcaatacagataaagcctcctcatgcacaggatctgtaggaactccaaatggaaaagggctggcaattgttgttctgtagttttgccttgaatcatcagttattgcttcagccttcttatcatgtgttgcactagaaacttcaatttcatcagattccctgtcacttgcatcctccttggttgtctctgttgactctattgttggcaatttctcttgaacatagtgtaatggagcaacaatgagttgctgtatacgcttctgggaagatgggaagcgccacgccagcccagccaaggcgatcgccgcagaagctcccaacccaaccacgacagctctcttaaacccaatcctccccctcgcctgtttcatcgatttctcgtactcgggaaaccaccagccgccgaccccgtcttcggagtcaccggcggcgggagaccagctggtgccggctgcagcaacccgagcgggcacgcggcagcgtaggtgaggccgcagctgtgggaagaggatggtatcaagccgcggcggcggagagaggccgagagagtagaggccgacggccatgctggtgaggaatcgaggtcgctagggttttgtgaatcgggtttcattcaggtgtccatttcgggtcgagtgtatcatataccggccccgccggcctcgaggtacccaa

SEQ ID NO: 10678 - DNA, 237 bp, Zea mays
  unsure (1)..(237): unsure at all n locations
  Clone ID: MRT4577_10973C.1
agcgaaggncagagagactctagagcgggcggcctagaagattagttagaaaagaaacgagggaaaaaacctttccgcagctagagcaattgagagccagggcggacgagagaaaagggaaagagacctcgaacagcgccggaagagaaggcgatccnacaganactactaacaggaggccnaagcgagagaaacaccttcttacagagaacaaaagggcaaaacaccccaccccaa

SEQ ID NO: 10679 - DNA, 1844 bp, Zea mays
  Clone ID: MRT4577_109740C.1
tccaaaatgaagggatacatacggcccctaagatggcaacagattataattcctccaaaatgaagggatacatacggcccctaagatggcaacaagatgccgagaagcaccaaaggataatgaaccatctcaaagaacattatggcacgaccattccattccattgtgaatttttcagatctgatggcagatgctctggaaccaagtagctccaaaaactttgaacaagacttttcctatgcaaagcacagttagtttggagggatcaatcttctgggattcgccatcttctcaaagccttctcaagtgtctcagctcgttcatggacacgtcctgcttcatcttccacccaagtccttaacatagtaagagcttccttctcagcttcaagatatgatttagcttcattgacagcttgatgcttgctggtcatgtcagacaccaggttttccaaagtctgctgatcagccatgacctcttcattctcagttgccaatctatcgtacatgccatcaacttctaaccttaaatttatgagttcctggttcttgcattctaaagctgctcgttctttcaacaagactgctagttcctcttctctgtctgccctctcatttgcaagctcatccaaaacatgttgaagattattgtcaacttcaagagcccgttcttgctcctttttcatcttttcctcccattgttgttgtatatctcccctattaattaattcttctgttatttcagctataacagaaagacgggcttggttatctgcttcaagtctatttaactcttcctgaattgcttccttcattcgaccactggtcagcgcagcagctgcttgcgctttagttacaggtttgtgcggttgaaggcgcctagtatttccaaaaactctgctgatgatgctgttttcaccagccattagctctatgagcatggatggagacacatctgggcaagcacgcagatccaaaatgcaaacattttgactcagcatcttttggtctatttccaatgcacatggatgctccacaagcactttccagttgacaagatcgaaacgagagaggtaactatcaggtaggaacaaggaatttccctgggaaggagagccagttgttaatgtttccaaggagtttgacaacttgctggatattataccagattctcctaaagattggatatacaggaagtctgggtggtctatatttacatcatcaaaggcacattggactgtgtcagaagttaatttattaggaacaatactgcacatctttttcctctcaaacttgagcttaacttaacaaaccatcttgcaaattccctccgtgtacaaaaatcactggagctaacatctttctcaattatctgaagcttcttcaatatagagaaagcctcctcatgtacaggatctgtatgaactctgaatagaaaatggctggcgattgctgtcctgtaattttgccttgaatcgtcagttattgcttcagccttcttatcatgtgttgcactagaaacttcgatttcatcagattccctctcacttgcatcctccttgattatctctgttgactccattgttgacaatttatcttgaacatagtgtaatggtgcaacaatgagttgttgtatacctcttgtaatcatatttttcaagccgatctgaaggagtaagcaataaaaggattatatcatgaaacaagcagtggtaagccaacttcaaatatggaacatggatcgcttcctggaggatgggaagcgccacgccagcccagccaacgcgatcgccgcagacgctcccaacccaaccacgacagcgctctgaaaccctacaactcaac

SEQ ID NO: 10680 - DNA, 265 bp, Zea mays
  Clone ID: MRT4577_109741C.1
atgttcttcattttgtgtggggttttttttgttttctcatttttctaggaggaaattgtatcttaccgtcataccatgttaagccaaaagggggtggtttaatccatataattccccccacgggaaggtaccctactggttggcaaaagccaaactgtacccgacacaaaagccgtgttcatttccagggtgtttgtttccttcttaattaaagggccggcttgtattgccttttttattaaccacaattccagtccagttttca

SEQ ID NO: 10681 - DNA, 250 bp, Zea mays
  unsure (1)..(250): unsure at all n locations
  Clone ID: MRT4577_109742C.1
cgataatgactttgctgggaggatcaggagtaagannnncctncngngacattcctccctctcactcctgttcactcgtgcgctattccaaaatccttctgctccctcctcccgttatctgcataggccctaagccaccctcactgacccgccgcaccagcccatgctccataacctgatcctcccccctgcctcctcctccgagcaccttcacagtctcctcaatcaggcttcccatctctccgtcctc

SEQ ID NO: 10682 - DNA, 410 bp, Zea mays
  unsure (1)..(410): unsure at all n locations
  Clone ID: MRT4577_109743C.1
cagcagggccgcnnccncgccgccgccaccgccaccgccacgaggccggaagacgggcagaggaacgacggggaggcccagncggcggccccagcncccgccgccgccgcggcgccggcgcncnccacacaacaccaacagaaggagancgcgnccgggancgaggcgggancncgggccaaggagggccgccggancacccgcgccnnccgccacaccgacgcgcaccgccgccgccnggccgcacgggacgncnccgccanccncgccnacgcgccacccgcgggcggcgaagccaacgggcgccncancgcccaggggcccaaggaagaggagacggagagggacgnngaggcggcggcnccagcaacncagaagncaagcaaacagggccncccagagagcgaaac

SEQ ID NO: 10683 - DNA, 222 bp, Zea mays
  Clone ID: MRT4577_109744C.1
ttcggttcgagcttgacttaacgtctaacattttttttttatctcaccgacactgtttaataccaggggggtgcttttaaatcagtgggtgggtaacccaccgcgcccccagggtgatgccgaatgccacatcaccacggtccacgatgccgtctagatgtaggccatctacttcactgtgggctggtgcggttcataccgagccatttatccactgtgcgc

SEQ ID NO: 10684 - DNA, 299 bp, Zea mays
  Clone ID: MRT4577_109745C.1
cacaagatacatgacagtcgtgtagctagctcatgtatgctcaacggtcataatctagaacatgtattaagagcgcgacgagtgcctcaagaattactataccggccaagatcattcatcaacagcatgtcactttgcattgtggccacttcaatctggatcaagtgtggtcagatcttttagtgatttaacgcttatattacttacaacaaaagataaacccaccaatgcggacctcgatgtaccgcccagttcagcagaagcgcacaccgagatgttccatctgagccctgctggcc

SEQ ID NO: 10685 - DNA, 2621 bp, Zea mays
  Clone ID: MRT4577_109746C.1
ctggcgagagaaccaaaccggaatgtgtgacgactgacgactgaggtctgacgaggcgaaaacctcgctgactcgccccgccgccgccccgccccgcccgcgcgttctccgccgtcgtccccggaaggttttcgcctcagggcatgtggatctgttagttcacctgctgcaagcaagtatagctatagggttgaccagtgcagaagtatgaatccttactttgttgggattcttgtccccgtcgcggtctccctgctgctccgcaagaggagaaaggccgaaaggatgaggggagtgccagttgaggttggtggggagcctggatatgcagtccgtaactatcgttttgaacaacctgttgagacacactgggagggggtgtccacacttgctgatctgtttgagcaatcttgcaaagagtatgtatacatgccactccttggcacaaggaagctcatttcaagggaaactgaagcagcacctggtgggagatcgtttgagaagctgcatctgggcgagtatgagtggaagtgttatgcagagtgcttcaagagcgtttgcaacttttcatctggactaattagagtaggtcaccagaagaatgaacgtgttgctatttttgctgagacacgggccgagtggcagattgggttgcaggcatgcttcagacaaaacattacagttgtcaccatctatgcctcattgggggaggaagctttgtgtcactcactaaatgagactgaggtcactactgtagtttgtggtcagaaagaactaaaaaagttgattgatataagtgggcaacttgacactgtcaagcgtgttgtctatatcaatgaggaaggcatctcaactgaagtttctttagctcaaaactgcactagctggatagttgaatcatttgaggaagtaactaggttaggagctgaagcacctgttgaagcaaacatgcctctaccttccgatgttgcggtgataatgtacacaagtggtagcaccggattgcccaagggagttatgatgacccaccgcaacgtcctggctacactctcagcagtcatgaccattgtgcctgcacttggcagtaaagatatatacttggcctaccttccacttgcacacattcttgagttggcagcagaggcactaatggctgctgttggggcctcaataggatatggatcacctttgaccctgattgatacatccaataaaataaaaaagggaactctaggtgatgcttctgcactaaagccaacattgatgactgctgtacctgctatacttgatcgtattcgtgatggtgtcaggaaaaaggtggatacaaagggtggtatagcaaagcaattgtttgacattgcctataaccgtcggcttgctgcaatcaatggaagttggcttggtgcctggggactggagaaactcttgtgggatacacttgtgtttggaaaggtgcgtgctattttgggaggaaagattcggtttgtactttcaggtggagcacctctatctggagatactcagagatttatcaatatatgccttggggctccaatagggcaaggttatggtctgactgaaacttgtgctggagggacattttcagagtatgatgacacatctgtcggtcgtgttggtgctccactaccttgttcgtatattaagttgattgactggcctgagggtggatacttgactgctgatttaccaatgcctcggggagaaattgtcattggaggtccaaatataactaaaggctatttcaagaatgaagctaaaacaaatgaagtctacaaggatgatgagaaaggtatgcgatggttctattctggcgacatcggacggttccatccagatggctgccttgaaatcattgaccgtaagaaagatatcgtgaagcttcaacatggcgaatatgtatctctcgggaaggtagaggctgctttgattgtgagcccatatgtggagaacattatgatccatgctgatcctttccacaattactgtgttgctctcgtggtggctgcacacattgagctggaaagctgggcttcgcagcaaggaatcaaatacagcgatttctcagatttgtgccagaagcaagaggctgttaaagaagtgcttggatctttagcaaaggctgcgaagcaagcgcgacttgagaagtttgagataccagtcaaaatcaagctgataccagagccatggacccccgagtcgggactcgtcactgctgccctcaaactcaagagggaggtgatcaggaagacgtacgagaacgatctggctgagttgtacgcatgatggtgctactctttttgatacgtttagtgtggaaaatgtgtagattgccaatgtcacggtgagatctatggtaatttgataccgattatcgttctgggattattattattattattttcagttagaggagatatataaaccttgagttttgagttatatggcttctcttgatgccgagaagctatcttgcgatgattcctatgtgtttaggatataatgctttcgaattcttattgcgcttgttcatctcgtaccttgaggcaaaaaaaaaaaaaaaactactggtattgcagtctataaaattgcatgtacggtgt

SEQ ID NO: 10686 - DNA, 296 bp, Zea mays
  unsure (1)..(296): unsure at all n locations
  Clone ID: MRT4577_109747C.1
ggaccgggccggaataaattccttgttcgacgagctcctcagacggcggccgccctanaaaaaaaannggggggacttttaaaaaagaaccgccgaaccaaccagagaaganggcaaaaangaaaccgcagaaagcacgaaaacaacaaggagcaaagaggacagggggaacagccaaccagacagacacacagggagaaccaacacacacagcgcaggcccggcaaacgaacggaacacacaagacgaggccgggaacgagaaggagaagcacggagcaagacaaaggaccagag

SEQ ID NO: 10687 - DNA, 288 bp, Zea mays
  Clone ID: MRT4577_109748C.1
gttattgaacattcttttattgttaatttatagttgataactgtggatgtaacacacgccgggattggcctataaaaaccagcccgggcttagggtcagaagctgaccaagaattgggggagccaatcaactggaacccaataaacccctgcgtttaaaaagcgaccgccaggaaggatgtacccctgaataactggctggcggcccatagggggcagccaaggattcagggacccaagaaatttgacccctaagaggggaccctgttgctcactggttaacaggaac

SEQ ID NO: 10688 - DNA, 405 bp, Zea mays
  Clone ID: MRT4577_109749C.1
tggactcgtgggattttgcatagcaagatgaggggcttgataaactggtagagacggtgctgaacacaaagcatattgcattagcagtcaatgaagaacttaccctgcacacaagattgatagttagtgccatataacaaaaaccagtagtatatgtgtcttttacacttgatgataacttgttatcttgtttgcaggatgaccttgaagatcatgttgatgttacaaattcacgtctttaggctagcatttagtatcaatatttaaaccgctgctattgcttacactactactacgtagcattgcttaaccgctcttccttcattccagatatgaagttctggatacactacgtgactatttcttgattcatagcaacagttatttagcatgtactttaaaaac

SEQ ID NO: 10689 - DNA, 719 bp, Zea mays
  unsure (1)..(719): unsure at all n locations
  Clone ID: MRT4577_10974C.1
ccccgcgtccgcaaacattgaatgtagttagtgcatttagagtttttaccttatttttcgagaaaactggaagatcggatacaatatctctactatataaaacactaggttcaactgtcgcccggtgtcatacttcccgtttaattaacgtccggtaaaattgtacacaaataagagtttggacttttgttattggcttcacatttacatccacctaaccaatagaacaaaccacatatatttatattttattaaaataatgtatactcataaaatatatagaaacgtgacaatgcactggtaactgactagtatacaaatcatagaggacgttctaagaatttaacatcctacactcatgtgatggccatagattatgataccgtggattaagaaatagactcgtgccttgttaggttgtcttcagtggaccgtgtaaaatatagtatttacattgtagatgatactgtttgcatattgaagtttgaaataaggtatgtgataggggatgaaatagggaagctactggtgatagccttagagtatgaagccgtgtattatggatacatatcaacaaggaacgaaacaacgttatcatttaacttctctactactataatgtgactgcacgtcccccactttcgtgcacgccctcacttaggggcgaaaccaactntaaatttatggtggtgcagtgctaaagcaacatacatagtttt

SEQ ID NO: 10690 - DNA, 351 bp, Zea mays
  Clone ID: MRT4577_109750C.1
catatatatatctatatacacataataaaaattatacttctatatactatggagcaaaacaacaacactagagagacttgtatatctttatatagaaaaaactcacctcccaccttataaaacacacaatataactaaacaaatcataacacttctttctatacaaaaccaattcaactctatttattaaatacacagactacctagacaatactccacactttatttatatctattcctactagatatcacataccttaacccgcctaacaaaaaacacaaccaaaacatataaacttacaaaattgctgatatacttaactaaaacaccataagcaaccacatttaaaa

SEQ ID NO: 10691 - DNA, 332 bp, Zea mays
  unsure (1)..(332): unsure at all n locations
  Clone ID: MRT4577_109751C.1
acgcccacgcgtccgcccacgcgtccgcccacgcgtccggaaaaaagagagaaaagaagccaacgggactcatattttttgcccatgcctgcaagcatctaggtttggtgtctgtttttttggcttcttttgttgtggatctgaatccctgtaagagctctctctctctttctctttttgcatgaaatgtgtgggttctgtctgacaaaatctgcttgtgttgtgtgaatctgaacgtgaacagatcatactggagaaaaaaaaaagcagcaaaactagaaatattatttaatttgcaagctcaatcaaataatatttctagttntgcttgc

SEQ ID NO: 10692 - DNA, 174 bp, Zea mays
  Clone ID: MRT4577_109752C.1
cctaaaatgagtcgtattaagcgggatggttggcatgctgtttactcagttgcttttcttacaggacctgaacgaataaatcatataaatctaattacatcggtcatctggatcgagagatttaaatttgggcgtcgattaatgaggaagggcgggtgtttgaggttggttccg

SEQ ID NO: 10693 - DNA, 525 bp, Zea mays
  Clone ID: MRT4577_109753C.1
cgaatctaaatgtgcagcctcacgacctgttggttaattaatataaccgaaccatacaatgcaacaacggtcacgcaaacagggaagtgcattgcaaaactatgacgtatgaacaacatacatgcgattctcgcaggaatcctatacggatactggctttttttatcacatgatgatatgcatcagaggcaacaccaaatgcatccacaccacacaccacatcgattttcacgatccaaggaaatgcgaaagttacaaagccaagtcaaaaagggaagcaaaagaaaaactgaagtgacaaaaaacaggagatcagtctcaaatgacaaactacgatgtaaatgccccccctcacgctgtgaggattagcataccatcccatatgcccatttttatggctgcgggcctgcgtcttgttgcagttttccatggacagaactcagaaaggctcacacaaggcgtgatgctaggatggcgcactacaattgaaccgacatcatcccgcatgttgcctaaaccgtccta

SEQ ID NO: 10694 - DNA, 139 bp, Zea mays
  unsure (1)..(139): unsure at all n locations
  Clone ID: MRT4577_109754C.1
agaaatgtactttctaattncnagggaagccacaaacattagacaaatagctctattactgacctgtacctcatcagacatctaccagacatccccaccaacgaagggttgcttatcaacagccgttatgttccaaaaa

SEQ ID NO: 10695 - DNA, 155 bp, Zea mays
  unsure (1)..(155): unsure at all n locations
  Clone ID: MRT4577_109755C.1
ntagcgttaacgagtagtcgaatcgtcatgcacgcgacgacgacgctcagtgaatgccagagtctcgcactctcgtatgcgtccgacgctaccgagaccgaccgcgcagtcgtgatactcacgcacgcgcgagtcagatagccgagtcgacgcgt

SEQ ID NO: 10696 - DNA, 154 bp, Zea mays
  Clone ID: MRT4577_109756C.1
cttgactggtgtttttttttttatgtccggtttgaatatggttctacgataaggccttgattccagggttttctcctctggctatttggaaatgaagggcccacaaagtgccctagaagggcttttttaagatgcccccccccgcttatgtttt

SEQ ID NO: 10697 - DNA, 502 bp, Zea mays
  Clone ID: MRT4577_109757C.1
gaccacgcgtccgcggacgcgtgggcggacgcgtggggtccagcctcagctccaagtcccctcggtggtcgcagcccccgccaatcccccctccgcaggcgattcccgtggtgggggttctctcgccgccgctggagccacaggccgcggtgaaatcaacgaagcgcgcgggaatcattgggatcgcatttgaggcctactattctaagatttggcagatgcttgctgcgtcgaaggtggatgcctgcaatgctgctgctgcgtgggcggggcagtactgcaaatgccgttttgagctggatgagaaggaactggaagaagaggaagctgactctctggggtctgtctcgccaatgtcctcggaggctgagaatgggaaggagctggtggacgaattggccaggctgcgtatcaatggagacaacaattgcagcgaggaggacatggaggcaagggtgccacttccctgggacctgctccagccagtgatgagggttcttgg

SEQ ID NO: 10698 - DNA, 970 bp, Zea mays
  Clone ID: MRT4577_109758C.1
cttccctttcccccggtccagtggcggacgccctagccaggcaccacaggccacagcctgggctgccccactgccccggtcgccgtcgggcaagcgccgtccaacctgtgcgtcaccgcctccgccttcagtttcgcctccagcaggggcgccgcgtggggtattcggttcgtcgtcgaggagagagagtcacttctgccgagggagcagggatggagccggtcgtggggatcgtggtgtcaaacaagatgcagaagtcggtggtggttgcggtggaccgcctcttccactataagatgtacaaccgctatgtcaagcgcacctctaagttcatggcacacgacgaggctgactcctgcaacattggcgaccgggtcgcaggttgtagggtggggattgggctcgagaagggcggcggcgctggggcgctgtcgtgaccctggctgggtcgcgcgcagggagaagattccaggagactctggcttcatctgggaagccagaataaattggttaggctggacccttctaggcccttgagcagatataagcactgggttgttgctgaaattcttcgcagagctaaggtatatgttccaccagctgcaacagcgtccagtcagtccagtgaacataatagcaaatctcaaaaggctggtgttgctaccaaatgatccatatgcagttactcaagcaagatgcagctatggctttttttcttcttctgtatgtttgtttggaatgtggatgccatgtttagccatggaagaaaaaatagcacgcagccaccatcttcgcttaatttagtttgttctcctgtggtgtcctccctttaatggtagccatcgaggatataattaccatattcaacaagaccaatggatactatatcggcagttgtctttgtatttgcatgcatggttggcaggtgtctaatactgctgaaatgagcaggcggaaagatccgaagagt

SEQ ID NO: 10699 - DNA, 420 bp, Zea mays
  Clone ID: MRT4577_109759C.1
ccggccgggatctccttcacgccacaccacaagtgtccggcctcagaatcggatcaaagagcaagcgacgggggtgagagagaagagaggaccgtcatctccccttcctccctcacaactcacacgcgagacggagacgcggccacagccgaggtctgcataaaagcgcaaaagatctctcgctctcggctctcctctccccctcacccccggtgcgctgtgtgtgtcccgtctccgcgagaccgcgagcaagttctgtcttcgtccatccatccgtgcccggtcctactggtggcgctccttgattagcttacccccgccggcgagttcaccctgacatggtcggccggatggagcggcagaccgcgtcgtcgtcagcttcgtgctcctcctcctcatcttcctcctcggtctgcggcc

SEQ ID NO: 10700 - DNA, 198 bp, Zea mays
  Clone ID: MRT4577_10975C.1
gcaccgccgaagctggaccttaagcggcgcctccttttgtttcccagacctccacaactgggggttataaaaggtgcggttactgccacttgcttaacagcacaaggacagtcgacgagtcatccctactggaattaaacatgacaggcaagaacaacagctgatcatgattaccttacgctgattgtgtcgaccgat

SEQ ID NO: 10701 - DNA, 610 bp, Zea mays
  Clone ID: MRT4577_109760C.1
ctctgcaaatatttcggttttttaagtaactaaatacatttcgattttaaacaatagcgtggttttactatggtaatgtaatattgtagcatttgtgccatgtataattataagctgtgttattttaaaattatattattttaaaactgcattaccaaacaggccctaaagcttcacaaccacactttttgaggcttattgcaagtcctcaagagcacaaatttcagtggctaggtagttgtatgtcttcacctgattattcattctgtgtcccatggttcctaatgtaaatgaatcatgcttccttcctttcctatacgtttgatgcacaatttttacctgtttctttaggtcgatgacgaccaacacaagcaaagcattccatctgttgcttctaaatatcacaatctctttacacgcatctttccctctccgtttcagattctgttatacagcaagaggtggtgctttccataatcacatacattcttttttagtctttatctatataatcaatcatagattaaatatttgttaatcatagatggtgctttaaaatccgctaatgtgatactacattaaatatttgttaaccatagcggacgctggg

SEQ ID NO: 10702 - DNA, 1228 bp, Zea mays
  Clone ID: MRT4577_109761C.1
caaacagctcgaaaactttttgatgcaactccatgcaaagaccagatcatgttatcttcaatgatatctggatatgctacaaatggttatagtgaggaggcactctcattgtttcagcttatgttggcagctggttttcatatagataggtttttatgctcatcaattattagcatatgtgctaacatggcaagaccattctgtggtaaattgttacatgggtatgcatccaaagtaggcatactgtctgatctatctgtgagcagttcacttgtgaagttatattccaaaagtggcaacctggatgattctcgtaaagtttttgatgaaatagatgttccggatttagttacatggacagcgataattgatggatatgctcaacatggaagcagtcaggatgctttggcgttgttcgatttgatgattagatgtggggtaaaaccagacactgtcatacttgtgagtgttttgtctgcttgtggccgaaatggtttagttgaagaaggcttcaaacattttaattcaatgagaaccgtgtatggggttgagccagtgttgcaccactactgctgtatggttgatttacttggtagatctgggaggcttgtagaggcaaaaagttttattgagagtatgcctgtgaaacctaattcaatggtgtggagcacactgcttgctgcttgcagagttcatgatgatgttgtacttggacgttttgtagaaaataagatccatgaagaaaattgtgattcggggtgttttgctactatgtcaaacattcgagcaaattctggagactgggaaggtgtaatggaaataagaaaatcagtcaaggatgtggagaaagaacctggatggagttttctggaagaataaatatgcttcaatagatatgtaaaaagagggtgaatactatacataacttcgaaacatgtgcgatgcgttggcataaattggctatagaaactcactgaaacatagtgcagcatatgtaactgtgtactgaaaaaacttcatatctctgaaagtttttttgaaaaacttgtgtgatctgttttctagttagtgaatgtattacagatgtgtttggctgagggaccaactcatgtaggattgtttggttgatcactttgttatggccttgtgggaccattccatgaattttaagtatatttcctgactttctacatattttgttgtaacaagtaatgatttttatctctgc

SEQ ID NO: 10703 - DNA, 312 bp, Zea mays
  Clone ID: MRT4577_109762C.1
aatgtagcaacggtgttataggtcgtaaattgtaatagtatatttttggaatgatttaggagctttgcaagtagaccacacaggatcggaattgcggactcgtggcttaaactgtaacaactgtaaactatagtgtcggatatttttaagatgaaaaacgggagaggtgccgatacctctctagggggaaaaaaaagatctgtgttaacacaatagtcgggcgaattttcacaatatctgggcgctcacaatgtatggggcacttttggggaaagtgtgcgcaaaacccatatttgtttatgttgtctaaac

SEQ ID NO: 10704 - DNA, 316 bp, Zea mays
  Clone ID: MRT4577_109763C.1
gggggtggggaaaaaaaacgggggggtggggtcctgctacaccaggcatggggcatttttaaagctgtttaacattacaaaggttgggggtcaaaaggttccaataaaagccccttgaaagggaatgcttttttgctttaccagctaaaacttaaacaaatgggtttgaactcctacaaaactcagggaaatcgcaacacatttcctaatctgctttggtgggtcaacacatctttttaatgcgggtcctttactctccgggggggtaggacgggtttttcgtgcccccctttggtgccaataggagggacaagtt

SEQ ID NO: 10705 - DNA, 488 bp, Zea mays
  Clone ID: MRT4577_109764C.1
gggacaaacaatcaaattttttcggtttaattcaacagaccccccaaggccgagtgggggctaaaaaacaggactggaactggatgaaccgtgaaatacaaaaagaggcatgggactgaatactactccttgccatattcgttgtcaaccaaaggcccacctttaaggggcaacatgtctgatccctccttgggaaagcgggaacggctttgccactccaatggaaaacccacttacctccttgtacgtccggggacttaaaaatacatcactttttgtaaccgaagaagaaacccaaccttttggctcccaccttggtgacaaactgccgacctgccccacggcttttgattaacgcaaaatgaaactccttaaagaacgatttgaacccgaaagggatttttttgttacccttggcagttttaacaccctgacggcaacattgggtcagaacagaaagttgttctgcaagctaagcgcctgaaaaa

SEQ ID NO: 10706 - DNA, 329 bp, Zea mays
  Clone ID: MRT4577_109765C.1
aacacgcgtaaaatatgtttatcacagcatttattttacacacagaaaccaaaaataaacaagccggcgttttttaaaaacgcggtgaggcactccaacataaccaataatattactaccaattaccataccaccaaacacgctcctaataacctaatcacccagcttcacaactcaatatttcttccaagtcagacctaacataaagcaacaaacatcaaatctactatccttcgtcctacacactctatcaattgtaaaacctttcttttacacattttaaaccctactaactatattccatatactcatatctctttcaaagcaaa

SEQ ID NO: 10707 - DNA, 750 bp, Zea mays
  Clone ID: MRT4577_109766C.1
tcgggaaagccgtctcgtccgctgatgctctttcatggctctgacctactacctagcggcagtactagtaagctggcgcgtgcgagcgacgccgctggtgcatggcaattggcatgggcgcaaagctaaaaaaaaaggagacgcccgagctcccgggcaactgaactgcgcgccatggagccaacggcagggcagcgcggcgtcgccgcatggcgccgggtgctcgccgcagtgatgattgcatgccgagaaagaatcccagcccccttttcgaccatatatggccatgcacgagttgggggggccgttagcgcgcgtgcgtgcgtgcatggtgatgccatcctgatgccactactttgtcatatatagctgggaaagattatcactctaacaaatctaattaaatagcctcctgaggattaatttgagctacgcctttgtgttttatatatatatagcagaatgattaaaaaatgctactagtcaaaatatggcaggtccagcagcaaggggaaccgaataatatggcaatcatcgtgggaccaattgttcattggtgcctgaaagtagagagtagtattggtctactctcaaatgacacgttgatcgtcgtgtctgatctcactgatggagtagcccgagatcttccacacatgcccgcgtaaaagcaggtttccacggctttggccagacggagtgcaccccaggatgatgtccttgggtaatctatgatgcacatgaagactggag

SEQ ID NO: 10708 - DNA, 340 bp, Zea mays
  Clone ID: MRT4577_109767C.1
ttcaccttgggctgggtaccaccgacaattcagtatcaaagcagggttccatgcaccatcccatggccggataacttgcactaccactaacctaacaaaattctgttgacagacagaaatctgcaggtgttcctcaaatgattggccatcgcacataagattgtcccaaaagtcccaacccacccaggcctcattattaacttgatgcacaggccaggacccctaccagcggatgcccgggaaccaaatgcctcgcaacttatagtttatatcccagcttcgttaggcatctgcaatatttccgacacatagaaatgctggactataaacccttcttctt

SEQ ID NO: 10709 - DNA, 522 bp, Zea mays
  Clone ID: MRT4577_109768C.1
aaggattatcaatgtaccatgccaaagcacgttgtaaatgtaaattgagcattcttgccgctaggcaccatggtactttataatttgaaacctagggggacgggcctgctgtaacctggcctacaaacattcttttctggaaggtgctccatgcttgccaccctgtgtaacgagtgtgctctgtccattttgccagcaggctgttacccgctgacaaaatagtcggactgtctgaaccgacgaggctatataatggaatgtagccctcgctgcatacgatttctcttgggttggccaactaactggtcaggtcatcttacaccgagacggtgctctcataggcggactcaaaagggtagcccttgaatagcatgctgagggaagacatattcgacacggcaaggtacaatacaattcatgcctgtgacccgctacaccgagatctatgacatgctgacctttgcttttaaggtttcgactactgcctttagcaccctattgtccacagcagattcattgaac

SEQ ID NO: 10710 - DNA, 901 bp, Zea mays
  Clone ID: MRT4577_109769C.1
cattgggtacctcgaggccggccgggttgttgttgttgttgtgtgatctagaggtttcgtaaaaaaaaaaaaattacgatcacacaccactccacagcagtagcaagagggatagagcaaggccacacacacacacaccactaggctaggttagccttttagtcgtcgtcgaggagcaagaagggcgcgcacgcaagcaggcaagcaagaagagagccgatcgaccgagagctagcacgcgatggcgaggtcttccaagatgatggtggcggcagctctgctggccctggccctggccgtgtcgaccgccgaggcgaggaacatcaagaccacgacgacggagaagaaggacgacgcggtggtgcagccgcagaccttcccgcccttcgaccgcctcggcggcggcgcgtccccggcgttcggcggcctccccggcggcagcattcctggcagcagcattcccgggttcagcatgcccggcagcggcagcagcctacccgggttcagcttgcccggcagcggcagcatgcccctcttcggcggcggctccccgggcttcagcggcttcggcggcatgcccgggtcgcccaccgccggctccgtccccgagcacgccaacaagccctgaacgccaacaagcgtggtagtagagtggtgctactgttactgtagtacgtcgtcgtcttcatgcatgcgtggttcgtggtttcccctagctccatacgagcagtagttgggccttgcacgtaccgtacgtctagctagctatatatatagcttgtgttctactgctagtttaattacctgcctgcattggacagttggatctgtttcatctgctatcaggtcagtatctgttttgtggagatttggtgtttaatttatttagccgtttgtgact

SEQ ID NO: 10711 - DNA, 570 bp, Zea mays
  Clone ID: MRT4577_10976C.1
gcaactggtcgtcagaatcggcttctggctgccaaatgctttgcttctcagtccgcttctgtgaaaatcgattctgtgaaaatcgctcaaatcaatgtgaatgtagaatccgccgagtcgtcgcgatgggaggaatctggtgcttcctaaaccctaaatcgtgcaggcctttttcatctttatttgcgtgcaagccccgcgatatctagattctcgtgacagcttgatttttcatgaatccagattcttagaaaaggtcttcagaaaaaagctatcccaaaagccccaataactggtgttggacaatcagttgcctagccaagcgtggtttgcccacaccagcctgccttcccgttcagtgattatgccgaggaaacaattgaggatattcgtatctcctgtgtgttcactcgacagatctggacaacagtgttcttaaggcgtcgcctaggcactaagggcggtgtctagtgcacttgctcgcctaggcgccttaagaacactgctggacaatattttttcagaaaattcccatgtcagcttgtgcatatccagtcgctgcaacttgct

SEQ ID NO: 10712 - DNA, 989 bp, Zea mays
  Clone ID: MRT4577_109770C.1
cacagcagtagcaagagggatagagcaaggccacacacacacacacaccactaggctaggttagccttttaatcgtcgtcgagaagcaagaagggcgcgcacgcaagcaggcaagcaagaagagagccgatcgaccgagagctagcacgcgatggcgaggtcttccaagatgatggtgggcggcagctctgctggccttggccctggccgtgtcgaccgccgaggcgaggaacatcaagaccacgacgacggagaagaaggacgacgcggtggtgcagccgcagaccttcccgcccttcgaccgcctcggcggcggcgcgtccccggcgttcggcggcctccccggcggcagcattcctggcagcggcagcatgcccctcttcggcggcggctccccgggcttcagcggcttcggcggcatgcccgggtcgcccaccgccggctccgtccccaagcacgccaacaagccctgaacgccaacaagcgtggtagtagagtggtgctactgttactgtagtacgtcgtcgtcttcatgcatgcgtggttcgtggtttcccctagctccatacgagcagtagttgggccttgcacgtaccgtacgtctagctagctatatatatatagcttgtgttctactgccttttagtttaattacctgcctgcattggagagttggatctgtttcatttggtggtgtttgctttactattaggtcagtatctgtttgtggagacttggtgtttaatttatttagccgtttgtgactggttgtagctagcggtggtgcggtggtgatgttcttgaggcatgaataatgctacatgcatgtgatgtatccatgttttgtgtgtggtaaacctgttgtttgtataagctgtatgcatgggtctttaatttgtttttgaagcagggttcacgttattaatttaaaaaaaaaaaaaaaaaaaaaaaaaaaaaaaaaaaaaaaaaaaaaaaactcgagagggggc

SEQ ID NO: 10713 - DNA, 173 bp, Zea mays
  Clone ID: MRT4577_109771C.1
cgacaatgtaaaggcaaaaattcttttaaggagggcatacaccctgacgggcggcgtcttatctactccggcaaacacctggatgattgcctcaccttatcacactacaacatccaaaacgagagcaccctacaccttgtgcttcttctccatggacgacactaaatcatgcg

SEQ ID NO: 10714 - DNA, 1304 bp, Zea mays
  Clone ID: MRT4577_109772C.1
cccacgcgtccgcccacgcgtccgcccacgcgtccgcccacgcgtccgaagacacatacattgggtacctcgaggcattgggtacctcgaggccggccgggacgatcacacaccactccacagcagtagcaagagggatagagcaaggccacacacacacacacaccactaggctaggttagccttttagtcgtcgtcgaggagcaagaagggcgcgcacgcaagcaggcaagcaagaagagagccgatcgaccgagagctagcacgcgatggcgaggtcttccaagatgatggtggcggcagctctgctggccttggccctggccgtgtcgaccgccgaggcgaggaacatcaagaccacgacgacggagaagaaggacgacgcggtggtgcagccgcagaccttcccgcccttcgaccgcctcggcggcggcgcgtccccggcgttcggcggcctccccggcggcagcattcctggcagcagcattcccgggttcagcatgcccggcagcggcagcagcctacccgggttcagcttgcccggcagcggcagcatgcccctcttcggcggcggctccccgggcttcagcggcttcggcggcatgcccgggtcgcccaccgccggctccgtccccgagcacgccaacaagccctgaacgccaacaagcgtggtagtagagtggtgctactgttactgtagtacgtcgtcgtcttcatgcatgcgtggttcgtggtttcccctagctccatacgagcagtagttgggccttgcacgtaccgtacgtctagctagctatatatatatagcttgtgttctactgccttttagtttaattacctgcctgcattggagagttggatctgtttcatttggtggtgtttgctttactattaggtcagtatctgtttgtggagacttggtgtttaatttatttagccgtttgtgactggttgtagctagcggtggtgcggtggtgatgttcttgaggcatgaataatgctacatgcatgtgatgtatccatgttttgtgtgtggtaaacctgttgtttgtataagctgtatgcatgggtctttaatttgtttttgaagcagggttcacgttattaatttgtcactactttgttcggttcgcattatttaaaaaaaaaaaaaaaaatggtaaacctgttgtttgtataagctgtatgcatgggtctttaatttgtttttgaagcagggttacgttattaaaaaaaaaaaaaaaaaccattgacatctgacatatgaaagcttttgttgttattaataaaaagggcgggctttt

SEQ ID NO: 10715 - DNA, 1648 bp, Zea mays
  Clone ID: MRT4577_109773C.1
cccacgcgtccgcccacgcgtccgcccacgcgtccgcccacgcgtccgcccacgcgtccgcccacgcgtccgagcaaggccacacacacacacacaccactagtaggctagcctagccttttagtcgtcgaggaggagcaagaagggcgcgcacgcaagcaggcaagcaagaagagagccgatcgaccgagagctagcacgcgatggcgaggtcttccaagatgatggtggcggcagctctgctggccctggccctggccgtgtcgaccgccgaggcgaggaacatcaagacgacgacggagaagaaggacgacgcggtggtgcagccgcagaccttcccgcccttcgaccgcctcggcggcggcgcgtccccggcgttcggcggcctccccggcggcagcattcctggcagcagcattcccgggttcagcatgcccggcagcggcagcagccttcccgggttcagcttgcccggcagcggcagcatgcccctcttcggcggcggctccccgggcttcagcggcttcggcggcatgcccgggtcccccaccgccggctccgtccccgagcacgccaacaagccctgaactccgtctgtccgtccgatccgtcgctggagcgaggtcgggctagccagcgtgcgtggtagtagagtgatggtactgtagtacgtcgtcgtcttcatgcatgcgtggttcgtggtttcccctagctccatacgagcagtagttgggccttgcacgtaccgtacgtctagctagctatatatatagcttgtgttctactgctttttagtttaattacctgcctgcattggagagttggatctgtttcatttggtggtgtttgctttactattaggtcagtatctgtttgtggagacttggtgtttaatttatttagccgtttgtgactggttgtagctagcggtggtgcggtggtgatgttcttgaggcatgaataatgctacatgcatgtgatgtatccatgttttgtgtgtggtaaacctgttgtttgtataagctgtatgcatgggtctttaaaaaaaaaaaaaaaaaatccacggtacagacccgggttcgtttcccggctggtgcaccaaagcgacaagaacccaaccactccgcgtcgtcgtctgctgccaatggaggaggagcgctgcttcaacaactgggatctggacgccgcgggcgcttgggctgccgccgcctcctctccccgtcgccgcagcccgacccgttcgcttcgtttctcccgccgccgccgcagaaggagaagcccgtggcgccagcgccggctaaagagccagagccacataccgcgtggcgcttccctgaccttggtgctggcggcgggcaagacggcgaagagctcctcagggccctgttagccgaccagcctcccctccatcagcctctgccaacgccagcggcaacgccaacgccaacggcaacgcctcccccaccatcacaacagcagcatctacagccgactgtgacagccgtggacgtggctccaccccaggtgcgccccgctccggctagggcgcagccgagcgggcggcaggtgcccgggtggcgtgccaagatccaagagaaggaagaaccaggtgaagaaggtggtctgccacgttccggcggacggctcg

SEQ ID NO: 10716 - DNA, 355 bp, Zea mays
  Clone ID: MRT4577_109774C.1
caacccacacaaagaaaggcctggggtcaaatcgtgcatacaccacagacggcgcggccatatacggtggaaagaacctacaaattggcctcccggccgggggtcctaagggccccaactacccgggcaaaaagcccccgttctttaaaaatgcatctgacaagcaccatttagcaaaaaaaagaaagccttttaaaaaaaaccggcatacctaaaaccccccccggccccaaaaggcggtcgccgcaaaaaaacctttttgacaccctggctgacagcacccctccaaatatttaccccccccatgtttccccccctgggaaagggcgccccaaaaagggggggcaataaacaa

SEQ ID NO: 10717 - DNA, 408 bp, Zea mays
  Clone ID: MRT4577_109775C.1
gaccactgtctccatccaggcattttcagttattgtgaattcacctctacgtattgatctctcgtgtgtcctggatcatgttgtttctgagctcacagctttccttcgtaaggattccagttcttatcaagtgactcctccccctcacgatgactttgcggacatatgtctcaattctaatggtggagctacgaacaacaatctgatgtcctgatcgagagcgatggagctaatgtttgaacttgtgtgtttgaacttgtgaactacaaatgtgaactatggatgtgaacttgtgaacttatgtatttggacttatctgaatttgtgaacttatatatttggacttgtgtgaatttgtgatatgaacatatatcaatgtgtttaaaatccccattgtatgtgatattc

SEQ ID NO: 10718 - DNA, 1003 bp, Zea mays
  Clone ID: MRT4577_109776C.1
ttgggtacctcgaggccggccgggacgatctccaccactccacagcagtagcaagagggatagagcaaggccacacacacacacacaccactagtaggctagcctagccttttagtcgtcgaggaggagcaagaagggcgcgcacgcaagcaggcaagcaagaagagagccgatcgaccgagagctagcacgcgatggcgaggtcttccaagatgatggtggcggcagctctgctggccttggccctggccgtgtcgaccgccgaggcgaggaacatcaagaccacgacgacggagaagaaggacgacgcggtggtgcagccgcagaccttcccgcccttcgaccgcctcggcggcggcgcgtccccggcgttcggcggcctccccggcggcagcattcccgggttcagcatgcccggcagcggcagcggcctacccgggttcagcttgcccggcagcggcagcatgcccctcttcggcggcggctccccgggcttcagcggcttcggcggcatgcccgggtcgcccaccgccggctccgtccccgagcacgccaacaagccctgaacgccaacaagcgtggtagtagagtggtgctactgttactgtagtacgtcgtcgtcttcatgcatgcgtggttcgtggtttcccctagctccatacgagcagtagttgggccttgcacgtaccgtacgtctagctagctatatatatagcttgtgttctactgctttttagtttaattacctgcctgcattggagagttggatctgtttcatttggtggtgtttgctttactattaggtcagtatctgtttgtggagacttggtgtttaatttatttagccgtttgtgactggttgtagctagcggtggtgcggtggtgatgttcttgaggcatgaataatgctacatgcatgtgatgtatccatgttttgtgtgtggtaaacctgttgtttgtataaaaaaaaaaaaaaaagaaaaaaaaaaaaaaaaaagcggcc

SEQ ID NO: 10719 - DNA, 589 bp, Zea mays
  Clone ID: MRT4577_109777C.1
gcctcgccgccgttcccaacaccctgtcgacccaatctcacatcctcctctcgcccgcccgagtcttcttcgccgccaaaaggaaatgatgctctacaaaatccgctcccatgcccaaatccaagacctgcaggcccgctccgatgagctgggcctctccaataagtccatgcttgtgagtcttgtctctctggagtcggtgcgcatagcgtgggagtcgtatgcgctcctccgcccgctgatcaaggagtcgtggtcctgggtatgcccgcagctggatttcctctcggacgtggcaggcttgtcgctggaaatccaaaagcttgagcatgatgtgttaccccagctcaagcttcaggaggctaagctggaaaggggcgccctggaagccctcctactcatgaagaactcagctgttgcgctcttacatttgaggaagtgctttaaggaagacttgggcgtattgcttgccaaggaggatctggtctcagccaaagtcaaaaggctgagcaaaatgctaaagtatattgctgtccggttgcttcaggagcgtgaatgcaacattgtcgggcttcaggagcgtgtccgg

SEQ ID NO: 10720 - DNA, 307 bp, Zea mays
  Clone ID: MRT4577_109778C.1
gacactatagaatcactatgacgtcgatctcgcgtcgtatgcttggtccttagagcggcgtcttttttttttttaactaataaacattcactggagagccagccttctatcattgaaagatatccatgcaatcagaaaaaatgagggatccctaatatgtacctcttaaaggggaaatctacattcagcgtacacttaaaacgcccttctaataattatgtacagttcattgtttcttcggacgcctggtgattaaaatgccaacacaaaaaacaccaccttgagatatctatcttgcgggaggact

SEQ ID NO: 10721 - DNA, 1480 bp, Zea mays
  unsure (1)..(1480): unsure at all n locations
  Clone ID: MRT4577_109779C.1
cctcgnagccggccgggattacgtgtgatgacgagcaaaactgagtctcttgcatgctggggcaatcattgtattaccgcaaccgatcggcggcggcatcgacgagcaacgacgacttcgcctggcgccatttgatggctttcactggctgcgacgacgcggagaagctgcggtcggaaaacatcaccgggaaaatcatggtatgccgagcgccggagttcaagtccaactatcctcccacggcgcagtttagctgggccagccgagccgccatcgccggcggggccaagggcgtcatcttcgagcagtacagtaccgacgtcctcgacggccaggcctcctgccaaggccacctgccctgcgtcgtcgtggacaaagaaaccatatacacgatcctaaatagcgacagcaatgtggccaggatttcgccggcggcgaccatggtcgggccccaggtcgcctcaccgaggatcgcgacgttctcgtcgaggggccccagcgcagagttcccctccgtgctcaagcccgacatagctgcccctggagtgagcatcttggcagccaagcgtgactcgtacgtgctcctgtctgggacatccatggcatgccctcatgtctccgcagtcgtcgccttgctcggcccggttcacccggactggtcacctgccatgatcaagtctgccattgttaccacagcgtcggtgaccgatcgattcggcctgccaatccaagccaactcggtgcaaaggaaaccggccgacgccttcgacatgggcggcggcctcatagcgccggacagggccatggaccccggcctagtgtacgacatccagccggaggagtacaaaagcttggacgaccgcgtcgaccgcctcaacctcccgtccatcgccgtgcccaacctcatgtacgactccgtcacggtctcgcgcaccgtcaccaacgtcgggccggtggaggcgacgtaccgggccgtggtcgaggcgccggccggcgtggcgatggacgtggcgccgccggtgatcgccttcgagagaggcggcgtcaggaacgccacgttcaaggtgacgttcgtggcgaagcagagagtgcagggcggctacgcgtttgggagcctgacgtggctggacgacgccaagcggcactcggtaaggatccccgtcgccgttcggaccgtcgtccgggacttcgtcgccgatgtgtctcgatgatgaacactgaacgatgtgtctgtcaaagaagaacaccgtctcgatgatcgtccatatatgcgacactgtgtcactgtgtgtgaacactgaacaacgtgtcaaaactgaacttatgttgccaatttatttgcaagcaacaaggcgctcccagctgatcttgtgcctttatgcagtttatacagttcaaataaactatgaggctcagcctagaattcattacaaagcataattattgagcgagagacccgatcgatgatagttttgtctgt

SEQ ID NO: 10722 - DNA, 1151 bp, Zea mays
  Clone ID: MRT4577_10977C.1
ttgtggtacctcgacgggccggggggaaacgaaatatttttaatccgcttttcggttggtggtgcctggcatctaccgtgcggagggggaagagggagaggccaggagaggaaagcctgcagccaccatggattccgacctctggatctcgcgtctcacggccgccaagcggcagtttgcgctgcagcgcgcgcagcgccagcacgccgccccggcatcccatcacgatcgatttgggtatgatgatatcgaacctgaggatgatttgcactcagacttcccatgcccttactgttatgaagatcatgatgttgcttctctctgcgcccatttggaggacgagcaccctttcgagtctaaaattgtgtcttgcccagtttgctcagctaggatttcgaaggacttggtggatcatataacccttcagcatggctacctatttaaattgcagaaacatcaaagagtacgcagagttactggtaatggcaaccacaatctctcctatgcagggagagatcttcaactgcaagagacctacttaaaggtgcttcttggaaatagcagtcgaagcagcagtaccaatgcatcaagtacagtcaccgattcactgctaccctcactagttttaaatttatcatcaccagaagtagaagacgcatcaaagttttcagctcctgctgtggtggaaaataattggtttaaacgatcactgccttcaaaaacttggaaattaagaactgttgattccacccttagtcatgaagagagggagcgtaggaggaggagagctgctgtgagatcagcttttgtgcagcatctccttgtcactaccatttttgaagactagcagatcaagcacagctatgcacgggaatcgcactagttgttttggatatcatgaagttgttcatccggtctgctgggtaaccttgacaggaaaactgaagcaccgggcgtcttaccttatttattctgtggaagcagctctgtcatttattttctagatcctattcatttttgtagggctgttgatcagagcctctatagtagagtcgtgatgctttttttgttgggtttcagtctgcaattggagaatatgccaatttaatttatatattactaaacatgattccgagtttggaacttgttct

SEQ ID NO: 10723 - DNA, 158 bp, Zea mays
  unsure (1)..(158): unsure at all n locations
  Clone ID: MRT4577_109780C.1
agctcagaaacagnctcacagtcagattcagaagattcagaaccagaaaaaccaacagtcccagcgaaaaggcctctagcaacaaataaaaagaatgaacaatccagcgagaaatcagatgacagcactgatgagagtactgatgaaagtaacgagga

SEQ ID NO: 10724 - DNA, 179 bp, Zea mays
  Clone ID: MRT4577_109781C.1
acgggtatctgcctgacacaattgcctttttcttgttcaactctcatgttacaccatgagctattgtactaaccagacatggtcagagtttacataatgttagatgaagaatcgctagtaatacaattctaaattaaactgtataactttatgtacagatactatttaactttatataa

SEQ ID NO: 10725 - DNA, 847 bp, Zea mays
  unsure (1)..(847): unsure at all n locations
  Clone ID: MRT4577_109782C.1
ttgggtacctcgaggccggccggcactatcactcgtgcataacactagcagagagagaacataaatccaaagatgggctggagaccacacgttgtctctgtgtcatcttctgcactactagtgctgcttcagctcctcgtgctactgatgctgcccgctgatgcgtcgtcatcaagccaaacgacgacgacgacgatctacgtcgtgtacatgggcgagaagaagcacgacgacccttccctcgtcgtggcgtcgcaccacgccacgctggcctccgttcttgggagcaaggatgaagcactcagctccatagtctacagctacaagcacggattctccggtttcgcggcgaagctcacccagccccaagcggaggagcttaaaagtgcgtcgtcgtagcctcgccggagctaagcatgaatcaagttgttttattactgagaataacgagcttatttgcaacatatatataatgacatactagaataccctggagttgtgagcgtgaagccaaacacgtaccaccacgtccacacgactcggagctgggattttcttggcatgagctacggccaacagcagtcgtggtcatcgtcgtcgtcgcggctccttaggaaggccaagtacggcgaagatgtcatcgtcggcgtcatagactncaggttctggtgggtttcgagtttcgacatcacttaaatccagtttgcgttgctgacatgtatgcttctgcaggcatctggccggaatcccggagcttcgacgacagcgggtacggccccgtggcgaaacggtggggaaggcgtgtgccagacaggccaggcgttcaacgcgagcaactggcaaccgg

SEQ ID NO: 10726 - DNA, 378 bp, Zea mays
  Clone ID: MRT4577_109783C.1
agcgcctttcgcctccctttccccttccctccctccctctccccgaggaacgacataggacccttggaaaaacacgccactctgatacccgcacagggaagcggcaagccacacccaatcccgtccctgaatagtgttctcggcgccgccgcgcgaatctcccgtgaccgacggaaaaaacaagggccgcggcaccgccgatggcaggctgtcgtgagaaacatcgggaagggggatgcgcgcctaggagacgagaggtaggtcgcctcggagcccatcaagactaagaagggtgccaagggtgtcttcatgttcaagggtgactgtcggaagctctttttttttgaaaccgaaggaaccaatttgttggtgccctgg

SEQ ID NO: 10727 - DNA, 2705 bp, Zea mays
  Clone ID: MRT4577_109784C.1
cattgggtacctctggaggccggaccggcactctcgtgcacaagactagcagagagaacataatccaaagatgggctggagaccacacgttgtctctgcgtcatcatccgcactagtgcttcagttcctcgtgctgctgctgcccctgcccctgcccctgctgtccgccgatgcatcgtcaagccaaacgacgacgacgatctacgtcgtgtacatgggcgagaagaagcacgacgatccttccgtcgtcatggcgtcgcaccatgccgcgctgacctccgttcttgggagcaaggatgaagccctccgttcgatagtctacagctacaagcacggattctctggtttcgcggcgaagctcacccagccccaagcggaggagcttacaaaataccctggagtcgtgagcgtgaagccaaacgcgtaccaccacgtgcacacgacccggagctgggattttcttggcatgagctacggcgaatcgccgtcgttgtcgtcgtcgtcgcggctcctcaggaaggccaagtacggcgaagatgtcatcgtcggcgtcatagactcaggcatctggccggaatccccgagcttcgacgacagcgggtacggccccgtgccgaaacggtggaaaggcgtgtgccagaccggccaggcgttcaacgcgagcaactgcaaccggaaggtcatcggcgcgcggtggtacggcgccgacgtcggcgaggaggacctcaagggcgagtacaggtcggcgcgggacgccaacggccacggcacgcacacggcctctacgatcgccggctcgccggtgcggggcgcgagccacgccggcggcggcctagccgctggcatagcgcgcggaggggcaccgcgcgcgcggctggcgatatacaaggtctgccacgacgtcggcggcggcacgagctgcggcgacgcgtcgatcctcgcggccctcgacgccgccattggggatggcgtcgacgtgctatccttgtcgctgggaggaggcagtgacgaggtctacaggacgttgcacgtcgtggcggccgggatcaccgtggtgttctccgcagggaacgatggcccagtgccgcagtccgtcaccaacgccctgccgtggctcgtcacggtggcggccaccaccgtggatcgcaccttcccgacagtcgtcacgctcggcgacggagagacgaagctggtggggcaatcattgtattaccgcaaccgatcggcggcggcatcgacgagcaacgacgacttcgcttggcgccatttgatggctttcactggctgcgacgacgcggagaagctgcggtcggaaaacatcaccgggaaaatcatggtatgccgagcgccggagttcaagtccaactatcctcccacggcgcagtttagctgggccagccgagccgccatcgccggcggggccaagggcgtcatcttcgagcagtacagtaccgacgtcctcgacggccaggcctcctgccaaggccacctgccctgcgtcgtcgtggacaaagaaaccatatacacgatcctaaatagcgacagcaatgtggccaggatttcgccggcggcgaccatggtcgggccccaggtcgcctcaccgaggatcgcgacgttctcgtcgaggggccccagcgcagagttcccctccgtgctcaaggtgatgtatgcatgtgtatttgatgatctctcatcttcatgaatcaatgtatatatatatatcacaacgtgtctctgtttggacgacggacgacagcccgacatagctgcccctggagtgagcatcttggcagccaagcgtgactcgtacgtgctcctgtctgggacatccatggcatgccctcatgtctccgcagtcgtcgccttgctcaagtcggttcacccggactggtcacccgccatgatcaagtctgccattgttaccacagcgtcggtgaccgatcgattcggcctgccaatccaagccaactcggtgcaaaggaaaccggccgacgccttcgacatgggcggcggcctcatagcgccggacagggccatggaccccggcctagtgtacgacatccagccggaggagtacaaaagcttggacgaccgcgtcgaccgcctcaacctcccgtccatcgccgtgcccaacctcatgtacgactccgtcacggtctcgcgcaccgtcaccaacgtcgggccggtggaggcgacgtaccgggccgtggtcgaggcgccggccggcgtggcgatggacgtggcgccgccggtgatcaccttcgagagaggcggcgtcaggaacgccacgttcaaggtgacgttcgtggcgaagcagagagtgcagggcggctacgcgtttgggagcctgacgtggctggacgacgccaagcggcactcggtgaggatccccgtcgccgttcggaccgtcgtccgggacttcgtcgccgatgtgtctcgatgatgaacactgaacgatgtgtctgtcaaagaagaacactgtacgtctcgatgatcgtccatatatgcagtgccggtcctgacattttagaggcccagggcaagatttataaagaaggccctttataataataattactgctgaaaactagagtatatatatatatcgcccaaaaaagaacgtagaatatacctgcagcatcaataatacaactaaaacgttatctgctggacctacaaaaaaaaaaaaaaaacactgtgtcact

SEQ ID NO: 10728 - DNA, 405 bp, Zea mays
  Clone ID: MRT4577_109785C.1
gcctgtctcttttttttttttttttaaaaccaaattataggggtcgattttatttattggtcacagttctacatcaattggatcaaccaatatgcatgcagacacacgtttgtgagcacaaaaactgtacaacaaggtgcaacacgagattacaaagggacaaacaccgcgtagggttctgttataggcgcatgagacgacacctccattgggaattggggccatacttatggccagtagaccacccaccacaataagcgagataaaatgtctcaatatctaggggcgcaaatggacgggagcaccaggagcaggggcagtacttgcaaacgttaccctatgtgcagccgaggacagcactgatggactccgaccgggactagacgaactcgggcgcggccttct

SEQ ID NO: 10729 - DNA, 514 bp, Zea mays
  Clone ID: MRT4577_109786C.1
caaaaaacctgctttcccattttataaagtctcgcaaccatctataacagcttgtcagcccccttccccgcctgcaaaaatcctaacaatccgcccgggtgtgtttcatggtacgggaaccccgggggaggggggatcaccttaacctacaaccggcccccccccaacaaggggccaacaaaatcaacagcgtgctggcgatccctgaaaacctacaaacaagcaactttgaattgaccgaccgcccgcgcacagttacagaataacgaaaagaatgaacggatcaccggttagcccttcacgtcaccctcctcgaggtcgaccgaggccacgccggtcaccctggccttgaggggcacatcctctgccgttgagcttgccgccctttttccgggggatcggggctgccgccttcttcttcgtttacacggcccaactgtagaccacaatgcccatcaccgtgagcagcatccggagtatgttcttcatggagagggccgagtcaaacaggatc

SEQ ID NO: 10730 - DNA, 731 bp, Zea mays
  Clone ID: MRT4577_109787C.1
gccggccgggttccgacattccattccattccattccagtactcgctcatcttgctccgccttctgcttctgcgcatcctccaaggatcgtgatggccatggccacgcaagcctccgcggacacgcgccacctggtggccgccgccatcatgcgggaggggcccaacctcctgaagctggcgcgcaaggagcagtgcctcgcgctcggcaccaggctgcgctccaagtacaagatcacctaccagttctaccgcgtcttccccaacggcgaggtgcagtacctccaccccaaggacggcgtctacccggagaaggtcaaccccggcagggagggcgtcggccagaacttccgcagcatcggcaagaacgtcaaccccatcgacgtcaagttcaccggcaagagcaccttcgactaatcacacatcacgccgcccgcccgcccggccggtgatccaaatcaaaggacttcttcttcttcttatattaataattaagctagctgctggtggtgcgccatatacatgcatggtttgatctaaatatatgtggacatggatgtgtaatttgttttagtaatttcttggtgaccgtggaggcgcagcgtgggactctatgtacatgtgcatctgctcctcatgtctatgcatatgacaacgttgccataacacctgaatctttcaatagtgcatttaaaaaaaaaaaaagaaaaaaaaaaaaaaaaaaggccccta

SEQ ID NO: 10731 - DNA, 239 bp, Zea mays
  Clone ID: MRT4577_109788C.1
gttccagtaaactaggagcacacatagtgcagtagagtgcaaacaacctcacgggaatggttttctttgtttttttgctccctgtgcttgctacgctctgagcgggcgaaactatcgccgtcatcgtatcagattccttagttgcccatactttcctactcacagcacagatccttgttgttacctgattgaacaacacttaggcatgcacccaggtgcctccacaacaacacgacagt

SEQ ID NO: 10732 - DNA, 461 bp, Zea mays
  unsure (1)..(461): unsure at all n locations
  Clone ID: MRT4577_109789C.1
cgggaatctgtcactccccgacacgcgcacgagctccactccccactccgcacccaacccaaaggcgccactgccatggacgcgggcggtccgccgccgctgttcctcctgggcgccgtgctggccgcggcgctggggtggctgctcgtggtctggcgggcggcggcggggcggcggcggtccgcgtcggcgcggctgccgccggggagcacggggggtggggtcatcggngagacgctgcggcacatcacggtgtacaagtcgacgaaccccaagccgagcaaggaccagcacttgtggcaggactgacgccgctactgaaccaagggtgggtccctcagcaacgtgcccgtcggaggcggctgccggaagaaccgcagcaggggcaagccggttcgagccgtgcccgtcgattccgtggcgcccagcagcggtggcgcggcggcgttcacgcaccgggc

SEQ ID NO: 10733 - DNA, 793 bp, Zea mays
  Clone ID: MRT4577_10978C.1
attcggctcgagcggctcgagctggcatctactgtgcggagggggaagagggagaggccaggaggggaaagcctgcagccaccatggattccgacctctggatctcgcgtctcacggccgccaagcggcagtttgcgctgcagcgcgcgcagcgccagcacgccgccccggcatcccatcacgatcgattgggtatgatgatatcgaacctgaggatgatgtgcactcagacttcccatgcccttactgttatgaagatcatgatgttgcttctctctgcgcccatttggaggacgagcaccctttcgagtctaaaattgtgaaacatcaaagagtacgtagagttactggtaatggcaaccacaatctctcctatgcagggagagatcttcaactgcaagagacctacttaaaggtgcttcttggaaatagcagtcgaagcagcagtaccaatgcatcaagtacagtcaccgattcactgctaccctcactagttttaaatttatcatcaccagaagtagaagacgcatcaaagttttcagctcctgctgtggtggaaaataattggtttaaacgatcactgccttcaaaaacttggaaattaagagctgttgattccacccttagtcatgaagagagggagcgtaggaggaggagagctgctgtgagatcagcttttgtccagcatctccttgtcaccaccatttttgaagactagcagatcaagcacagctcatgcaaaggaatcttgtgggcgggccttttgcccactcatttatgtgggtgggggggg

SEQ ID NO: 10734 - DNA, 684 bp, Zea mays
  Clone ID: MRT4577_109790C.1
gtactcgctcatcttgctccgccttctgcttctgcgcatcctccaaggatcgtgatggccatggccacgcaagcctccgcggccacgcgccacctggtggccgccgccgcttccgccatcatgcgggaggggcccaacctcctgaagctggcgcgcaaggagcagtgcctcgcgctcggcaccaggctgcgctccaagtacaagatcacctaccagttctaccgcgtcttccccaacggcgaggtgcagtacctccaccccaaggacggcgtctacccggagaaggtcaaccccggcagggagggcgtcggccagaacttccgcagcatcggcaagaacgtcaaccccatcgacgtcaagttcaccggcaagagcaccttcgactaatcacacatcacgccgcccgcccgcccggccggtgatccaaatcaaaggacttcttcttcttcttatattaataattaagctagctgctggtggtgcgccatatacatgcatggtttgatctaaatatatgtggacatggatgtgtaatttgttttagtaatttcttggtgaccgtggaggcgcagcgtgggactctatgtacatgtgcatctgctcctcatgtctatgtatatgacaacgttgccaaaaaaaaaaaaaaaaaaaaaaaaaaaaaaaaaacacacacaacccagcgcc

SEQ ID NO: 10735 - DNA, 1416 bp, Zea mays
  unsure (1)..(1416): unsure at all n locations
  Clone ID: MRT4577_109791C.1
ttccggattccattccagtactcgctcatcttgctccgccttctgcttccgcgcatcctccaaggatcgtgatggccatggccacgcaagcctccgctgccacgcgccacctggtggccgccgccgcttccgcctgggcgccgtcggcgaagccgcggcagctgagctcacagctcgcgctgccgtcgtcgtcctcccgcgcgccggccccgctccgcgcgaccgccggggaggcggtgaccgaggaggcgcccaaggggttcgtggccccgcagctggaccccagcacgccgtccccgatcttcggcggcagcacgggcgggctgctccgcaaggcgcaggtggaggagttctacgtcatcacgtgggtgtcccccaaggagcaggtgttcgagatgcccaccggcggcgccgccatcatgcgggaggggcccaacctcctgaagctggcgcgcaaggagcagtgcctcgcgctcggcaccaggctgcgctccaagtacaagatcacctaccagttctaccgcgtcttccccaacggcgaggtgcagtacctccaccccaaggacggcgtctacccggagaaggtcaaccccggcagggagggcgtcggccagaacttccgcagcatcggcaagaacgtcaaccccatcgacgtcaagttcaccggcaagagcatcttcgactaatcacacatcacgccgcccgcccggccggtgatccaaatcaaaggacttcttcttctagttcttatattaataattaagctagctgctggatgcatggtttgatataaatatatatggacatggatgtgtaattttagtaatttcttggtgaccgtggaggcgcagcgtgggactctatgtacatgtgcatctgctcctcatgtctatgcatatgacaacgttgccataacacctgaatctttcaatagtgcctttgtgggtttttggtgtttggatgacaacacaattaaaaaaaaaaaaaaaaaaaaaaaaaaaaaaaaaaaaaaaaaaaaaaaaaaaaaaaaaaaaaaaaaaaaaaaaaaaaaaaaaaaaaaaaaaaaaaaaaaaaaaaagggggcccccaacccccaattttttttccctttaagggggggtaaatggccccttggggaaaaaaggggcaaaagtgttccccggggaaaaatggtttccccccaaaattcccccaaaaaaaacaaccggaaaaaaaaaggggaaaacccggggggcccaaaggggggcccaaccccactttattgggggggccccccgggccctttttcaaggggaaaacctggggggcccgtttttttaaaaaatcggcccacccccggggggggggggtttggaaattggggccttttcccctttcttggtaaaaaaattcgtggccccgggngttggggtgggg

SEQ ID NO: 10736 - DNA, 669 bp, Zea mays
  Clone ID: MRT4577_109792C.1
aaaaaaattccaaaaaaaaaaaaaaaaaaaaaaaaaaaaaaaaaaaaaaaaaaaaaaaaaaaaaaaaaaaaaaaaaaaaaaaaaaaaaacccctttaatccatcaacgccggccctccacggtcacgggaaagtaaccgccgttttgccgggttctcccgaagtcccgaaccgaatcgggttcttcgtgggcctcgttggcgtctcatcgccatgggggtttcccctgaagttgctcgcccgccaaaaccaagcaggggaaaacatgcttcttctttcaaatagccggaaccaagggaacgggggatcaaaaatcaaaactctactccaagggaccttgttttcaggggtggcctttgggctccggaatcaggggaagctttcctatgataaaaaaaacgagtacttggatgatgctgaggaccagcttacccataaggataaaagcatattccaggcgaggaaacaaaaggcaggtagttacagggatagcaacgcccaaagggttgccaacaattctgatgtaacaactaacccagaggaaggggagggaaatcatcattcggatactttggatcataacgaaaaaactgtaaaaactgggtccaataaagatagtactaccctgcatgaagatgacaagaaaaaccctgagagttcaaaagcggaa

SEQ ID NO: 10737 - DNA, 804 bp, Zea mays
  Clone ID: MRT4577_109793C.1
tgggcgaagccacggcagctgagctcgcagctcgcgatgccgtcgtcccgcggtccggccccgctccgcgcgtccgacgacggaccggcggcggcggcggtgactgaggaggcccccaagggtttcgtgcccccgcagctggaccccaacacgccgtcgcccatcttcggcggcagcacgggcgggctgctccggaaggcgcaggtggaggagttctacgtgatcacgtggacgtccccgaaggagcaggtgttcgagatgcccacgggcggcgccgccatcatgcgggagggtccaaacctcctgaagctggcgcgcaaggagcagtgcctggcgctcggcaccaggctgcgctccaagtacaagatcaactaccagttctaccgcgtcttccccaacggcgaggtgcagtacctccaccccaaggacggcgtctacccggagaaggtcaacgccggcaggcagggcgttgggcagaacttccgcagcatcggcaagaacgtcagccccatcgaggtcaagttcaccggcaaggaatccttcgacatctaatcctccgtcgcatgcttaaaggacttgcgtgttcttcttatatgaattattactataagttagctgctggtggcgccatgcatgcatgcatggtttgatagatgatccatgtgtaattttattatcaagtcttcttggtgaccgtggaggcgcagcgtgggattatatgtacatgatgttcatttgctcgtgataacgttgcttctttgcataataacaccgatcgatcatcatcattagtggtttagtcct

SEQ ID NO: 10738 - DNA, 491 bp, Zea mays
  Clone ID: MRT4577_109794C.1
ggcagccaacccggggggttttttcccacacttgcaaaaacgtaaaacccccccttcagtttcggggggaaaaaaaaaagcaaaattcagttcaaaaagaaactttaacctttaaaaaccaggaggggccccccggccacccccaattcgatggttttaaaaaaaggcggaacgaggcctcctaattccccgggggggaaaaacattacctttttgggaggaaacccgggttggccaccccagtttgccccagggttggggtggggccacccacctgttgggggggaaaacctgtttgaagttaaaacggccttggggtcccaggccgaaatgcctcaaaaaaggacctgatgccccccacgggggggggcatgttaaaccgggcaaccttgggagggccataacccaccccaagctggggggaggaaaaggggggggagtaatccccaattttgccaggggccctaaaaaaaaagggcccgttggggcaa

SEQ ID NO: 10739 - DNA, 1084 bp, Zea mays
  Clone ID: MRT4577_109795C.1
tgttccaaagcacccgcgcgccgtctcactctccaccaccacaccacccgctcctcttagctagctgcatgctcgcgccgccctcttccattccattccattccattccagtactcgctcatcttgctccgccttctgcttctgcgcatcctccaaggatcgtgatggccatggccacgcaagcctccgcggccacgcgccacctggtggccgccgccgccgccaccgcctgggcgccgtcggcgaagccgcggcagctaagctcacagctcgcgctgccgccgtcgtcctcccgcgcgccggccccgctccgcgcgaccgccggggaggcggtgaccgaggaggcgcccaaggggttcgtggccccgcagctggaccccagcacgccgtccccgatcttcggcggcagcacgggcgggctgctccgcaaggcgcaggtggaggagttctacgtcatcacgtgggtgtcccccaaggagcaggtgttcgagatgcccaccggcggcgccgccatcatgcgggaggggcccaacctcctgaagctggcgcgcaaggagcagtgcctcgcgctcggcaccaggctgcgctccaagtacaagatcacctaccagttctaccgcgtcttccccaacggcgaggtgcagtacctccaccccaaggacggcgtctacccggagaaggtcaaccccggcagggagggcgtcggccagaacttccgcagcatcggcaagaacgtcaaccccatcgacgtcaagttcaccggcaagagcaccttcgactaatcacacatcacgccgcccgcccgcccggccggtgatccaaatcaaaggacttcttcttctagttcttatattaataattaagctagctgctggtggtgcgccatatacatgcatggtttgatctaaatatatgtggacatggatgtgtaatttgttttagtaatttcttggtgaccgtggaggcgcagcgtgggactctatgtacatgtgcatctgctcctcatgtctatgcatatgacaacgttgccataacacctgaatctttcaatagtgcatcaaaaaaaaaaaaaaaaaggccccta

SEQ ID NO: 10740 - DNA, 231 bp, Zea mays
  Clone ID: MRT4577_109796C.1
cccacgcgtgcggtgcctacgtactggaggatcatcaggaggaagagagcaagtgcgcagtgacgactcttgaaccacaactgtacgatattgctgctgtcgagccgtgctttacctattctggttcgcaatggcatacatgtatatggaatgtcttatggttgccgtctctactgcgcgcgtgctcgatctgaagctaggacaagaccagaacctgaacaattatagact

SEQ ID NO: 10741 - DNA, 565 bp, Zea mays
  Clone ID: MRT4577_109797C.1
ttgaggaagttgtgctcatggagcaaaaatatgttttaaatgacagcactaacattaagaccgtgctgaatgacttgtcgaaagaggttggttctaaggtaacaatcggtaacttcatcagaatggaggttggcgaagggattgagagaactgaagccgctgatggtttagaggttgctggtggcgctatgtagattccaggcagagatggttcgaacgagatcattaggatctatatgaaggtgtgggctaggacggagataatgtttaggcaggcactagcgttctgggacctgcgaggctgcctagttgatttgtcagttcctagcttgtttggttacagttttggttgaaccctctctgattgaattacagttcgtgtggacgtataaaaaatcgaaatagagtgggaattgccccttgaactttttgcactgagtctggagtgaattagtgttagtgcaaagtagttgttttagctgtcatttttgtattaattaaactttgctagaatgacttgtgagtttgtaggatacttttgcaggctattcacccatcttttgcc

SEQ ID NO: 10742 - DNA, 1750 bp, Zea mays
  Clone ID: MRT4577_109798C.1
aattcggtaccaggctctcggccgctaggctattgccgccgccgccctacaccagatgcccagttcttcgtcagccccttctccggcaacgagcacctaacaggctgaaaaaaaatcattgatacacgtacgccgtcagaggctgcagtatattctgtgagaatggcatggggtcaaggtgctaagaggtccatactagggcttctctttcgttctcagcaccaaactgctcgggcatactcttcttcagcattccagactcaccaattgagcactcatgttccccaagatggagtgtttattaggagattcggctctgaggtgtcttcttcagagcaaatgaaccttattaagcaactcagacaaagaacgagtgctccaatcaaagatgtcaaggcctctctagttacctgcaactgggatattgaggctgcacagaaggacctaaggaagagaggtgttgctcttgctgccaaaaagtcttcacgcactgctgctgaaggtttgctagctatcgcacaagatgacaaaagggctgctgtagttgagcttaactgtgaaactgatttcgtagcaagaaatgatgttttccagtacctggcttcatcattggcaaagatggctttatctgctcagggtcctggtgaattgttcatgccttttggtcctgagcttttagagaacatgcctatcaatctagatcaccctaagctcagtgtggaaacaactgtccaaagtgccgttacagaagttgctgcaatggttggggagaatgtgaaactcagaagaggcttcatgctttccacaactgcacatggtgttgtttcatcttatatgcatacctgccctcagccaggtatgggtcgtatagctggattggtcacactagaaacagaagacagcagtactcttcttgattctgtcaaaagtgttgggtcatctattgcgatgcatattgttgcggcaaagccattattcttatcaaaagaactggtttctgcttcggctttagaaaatgagcgtgaaatacttcgaactcaggcccaaagttcagggaaatcccaaatggctatggataagatggtggaaggacgattgaggaagtactttgaggaagttgtgctcatggagcaaaaatatgttttaaatgacagcactaacattaagaccgtgctgaatgacttgtcgaaagaggttggttctaaggtaacaatcggtaacttcatcagaatggaggttggcgaagggattgagagaactgaagccgctgatggtttagaggttgctggtggcgctatgtagattccaggcagagatggttcgaacgagatcattaggatctatatgaaggtcccacttctctaaagttggggggccttggttttttccaataaaacttttgggctctcatctttgctccattggattgttacaggtgtgggctaggacggagataatgtttaggcaggcactagcgttctgggacctgcgaggctgcctagttgatttgtcagttcctagcttgtttggttacagttttggttgaaccctctctgattgaattacagttcgtgtggacgtataaaaaatcgaaatagagtgggaattgccccttgaactttttgcactgagtctggagtgaattagtgttagtgcaaagtagttgttttagctgtcatttttgtattaattaaactttgctagaatgacttgtgagtttgtaggataccttttgcaggctatctcgtgc

SEQ ID NO: 10743 - DNA, 295 bp, Zea mays
  unsure (1)..(295): unsure at all n locations
  Clone ID: MRT4577_109799C.1
gcgnncgggcgcagcccggggagccgnnaccgcaccgcgggcgcgacgaccnccncgcgggggggcaggcgcccngcgncgcagacancaagaacggcgccancacggggccaccgagnncgccggagcccnacancgccaagggccncgccaaggaccgcgggaccacgagcgnncngcggggaggggggggggccggcgnccgngncgncggccccgagggcgccgnggggcggncggggcgcccggaggggaaggccanggacaccgccggcgnccgccgcgggccccggcg

SEQ ID NO: 10744 - DNA, 158 bp, Zea mays
  Clone ID: MRT4577_10979C.1
gtgaaggtcaaggcttggtccaagctgcttgaacaccgacaaccggttgcagcacggcgggctaagccccgtggggtcggccataggattctggcccgccgtcgctttctccgggatccgaatccccaccaggatgcagggcgacgaggagcacaacg

SEQ ID NO: 10745 - DNA, 2100 bp, Zea mays
  unsure (1)..(2100): unsure at all n locations
  Clone ID: MRT4577_1097C.1
aaatgggacgacggcaaggctcttctgctgtcagcgcaagaatgaaaccactggtctctctggtgcccaaccaaagaacaacgagacgtggatatatatgacctgtagggaactagggatgcccctcggcaggcacagcggagacgtcgacggagtttgatgccaagtagcaattcccccatgtcctgaaatggacagaaccagatgcctgaaatggacagaaccagatggctgatgaaattctacgtacactccatccgttccaatatataattcgtcttccttttttatattatgctgcgggtggcgctgccgccggtggccgtctacatgatcaacttcgtcatgtccatgtccacgcagatcttctgcggccagctcggcaacctcgagctcgccgcctcctcgctcggcaacaccggcatccagcccttggcctacggcctcatgctgggcatgggcagcgcggtggagacgctgtgcgggcaggcgtacggggcgcacaagcaccgcatgctgggggtgtacctgcagcgctcgacggtgctgctcatggccaccgccgtgccgctgaccgtcgtctacgccttctcggagcgcatcctggtcctcctcggcgagtcggagcgcatctccagggccgccgccgtcttcgtctacgggctcatcccgcggatcttcgcgtacgcggccaacttccccatccagaagttcctgcaggcccatataatctctcgcccagcgtccacatctacgacgaggcacatatacagacacgcggcggcggcgggcagatccatcttggtatacacgtaatatatacacacacacacgatgggccgcgctcgcagcccacctcgccctcagctacctcgtcgtctaccgcctcggcctcggcctcctcggcgcctcgctcacgctcagcgccagctggtgggccatcgtcgccgcccagttcgcatacatcgtcaccagcagccgctgccgcctcacctggaggggncttctcgtggcaggccttctccggcctgcccagcttcttcaggctctccctcgcatccgccgtcatgctttgcctcgagacctggtacttccagatcctcgtgctcatcgcaggcctcctcaaggaccccgagcttgccttggcctcactctctgtctgcatgacaatttcagggtgggtgttcatgatctccgttgggttcaatgcagcagccagcgtaagagtgagcaacgagctcggcgccggcaacccaagggcggcggcgttctccgtggtggtagtgacgctgctctccttcgtcctgtcggtcctcgtctccgccgtcatcctgctgtgccgggactacatcagctacatcttcaccgagggtgaggacgtgtcgcaggcggtctcccggctcaccccgctgctggcgttcacgctcatcctcaacggcatccagctccagcccgtcctctctggggtcgctgtggggtgtggatggcaggcgttcgtcgcgtacgtcaacgtcggctgctactacatcgtcggcatcccgctcgggtgcctcctaggcttctactttgacctaggagcagcgggtatttggagcggtatgatcggcggcaccttgatgcagaccttgatcttgatatgggttacattcaggaccaactggaacaaagaggttgaagaagcacagaagaggttaaacaaatgggacgacggcaaggctcctctgctgtcagcgcaagaatgaaacaactcgtctctctggtgcccaaccaaagaacaacgagacgtggatatgacctgtacggaactagggacgcccctcggcaggctcagcggagacgtcgacgtagtttgatatcaagtagcaattccaccatgtcctgaaatggacagaaccaggccaaatgcctggaatggacagaaccagatggctgatgaaattctacgtacattccatccggtccaatatataattcgtttcacttttttatattaagtttgaccgactcatctcattaaaaaatataattgttattaacttttaaaaaaaaaaaaaaaaaaaagggcgcccgccgaattgagcgctcgtcgacccgggtatt

SEQ ID NO: 10746 - DNA, 265 bp, Zea mays
  Clone ID: MRT4577_109800C.1
ttggaaccatgggatcaaaccgccccggtcgggtcctcggaatcttccggcccggcaacttcgtctacaggctctccggggcccgggaacaactggggcaagggtcactacagcgagggcggatggcgaataccgttgcttcttgacagggctcgcaaggaggacgggaaatcacactgtctacaacggcttcaagaaatacagtgaggggctggaggcacaagatcatgctatatcgggagacccaaaggtccagaagctggag

SEQ ID NO: 10747 - DNA, 352 bp, Zea mays
  unsure (1)..(352): unsure at all n locations
  Clone ID: MRT4577_109801C.1
cccacgcgtccgcccacccgtccgacgaaacggtcgacatggctcgcacgcaatctgccggagcggtcgccgtggtggccgcggtgctgctgctgtcagcggcggctacaaccttatagtctttcatcattgagggcagganagctccgttcntctgtccctgcctgtcctactcccggntcacggggtccggcccatccacgttcctgctgtagcggcttcaggaaccttaagagcgccttcagcaccttcttcgacaggcgcgccgtctgcaactgcctcaagaactccgtcaggggcgttagcggccttaacgccggcaactccttcagcttgccatccaagtgcggtg

SEQ ID NO: 10748 - DNA, 362 bp, Zea mays
  Clone ID: MRT4577_109802C.1
gcgtgctctggtccagctcgccggtcggccgcccgtcacttgtagctgctcgcttgccgttgcatcctctcggttaggaaatttgcgcgctcccaccatgctccagtaccctgccgttggcttctcctccaactctagccccagctccggcttcgccgcggtgtctatgctcgcccaggtcgcgacctcaacgctggtgagctcgcttcgagctccatccatgaccaccttcttcgctgctccagctcaggtcacgcccggcctagctcggatctcgctccagcttgccgatgtcaccgagcagagcgtcaccttaagctctctaccatggccgcgccctccctgctgcagctcgccccgtg

SEQ ID NO: 10749 - DNA, 1977 bp, Zea mays
  unsure (1)..(1977): unsure at all n locations
  Clone ID: MRT4577_109803C.1
caccttcaagaacttctgcagaaacaaatgtgacaagtgctgagacaacatactggacaacagagtatgtactcgtaaccttgaagctgaagataatgcctactagcaacgtaatttgagagaccatgagcagttgcctgtcctcaaacatattgctgatgtatgttccaacaacagcattaacaggaagcaccgtcaacccaaggattgctagnnnnnttgccactgcgcttgtgttccaactgaaatagtgattagtgataacactagactctgaaagcaaaatctccattgcgtatttcagcatgaagtatatcaacaactgtctgccaccataatccaatccttgcgatctagatgctggttaatcaggttgtatttattgtacatgccactactcacagcattggcatggtagagctgtttctcatcagttgtatatgctgcttggcactgtgtcgatataaactgcttatttctctgattatttttgtagatcatacaccacattattgacaaggaaactacttcagtctcagatgataaaagagatacacagtataagcctcatgatctcgtagagaaatgtttctgaatgataacagagccttggtatgatctcgtagagaaacgtttctgaatgatatcagagccttggtacagctgaggagcccattacaatcatcactttgccaaccgccttcctatctctcagggcagagaaagcaagatggacctcaacaagtctgtagcagtgtgaaatttgaactgttatcagaccctttgaaagccatgacaagagttcattgagcgaatcaatgagtacttgtggccggtgagttaagtagcttccccagtacaaaccatgaactgtccagttcttaacaagagcaatattcgctcgaataactggaacatcaccactggcaaatccgatgacaagaatttgtgctccccaattgagaagtttcaggctatcttgagttaatttccccccgactgggtcatataaaacatcaacacctttcaagcctctagcctttaagaaagacttggcactttctataacattatccttgcttgagtcaattacatgatcggcacctatggatttgagataatccgatttctcagcccccctagcaactgcaataacaacagcaccacaaacttttcctatttgcacagcagatgccccgacaccaccagcagcaccaagaacaagtagcacctggccagccttcaattgggctcggtgaacaagggccaaatgtgatgtaccaaatgcaactggtaaagccccagctgtgaccaggtcgcatccatcaggcaccaaaaatagctgcttctcctcggcgacgatgaagtcagcgaaggaaccgaggccggtaaaggagcagacgcggtcgccgggccggagcccacgcacgccgggaccgactgcgtcgaccacgccagagtagtcggatccaggcacgaacggaagcgggggccgctcctggtacttgccctgcacctggaggaacgtggcgaagttgaggctggtcgccgcgactcgcactcggacagccgtcggcgatgagatctccggcactgggtgatccccagagaccgcggcgaacggggaggcttcaccgccagggggcagggtgggatcgcccagctgccgcaccacgagcgcctccatttactgggtactaggtgaaatgatgctcttgactcttgagaaagacgactacacgacgacgctaactttgggctggctcttgacttttgggacttctcgggcttgctttgggctggctcgttccggccggcatcactttggcaaccgactttttatttttcaaggcaaagaatgcatgatggtcctgaacaagtctgtagcagtgcgaaacttgaactgttttcagaccctttgaaagccatgacaagagttcattgagcgaatcactgagtacttgtggccggtgagtt

SEQ ID NO: 10750 - DNA, 2694 bp, Zea mays
  Clone ID: MRT4577_109804C.1
gtcttcgtgtagtcgtctttctcaagagtcaagagcatcatttcacctagtacccagtaaatggaggcgctcgtggtgcggcagctgggcgatcccaccctgccccctggcggtgaagcctccccgttcgccgcggtctctggggatcacccagtgccggagatctcatcgccgacggctgtccgagtgcgagtcgcggcgaccagcctcaacttcgccacgttcctccaggtgcagggcaagtaccaggagcggcccccgcttccgttcgtgcctggatccgactactctggcgtggtcgacgcagtcggtcccggcgtgcgtgggctccggcccggcgaccgcgtctgctcctttaccggcctcggttccttcgctgacttcatcgtcgctgaggagaagcagctgacatcatcaaggtacgtccctgaggtcaaaaggatcgaactctgcctcacccgaggtcctcctcacgagtattccaaaaactccgccttgctcgagcccgatctcggacagggcgtgagcttgggagaatctccgcctcggccgaggagaagcagctctggggctttaccagttgcatttggtacatcacatttggcccttgttcaccgagcccaattgaaggctggccaggtttccttcaatgtgatttcatgtgtttttccgcattttttagaccaaaggcatccacgggctttattcaaaaacttaaacatgataaaaatgttctatagctctgggattgccagctcacaacgaagttgagattgaaaaggagcacaaacgacaatacctctcaattctccagaacaagtctcaaacagctagacaagaaaaaacaagtcttttgggcattttttttataataactcttagcagggatacatctcagaacattttactagattaaatttgctatctactgtccatgctatcataaaccaaatttggaaccaatggattataattctgtgtactatgattataattttgtagacaacatagtaacatactagtcaggtgtatacttgaagttttgtagtgtatacctgaagttatccatacagtatgcatttatatgattgacagtttgacacaatggcatttggtttctataaacatattttctgatccggaagtttttgctgcggcagtgcctgtgtctgcagttactgtagtattcaagcaggaagcagcggcaagtggccggctgcccctggctcagatatcatccagaaacgtttctctacgagatcataccaaggctctgttatcattcagaaacatacgagatcatgaggcttatactgtgtatctcttttatcatctgagactgaagtagtttccttgtcaataatgtggtgtatgatctacaaaaataatcagagaaataagcagtttatatcgacacagtgccaagcagcatatacaactgatgagaaacagctctaccatgccaatgctgtgagtagtggcatgtacaataaatacaacctgattaaccagcatctagatcgcaaggattggattatggtggcagtgggaagacctcgccgttttttttatgttttacaccattaggtgatcttattccaaatatgttgtgtattaaatataatatgtagctccttagaagcggatgcactcgaccatagcaaagtgtacaacaacgagaaaagagaggcttaggtgttgtttggttcaagaaatgtacaacaacgagaaaagagaggcttaggtgttgtttggttcaagaaatgtaacgcaaatggtaatggtaatggtttacgttcggatgtcatctcgcctctcccgtggcacatacaacggtggcctcctctcgacggaggccgggaccctggcgagggtggtcgctgactgcaccatcactgcggcggggtacctgggcgtggggaagcttctcaacgtcaccctgctaccatccctggtgatatgtgttgcgtccattgcctgcaccttcctgacgtataactcgcttttctgatggagcttcacaatgtatttgtgtcatcatgattcgttccatattagcgcaaatcaaggcagctgggagaccgccattgccattgcccgaaggggctattgtattactattattatatgttcgtcgatttaattgctgtaaattgattgataaaatgatggtagctactgaacctggtcttgccgtgcaaaattttgaccgactctatccttgtcatgaatacatgctgtccatattatggcactctcggctggtgagtgactccgcatgagttttggctaatagaaccttattgccatatgataagcacccctactgccacataatagaccaatggcgatcatcaacagttgcgtgttgcgtttaaaatctcaaataacatgtatcactactaaactaggtaagtgcctatgcgttgaaacggggacatataataccacaataacttatgaacaaatatgtattatactgttatgagaaaatgtttcgtaatctattttgtgatcttagccatcataaatttattattttaatctagcttatttaattactacattcaaccatcagtgccatacaaacatctatatatgataggtatatgcttgtacattactacataatcaatataaaatacattgataaaaaaggcttattattctatacttttattagcacccggccaa

SEQ ID NO: 10751 - DNA, 114 bp, Zea mays
  Clone ID: MRT4577_109805C.1
ccgctcgacaagctacacttgctccaaaaattccacgctctggcatcacttctattccacctattgactctagcgtcagacacttgagtgcagcgtatggtgctattcaagcta

SEQ ID NO: 10752 - DNA, 398 bp, Zea mays
  unsure (1)..(398): unsure at all n locations
  Clone ID: MRT4577_109806C.1
ctcgaggccggccgggccgggttgccgcgtgcgtggacctcgccctcatctcttctgctccgtgttcaataattccaccaccgcatagctcctgccttcttcctagttcctaccttcgccccccccgccccccgcccccggcgagggatnaggggtgggctcacctcgaaccaggtaaatatcgggggtgagggaaggaggaaaagaagattaggggagaaaacccaccttcgggtatcggctggggataaaggggggatggtaggggcggggaactagggggaaaaaaagggattcgatagggggagatggaggaatcagtttattctatcgggatagaaggtggtaacggccgcaataataaacgtaggatcataagggctgttgggggagcttat

SEQ ID NO: 10753 - DNA, 222 bp, Zea mays
  Clone ID: MRT4577_109807C.1
cgacgggcactctgacgcaaaggcgtgaggcggaccatgatgactaacgtctgtaggatcaagataaagcgctaaatccaattctgctagatacagaggcatgtaaatatctcgttaggttgccgaatgaccagattgcaataatgggaagaatggctctgatgcacccttcttgttagctggctccggctcaaattcatacgccatgaactgcgatccagt

SEQ ID NO: 10754 - DNA, 241 bp, Zea mays
  Clone ID: MRT4577_109808C.1
gccctgacgctcccgatcttctttaaaaaagcctgccgcacatcagggctttaacagcagccatggcgagccaaatccacctccatgtatccttcaaacggacgcattgggtcatggaacgcgaatcagctgcgcaccctatatccatcaccagccccaacttgaatctctgcagcacatcaacctcgctgcacattaactaaccgtaccctgtgacttgacactggggccataaatgaac

SEQ ID NO: 10755 - DNA, 1192 bp, Zea mays
  Clone ID: MRT4577_109809C.1
ctcgaggccggccggttttgtatttcttctcccctattccctcttcttgttcttggagttgttggtgtccccggagctacaaaggccccgccttttggctcattctcagactttagtactttaccatctgctccaagaaagcgtcttggagatggcgcgcaccgagaagctcaccagcgatggctgctccggcggcgaagtccaagtggaggtggagctcggcatgggggtggacgggaaggggatcatagagtgccggatatgccaggaggagggggaggaggccgctatggactcaccttgcgcttgcgctggcacactcaagtttgcccacaggaaatgcatacagagatggtgcaacaagaagggaaatattacatgcgaaatctgcaaccaggtttactccccgaattatgtcatccctccaccgaaatgttgttcagatgaaatggacatgaatcttaggcaaaactgggtcggacgaatcgatccccatgattcccatttcctagccatcgccatcgcagagcagcagctgctgcaagctgaatttgatgactgtgtatctgcaaactctagcggtgccacatgctgccgatccattgctttaattgtgatgttccttttgctcgtacgccatgtaattgtcattgtgagggatgttagcatgctacaagatgcaacggtgctgttcagcgcaactcttcagtttgcgggattctttcttccttgttatgtaatagctcgttcttgctacgctttgcagcatcggagacggagacaggtgtagggagactcacctgaaccttaaaagaacacaaaggcgcaccaattgaagcgccaccgcggcggtacccccgaagataggaggactacatggaagcttgcgaagtgagcctccccgttgttgcttggagtcaccgcaagcatttggtttctgtcctgaagacgtcggcggtttaattaggttgattgagtagcgagaacaggcgctgtgaagctcaagtgtacatacgttgaggggacaaggccttttttttacagctgcgaggaagcaaaatgtagcctcacacatttctgctgcaaataaaagaacaatcgcccgtcagcgcctctgaattttaaaaaaaaaaaaaaaaagcgggggggggggggggggggggggggggccgaggggggggcccgggtaccc

SEQ ID NO: 10756 - DNA, 783 bp, Zea mays
  Clone ID: MRT4577_10980C.1
cttaaggtgcttcttggaaaagcagtcgaagcagcagtaccaatgcatcaagtacagtcaccgattcactgctaccctcactagttttaaatttatcatcaccagaagtagaagacgcatcaaagttttcagctcctgctgtggtggaaaataattggtttaaacgatcactgccttcaaaaacttggaaattaagaactgttgattccacccttagtcatgaagagagggagcgtaggaggaggagagctgctgtgagatcagcttttgtccagcatctccttgtcaccaccatttttgaagactagcagatcaagcacagctcatgcaaaggaatcttgtgggcgggccttttgcccactcatttatctggatggataaggcactaattatcttggataccatcacgctgttcatccggtctgctgggtaaccatgacaggaaaaatgaagcagcgggcgtcttaccttatatatgttctctggaagcagctgacatttgttttctggatcatattcataattctatgtaggctgtgacaggaatctctatagtagagccatgatttttttttggttgggtttcagcctgcgttggagaatatgcccaattttttttttggagaatatgccttatctggatggataaggcactaaacatttgaagattatatttcggagggtggagaatatgacaatttgatttatatcactaaacatttgaagattaaaaaaaaaaaaaaaaaaaaaaaaaaaaaaaaaagggcggccgccgactagtga

SEQ ID NO: 10757 - DNA, 229 bp, Zea mays
  unsure (1)..(229): unsure at all n locations
  Clone ID: MRT4577_109810C.1
ttttnaaggcagggganatntggagtgtggtagggtttcnnncntccanaatcancattatccctcnagaccaacacttccatacctttngttcaaccaattatccattctccttcatcaagtaaacttacaaacattttaaaaataaaaagaaaacaattgtacaacatgcacctattgtcatccaaaattgcatgaagcctggacattgcattaaaatcgccacccc

SEQ ID NO: 10758 - DNA, 487 bp, Zea mays
  Clone ID: MRT4577_109811C.1
ccatcccccggggctcaaatggttttaaaaggggaaatagtggtcgtttccatcatttgtctgagccatccacatggtctttacaaatcatcaaagggcgggaaaaaaaacgtagataaacccggccttcacaggcagccgactgggggttgcccctaacccacccctaaaacttttggtggtcttggaactcctggaagtctccttccacggtttcattttttcctgagcaggggttgcaatgttgacaacctccaccaaccgactgttgctaaggggcttttcctgcgagttcttcgggctcctcaaccaaatcgttctttttgttagtaggggagccaggctcggcctcccaaatgtcgaagtaaacccaagtctctgcctgaaattccaaagggggggatgtctttttttcagtcacttccatttttttttcgggttccgacaatagtgttcgcaaaaacctgggcggggataacccggggta

SEQ ID NO: 10759 - DNA, 530 bp, Zea mays
  Clone ID: MRT4577_109812C.1
tctttatatttcttgatattttacgtgtatgaagcatggagtttgaaacatccctatatcttttatgtgatacagtggtagacacatacatattgcctagtagctaatagatattttattggcactcgcttagttatgaattgtttatctcaagaagccaactaccttgttacttaccttcagaacttgtatggttggtgcctactgaaaaaatgtctgtgttggatgtctttattggcaggcagaattgtcaaagcttcttcctaatttgatgtttcctccttgctcccatttttcgttgcgttccttagaatgcaccacactgctattatgaaatgctctgtgtgcttatcatcatcctttgctatcaatactcctttgatctgtcttcatgtgttttattttattgttttcgtgcattaattaagaaatggtgatggtcgcagggctagtgtgcttgagcaagcctttcaaattgactataatggcctaatgggcactgggtgatgttttagagttagcatagagtg

SEQ ID NO: 10760 - DNA, 2156 bp, Zea mays
  Clone ID: MRT4577_109813C.1
cctgaccaccccctcgcctcgctttccccctcctctcattccatcgatccagccacgccgcctgcctgcccctcgcctcgggggcgaaccaggagaaggggattccggctagggtttcgcggatcgagaagagtcagggaagaagcggggggagagaagagggcggcacctagggtttccgcgggcggcccccccgcatggccacgcccgcttcctccaaggcccccgccacctccgactccgactccgagggcctcgccgagagcctgcgcgcgctgtgcgcgcggatggactccgccgcgttcctgggcttcgtggtggcccgccgcaaggaggcggacgcgctgcgggccgagatgccgccggcgctcaagctctgcgtggatccggccaagttcgtcatggacgccgtcgccgacgtcttccccgtcgaccgccgcgaggtccggaaccccgccgacctggcctgggcctgcgtgctcatcctcgaggccgccgtgcccgcgctcgccgacacggacccggacatcggccccgcgcgcccgctcgtgccgcgggcggcgcgcgaccgcgcgcggggcatggccagggactggaaggacgccgccgagaagaaggggggcgtcgagggcgccaagccgcccgacgcgcacgccttcctgcagctcgtcgccacgtttgccgtcgccgagagggaggacaggccgctgtaccgcaggattgtcgtcagcttctcctggcgccgccagatgccacgcctcgcgctcaccctcggactcgaggaacaaatggccgatatcattgaggaactgattgctaagaggcagcagcttgatgctgtaaatttcgcttatgaggctgggcttcaggagaagttcccaccagttcctcttttgaagtcctacctggaagactctaagaagacatcaaccgctgcttcagataattcaagcactagcagcggccaatcagggagcaatgtgaacaagaaagaacagtctgcactgcgagctgtcatcaagtgtgttgaggatcgtaaactagaagctgagtttccactggagggtcttcggaagcaacttgaagaactagagaaagccaagaccgagaagaagaaggcagcatcaagcgctaccagtggcggcagcggcggccctgcaaccaagcgcatccgtgcgagcactggaggcccaatgcctcctgccaaggcaggtcgtctcactaacaatgcttgcgtgtcttctctcccagctcccaccacattgacccagtctccctcccacgcgtcatacgccaacacctccccgtcccgcacctcatacgccaatacctccccatcccacgcctcatacgccacagtctccccaacccatgcatcatacgccacaccctcccctccccatgcatcatacgccacagcctccccttacccttacgacaggccggttggacacggcgtgtactgcacccggagcccgccggtgatcagggagccatatgtttacccagctgaggaggtagccaccgtcaacgtcggcattcccatggcctactccaccccgcccatgagctaccctgctgccccctacggcggctatggcaacgggatgccagcttacaccaatggaatggctcctgccttccaccaggcttactaccggtaggttcagtcaggaaacgaagaagtcgctgatgaatgacatgacaacaactgatgatgccaacgactcgaaaccccgctcaatggccctgttttgtagcgactgactacaacggtaggttgggtaccccatcttccatgtccttaccaccgctactactagatgtgttgtctttagctcctcgtctcatcttagtccgctaccgtaatttttttttactactactaaggaacctggatgtaaattatgtatggtatcagcgagactgtcgtcgcagccttatgtaattctgttcagaacttttgaaaaacgaaaaaaaaagaagaaaccagcatgtaatcctgaagtaccggtctaccggatgtaccgtggacttaattagaagtgttttttttatagttaaaaaaaaaaaaaaaaaaaaaaaaaaaaaaaaaaaaaaaaaaaaaaaaaaaaaaaaaaaaaaaaaaaaaagcggcctgcgttgttaccactgct

SEQ ID NO: 10761 - DNA, 477 bp, Zea mays
  unsure (1)..(477): unsure at all n locations
  Clone ID: MRT4577_109814C.1
cagacaaagggcaggaccanggcaccgangggggcaaaagcaggggcgggggcaaggaaaaccccncccacagcgngaattttttttcctgctattctgttatacgccgagattctcttttttttttggagaacncaangaggcanaacggcgggggggggaggagcacccccccgcacncannacaaggaacaagagnncnaaacggnggacacacaacgcaccngacacgccaagaagaanaggnggcgcacaacaaanacacgcgnccaagacgcccgaaaacagcccgcgannggacacagcacggggaagagcnggaccaagagagcgaagccacgaccangccncccgcgcagcgcgacaagaccggggngccgggcaacganggcaacaaggncncagaggcgaacgggcacgcgangggccacaagggcagccaccgcagancggacaacacccgaacgacagcgcgcc

SEQ ID NO: 10762 - DNA, 972 bp, Zea mays
  Clone ID: MRT4577_109815C.1
attcggctcgagggacccacctctttattcacccccgacacccctcctcccttcgctttcccctcctcgcctcgggggtgcgcgaatttcgactagggtttcgcggaccgagagggaagcggggagaggagagggcgggtagggtttccgcgggcgggccccgcatggcctcggcggcagcggcggcggtggcgccggccgcggaggagaagaagggcgcgggcgggccggtcacgggggacatggtcagcgcgggcttcgcggagctggagcggcagcagcggctgctcgccacctgcacgcgcctttaccagcacctgtccgaccacatcggctcgctcgagcgcgggctcgccgcgcgctccgacgcgctccgcgttcgccgtagggcattcgacgcgcgcacccaccgcgcgctcgactcgctccaccgccgcgaggcctccatcgacgcctccgtctcgcgcgcgctcgaccacctccacttcatctccgccaaggggtcaccgccggctccggatccggcacacgccgccggcgccggcgcggccgagggcctgcgcgccctctgcgcgcggatggactccaccgcgttcctgggcttcgtggtggcccgccgcaaggaggcggacgcgctgcgggcggagatgccggcggcgctcaagctctgcgtggatccggccaagttcgtcatggacgccgtcgccgacgtcttccccgtggaccgccgcgaggcccggagccccgccgacctggcctgggcctgcgtgctcatcctcgaggccgccgtgcccgcgctcaccgacccggacccggacatcggccccgcgcgcccgctcgtgccgcgggcggcgtgcgagcgcgcgcggggcatggccagggagtggaaggacgccgccgagaagaagggggcgtggagggggccaagccgcccgacgcgcacgccttcctgcagcacgtcgccacgttcgc

SEQ ID NO: 10763 - DNA, 773 bp, Zea mays
  Clone ID: MRT4577_109816C.1
attccattcccccacgccgcctgcctgccccctcgcctcgggggcgaaccacgagaaggggattccggctagggtttcgcggatcgagaagagtcagggaagaagcggggggagagaagagggcggcacctagggtttccgcgggcggcccccccgcatggcctcgccagctgcagcggcggcggcggcgccaccgccggccgccaaggagaaggagaaggacgcggaggaggcaccggtcacgggggacatggtcagcgccggcttcgcagagctcgagcgccagcagcagctgctggccacctgcacgcgcctctaccagcagctgtccgaccacttcggctcgctcgagcgggggctcgcggcgcgctccgacgcgctccgcgtccgccgcagggccttcgacgcgcgcacccaccgcgcgctcgactcgctccaccgccgggaggcctccatcgacgcctccgtctcgcgcgcgctcgaccacctccactccatctccgcctccgcctccggcgccgccgccgcttcctccaaagtccccgccacctccgactccgactccgagggcctcgccgagagcctgcgcgcgctgtgcgcgcggatggactccgccgcgttcctgggcttcgtggtggcccgccgcaaggaggcggacgcgctgcgtgccgagatgccgccggcgctcaagctctgactggatccgagcaagttcctcatggacgccatccccgaggtcatccacgtcaactgctagaggtccggaacccccg

SEQ ID NO: 10764 - DNA, 261 bp, Zea mays
  Clone ID: MRT4577_109817C.1
gttgggtaacatgatagaatttgtaggggttcataatgaaaacaggcacaaaacaaagctgtaagactttgttgtccgtataaatacggaaccccttattatgggaagggaaacataggccttttttaggcacgcaggcgaagttaaagatcccctacatagttgcaggaatttaagaaaaacgctcttttgtttgatcacaatacgacatgaagggagcccccgcgcggtacctagcattagtttatcgccacacttgat

SEQ ID NO: 10765 - DNA, 597 bp, Zea mays
  Clone ID: MRT4577_109818C.1
agcattctttctagcattacccgtaggcgcaaacgtaagcacgcgaccgacatggcgaacgcactgacgaaagaacgcgccagactctacgtccggctctacatccttggatacatcatgtgcaactcgaaccactactagaccccgtatctcacgacgattctcgtgctgatcaacgaggaggatgccacgggggatgctgcgtggcacattgcgtacctcttggaggacatcaacaagagcaataacaccagctacgagagcctctgcaggtgcgtctgccgtccggacacacactcgcacgtcaactctgccgagttccaggccaagctcccgtctgacctcctgcctgactacgtgagagtgttcgtgtaaccgatcatgatctcaagctttgtctaaggatttattgactaaaaaaggccctgtgaatgtttctgagttttttcctcacttttctcgtcttgtgatgtgacctgagattgttcctgagattgatctggggatgatgctgcgaaatttgttgccaaatttgttgactattggatgaatgatatgccaactgctattcttactttgcatcttaatttgccccta

SEQ ID NO: 10766 - DNA, 1489 bp, Zea mays
  Clone ID: MRT4577_109819C.1
tcgccaagaggaacaatagcaccagctccctcgtgcaggacgacggcgccacgccgccgccggctgcagtagacgcctccgaggactcggcggcgaccggcgagtactacgaccacgtcgcgtacgagtacgatggcctgcacgaccccttcgtctgcgccactccggacctgtgggatacgtggccgctgctggagtggaacgcggtggcctgaaacctcgatcgtgtactcgtcgtcatgtctctgtatctagtgcacgtgtggtggattcatggtgattccttatatagctagctagccccaactagctaccgagccagttgatccggggagggatcgacgggtaacagacgatagagagctgggtaattaggaatcaggagcgaccggcggctctgaagtctgaaccacctctctcacgaacatggatcctaaggtgcacggtggccggacattgtcgatcgatccctcttttccctccacagccgccggtcgctcctgattcctaattacccagctctctatcgtctgttacccgtcgatccctccccggatcaactggctcggtagctagttggggctagctagctatataaggaatcaccatgaatccaccacacgtgcactagatacagagacatgacgacgagtacacgatcgaggtttcaggccaccgcgttccactccagcagcggccacgtatcccacaggtccggagtggcgcagacgaaggggtcgtgcaggccatcgtactcgtacgcgacgtggtcgtagtactcgccggtcgccgccgagtcctcggaggcgtctactgcagccggcggcggcgtggcgccgtcgtcctgcacgagggagctggtgctattgttcctcttgtcgtccgccgccgcctccgcgtcgttgacctcgcagctgccgctctggtcttgccgctcgttcagcctcccccgcagctcgtctacctgcgcggcgagcgcgatcttctcctgcctgagcgactcgacgcgggcgtgcatcgcgtcgaactgagccctgagcgcggcgtagtcatgctccagctgcttggagcgccaccgcgcacgcttattctggaaccagatggccacctggcgcggctgcaggccaagctcccgcgccagctccgccttctcccggggctccagcttggcgcgccgcgcgtggaacgtcgtctccagcgaccgcacctgctcctccgtgaaccgccgcttcctctccccgccggcggcggcagctccccgccccgcgcccgcggggtcctgctggtcgccggccaccatcagctggtgcatgaactgggcctcgtcgtactgccgcggcggcaccaccgtgaactggcagtcgccgcgctccatgccctcctccgcctgaaccgaaagcacctgagtcctgagcgccgtcgtcgtcgtcgttgctcgccaaagccaacctggcagcgccggctagctgtgtttgtgtgtagtagtagc

SEQ ID NO: 10767 - DNA, 406 bp, Zea mays
  Clone ID: MRT4577_10981C.1
gcctgccgggccttgctagctgcgccgccgcctccgacatcgtcccttcgtccccacgagcaaccgataatccgccggcgttgagatgttggtttatcaggatctcctatctggcgacgagctcctgtcggattcattcacctacaaggagctcgagaacggcgtcctgtgggaggtcgagggaaagtgggtcacccaaggtcctgttgatgtcgacatcgacgccactccatccaccgaggctgtctcgtccgtcccaccacgagccgaccgctgctgacacgcagctggccgctcccaccaacttctgggtcagataaacaaccgatgcaaagacgaatctcttctttttcgcccccccccccccgccggggtgtttgcaaaaccccttcctctacctagctcc

SEQ ID NO: 10768 - DNA, 576 bp, Zea mays
  Clone ID: MRT4577_109820C.1
cccccctctcgagttttttttttcttttttttttttttttttttttttttttttttttttttttttttttttttttttttaaaacagacccggtttgcttttttttttgacggtggtgggaatacccaggccccctaaacccccttttttggacccccgggccggggggttcacaacatgaaaaaaacagttcttgtttttgcccaacacaccccagggggggggggtttgttttataaacacccagccgggttttttggggggccttttttatcacaactggagggttacaggggaaaaaagtacccgggggggtttttggagcccacttttatttcggggcccagggtttctcgtccagttttggggacctcacagaggccatagggctccaaaaccctttggggggcaccctttttgtaaaaatctccagtaagctgaagcgtttttggggggccaaaaacatcaacgggttttgttcggaaaatttcagcaatttttaggatttctttccgggcggcggggttgacaaaacccttaataagcataagttccttttcaacaaagggggggggg

SEQ ID NO: 10769 - DNA, 2930 bp, Zea mays
  Clone ID: MRT4577_109821C.1
ccggccggggtcctggcatctccccacttcgctctcaccccacgccgcgtaccgctattaataccaccaccagtgccggcacctctgccagttcgccaccatcgtgctccgtacacgctccgctccggccatggccgccgccgcggcctccttttcggccctgccgttccttctacttttgctgctggtgccgtcgctcgacggcgcctccaatgtgacgtacgaccaccgctccctcatcatctccggccgccgccgcctcgtcatctccacctccatccactacccccgcagcgtccccgagatgtggcccaagctggtggctgaagccaaggacggcggcgccgactgcatcgagacctacgtcttctggaacggccatgagatcgccccaggccagtactacttcgaggaccggtttgacctggtgcggttcgtgaaggtcgttagagacgctgggctgctcttgatcctgcgcatcgggccctatgtcgccgccgagtggaattatggaggcgtgccggtgtggttgcactacgtgccaggaacggttttcaggacaaacaacgagccattcaagaaccatatgaagagtttcacgacatacatcgtggatatgatgaagaaagagcagctcttcgcttctcagggagggaacattatcctagctcagatagagaacgaatatggagattattatgaacaagcgtatggagctggcggcaaaccatacgccatgtgggcagctagtatggctcttgctcaaaacactggtgtcccttggattatgtgccaagagtctgatgcccctgatcccgtgataaactcttgcaacggtttctactgcgatggattccagccaaattcgccaaccaagccaaaaatttggactgagaattggccaggatggttccagacttttggtgaaagtaatccccacagaccacctgaagatgttgcattcgctgttgcacgttttttcgagaaaggtggcagtgttcaaaattactatgtgtatcatggtggcacaaattttggtcgcactactggggggccattcattacaactagctacgactatgatgcaccaattgatgaatatggacttcggagatttccgaagtgggcacatctgagggaacttcacaaatctataagattgtgtgagcacaccctgctttatggaaatacaacgtttctttctctgggtcctaaacaagaggctgatatttacagtgatcagtctggaggctgtgttgcattcctggcaaatattgattcagccaatgacaaagttgtcactttccgtaacaggcaatatgatcttcctgcttggtcagttagtattcttcctgactgcaggaatgtggtgttcaacactgcaaaggtgcaatctcaaacttcaatggtgaccatggttccagaaagtttgcaagcatcaaaacctgagcgatggagcattttcagggagagaactgggatttggggtaaaaatgactttgtccggaatggatttgtggaccatattaatacgacaaaggactccaccgactacctatggtacacaacaagttttagtgtggatggaagttactcctcaaaagggagccatgctgtccttaatatcgactccaatggccatggtgtccatgctttcttgaataatgtgctcataggtagtgcatatggtaatggctcacaatcaagattcagtgtcaaattgaccatcaacctgaggactggaaagaatgaacttgcccttctaagtatgactgttggtttacaaaatgcaggattcgcttatgaatggataggagcaggctttacaaatgtgaacatctctggtgtgagaactggaatcatagacttgtcttcaaataattgggcatacaagattggactggaaggggaatattataatttgttcaagcctgatcagacaaataaccaacggtggataccacaatccgagccaccaaaaaaccaacctttgacatggtataaggtaaatgttgatgttccacaaggagatgacccagttgggatagacatgcagtctatggggaaaggcttggcttggttgaatggaaatgccatcgggcggtattggccgaggaccagttctattaatgataggtgcactcccagttgtaactacaggggaacatttattccagacaagtgcaggacaggttgtggacagccaactcagagatggtaccatatcccacggtcatggtttcatccctcagggaacatcctcgtggtctttgaggagaagggtggggatcccacgaagatcacattctcaagaagagctgtgacgagcgtgtgctcctttgtgtcagagcacttcccttccatagacttggaatcctgggatgaaagtgccatgaacgaaggcacacccccagccaaagcacagctgtcttgccccgagggtaaaagtatatcttccgtgaagtttgcgagcttgggaaaccccagtggaacctgtagatcataccaaatggggcgctgccaccacccgaactccttatctgttgttgagaaggcctgtctgaacaccaacagctgtacagtctccctgacagacgagagctttgggaaggatttatgccctggagtcaccaaaacactcgccatcgaagcggactgttcttagtgacctacggagtacgaagtgtctcggtgtgcatctaggttccactgcaagtatgcccgtcaaaattctaaaactgtagtgcttgttgcacggcaatgctattgtaacctggatttgaatgtatccatctgagctaggttatgtttcaggagctttcttaaactaacgttgttgctgagcagcatgaaatctgattagcgcaaatatgtttcctagattttaagagtaatcaaaatcattactcaaaaaaaaaaaaaaaaaaaaa

SEQ ID NO: 10770 - DNA, 2131 bp, Zea mays
  Clone ID: MRT4577_109822C.1
tattcggcacgagggtcacacaaaagctgagcttgctgtctacgattcaaaaaaaaaaaagaaaatcaaccgtatcgttgaaggaatgctgtttgagaccttcgtcgtggctactctgctgatccttctcctcgttcctgttggccgctgcgccgacgccaccgccggcagcgatgacgagcggttcgtctacaacggcttcaagggcgcgaacctcaccctcgacggcgcgtccaccgtgacgccgaacggcctactggtgctgaccaacggcaccatccaaatgaagggccacgcgttccacccgtccccgctgccgttccgtgaccggggcgcccagaacgccaccgccgcgcggtccttctcgaccaccttcgcgttcgccatcttcgggccgtacatcgacctgagcagccacggcctggccttcttcgtctcctcggacagggcggctctgtccaccgcgctgccggggcagttcttgggcttgctcaacagcaccgacaacggcaacgggagaacccacgtcttcgccgtggagctggacacgctcttcaacgccgatttcctcgacagaaacagcaaccacgtcggcgtcgacgtcgacagcctagtgtcgcgtgctgctgcggacgccggttactacgacgacggcaccgggcagttccggaacctgagcctggtcagccggaaggccatgcaggtctgggtggactacgacagcgggtcgactcaggtcaccgtgaccatggcaccgctgggcttggccaggccgaagaagccgctgctgcagaccaccgtcgacctctccggcgtggtgcagggcaccgcggcgtacgttgggttcacgtccgcgacgggcatcctcttctcgcgccacttcgtgctcggctgggccttcgcgttcgacggggcggccccggcgctaaacatctcggcgctgccagccttgccgcccgcggggcccaagccgcggccgaaggtgctggagatcgtgcttcccatcgcgacagccacgctggtgttcgccgtgggcgtcctggtttacgccctgctgcgccgccgggccaggtacgccgagctccgcgaggactgggagaccgcgttcgggccacaccggttctcgtacaaggacctgttccacgccaccggagggttcagtgacaagcggctcctcggcgccggagggtttggcagcgtgtacaggggcgttctccgcaaatccaacacggaggtcgcggtgaagaaggtgtcccacgagtcaaagcagggcatgaaggagttcatcgctgagatcgcgagcatggggcggctgcggcaccgcaacctagtgcagctgctcggctactgccggcgcaaaggtgaactcctcttggtctacgattacatgcctaatggtagccttgacaaacacctctacgatcgaagcaagggcgcacgtgcgctgggatggcctcaaagacttcacgtcatcagaggagtggcgtccgggcttctgtacctgcacgaggactgggagcaggtggttgtccatcgagatgtcaaggcaagcaatgtgctcctcgacggcgaaatgaacgggcggttaggagacttcggcctcgcgaggctgtacgatcacgggactgatgcgcatacgactcatgtggtcggcactatggggtacctggcccctgaactaggccacaccggcaaggcaacgccggcaactgatgtcttcgcctttggggcattccttctggaggtcacctgtggacgaaggccagtcgagcaggacgagcacaacagccacacggtgctcgtggattgggtggctgagcgctggcgtaggaggctgatccttgacgcggcagacacgatgatcccagacggtttcaatcctgatgaggtctgtctggcactaaagcttggtctgctctgctcgcatccgttgcccaacgcaaggccgaccatgcggcaggtcatgcagtacctcgacggcgacatggtcctcccggacttgtcaccggagtatttcggcttcaccgcagtggagcggatgtatagcagggaggtaagcaaggatacgatggcatacgtgtcgtcgtccacgagcatgggtgccatttctgatctttctagtggaagatga

SEQ ID NO: 10771 - DNA, 734 bp, Zea mays
  unsure (1)..(734): unsure at all n locations
  Clone ID: MRT4577_109823C.1
atctttaatctgttgcacttccttccttctcaccgacgaatcctccatcccgcgcagcatctcctccctccctccctccgctccgtccgcgtcgccaaaccctagtagtacgttgtacaggacaatggggccacagccaccgcttcaccttcccgccgccaacggcgacagcatcgtcgaccgcgacgtttggctcgcctgcgccgtcccgctctcccgcctccccgccgtcggtgccgaggtctactacttcccgcacggccacgccgagcagtgccccgcgcatctcccggcgccgctcccggcgccgcacctcttcccttgcaccgtcgccggcgtcagccttggcgcggacgacgagaccaacgaggtgttcgccaaaatctccctcagcccaggcccccaccgcgggcccgccgccgcttgtcgtaccgaccccaccagcgactgcccgccgcaggagctcagttacttcaccaaggagctcacgcagagcgacgccaacaacggcggcggattctccgtcccgcgctactgcgccgaccacatcttccccacgctcgacttcgacgccaacccgcccgtgcagaagcttttcatgcgcgacaccaggggcaacccgtggcagttccgccacatctaccgcggnacgccacgccgccacctgcttaccacggctggagcaggttcgtcaacgccaagctgctcgtcgcgggggacatcgtcgtcttcat

SEQ ID NO: 10772 - DNA, 1342 bp, Zea mays
  unsure (1)..(1342): unsure at all n locations
  Clone ID: MRT4577_109824C.1
ggccctaggggccttttttttttttttttttatttttttggctgaggacacttatcatattgagtaatgcctctgaagactcttaaaatctaggaaacatatttagcgggtaaatccaggttacaatagcattgccgtgcaagaagcactacaattttagaattttgacgggcatacttggaacctagatgcacaccgagatacttagtactccgtacgtcactaagaacagtccgcttcgatggcaagtgttttggtgactccagggcataaatccttcccaaagctctcgtctgtcagggagactgtacagctgttggtgttcagacaggccttctcaacaacagataaggagttcgggtggtggcagcgccccatttggtatgatctacaggttccactggggtttcccaagctcgcaaacttcacggaagatatacttttaccctcggggcaagacagctgtgctttggctgggggtgtgccttcgttcatggcactttcatcccaggattccaagtctatggaagggaagtgctctgacacaaaggagcacacgctcgtcacagctcttcttgagaatgtgatcttcgtgggatccccacccttctcctcaaagaccacgaggatgttccctgagggatgaaaccatgaccgtgggatatggtaccatctctgagttggctgtccacaacctgtcctgcacttgtctggaataaatgttcccctgtagttacaactgggagtgcacctatcattaatagaactggtcctcggccaataccgcccgatggcatttccattcaaccaagccaagcctttccccatagactgcatgtctatcccaactgggtcatctccttgtggaacatcaacatttaccttataccatgtcaaaggttggttttttggtggctcggattgtggtatccaccgttggttatttgtctgatcaggcttgaacaaattataatattccccttccagtccaatctataaattttaaaaagaaaagaacacactttcatatcaatttcaggatatatcagcagagggaagaaactatcatactctgtaaaaaaagatggatcaattgtatcgagttcgtcatgtaatttcatgttaaattctagaatataaatttgccccaaaaaaccgaagactattggtgacaataccttgtatgcccaattatttgaagacaagtctatgattccagttctcacaccagagatgttcacatttgtaaagcctgctcctatccattcataagcgaatcctgcattcttatagggggcataatcttaatcaatatggtaactttgtattgaaagatnatata

SEQ ID NO: 10773 - DNA, 931 bp, Zea mays
  Clone ID: MRT4577_109825C.1
ccggccgcggccgggacactgtaaatttgtagatcgtctccgaggcgaggagagagagagagagagagagagagagagagagagagagagagagagagagagagagagaggagagagagggacaggatgccccgcagcggcatttcggggaccctcaggtcgccccagatcgacgtggtcatcgacacggggaaccccttcctgaaccgcaccgtcgacggcttcctcaagatcggcgccgtcggcgcctgcaaggtggcggccgaggagaccttcgactgcctccacaggggggatgtttcaaagcgcaaggttgagcatgccctgaagaagatgtgcaaggagggcgcatattgggggactgttgctggcgtctacgtgggcgtggtgtatggcgtggagagggtccgtgggcgcagtgactggaagaacgcgatggtcggaggcgccttgtccggcgcgctggtctccgccgccagcagcaaccacggagacaagatcgtcaaggacgccatcaccgccggcgccgtcgcaacggccgtcgagttcgccaactacctcacctagctgagcaaactgcatctgcagcgccgctgttcataagccagcgtcttcaggcttcgtttcttctgacaggcaggcagcagtttcgctttgcgtgagtgtctcctgaatccgttgcctctgcggttcgcaaatgcagccgtggggttggagctggagccgtagctacggacaaacaaaaatcacattacgcaattgtttcagacctgataagacactgcctgcaatttgccaaaacttggtttcggagttccaaaataaacttgtaatgttagccacggtgtataaggccttttgtattgccatttttttattatgttttgcttcctcctcttttttatgaaacaggggcgttgtttgttgtttc

SEQ ID NO: 10774 - DNA, 375 bp, Zea mays
  Clone ID: MRT4577_109826C.1
gtagcgaatcagtgcttctggttcaaagttctgattcttcggtgcttgaccacaaaggcacgtagccactactcagagtgccttttaagactttagatgatccacaataaactctacgagaaccaagggtaaaaaaggaaaaaaaaatcagctgacacggccatgctcactggaataccaaaagttcagaacaaaaatttcggctcatgcagcaccgtttcctaacgggggaattttacatacttggcagttaaatcataaagactcactagcgacgcataacgaatgtgaaatcccaacagtgttaactatgatcatgactgtggtttcttggcaaaccgctgcaaggcttttgggagttcgacctcttcgcct

SEQ ID NO: 10775 - DNA, 437 bp, Zea mays
  Clone ID: MRT4577_109827C.1
attctgtttctgcactgggtgacaagtgtcatgtgggtgtttggggaaaaactgatatgaggaacccagccctgatccaaaatgtcaattatggtgccacagtaataaatagcataaaacttatcatggtaagcgcaaagtaaggtgaaattagttcatgtttagtttattattaatgtatagcaagtagtccttaggacttcttgagtccgctaactactgaaatcatggagagacaagaactaatgagttgaatttctacctgaaatgacctcagtagtttaggtaatacaagttctcacacttaaatttggaccttctagccacacaaataatagtgcatttaccaagtgctaacattagtgatgaacttgctttctgcagcagcacagcagcagctgattgagtatgaaaagaagcttttgggtctaatgatg

SEQ ID NO: 10776 - DNA, 856 bp, Zea mays
  unsure (1)..(856): unsure at all n locations
  Clone ID: MRT4577_109828C.1
ttgctgtcggtctgcttcgacgacctcccgcacgagctcaagtgctgcttcctctacttcgccgcgcttccgaccaacaccacggtcgaggcgcgcagcctggtgttcatgtgggtcgcggaggggttcctttcctccaagggcgggaagacgatggagaagatcggcttcgtctacctgtccgagctgatcagccggaacctcgtcaaccgggccaaaatgaacgacgattccagcttcgggagcatgctggtcacgatccaaaccaaagtccacgacttcctgcagatagaagcgcatgaggcgagcttcgtggaggtccacagcaacgacgacatccccacgctgaccagcgctcgccgcctctctctgcagaactacaccgacaagtacgccgtcctggcgcacccgctgccgaagctacggtccatcttctcccagtacgagcaggagcctaacaagggtgaccgggggcaccaccacaggtccaaagggagccgggcgtacatgttccggttgtcccagcaaaggccatctcgaagatgaagagagacatcaggtctcacatcaaggacctgttccatgggtccgagttcctccgcgtcatcaacctgcagggcatcgagatcggcgagactctgacgagcgccatcggcgaccttgtgcacctgcagtacctcggcatcacgtcgtgctcgctgagacacgtcccgtggtccatcggaggactcaccagcctccagacactggacgtgagggagacaacgtccgagagctcccgaggtcgttctggatgatncagaccctgcggcatgtgcttggcttcgtcctcagctgcccagcagatcggcgactg

SEQ ID NO: 10777 - DNA, 321 bp, Zea mays
  Clone ID: MRT4577_109829C.1
acgtcatgtacacacaacggcaaattgtgcttcactggactccgacgtaacatctgagagccagcctgatgatgatcataggcctacccacatgaatgcatctgatataatatctctatcaactggctggcacctctgtggcttatttgaagaatctaactggaagagagaatccaaagacacatgtaccaacacaagctcgactatcatatgaaacatcgaagatactgcacagaataagctgctgaatgtgacataaaaggatgtacgcatgtttatgatggaagcttcaaagcctggaaagacacgggaaatgggtat

SEQ ID NO: 10778 - DNA, 460 bp, Zea mays
  Clone ID: MRT4577_10982C.1
ccctccttcctttcttaatttaatgatacgcagctctcctgcgtattcgagagaaaaaataattttatcgtactaatgaaaaggatcccaataaaccagccaatcagctcagtatcttctacacgattaatttttaaagtatttatacacaaatatgtgaaggggcctctagctgagttgtttaggtggtctaagtagcactccttaggtcctgagttcgaatcccagtggaagcgaagtttaggctgaggttataaaaggtcactcgttggttctcttgttgtgtggactgacctgtgaggggcagctaggagggctcaaagcacgagtaaagatctggcctatagggggcggaccctcatgctgcacgaggggccaccggccagctttcatgacatttctcggtcggggttccaattgagcttctttttaatataataccgtggggtagtctttcccc

SEQ ID NO: 10779 - DNA, 2418 bp, Zea mays
  Clone ID: MRT4577_109830C.1
atgaggggaagatactttcgagatatgtctattgtcagggctggcggagacgacaacgttcctgcgcctgaggagaacgaagttgtgattttccgaagcttcttcaaagctgggcttcggttcccactgagcaggtttgtagttgaagtgttgaaaaccttccaaattttccttcatcaattgacccctaaagctatattgaggatgggagtcttcgtctgggaagtaagaagccaagggatagagccaagcgcaaaatgcttctgcagcatgcacgaacttctgtatgagacgaaggccacagggaaagaacaatatcacaacaacttcggttgttatggatttatcgcccgtcccaacgcaagccacctagtgccaacatttcggaagagatggccgggaaattggatggaagaatggttttatgtgaagaatgacttgatagcaagagaggacattacggaggttattatgcgccccatatggtcccgcttcggcctccgaaagccgaaggttgaaattgacgaagccgccgaagcatgtcagaaggcatttggtactgtctgcttttttattggtacgagagatttaattcaagagcacatagtattcaaagtatggccgcttgtagagagctgggaaataccgaaggagaccatcatcgaatctagtgaagaagacaatgcattatccacagccttcggaggccggggaaaaaagagattgaacatagtttttgatgccattggctttgtttaccccgactaccgctattcgttgcgaggtcagggaaagaagagaaaagctgctacttcggccactccagacgagcctatgccgaagggcaaaaagttaaaggttcttacccaccggtcgcgttatattgaactggtcgtggtgcctgaatttggcggggaggcatcttcagctgctgaaccaagggaacctgttccccccacgcagaaggctgaagagccggctataatgccgaaggcaccttcggttgagctagttgaaacgaaggttgacaaagataaggctgaagagtcaaaaactgaagaagtaacaaagatgccggggattttaagtcctttaacagaagcaacaacgctgaaggcagaaaagagttctaccacaactcctaacagaaggaggatggttgccactcctactcccgaagctttaaaagaaagcattgattacatcatctgccatgcttcgggaaagggactttctcaggaagaagaacgagaagctcaacattatgcccaaaaattgaaatacccgaagggggcattggtgttcaatggcagtggagaagaagattttttgtactgtctcccggataataaagagatatctgtctgccgggagataggtagaagcttcgaatttctgaagctggaagatggcctttcaatattatcaaaggatgaactggctgacagtttagcatataatagcataaagggcttaatccttagcaatgcccttagagcacagaaaaacattgaagatgaagggtatacaatggctctgaacaaccttcgttcagtggtgatcgaattaaggaacgaaggccttgaaaaagacaaaatattaatttcattggtaaacaaagtaaaagaaggtgaagctagttccaaagctcaagctgagattcaaaagaatgagatcgaggaccttcggaaacaattggcagaggccaaagaaaaatgcgctctcgccgaagctaaccgagatgccaacgaatattggaaaaactatttagaaaaaacagttgaagaacttcgcgcatccaaggaaagatattttgaaaaatctttgggttgcgtggagaacataaaggctagcttcaccaacgtgggcgcctattcaaacgaagataacttcatacgaggcgacccaaagggtgttatcgagtggataagcggagaagccgaagcttttgaagaaatcttaagtgaccgaggagatgtatgtgcattttctggtgcacgcgggatttcagcaatcttggagaatgtggggtgcaatcacatcaaaaccatggcccatgccgaagctgccttctccgcggacgtcacgaaggacccttcagctgaagcaaccttaatgggcggaaaattttataatgatgtgtgggagaatggtggtcgagaaatggctcatgaaattatgaagaaaagtgaaaaagacatccatgaggcccgagttgaagcaaaacgagctgaaaaagctgctgagcgtgaaaaacgcatagctgaattatctcctccatcggagccattcgaccccctggctgacccagaaacaaagaaagcaatagaaatcatcaatatagccgaatttattgttgacaaagttgttaacaagttattgaatgaaattgcggaaaaggtcctgaaagaggaatga

SEQ ID NO: 10780 - DNA, 467 bp, Zea mays
  unsure (1)..(467): unsure at all n locations
  Clone ID: MRT4577_109831C.1
gaagctggatcctcagagcgttcccccccactttttcnttttttttcccggcaactaaaaacgaagaagagtagccaattgtagctacacacccacatctacacaattctgcaacatctagcaattctataaaaaccttaccttacctaaaatcaaaagattaatcacaaccgaccttacatttctatttgcatagactgtttgaagaatgcatcaccacattttatcaaaaacaaggtcttttttcatctatgtctaaggaggaactttccttatacgtacgatcagtctcatttttgaatcatcacagatcaagtacccattatcctctgccttatcacaacaattgttaaatcattccttgctaaagaaatcttcttataattatgatggaatcatcttaaccccttatcttttacactttaaaacaacatttatattttttaaaatcttctttaaaaatttct

SEQ ID NO: 10781 - DNA, 565 bp, Zea mays
  Clone ID: MRT4577_109832C.1
ttgtgtacctcgaagccggccggggaaactcttctcctcctcatctctctctccaaattcctctcccgataagagcgaagcctcggataaggttgagcttcccctgccacccctacagtgctccagtctcccctccaacctacgcagcaaaaattctgtgatcgagctccgatccgactcgactactaacacacgccgcagaagacgtgcgacctgatctcgcgaagctctagaaaagatgaagcgcgacaccgcgcttgactgacaccgtaccgacgcacgagaaggaataggagtccgcatccctccgcaccgctgcccgaagaacctatggattccgaacactggatctcgcgtctggacgccgcaaattgcttataacgcggcgcaccatcgaacacagcgatcacgccggagatggacgagctgcataggtaccaggagttcagggccgatgtcccctgcccctactgctacgaggaccacgacgtcagatccctccgatagaacctggaggaggaccacccgttcgaacgaccagccgcgagctgcccagtctgatctg

SEQ ID NO: 10782 - DNA, 2214 bp, Zea mays
  Clone ID: MRT4577_109833C.1
atgtctcaagacaagaaggttgctgctgagacgaagctaactgaagaggagaagctttttgaggagaagaaggctgcgaatccttacatagctgggtttatcgagtcaatggcaaaatcaaatacagagaagattactaaggagatactggagggcctgtctgaagatactagtgatagtgacagttatgatgcaaaaagtggaggcgaagattctgatgatcgaccctggagaccaagtcatgcaattttcggaaaatcgaccatcaagcaaagtcacctcgaaaacatgaggggaaggtactttcgggatatgtttattgtgagggctggcggagacaacaacgttcctgcgcctgaggagaacgaagttatgattttccgaagcttcttcaaagctgggcttcggttcccactgagcaggtttgtagttgaagtgttgaaaaccttccaaattttccttcatcaattgacccccgaagccatattgaggatgagagtcttcgtctgggcaataagaagccaagggatagagccaagcgcaaaatgcttctgcagcatgcacgaacttctgtatgagacgaaggccacggggaaagaacattatcgcaacaacttcggttgttatggatttatcgcccgtcccaatgcaagccacccagtgccaacatttcggaagagatggccgggaaattggatggaagaatggttttatgtgaagaatgatttgatagcgagggaggacatcaaggaggttattatgcgccccatatggtcccgcttcggcctccgaaagccgaaggttgaaattgatgaagcctccgaagcgtgtcagaaggcatttggtactgtctgcttctttattgttacaagtgatgaactgcttggatcatattccaaggtagaagataatgcattatccacagccttcggaagtcgagaaaagaagagattgaacagagtttttgacgctattggcttcgtctaccccgactaccgctacccgctgcgggggcaagggaagaagaggaaagctgctgctctggctgcctcggctgaacctgtgccgaaggctgcgggcaaaaagatgaaggtacttacccaccgaccacgttatattgaaccgaccgtggtgcctaagtttggcggggaggcctcttcagctgatgaatcaagagaaactgctcctccgatgcagagggctgaagaactggctacaatgccgagggcacctttggttgagctagttgaaacgaaggttgacaaagataaggttgaaaggtcaacaactgaagaggtaacaaagatgtcagggactttaagtccttcaacagaagcaacaacgctgagggcacaaaagagttctgccataactcctaggagaaggaggatggtaaatgtattagatgtactggagacaaccgactccataagtctcgctcccaaagggaaggttgccgaagctgacaaaacgcaacccaaagctgatactaagcaaatagatgttgaagctacaacaacccatgctaaaaccgaggtggggccctcagtgcgtgctgagatgaagcctgtggaatttgaagaaaaggcaacagaagaaaaggccacagagcaaatttcgtttgaaaaggttgccactcccgctcccgaagctttaaaagaaagcattgattacatcatccaccatgcttcgggaaagggactttctcaggaaggcttaatccttagcaatgcccttagagcacagaaaaacattgaagatgaagggtatacaatggctctaaacaaccttcgttcagaggctagcttcgccaacgtgggcgcctattccaacaaagataactttataagaggcgatcctgaaggcgttatcgaatggataagcggagaagctgaagctttcgaagaaattttaagtgatcgcggggatgtctgcgcgttctctggtgcaagaggaatttcagccatcttggagaaggcgggttgcgatcatgtcaaaaccctggctcaggccaaagccgccttctccgtggatgacacaaaggatccctcagtcgaagcaagtttaataggcggaaaattctacactgacatctgggcaaatggcggccgagaaatggctcacgaaataatgaagaaaagtgaaaaagatattcacgacgctcgagaagcagcgaaaaagctgaggaagctgcagaacgcgagagacgaatag

SEQ ID NO: 10783 - DNA, 2280 bp, Zea mays
  Clone ID: MRT4577_109834C.1
atggatgaaggccttaagccgaaggaaaaaatatctcaagacaagaagattgctgctgagacgaagctaactgaagaggagaagctctttgaagagaagaaggctacgaatccttacatagctgggtttatcgagtcaatggcaaaatcaaatacagaaaagattacaaaggagatactggatggcatttctaaagatactggtgacagtgacaaatatgatgcagaaagtggaggcatagattccgaggatcaaccctggagaccaagtcacgcaagtttcggaaaatcgtccatcaagcaaagtcacctcaaaaacatgaggggaaggtacttttgggatatgtctattgtgagggctggcggagacgacaacgttcctgcgcctaaggagaacgaagttgtgattttccgaagctccttcaaagctgggcttcagttcccactgagcagcatgcacgaacttctgtatgagacgaaggccacagggaaagaacagtatcacaacaacttcggttgttatggatttatcgcccgtcccaacgcaagccacccagtgccaacatttcgaaagagatggccgagaaattggatggaagaatggttttatgtgaagaatgacttgatagcaagagaggacatcaaggaggttattatgcgccccatatggtcccgcttcagcctccgaaagccgaaggttgaaattgacgaagccaccgaagcaagtcagaaggcatttggtactgtctgcttctttattggtcatgggaaaaagagaaaagttgctacttcggccactccagacgagcctatgccgaagggcaaaaagttaaaggttcttacccaccggccgcgttatattgaaccgaccgtggtgcctgaatttggcggggaggcttctttagctgctgaaccaagagaacatgttcctcccatgcagaaggctgaagagccagttataatgccgaaggcaccttggtttgaactagttgagacgaaggttgacaaagataaggctgaaaggccaaaaactgaagaagtaacaaagatgccagggattttaagtccttcaacagaagcaacagcgttgaaggcagaaacgagttctgccacaactcctaagagaaggaggatggctgaaaccgaggcagggcccacagtgcctgctgagacgaagcctgcggaacttgaagaaaaggcaacagaagaaaaggccacagagaaaatttcgtttgaaaaggttgccactcctgctcccgaagctttaaaagaaagcattgattacatcatccgccatgcttcgggaaagggactttctcaggaagaagaacgagaagctcaacattatacccaaaaattgaaatacccaaagggggcattagtgttcaatggtagtggggaagaagattttttgtactgtctccctgataataaagagacatccgtctgccaggagataggtagaagcttcggatttccgaagctggaagatggcctttcaatattatcaaaggatgaactggctgacagtttagcatataatagcataaagggcttaatccttagcaatgcccttagagcacagaaaaacattgaagatgaaggttccaaagctcaagctgagattcaaaagaatgagatcgaagacattcagaaacaattggccgaggccaaagaaaaatgcgctctcgccgaagctaaccgagatgccagcgaatattggaaaaactatttggaaaaaacagttgaagaacttcgcgcatccaaggaaagatgttttgaaaaatctttgggctgcgtggagaagataaaggctagcttcgccaacgtgggcgcctattcaaacaaagataacttcatacaaggcgaccctgagggtgttatcgagtggataagcggagaagccgaagcttttgaagaaatcttaagtgaccgaggagatgtatgtgcattttctggtgcacacgggatttcagcaatcttggagaatgcagagtgcaatcatatcaaaaccatggcccatgccgaagctgccttctccgaggacgtcacgaaggacccttcagctgaagcaatcttaatgggcggaaaattttataatgatgtgtgggagaatggtggccgagaaatggctcatgaaattatgaagagaagtgaaaaagacatccatgaggcccaagctgaagcaaaacgagctgaagaagctgctgagcgtgaaaaacgtataagtattgtttcgcagcatctaacttcgtcatttgttctcgtgacttcgaaatga

SEQ ID NO: 10784 - DNA, 2739 bp, Zea mays
  Clone ID: MRT4577_109835C.1
atggcaaaatcaaatacaaagaagattactaaggagatactggagggcctgtctgaagatactggtgatagtgatgattatgatgctgagagcgggggagaagattctgaggatcggccgtggaggccaagtcatataatttttgggaaatcaacaattaaacagagccatcttgacaatatgagaggaaggtactttcaggatatgtctattgttagagctggtggagacagcaacgtccctgtccccgaggaagacgaagttgtgatttaccgaagtttcttgaaagctgggcttcggtttccactgagcaggtttgtagttgaagtgttgaaaatttatcaaatttaccttcatcagataacccccgaagccattattagaatggggatttttgtttgggctgtgagaagccagggactagagccaagcgcaaaatgcttttgcagtatgcacgaacttgtatatgagacgaaggccatgggcaaagaacaatatcacaacaacttcggttgttatggatttatcgcccgccccaacgcaagccacccagtgttaacatttcggaagagatggccgggaaattggatggaagaatggctttatgtgaagaatgacttgaaggcaagagaagatattaaagaagtgattatgcgccccatttggtcccgcttcggcctccgaaggccgaaggttgaaattgacgaatccgctgaagcatgtcagaaggcatttggtactatctgcttctttattggtacgagacatttaattcaagagcacatagcattcagagtatggctgcttgtagagagctgggaaatgccgaaggagaccatcaccgaatctagtgaaggtgaactggtccggctgaagtatacattcagatatggggataaattcgatgaaccaaacgatgactggctaaaatgcatcaaagttacaagtgatgaactgcttggatcatattccaaggcagaagacaatgcattatccatagccttcggaggccggggaaaaaagagattgaatagagtttttgatgccattggctttgtttaccccgactaccgctatccgctgcgaggtcatggaaagaagagaaaagctgctacttcggccactccagacgagcatgtgccgaagggcaaaaagttaaaggttcttacccaccggccgcgttatattgaaccgaccgtggtgcctgaatttggcggggaggcttcttcagctgctgaaccaagagaacatgttcctcccacgcagaaggctgaagagccgctagttgagacaaaggttgacaaagataaggctgaaaggtcaaaaacagaagaagtaacaaagatgtcagggattttaagtcctttaacagaagcaacagcgttgaaggcagaaaagagttctgccacaactcctaagagaaggaggatggtaaatgtgttagatattttagaaacaactgactccataagtctcgctcccacggaaaaggctgccgaagctgacaaaacgcaacccaaagctgatactaggcagatagaagttgagagtacaataacccaggctgaaaccgaggcaaggcccacagtgcctgctgagatgaagcctacggaatttgaagaaaaggcaacagaagaaaaggccacagagcaaatttcgtttgaaaaggttgccactccttctcccgaagctttaaaagaaagcattgaatacatcatccgccatgcttcaggaaagggactttctcaggaagaagaacgagaagctcaacattatgcccaaaaattgaaatactcgaagggggcattagtgttcaatggcagtggggaagaggattttttgtactgtctcccggataataaagagatatccgtctgctgggagataggaagaagcttcggatttctgaagctggaagatggcctctcaatattatcaaaggatgaactggctgacagtttagcatataatagcataaaggtgatcgaattaaggaacgaaggccttgaaaaagacaaaatattaatttcattggtgaacaaagtaaaagaagatgaagctagttccaaagctcaagctgagattcaaaagaatgagatcgaggaccttcgaaaacaattggcagaggccaaagaaaaatgcgctctcactaaagctaaccgagataccagcgaatattggaaaaactatttagaaaaaatagttgaagaacttcgcgcatccaaggaaagatgttttgaaaaatcttttggctgcgtggagaagataaaggctagcttcgccaacgtgggcgcctattcaaacgaagataacttcatacaaggcgaccctgagggtgttatcaagtggataagcggagaagccgaagcttttgaggaaatcttaagcgaccgaggagatgtatgcgcattttctggtgcacgcgggatttcagcaatcttggagaatgcggggtgcaatcacatcaaaaccatggcccatgccgaagctgccttctccgcggacgtcacgaaggacccttcagctgaagcaaccttaatgggtggaaaattttataatgatgtgtgggagaatggtggccgagaaatggcccatgaaattatgaagaaaagtgaaaaatacatccatgaggcccgagctgaaggaaaacgagctgaagaagctgctaagcgtgaaaaatgcatagatattgtttcgcggcgtctaacttcggcatttgttttcgtgacttcgaactga

SEQ ID NO: 10785 - DNA, 2237 bp, Zea mays
  Clone ID: MRT4577_109836C.1
ccggccgggccgggattgcacccgccccggcctcctccgcagtcccatgagccaggccgcgcccgtggcgaaccctgctcgcgccgcgcctgcccattccccctccgcccccgtcggccaccgggccgcctcgcccgcccggcgcccgcgcggagccacaggcgtcggcgccacagccgcccgctcccctctgccgccggtgcccggagtgcagatccgtctgaccgcgccgccgccgctctcggtgataaatccaagattctgccagtaaagatgccgatctgtagctgtgaagaaactatccatgagttcgagatgttaacacgcgatgctgggcgtgtacagaaggatacactgaaaaagatcctcgagttgaatgctgatgctgaatatctgaacaagttcggcctcaatggcaggactgatgtagagagctacaaatcctgcatcccgctgtgtgtgcacagtgatcttgagccatacatccataagattgctgatggtgatagctccccactcctcactgggaagcccgtcacctccctttccctcagttctggtacaacgcagggaaggcctaagttcttgccgtttactgatgaattgcttgagaccacacttcaaatattccagacttcatatgcatttaggaaccgtgagtatccaattggaagaggaaaagccttgcagtttatctatggtagcaagcaagtggtaacaaaaggcggcatccttgccacaactgcaacaacaaacttgtaccggagggcacgatacaaggaggggatgaaggatatccagtctcaatgctgcagccctgatgaagttgtttttggctctgacttccaccagtccttgtattgtcacttgctctgtggtctaatatactctgatgaggtccatcaggtgttctcgacattcgctcacagcttagtccatgcatttcaaacatttgaggaggtttgggaagatctctgtgctgacataagagatggtgtcctctcagagaaagttacagtgccatcggttcgtgaagccgtgacaaaaatcctcaagcccaatcctgagctcgctgactcgatctatatgaagtgtacgggcctgagcaactggtacggtgtaatcccagcactctggccaaacgcaaagtatgtgtacggtatcatgacagggtccatggaaccgtatttaaagaaactgaggcactatgctgggcacttgcctctgataagcgcagattacggcgcatctgaaggatgggttggtgctaatataaaccccacacttccacctgaacaggtgacatacgctgttctccctcagaccggttattttgagttcattcctttggaggtggagaatagtgcctcctccattcactacttagaatcagaaccagttggcctgactgaagttgaggttggcaaaacctacgaagtcgtgataactaccttcggaggtctataccgctaccggctaggagatatcgtgaaggtaacgggcttccacaacgcaacaccggagctccggttcatctgccgcagaagcctagtcctgagcatcaacatcgacaagaacaccgagcaagacctccagctggccgtcgaggaggcagcgaagctcctggacgcggagaagctggagatcgtcgatttcaccagcttcgtggagaagtcaagcgaccccggtcgctacgtcatcttctgggagctgagctccgacgcgagcgaggacgtcctgcgaggctgcgcgaactgcctggacctagccttcgtcgatgctgggtatgtgggctcgaggaagatcagagccatcggcccgctggagctgcggattctgaagaggggaaccttcaaggagatcctggatcacttcctgagcctcggtggcgccgtgagccagttcaagacgcctcggttcgtcaacccgttgaacgtcaaggttctgcagatactcagtaggaacaccaccagaagctacttcagtaccgcctatgggctctgataaataagaaacgctgctagtagttccatccatgtaattatatttatataaaaaaatattgcttcactgttctgttctagtctccaggtaaaagaaaacaatctactcatcctagtcctgctggcgccctgctagaatgtctgtaaatccatatgcaagcaaatgcattcagtctctgcctgtgttctgatctttgtgcatagcaagcacatgcattcacagtctcaaaaccc

SEQ ID NO: 10786 - DNA, 417 bp, Zea mays
  Clone ID: MRT4577_109837C.1
tcttaccccccgagctgagcttagcttcactccagcttcaatcacagtcgtgaccagagcgagagctagctagagggccgttaaaatgcccatcaataggatcgtcttgaggagccaccaagaggtgtaccacgcgggcgccctcaaggcggcgttcgctgagtgcatctccaccctcatcttcatattaacctgccagggctccagcatggactgcaagatgctgaccggctgcggtccgacgaccccggcgggcctgatcgctgcggctgtggcgcacgcgttcacgctgttcgttgcggtgtcggtaggctcgaacatatcctgcggacacgtgaacccaggcgcgaccttctgaggctgtctgggcagtaacatcaccctgttccggaggctcctgtactgggtggcgcacct

SEQ ID NO: 10787 - DNA, 356 bp, Zea mays
  unsure (1)..(356): unsure at all n locations
  Clone ID: MRT4577_109838C.1
aaaaaagacggcccacaccggcgggcggaaaaggcaccggcaccaaggcccgggggggggcaccgagcgggcccaaccaaacacaccgcagcccaaggacggcgggcagcggagccacacgnggagagcgacccgcggaacgggggcgcggcggnggcggagcgggccgggagccacccggacgaggagaagcgcacggcggcgcaggggcggcagcccggggacaagagcgagggcgagcaccctgccgngagagggcaggagagacagccnggccagcggcaaggacgcggacggaggaacacgaggagcacgacgaggaggcccgaccaaggggaaagggcagcaacgagcgg

SEQ ID NO: 10788 - DNA, 274 bp, Zea mays
  unsure (1)..(274): unsure at all n locations
  Clone ID: MRT4577_109839C.1
ccaaaaacggggtcttcatgtggacttggttttgcacaaggacttgcatttttgcaaaattttcaaaatcggaaatagtgtgattttacaaaaccctgtttgtttggggggggcctttttctagtttttccaattttaaaactggtttgaaagcaccaagcaaccccttcgtgacaactgacaaaattcccaacaaggcggaaaaaggggtcnttttgtttcccctttttaacagttttaacttgctggccaggtaccaggattgcatggccaa

SEQ ID NO: 10789 - DNA, 793 bp, Zea mays
  unsure (1)..(793): unsure at all n locations
  Clone ID: MRT4577_10983C.1
aacaaccccaattgagcacccgcctcacctcgcgagctggtacgcgtcaaagaaacctccagctcccgattcgccatggctcaagaacaacccaatcccaacgaggtcgtgctcgggcaggagatcaacggcgcgagggtggtcaccctcaaccgcccgcgccagctcaacggcatcaacgacagagtggtctatctcctagcgcagctcttggagaaatgggagcaagatgacgatgccaagcttgtcatcttcaagggagcaggacgcgcattttctgctggtggggacctaaagatgttctacgaagggagatcatcagatgattcctgcctcgaggttgtgtacaggatgtactggctctgctatcacattcatacatataagaaaaccacggtggccctggttaatggacttgtcatggngtggaggtgcagccatggttgctccactgaaatttgcagttgtcacagagaaaacagtttttgccacccctgaggcaagtgttggactacacacagattgtagcttttcttatatccattctcggctccctgngatatttaggtgagtatctggctttgactggtgctagactgaatgcaaaagaaatgattgctgccggtcttgctactcattttgttcattctgaaaaattggaagatcttgaaaaacaattactgaatttaaacacaggcgacgagtctgcagtccgagctgtcattgaggattcctctacggatgttcaacttggatcaagagagtatttttaaacaagctttcaactatcgac

SEQ ID NO: 10790 - DNA, 194 bp, Zea mays
  unsure (1)..(194): unsure at all n locations
  Clone ID: MRT4577_109840C.1
tcttgcaggtccccgtgcgaggaacaggaaccggtgctgctttttggcttcggttcgaaccttcttgcgctcgagaaccgggacgcccacgcccttccttgacgcgttggtgatccgcgagctcagaactgcatattaaagaagaatttnccnatattccggggaacatgaaaagaaaggccccattaggaaaa

SEQ ID NO: 10791 - DNA, 290 bp, Zea mays
  Clone ID: MRT4577_109841C.1
attctttaattcctgtttttgcaaatatctacactcctttaaacaacgtcactcatttttatcctctaatcatgcgcgttaccaccctcctaggcctgatcgcctacgccgtcgcagaggcgagctgttcgcgcaacatcatttactacgatcaatggcacaccaaggatctgccccccaaggacgtcacccacagcgtcacccacgtcatgatgtcctttgccaactcgtcgctcttcaccactgagcctgctggcaagtatgagccgttccagcctcttaaggaggtc

SEQ ID NO: 10792 - DNA, 305 bp, Zea mays
  Clone ID: MRT4577_109842C.1
agcagtggtaacaacgcagagtacttttttttttttttttttttttttttttttccctttttttttttttttttttgtgtgaacttggagtctgttgttgtttgttgttggggggaaccaggagtcgggggcgggggaacccgcctcctgtcggcaccctgggccggttcgaaccccccgcaattgggggccccggaggggcaataaaaagccggaaattggggtgaccaaccccccccccgcagggatgttaacgggggccccactatcccgccccaaggaagccaacggaaagcccctggggg

SEQ ID NO: 10793 - DNA, 509 bp, Zea mays
  Clone ID: MRT4577_109843C.1
cccactcgttcgcctgcttcttttcctgctttcctcttcactagtggttcccccgggggtcgagcaagcgggcgacacaacgtggctaaaggcctatcgcgaggacgcgtgttaggccagcacatttgcaatgaccgcaccaacgaacgacgggaataatgccaacactgatgccgacagcggacaggagaacgaacagatcgaccgcttcctcgtgctgttcatcgagatagctccacgagatacaggacgagctcgagaaggcaaatgacgaagcaagtgacaaggatctggaggtcgagcagaaatacagagatatccatatacctaggtatgtcaagatgggtaacattatcaacaccatgctgaacttttggctcacacattctatgagccatgctctattaactgagcttgtgactgaaatagaccagaacatatacaacatcttagactacattgatgaggatgatgctgaagactacgtacgatactacatttatgttaac

SEQ ID NO: 10794 - DNA, 287 bp, Zea mays
  unsure (1)..(287): unsure at all n locations
  Clone ID: MRT4577_109844C.1
gtgaggacaaaggagcaaggagcgtacaagaatcaagcaatagaggacatgggtaccaagtgtgcattgttgcacaataagtcctcgtaatcaatcaaacttctccacacttggctgactgagtcttgggcgctcttattgagcttgtctgagcgcatatgccttgtgtgtcgtatttgcaacctctttgtggacaagncttgaatggaattgctgcaaaagggaaggatatattgcgtagcaaaacttttcctttgcaaatcnagacacagcgacaagcggccatt

SEQ ID NO: 10795 - DNA, 398 bp, Zea mays
  Clone ID: MRT4577_109845C.1
cctcgaggccggccgggaccctgcttgcgaagcgacgactctcgattccgcctctctccagattgctgcgctcgaccactcactcactcacccatggtgctcgccagactccagacgcctgaatgctagaacgtaacctctgctgtcggggctatacgcgaacggcaactccggctccactgctactaccgacctctgatatcggactcgtgcatgtccacgaaccgtgtgatcgtgaggaatgacaaggaccctggtcatgagagcgaccgcctgaccctgttcgattgtgagatcgacgacatcaggcttcactgagacacatgcatgaccggatgtaatgctctgagttatgttcaatgcttgacgaactatgggcgcgacccatacgataccgg

SEQ ID NO: 10796 - DNA, 347 bp, Zea mays
  unsure (1)..(347): unsure at all n locations
  Clone ID: MRT4577_109846C.1
cggcatagcagcggggcagcgtgcatggggcaccagtccccgttcatccctggcgacgattgctcttcgtcgctcttcttngtcgctgttctgctgtcgggcgccaccagccgccagggtccagtccacgcctcgccacaccgatcgccgatccactgcgattccgtctccccgagcagctttgggcactgggtggtcgacctgtggaattgctgcgactccgctatctaggacgcctccctgccggcgtggcgctgcaacgacgtggtgtattttttgttccgccgactgccatgactgcgaggcgtctccggccggcgacggcttcgtctgcggtgactttatct

SEQ ID NO: 10797 - DNA, 287 bp, Zea mays
  unsure (1)..(287): unsure at all n locations
  Clone ID: MRT4577_109847C.1
gggaangggaccctcgggccggncggggccggtttcattagatgttgaggggggtggttttggttgtgcgcgccgggggcgggacagcgttgttcccctggcgggtctccatggcgcccggtctgcttggccggggcgcgttttaggatagtctccatttcagttgtgtcttncctggggctttgcgggggcgtgcttagctcngggcggtctctggtgcttagagccagctgcctttgttgtggtgcatgccaggctttgccagaacttgtgttcctctggttttt

SEQ ID NO: 10798 - DNA, 193 bp, Zea mays
  Clone ID: MRT4577_109848C.1
tcattccaattaccagacactaacgcgcccggaattgatatttattgacactacctacccgtgtcaggattgggaaataagcgcgcctgctgacttacttggatgaggaaagacgaaaataaagctaactaaacgaaataaaaccctaatactgcggcgcccatgaccaccatggggggcccgcatgctacca

SEQ ID NO: 10799 - DNA, 277 bp, Zea mays
  Clone ID: MRT4577_109849C.1
agagtggtaggagttctcttgttgtgacaataggtccatctgctaggcattagtcagaaacttcaagcacaatcatgtttgggcagagggcaatgaaagtagtgaacacaataaagctgaaggaagaggttgattatgaaattctttacaagaagatggagcgtgaggttgaccaactcacatccgagatggagagacaacagaaggttataagaagtgagaaaatgcagatggataagaggttgagagaatctgagaggtccttccatgatttaag

SEQ ID NO: 10800 - DNA, 456 bp, Zea mays
  Clone ID: MRT4577_10984C.1
gtaagctgggatccttaaaactggccgccctttttttttccttttttttttattctttcctttttttggccccaaacccttcattcaatcatatctcaattttaaaaactcggagctgggggctaccccgttacactcaaactaaataaaggaccctcccttggaaatgcccaaagtttttatttttgcctgtgaaaaacgacaatgaaaacggcctaatgatttacttttgctgaaaggaacatgtcctcctgggtcccaatccaccccaactggcctgagggctcgccggcacgcgattaactgaggggggcacgcccccgggcgtccttcccgtcgcacttgagcaccggcagacggcgtggacagcctcggcctaaactagcagtttcggagccttgtacccgcccagctgggggtcggggcccacctgcgaaatcaagagcgtgagccacc

SEQ ID NO: 10801 - DNA, 323 bp, Zea mays
  Clone ID: MRT4577_109850C.1
ggacactgccgcgacaaaaggggccgggcttaacttgggatggcgcacgtgcggtgacaaagcaatgaacttatcagaatctgcggaccaagcgacagagagcacataggcactatctacgagacagaacaatagctgcaccagtcactgctcaagctgatagtggaggcgagatcagctctggtgacaccacgcacgatgctgggtctgcttcatgcaatgggactacagagaaacaggtgagtgcacacacaaagaagggagggaggtatcccgatgtgaacatgtggatagggtccaaacatcgaaagcccgtgaagaaa

SEQ ID NO: 10802 - DNA, 322 bp, Zea mays
  Clone ID: MRT4577_109851C.1
tcggggatttgctccattgggttgtatgctataataagcctggctatcttaaaatctcggaggcgtgacgataacttcaagataaacgacaattgtatgcgacggctaccaaaataatttctttcttgaactgccttacttttaaatatctcatgcattatgctcctcgaatcagttctactacattgtaattccacttagaaaactttgccaccggtccgattactcactctttagatacccgaatatttatgggggtagcccccagccaggactgacattcaaaaacaaattgagagaatattattacgggtgtttatac

SEQ ID NO: 10803 - DNA, 696 bp, Zea mays
  Clone ID: MRT4577_109852C.1
ccggccgggagcacactctcccagcagctctcgatcgcctcgaccttttattttcgcatcgacagtcgactaacaacttgaagcaaaaatggctggaggcaaaccccgtggtcttaacgccgcccgtaagctgcgaacaaaccgaaaggaccagaaatgggccgatctcgcctacaagaagcgtgccctcggtaccgcttataagtcctctcctttcggtggttcttcgcacgcgaagggcatcgtcctcgagaaggtcggtgtcgaggccaagcagcccaactccgctatccgaaagtgtgtccgtgttcagctcatcaagaacggaaagaaggtcactgccttcgtccccaatgacggttgcttgaacttcgtggatgagaacgatgaggtcctcctggctggtttcggtcgcaagggcaaggccaagggtgatattcccggtgtgcgattcaaggtcgtcaaggtctccggtgtcggtctgcttgctctgtggaaggagaagaaggagaagccccgttcttaagcgaagagcgcgtggatggaaacaaagtcatatttcgacacgtggagtctattcggattgcttgcatcgacattacggttagggatctgatcatgggagacgggtctgcaaaaggaaaatagatcacaaagtcttcgacgaacaaaaaaaaaaaaaaaaaacccgcggcc

SEQ ID NO: 10804 - DNA, 298 bp, Zea mays
  unsure (1)..(298): unsure at all n locations
  Clone ID: MRT4577_109853C.1
cacttttctcatgttgtcagatcatgtggaccaacttgaatggcnnaaaaaaaaaaaaaaaaaaaaagggcagacgaatataaagaaaacaaactaacgtacacatgcatgcgaaaaaaaaagatggggtgtagggtcacctagaatccaaattttcctggccgcgggcttgacaacggctggccttttgtaataccctgacgttacttcacttgactggccggcgttacactacctcttgcggcggctaaaccttttatttacggggccttaatcgccttgcccttccttacagttt

SEQ ID NO: 10805 - DNA, 634 bp, Zea mays
  Clone ID: MRT4577_109854C.1
cccttttcgagtttttttttttttttttttttttttttttttttttttttttttttttttttttttttttttttttttttttggggggttctttaaaaaaaaacctttattttatttcccgggaaaaattttttttttggggcccgaaaaccgggggaccaaaaaaaagggcttccaaacccagggaaaagggtttttccctttttgtttattaaaacagggaaaaaggtggccttttttaaaacgggaccaaaacccttatttttttaaaaaattggggttgggggcaaaattaaggggggaaccctttttttggaaatttggcccaaaccaaaaaaagcattttttgggatagggggggaaactcccccaaaaaaacccttttccaaatttgttttgttggcccaattttcttttgtttttggggggaaaaaggctttgaaaaaccccggggtaaaaaaacccccttgttaaagctttcaaaaattatagccttttttggggttcccctcatcgggcccactattataatcggcccctttttaatggcaaacccccttgggggcggttaaaaaatttggggcggaaaaattaacttttggacccccacggcccaaattagaatttccccctt

SEQ ID NO: 10806 - DNA, 187 bp, Zea mays
  Clone ID: MRT4577_109855C.1
caatttccgaaccgacccacgcatccactcactcctccaactccacaatcgcccttttaagattcacacacatacttacactgtatgggacttgtataatacttaagaccacactcaaaatattggtgctaaatatgtacgccaaactacttataaaacaaacgactttgcttataataggacaacc

SEQ ID NO: 10807 - DNA, 426 bp, Zea mays
  unsure (1)..(426): unsure at all n locations
  Clone ID: MRT4577_109856C.1
ccatcgcgtccgatctacgtatatgccctgggcccgggtcctctccccatgcccctctccattgtcggctggaccctcgcgtagagtgagggagacgagagctagaaaccaaagatccacgctgnccttgctctctgcaggagggcacaagaaggaagtgatggcggccacgaggattcagtgagagcccaacgatctgcagaaggaccctcccacctagtgcagcgcaggtcctgaagaggatgacatgttccactggcaggcaacaatattgggtccatcttatagcccatatcctggaggagtggacctagttacattccattgccctcctgattatgctttcaaacctaccaaggaggcatttcgcactaaggtgttccatccaaacatcaacagcaacgggagcttttgcctcgacatctt

SEQ ID NO: 10808 - DNA, 810 bp, Zea mays
  unsure (1)..(810): unsure at all n locations
  Clone ID: MRT4577_109857C.1
tttgccgggacctttgaccggcagcctttccactctggaattgcattcctcaggagtgcccaaactgcaacgagataacataattcaaattaaacaattattagaagctaataggcacgtgaacaagaggttaagggacacatgcaactagtattagtctgacatgttaaaaaagtgtctggatgagatcaatagaacagtccaccatcacaatttgatctatatgaactcactctgatcaaatttggtagcaggatttaaattggtcttgactacatatcacaagatggaaataatagtggtaagcaactgatgcatatcaccatcttctacttgaccttttgacattcctatagtcagtttcttcaaaaaaaagattataatatacatttcaatggaatttatccatcattctggtcttaatatcaatgttgcatcttttattgattaaaattgctatacagccaccaatagtcaccaggaatccgttaactactggtcaaaggggagaagaaatgagacatgcacaattgtttttaatattatcaatagggtattaacttactccctgtcctaaatatttgcaattctataattcaaattttgtcccaaaataaaaggtcacatagtaggtgatataggtttggngagatccaacgtgcagcactactactcttgcctcccaccagtccatcagcatgagaccaacanaatatgtaaaaaaaaatcaacttctctctctaaaaaaataaccaacagtcttatccccttcgtccagggggagtacagaaaggctccatgcacaacagt

SEQ ID NO: 10809 - DNA, 1446 bp, Zea mays
  Clone ID: MRT4577_109858C.1
cgcttcccatctttcgtagtctttgtatccgtcacaggaggaaggacgcacaggcccttgcatggcggatacaaagactacgaagcaatggtttccagcagcatgcgcattcagatgtgcatcctctcgcagaggagatgtgcatccgcatggtcgaccgcacattttgagtgacgacatccgtgacctactgaaagcgtgaatagtgcatcgttatgcgagagtcgatatgcatactattggacacaacctaatacccatgtggtaatgcgtacggcgatgagcaacaacatccatctaacgcaagacaacaacaacgtaagctacactgctagacaatgtatcttgagcacagcagcttactcgtctccatccaccctgggtaacactaggttagtgttgttagtcgatgagcacttgacgaccatcttcaggtttgtccatcagcagcgccttgcgaagaagcccacgcttggggtcgacttggctcgtcttccgcatcacgcgattaattaacgtaccgcttcagcagctgacacgaatctgcgagatcggtagcgattttccaatccagacaatttgtcgaacacttggggagtatcgtgctgctagcctcgtcttcactcgattcttgggatttcttgatgacacacggatcgacgacgatcttcgattgatgtcttcaaccgagtacttgataagcgatacacaggggtctcgcttatttttgtctaatatccagaattcggtgttcgacgagagcgagcagagaagaacgaagctcgacgggctcgacaacgatatggaagggtggcatatatagagttgcaggtctggcgagctgaggcggtcaagataactgtggctaacgagaaacaggaacgcgcgcggagagagatcggctgggctgggcgactgagtttcgagcgccagggagaccgagcagatgagcacgactgcgcagggagatgagcgagctgcagcccgtggccatgggaagcaggcgcgactgtgaagaactcggcgcggcgcggtgacaaggaaccgagcagagtgccgcgcgcaagagaggccttggctggggaagatgagcgacccgcgcgcagaccaatggcaacccgagcgcaggagccaggaagagatggggcgccgccatgggagctccgagcagagcgtgacccagaggagcgcacaggcgaggaatttccaggggcttgacggcggccatggcgaaagacgcgcgcgcggggagaaaaatctagcgcgcagcagaggggaggagctcgcgtgcgagcttggacaggggcacactccgtgcgccggcttgagggctggggctgggcgagctgcaggttgacgagctccatggctgggaggagctcgggcgcgggagctcgagctgcacggtagggagatgggcgctgggaaaatctcggctgggaagat

SEQ ID NO: 10810 - DNA, 486 bp, Zea mays
  unsure (1)..(486): unsure at all n locations
  Clone ID: MRT4577_109859C.1
tnnggcgcacaaaaaaactcgtgttggtctgtagggacgatatatgatcctaaagagctgccaggagtgagtaccgccggtctaggaattggacggggtgctacaaattcagacaacaaccctaaatttcgtaccaatgcactatgagtgaaaacctgcactggcatcactgagccaaatcattggactataagacctatgttgatccagctaaacctggtggcttatttactcccttctctttgattgaagcccgagccttttcagattcgtcccacttacctgcttcggcactgatgtttgacagcagcacataatttgaggccttgcgaggttccaattcagacaacctctcagctgccagctgtgcaagttcatggttcttgtgcatgtggcatgctccaagcaatgcaccccagacgccagcatttggttggatctgcattccttgcacaagttcaaatgcctcgttctgcgggaccggta

SEQ ID NO: 10811 - DNA, 565 bp, Zea mays
  unsure (1)..(565): unsure at all n locations
  Clone ID: MRT4577_10985C.1
gccggccgggttcgnatcaccatttccggcctgccacttaattatcgtcaacaccacacaaacgctgcacacaaacactccaagtgatactcaccaatgactttactatgatcacgccatctactgacttctcggagaagaggtcctcgcctgcgcgcgctttcacacgtgacgtgcttgcaacacaaaacaacgcgccgcgagtgacaagtgcaaatgaacgggtcacaccaacctcacgccatcgcggacagccagcaccgccaccatggccacgaaggaattcaccccttcatggtgcccgagaccatcgtcaactaccacatcaacgactgtatcacaaacttccgccagaacagctacacctacctctacatgcttaactgagccgtcctcttctcacgatatgcgaccgcaccagcttgcctgtctgcctcttgtatgtctgtggatgactggttgtgcagggtcatcgccacttagggtatcgtacgtgtccacactcagctcctgcaccaattaccacaataacctcatgaccttgatagaaattcttcacctcact

SEQ ID NO: 10812 - DNA, 593 bp, Zea mays
  Clone ID: MRT4577_109860C.1
cccccacttttttacagcaattagcaccaccaccgcaactaggaacttggcgggtgtaggggcgaaccccctccactatagcccggccggcagtagtccaaagaaccccaggtcacgttcccaactaagaagatagttgtggggctcatgaacttgcaggtagttattttgtacatgaaggttagaagataaatagtactggacaacaacaaagacataatgaataactttgatttactctaggagacctttcttaactatatgtttcttgagaactttactttcgtcgtaaagaaccaatcccacatataggtccctacgaactgtaagaagttgactgacacagcgatgcggattacatgaaccgtgaaggacctcccagtgtagatttgaaccataactttgccgatctaaactacagtcgttctgttttggatcgccaggtcaatgacgacgaagtactacccgctagacgttcgaacgttctccagaatcaggttaaagggtgaccctgataatacgtaggtgattgtgagcataacgttaactagtaagaacagaaccaactaagacacgaggtcgaagaccaccca

SEQ ID NO: 10813 - DNA, 173 bp, Zea mays
  Clone ID: MRT4577_109861C.1
cggaattgcatgctcgacccaagccacccgtccgtcgtcccatggatggaaaccaagcttgtgttcctcttccactctctcagaggagcaaaggcatcttcagcatgggcttctcggggagaaaggggcataatttctgacatacgctctcagggcgcaatcactggaaggtc

SEQ ID NO: 10814 - DNA, 702 bp, Zea mays
  Clone ID: MRT4577_109862C.1
ggtacccgggccctcccctcgagtttttttttttttttttttttttttttttttttttttttttttttttttttttttttttttttttttttttttttttttttttttttttttttttgggaaacaggcggggacccctgggggaaaaaccaataattttaacaactggccagagttaaaattccccctggggacacctgggggggacccaaacgattttaaacagtttcctattttttcacaaaaaaaggaaattttttccggggccccgtttcccagtttgggattattttggggggggaccctccttcctaaaaaaaaaagggggcccaaaacccagttttttttttactttacgggggcatccaaaaaaaggccttcaaaccgaaagggacaacttcaaatccccctacttgttggaaaaatctacgggcaaacaattttttttgtccgggcggggttttttaaaaaaaaacggaagggtcttttggtgggttttgggggcaacacactgccaaaaagctttggaggaaaaaatttttttggggtttattcctatcgaaaaaaggtttggggcgcccccctgaatataaaaaaaaagctgcaaacaaattttgggggtataaaatatgaggttattgggggcattggaactacccccaactcccctttgggcccctgggggcagtttttgaaacaaaa

SEQ ID NO: 10815 - DNA, 305 bp, Zea mays
  Clone ID: MRT4577_109863C.1
cggactcttagggccgtgccgtaccatccatcacacccacttttctattgccggcgccaccgacagaaaataggtactccctagaaaaaatgcaccgactgaggtctaccctcgacacaatggcccatgcccatttaatactgatcatcttaatgccgatcatcacagcggctcagacaccggctctcgagcccaccaaccacagtacatcaatcaacctgtacatcgtgtacatacttatactttaggccctggtgctgacataccacaaccacccaatatgacgcatcctatcactacaagct

SEQ ID NO: 10816 - DNA, 219 bp, Zea mays
  Clone ID: MRT4577_109864C.1
caaaaaaacgaaacccttccaaatcctccttttgtatccccattacactaaaattacatgggttttaaaaaaaacacccggggggcaacaaacaaatattttttagacggtttttggacgccgatttacaataagagagtgtgcaaacaaataaatttagtcgacataaaccacacgggggcaaaggcaacacctaccaagaggccaacgacctttttt

SEQ ID NO: 10817 - DNA, 962 bp, Zea mays
  Clone ID: MRT4577_109865C.1
tcgaaatcgaatcgggtcggtcttgccgtgcgtgcgtggctgcgcgagcgactcgactgcaccccccgctcctcccagtccccacacactgcgcgccgccgccgggtcctcctagggtttcgccgcgatgtcgctccggccgagcgagcgggagcagatgcggaagggcaactacaagcagacggtggacgcggaggagagccgccgccgccgcgagggccagatggtggacatccgcaaggccaagcgcgaggaaagcctccagaagaagcgccgcgatgggtttcccgcctccgccgctggtgtgccgccgatgggccactccaccgcgctccagcagaagctcgatggcttgccggcgatggtgcaggccgtccactccaacgacccctccgtgcagcttgaggccaccacacagttcaggaagctgctttctatagaacgtagtcccccaatcgaagaggtgatcagcacaggagtggtgccgcgattcattgagtttcttacacgtgaggaccatccccaactccagtttgaggctgcatgggcactcaccaacattgcatcaggcacatcagagaacactaaggtggtggttgagagtggtgctgtgcccatctttgtcaagctactcaactccctcagcgaggatgtccgtgaacaggctgtatgggctttaggtaatgttgctggtgactccccaaagtgtcgtgatctggtacttggtcatggtgggctataccctttgctgcagcagcttaatgagcatgctaagctttcgatgcttaggaatgccacatggactctctccaacttctgtcgggggaagccacaaccaaactttgatcaggtcaaaccagcattgccagcactacagcaccttattcactcttaggatgaggaggtcctaactgatgcctgctgggcgctctcatacttgtctgatgggactaatgataaaa

SEQ ID NO: 10818 - DNA, 379 bp, Zea mays
  Clone ID: MRT4577_109866C.1
gtctaatattttcgttcgagtcttatctgattttggtgcgctgtctttgtcgtcgtcttctttcgactcccaccgtgcattcttgggggaacagaccgagaaggcttttatgaaggagacaaaggtgtaacccatttcaaagaagtccggccgggtaagaagcctttcttaagaaaaaatcgattttggaagaacattggccttggtttcaagactcaaacggaagctgtggaaaggacctacattgacaagaaatgtacattcactggaaccgcttctatcacatgcagaattattgcttgaacatggcacagtgcttaaacgaacagaaccatgattgttcgcttgaactacctccactgtggtaagaaataccaga

SEQ ID NO: 10819 - DNA, 3053 bp, Zea mays
  Clone ID: MRT4577_109867C.1
ttgggtacctcgaggccgggccgggccttcccgttccccaattcgaaatcgagtcgggtcggtcttgccgtgcgtgcgtggctgcgcgaaccagcccacgctcccactccccgcccgccaccgccgggttccctctagggttttgccgcgatgtcgctccggccgagcgagcgggagcagatgcggaagggcaactacaagcagacggtggacgccgaggagagccgccgccgccgcgagggccagatggtcgacatccgcaaggccaagcgagaggaaagcctccagaagaagcgccgcgatgggttccccgccgccggcgccgtgccgccgatgggccactccaccgcactccagcagaagctcgatggcttgccggcgatggtacaggccgttcactccaacgaccccactgtgcagcttgaggccaccacgcagttcaggaagctgctctccatagagcgtagccccccaattgaagaggtgatcagcacaggagtcgtgccccgattcattgagttccttacacgtgaggaccatccacaactccagtttgaggctgcatgggcgctcaccaacattgcatcaggcacatcagagaacactaaggtggtggttgagagtggtgctgtgcccatctttgttaagctcctcaactccaatagcgaggatgttcgtgaacaggcatgcactgaattacaatagttacactcttctatatgagatttatgtagagtggtgcttaggttcttttttttttgtgtttgcacgctgtatgggctttaggtaatgttgctggtgactccccaaagtgccgtgatctggtgctaggccatggtgggctattccccttgctgcaacagcttaatgagcatgctaagctctcgatgctgaggaatgccacatggacactatcaaacttctgccgtgggaagccacaaccgaactttgatcaggtcaaaccagcattgccagcacttcagcaacttatccactctcaggatgaggaggtcctaactgatgcctgttgggctctatcatacctatctgatgggactaatgacaaaatccaagctgttattgaatctggcgtgttccctcgccttgtggaacttctgatgcatccttcagcctctgtactgattccagctctgcgcacggtgggtaacatcgtaactggggacgacatgcagactcagtgtgtcattgacaatcaagcacttccatgccttttgaacctactgaccaccaaccacaagaaaagcatcaagaaagaagcatgctggacaatctcaaacatcacagctggtaacagggaacagattcaggccgtgattaatgcaaacataattgcacctctggtgcaacttctgcaaactgctgaatttgacatcaagaaagaagcagcctgggcaatttcaaatgccacttctggtggcacacatgatcagatcaagtaccttgttgcccagggttgcattaagccactctgtgatctgcttgtttgcccggatcccagaattgtaacagtttgcttggagggtcttgagaacatcctgaaagttggcgaggcagagaaaaatcttggtgcaggcgatgtcaatgtttacgcacagatgattgatgatgctgagggcctggacaagattgagaacctacagagccatgacaacactgagatatatgagaaggctgtcaagatgctcgaatcttactggctagaggaggaagatgatgccatgccctctggcgacaatccccagaatggcttcaactttgggaaccagccctctgttccatcaggtggattcaacttcggctgaagatgcccatttggaatggcggctgtgccattgtgccttggcctagtggttggggctagtcagagttggggtagtggcgtcgtcctccaaaaccttggttcggtcccattggtctggtctcaggtgtttgtcatgtcagtcccagtcagcagggtcagtccttgtgctgcatcaccagtggtgctgcatggaagtggtcagtcttcaaggtcagccggttggatcatttgggctcttgctcccaccgcctctggtggtaggcatgaagtcgcaggtgttgtcgggagttgggttttgcctccaatatagcatgaatgaattatattgttttacctatttgatgaggtagaagaaaagaaccttggaagatagggaatgtgttggtttttgtcaaagcggttcctgtcctgtatgacatgttgcatgagtattgacacaaattataagacataatggcaaataggtttttgggagtctcttgagtctcgagtcttaactcattggctcattgtaggtttgtggttcgttatgtcatcttctctgttgtagtcacttgtgcttcctcaaacgtggttttggcaccattgtctcaaagtcgttccaagcttatctagagcagtagaagacgagggttgtttgcggcatttgaggttatggttcctagtttttttttgtggaacctgatttatcgttgtatgatcatgacaaacaattggtagtaaggaaatcaaaaaggggaaatccgtacatgtttgctctgtttcatctgtatcttgcatgttaaatatttaaatataaaaagcattgagtctatctcctgtgtcattccgtggaacatcttcgggatgcttttatgatgacaaatggcattagaccccgcggtgctttgttaagggcaagtcatgattgcgactgacctcttcaccatcatgctggcacagttcatggcctgatgattggttatgcattgatggtggctctgtagatttttgaaaatctgattctagctgtgagctaaagtatgctgcaagccgacggttgtggagaagttaaaatatgttggttgaaataattgtagattatgtaaagcacgatgtctagataatatggatgacatgaacatgcaaaaattggggtacaatgtgattctaaattgaactattgtaatatgtatatttttagcaatctattctgttgttgtatctgaaaaaaaaaaaaaaaaaagcggcc

SEQ ID NO: 10820 - DNA, 612 bp, Zea mays
  unsure (1)..(612): unsure at all n locations
  Clone ID: MRT4577_109868C.1
cggccgggnatatttatatgtttactcaacaatgccatgctcggagtttgcaacatctttaccatttgtaaaataacatttcatgcctttttttttctttgttgttgtcagtactacaagttagatatacactatgtctaggtgcatgataaaaacgatgtatctagaaaaataaaaaaaacttataatttagaacagagggaatatatgttactcatgatagttcttcatgctattgtgctggaagctaattgtgaacgttatattatcaggggatagagaaaaagcatgcaaaattgaagggtaatgaaaaagctgttgttgcgcggcatgaagtaggtcatgcactcgtgggaactgctgtagcaaacctccttcctggacagccacgtgtggaggtttgaacttaagcaattactgatagaacaatctgataaaaaaggatctaatttgactttttaatgttgaatttaacagaaattgagtatattgccaagatctggaggtgcattaggcttcacgtacacccctcccgtcacagaggatagatatttactctttgttgatgaactacgtggccgtttagtaacactactgggctgggagggcagc

SEQ ID NO: 10821 - DNA, 1794 bp, Zea mays
  Clone ID: MRT4577_109869C.1
atagttttccacttgtagcattataataattaattctggtaccattgaagcccgaagtatattgaaaatagtatatcaatacaggaaccatagtccgtataagcattatcctattgatcatctctaggatcatattgtaaagaggaaaataacttctaacagggtgaggacaagaacctagggcaaaaaaaagaatcttttacatgtgtaacaccgacccgatctatgaacaacatgtgaaaactaaccgcttcaaatattcctgaggttgatcttacaatgttacaggtcaatatgaatcatctcttttttttggtactcatgggtccgcgaactgcaatggtaaatatttacatggtcactcgggcatgtagatttccttttctgaaaattctcctctaaggctcgagctcatgattcaacgaacgaagggtgggcgcccaacccaagtttgtcttagcatgagtgggtgggagaggtcatacaatccaccacatggccacagatctgtccccagtatcaaggtttccattgcataccttggaactcgcattgtatgttctaattgctggaagacttctgtaagtaattaattttaagagtcctgacgctaggagcctgcttccagctgaagaacttgctcttgctgtcctctgataaaagaggtcaactcttttgatgcaacaactgactttagccactcttcaagttcctcgccttcaaccttttcattctcttctaaatatgctccgaggccttccaaaactgcaggattagcacgaataactgaaagagctacttccagtgccgtctgtaaaagcgcttttacttccctctgaacgagatcaactagatggccctgatctcttccccatggagagccaccagagtcatctaacccaccatttgacagtgtagcaagtgatattggcccgatgcgctgattaagaccgtattctgctacagctttgtaggccatgtcagtagcacgtcttatgtcatcaagtgcaccagtggaaacccgtcctgctaaaacaacttcctctgctgccctcccacccagaagtgttactaaacggccacgtagttcatcaacaaagagtaaatatctatcctctgtgacgggaggggtgtacgtgaagcctaatgcacctccagaccttggcaatatactcaatttctccacacgtggctgtccaggaaggaggtttgctacagcagttcccacgagtgcatgacctacttcatgccgcgcaacaacagctttttcattacccttcaattttgcatgctttttctctatcccagctatagatcgctcaaccgcacggatgaagtcaaccttttccactatttctttatttaatcgcccagccaacagagcagcttcgtttaccaagtttgcaaggtctgctccagtaaaaccagttgtcattgcagcaatattggctagatctacatctttactcagtggaagctctcttctgctcacatgaacttttagaattgattctcttccaaacctatcaggagcttcaaccataaccacacggtcaaatctcccaggtcgcctaagggcaggatccaaaacatcagctcgatttgttgcccctagtacaatgacagccgaattggtgtcgaagccatccatttccgtgagcaattggtttagtgtctgctcacgttcatcattactgacaatgcgatatcgaccatcacggctttttgcaaccgccccacgcctacgtacccaaaaataatcgacggtgatccaaaaacgctgggtcgacccgg

SEQ ID NO: 10822 - DNA, 687 bp, Zea mays
  unsure (1)..(687): unsure at all n locations
  Clone ID: MRT4577_10986C.1
aattcggcacgaggcttgcatagttgcacaccccacggccgcggtgcgtcggtgcggttgatcccgccaacaaggcaacaacgggcgcccgcccccgtcctgtcatctccgctcgccacaccagtcgccgtcggccgtcgctcctctcctccacgcctccctccctacctacctacctcgccttggcatccccgcaaggaatatcccttccatagcgtcccttgcttctttaccaccccaccctgtattcgtgcgtccctgccgcttaatttcccggtttctctgcgctctttcgtcatcttggatcttggttgcctcgggtggttcacagggtaatcatcgagcatagagttcatgttgcctgattaccttagttgctactatgcgatttaaggtgttacacaacttcatgctggataaattaggtcgtgggaggactttaaaaactagctgcctggtgtttctttttctccttcattctagtgaactcactttcagaagcttgtttgcaatatgtcttacacgaactgtttgaagaagcatccctatagaattttctttcgatatggcaactccatcctcagagcttctttagagaaaggctcaccacanaagttacttatggactatagcactntgctccatttcactgctttctgccctgattacagaacctacgctttcctt

SEQ ID NO: 10823 - DNA, 1748 bp, Zea mays
  Clone ID: MRT4577_109870C.1
cactcttgaatttcttggttgttacagaagatggtccaatgtttcttagagcgatcaacactgaaggaatatccaagaccaaggagtatattgcagagaagatgttagcagtaattgatgaggttggggcacaaaatgttgtgcaagtgatcactgacaacgctgccaattgcagagctgctggcatcatagttgagcagaagcaccctcatattttttagaccccttgtgttgtgcatactttgaatcttgctttgaagaacatatgtgcttctagggaaattgaaaatgtgctttatactgaattccagtggattagcgaagtcattggagatgccagcatgattaaaaatttcatcatgaatcactccatgaggttgtctatgttcaatgagcaaagcaatctgaaattccttgccattgctgacacaagattttcctctgctattgtgatgttgaagagatttattgctataaaagatgctctttcagtgatggttgtgagtgaaaagtggagtgcctatagggaagataatccacgtcaggctcaatttgtaaagaagattgtgaatgatctgtggtgggataaagtgcgctatttccttagtttcactgagcctatctatacaatgatacgagcgacagatactgacaagccatgcctccatttgatatatgagatgtgggacacaatgatagagaaggtgaagagtgtgatctatcgtcatgaaatgaaagagacacatgaagaatctatccccacgcgtccggtgcatgacatcttggtgagtcgatggacaaaaagcaacacgcccttgcactgcttggcacacttactaaattcaaagtattacactgatgcatggatcaatgaggtcctcaaccgacaggctcctcataatgatgaggaaatttcagagatgagaaatacttgtttcaggaggtatttttctggtgcagaattaaaaaagattaagttgcagtatgctaatttctctttgtttggacctggattcaattcatttgactcacttgaggatagaagttatatggaaccaaaatgtggtggggaattcatggccattctgctccagaattaaagaagttggcacttaaattacttggacagccagcatcatcttcctgtgctgaaagaaattggagtacatatgggctgatccatagttcattgagaaacaggctaaatcctgggcgtgctgaggatttagttttcacacaccaaaactcgcgtcttctttctagaaaatctgatgaataccgttgtggtccattagcaatgtgggatgttggagctgacactttcgaagctgattttgagggtggtgctgattttcttgagcaagctgatcgatactggatgagccataacttgaagaaagattgtttgaagatcttgaggcattgggtttgaccgaagatgcagaatggaatctagttgttgtttcatgtctggcttgtggtctgttagaattagaacttagaacttgtgtggtgatttggtggactagtgattatttgcgagtctgctggtatagcgtatcgttacacatgtttttgggcttttggcatgctggattcattgatttgagtctagataaattctggaagaggaagtagatgattactttagtcaaagttgttgaacattaacttctaatgcccttaaactgaactgatcggcggtggtctatttcagacatttcaacatttaattttatttataatat

SEQ ID NO: 10824 - DNA, 395 bp, Zea mays
  Clone ID: MRT4577_109871C.1
tcgagcggcgcgcccgggcgaggtgaaaaaaaaaaaaaagaaaaaaaaaaaaaaaaaaaaaaaaaaaaaaaaaaaaaaaaaaaaaaaaaaaaaaaaaaaaaaaaaaattttttaattttttcctttaacccctttaagggaaaaattttaaaaaattttttttacctttggggggcgcgggggggggggggtttattagggcccattttcccccttatttggggggggtattaaagatttattggaggggggctttatacgcccttttagtggggaaaattttgattttaccgaccttaatttacttgggggggattgcgtttaaccctggttggggtaaaattaaaaaggttggaagcaatcgccttttttaaaagttgggcatcctgaatggg

SEQ ID NO: 10825 - DNA, 189 bp, Zea mays
  unsure (1)..(189): unsure at all n locations
  Clone ID: MRT4577_109872C.1
cggacgctgtgggttatgattgaattacatctaataggcgagtcggccacatgcctcatccaaagaactttattattgaattacatctaataagcaatctaaaagaggtggccnccgggcaacaattggtgtagttgtaacagggggccagcggtaggcgcagtgtgctgagagaaccggaaaaattgt

SEQ ID NO: 10826 - DNA, 444 bp, Zea mays
  Clone ID: MRT4577_109873C.1
attttcttatacaaactcagcattcagccggtcagttgaggaacaggaagaattctaattctggtagagcaaaagtttctgaaagtacagatatagttacatttgctgatgtggctggagtagatgaggcaaaagaagagcttgaagaaattgtggagttcttaaggaacccagaaagatatgttcgtcttggtgctcgccctcctcgtggtgtcttattggttggttttgcaaatgctatcagtaatggcaattactgcttgacaattgtgtttgttaccatattgttattctttatctacaggtgggtcttccagggactggaaagacacttcttgcaaaagccgtagcaggagaagcagaagtcccgttcataagttgctctgctagtgaatttgttgagctatatgtaagcatgggagcagctcgagtacgtgacctatt

SEQ ID NO: 10827 - DNA, 1076 bp, Zea mays
  Clone ID: MRT4577_109874C.1
ggccgcttttttttttttttttttccaggaaccatagtccgtataagcattatcctattgatcatttctaggatggtatatagaggaaaacaacttccaatagggtgagtacaagaatatattgccaaaaaagaatcttttacatgtgtaacaccgacctaatctatggaacaacatgtgaagctgaatcacttacaatattcctgaggttgatcgtacaatgttacagctcaatatgaatcatctctggatttctttttttgtagtcaagggttcaggaactgcaatgatagatatttacatggtcactcgggcatgtagattttctttttttttcctgaattctcgtatagggctcgatctcatgattcaccgaacaaagggtgggcatccgaccagtttgtcttagcagacccggtttgtcttagcatgaatgggtgggggttcatacaacccaccacacatggccacaggtctcttcccagtatatgaaggtttccattgcataccttgtgtctcatattgtatgttctaattgctgagtcacttttgttaagtaattaattttaagagcccggtgcatactcctgacgctaggagcctgcttccagctgaagaacttgctcttgctgtcctctgataaaagaggtcaacccggctgatgcaacaaccgattttagccactcttgaagctcctcgccttcaaccttttctttctcttctaagtatgctccgaggccttccaaaactgcaggattagcacgaataactgaaagagctacttccagtgacgactgtaaaagcgcttttacttccctctgaacgagatcaactagatgtccctgccattaggttccaagtttgagcttagtgcttgcagatgacaacttacttaatagttcttgaaggtgtaggaaaagtttcgaggcaaacctggtcctttccccatggagagccaccagagtcatctaaaccaccatttgacagtgtagcaagtgatattggcccgatgcgctgactaagaccgtattctgctacagctttgtaggccatgtcagtagcacgtcttatgtcat

SEQ ID NO: 10828 - DNA, 287 bp, Zea mays
  Clone ID: MRT4577_109875C.1
aaaaaaaaaaaaaaaaaaaaaaaaaaaaaaaaaatttttagagcgagcctctagagctccggctcctgtgggaccctagtagctgagggtgaactttgcgcgcggtgccgagtctgatggctagtggcgtgtttgcctgtcgcgataacggttaccacgctcacaattccacccaactcacaattccaaaagcataaagggtcaaaaccaaggagcctactgacatgagctagctaagagttaacggaacgcactcaatgcccgatacccatactgccaacttgcct

SEQ ID NO: 10829 - DNA, 1428 bp, Zea mays
  Clone ID: MRT4577_109876C.1
atgtcagtagcacgtcttatgtcatcaagtgcaccagtggaaacccgtcctgctaaaacaaacttcctctgctgccctcccacccagaagtgttactaaacggccacgtagttcatcaacaaagagtaaatatctatcctctgtggtgggaggggtgtatgtaaagcctaatgcacctcctgaccttggcaatatactcaatttctgttaaattcagcattgaaaaagtaagtcaaattacatcttcttctctcagattgttctatcagtaattgcttaagttcaaacctcaacacgtggctgtccaggaagaaggttcgctacagcagttcccacgagtgcatgacctacttcatgccgtgcaacgacagccttttcattacccttcaattttgcatgctttttctctatcccagctatagatcgctcaaccgcatggatgaagtcaatcttttccacaatttctttatttaatcgcccagccaacaaagcagcttcatttaccaagtttgcaaggtctgctccagtaaaaccagttgtcattgcagcaatatcggctagatctacatctttactcagtggaagctctcttctgctcacatgaacttttagaattgattctcttccaaacctatcaggagcttcaaccataaccacacggtcaaatctcccagggcgcctaagggcaggatccaaaacatcagctcgatttgttgcccccagtacaatgacagccgagttggtatcaaagccatccatttccgtgagcaattggtttaatgtctgctcacgttcatcattactgacaatgcgatatcgactatcacggctttttgcaacggcatcaatctcatcgataaaaataatcgatggcgattcctttttggccttagcaaataggtcacgtactcgagctgctcccatgcctacatatagctcaacaaattcactagcagagcaacttatgaatgggacttctgcttctcctgctacggcttttgcaagaagtgtctttccagtccctggaagacccaccaataagacaccacgaggagggcgagcaccaagacgaatatatctttctgggttccttaagaactccacaatttcttcaagctcttcttttgcctcatctactccagccacatcagcaaatgtaactatatccgaactttcagaaacttttgctccgccggaattagaattcttcctattcctcaactgaccgggtgattgctgagaaaagcttattggtaggcgctgcaaaactaccgcaatcaatacaacatagataagacctaccagggcagaattgagcatgccgccagacctcttgtccggtgacccaaattcaaccatgttttccaccatcttctcgtatgggtctttatgtcgaaaggacgagcccggccggcctcgaggtaccca

SEQ ID NO: 10830 - DNA, 291 bp, Zea mays
  Clone ID: MRT4577_109877C.1
aaaacatacctcatctgcgaattaataaattaatgggggggttatcaacaagatagataaacccatcctgctcgtacatactcctagatagcacagctagttataccacccacccaacaaggcatgcaattagctaaactgcttggagaaacattattctactaataatattattactaaatccaaaacagatgctggggtcgttcacagttacagcactccctcgcttgggctggtgcttgacccccctaaatcccttctacggcatactcccacctacaccaacatgag

SEQ ID NO: 10831 - DNA, 169 bp, Zea mays
  Clone ID: MRT4577_109878C.1
cgatgctatactgaatgcttactggaattttgatcatcatatgtcactagtcgattaggggtgcactgagcagaggaaaccttggatttgcacttctactgatgccatgtcacctttcaaaaaaaaaaaaaaaaataaaattatataaaataaatagtagtacattata

SEQ ID NO: 10832 - DNA, 1371 bp, Zea mays
  Clone ID: MRT4577_109879C.1
cattgggtacctcgaggccggccgtgttgctgcttgacactggttttactggaccttgcaaacttggtaaacgaagctgctctgttggctgggcgattaaataaagaaatagtggaaaaggttgacttcatccgtgcggttgagcgatctatagcagggatagagaaaaagcatgccaaattgaagggtaatgaaaaagctgttgttgcgcggcatgaagtaggtcatgcactcgtgggaactgctgtagcaaacctccttcctggacagccacgtgtggagaaattgagtatattgccaagatccggaggtgcattaggcttcacgtacacccctcccgtcacagaggatagatatttactctttgttgatgaactacgtggccgtttagtaacactactgggtgggagggcagcagaggaagttgttttagcaggacgggtttcaactggtgcacttgatgacataagacgtgctactgacatggcctacaaagctgtagcagaatacggtcttagtcagcgcatcgggccaatatcacttgctacactgtcaaatggtggtttagatgactctgggtggtttacctgactggaggggagcatccattctaaaaagtatgaccagggacatctagttgatctcgttcagagggaagtaaaagcgcttttacagtcgtcactggaagtagctctttcagttattcgtgctaatcctgcatttttggaaggcctcggagcatacttagaagagggggggggggtggaaggcgaggagcttcaagagtggttaaaatcggttgttgcatcaaaagagttgacctcttttatcagaggacagcaagagcaagttcttcagctggaagcaggctcctagcgtcaggagtatgcaccgggctcttaaaattaattacttaacaaaagtaactcagcaattagaacatacaatatgagacacaaggtatgcaatggaaaccttcatatactgggaagagacctgtggccatgtgtggtgggttgtatgaacccccacccattcatgctaagacaaaccgggtctgctaagacaaactggtcggacgcccaccctttgttcggtgaatcatgagatcgagccctatacgagaattcagggaaaaaaaaagaaaatctacatgcccgagtgaccatgtaaatatctatcattgcagttcctggacccccttgactacaaaaaaagaaatccagagatgattcatattgagctgtaacattgtacgatcaacctcaggaatattgtaagtgattcagcttcacatgttgttccatagattaggtcggtgttacacatgtaaaagattcttttttggcaatagattcttgtactcaccct

SEQ ID NO: 10833 - DNA, 260 bp, Zea mays
  Clone ID: MRT4577_10987C.1
cgtcttcctccgcggatccctcctcttcgcggacgacgcgattctacaccgcgaaccctccctccctccctggattggtcgatgtgctcgtccatctccgctccgtccctcgcctcgccatttcgtagcttctttctttttcccttgtccctcactttcgggttctgcttgattcatcacattagtttactggtagggagggagacgttacgtcggctcggcgcctcagcgactgcgtgctccgcctcgggagtagccga

SEQ ID NO: 10834 - DNA, 369 bp, Zea mays
  Clone ID: MRT4577_109880C.1
agcagtggtaacaacgcagagtactttttttttttttttttttttttttttttctttttttttttttttttttttttttttttttttttttttaacgacctacaaaaaggcaaaaacattcctcggagctacggccttacgggccccccagcaaaccagataggggcccgcggggaaaaactatagctgcactgcaggagcagcaccgtcattgtacacacacaacaaaagaaacgcgggggcactactaaactacggggggatcctgcaaatgccatccgtctgaacggaacggggggcaaccaagctttttttttaacaggcacagatcgggcataaccccggggactctgggttggtaccacgggt

SEQ ID NO: 10835 - DNA, 303 bp, Zea mays
  Clone ID: MRT4577_109881C.1
aaacactatcatatatattttttttattttgagacgataaacatacactcaccaagtccttcgataaggagaggaaaaaaaactgtgtatatccaaatacacacaccgcgaacatgactacgaatcatgttgctataaaaaattgcgctgcaaaggaacaaactagtttaatacacatcaaaaaaatggggaaaaggcaatttgcgatcctccgaagaaccacacttgtgggggtacagaaaaacactttaaaaattatacgcggtccggaaaaccggatgcagcaatttggacaatttgtcc

SEQ ID NO: 10836 - DNA, 398 bp, Zea mays
  unsure (1)..(398): unsure at all n locations
  Clone ID: MRT4577_109882C.1
gcgggcggggggggggggttatagtattgtgggggcctcggggggtttatatatatagtttgggtccatattacatgtgtatgagagccggggcttgggttcacatgtgcctcaccccaagtgtatataggcgtggcagtagttttgtagcgaggggggtggggggggccaatgcgagggcatgcttgcaacaatgggatacatcacatccagcagagaaaactgggaagcgaaggaaccatggggcgggggaaaagaaaaaaaaaaggagaaaagggaagaagaaaccaagcaagcaaagggggcggggacccctaagcaaaaccgagacgagagagacgacccatgggactagctagctactagctcacgcaggagctatagctanccngcggggg

SEQ ID NO: 10837 - DNA, 711 bp, Zea mays
  unsure (1)..(711): unsure at all n locations
  Clone ID: MRT4577_109883C.1
aattcggcacgaggatggcgccagtgccggggtacgccgggacgaagacgtccgcgcgcgggctgtacagcggcggcggcggcggcaggcagcaccggccttcgttccagaactccgtcttctccattgaggagatccttagcgccaccaacaacttctcgccggcgctcaagatcgggcagggtggcttcggcgcggtctacaagggcgtcctccccgatggcaccgtcgtcgccgtcaagcgagccaagctggtgagtcggtccagagaccaggctgcctgctgctctcttcaattctcaatctcctgcagatttccccttttccgttttctggctgaatcgacgggtgaataaaccatagataaatttaaattccgggatggatggatggtcgcagcggatgcagaaccctcacgtggacgtggagttccggagcgaaatcaagatcatggcgcgcatcgagcaccagagccttgttcgcttctacggctacatggagtgcggcgaggagcgcatcgtcgtcgtcgagtacgtccctaacggcaccctccgggagcacctcgacagtaagcgaccacctgccattgctgctgctctgcttccaactccatctgccatctctcacctcgcaagaaccaactccaaccaagcagggtgcaacgggcgggtcctggacttcggcacgcggctcgacatcngcatcgacgtc

SEQ ID NO: 10838 - DNA, 319 bp, Zea mays
  Clone ID: MRT4577_109884C.1
cgtctttttcttttttttttttttttattggggggtcttttttcgttttttttcgttttatccacccctaaaaaaaaggactctggatttgccatggggggctgggttatataaaccaacaatacccaaccgggggccttttgaatagactatattccgcatggaagggcttctagagaacccccattgggtggaatcctagacacattgcttcatagaaagggccggggtgcttatcaaccacccgattcctttccgtgaaggggggagaggggggacttttggccgggcccccagaccctcttttttttttctgccc

SEQ ID NO: 10839 - DNA, 428 bp, Zea mays
  Clone ID: MRT4577_109885C.1
ggaacaaaaatcattttgggttccaaagcccttaattaacaggggaatagcaaacgatccatccaacttgggcccattttttttgggggcgggtttgggggcgggggaaaacaaaacaatcctattaggccgggttacatttcccttccccgcaaatggcccccctgcatggaaagctttatgatgggttgggttcggggccaaccaaagaggggaggggaccaactttgggttgacccccccccttttttttaaagggagggccccatccccttttttagaaaaaattccttgaccgggactttaaacccccaaaccaaacaggggtcaacttaaaaggaacctatcccatcccttttaaaccttcctgggccatccctccaaaccctaaagggtggggggggggcttccctattaattggagcccc

SEQ ID NO: 10840 - DNA, 278 bp, Zea mays
  Clone ID: MRT4577_109886C.1
gggagaaagggaaaagctggttaaccattccctaaggggtaaacaaagggggggtcaacacaaaaaaaggccccggggttggaaaaaagtttcgggaacacgttttttttggtccggggggtttaataatggaccacaacgcctctttgccccaaccataggggggggaggaaaaaaaggcagccaaacaaaaaggcagggggcataaatggttacaagccgggcaaggggccaaatccccgggggcaaactggaaacccttggggggggaggacggg

SEQ ID NO: 10841 - DNA, 274 bp, Zea mays
  Clone ID: MRT4577_109887C.1
tgcgatatggccggacggacaagcacatgcacatgggcctcgttcagcctccactcatgtacgagcctagaagataatccaagagaacacacgacacgacgacacgactcctgcgatctgcacaaatcctgtgacccaattaatgagtgcatatacgacattctaacctggcatcgattctggcatggttagatgccatcacccaaaacagtacaattattcgctgctaagactctgacacggtgacatgtcgttgtcatcactggacaactag

SEQ ID NO: 10842 - DNA, 196 bp, Zea mays
  Clone ID: MRT4577_109888C.1
ggccacgcattccttcatcttcacgcatgacgcatcggtcgtccactgctccagtgaattttctcacgtcttcgaccttaactaccctgacttcaccgccgtcttctacagttaccaaaactacgtcacctacatactggtgttgcgcaacgtcagcatcaactacaacgcggtgtaccaaccgactatctgcatc

SEQ ID NO: 10843 - DNA, 391 bp, Zea mays
  Clone ID: MRT4577_109889C.1
tttttttttttttttttttttttttttgttttttggtttttttttttttttagagggaagatgtttttttacaaaatggcaacaggtactatttttattcggatgtcaagttgcaacaaacagcataaaggctggaactcaaaactttactttccgaccgggttatccttgtacgtttctcaacagcacgggaaattataccaaacccattatacaatctttgccattggttccacagcttcaagaggggcaaattcagcaattaggatcggcttcaaatctgtttacatgccccccacccctaccaaaatatttttttttatgtgctaactttgctctacaaactaatcaaacacctaccctttgaggggcccggatactccacacgact

SEQ ID NO: 10844 - DNA, 276 bp, Zea mays
  unsure (1)..(276): unsure at all n locations
  Clone ID: MRT4577_10988C.1
gagctcacnatacggcggccgcccttgttttttttttttgcggtgaatcaagccctaatttgcacggatgagcctacagcaaagtttgaacttcactatagcatagtttgacaaaagaaacactcgtccataacgttagaatggaagcgaaactatgtgcgtacagacatcatcaaaaaacgttactgcgaacgcttgggttgagtaaaagtgtagttagttaaacagtaaagtggctatatagttttcggcgatttcatcgaagtgatcttagag

SEQ ID NO: 10845 - DNA, 754 bp, Zea mays
  Clone ID: MRT4577_109890C.1
cccacgcgtccggatccttggacacctgcgcgccgccagcccgtcaccgcttggagacccgcgcagccgcgcttccctgcgcgccgccagccgtcgccgatccgtggccgcgtccgccgccgccagccctaaggtcgcgccgtcagccagcccgtctgccgtcgtgaggtactgaggaatttttctggtaatcagcatggcactgtcatcaatgtttaagagaataaatgtgaaagatttgacctccaaggtttcagtctataccagtgctacaggcgctgggccacgaaaaggactgctggatcaacaaaaaatggtcgcgattccaatccaaagtatttgggggtaaagaagtttggtggagagaaagtactaccagggaacatcattgtccgccaaagagggacccgcttccatcctggaaactatgttggcatgggcaaggatcatacacttttctgcctgaaagaaggcaatgtacgctttgagcgcaacaaactctcaggcaggaaatgggttcatgttgatccagttgctggtcatgatcttcaccccatttacgcagatggttttgctactacatccgacactgagccaatgcaataaatgtgcttggggatttgggctgtcattttgttccaactcattcagctgccattttacagtttcatgtgtaaactttagcaggcttgaacgtagctggatcttttctttgtaatcataactactttgaataatataagttatacactgt

SEQ ID NO: 10846 - DNA, 275 bp, Zea mays
  Clone ID: MRT4577_109891C.1
atcagcagctagcgctctcctcgatcccagcagagaaaggtcggcctacccactctctctctctctctctccagtctccaccggcagctctaatcgtaatatccatgggctccaccgccggctacgtggccgctgtggtggacgatgaggcgtgcatgtacgcgatgcagctggcgtcgtcgtccatcctgctcatgacgctgaagatcgccatctatctgttcctgctggatgtgctgcagaaggatgccggctgcggcaaggctgcgctggcg

SEQ ID NO: 10847 - DNA, 857 bp, Zea mays
  unsure (1)..(857): unsure at all n locations
  Clone ID: MRT4577_109892C.1
gcgttcgtaaaccttggncacctgcgcgccgccagcccgtcaccgcttgtggacccgcgcagccgcgcttccctgcgcgccgccagccgtcgccgatccgtggccgcgtccgccgccgccagccctaaggtcgcgccgtcagccagcccgtctgccgtcgtgaggtactgaggaatttttctggtaatcagcatggcactgtcatcaatgtttaagagaataaatgtgaaagatttgacctccaaggtttcagtctataccagtgctacagagttatctggtggactaaacatgatatttaggcgctgggccacgaaaaggactgctggatcaacaaaaaatggtcgcgattccaatccaaagtatttgggggtaaagaagtttggtggagagaaagtactaccagggaacatcattgtccgccaaagagggacccgcttccatcctggaaactatgttggcatgggcaaggatcatacacttttctgcctgaaagaaggcaatgtacgctttgagcgcaacaaactctcaggcaggaaatgggttcatgttgatccagttgctggtcatgatcttcaccccatttacgcagatggttttgctactacatccgacactgagccaatgcaataaatgtgcttggggatttgggctgtcattttgttccaactcattcagctgccattttacagtttcatgtgtaaactttagcaggcttgaacgtagctggatcttttctttgtaatcataactactttgaataatataagttatacactgtaagctttgttctcatggttaacttcagatttcaaatatgatgtcactacaatggagttcttatcattgtagaggtt

SEQ ID NO: 10848 - DNA, 1798 bp, Zea mays
  unsure (1)..(1798): unsure at all n locations
  Clone ID: MRT4577_109893C.1
ggccgctttttttttttttttttccgggntttttttttttttttttttttttttttttttttttttttttttttttaatcaaaacggcacgaggttccattacttctcaaaatagctgtggcctgtagcttctttcattgtttcaaagcattacaacataagcagcaaaaccagaaacagtcctcataagcaccacttattagggcagtacaacacaaacgataagcgcggtgcagatcaagaaagaaccacaacatgtagaagccatataaaagcatgattaagcacagcagaccaccaaaagcttcttactgaaaaaaaaggccgccttaggcagaaggtttctccgacttgagtggcttcaccacctcccaggtgaagtcagggtcgtcccttccaaagtggccgtaggccgccgtcttgaggtagcgcccgttgccgcctttcttgaggtcaaggttgatgatgatcatgccaggcctgaaatcgaagttctccttgacaatcttgaggatctccttgtcggggatcgcgccggtgccgtacgtgtcgacgaacacggagagaggctcgggcacgccgatggcgtaagacacctggacgatggcgcggcgagcaaggccgctggcgacgatgctcttggcagcctgccttgcgacataggctccgctgcggtcaaccttggttgggtccttgccggagaaagcgccaccaccatgggctccccagccaccgtaggtgtcaatgatgatcttgcggccagtgaggccagcatcgccgtgaggtccaccaatgacaaagcggccagatgggttaaggtggaagatggtcttctcgtcaaggtactgctcaggggtgacagtcgagtaccgcaatgagggtggtgccatggtccccatccgtgtccacaccgtcctcatctccacccagcacgacgagacagtgaccaatgatgagatcgctgctgacctgaaggagcatgtcatcaagcctatcatccctgagcagtaccttgacgagaagaccatcttccaccttaacccatccggccgctttgtcattggtggacctcacggcgatgctggcctcactggccgcaagatcatcattgacacctacggtggctggggagcccatggcggtggcgctttctccggcaaggacccaaccaaggttgaccgcagcggagcctatgtcgcgaggcaggctgccaagagcatcgtcgccagcggccttgctcgccgcgccatcgtccaggtgtcctacgccatcggcgtgcccgagcctctctccgtgtttgtcgacacgtacggcaccggcgcgatccccgacaaggagatcctcaagattgtcaaggagaacttcgatttcaggcctggcatgatcatcatcaaccttgacctcaagaaaggcggcaacgggcgctacctcaagacggcagcctacggccacttcggaagggacgaccctgacttcacctgggaggtggtgaagccactcaagtcggagaaaccttctgcctaaggcggccttttttttcagtaagaagcttttggtggtctgctgtgcttaatcatgcttttatatggcttctacatgttgtggttctttcttgatctgcaccgcgcttatcgtttgtgttgtactgccgtaataagtggtgcttatgaggactgtttctggttttgctgcttatgttgtaatgctttgaaacaatgaaagaagctacaggccacagctattttgaaaaaaaaaaaaaaaaaaaaaaaaaaaaatactctgcgttgttaccactgct

SEQ ID NO: 10849 - DNA, 431 bp, Zea mays
  Clone ID: MRT4577_109894C.1
aaaggggggggaacccagactaaaaaaaagggcaaccccaccgaccctaataaccaaaaaacacacaaagaagtgggggccctaaaaaaaccagggaaaaaaccccggggaggggaagaccccagaaagcatccccgcttaaaaaaaaaaacccttaagggtcccctgttatttagggagaaaagggaaggtcttgaaaaaaaaaaaaactctgctctaaaaaaagccctaaaaaagggggccccaaaaacccaacttttgtttatcgggtttagaaaaaagccccgcgcaagggattttccaacccttaataaaacgcgggggcccggcgaacccaaatttataaaaaaagcccgaggttttttaaggaaacgacatgtggagggcttaacccaagcttttataaacccgagggcggggggcccaaaacc

SEQ ID NO: 10850 - DNA, 2278 bp, Zea mays
  Clone ID: MRT4577_109895C.1
tttttttttttttttttttttttttttagggactctacttatatgattagcaagcttaaatagagtttttttttcaggtccatttcttttccttagattacagaagcaccataacacattccaaaagtaattgcatgcacccaagaatctgctaatgttccgttgataaacagttaagtgttgaaaacaaccaaaactgtacttatcacttaatgaaatacatggcacaaacaaaaaaaaaaactgaatatgcctgcgaacatagcagaaggggttgtcatgtactaaaaacattattgggtcttcgaacaagctgctcatataatggaagatggttctttgcaacaaaaaccctgaacccttcaagaagtggaagtcttcctggggacgaaaaaagcttagttattgcttcaagtgaatccttggtatgcatagttttcaattttaaggccttcatgtattcaacaaactctgtgtactctgcaggactaagcttttcttgaaccagcttcaagaaggctggccctgagttagattcctggccttcagttttttcacaggccccatcattctttccgcatgctgttgctatagtgcttttctttgattcaggtgtaggtccaccacattggtatctggccaaagctcttgaccctatattttgaggcaattttgaagagacgtcatctaaaacaacagcatctttggatctgtccattgttttagctttcttaagccctaaagacttgaaggtatgttccttcaaatgcccttgtattgccaagtcaacagtaatatcaacattggtatcctgtgacagctggtcttctgggaggttgtgcttcgtagatgtagacacaaagttgtgttttgtagtaagggttgaacgattagcaggagtgatctgagccaacttcatgaagttacttcttctcatggttgaatttcctgataatgtgatttgtgggcactcatcttgtgcactggcagccaaatctgatagcttctctttaagcatgtgtttgtttgctggtggtgctatacaattattacaatctgttggctctagtgtcaaaggatctgaagaagctttatctcgaaaaaatcgggtcaatccttggactacttccccatactttgagtagcactttatatgaggtcggagccaatatgacatctgagattgataatttggccacacaaacctttcatcacaataaataatagctccatagtcatggcgatgtctgataacacgtccaacagcctgattgacagcccgtgctgcttgttgcacataccattcttctcctgtcaacatctttgtgtttttattagatggtgtcccctgcttatccaaatactcgcgcttgagccgaaccttggcatcagttggagtagcaaagggcattccagtaactattactgccctcccagcacgatcagcaaaatcaagaccctcactaacctgcacaagtataacaatgaataaatgagggggcaaaactcagagattagtgaaaaggcaacattttggaaatggtactcccaacttattagtacatgtcctcttaatgacccattgatttgttccgcaagatcatcattgacacctacggtggctggggagcccatggtggtggcgctttctccggcaaggacccaaccaaggttgaccgcagcggagcctatgtcgcaaggcaggctgccaagagcatcgtcgccagcggccttgctcgccgcgccatcgtccaggtgtcttacgccatcggcgtgcccgagcctctctccgtgttcgtcgacacgtacggcaccggcgcgatccccgacaaggagatcctcaagattgtcaaggagaacttcgatttcaggcctggcatgatcatcatcaaccttgacctcaagaaaggcggcaacgggcgctacctcaagacggcggcctacggccactttggaagggacgaccctgacttcacctgggaggtggtgaagccactcaagtcggagaaaccttctgcctaaggcggcctttttttttcagtaagaagcttttggtggtctgctgtgcttaatcatgcttttatatggcttctacatgttgtggttctttcttgatctgcaccgcgcttatcgtttgtgttgtactgccctaataagtggtgcttatgaggactgtttctggttttgctgcttatgttgtaatgctttgaaacaatgaaagaagctacaggccacagctattttgagaagtaatggaacctcgtgccgttttgattaa

SEQ ID NO: 10851 - DNA, 562 bp, Zea mays
  Clone ID: MRT4577_109896C.1
ggccgcttttttttttttttttttggactcagcaaatgtctctttttatttctgggtgaccacatacatgatccaaaaaactttcttgttgagttacatctaataagctatctaaaagaggtcaccaccaacgatgtgaagcttgtaggatgctgctgtaacttgtcacagcaagttgttcaaagggcaacctgtgttatacatgctagactgttgcggacctagcccctgactgctggtagaccggcactaactgtcgctgtctcaagaaggaactactgatacgcctgagctacgctgcctaactgtaggcatacttgctgcttcttataagcaaagccattcactgccttcaatcgcatacattggaataagttgtctgttgttcgacgtagtaccacagtacctacactgctaacatgatgacatttgctgcttcacatacataacagggaccagtgtgcacagactgtagaatggaagacattgcatgtgtccatagagtggagaaagacttgccagacctacatggttgatcacatgccgcacaagctgctgcagc

SEQ ID NO: 10852 - DNA, 276 bp, Zea mays
  Clone ID: MRT4577_109897C.1
aagcaagccatgtggaggagggctttagctatggtcctgttcatggctggcgccgggctgctctcctgggctggcggcgcgggctctcatcatggcttgtggagcatcatcaccctgcccatgttccagagcatgcttagccaccgtggcttacatgcgttttccatttcaccttctacacctactactccttcatctaggcctccagcatgttccctgtcttatgcaccactctttacaagcaaactctcatgtcttatctcaacttcttttttt

SEQ ID NO: 10853 - DNA, 297 bp, Zea mays
  Clone ID: MRT4577_109898C.1
ctcacgcgtgcgaatatcacactccgcaggtcactttcacctagtccaacctcatatatcggatgggctcctactatatctcatctatcctatgtcagctctttcagcgctcaccctaaactctctataatctatactaccagtcctctcctcagtctcatctaacactgtcatccttcacaagatgcacgaaatcacaataagcttcgcgttacgtaacttccaagtgtcaagaactcgactaatccaactaatcataatgatccgttactatagctctagatatactctagattt

SEQ ID NO: 10854 - DNA, 332 bp, Zea mays
  Clone ID: MRT4577_109899C.1
atagtgagtcgtattaaaagatgctattgactacgtcgagtggcactacagggagcccagcgatgacaagttccggcatcgcaagtcgtggctcacctccagtcgcggcggcagctccagctgcgacgacggctgcatcgacctgcccatcaacggcgacaacgacgacgtcatcaacttcatcctcgacttcgacaaactgcaccgcgtcaggctggaccgcatcacccacgcatgcggctgcatgtgcgcaagcatcgtcatgcgacactccatcggcggaacgctctcctacagcgcagtcgggttctgcggaggtttcgcagacgcat

SEQ ID NO: 10855 - DNA, 142 bp, Zea mays
  Clone ID: MRT4577_10989C.1
cccacgcgtccgatgatgtcaagcctgcatattccacactttcgccatccgaagcacccgagccttaagattatcatgatgtgaaagattagctatgatcccaagatgttttcaagcttggtcttactgaatgaaagtttgg

SEQ ID NO: 10856 - DNA, 1997 bp, Zea mays
  Clone ID: MRT4577_1098C.1
agctacctctccgatccgaggcctgagcgagcgagctgaggactgcagcccatataatatctagactatagtgcaccacagcgaggaggcacgtatataaacacgcggcggcgcatggacccagcatggtatacacccactacctacacgagcacgatgggcagcgccggcggcggcggacagcacgtgcgcgggatctctctgtgtggcgtggtgtccgcggtctagacgctcgtatctatcttcctcggccttctggtcccctgcgagcgcgccgacgccagctacgggtacacggagatccaggtggtgtcccacgccctcgcggatgccatgcccgctgcgtgccgtcaccctcgttctcaacggccctccagcctgtgctgtcagcgtgtcgccgttgggtgcgggcgggcagcagttcggggcctgcgtgaacgttggctgctactgcatagtcggcgtccccctcggcgcgctgctcgggttcgtcttcaagctcgctgttcagggcatgcgggcgggggtgatcggagggacctgcctgcagaggtctgctctactgcgggccacctcgcgatctgcccggaccaaggtgggcgaggaagcacagaataggttgcacatgtgggaggctacgaagacgacggcgcccccgcctgcggggctctgcaattaccctgagcccgccgcagctgcttcagaatctcaaatccctcggccttgacgcagtatctaggtcgccgcgccctcctcagtaatcttgcgtccgcggctccttaggcctcacgtggagtgccttctcgtggcaggccttccccggcctgcccagcttccttcaggctctccccctcatccgccgtcatgctctgcctggagacctggtacttccagatcctcgtgctcatcgcgggccccctcaaggaccccgagcttgccttggcctcactctctgtctgcatgacaatttcagggtgggtgttcatgatctccgttgggttcaatgcagcagccagcgtaagagtgagcaacgagctcggcgccggcaacccaagggcggcggcgttctccgtggtggtagtgacgctgctctccttcgtcctgtcggtcctcgtctccgccgtcatcctgctgtgccgggactacatcagctacatcttcaccgagggtgaggacgtgtcgcaggcggtctcccggctcaccccgctgctggcgttcacgctcatcctcaacggcatccagcccgtcctctctggggtcgctgtggggtgtggatggcaggcgttcgtcgcgtacgtcaacgtcggctgctactacatcgtcggcatcccgctcgggtgcctcctaggcttctactttgacctcggagcagcgggtatttggagcggtatgatcggcggcaccttgatgcagaccttgatcttgatatgggttacattcaggaccaactggaacaaggaggggtgaagaagcacagaaggaggataaacaaatgggacgacggcaaggctcctctgctgtcagcgcaagaatgaaacaactcgtctctctggtgcccaaccaaagaacaacgaggcgtggatatatatgacctgtagggcttgtttggaagaaagagtattggagaggattgaaggggttataatctcttgctattcaaaattgaataacaagggattatagtccccacaatctccttcaatactcttgtttccaaacatacccgtagggaactagggatgcccctcggcaggctcagcggagacgtcgacggagtttgatgtcaagtagcaattaattccaccatgtcctcaaatggacagaaccagatgcctgaaatagacagaaccagatgcctgatgaaattctacgtactccatcggttccattatataattcgtttaactattttatattaagtttgaccgactcatattattaaaaaatatataattgtcatcaacgcacgacgcgaccaaaaaaaaaaaaaaaaaaaa

SEQ ID NO: 10857 - DNA, 146 bp, Zea mays
  Clone ID: MRT4577_109900C.1
caatcggcccaaaccagaggcgggagggtggagcttaggagacggccatggctcgctacgccgccgcccggcgctgcttcgacgcctcttctgcagctctattcagcctctactaaaaacaagagctaaattaagaaatcataaaa

SEQ ID NO: 10858 - DNA, 149 bp, Zea mays
  unsure (1)..(149): unsure at all n locations
  Clone ID: MRT4577_109901C.1
ctgatcaagtgaatatatttgagcagatgatacgtatctacagcaaaaacagaaaagcagnataagnagntaataaggattgcaaccaaatagggagcaacagagatggaacttcagtatgtatacaatcctgattatcgacttactct

SEQ ID NO: 10859 - DNA, 444 bp, Zea mays
  Clone ID: MRT4577_109902C.1
ggataccaattaggtggtatccattcatcacactaatggctgtttgtgcttaagctggagaattgtggcttacgagaccgcagcttccatttgtgtgatcaatggatacaaattaggtgcgtaaatggtgacagattaacgtcaagagatgacaactctttggacagtaaaccatttctgactcctcgaattgattgtttgctcacatgatgaggataatcggcacatactatgttacacaatagattattacattgattcctgtggcctcccaccaatgtcacagccaggacggggctcttgtctgtttgaacaacttaacattcttgaaaactgtcacatcgtgtatgtttactcgggcgtattcgcaccatttgtcccactagatctcgctcatgatacattacttaattcaatgcttgagttttcatcttcatgatgaat

SEQ ID NO: 10860 - DNA, 294 bp, Zea mays
  Clone ID: MRT4577_109903C.1
accacacgatcgaccacgcaagatcccatttaaatacgatcataacatcacaaagcgtttgcatttatatcatattaggatcatcctataatcgtacctgtctcaaattagctatcaacctaagtgactatttattacacgctcacaaatcgatatacgatgccatacgcaaaatcatacacactaatacacaaccatacacgaatagatctctggcacattttcgcacttccaagaccagaacctatcaacgtagacacatagatccctacatatagatcatataatattctc

SEQ ID NO: 10861 - DNA, 407 bp, Zea mays
  Clone ID: MRT4577_109904C.1
cccctctcccctccccaagcccgcacccagacgaaatccctcgctagggttttactcccgcgccgccgtcccgaaatcccccccggaaggcgaccatgtccggcggtcccgcggcggtctcgttcctcaccaacatcgccaaggcggcggctggcctcggcgccgcggcctccctcctctcggcgtcgctctacaccgtggacggcggcgagcgcgccgtcgtcttcgaccggttccgcggagtgctgccggataccgtcggcgagggcacccacttcatcgtgccgtggctccagaagccctacatcttcgacatccgcacgcgcccgcacaacttctcctccaactccggcaccaaggacctgcagatggtaaacctcaccctccgcctcctctcccgccccgac

SEQ ID NO: 10862 - DNA, 353 bp, Zea mays
  Clone ID: MRT4577_109905C.1
cgggcccggatttccgggggggtggggtccttgggggggcagttttccggtttggcgtccactgctatttgttgggggcagtcttatgggtaagggggcgtaaggcctccaatcatttacggggacttgggccgccccaacccaatgaccgttttttggtcaaaaacggaccaaagcttgacgtttcgcccaatgaaggggatgctgactggcccagtaacaatcttaaactggtccttggtccggaatgaccagccgaggtttgagacttgttaccaaatcgtttttgcaaccaaaaaggaagtcgaggatcttgaggctgggggaattaaggttttccaaatcgacaaggt

SEQ ID NO: 10863 - DNA, 616 bp, Zea mays
  Clone ID: MRT4577_109906C.1
tcgaggccggccgggccgggctctcttatcggccgatctcacaatattggaaacaggagagagagggagagattagagggagcgccctggccaagctaacaggaaccacgtcgcgagaagagatagcaagggccgacgccgccagcaggatgaaagagatcatgaacgtccacatcaggacatgcagcttatccaggccggcaaacgactgctgggagctctactgccacaagcacgggatcgaccccgatggcaccatgcccgtggatacctcggctgttcgcctagatgatgccttctacacgtgcttcagcgagaccggtactggcaagaatgggcccagggacatgttcgacgatcttgagaccactgtcattgaggaggctcacactgtgtcgtaacggcaactcttccacccagatgcatgtcctctcgggcaaggaagactcactcactatctttgcccgtgtgcacatacactgtagagacccagatggacaatctatgcctggaccgtgagcgcaagctggcacacaactgcatgagatgcagaagatcattgatgttccaagctaggcgtgggaggcactgggtctgaactagccttgcttctatt

SEQ ID NO: 10864 - DNA, 337 bp, Zea mays
  Clone ID: MRT4577_109907C.1
acgcatccgaccacgcgtccgggccgctagtctgatgcgcatctgcacctacaccaacatcgtggataacacctccattgcatcgagcggatctgtgggcctgttgttagtgcggggctgggcccagcgcgctgatgccaatgccacctccagcgtctccgatctaggcggatcagctagcggtggcgccgctgcgcttgtggcgctggatgaccatctcgatgtcagattgtcaattgcgtcccgttatctgatcatgaacccttgactgggcatgaccatcgtcgactagttcatccatcttcagggactatctcattgttcagcaccattccct

SEQ ID NO: 10865 - DNA, 1508 bp, Zea mays
  Clone ID: MRT4577_109908C.1
atctgccaataattacttgcagtttctacggagcctcaaccgctccaagtgctgcgccaagggaatttgcacggagtgcttcctccagatgaagtcgcccacctcgtgcaaaccgacgcagtgtccgtattgcaagacgctgaattacgcagtggagtaccggggcgtgaagaccaaggaggagaagggcatagagcagcttgaggagcagagggtgatcgaggcgcagatcaggatgcggcagcaggaggtacaggacgatgcagagcggatgaagaacaagcggactgcaactttgggtgacgtagtagcatcagcacaggtcgattcttgcaataccgatggtgcatcaactgcagttgcaaacagtccacgaggcaacgatgttctctcgtccgaagtgcagcattctgagttgatatcgaggaattctgaagccttcaaacagatgcggggcaataattttgaggtggatcttgaagaagtaatgcttatggaggcaatttggctctctatacaagatcaagaagctttgggaaatccaggatgtgttagcactacaccgtcatcaattccttcaaggccttttgatgatggtgatatgacaacgaccgctgaagcagcttcttctggtggatttgcttgtgcagtcgcagctttagctgaacagcagcatatgcatggagagtcttctagcgcatcaccttgccaaacaataaggtttggcacccttagcagaccagacagatccactacacaggatctgagtgtagctgggagcagttcttcggactccagagttgaggaaccaccaaccagcaatacacaccgaacaatagaggctgcagagtattctaattctaatgtccagtggtccgaggtggccgaggctgggaccagtattgctgaatctgatggtacagtggaggctggtgttgacaattcatccacttcggctgggtccaacattgattctgttagtgttcctgatagcttcgaggagcagatgatgctggccatggctctctcgttggtcgatgcccgtgctagagcaggttctccggggttagcttggcggtagcatttccttgtaggcccttccactccttatactattcttttcggttgtgctgcgttttgttcctaagtgttccaattgccacgtaaaacatgggggattagatggggagcaggctcaaatttgacgaactgacagtgatacttgtgaatagtgggataaatctgtacatttgaagccagtggtttggctaattttatctcctcttctttcgattcttgaggaagaaattggattctcaggcagatttctgcctacagaagttgtgcctgatgatgttgaaacattgtgtaaatacggaaacgcactcacatttttttcaaaacccggtggttctccctccctgcggtgtcgaacactgcatatgcatatagcggaatgacatcttataaataaagtttctaaattttccttaaaaaaaaaaaaaaaa

SEQ ID NO: 10866 - DNA, 1561 bp, Zea mays
  Clone ID: MRT4577_109909C.1
ccacgcgtccgtccagctcgccgttcattcccgcaatcccgttccgctcgcggtatcgggccgtggttcgttcgatccctcgtctctctctgtcgctatggtttggtttggaccttcgcctgctcgaacttcggtcagcatcgagtagtgatgccgctggctgagccgccccagtggcgccgcaaagccacggatttcttctccacatctagtgtcaagctgaagcaggcagggcaatcggccggggataatatagctgatgttgctgggaaggttgggtccgcggtgaagagtcggtgggtcgtcttccaggaggctaggcagcagcagcagcagcaacggccaccgcatgagacagtgcaagagcgtatcatcaccgctgctgccaccactggtttgcttttcaggaaaggcatttcagagacaaaggagaaggttgcagtgggaaaggtcaaagttgaagaggctgctaaaaaaactgcagataaaagcaagagtatcttgaacaatattgaacgctggcagaagggagtcgcaagcactgatgtgtttggtgttcctattgaagctactgtacaacgagagcaatctgatagagcggtgcccctggtgcttgtgagatgtgcggactacctggttatatcaggtttgaataatgagtacttattcaaatctgaaggtgacaaaaaagttcttcagcagttagtttctctttacaatgaagactcgggtgcatctttacttgaaggtgtaaatcctattgatgtaggtgcactggtgaagtgctaccttgccagtatccctgagccgcttactacattttcgctttatgatgagcttcgagctgcgagggttagcattcctgatcttagggatatattgaagaagcttccaaatgtgaactacatgacaatagagtttgttacagcattgcttcttcgagtcagccataaatcatcacttaacaagatggactcccgcagccttgctgtggaatttgcgcctttgatcatgtggcggcaaggtgacactggcacagatttgcgtaaccacctcaagtttaccctgaaaccgcctccaaaaattgtggatacaacatcaaatgctgccacatgggacctgttagatgaggatgacgaggatgcttcatcccagatccccttagacgatgcttcaccaccagactacagctccattgaggttatccagtgtctgatcgagcatcacaatgccatcttcaccgacgcaaatgaaaccgtgtggagatgatcggcatctcctctagatctctctggtgttagatcgtgctattgtacaagttccaggtaggaaggtgggaaggtggattagcgctcgctattgttagggataagcattttggccggaatatttttgaagtaggtttgtatatacactagtgttaactgttaattctccacgggactagaaccgggtcatgccatatcaataaaaatatatttggatggatgtaaaaaaaatgaaaaataaaaatcattgattgtattcagatcatataataataacaaagcctttgtccccc

SEQ ID NO: 10867 - DNA, 1832 bp, Zea mays
  Clone ID: MRT4577_10990C.1
tgctctcattgacaacagacaacaagcagtctggaaccttcaacctgtctggatccattagacggcaggttctgtctcccgctagttctcttcttagtccatgtagggggtgtttggtttgaggaatcactttatccaaaatgtagtggtgcatcatgggtccattcctcaaatttgttgggatgacctcattcctcatattagtactaactaaataactataaggaatgaggtgatgatggatcaactcaatccattacacaaaccaaacaaaaaattgaggagtgagaagacgatgacctagatcattcttcaaaccaaacagcctagtagtgttaaatgttttgcataccatgggcaccgttttgataaagttgtcttacttctaattaggggcacaactaaatgtcatacctattttccgctgctcttgacgtttatttaatagggatgagacttcatgcacttaacaatgcacaccatttttttgaattttgaatttgtaggctacctattatgaactaacaaagaaatgtacacttcaagctcaaatgaatgaactgctaagttacatgcagttttagtaaagcctagaaggccagtagaaacaaatagcaactttcaagtgtttagggaactttcacatgataaattgtttctaaactaataagcattatttggagcaatacttctttgattagaaaccctgctcaggtatgggaacaattgttgtgcaagtagaccttaggtgtaagcgtgcaagcgagcctcctgaatctttagatcatggtccaaccgtagatgtaaccgtagtttgtcagtttttttttttgaaaaaagctgcataagctggtggtgaagaggtttaagtgttaaatgtgacctacacttggattaggatttaaatgatcagaaagctcgcttgcatcgcagtcttgcttgcacaacggtcgttcttctgaggtatataggaagcgcttcgtagagaagctgcacaaatggagtaaaacacagtcaaaataagtaggtttaacccatctactttttagcacaaatgggatggtgggactaagcgcaaccagaataagttgcagaaaagcattcagtttggccatgaacagcttataagctgtaccaaacaggccactggaaaaagctaatgtgataactacctgtttctatttgcagatgagtatgactcttgctgtagctgatggacaccttgttaatatggggaaaatgatagaagaaatggaggggaagctgagaaattcactggaccaagtacagttttgcattgataatgattacgccgaatattaagatatcccaaagttgctgacatcatttgcaacttgccaattccttagccgcatgcataatatcattctattggcaggtttattttgggaagaccagagaaatggtttgcactcttcggccaccaccagaagttcttaatatgagactacctgacagctgagccagtgcatagaagtgtcaacttaacaaagaaaaacgtattcttctccactctaggcgtggtctgttcttgcttcgtagttaatagtctgtgcatctgtatcgacatctgttgaggtatctatgataggagcttattatcttctgatcttttgtgattagctgtaatccgcgaagtgtttgacaggagccagtgtttgcagtggaactcagttaccaacagatgaatctccacaaaacgttgtgttggcgttctgtatcttctgaagaatctgatggtgttgtggctggacttgctatctgtcaaagtactaatgcggtgtttgttttgaggagtcgcctcatatcgg

SEQ ID NO: 10868 - DNA, 776 bp, Zea mays
  unsure (1)..(776): unsure at all n locations
  Clone ID: MRT4577_109910C.1
gggtacctcgaggccggccgggccgggcggaacgggcggcctcgttgcaacttgcagagacccagtcctctcgctttctcaccgcgattcgcctcgcttccatccgattcgattcgggagctagaggagagagaggagaggagaggtatggtaatcgccttgagcgtgctctgcttcctgcctcttcggtcgcctccagctcgctgttcattcccgctccgcccgctgattcgccggatcgggccgtggcagtgatgccgctggctgagtcgcccccgtggcgccgcaaggccacagatttcttctccacgtccagtgtcaagctgaagcaggcaggccaatcggccggggataatatagttgatgttgctgggaaggttgggtccgtggtgaagagtcggtgggctgtcttccaagaggctaggcagcagcagcaacgtccgccgcatgagacagtgcaagagcgtatcatcactgctgctgcctccactggtttgcttttcaggaaaggcatttcagagacaaaggagaaggttgcagtgggaaaggtcaaagttgaagaggctgctaaaaaaactgcagataaaagcaagagtatcttgaacaatattgaacgctnggcagaagggagtcgaagcactgatggggggtttggtgttcctattgaagctactgtacaacgagagcatctggatagagcggtgcccctggtgctttgtgagatgtgcggactacctggctatatcaaggtttgaataatgagtacttattcaaat

SEQ ID NO: 10869 - DNA, 363 bp, Zea mays
  Clone ID: MRT4577_109911C.1
agacgaacaagatccgacggctcgggagcggcggcgacgacgagctggcgcccctggatctcgaggcgctcctggccacgacgcaagactcggaccccgaccccgaccgccccgccgacgagcagacgatccagtgccgtacgggaggcgcggcggcggccacgccgagatgggcaagtcgtggtcacggtcacggtcaccgccgcgtcgctagcgtttttggcgtgccagacgaggacgacaacctcgtctcgctggtcacgtgcacggtctcgggtcagaacggcttctgctcgactttcttcggggggtcacgaaacgccccgcggtcggaagcgcacgctcgagccgtccaagcttcct

SEQ ID NO: 10870 - DNA, 837 bp, Zea mays
  Clone ID: MRT4577_109912C.1
cggcccgtcggctccagctcgccgttcattcccgcaatcccgctccgctcgcggtatcgggccgtggttcgttcgatccctcgtctctctctgtcgctatggtttggtttggaccttcgcctgctcgagcttcggtcagcatcgagtagtgatgccgctggctgagccgccccagtggcgccgcaaagccacggatttcttctccacatctagtgtcaagctgaagcaggcagggcaatcggccggggataatatagctgatgttgctgggaaggttgggtccgcggtgaagagtcggtgggtcgtcttccaggaggctaggcagcagcagcagcaacggccaccgcatgagacaatgcaagagcgtatcatcaccgctgctgccaccactggtttgcttttcaggaaaggcatttcggagacaaaggagaaggttgcagtgggaaaggttaaagttgaagaggttgctaaaaaaactgcagataaaagcaagaatatcttgaacaatattgaacgctggcagaagggagtcgcaagcactgatgtgtttggtgttcctattgaagccactgtacaacgagagcaatctggtaaagctgtgcccttggtgctagtgagatgtgcagactacctggttatatcaggcttgaataatgagtacttattcaaatctgaaggtgacaaaaaagttcttcagcagttagtttctctttacaatgaagactctggcgcatctttacctgcaggtgtgcatcctattgatgcacgtgcactggtgaagtgctaccttgccagtatccctgagccgcttactacatgttcgccttatgatgagct

SEQ ID NO: 10871 - DNA, 146 bp, Zea mays
  Clone ID: MRT4577_109913C.1
ggcataccgccacaaagccaccggaacaccacaggggcgctggtggagactcacaggcgatgcgacagccagcccgcgccgccgagcgacggacgacccccgcggccgcaacgagcgcgggagaccatgcacgagcaaagaaatga

SEQ ID NO: 10872 - DNA, 686 bp, Zea mays
  Clone ID: MRT4577_109914C.1
gccggtttcaaaacgtgcttcctgccttctcggtttgctccagctcgccgttcattcccgcaatcccgctccgctcgcggtatcgggccgtggtagtggtgccgctggctgagccgccccagtggcgccgcaaagccacggatttcttctccacatctagtgtcaagctgaagcaggcagggcaatcggccggggataatatagctgatgttgctgggaaggttgggtccgcggtgaagagtcggtgggtcaccttccaggaggctaggcagcagcagcagcaacggccaccgcatgagacagtgcaagagcgtatcatcaccgctgctgccaccactggtttgcttttcaggaaaggcatttcagagacaaaggagaaggttgcagtgggaaaggttaaagttgaagaggttgctaaaaaaactgcagataaaagcaagaatatcttgaacaatattgaacgctggcagaaggtttgtgatttggaatttgttacctagtaacacaaatttgaccttttttgtgtacaacgctgattctcatttctgtctctttgtcccagggagatgaaaagcaatgatggtatgcttaaaattcaatattcaggattcatatccgataataaagtatagatgaaaaaacatatgatttctttttatcatccaggaatgttaatttttttctgt

SEQ ID NO: 10873 - DNA, 926 bp, Zea mays
  Clone ID: MRT4577_109915C.1
cggctcgagaacaataacattatccaccacacacaaaaatggctgttggaaagaataagaaattaggtaaaaagaagaagggaggttctcgtaaagtagctgatgcatttgctaagaaagaatggtatgatatcaaagctccttcagcatttcctattcgtcaagttggtaaaacagttgtgactaaaactcagggaactaaaaatgctaaagattcattattgggcagagtatttgaatcaagtttaggtgatttaaaacctaacggagaagatgatgcttttagaaaatttaaattacgtgtagaagatattcaaggatctaattgcttaacaaacttctatggaatggatttaaccacagataaattacgttctttagttagaaaatggcatactttaattgaagcacatgccgatgtaaaaactactgatggttatactttacgtgtatttgccattggttttactaaacgtagacctaatcaaattaagaaaacttgttatgctcaaactgctcaaattagacaaatcagaaagaaaatggttgatattattactagagaaaccacttctgttgatttaaatgaatttgtaactaaaattaatttcctgaaatcattggacgcgaaattgaaaaagctactgaaggaatttatcctttacaaaacgttttaattagaaaagttaaaatgttaagagcacccaagactgatgttaataaattattagaattacacggtggtgcagaagctgctgctgttaatactaatcaacaagccaaagcagatgttggaactgctgttgaaagaaaagatcaataagcagcatcacagtcagtaatagtagtgttgataaaaaaaagccaatgttagtaaatttgtgcagtgtgtaaaatagcattgtacaaattaaataatattatat

SEQ ID NO: 10874 - DNA, 489 bp, Zea mays
  Clone ID: MRT4577_109916C.1
cggacgcgtgggtttgagaccatctcttaaagcgttgaaactcagcccagacatttgtcggaagattgacttcgatgcagtcagtgactccaataaagaaaataattgatggttctgcccctcttgattgacaataacaagtaatgaactgtgcattttgggattgaatgatctgccccaggagacagcatttggaacagctttaatctgcctatctgacaatctcatgtatcagtatcctatatgccgttgtggtagctttagctaacccagaagctttggggattattgctgatgatagataagtacttaagtagcaagcagtttaagttatacatgtaatctatatttgcttttcctttgtaactgtccttgtgctagttacctcttagacttatatcagtagatctgagctctgacaatgttttgtaaatcttcagatgagccttgttccgtgtgattaaagtaatgcacccgatgcagttgctt

SEQ ID NO: 10875 - DNA, 1555 bp, Zea mays
  Clone ID: MRT4577_109917C.1
cgggagaatggcagaatccacaagcggcagagcgccccaaacaaaacccaactcattttttttttcccagctcgcggaacgggcggcctcgttgcaacttgcagagacccagtcctctcgctttctcaccgcgattcgcctcgcttccatccgattcgattcgggagctagaggagagagaggagaggagaggcagtgatgccgctggctgagtcgcccccgtggcgccgcaaggccacagatttcttctccacgtccagtgtcaagctgaagcaggcaggccaatcggccggggataatatagttgatgttgctgggaaggttgggtccgtggtgaagagtcggtgggctgtcttccaagaggctaggcagcagcagcagcagcagcaacgtccgccgcatgagacagtgcaagagcgtatcatcactgctgctgcctccactggtttgcttttcaggaaaggcatttcagagacaaaggagaaggttgcagtgggaaaggtcaaagttgaagaggctgctaaaaaaactgcagataaaagcaagagtatcttgaacaatattgaacgctggcagaagggagtcgcaagcactgatgtgtttggtgttcctattgaagctactgtacaacgagagcaatctgatagagcggtgcccctggtgcttgtgagatgtgcggactacctggttatatcaggtttgaataatgagtacttattcaaatctgaaggtgacaaaaaagttcttcagcagttagtttctctttacaatgaagactcgggtgcatctttacttgaaggtgtaaatcctattgatgtaggtgcactggtgaagtgctaccttgccagtatcccggagccacttactacattttcgctttatgatgagcttcgagctgcgagggttagcattcctgatcttaggaacatattgaagaagcttccaaatgtgaactacatgacgctagagtttgttacagcgttgctgctgcgagtcagccgtaaatcatcacttaacaagatggactcccgcagccttgctgtggaatttgcgcctttgatcatgtggcggcaaggtgacactggcacagatttgcgtaaccacctcaagtttaccctgaaaccgcctccaaaaattgtggatacaacatcaaatgctgccacatgggacctgttagatgaggatgacgaggatgcttcatcccagatccccttagacgatgcttcaccaccagactacagctccattgaggttatccagtgtctgatcgagcatcacaatgccatcttcaccgacgcaaatgaaaccgtgtggagatgatcggcatctcctctagatctctctggtgttagatcgtgctattgtacaagttccaggtaggaaggtgggaaggtggattagcgctcgctattgttagggataagcattttggccggaatatttttgaagtaggtttgtatatacactagtgttaactgttaattctccacgggactagaaccgggtcatgccatatcaataaaaatatatttggatggatgtaaacgaaacacaa

SEQ ID NO: 10876 - DNA, 127 bp, Zea mays
  unsure (1)..(127): unsure at all n locations
  Clone ID: MRT4577_109918C.1
aggngaagngnncagcacgcatcgagggccacgncntggtcctctctctgctcnactagnaaccgnncaccgccnccacantatcctcgctctggctgctcactcgcaggantnagtgnatacatcc

SEQ ID NO: 10877 - DNA, 508 bp, Zea mays
  Clone ID: MRT4577_109919C.1
tccctggcccgtgggtgaagggagcgggcccggaagaagaatggggccttcgcgtttcggaagcttttccacccggttttctcccagaaggggaagccgattcttaagggccggcttggacgccgccggtaaaaccaccttcttttccagcctaagcttcgcgaaaatcgccaccaccattcccaaccatcgggtttcaatgttgaacctgtggagtccaagacctttagctttcacggtcttggaatggtcggggggtaaggacatgatcagacctttttggaggcattactgtccagacacacagggtcttatctttgttggggatagcaatgaccgtgaccgtgttgttgaagccagaaatgacctgcacaggatgctgaccgaggatgagctacgtgatgctgtgctgcttgtttttgccaacaagcaagatcttcctaatgccatgaatgctgctgaaatcactgacaagcttggattacactccctgcgccagcaacactgg

SEQ ID NO: 10878 - DNA, 257 bp, Zea mays
  Clone ID: MRT4577_10991C.1
cgcggtctgctcgctcgatctgtgcagaagatctgaggtcccgggcgaccgtgaagcactttcaatcgtcggcatggcgctcgcattgcacagtagggctggacacatagaatcgcctcaaagcacttattgctgcagaatacagtgggatcaacgatgagttgaccgacgattttgagatgggtgtctcctacaagacccctgagtttcctaagatgaacacccttgggaatgctcctgttctggagactcctgat

SEQ ID NO: 10879 - DNA, 327 bp, Zea mays
  Clone ID: MRT4577_109920C.1
ctggctactttatggtacaacttgagcaccaaccctatggtcgtcattgcgcgcaccaccctggcagttactatgaagacatgcatgacgctgatgtccagcttgggcccattggcctggacaccggagatcaatgtgttgaccgaggatgcggtcacggcctgtattccaggcatcatatacagaagacatcaacgcttctcttctgcatacgcgatctgttgggaggaaatctgggccatctggcgaataaaaggttgtatagagctggacacgacgctcacgagcttgcctatatacgacatcttaaggatgtacaggggactc

SEQ ID NO: 10880 - DNA, 344 bp, Zea mays
  Clone ID: MRT4577_109921C.1
gcgtccattctaggcggccgcctccagagcggccgacgggcttttattatactggcgtgttacaacagacccgtcatcatcatgatcatgagctaccatgcggggtgaagttgtcctgccgaaaactaaacagcacatcatagccgccggcatcatgaagcacccctccggcgccgcataagcagtgtacaaactaacaatagcagtgctctcacaacacgctgaggaccatgaacacaagatgtaccagctgctttattaattaagtagaccatccgcgagaagaggcacaatcgcttatcccacaccaaggtcaatcttttctacactcagaagacctacaa

SEQ ID NO: 10881 - DNA, 382 bp, Zea mays
  Clone ID: MRT4577_109922C.1
ttgggttcctcgaggccggccggggtgttgctataaacgctgtgatcaagcaatctttctcttctccctctacctctcctagccgttctcatccgtatcataactctctataccgtgctagctgaaatgtctcgaaccacgaaagttgacgaacatctgaatgctgtttacttctatcccccagcacatcgcgctggtgcctatcgtcgtgcacttacagtatcatgtgcacaaatattataaaataccccgtagttgaaaaacgaagacaagatcttctcctccatgcactacgatgactctgagcccctctctccaatgctgcttgctgtacgtcccgtaccttactcatgatcatccaaggcgagcctggtgcctccat

SEQ ID NO: 10882 - DNA, 787 bp, Zea mays
  Clone ID: MRT4577_109923C.1
ccgggtcgcccacgcgtccggtctgctctctctctgcttcgtctccctcccggcgccctgcgtctcctacggcgcgcacccctcccctgcacgctccatctctcacgcgctgccgccctagttcctgatccctggccaccgtggagcttccccatcgcccctggctcggatccagcgcccgagcgacctaccttcggcttctgcgcgccggatttggagctccagccatggcgcttcgcttcccccagcagcactctcctcctctactccaaccatagccgcgcccctcagctcaccctccagcgtcgtgacttccagcgctcggcctccagctcctacgcgcgcaggagccttatcctccatgcgccgtcgccctcctctggtgttcgctcgccccggcctctgttcctccaactcggcgcccagctccctctctcttggccatggctgccgtgtcgaggtcccttccccgcgagctcccctgctccctcgcggcgaccttccctctgccatctcctggtgccgcgcccctactctgctctctgttcggccatggccgccgtgccaaggcctccttccccgcgcgcagcttttcctctgctcctcccggctcctagcgctctcgtcctgtctccctcgcgcgcgcccggggtcctgctctcttgtttgccgcgcgcagccggcgtttctccctgacgcgctcgcccagccactgcggcaagctacctgctcgatggaatgttcaactgctcgtcggatctgcgttatcccggcgcgatgtcacaaa

SEQ ID NO: 10883 - DNA, 439 bp, Zea mays
  Clone ID: MRT4577_109924C.1
ggtctttaagattcatattttcttttatatatttattgttgttttttttttttttaaacaacacagagggccgctccttgtgaattatcggattaactaaacatctgctatttcctatgatcctgccatatgtaccatacaagggacctttttttccagcctttcagctactggggaatacattagttttttttattacaaaaagggtttcccggaaaacttttgtacagtttgactaaatgctcgctgttcacaactcacttggatagaaaaaatttttggtaccaaatcccaatcctttaagcaaaggcaaaggcaaaggtccttctcccaaatttttgcaggttttaaataacccaatgaccttaactgacaaaggtgcaaataaacggttgaaaatataggccatttatggggttcataaacggttggggacccc

SEQ ID NO: 10884 - DNA, 258 bp, Zea mays
  Clone ID: MRT4577_109925C.1
aggcagccaccatgccaccgcacgcaaccaaggatcccgtcgccgcgcctgcagcagccacagctgcagcgctgtcgcgggccctggcagcggcgcgccctttcctgcacggggaggacgcggaagttgacccggcgctgcctggcctcaccgccgtgatgtgcggggccggcaccggggaatgctgagcaaagccgcggacgttcctggcacaactgccgggcgttccaccggttatccgcccgttgggcgcgcccc

SEQ ID NO: 10885 - DNA, 413 bp, Zea mays
  Clone ID: MRT4577_109926C.1
tttgctttttttttctccctcagaccagttggagaaagacgcgatccaacaaatttgggggcttgtatgcctgccaattctgaacacgtaccaactcaacccttgttcatcgatcttgcagcactgcaggatgtacagggctaagagagctgcttcgctcagggcgaagcgccggcgccttggcaagtacgagctcggacgcaccatcggggaagggacatttgccaaggtccggatcgccaagaacatggacactggggatcatgttgccatcaagatcctcgacaaggccaaggttcacaagaacaaactagttgagcagattaggagggaaatctgtacgatgaagctaatacagcatcccaatgttgttcgcctgtacgaggtgatgggaagtaaagcaaggatttaca

SEQ ID NO: 10886 - DNA, 1346 bp, Zea mays
  Clone ID: MRT4577_109927C.1
agataatgtgggcgtagcagcaatcagtcgaagaaaaacccacaaccaggcattgccacggcaaatgttctcaacagctgaaatgaacataaatacaaatcactaaccataaactgacaataatacagtttagcacatccaaggactctgttctagatacagttaggagaacagcacaaccataagcataaaactgtacaatcccaacaagatgaagagctggagagagacagataatgcgttaacacctacggacagaactatacctatgttcaaactgatttgaggctgaactgaggtggtcgatggtaaggacatcaacctgctaacagcacgaccagcagcacacactggcagcctcacttcgatgcaaccttgcttaactgcaatccttcgcataaatttgacagatatgaagaggggtgatctagaacttgatcagatttggtgtcaaaatttgatgtccctaataatgggggatatatgcttctaaattctacatttggtccgcctgtgaaatctggtaggatcccagatcacttctcttcaattttgctaaagcttgcaaggatgcccaaaaaaagaccaaaaaaagaccacatgtgcgcatgaacttgattctggcattttacctgctgaccgtgtatccagggattctccagggtgttcatgcgcatgcagtcactatatagtagtgaagggaacatgaccattcctgcatgccatgacaccagccactcaccgaacagcagatgtgtatggagacagaaagtactccctaatgcgtgaggccccatccctggctagcatgccctcgaggtctccaagaattcttgccagccaaatctccaagcttcgctggatttccttgaagttattccttattgaacttagtgctcttcttgtgcacattttggcttctgctgttagctcatctccgaagctgccttttgcggtctctgcttgcagtgtgccgagcttctgcctggtttcagttgcacgatgctgaaggtgaaacgcttccagcaagaattctgtttgccgctgtgttctaaactccgagttaagtgttgaatcacaagggtcacttgtttgcattcgtttgcaaagatcatcaattttcccagctagagtttggtatcttttcacttgttttctcatcaccaatggaatcttggacaaatctccattcactaccttttccaggttaagtaattcctgctccagcaacctaagttttgctggaactcctgaagattctacatccactttccagggtattctctcctcggtacagcatgctttgtgttgtacgttgactcaattgtatcacccggccggccctc

SEQ ID NO: 10887 - DNA, 234 bp, Zea mays
  Clone ID: MRT4577_109928C.1
ccagcatccggtactttgagatcacagaggctcctccctacatccacttcctgcgcacgttcaccagcaaggagccgcagcggcgtatggcgagcatgccaacacggggcctggcggtcagcaagtgcgagattgctcggctctacacactgcagcagcgcaagtgtgagcccatcatcatgactgtgccacgacagtcgaggctcttccaggattgctctgtatcccgacaca

SEQ ID NO: 10888 - DNA, 429 bp, Zea mays
  unsure (1)..(429): unsure at all n locations
  Clone ID: MRT4577_109929C.1
gtttataacttttttaacccacngcaaaacccggggcaattttagattcttttaaggggaaaaccggaacaaccccggatacaaattttttacaccctaccataccatctgcaaagctagttttgtcccacacattaatacctaaaagtataaaccgcaaaaaacaaatatgccagtggacaaaacaatgggacaaggaacctaaaaacaccatctcccttgtgcatgctggtggcatgatcaagcgatatattatacagcaaggaggcgatggttatcattggcagtacatgtgtacatatactgtaaccctttaccgttagaaacaacaaaatagcggatccattatgcaccttcttatacctttttatttgctttggtggctggagaaccaccttaattgctgcgtcaaacactgcttttatggtc

SEQ ID NO: 10889 - DNA, 368 bp, Zea mays
  unsure (1)..(368): unsure at all n locations
  Clone ID: MRT4577_10992C.1
cattttcactgacctcaaactttcttggaagtttaaatctatcacattcagtttaaaattttgttacggcctattcttcaagcaaagaaaattgttctcatgagctctggtagtatggctgaaaaaaactcaaggttctttgtttcaaatgacaaaatgaaaggagagagagatgcatatagcactgcagtgaacttatgttacgtagtctaaccctaattggcctcttgtgctgggttttaggcccgtcacataatagtctaagggtctgtttggttgtgctgtgggcctgtggttgtaaaaaaagctactgtggattgtgagctgtgaaaanaattgttgtggatgtgagctgttaaaacactaaa

SEQ ID NO: 10890 - DNA, 164 bp, Zea mays
  Clone ID: MRT4577_109930C.1
ggataagggtcaccttactgctaaattaataaccaaagagaaagagcacgatttgctcaattatcaagaccatgatgtaaaatcagctctttcctctctaggcgaagctgctgatcagtttgaaacgattgctaatgttaattgttcagagaaattaaacacta

SEQ ID NO: 10891 - DNA, 336 bp, Zea mays
  Clone ID: MRT4577_109931C.1
cctcgaggccgccggccccggcaccgccgtcgccgtcgctacttaccctccgatcctcgtcgccgacgcatccacccgaaccctctccgcgacctcgccgcgccgcagccttggcctgtcatcttcgagtataatgggtccccgaggcggcatggaggagaagaactgatgtctataacggaaatcaccaagggttgcacgaacgcattgagcacatctggcctgactatcaatgggagactaagcaacaacatatgcagcacatggatctctatgggctcgacactgacgcccagacgctataccacccgttagggtccatgcacaagctgtatc

SEQ ID NO: 10892 - DNA, 622 bp, Zea mays
  Clone ID: MRT4577_109932C.1
ccccacccggcttttggaggatcaaggaagaatctaccagatgccagttgtaggaacaaagagaaaggaacctgatggcagctgggacttcagaaaggtctacatacaagcaattatcatggcaatgatggctctgaagatcgttctgcactggactggtacctgcatgtagaacttgggcggtgtgttcttcagtcactgcaatattactcgattcagcccatgacgttgatgtgggatccaggaaacgaaaacttgctgtaattgttgtagattttttccctagctgttaggcttttgattctaatttactcaggagggggtatggctgcggaggaggaatctttgtgatcctgagctctggggctactgtaattagacggtccgctctgtttgtcggtgatatactgtttatcacatgctgcagctttacattacataagaatttagatgtgaccttgttccttgctggggaagcgttacgtcagctgaccatatgaacactggtgcaacaatcagctcgagttgatacgccatgtatctttaagttgcagtgcagctgtatgtataaggattctagcagatcagcaagctataattttttgctgtttttttggcaccg

SEQ ID NO: 10893 - DNA, 486 bp, Zea mays
  Clone ID: MRT4577_109933C.1
ctccattccttccgtgattcccttggtaccaaatcagcccttagggcgtgcttggttctgcttttaatacctgtttctgcttaaaaaagtagaaagttggaccataggcctcccacccagtccttggttttaccaccgcagttgcttttccgtagttgaactcatgaaggagacagattcttgctttttcaacggtggcaacaaagttaagttcgaagaatttacccacctgacattggttaaggggcactagactgttattgctatctctttcaccttttctctttcatcgatgtcttcacactgttcaatccacaagcttaagctattaggagacggtagccaattcacttatacagttcaacatcttgacgcacgtgcagcctgagagaggctcatacgtagaaataaagggggcggaggcacatacttatgtcggtttagaacttgagacctctgattctgatactatgttagagtggatgc

SEQ ID NO: 10894 - DNA, 246 bp, Zea mays
  Clone ID: MRT4577_109934C.1
cttcttcccatcatttttggtgccctcttttagattccagatgagttatagttcaatactaaaattttctgtctgctgtctgcggcttcccataaattaaatagccttgttcccacttcaaaataactagagaaaccctgttcaaaaacaaatttatgaactttcaacaacaacattttttctctaattaggatattttctaataatctctaaaacaatttttgagggccgcccctttaaaaagtt

SEQ ID NO: 10895 - DNA, 139 bp, Zea mays
  Clone ID: MRT4577_109935C.1
tacataagttccctctggaataacaacaggttttccaaacagggctcaagaactaaattttattgtccaccacctacatgtagagaacaaatagtcaaacaaaagaaatttttgaaaataaaaaaatgccccccatttc

SEQ ID NO: 10896 - DNA, 332 bp, Zea mays
  Clone ID: MRT4577_109936C.1
attcagggccacaaccacattaaaaaccaaacccatgaacaaaaaactttatcaactcaccatgaactacacatccacatgttctcctcctttttcaactaaaaactattatccactctcaatactaaaaaaaaactctccatacaaggaaaatcttcgttctcatccttaataacaaataacaaaatcgcgctaaaaacatttcacgccaggaataactaagacacttttttcccacaatcaaacaacacatggcctagaaaaaaggtgttgacccctttcaatctcctttaatgttatgctattaacaaaactccacaggcaacaaaatt

SEQ ID NO: 10897 - DNA, 538 bp, Zea mays
  Clone ID: MRT4577_109937C.1
gcacgaggtacaccaccagcaccatgccgccggaggccgcctcgtcaacaggccacatcgtcgcccgcatccggcgtccgctgcccgcggagcggccgcacgtgaggcgatgcaccaggctgctgtgctcggcgttcctcaccgtgctcctcgtcgccggcgtggtcctctttgtcgtgtacctcgctgtccgcccgcatcggccgcggttccacgtgacggcattctccgcgtcgggcatcggcccgtcgtccggcgggaccgtgtcgctgtcggggcagctctccatccgcaacccgctccacgtcgcctggcgttctggggcaaccggcactggcacccgctccacgtcggctgcgaggtggccgtcggactcgacggccagttgctggccgagtacatgcagaaacgctgcagcatagacttcttctaggagaccaaaaacacctaaacgccaaaccagtaaaagcggcaaagtaactcagaatgcaacgtgggttctcaggccggaagcagtctcatttcttgaacgagcact

SEQ ID NO: 10898 - DNA, 246 bp, Zea mays
  Clone ID: MRT4577_109938C.1
tgaggctattctggatggccgaggaaaaaggatctgcgcgcggctgctctccctactatttttttatcgttctccgcgactaaacaggacaactgctcgatgtcctcttgtttatcgcttggctataccgttctgtttgctataattatccgttcgcgtgatgtgaagttctggttacattgctcgagttctaataaagtactgttttgacttgcctaaacaataactaagagataggcgggccgc

SEQ ID NO: 10899 - DNA, 266 bp, Zea mays
  Clone ID: MRT4577_109939C.1
gatgcggacgaagagggcgaccagggccacgtgttcgggtacgccaccgacgagacccccgagctgatgccgctgagccacgtgctggccaccaagatgggcgcgcgcgtcaccgaggagccaagaacggcacgtgcgcgtggatgaggcccgacggcaagacccaggtgacggcagtacgtgaacgaaggcggcgccatggtgcacgtccgcgtgcacaccgtgatcgtgtgcacccagcacgacgagaccgtcgccagcgacga

SEQ ID NO: 10900 - DNA, 633 bp, Zea mays
  unsure (1)..(633): unsure at all n locations
  Clone ID: MRT4577_10993C.1
ctgggaccgccggatgggctaggtggggaaccgcaacaccaccgatctcctgtcgcccttggacggacggagccgtgtgggaaaccacaactggccgcctcagtcgcaacgacaccatgcctcgatgcaactgcaagcctcatcacttgtgggacttcagtacagccactctgccgctgctgcaacaaaatctcttacgcccgtccgacctcatacccacttgctgcacccacaatcccacagtcatctcaccactcctccaaccccccttccacccccggcaagcaaatcccatctcgttgcagacacacatctccaccgcccatccatcgtaccgcgagatgtgtcttccacgttcccgtgctctttcctagcgtgcgtgctcgaggggtccagtgccggtgttatgggttgcgggggggggggggcaccatcgggaccatcaatcaaggctacgcgctgaaacgtccaggaaaccacgccacggacttgatcgtggagtctacagccacaaacgcaatggactgcgtcagaggggttcgttgaaaggtggtttggccacaggactcggacgaggtgcgacatgtagtgaaggaggtgnagtaggacaagatcactcatgcagtatcgagg

SEQ ID NO: 10901 - DNA, 381 bp, Zea mays
  Clone ID: MRT4577_109940C.1
gttcccgtgttttgtgttttttttctcttgctctcttgtgcgtctttttacttcttctttactgcttgtttcctggcgttaaaaaacgggggcccctccctttttttcccccttgcgcctgctggcgggatcctgagaacgccaaaacctatcccccttaaaacgaggggggggggccactggcccctccccatcacaaacaaaaaaaacccccttggaatggggacccttggcccggggggggttctacattcttaaccaaaaagcctaaattttaccccctgccttgggggtccagggccttcttggtacttcgggggagcgtttttccagctgggcccaagagttctctagggtcgggcgcccagggctacaggggcc

SEQ ID NO: 10902 - DNA, 188 bp, Zea mays
  Clone ID: MRT4577_109941C.1
aattcggcacgaggcacaaacgccggcgcaaactcttgcccgagcccgacagatcttcaattccccattccgcccaccgatcgaccttcacgcctatctcggtctcttcctaaggcgtcgtgcgcggtcgcttgacacgccaggagcaagatgaggcagtgcatctccctccacagttgggcggccgg

SEQ ID NO: 10903 - DNA, 1868 bp, Zea mays
  Clone ID: MRT4577_109942C.1
tctccgcgccctgccacggcgcctcgagctctggctgccgtgccttgcggcggtcgagagtaacccggccccgccacccttagctccgccaccgccggacgaggcgagcgccggctcaggcctcgatgcgagggccgggggaggtggcggtggtggtgacggaggtggcggcactgatcttgggtggttgagggctttcccgcatgtgttcactgcgtcaatggcaaacttcctattcggttaccacattggggttatgaacggtccaatagaagatattgcaacccagcttggttttcaaggaaatccgttcctccaaggtcttgtggtgagcatattcattgttggtgccttttttgggagcttaggctcatctgcattagtagataagttcggctgcaagaggacccttcagatcgacagtattccattgattattggagctctcctgagtgcgcaggctgattctttggatgagatgcttttgggaagattccttgttggcatcgggatcggcgtaaacactgttcttgttccaatatacatctctgaggttgctccaacaaaatataggggcactttggggactctgtgtcaaattggaacatgtctaggcataattgctgcactttccttggggataccttctgagagtgatccacattggtggcgaacaatgctttatgctgcatgtgtacctgggattcttattgttgctgggatgcaatttgctgttgagagtccacggtggcttgccaaggttggaaggttcgatgatgctagaaaggttgtagagagcctttgggaaccttctgaagttgagaagtccatggaagagatcaaagctgttgtgctaaatgatgattcacggggcagctggtcagaccttctggtggaaccacataatagagttgcattgattggaggatcccttttctttctgcaacagtttgctggaataaatggtgttctttatttttcatcattgacattccgtgatgttggtatcactaatggtgctttagcaagcttatatgttggaataatcaattttggaggggcactagttgcttcaaatttgatggacaagcaagggcgaaagaagcttttgataggaagctaccttggaatggcttttgcaatgttccttatagtatatggtattagcttcccgcttgatgaaggagttgcccacagcttatcaatcgctggaactcttttgtacatttttacttttgcaattggtgctggaccagttaccggtatcattataccagagctcagcagtgctcggacacgctcaaaagttatgggcttcagtttcactgtgcattggatatgtaactttctggtgggactattttttctggagcttgtgaacaagtttggggttggagcagtctatgcaggttttggtggggtctccctgctgacagcactctttgcctacaatttcatagttgaaacaaaaggacgttcgcttgaggaaattgagatgtccttgagcagtgctacccctggcaagcaagagtagaacatctcaattgtatggacaaactgaacaactgacgggaggaatttaataagagcagagggggcctaatcccatgaatcttcagcagcagcagtttgttgcaaacaacatcaactcctatagataatgagcacaatcaaattcagcttttctttggtagcatgagaatcgttgtacaatattaaaaagggtgaagaaaacgcccctttaaatttgttttttttgtacatctgatgtatatattttagtattttacgccttctgtagtacgtaaaataaagggaacagatctttctgatattactcgattgatgaatttggaatattcgcattc

SEQ ID NO: 10904 - DNA, 891 bp, Zea mays
  unsure (1)..(891): unsure at all n locations
  Clone ID: MRT4577_109943C.1
cccaacttagtgaccagcttccggaatcaagggaggctgctcgcaacctggcactggaactacaagtattctatgagaagtctcaggcctcaacttctgacgaacacgagggcgagctttctgcctcaccagatgctgaatcatgggaggccttctgccagtccaagctctctgcgttaagcgcccaagccattcttcgtgtgacccctactacaaaagagggtgtgacctctaccactacaaaagagggtgtcacctctgccccaaaagaaggcttggccgtgggttgctagcataagccacaaggagagattgcgatttttcaaccccttcactttcttgctgtatatgcctttggttggtccttcgttacatccagtcgttgaaaaaaaaaatcaccggttcaggaattcaggtgtgaccacggtgttaatattggtgtgagatatatccattatagttgactgtacaatcattgcgttccactacttgctattgattggtcaagtgaatgtagatccatggttcagtgctatataacagtcttttttttccaccggcaccccacgcggcagacaccgcagggtatacaccacaggccgcgggccaaaatcnacggtcacctggcgaaccaaancccaagtagtggaacaaaatgattatacaatcctctttctgccacatcgggtgcaggttatgttatttttgaaggagatgtcattggcattcgtgcgccccccctatgttgnactctctctcccgttttaaatcataagtcgttttgacttttttttaagtatatagcttttgttatgcatctagatataagttgtctataaaaggcctataacttggagggagtaaaaaaaaaaaaaaaaaaaaaaaaaaaaa

SEQ ID NO: 10905 - DNA, 171 bp, Zea mays
  Clone ID: MRT4577_109944C.1
atggttgtgggtcctgtaatttctgaggtgatgaaggggacaaccaggacgaggaggctgaaggctaacgaggttgctaaggaagaccatatagaggagggtgctttggatgctgcgggagaagacaacgatcttcggccaacaaagcctggctacatcgatattggctag

SEQ ID NO: 10906 - DNA, 348 bp, Zea mays
  unsure (1)..(348): unsure at all n locations
  Clone ID: MRT4577_109945C.1
ggccgggccgcaccgaatggtgggcatggcgtcgtcctgctgcctcgcctcgccggctggcgccactctctgccgcccgcggcggccgaggtgccgcgtggggtgctttttttttttctcccgcgggagcaccgggccggtgcggggggaggccttttttttcccncgcgtgcggcgtactggccgctggggacgacgcgtccctgtgcactccctgccttgtcgcgagccacggcttgcctgcgctctctagggagccccaccggtgcctgcgcgcatccgcggggttcacacttgcccgggcgcacgggttgggcggccggccttttcggctccgggtgtgggttt

SEQ ID NO: 10907 - DNA, 244 bp, Zea mays
  Clone ID: MRT4577_109946C.1
gcaacatagaacgaacaaatctataccaacgctttcaacttgaatattaagggcgcttatgcttggggagggctatggaagtgttgttatcgcaaccatcttcctacaatgcttacacgctgctatcagttccattgttgggacatacttcttaccagcggggtctataatgtacgaaaacctaattagctaactctacaggatcgacaacgcaatctgcacaagcatattaccattatcaccc

SEQ ID NO: 10908 - DNA, 270 bp, Zea mays
  Clone ID: MRT4577_109947C.1
acatatactttcctcaaatctagtcttaactagaaggtgtctatttttctaaatcacttataacaaccttctattgtggcctttttctaaaagcctgtcttgaattacttttttttcttccttttaaggtttccaattgctattctatcctcactttacttcctaatcttagtctttctcctcgtttttaaccaaattccctacttttttattaattttctcatcaacactatctttacaatacctttctattttaacattttttttttt

SEQ ID NO: 10909 - DNA, 327 bp, Zea mays
  Clone ID: MRT4577_109948C.1
aaaacataaaacttattcatgattgggcatagttcggggggggccgcacacacaacaaaacgggtccttttttaaaccaacattgacccgatttatgacccgaacgggagttccttggacaccctccatttggggggggggccccagacgacccaggcactttggcggtttaaacgacccatgattttctgcccaccacggagccggggcccaggggggggggggctctcttttgggatgttgtagtctgttagggggcggccttcctccagttttttgccgggaaaaataaaacccttttggtccggggggatcccctccttggcc

SEQ ID NO: 10910 - DNA, 746 bp, Zea mays
  Clone ID: MRT4577_109949C.1
tccgggaccaataatctggttttaaaacacctctcaataacccaattgataccttcaagaaccttgaacagctttccaacagtacccccacacagatactacatctagaaactcaactcactcctcaagatgttccgcatccagcccgcacgcgcagttcaacgcgcagtcttcactcgccctcaagtcgttcgtccccgcttcctttcaacgagcccagcacgatttgcgcaaaaggatgcacaagacaaagactcgctcaacccacgatcgaccgagtatgccaaatctggctctgatgatggtgcagcacatacagacgcggcttttaacccctcaaagacatctccagaggcagaagaggcagatgctgagcgcgaagctggtgggaagcagaacagcttgaatgttagccctggcaacaaggacatcagcgaacccaacagccccaccgttggaggacacgggggcgcaccaaacaagaagagcagtggtgcaggcagtgcaccaaagaacagctcaggatgagcatacacagcgcgtgatggtttctcagtgatgtcgcagaaacacaacggggaggcatatatgagctgagctggtgcatgggagatatggacgaatggagcatttggggcatgtcacaatggtggattaagctacttttacgagtttcaagaaatggtgtacatacattcttggggggagcaggcgcatagcaagttcaatctcaacggttaatcaag

SEQ ID NO: 10911 - DNA, 174 bp, Zea mays
  Clone ID: MRT4577_10994C.1
tacgtcgccgctgcggcccaagaacggcgtggagctgtaggagacggagctgtcggccccctcgctgcgcctgccgacacacgacagaaggttccatgtttgtcatggtgaaatacaacatttagtctcttggagagcatccttcatgatactgatttttgccgcaagctggca

SEQ ID NO: 10912 - DNA, 563 bp, Zea mays
  Clone ID: MRT4577_109950C.1
gttttttttttttttttttttttttttttttttttttttttttttttttttttttttttttttttttttttttttttttttttttttttttttttttttttttttttttttttttttttttttttttttatttttaaaaatttttggggggttgttggggttttttttttttattttttgggggtttcatggtttgttggtaagggggaggggagggggggaagagagggggagagggggggggggggggggggtggggaggaggggggggggggagacaaaaagggtcacatctttaacctggggaaaaaggggagggggggaaaagggggcagcggggataaggggttccagggggaaaacatggaaattgggttaagggggttgggggctcttttagttttcactaaaaaaaaagggtttggtaaaaaaatggggggggtgggcaaaaaaaaccagaggtttatataaaaaagggggtgggcatttcggggggggcttacataaaagggtgtctaaattaagaggggcgtcttgaaaaaaaagttcctctcctatgtttt

SEQ ID NO: 10913 - DNA, 634 bp, Zea mays
  Clone ID: MRT4577_109951C.1
gggaaaaaaaaaaaaaaaaaaaaaaaaaaaaaaaagtggctcgccgtctcagttctcatgtccgggtgaagaaaagaaaaatcctcctgttcctgactatcgctacccctccacatccaggttaagtttaagattgataaagattgccgtcctctccctgagagtagtctcaagcaagccatcaatgaaaattacagtgcaaagagcaaatttgacccagaactcaccacaaaacaggtccaaaggttacttttgctgtttaagcctcttagtgcacctcaatctgttccaaataatcactttgaagaaaggcgtcactatgaagaacaaaggaagccgtattatcattttgaagaaaggcttcctctgttgcctattgaagaagtgcgtcagccacggtttgatgatgaaaggcgccctgcagttagacatgttcctcttgaggatccatatagggcacaagcaccacgctttgctccagttcctgttgagtctcagcttggccattcgttggctagtgctcagggtgatcatggcagatattatcaaccaccagcacttgcgcctgagcctcgacacattcctcttgttctagagcctcgctatgtttcgccagcccatgtgcctactgtgc

SEQ ID NO: 10914 - DNA, 106 bp, Zea mays
  Clone ID: MRT4577_109952C.1
agagatttaagggattgtcccattcaaagcccgacgataacgctggggaaccaaattgagatacaggttggggccccaacccctatcggggaaaagggccccttta

SEQ ID NO: 10915 - DNA, 402 bp, Zea mays
  Clone ID: MRT4577_109953C.1
ggggaaaacaacaaaattctcgattattgaaaatagtcttcccaggctttgcccccaactgggtaaaaaagttcaaaacccaatttgatacaccaagcttctcccaaaccattacccccataggagtcaattttcaggggttaaaaataaaacgggttcccaaacactggaactggaggagcaggactcattttggggggcccccacccccacccttgacatgtacaaaactgggataaaaaacaacgttttgaggtggagaagggtcacctttgggattttccaaggggaccttgggctttttgggggggggcccacggccaccggggctaaacatgcccctgggggcctggtcacgggccacaatgaagggggccttgagctttggggggggtccccccc

SEQ ID NO: 10916 - DNA, 2401 bp, Zea mays
  Clone ID: MRT4577_109954C.1
gttagagacgaccatacgttaggttttcccggaatactatttcgaatcggttagaatcgtataatttcccccaaaaagtccctagttaggctattgatcaccctaaatatcttcgttaatccgattaaatcgtagaaccctccccggaaatattcgtttattgatccacccgtccgcaataactgtcgattgctgtggatctagttctgcttttgtggtaattcttctcctttacttcccgaatctgcaccgagcagtggccatggtgaagaagcccaacgacgttgccaaggccgcggcgacctccgccgacgcggcagccaggccatccaaggcgaatccgtccacccctcagtcggtcaagacctcgaagtttaagaagcggaaggtcaaggccaaccgccagaagccagcggtcgctgccgcagctgttgacgatgtcgccccggtaggcgcaggcactggggatggcgatgcatctgcatccgcggttttaccgcagccatccaatgttgctgaggcatcgcctgtggtgcaaacgccaaagtcgaccacttttgttgaggcgtcacctgtggtacagacgcagaagacagccactgatgctgaagtaccggtgcattcaccaatgccagccactgctgaagcatcagctttgtcgccaaagccaaagccaaaaccagctcatgctaatgctgatgctgcagctgcaatttctgtcagcaaggggcaagggcgtgggtgctgataatagcgggggtgatggcagaatgaagagcagaaaagagagggctaggagtggcaaggggaaggaggttttgggggatggaggaagtaagggaaaggggaaggggaaggggaagaaggctgtaggcaagaaggaagaaaggggtgaccataaggttgcagggtttatatttatgtgcaatgcaaagactaagaaggagtgctaccagaatcgcttgtttgggatgcctggtgggaagattggaatggtcaagaagataaggccaggggtgaagctgttcctgtatgattttgacctgaagcttttgtatggtgtgtacaaggcagcatcacatggggggctaaaccttgtccaaggagcatttagtgggaagttccctgcacaggttaagtttaagattgataaagattgccgtcctctccctgagagtagtctcaagcaagccatcaaggaaaattacagtgcaaagagcaaatttgacccagaactcaccacaaaacaggtccaaaggttacttttgctgtttaagcctcttagtgcacctcaatctgttccaaataatcactttgaagaaaggcgtcactatgaagaacaaaggaagccgtattatcattttgaagaaaggcttcctctgttgcctattgaagaagtgcgtcagccacggtttgatgatgaaaggcgccctgcagttagacatgttcctcttgaggatccatatagggcacaagcaccacgctttgctccagttcctgttgagtctcagcttggccattcgttggctagtgctcagggtgatcacggcagatattatcaaccaccagcacttgcgcctgagcctcgacacattcctcttgttctagagcctcgctatgttccgccggcccatgtgcctactgtgccagagcttcaacatgtcccagctgcatattatcgcacttcggctccatctggcgattcatactatcggcctgttgataatctggtgcctgaggggtatgcagacagaattgtggcaaacataaccgctagagatccaatcattagtgatcacacagcactgccagtggaagcctctgctcgaccagaccgcttggatgatctctaccggattcgtggtgctcatgtggaggagctgtaccgtccacgggaaattgctgatcgtgcggggatcactgctagagcagatcgtgtggaggaactctaccgttatgatcgacttgctaaccgtgctgtggacccccctcattcagcctaccttacaactgcttatgagaataaccctgcttatgctgaaacaagcgttaggcctatctcagcaagggttggtggctccggcgcgccggtttcgtcactctattccttttctggtggtccagtatatcggtgatgagtgatcatggctagctctgttgaaaagccttagccagactaagaagacatgatgttcgtctctataactgcaactgccgttttaccttggctttgactctgtattttcttaaatatccttcactggatgaatggtactcttcgttatcaagaagacctgctggtctatgctgttgaattatgtatttatgctgctgcatctctcttgctatgcttgaagctcgtttcattttgtgaatggaggtttacatattgccatgcttc

SEQ ID NO: 10917 - DNA, 534 bp, Zea mays
  Clone ID: MRT4577_109955C.1
ctgggggggggggggggggtttttttttttttttttttttttttttttttttttttttttttttttttttttttttttttttttttttttttttggggggaaaacccccaggggggtagaaaatatataactaacaggaaaaagcacattagggggggggggggggggcctacaccaccgggggtttttggcgcattaaaaaaattataaaaattttaagttttaaattaaaaaccctactggaaccggccaaaaggacattttttgggcggggatgttgagagttaaagctgaggagggcataggggccatcgaaagaaaaaccaaccgccttggaaaaaaagaaaaaacacggtggtttgggggaggaaaaaatttcgaccgggcccgagccccaaaatttgaggttgagggggggattcataccaccgagattaaggtttttaaccgggccaccaagagtgaacatggggagaagggggaacaccaaaaaggcgaaaccggttgggaggggcttgagagggagaacgggga

SEQ ID NO: 10918 - DNA, 1850 bp, Zea mays
  Clone ID: MRT4577_109956C.1
ccggccgggaggttaaacacaaaatgtgcatcgccgccgccaccatatagaaccacttatcacgaaccgccgccatcacatccactgcctcaactagtgttaccacctatggttcattgttgtgtctgcttcttgtagcactgttggtctacaaacattcatatttctctcaacatctggcacagcatgccgccttccaaagcacgccgaaagaggtcacttcgtgatatcactgccaccgttgccactgggcctgttgccaactcgaaacctggctcatcatcgacgaacgaggggaagcaacatgacaagaaaaaggagggtccacaggaaccggacatcccaccattaccgccggtggtggtgaatatagtcccacgacaaggattaggatgtgaagtagtggaagggctactcgtgcctagtcggaagcgagagtacaagcccaatagcaagtatactgtgggaaatcacccgatctatgccatcgggttcaatttcattgacatgcgctactatgatgtctttgccatcgccagttgcaatagtgtgataatttaccgatgccttgagaatggtggttttggtcttctacaaaattatgttgatgaggataaggatgagtcattctacactctaagctggaccatcgatcaagttgatagctcaccgctgttggtggccgcaggaagcaatcggatcattcgggtcatcaattgtgctaccgaaaagttagataagagcttagttggccatggtggttcaatacatgagataaggactcatgcctcgaagccatcactcatcatttctgccagcaaggatgaatctattaggctatggaatgtccatactgggatttgcatcttagtctttgcaggggctggaggccatcgacatgatgtgttgagtgttgacttccaccctaccgaggttgggatttttgcaagttgtggcatggacaatactgtgaaaatttggtcaatgaaagaattttggatatatgttgaaaaatcatattcatggactggccatccatcaaagtttccaacgaggaatatccagtttccggtcttgactgctgcagtacactctgactatgttgattgtacaagatggcttggtgacttcatcctatcaaagagtgtaaagaatgcagttttgctttgggaaccaaaaccagacaagcgtaggcctggggaggggagtgttgatgttcttcagaagtacccggtgccaaagtgttcattatggtttatgaaattttcatgtgatttttactccaaccagatggcaataggcaacaataaaggcgagatctatgtctgggaagtgcagtccagcccgcccgtcttaattgaccggctgtgcaaccaggaatgcaagtcgccgataaggcagaccgcagtgtcattcgacggaagcacgatccttggagccgccgacgacggcgcgatctggcggtgggacgaagtggaccctgctgcttccagctccaaacctgatcaagctgctgcgcccgccgccggtgtcggtgccggtgccggtgccgacgccgacgccgacgcctgagcgagaggaccgtcgccgcccgccggttcacatcgatcgtactccgtgctggttgattagctttacccattggtatgttttggttcagagtcgccagatctagtgtgtggctgaacgttgaatgttaggatgctgctgtttgttatgctctgagtcttgagttcactttgttaatttgcaccgtggatgagatgaataacttgacgttgcaaaaaaaaaaaaaaaaagaaaaactttgcatcccatatatgccgtaaatctgccgtctgttgtttgtc

SEQ ID NO: 10919 - DNA, 384 bp, Zea mays
  Clone ID: MRT4577_109957C.1
ctcttgggtttttggtttttttttaccttgaggaaaaaatttttaaaaacaccccttgggttgaactttaaaatacaaaccatccttaaaaaaaaacacaaaaatgacctttaaaaaaaaaaaaaaattttaactcacattttccacaaattgaacccattgtctgccattaaattcataaactggaaaacccttgcaaaaagggaaaaacctgggtggcttttttggtaccggcactggcaaaaattatccatccacaaaaaaagcgagcctttgtatatgttagaacaaacttgattcctaaaacaaacactttttacaagggattaactggtataacctcagtatctgagaccttcttctttgcctaccaaaaaattgggc

SEQ ID NO: 10920 - DNA, 261 bp, Zea mays
  Clone ID: MRT4577_109958C.1
gaaccccaagaaaaaaagacgcatttatatatttccccttgagttattacatacacaattaatacaaaagcaaaacaaaaatcccgctcgaaaaatggccgttgcaagcactagcaaaataagtgaagggaggcaaggggtttatacattctcactaccagcttgtacagagattacaagggaaacaaaaacgagaccggcttttacaaagataaatcgaaacataatgagattctattccaagaattttcaaatgcgcgg

SEQ ID NO: 10921 - DNA, 367 bp, Zea mays
  Clone ID: MRT4577_109959C.1
gtacgtaagctcggaattcggctcgagcccgagtgcagaagtccacttcgtgcagaactgtctcagtgatgtttgtatttctcacggaatagctctatttatctcaagattgagcaagctcgcagcttactcggtgtaccggcgttgtatccttggggcatccaggatcttgtacgatttgaaacagtctgaaccaatgatgtaacccaagatagtacaaaaagaaagtttctttctttttagcagtacttgtacaaaaagttactaccctctccgtctcaaaatatagcttttctagttaacaagataaaaaggcacataaaaaaaggggaaaccccgttgggaaaaatatactgttaggggcggc

SEQ ID NO: 10922 - DNA, 411 bp, Zea mays
  Clone ID: MRT4577_10995C.1
cccacgcgtccgcccacgcgtccgcccacgcgtccgcggacgcgtgggcgagggcaagttgcacccgcaacaaccgggttaacaagcctaaccggaccctggccattctggttccttggcggcggcggcggcggcggcggccggccggtggcggttggctttgggacccggcaagccagggcccggcttccggggacccggcggccgaagaggggagaggaccatatgaacgcggagaggaagaacgtggggggcgcgcgaaaagagggccccggcgacactctcgccgggggagagcgtattgcgcgggctcacactctgcgggtcctacagcgtatcgaggtgaacgacggcgtgggcatgaggttcgtgtcgttgttcgccgagatgttccagaagatctggtggatc

SEQ ID NO: 10923 - DNA, 632 bp, Zea mays
  Clone ID: MRT4577_109960C.1
tcgagcggccgcccgggcaggtacaagctttttttttttttttttttttttttttttatttttttttttttttttttttttttttggaacaattctttttttttggaacaaaaattgttcattcaggtcataggtgacactgacagtgacacccaaggcggaccctgccaccctaggacacacgcaacaccgttaaacgaaaaaaccggcgagcaaggaagaaagccaggggctccgtaacaagacaacgggtccttggccgtaaccccgctccgggggaattaccacccaaagggggaagtccctaacggaggcgggcgtggcaccaagctcggagcaaggaaccaaatagggggtaaccgtgggaaatggtgatcccggggcaaaatcgcacaaccgaccaaccggaaccaaaaaaaggaaacccaggggtaactaatgaaggcgcggacccccaataagggagctaacccaaatgaacggttttcagcccaaaaacccgtttcgccaggggaaacaaggaatcccccaacgctcaaggaaaggcccaacgcgcggggggaggcgcgttcgcgtactgggccactgacccgttgcgctcggacggactgctggggctagggggttcagct

SEQ ID NO: 10924 - DNA, 583 bp, Zea mays
  Clone ID: MRT4577_109961C.1
ttcgtcacacgacctcgcgctcggaaaactccacggagagcgagggaggcgaaccaagggcgacgtatcctccgccggagaaggtagccctcgatccgccgactcccgcgatttgtttttcttgcgacagctgggcgaccgtcgtcgtcgccgcccttctccaggtgcccaggtcttcgccggtccctttggcgcctcctcgccgccgacgagcaccagccaggttcaggccccggacgccgctactcaggccgggcttccggccgttggcaacgccggcgggtttgtccttgtgctgccgcggcggtgcccgcctgtcggagaacagctctcagaccgaaggggcagggctcggcgcgggggccggcgcgggctttgcctgccggtcgccggatctgccagacctcgccgcgaaggttgctgcgcgagcacggcgcactgctcaccttcctcgcggccggtacggcttgcacgagccggctccgccgccgggcgtgcggctccgccagaagggccagatgttggtacttccctcacaattactttacttcagttctctctttaatctgatgactgccacaat

SEQ ID NO: 10925 - DNA, 2716 bp, Zea mays
  Clone ID: MRT4577_109962C.1
gatatacaaattcggctcaaggatcgaacgacccccgcggccctgccccggaaacaaagctagggtttgcctcccaaccctcctcccgttctcccgcctcctcctgtgaaccgcgcgagccaaggaccgcccgtcgtctctcgccgctcgccgccatggggacggagcggaagcggaaggtgagcctgttcgacgtggtcgacgagacgtccgtctccgccaagctgcgcgccgcctccaacggtgccgccgccaccgcgactgggggcaacccgtctgtcaaccggtggaacgggcggccctacacggcacggtacttcgatatcctcgagaagcgccgtacgctccccgtgtggcagcagaaggaggagttcctccgctccctccgcgacaaccagaccctcatcctcgtcggcgaaactggaagcgggaagacaactcagatcccccaatttgttcttgagacggaaggcttgggtaaccgttccatggttgcctgcactcagcctcggagggtcgcagcaatgtcagtctccaggcgtgtggcggaggagatggatgttactattggggaagaagtgggttatagcattcgatttgaggattgcagcagccacaaaactgttctcaaatatttgacagatggtatgcttctgagagaagcaatggcagacccacttttagagaagtacaaggtgattgttcttgatgaggctcatgagaggactttggcaacagatgttttgtttgggcttctgaaggaggttctaaaaaatagaccggatttgaagcttgttgttatgagtgctactctcgaagcagagaaattccagggttactttaatggtgcacccttgatgaaggtgcctgggagacttcatccagttgagatattttacacccaagaaccagagagggactacctagaggctgctatcaggacggttatgcaaatacatatgtgtgaacctgctggtgatatccttgtattccttacaggagaagaggagattgaggatgcatgccggaaaatcaacaaggaaactaataatatgggagatcaggttggcccagttaaagtcgtgcctttgtactccacactgcccccagccatgcagcagaagatttttgaacctgctcctgccccattgaaggaaggaggtcctcctggaaggaaaattgttgtgtccaccaacattgctgaaacatccttaactatagatggcatagtttatgtgatagacccggggttttccaaacagaaagtttacaacccaagaataagggtggaatcccttctggtgtcacccatttctaaggcaagtgctcatcagagagctggtcgtgctggacgaacacaacccgggaagtgttttaggctatacacggagaagagttttaatgaggatttgcaaccacagacatacccagaaattcttcggtcgaacctggcaaatacagttcttaccttgaagaaacttggaattgatgatttagtgcattttgactttatggatcctccagcaccagaaactctaatgagggccttagaagttttgaactatttgggtgcactagatgatgaaggtaatctgacacagttaggtgagatgatgagtgagtttcccctggatccacaaatgtcgaagatgctcgtcatcagtccaaaatacaactgttcgaatgaaatcttatcagtatctgccatgctgtcagcacccaattgcttcctccggcctagggatgctcaaaaggctgctgatgaggcgaaggctcgatttggccacattgacggggaccatctgacgcttctgaatgtataccatgcatacaaacaaaacaatgaagatccccagtggtgttacgagaactttgtcaattcaagagcacttaagtctgcagacaatgtcagacaacagcttgttcgcatcatgactagattcaacctcaagatgtgcagcacggatttcaatagccgtgagtactatgtcaatatcaggaaaaccctgcttgcagggtatttcatgcaggtcgctcacctggaacgaactggacattacctgactgtaaaagataaccaggtcgtccatcttcatccctccaattgtatggaccataaaccagagtgggtcatctataatgaatatgtcttgaccaccaggaatttcattcgcacagtcaccgatatccgtggggactggctaattgatattgcgccacattactatgatctgagcaatttcccgtcatgtgaggccaagcgtgttcttgagaggctgtataacaagcgagagagggaaagagctgcaaatagaggctgaggttgatacttccacaaacctggtgctctgtaattccaccgcaggtctatccagagcccttatacgagctttggttatcacagatagctgtcccatttgtcttaggcaaatgcgttagcatgatgtctcctacacaccctaatatctattgtctcatcagcgtgatcattatgtagacaacctcgagaaattctttagcatctcaattagttgtgattcagattaattgtgtgacagtctgtttttgtatgcatcagacgtttatgttttgtgtttctatgtggttaattggttaccctttggaatgaaaaaaaaaaaaaaaaaaaaaaaaaaaaaaaaaaaaaaaaaaaaaaaaaaaaaaggaaaaaaaaaaaaaaaaaaaggcccctagggcc

SEQ ID NO: 10926 - DNA, 269 bp, Zea mays
  Clone ID: MRT4577_109963C.1
ctaaccaccaaaaaaaactctattattgaactataactcataagcaatctaaaaaaggcccccaccaatgacgggttgttgctaaaacactgctgggtttggcaaaaaaagcgggccaaagggcaacacttggtgcaattgcaaaagggggccaacgttaggcccagagcgcaggtaaaacgccaacaaaggttgctgtgccaaaaaggcaacagggcccacacccgctatctggctgaatggtaccagctgaatgatgttgcaccccc

SEQ ID NO: 10927 - DNA, 1293 bp, Zea mays
  Clone ID: MRT4577_109964C.1
atgcacgcgtagcgtagctcggaattcggctcgagctgataagttacgttctttttgggtgccctagatgatgaaggtaatcgggcacagttaggtgagatgaggagcgagaattccctggatccacaaatgtcgaagatgctcgtcatcagtccaaaatacaactgttcgaatgaaatcttataagtatctgtcatgctgtcagcacccaattgctttctacggctctagggatgctcaaaaggctgttgatgaggcgaatgctcgatttggccacattgatggggaccatctgacgcttctgaatgtataccatgcatacaagcaaaacaatgaagatccccagtggtgttatgagaactttatcaattccagagcactcaagtctgcagacaatgtcagacaacagcttgttcgcatcatgactagattcaacctcaagatgtgcagcacggatttcaatagccgtgagtactacgtcaatatcaggaaaaccctgcttgcagggtatttcatgcaggtcgctcacctggaacgaactggacattacctgactgtaaaagataaccaggtcgtccatcttcatccctccaattgcatggaccataagccagagtgggtcatctacaatgaatacgtcttgactaccaggaatttcatccgcacagtcaccgatatccgtggggaatggctaattgatattgcgccgcattactatgacctgagcaatttcccgtcatgtgaggccaagcgtgttcttgagaggctgtataacaagcgggagagggaaagagctgcaaatagaggctgaagttgatacttccacaaacctggtgcttcataattccacagcaggttatcacagatggcggacccgtttgtcatatgcatgatgtcttccacagcctgttgcctagtgtttcatcagcatgatcattatgcagacagcctcgagaaatcccttggcagctcaattagttatgatgcagattaattttgtgccattctccttatttttgtatgcgtaagatatttatattttgcgtttctatgtgattaactggttatccttcggttggaatgaaattccactgattttggtttattagcttagctggggttatgtatgcctataatatgcttacttccggttgcaggaggaagggttgaacgaggttggccccgaaaaaaattcggggtccctttttatttatttataaaaagtttctgtgggtaaaaaaaaaaaaaaaaaaaaaaaaaaaaaaaaaaaaaaaaaaaaaaactcgaggaggg

SEQ ID NO: 10928 - DNA, 743 bp, Zea mays
  Clone ID: MRT4577_109965C.1
tggggactggtgagttactactatctgaacaaagctggtcactttttagtttgaccatttaaagatcgattgatattctctgtgacttaatgtgcaggctaattgatattgcgccacattactatgatctgagcaatttcccgtcatgtgaggccaagcgtgttcttgagaggctgtataacaagcgagagagggaaagagctgcaaatagaggctgaggttgatacttccacaaacctggtgctctgtaattccaccgcaggtctatccagagcccgtatacgagctttggttatcacagatagctgtcccatttgtcttaggcaaatgcgttagcatgatgtctcctacacaccctaatatctattgtctcatcagcatgatcattatgtacacaacctcgagaaattctttagcatctcaattagttgtgattcagattaattgtgtgccagtctgtttttgtatgcgtcagatatttatattttgcgtttctatgtgattaactggttatccttcggttggaatgaaattccactgattttggtttattagcttagctggggttatgtatgcctataatatgcttacttccggttgcaggaggaagggttgaacgaggttggcaccgaagaaaattcggtgtccctttttatttatttatatatagtttctgtgtggtacgccaaggataaggcgatctgaactaactggcttagacagaaagaaattggattgcgtct

SEQ ID NO: 10929 - DNA, 3040 bp, Zea mays
  Clone ID: MRT4577_109966C.1
gatcgaacgacccccgcggccctgccccagaaacaaagctagggtttgcctcccaaccctcctcctgttctcccgcctcctcctgtgaaccgcgcgagccaaggaccgcccgtcgtctctcaccgatcgccggtatggtgacggagcggaagcgcatggtgagccagttggacgtgatggtcgacatgtccgtctcggccaactggtcgaccgactccttctcaatatccgccaccccgacaggagccaactcctccgtcaggcggaggaacgcgcaaaacgacgcggatgaggccaaggctcgctttggccagatcgatggggtccacgtgacgcttctgaaggtataccttgcacacaagcaaaacaatgaccagaccctcatcctcgtcggcgaaactggaagcgggaagacaactcagatcccccaatttgttcttgagacggaaggcttgggtaaccgttccatggttgcctgcactcagcctcggagggtcgcagcaatgtcagtctccaggcgtgtggcggaggagatggatgttactattggggaagaagtgggttatagcattcgatttgaggattacctgactgtaaaagataaccaggtcgtccatcttcatccctccaattgcatggaacataagccagagtgggtcatctacaatgaatacgtcttgactaccaggaatttcatccgcacagtcaccgatatccgtggggaatggctaattgatattgcgccgcattactatgacctgagcaagaagcttgttgttatgagtgctaccctcgaagcagagaaattccagggttacttcaatggtgcacccttgatgaaggtgcctgggagacttcatccagttgagatattttacacccaagaaccagagagggactacatagaggctgctatcaggacggttatgcaaatacatatgtgtgaacctgctggtgatatccttgtattccttacaggagaagaggagattgaggatgcatgccggaaaatcaacaaggaaactaataatatgggagatcaggttggcccagttaaagtcgtgcctttgtactccacactgcccccagccatgcagcagaagatttttgaacctgctcctgccccattgaaagaaggaggtcctcctggaagtgctcctgtccccattaaaaagaagcaggacctcctgtaaggaaaattgattgtgtccaccaacattgctgaaacatccttaaactatagatggcatagtttatgtgatagacccggggttttccaaacagaaagtttacaacccaagaataagggtggaatcccttctggtgtcaccaaacaacccgggcaagtgctcatcatagagctggtcgtgctggacgaacacaaccgcaaccacagacatacccagaaattcttcggcgaacctggcaaatacagttcttaccttgaagaaacttggaattgatgatttagtgcattttgactttatggatcctccagcaccagaaactctaatgagggccttagaagttttgaactatttgggtgcactagatgatgaaggtaatctgacacagttaggtgagatgatgagcgagtttcccctggatccacaaatgtcgaagatgctcgtcatcagtccaaaatacaactgttcgaatgaaatcttatcagtatctgccatgctgtcaggtaaaatacaactgttcgaatgaaatcttatcagtatctgccatgctgtcagcacccaattgcttcctccggcctagggatgctcaaaaggctgctgatgaggcgaaggctcgatttggccacattgacggggaccatctgacgcttctgaatgtataccatgcatacaaacaaaacaatgaagatccccagtggtgttacgagaactttgtcaattcaagagcacttaagtctgcagacaatgtcagacaacagcttgttcgcatcatgactagattcaacctcaagatgtgcagcacggatttcaatagccgtgagtactatgtcaatatcaggaaagccatgcttgcggggtatttcatgcaggtcgctcacctggaacgaactggacattacctgactgtaaaagataaccaggtcgtccatcttcatccctccaattgtatggaccataaaccagagtgggtcatctataatgaatatgtcttgaccaccaggaatttcattcgcacagtcaccgatatccgtggggactggctaattgatattgcgccacattactatgatctgagcaatttcccgtcatgtgaggccaagcgtgttcttgagaggctgtataacaagcgagagagggaaagagctgcaaatagaggctgaggttgatacttccacaaacctggtgctctgtaattccaccgcaggtctatccagagcccgtatacgagctttggttatcacagatagctgtcccatttgtcttaggcaaatgcgttagcatgatgtctcctacacaccctaatatctattgtctcatcagcatgatcattatgtacacaacctcgagaaattctttagcatctcaattagttgtgattcagattaattgtgtgacagtctgtttttgtatgcatcagacgtttatgttttgtgtttctatgtggttaattggttaccctttggaatgaaaatccactgaatttggtttattatgttcttgagaggctgtataacaagcgagagagggaaagagctgcaaatagaggctgaggttgatacttccacaaacctggtgctcagtaattccaccgcaggtctatccagagcccgtatacgagctttggttatcacagatagctgtcccatttgtcttaggcaaatgcgttagcatgatgtctcctacacaccctaatatctattgtctcatcagcatgatcattatgtacacaacctcgagaaattctttagcatctcaattagttgtgattcagattaattgtgtgacagtctgtttttgtatgcatcagacgtttatgttttgtgtttctatgtggttaattggttaccctttgg

SEQ ID NO: 10930 - DNA, 661 bp, Zea mays
  Clone ID: MRT4577_109967C.1
ataccctacgcgactcgggcgccgctcgcgctccgccgcggcggatcgcccgccgccacggagcaccgcgacctcatctatcagcttcatatttcaatcgtggcggacgtcgatgacgaaccggaggttgccggcggagctccgatgaagaggacgttccgccagcacatgctaccgcggcgtcgacctacatgcgcttctcgacatgtccactgacgacctcgaccagctcttccccgcgcgcgccaggagaatgttccagagggtgctgaacaggaaggccatggcgctcatcaagaaactgcgtgaggcgaatgaggatgctcctgctggagagaagcctgaggcagtctagacacatctccgtagcatgatcattgtccctgagatgattggaagcattgttggtgtctaccacggctagaccttctatcaggttgagatcaagcctgagatgatcggacactaccttgctgagtgtctccatctcctacaagtgcggcaagcacgaggggtcctgtatcggcgccacccactcctcgcggttcattccgctgaaatgagctggaactcggctctttagtatcgcaagacattttgtggtggtccgttccagctcaagaattcaaagctaagcattgcactattatgctgtgttgtg

SEQ ID NO: 10931 - DNA, 194 bp, Zea mays
  Clone ID: MRT4577_109968C.1
ctttttattatttttttttttttttgaccaaacctatggagtggtgggatggttcatcaaggagtatgatgctgattacatatattagtccagcctgccatacacggggatgtggcaaccaaaacaaccctctccgggggggattattcaccggcacaaacccgcttggcggcacaacacttacttgcaaccct

SEQ ID NO: 10932 - DNA, 570 bp, Zea mays
  Clone ID: MRT4577_109969C.1
agacgggcatcagttcaaactttcccgttaaaacaagcctcccaactccgaattgatttctggaagaaaaaaattatgtgtgggccaccttattggtgggcacaaaccgaaggcctctagcctttaggagtgctgctgttgttacccgttaaaacagggcgctccgtttgggagcgaaaacacctggggagagagaggcataccaccccacctggggggggggggggggtcctttattgggagttgtagaaatctgctggaaacaccgttccactatgttcttttgggggtgtggccaccgacgatgcccatgaggcccccgtcaaacaaaaaggggatggataaaccgccgccggttttgctgctctctttccggaaaacctccacctcttggcggaatttctggttctgctgaacagaagactttttctcctcagttagctgggagatcacaaaagttgcctcaaagggcttgtcctttgctgtttcagcagccgttctaaatacagattggggcctcctggattgatcgatcccgttttcttgggaaatgagggaggggaaccccct

SEQ ID NO: 10933 - DNA, 800 bp, Zea mays
  Clone ID: MRT4577_10996C.1
aaatacaaaaaaacggccccgagcattttggatcttcccttccccgcaaccgaacccaaaccccgaccaaacccctcgacctcactcatcctcacctagggttagggtttcaactccaccggctctctcccgctccaattcgaacgaatcctcccgcatggccgccggcatcctggtggacttcccctccatggggtccgcctgcttcttccccagcctcgagtccctcctccgcgactccacctcccgcttcctcgccgccgtctccgccgcccccgacccggacctcaccaacttccgctccctcttctcccgtgtcctcaccacctacccggaccctcccctcgaggccgtctggttcttctccgcgctcaccttccacgacgcccccgacgacctccgctccattctccacctcctctccgccttcactgcctcctcccctgccgccgccaagccccttgcgctcctcgcccccgtcgtctccgaactcttccactctgccaagccccgcagggagattgaggcgctcgtcgaggctgtcctcagctacatcagtatctgcagcagccgccccgctggcggcgaggtcaacgccgacgctgggaggctcttgccaggtttcggggagctggtcaaggtgtggagcgtgcgcaactccaaggacagatgcccgttccaggtccttttcccgctagtcggggacgaggccaggcgggagctcatgaaggacggctgcagcgtcactttcctcgccggtgtggtgggtggcggagccttcctgctcaggctctgcctca

SEQ ID NO: 10934 - DNA, 320 bp, Zea mays
  Clone ID: MRT4577_109970C.1
aaaaaaaaggggggattttaaagccccgaataaagttaaaggggggaaagtcaaagggaacaaacccttgggggggtttgcaaaaaatggggctaaacgggttaaaacattttaaaaaggacaaatcctgatcagccaaactgggttttccatttttaaggcaaaggaagggggatgtcagcccctttttttttcctcataaaagggtcaaaagaacttcccaggggtgggggaccctttggaatggggtccgccacccactgccatagaaatttaaagtcccccaaggaaaatttgtttgtcttttccgcaaaatccaa

SEQ ID NO: 10935 - DNA, 547 bp, Zea mays
  Clone ID: MRT4577_109971C.1
actcgtcattggtaaaccaacacccccggtccgggcgcgggcgggtgcgctcacactccactcccctgacgggctgaccccgcgcgcacaagcaacagcagcccgatggccgcaccgtcctccgccgccacagcctgcttagtgtccccgctcccgccgactcgccgcccgcagtatttgctaaggcacctcgcgcgcgccgtcgtcgccgagcccacgcccgtctccgactgctagatcgacctcccgtcgccatgggcgtaggcgcggcggctgcgtaagctgcaacccggcgaggccgatggccggctgttgttatcaggcgagggcttgctgattggcatgatattctgcggaatgttagtgatctgggtgtgcaggacgtgcttggtgttgagtacttgccattcaaggaacatgtgggggatggacattgcaacagcgagtctgtgctagaacaagacactgtgcgcttcaatgactcctttcctcgtccttggatgtgaaaggctatcgctaaaggagcgcaatgccttaaacgacacct

SEQ ID NO: 10936 - DNA, 629 bp, Zea mays
  unsure (1)..(629): unsure at all n locations
  Clone ID: MRT4577_109972C.1
ccgtgaagttgacgcggaggccgtcttattgctcgcacgaggctgccccctcctcgaggatgtggctttcctcgattgtggcaccgtggatgaggccgcccttgctggtatccactctgtccgattcctctctgtagcaggatgccggaacctgaaatgggctactgcatccacctgctggacccagcttccctccctcattgcccttgacgtctcccgcactgatgttccgccaagtgctgtttcacgcctcatttcccatgccaaaaccctcaagctaatatgcacgctgaactgcatttctgttgaggaggaacagcttcacaatcctgctgtatttagtaactctaagggcaaggtcgtgctaacgattaacagcgatatcttcaaatcttttgagaccatgtttccagttgtggatgtgaaagagcatgagtttttcaatcaatgtaactggagtcacaaaagacnagatacctggtgatacgatgacatggctcgaatggatcctgtcacagtacttctccgattgnagagtncaacccacaangcatggatggttctggctgcagaagggcntacactgtgctagatgttaagagtncaggangatgtncaggangggcact

SEQ ID NO: 10937 - DNA, 355 bp, Zea mays
  Clone ID: MRT4577_109973C.1
gttagaaacgcacatgttagccccgaagtttgtcgccagaaaggtagacgaaagaaaagggcccgacaaaaaagaaccgcccaaatcggggcgggaaaggaagccccggggggggggggggacacactgcggggaaacaatatggaggggccatatcggggcggcgacccggggggaagacgtctgggagaaggacgaacatgcggtggcctagcgggcaacgcccggggggaggggctccgcaaggaggggctccggcggggggacctccgactgggggaccccccaggggggggccctagcggggcgtcccaaaccgttgtgaacgaggcagacaaaaagggggcccacagga

SEQ ID NO: 10938 - DNA, 897 bp, Zea mays
  Clone ID: MRT4577_109974C.1
gccggccgggccgggacctccttctctcctcctcgatacatccgagcacgccgaacgctgtcggaaggcacaaagcggcgagcggcgccgggcttcccctctctttctcgcccccgatctgcgccgatcggggcgaccgctctctggggacgccgatcgaaggtcgggcggcgatgcttccgatatacggaagcagtttctagttttcttcagttggtcgccacagtttccagcgctttcagccagttgtctaataacttgttgttgttgttgtacttaaggatcaccgtactgtcttcctcagagaccttccaacttggttctagttccagcaaccctgtcatggatcatcagaatttacttcccaacaactctaatgtgtatgaacagattttactcccaaatgcattagagcatgaggactgcccacactatttgctcaacggtcatgatgtgggtgtgccaaatggaagcttgattggtcagcaaaatacaagcttgagcttgtgggaaccagctggatctagctcaatgagctgcttagttgatcatgacaactttttccaggcaaaaagggagcatcttgcctcttctctgtctattggaggccccttaaatatagacaggaggagacatgaaggcactagttcattgcctttacacaacctaaacatagacctcaacattaatcaggctgatcaatttggctctgatgatgttgatcttgtacatggtaatggacaatcaagtgcaaatactgtcacagcccacaggggctctttcataactgatcatattatgcatcatggagtttcttcagatgctacaggaagttcatcatggaatgcagaatgttttaatggtgcagcaagccagcacagtcgtcatccagctttt

SEQ ID NO: 10939 - DNA, 358 bp, Zea mays
  Clone ID: MRT4577_109975C.1
ttttgggtttttttaatttttttttggttttttctcttttttttttttttagccatcaccccgaaaaaatcatgccccggtctatgggatttaaagatgcccataaccaaagggtatattggatttttttacccctcaagactacatattttttcgggcataaaatacccatggtttttattttaaaaactggcccaggaaaaaggggacgagccagcacgccttgccttgggggacaaaccctggcgcctgcattttgggaaaaatgcaaatggggcttccaacgggaattatttattggcaagggtttttgcccacttagattataaggcacgccttattatcattaattccaccg

SEQ ID NO: 10940 - DNA, 572 bp, Zea mays
  Clone ID: MRT4577_109976C.1
ctctcattttcttcctcgtttcggcacgcttctctcctcctcgatacatccgagcacgccgaacgctgtcggaaggcacaaagcggcgagcggcgccgggcttcccctctctttctcgcccccgatctgcgccgatcggggcgaccgctctctggggacgccgatcgaaggtcgggcggcgatgcttccgatatacggaagcagtttctagttttcttcagttggtcgccacagtttccagcgctttcagccagttgtctaataacttgttgttgttgttgtacttaagattgacacgcttcgtgttgtaaagcattgccatgtttggggcatgacttgtttttgttgaaatcaattgacttccaaggggtacactaaatccttgatgcaacataataggatcaccgtactgtcttcctcagagaccttccaacttggttctagttccagcaaccctgtcatggatcatcagaatttacttcccaacaactctaatgtggatgaacagattttactcccaaatgcattagagcatgaggactgcccacactatttgctcaacggtcatgatg

SEQ ID NO: 10941 - DNA, 449 bp, Zea mays
  Clone ID: MRT4577_109977C.1
ttacgcaaagcataatcacctgcctatctatctagcgagagagagagaggaaagctagatatctagcatgcagtgccggagcgacaacgcagcaagcggagtgtaggcgctgctgcttctccacgtgcagctagctccgactactgctaccgcccgcctcctgcacgctcatacctccaccgaggatgtcctggacatcatccctagggagtttggccatccagagagaggcatcctctgaggcgaaacctgtgacttcctaccatgctatacagtagccatgggttgccaatgcattggacaaatctgcatgatgtgatatctgcactaacgctatttgtgatttgtgctgggacaaacaccaggacgggaacgcggtgctcaacttattgcatgtgtatggtgatctaataagaaaagcatgataaaaacggatatggtgcatggac

SEQ ID NO: 10942 - DNA, 351 bp, Zea mays
  Clone ID: MRT4577_109978C.1
acccacgcgtccgctaaataaactatgatatctacaatagcttttttcatacctaccaatgacagaattcaaggcggtgattttcatcaataatccctcacacatgcacatgagtatctactgtctatatctcaaacacttcctactacaattccaaccataagttccaagaactgttcctattctaaaaatacgagtgacactcctaaccttttactcaacacactccacttgcttctccaccttttttaggccccaaaatcctaacaactgggagaactcccttgaaactatacctatcatactcaaccttgcaattccttattctcatatatacttacctaaattcaa

SEQ ID NO: 10943 - DNA, 450 bp, Zea mays
  Clone ID: MRT4577_109979C.1
atatagatacatgaagtaaataatttcattgcaaggttagtctgtacatcgatggtaataagcagtaaagattgattagtgacgaaatggtatgtacaaattttatctgcagcttcacgagtgtgcaaggagttcttagttgcttatgtcaaaatacttgggatttgctgggaagtcatgctcaacccgcagcttgcctttgtcagagtctgagtgcctttgaggaaagacaactttaatatcattgtaaagataaaatctttttttttcctcagtcctactgcgactgtgtggttgtgatgacatatccaatttgcaatgataccttgactttgatgacttcttggagaaggggctcaaaaaacgtaagtgcaaagcataccgcaaaaccccttcagctggaatataattgaccttgggagaactgttgaaaaatatttttccaccctt

SEQ ID NO: 10944 - DNA, 1057 bp, Zea mays
  Clone ID: MRT4577_10997C.1
gactaaaagaagacttggttattaaagagagagactgaagatggtttgatatatagacatgtggagaattttatcaaacccacacccccattatgtgctggtgcgctgcaggattgaatgcttattcgagtgagctcttcagaaaatatcagctttgcagtctttatcgctgtacgtctgtactctgtactcgtccagtgctctttccgacactattaataaatttgaactctccaaatccgcgtttttatgccactctcatcacaggatttttgttctacaacatgcaaatctctatgcacactgggacatcaacatcgttcgcctagtacttctgaattctctggttcacaaccagcttcacaaaagtggtcaagcaaagaatcgatccgccaagttataacctcttgacgaatacgtctccctgcggcaccggtgctgtacttgtattttgtgccgtctcccagctgtcgagtccactctggttactgtgaccaatagcgttgcaaccttctcttgcgcagctccagaactgtcccctgaagtcccagtaagataatcttgacttcgtatttgtccatgttgcaacgtcacttcaacagattgtctgggagaaattatgccgactgccggagaaaccttcagccaagaagggaaacctgagaaagctgtgccagatgacattggtgtctgaccaatgatctcaaaacaagccaactcttttgtacttctgttatgcagtttcacaacaaaagggttttgatcttgcagcatgatgtcattcgtgctgatatctacttcaggcaaagcctccaagccctgaagtgagtcaagcacttccttatttgaactcattatttctccatacttctgcctcattgtttgtttgtccacatgagcaatatctaaattgaacacgcatttgacaggtttatgatcactgtctgttgcttccatacaagagtcgtacagtgatatcgaacagactacaggacattccaaagaacactcaatctgtgaactagttcggctgcccacgcgtccgcggacgcgtggg

SEQ ID NO: 10945 - DNA, 335 bp, Zea mays
  Clone ID: MRT4577_109980C.1
agatgcactcttcttagtcctaaagaatgcgctcccctatacaccgccgccgctcgactccctgacaggacgccgtacccagagatttggccgatcactaggtagagactcggatgtacttgtctcaacccaggctctgctgcgtctggaggtggttgaaagcagaaacccctgacatctgtgccccatcacgcgcgcaagctccgtaatcggcggtttcaccgtaagatacggagatttagacttcgtgtactaagggagcctatcgctcgctccacgtatatgagtagacattctatgatgtatgaagatcccattggctacagcattgacca

SEQ ID NO: 10946 - DNA, 355 bp, Zea mays
  Clone ID: MRT4577_109981C.1
tttgttttccgcccttttttttttttttttcaaaggcatgttacgttgccaggattgtattttgaaaacagaaacatgactgaggccgtgttctggagtaaaagttcattggggccgggaatagccagcctgctgcatacttactcggcagaaacgcgatgcatgagttgtgatcaaagcggaagcgtgcacgaacctgggaaactgggagccaccatcacatttttggagcacaattcatgacgtaccgggtagacattggctactccaacgacataggcgttacaagcatctccttggctgaaatgctgagaatcttcgtactttacgttccggatggagaaataaaccttgg

SEQ ID NO: 10947 - DNA, 1738 bp, Zea mays
  Clone ID: MRT4577_109982C.1
gattcggactcggtacccggcgatcctgtaagactcgaactgtatgcatcggtcgcccttttttttttttcttgcttttctagtgctatataaaacatatttttctttaaaaaaaaacggagggtgtagacaataaccaagataatcacatgctacgatcactttctccaagcaagtttttcacagtatatcttctaacgaccctactacagtgtacatcacactgctatattgttatatgaccaagataactgcgcaatacaatccctagatccctctgctcaacaaacagatggctgtggcatttcagaggggcacacacactcccagcgtgcacggtgacgaactgtgttgctcctcgctagcacttgtgaagtaataataatatatcttcactacaaagttcaagcctcctttctagttatcctgaagcaatagattccaagagcgtccttgatttcatgcacaaccgacacagcgaggtgcaggtagagacccactgtatatgcacaataaagcagcagcagaacaagctcatcaactaaaggactcccatcgttgatctttgcaatgagagcatttgcaattggaaaacaaagaaacaccagagacatgaacatcccagattttagacctttgggttcatcacacaaatgagcaagtatcattcttcccaccaaatatccaaaattaaagccagttccaatcacgagcaaatgtggctggttcctcattatacttgaaggagaaagataacaccagatagcaactccagctaacagtacaataaaaggaaggatcatggctaatgctaatgccatgcttccttttcgtgcctcaactacctcttggacattactgacattggatctaacagtaggtataacagcacatacgatcataagaatcagcacaagaacatataaaggaatttcaatttcagaaagaaatggaagtggaatccaaccgaaaaagggtagtgatttccgaaaatcctgtgcccaccattcagcgccagtaaaaaatgtaaacaaatgtgatacatagatcagcatcaggccctccgttggtccatttattgtaggcagaatgagcgtatttgtaaagaagtgttcccaggttgcaagatagaacgggacagcggcaactacccagaaacaaaatgtccatcctccacacatcaaggtgcttccaagggccaatgcttcaaaagcacatgcaagtgcatcacatccatgatcaaaaagttctccaagaggactcgatgagctagtacgccttgcttgtttaccatcaacagcatcaaaagtctggtacaagaagagaagtaatccatgggcaagatgaacccacctagggggagcagtgtcaaggtgaggcgaacatatatagccaagcagcgctgatagtactagaaacgaaaatcctgtaagtgtgatcatgtttggtggcatccagagcgggaagagagtgacgcatcggctccagaagggctgcagcacgtacttggccaccaccgagcggtcctctccgctgtacctataccgcttcagcgtctccacgccgtgcgcgccgataaaccccatcctgctcgatcgagttcgccgctggctgtgggcggagaagggacgctgggagcggaccgggtggtttaagaagctctgaatggacgagaaggggacgcgattatggcgggcgggggctggagtggtcacgtcccggctcgaggtcgcgagcg

SEQ ID NO: 10948 - DNA, 273 bp, Zea mays
  Clone ID: MRT4577_109983C.1
cggacgcgtgggttcagtgagaaacttcttaaactgttcattactcataagtttgatggaagctacttcatcgaggtgattactatatataagcacatactacgatgctagctactaactgcattagtgtatgagggcgtgtgcggggggctccaatgtcttctgcttatatcagacatacatacattatacattctgacagggaggtacgtaaccagatagagcgcgcccaagacatcatggctatctatgatctcactgacgtaaaacatg

SEQ ID NO: 10949 - DNA, 348 bp, Zea mays
  Clone ID: MRT4577_109984C.1
ccgttgctgtcgtcgacaccccgtccaccccgccgtgcatctttaaggctttcgcgtcgtgcttgcttgtgatcgatgccagctcgtctgggtttatggagaacccagcgtttctgatatcctctgtgatccggtagtctttgtgcttggcaccatcaatgaaggtcatggcagccttctgcacatagagggcaagccggattttttcctgggtggaccgccgctgggcctcgtccaggctgcgccggtggaggtccggcaccatgcggaagcggcggcggcggttcttgacgagcgcgccaacggcggaccgccatcgccgctgcgcctcctcagacgacagcaacg

SEQ ID NO: 10950 - DNA, 648 bp, Zea mays
  unsure (1)..(648): unsure at all n locations
  Clone ID: MRT4577_109985C.1
gcaccttgntgtgtggaggatggacattttgtttctgggtagttgccgctgtcccgttctatcttgcaacctgggaacacttctttacaaatacgctcattctgcctacaataaatggaccaacggagggcctgatgctgatctatgtatcacatttgtttacattttttactggcgctgaatggtgggcacaggattttcggaaatcactacccttttttggttggattccacttccatttctttctggtatgtactcactaggagatgtcatcaatttatgcaaacacggcattacttatttcctttatgccttattgttattgccatgttatttgactgcatgcatataacatttttgtgctctttgctataatgtgatatctgtttctttagtcaagtgccagaaatgcaaaacgctcatggcctcacataattattaatgccattatttctaaagttcttccttttgcttgtttcagaaattgaaattcctttatatgttcttgtgctgattcttatgatcgtatgtgctgttatacctactgttagatccaagtaagcttctcttccttttcctctacttcctaactgcccttcgcattcatcatccagaactaatatggaactatatgcaaatgctggttc

SEQ ID NO: 10951 - DNA, 874 bp, Zea mays
  Clone ID: MRT4577_109986C.1
tatgtctctggtgtttctttgttttccaattgcaaatgctctcattgcaaagatcaacgatgggagtcctttagttgatgagcttgttctgctgctgctttattgtgcatatacagtgggtctctacctgcacctcgctgtgtcggttgtgcatgaaatcaaggatgcccttggaatctattgcttcaggataactagaaaggaggcttgaactttgtagtgaagatatattattattacttcacaagtgctagcgaggagcaacacagttcgtcaccgtgcacgctgggagtgtgtgtgcccctggaaatgccacagccatctgattgtattgcgcagttatcttggtcatataacaatatagcagtgtgatgtacactgtagtagggtcgttagaagatatacggtgaaaaacttgcttggagaaagtgatcgtagcatgtctacaccctccgttttttttttaaaaaaaatatgttttatatttcgctatgaatctagataaacatctatttagactcgtagcggaaacgactcttttttttgtgtgatgggcactcttttggggacggagatctgactgtttctgcgtttctgccatgacagggattttttggccaagcctgagcctgacggctgaacgcgtcggccggcccctgtcttctgatagctcgatagcagtcgacggcctcttctccgtctcgtggggcgtttgcttcgaggaagaaacaacaatgcagccttcaattctcaggcccagtatgctgctatgcatgcttgttcgtctctcgggctcttcacggtcacggcgcagcgacctggcatgtaaaaaaaaatgggccgatatatatcaagtgcaggttttatttaccac

SEQ ID NO: 10952 - DNA, 347 bp, Zea mays
  Clone ID: MRT4577_109987C.1
ctgtggcacaattattgaagggcaggggtattataaaagccgaacaacacagcaagcaatgctaaagaacaggtgatgacccgcaaaagcatccgctgttgttgcttctgtaaataaactacacttctctggtacacggttctatcgaaagaaacataagcattccctgcctgaaaatggcaacgcacccctttaccagcaattatttacatctcccatccgtcccagagaaaaccaccatgaacacattagtgctagggagggatcccacaccctagaattgatgcatgctgaacaccatatctctaataaccaaaagactgcagtcgaaaaacccctgagaaaac

SEQ ID NO: 10953 - DNA, 437 bp, Zea mays
  Clone ID: MRT4577_109988C.1
tttttataaattttttttcatttgtttccctaaggggttagccgttttttacttttcccgggttttaaagggaaaagcctctttaataccccggaattccagtttccttaaaagggcatttaggcttccttttttaagggcccccccaagaaacattttggggcagttaaacattgggatttatactcccccaattatcagccgggaacataaaaacctcaactagccggaaaatcctttaaaaaaactgaaaaattctttttgaaaaaccactggattttttctttcaatcccaaacagattttttgtttttaccccaaaaccgccctaggagaaacccctgccttaagaccccccatccccacccccggggccctaattagctggttgggggttaaagtttcttataacggggtttttaacccatggggggttta

SEQ ID NO: 10954 - DNA, 209 bp, Zea mays
  unsure (1)..(209): unsure at all n locations
  Clone ID: MRT4577_109989C.1
tgtcgctcgcangagnaggccaagggggtcgggaagcngcgcnaccgnngccantccaacctgntnggcnacagctgcgacggcnaggagngcctgctcgtcgccgantnnatgcccaanganacgntcgccaagcacctcttccactnggattaccagacaattgaacggnctaanngcctganagaagcanactacancgctgtagc

SEQ ID NO: 10955 - DNA, 460 bp, Zea mays
  unsure (1)..(460): unsure at all n locations
  Clone ID: MRT4577_10998C.1
cgggaaccgggnggacaggcgcccgcgcttctctccgcttccctccgcctgggctctcggccggctctgagcactccggcggcggtccgcctccgtaggcaccgcctcgccctgtcggagcccgcggctctgcggccgtcggacctgctggtcgactcctccgtcgccgtggagatgccggccgtcggattgtccatcaacgtgcttgtgctcctgaggggggctgctgtgcagcgtggtctccgccggagcgactacgcgcggttccggcgatgctgctctgcacgactcaganggctgttcatgtctctcccgcttctgcntggccgtggtgcctcctcctgacgggttctatcctcgtcagcggtgacggctcgtgaggcttctccctgtcgcgccttctttggtcgtgcgcgcctggtgtcgtgccttggcggggcaggctgctggtgcagccgct

SEQ ID NO: 10956 - DNA, 486 bp, Zea mays
  unsure (1)..(486): unsure at all n locations
  Clone ID: MRT4577_109990C.1
ttttttttttttttttttttttttttttttattcgaagagctgatcctttgaacaaagattgggctcaactgagcaaccaactcatcatgagagttattacaattcgtcaggtgggggagaccgaccagtaaactgggcactagatgtgactatactcggctaaacaaccattacctgccgattccccaaaaactgaagcaccgaagatggcacctccaagactagaaagaaaagcaatctgtaagcaaaaccaaccgttgctggatcttaaaatcgcatggcaacatttttctattgccagcaagatctaatctaatgatgttaacaataaagtatatcgatcaacaccatctcatttatgctaatgagaaatcacatgtactcatcttatgggccactcagtgagatgttatatacggtttccatgctatccccacggttctttaatatccttcgagcgcctgctcccnnnnngcaaacatgac

SEQ ID NO: 10957 - DNA, 354 bp, Zea mays
  Clone ID: MRT4577_109991C.1
atcacagttgtaccccagcgcctaacacatgcaccggaaggacctgacatgttgccatcctggggccacagaaagccaaccctaaaagcgagcgacagacaaacacaagatgaacgctagggaacggttacccacagcagcgggcacaaacaagcgccaaaccaaagggaaaggaaaccaaacagccacaaaagaaggcggaaacatttgctgaaaaatgaacggtacccaaagcgcataattgacagaaaactaaaaagcgccgttagcttataccacggaagactccaggaaaggggaaacggcacaaaacaaggggaaagccacgggcctgaaaccgaacccaacaggggg

SEQ ID NO: 10958 - DNA, 275 bp, Zea mays
  Clone ID: MRT4577_109992C.1
gttaaggggatacatttacgaagaacatttgttcaggttactagcttaaaggcgcaaggaaagcacgaactaagcgcgggcacttcctattgtctacgccgaacggccctgctatctcagcaaaccacaggcatacataagcggtcggggcgcagcatcgaacgggcctagatgccggccgccgggcgggtcacttggtcctgggcaggaaactctacctgagcttgtggacctagccggtgcaggagaggcagaccccttggagcctggaaaac

SEQ ID NO: 10959 - DNA, 554 bp, Zea mays
  unsure (1)..(554): unsure at all n locations
  Clone ID: MRT4577_109993C.1
ttctttttttctcccgggggggggggggggggttaaaaaattttttttggggggcacaagggaagcacaaaacccaaaaccagggaggcccaacatccgagggcccaaaaaaaaagaaaggctaaaaagcaccacgggtccaacgaaaggaaaaaaaccccaagaccaggggggctggcgcccaaaaatnntttgntcaccccacaaccgcaaggaggccaacaagacgagagaggggaagcnnccccccgcgccccaacaagcaagcacagcaccagccagaaagaacaancccncggggaaaaaaaaaaaaaaacccgggccccagggggggcccccnnccccacacccnggaggaccccgacagccaccgggggccccagggcacggacagcaaaccgaccaagaggaggagaccgagaaaagggccccaccaccaggggcnaagggggaaccancnncaccaaaccagcancaccggncnggagaaaagggggccccnncnccagcccccggccggagcgccnancaancnggggaacgagcccagcaaa

SEQ ID NO: 10960 - DNA, 380 bp, Zea mays
  Clone ID: MRT4577_109994C.1
caaacgtccggcactgaaacgaacatagtctcgcgatccgagggtcaggatacaccagcacgtggcccaggcgcagactcttcaacaatgaggacgtcgagtacatccggagaagattctacgtctaccgtagagcctacgaaagtgacaccctcaactccgccgtcgcccaaccccacaactcaagaatcattcttcaagtcagtcaataaacgactgcaaatgctagaatccaactcgacgttgtccttactatatattgaagagcaatcacggatgctaagggatgcctttagcaaagtggaaaaacgacaaatggctaaaatgaacacatttcttgaagagttaaacacaactgttatcgacgagattagaaatct

SEQ ID NO: 10961 - DNA, 151 bp, Zea mays
  Clone ID: MRT4577_109995C.1
gtcgtcacagtaccagcgacgagagatcggcattcggctcgacgtcagcttgcaccgagtttacagcatgaccgtgcgcgactcgacatacgcagccatcactcttcgtctgaagacgttactagctcattcgttgcatgccacgaacaac

SEQ ID NO: 10962 - DNA, 627 bp, Zea mays
  unsure (1)..(627): unsure at all n locations
  Clone ID: MRT4577_109996C.1
naaaaaaaaaaaaaaaaaaaaagaatttttattatttataaatggtaggnnntaagtggtaaaaagtggttgaaatcttctatttattgaatgattgacatttaggggnctgacttgctaatgcatggtggttcttttcacatctcaggatgggatcttaaaccctcacgctgcctcttgcacctgtgctgcctgctgcgacgacatgaccttagtaagtggccagcgtgtctggaacaggatgacttggtggggctgggggcggctgagtgggtcccacagcccttggcctctcggctgtttccctcctgccctctgccttggagagagacactgtcctcacttctcctgggttgctctgttccctcctccctgatacgtcacagtgaatcctgatgtctcgatggggaacacgtggttggcccccaagatgttgctcaaagaacatttgtggaaaccttaaataatgaaaagcggttataatgtcaccgccttaactctaaaactaaacatacacgcttttccttgtatgcatgccattttatattcctcattntgtaacatgtcagaaaaatgctactgtaaacttattcatgtgtagagcttttaacgcctttttgacatatt

SEQ ID NO: 10963 - DNA, 458 bp, Zea mays
  Clone ID: MRT4577_109997C.1
aagtcttattcaaatgaatttcttataaagtgtttttataaacacaacccacggtacacgatatattaaggttcaataaccgtgcttattgccctagagcataacaccatttaagcgaaactgcctgaaaacaaaacccttcattaagtactgtttgggacacaaaccaacacggggactgcggccatagatttctcaggggtgaaataccacctgattcgcttcttggaacacaccaaacagtcctttacacacctaccatgagttcttggtgtgtctggccacggtacacgagctgtccaaaagggagactcagaccacggggggtcctgatcttataaaccctttcaagggcccacatgaacttaatatcattggcgatgaagaccacctgcgagaacctgccgatcttaaaatgcttcttactggtgaggaaccaggccgggaacttgaactgt

SEQ ID NO: 10964 - DNA, 459 bp, Zea mays
  Clone ID: MRT4577_109998C.1
attaacgcggacggtcgcgcgggacggtttacagcttaggcgggctcggtgtcgccgcagtcgagtgcaggacagcacgcggtcgggtcgcctggatgcgtggctgcgcgggtgggcgtcggggcgtgtcggtgcgcggcagctgggcacgtcgggcttcgtcggctcctgggcgggtcggtcctcggcgctggcgtctgctcggcgggtcgattcagggtcgcgtcggtgcggcggcctggcagaggcgctcggccggctgcgcgcagggcgaggctggcgtcggggcgcgggggtgcgcgcaggctgggggcgctgctcggtgggcagggctgggcgcggtttctggcgctgtgcggcgcgtgtggtcggggacggtcggtgtcgggtggcttccgctggcgtgtgggctcctggcggcattcggaacaggcagagggaggagagagagtgagccgg

SEQ ID NO: 10965 - DNA, 824 bp, Zea mays
  Clone ID: MRT4577_109999C.1
ggtccctcccacttgttgaatttgtagaagtcgtttttctcttcaaaaaatcatagatgtatctttgatgataaggaaaactgtccataacgatcttcgaccaaaaatacctaacgtatgtcctgtctagggttggagccatgctgccggtcaccgggggactcaacctaaaattttaggaagggtgaacttaaggaacaaactcacaaacatcattcaaatattgcaatcgcacaaactatatcaattgacaaagcaataaactaaattatccgtcttctgggctctggcgcggagatcgcgtcagttacggttatccatctgaaatgttctcggattcctgccagccttcgtcccaggaccccaatacttctcaggatttggcatgaatcttgcgcgcttccgggtgaccgaggcccccagtactctggaaaattttgcctgaaatttaggctcttgggaaagtatcacattgccaggatgatttccaggtcgatgtttaactgggtgaagcttgacccagcatcgcatgatgtcccagatcactgacatcggggcatctgttttaagagctagcgggtccacatgacttcctgatacttgatacccagcatttctgatagcacattgtaacataaccatggttggagtagtgcacttcagtattgcacacagattgtgaagactcacaaataaaggtgcctccagcaattcctctgagactgaagatagtatagccgaaatttttggataagctggatatgcttctctcatagcatgaatatctgataatattgaagcagcccataccttgtcatgtattg

SEQ ID NO: 10966 - DNA, 430 bp, Zea mays
  Clone ID: MRT4577_10999C.1
gggtcccggaactttcttgggttatttttttccctggaaggggcaaaactcaagagacaactagaatagcgggggttagagggctcttaattaaaagttacagaaatgcagcgcttgatcggggggggtttacacgggcaaacacgagcgatctgaataaacttttcgagagcctgaaggagggttttaaagaacctgggctccccaagggggtccttgtccttcaaaagacccttcctgaacgctcggaacaccggaccaaaaccatccggggccggaaagaccaggcaattgatgtacaccagggtccgcgttgggccgtccttgaccgggaaaaaccctaacctgatccccccctcaaccttgtccaccttgaaaggcacccgaaggggcaggttggccccttggcaaaagctgttcccccactgga

SEQ ID NO: 10967 - DNA, 1941 bp, Zea mays
  Clone ID: MRT4577_1099C.1
ctcgaggccggccgggccgggatatgtacgctgttgtcttaattactgtgtggtgattggacgaaaaaaaaaggacccgtatcatcagtcaccacacatctcataccacatatcatcacacaccataccacatcgacgacttgagcgcgtgcgtgcgtgccctgatcgagcaccgattgccatggactcgacgacgacgacgacagcgccgctgctgcagccggccgccgccgcctcgagcaaggaggagccggcaccggcgtccccgcacggcgcgggcagctgggagctggaggcggtcctggccgacgcgtcgtcgccggtcttgcggcgggcctgggaaggcgcccgcctggagctgccgctgctgctgcgtgtggcgctgccggcggtgggcgtctacgtgatcaacttcgtcatgtccatgtccacgcagatcttctgcgggcagctcggcaacctggagctcgccgccgcgtcgctcggcaacaccggcatccagtccctcgcctacggcctcatgctggggatgggcagcgcggtggagacgctgtgcgggcaggcgtacggcgcgcacaagcacggcatgctgggggtgtacctgcagcggtcgacggtgctgctgatggccaccgccgtgcctctgaccgtggtgtacgccttctcggcgcgcatcctggtgctcctgggcgagtcggagcgcatctccagggccgccgccgtgttcgtgtacgggctcatcccgcagatcttcgcgtacgcggccaacttccccatccagaagttcctgcaggcgcagagcatcgtgccgcccagcgcttacacctccgcgcgtacgcggcggcgcacctgctgctgagctgggtggtcgtctacaaggtggggctgggcctgctgggggcctccctggtgctcagcctcagctggtggctcctcgtcgcggcgcagttcgcgtacatcgtgatgagccccaggtgccgccacacctggaccggcttcacctggcaggccttctcgggcctctgggacttcctcaagctctccgccgcgtccgccgtcatgctctgcctcgagacctggtactatcaggtcctggtgctcatcgccggcttgctccccaaccctgaacttgcattggacgcgctgtctgtatgcatgactgttaacgggtgggtgttcatgatcgcagtagggttcaacgccgctgccagcgtgagagtgagcaatgagctcggcgccggccaccccaagtccgcgtatttctcggtgtgggtagtgaccgcgctgtcgacgctcatatctatcatgctcggcgttctggtcctctgcctgcgcaactacatcagctacttgttcacggagggcgaggtggtgtccaacgcggtggcggatctctgcccgctgcttgccgtcacgctcgttctcaacggcatccagcctgtgctgtcaggtgtcgccgttgggtgcgggtggcagcagttcgtggcctacgtgaacattggctgctactacatagtcggcgtccccctcggcgccctgctcgggttcttcttcaagctcggtgttaagggcatttgggctgggatgatcggagggacctgcatgcagacggctattctagtgtgggtcaccttgagaactgactggaacaaggaggtagaggaagcacagaataggttgcacaagtgggaggctaacaagacgacggagccccttcttgcgggggtcagcaatgacaagtagctgatccagaatatcaatctccggccttcaccagtactagttcccttcatgcataatgttgggaactggcgtctttagattttctgtgcagtaaattaaatgaaccacggtaacgtcaatgtaaacgaagaatcacgcatgtttggtttgcttatttcgtcagttttaatgctgaaaaaaaaaaaaaaaaaagcggcc

SEQ ID NO: 10968 - DNA, 134 bp, Zea mays
  Clone ID: MRT4577_109C.1
atatgcaggatatgtgacggtggatgcaaaggctggaagggctttgttctactattttgttgaggctcttcaagatccttcagacaaaccgcttgtcctatggctgaactggagggcctggctgttcatccttt

SEQ ID NO: 10969 - DNA, 332 bp, Zea mays
  Clone ID: MRT4577_10C.1
gatcttatagagcttggctttcttcttgacggccagatcgccctggcagtccgatggggcgcgcttcacgccggctatggtggagacgtagactgcgccacgcctaggtgcaagcttgtacttgttgagccaatagacgtcagcgtcggcggcactgcgcttgcccatgccgttctttgactcctcatgcaggacgttctcgaagctttagatgaaggattttgaccgggacgcgaggacgatggagcgaatggccgtcagagatgcgacagatcatcaccatggaaggagaccatctgataggatgcggacgtgctatagtactctgcatc

SEQ ID NO: 10970 - DNA, 367 bp, Zea mays
  Clone ID: MRT4577_110000C.1
ttcgagaggagatgtgatgtcgattcgagcatcgacacagcaatctcccttgcttcagccaacagcctgactatcttgcatccttcaatgtcagaggcagccttgctgctgatcttcttgaactgcttctgtgccttcttggccaagcgagcgtaagactgaaccttggcctgaagagacacgttgtctcctctcttgagggccagctgcatctcctggacgctgaccctgagctctgcaaagttctcttgcatggcgttgcagaggtcaagcaggacaagggagcgatcgagctcctcctccactgccttcctctgctgacgttggttgccggccaatgatgtgagctcgtcaatgcagctgtaga

SEQ ID NO: 10971 - DNA, 163 bp, Zea mays
  Clone ID: MRT4577_110001C.1
ctgcgagaagacatttttgccgtttagcatcatgcttacgtaacaactaggcggttatgctaaccccgccgaccccgacgagatctccccccaatagtgacgtgaccgacctaccgagctggagatgaagctgaccatgcagcaggagcccaccgtcgattgc

SEQ ID NO: 10972 - DNA, 423 bp, Zea mays
  Clone ID: MRT4577_110002C.1
ggcaacaccaaaaaccccctttttttccttaggataaactaaaaacaaacccggacgggggaaaaagcatccatcgacccacagcccaggcggggggaggcaggggtcggggggacccggggataaacccagccctaacaaggggcacagagcgaccttgcaatcaaaaacccaggggggcaccaccaaacgggacgaacgaaaaaaaccccttgggactagggaaaacaccccgggaggaaacaggaaaactgggccgggggggccccaccgttaagttcccccagttcccgggggagttgccgaacccccccccacggttgccccccccgaacccccccccacccccaccggacccccccgcgccaccggagcccccgccccccccgccgaaacccccgcgctccttaggggccccgcccc

SEQ ID NO: 10973 - DNA, 1723 bp, Zea mays
  unsure (1)..(1723): unsure at all n locations
  Clone ID: MRT4577_110003C.1
tatgagggtaaggagggagttgtgggtacctcgggtgtggccggggtacacccggtcttccctccgtcgccgatttcgttccccttcccctacccctgtcccgatcgcgcagctacggcgaaaccctagcgacgaattccccgccgaatcgaggattccaaggttccgaccgcgccgagcgcggggaccgcattccgggaacgggtgatggtgacctgccgcaagatggcacgcgtcgacgtcgccgagctgaagcagcgcctggtgaagcggctgggccgggagcgggcggccaagtacttcgcacacctcaccaggctgctgaatctgaagctcaccaaggtagagttcgacaggctctgcttcgccaccatcggcaaggacaacatcgcgctgcacaacgcgctcattagggggatcataggcaatgctctgtcgggagtgcctccgcccagccggcaggcggtgacggggcagtcgggcaccaccaccgccccgagcgggcagtgcgtgggcgtcgcgctgcccgtggtggggaatgtgggggcagtggtcgattcgggtgatggtgagctggcgagggagcttggggcgccggttgggaaggtggtgtccgtggaagatggggaggaggtggagcaggtcaggtctgttccgtgtgtccagagccggagcccgataacacagcccttggggatttcagtcgctgggggcagtggtacgagggtaaggaggaggctggatgatcctttggtgtcatgctatgattgtggacatttgctggatacgggctctctgtgcgaggatttgcagcggcgactgcacagtaccggcactggagtgacggtgcaagctgtcgatgctttgaatcgtggattagatgagttgttgcgaaggttgattaaaccgtgcatggatttgtcgagggtaagagccagcagtagaagaattagcaaagtcaatgaaaaggttgctggtagagtgaattcattgcaacaactaaatcagggtcagcgtacaacgttgcaagattttgcagttgctgtgcaatctgatccacatttgcttggtccaaattggcccacacaaatcgagaaggtacaggcaatgtcatttggaggagaatgatacatagtggcctgttatagctgatgaacatgaacttctctaaaggagatgctgtttgctggcattgaagtaaatgaaacgacagaccaacaccatgactacaaaatctgagtattgcgttactcacaagcaggagataccaaggcccaccaggtgaacaaagggagatgcaatggacagtgtagcataaattcttccttgggaatctagcctgttgtcaataaatcgaagaatcgatagggttggctgatgtccaggccaagctaagaaactcgtcgacaaacataccctcagctcttggctcaaaaaacatgttctgatagtacttttagagatttgttgtgacgttgtaatagagcattttccccttattagacttaaatggaatcatttttctcagtgatcataaatgatgcctttaatggctcattgctcctgtacattgtattcagattatggcaatgatcacttgcaattaagataaaagtttaaccctgttggataaaaaaaagttttttaggccccaaaaaaaaaaaaaaaaaaaaaaaaaaaaaaaaaaaaaaaaaaaaaaagaaaaaaaaaanctcgagagggg

SEQ ID NO: 10974 - DNA, 1859 bp, Zea mays
  unsure (1)..(1859): unsure at all n locations
  Clone ID: MRT4577_110004C.1
aggccggccgggccgggcgcgaccccgccaccacccttcgcgtcgcccacgactcgtcgtacacccggtcttccctccgtcgccgatttcgttccccttcccctacccctgtcccgatcgcgcagctacggcgaaaccctagcgacgaattccccgccgaatcgaggattccaagtaagttatgccccccccttgcactccattctgcctcaatttgttcggtgccttgatggttcggttagatctgagcaccccgggcttgcatcactagggttccgaccgcgccgagcgcggggaccgcattccgggaacgggtgatggtgacctgccgcaagatggcacgcgtcgacgtcgccgagctgaagcagcgcctggtgaagcggctgggccgggagcgggcggccaagtacttcgcacacctcaccaggctgctgaatctgaagctcaccaaggtagagttcgacaggctctgcttcgccaccatcggcaaggacaacatcgcgctgcacaacgcgctcattagggggatcataggcaatgctnctgtcgggagtgcctccgctcagccggcaggcggtgacggggcagtcgggcaccaccaccgcccccagcgggcagtgcgtgggcgttgcgctgccggtggtggagaatgtgggggcagtggttgattcgggtgatggcgagctggcgagggagcggggggcgccggtggggaagctggtgtccgtggaagatggggaggaggtggagcaggttaggtatgctccgtgtgtccagagccggagcccgataacagcgccattggggatttcagtcgcggcgggcagtggtatgagggtaaggaggaagttggatgattcaggggtgtcatgctatgattctggacatttgctggatacgggttctctgtgcgagggtttgcagcggtggctgtacagtaacggcactggagtgacggtgcaagccgtcgatgctttgaatcgtgggttagatgagctgttgcgaagattgattaaaccgaccgtagatttgtcgagggtaagagccagcagtagaagaattagcaaagtcaatcaaaagtttgctggtagaatgaattctttgcaacatccaaatcagggtcagtgtacaacgttgcaagattttgcagttgctgtgcaatctgatccacgtttgcttggtccaaattgccccacgcaaatcgagaagatccaggcaatgtcatttggaggggaatgatacatagtagcccgttatagctgatgaatttctcaaaaggagatgctgtttgctggcattgaagtaaatgaagcggcagatccaacagcgctacaaaatctgagtattgcagccctctcggagtcccgggcaagaaatacaaaggcccaacaagtgaacaaagggtgatgcaatggacagtgtagcataaattctttcttgggaatatatagaacgtcgataataaatcgaagaatcaatatggttggctgatgtccagatcaagctgagtaactccttgacaaacatactctcaactcttggcacaaagactatgttccggtagtacttttagagatttgttgcgatgttgtaatagagcattttcctcttattacagacttaaatgtaatcatttttctcagtggtcaatgatcataaatgatgcctttaatggctcattgctcctgtacattgtattcagattatggcaatgaccgattgcaattaagataaaagtttaaccctgttgaataaatatatgttttttatgcccaaggacttcaaattctctcctatggctggaatataaatgttctaaacatgcattcatccaaatgagttacaattgagttgccagg

SEQ ID NO: 10975 - DNA, 410 bp, Zea mays
  unsure (1)..(410): unsure at all n locations
  Clone ID: MRT4577_110005C.1
ccctcgcgtccgattacaacagtgtcaggctgagagaagatccatgtcaaggtcctgcaatgccagttgtcatcaagactgattccaatatatccaacacaaacaataacgctcaaacaaaagcaaaggaggtgaagaaatcttcacacaggtcaacctatgacgacacatcagttaaattggtcatggctggaactggatgttctgacattgccatagctgagcattgtcaaatttgctattatcatacaggttctcggagaaatggatgtngatgttgatgctgctattgagtacctgatagcggagcgacttgcagtcagtactgatgatgcgggaggtagacctttatataaaccatgcatttaacggagatgaacctaccaagaggcaagaggatattaacatga

SEQ ID NO: 10976 - DNA, 843 bp, Zea mays
  unsure (1)..(843): unsure at all n locations
  Clone ID: MRT4577_110006C.1
ctctctcgtcgcccagatcaggcccctacccctaccttgcttcatcctcgtgttcttttcccggcgcgcccttcccccatctcctcttcgccggggttatcagcgacgactttcggggacgcacgcggaagccgcggcggatcgagaaggagctcgcttccatgtggatggcggggcgccgacggcctgatgatgggcaggccgagcgtcaacgcgtacggtggctggctgtggggttgtgactacacttggccgtaggagatcaggtcaagactctggatcagccttctccatccctccttccggcgtgcaccagaagaagggacagcaggccttcggaaccccgcctcttgcgatcctgtacgggagaggggcgatcaggtttttggggagagctctcactcgactgctgacagcgatcacttccccaacgacgacttcttccccgacatcggcaacctcttcctcgacgacgacatggcccagaccggggacaacacagccgctactacagctgctgcaacccaatttgctacacctgcttttcttacgtcgacaaagcccgatcggttcaagggtgtgaactataagaggtggcgcacgagagcagtgttgtggtttcaatccatgaactgctatgcggccaccaagggcatgcctgagggcgatcttgaacctgcacagcgggaagcctttgaaagggttgatattatgtttaagacagccctccttggtattattgatgattccattgtggatccttatatgttgtttgataatggcaaggacatgtgggccgcgctcgaggccaagttgnggtctcggacgctggtagcgagttgt

SEQ ID NO: 10977 - DNA, 357 bp, Zea mays
  Clone ID: MRT4577_110007C.1
ctcgccatgccttcactcttgcaatttgttaagtggagcattacgggggcatcggaaatggcgtctatgaaggcggaggtgacatggttgcgcgacatgctttgcggtgacgatgcctatgatatgccggtgaagcttatctagctagtgccggaggactacccctacaatgatgatgactagctctattttactgcaagatagcttgtttggatttagacatcactttcatcgatggtacgtagatctgctatatcctgctgtcataccacgaaagctgcgtctgtatcgcttgtacatcgtaaaaatcatacatcatctctcctgattagcggctgtgaattagactgctggatt

SEQ ID NO: 10978 - DNA, 861 bp, Zea mays
  unsure (1)..(861): unsure at all n locations
  Clone ID: MRT4577_110008C.1
gaggttggccggggtgttacactcacaaaaacattcagcaaacaagttctttgccgagtatttttgtttgtcgagtgttttttgtttgacacactctttttctagtgcccgaaaaaaatacgtttagcaaattaattggcactcggcaaagagccgaattcgatattgaatatactacccatgtcatgtctacacatctccaaactatatattttgagagctatcagtggtgagagtttcaaaagtaaaaggttattgggttttagtcaaagctatcgtcatttacattggtgactagaataatagattttccactccaatgacaggacattgccttataattagaagtaagttctatcaagtgtttattgacaatttgccaccaaaaagcgtgcaattttgtatgaataaataatatgtgtaatactatataataataatgtatggacatagtagtgtcagtccatcaaaattaattcggtatacatggaacgcataaacatatatctttcctagatagatagttgttactatatatatctttgcttagcgtatctagtcacataatagaagctatcttgagaagccaaaacaattagacggagaggaatatttattactccgtattagactagcaaatggagatgctgagatccaaccatatgattcatctgtatgttattcccatccgcaggtaagaacaaacggacaggcgacagcattatcatcatatacatattcttcatttatttcattaattagacaatggagattcttggcttcatcagaatatcagatntatattatcgatcatctgtgggcccgtcgatcctagaaagctatgacctaataactagaagc

SEQ ID NO: 10979 - DNA, 286 bp, Zea mays
  unsure (1)..(286): unsure at all n locations
  Clone ID: MRT4577_110009C.1
cncngattattcgcatttatgcagangaanacccnangcnaanngaaggccacagggcagcaacagaacagacnncgcatcgcggcgccccggagnncaacgcagaagaaggcangancnacangccanacnggaggaggcaaaagccncnccggcaagagggagaaacgggggncanaaaaaangccaaccgccccaagggcacanangcgaagcngcagccncanacaacagacnnnccagaaannncaaaccccaaagcaancnnggagaaaacnnngcggaa

SEQ ID NO: 10980 - DNA, 604 bp, Zea mays
  unsure (1)..(604): unsure at all n locations
  Clone ID: MRT4577_11000C.1
accacaagggcgaatgggtacaaaagagagcggccgacnaaaaaaattccccgacagagagcagcgacaccacgggcgagcgaccccaacgccaacgccaaggacaccgcacaggcgcacccggccgcacggcacgcgnccagccccacgcccacggagcccgacgcacaacccaccacgcggcagccccccaacaaaagcgacgacagaagccgcgacgccccaaccccaagcggacggaagcaaacaccggggcaagcgaacccacgaggngcggcaccgcacacagcaagcgcccccaaaagaggagcgaagcgaggccaaagccgaagacagggcaggccgcggagaacgaagagcagcagcagacccgagggacagcacggacgcagggcanccgcgccgcggcggaccgcaaggccgacaacacgcccagccccagcaagcaggggcacaacaggggaacgggaggagcagcaagcaacaaggacgcncacgagagaacgaacaacacccaaagcacgaacgacgcaaagacaccggagacaggaaccccagcggaanccaagcacaagaagaccgaagcaccagacaacccagacac

SEQ ID NO: 10981 - DNA, 272 bp, Zea mays
  Clone ID: MRT4577_110010C.1
ggggcataaatttcctgacaactcctttttttgggcccccaactcggttcgggggtgggtcgtcacgttacacgagccttttatttaggacgtacgtacctaccttcgtacgggacaagacgggggccgatccctttagggctttagggttcggggcttccccatgggaaaaaaaaaattaggtgcccgggtagcccaccttgagggcgatccccggttttttttttacggccggcccccggacttgggatttccacccggggccccggggg

SEQ ID NO: 10982 - DNA, 202 bp, Zea mays
  unsure (1)..(202): unsure at all n locations
  Clone ID: MRT4577_110011C.1
tcggtaagggcgcgaacctggcggagatggcgagcatcgggctgtcggtgccgccggggtttacggngttttctnttgttttnttttttttttngttttccttttctttttctttttttccccttgctcccgctttttcaagctcttcagcccgtacgcgcggcgccgcaccgctttaccccctggtacacccatcataccc

SEQ ID NO: 10983 - DNA, 291 bp, Zea mays
  Clone ID: MRT4577_110012C.1
cccgatcctaagctgtgcctcataccatttcaatccaatgtctccgacgtcaaatctgtctactggcatcaagggcgcttctcggtcgggcgcgtaccatcgccttattcttctcaccatcaagaccaagaacagccgctccttccccaatacctacatggccttcgacaccataaaacccatgttctaccctctccactacatcaaccccacctttcccagcaccctcacaccttaacctaccaaactcatctcgatcatcacgccttgtaccgttcttatccttcattc

SEQ ID NO: 10984 - DNA, 379 bp, Zea mays
  Clone ID: MRT4577_110013C.1
ctcctgcaccctgcgcttcaaatcatttcgggggtagtgagcaacgccaagcatccagcaacagcagccgctacctccctttgtctagctgtctccctcacccgggccagtcctgcattgcattgcctcatgaggacccaaagaaacctccttcccctcctcctgctgctgtccgccgcgctgctcgccgtcgccgacgcgcaggagcgcaagaactacgtggttcatctcgagccgagggacgactacggcggcggcgggtcggtggaggagtggcaccggtctttcttgccggaggccacgctggactcggcggcggatgacgggcccaggatcatccactcgtacagccacgtgctgacggggttcgccgacagcc

SEQ ID NO: 10985 - DNA, 721 bp, Zea mays
  Clone ID: MRT4577_110014C.1
gtaccggcgccctccttcgagtttttttttttttttttttttttttttttttttttttttttttttttttttttttttttttttttttttttttttttttttaaaaaccacatttttaggggtggcatttgggaaaaacccaaaacacaaaacaagggaaatcaggcggggggccccccccccaagaaaaaccaaaaaaaaaaatttacgggctttgacccccccaaaaaagggggccgggatgggccgttaccccacccaggggggaccaaccagcagccgaggcaaattgttccaagccccgggcttcaaaaaaaaccacccaaggggggtttggttaaaaaaaccaacaaaaaattttggggccccaggcaggaaaaaaaagacccccttgacgttaaggggggaaaaagttgaaaaaacagggacccccttgaaaaaggctgcccaatcttgaaaaagggacccgcgggggggggcccaaaaagggggggggaccattggtaaaaaggacccctttttggggaggaaaaacatcaaaaaggctaggctttgggggctccaaaggacccgacaaaaaaaaaggcccattgtcctgaacaaaaaaaggccgcaaaaatggggggcccggaacaaaaaattcactgggaaaccttgggtcaagaacaaggaaaccgttaaatcccatggaatcattacccgacagttttttggaaggggg

SEQ ID NO: 10986 - DNA, 836 bp, Zea mays
  unsure (1)..(836): unsure at all n locations
  Clone ID: MRT4577_110015C.1
aaattagcctcaaaaacacatcatctccaatccccttccttcgcctctcctcgtgtggctctctggagaaacactcgctgcttgtctcgcctccattgtattatttcgtccctcgtgtagcttgaccggccggcgtgcgaagatgccgggcggagggttcgccgtgtcggcgccttccggcgtggagttcgaggccaagatcacgcccatcgtcatcatctcctacaccacccgccgcctcggccgccgcctcaccatgctcatcgccggcgtctttttcatcatcggcgtcatcttcaacggggccgcacagaacctcgccatgctcatcatcggcaggatcctgctcggctgcggcgtcggcttcgccaaccaggccgttcccctgttcctgtcggagatcgcgccgacgaggatccgcggcgggctcaacatcctgttccagctgaacgtgaccatcggcatcctgttcgctaacctggtgaactacggcacgagcaagatccacccgtggggctggcgggctggtcgctgtcgctggccggcatcccggcggcgatgctcaccctgggcgcgctcttcgtcaccgacacccccaacagcctcatcgagcgcggccacctggaggaagggcaggggcggtgctcaagcgcatccgcggcaccgacaacgtgggagccggagttcaacgagatcgtggaggcgagccggatcgcgcaggaggtgaagcacccgttccgcaacctgctccagcgccggaaccgggccccagctggtcatcgccgtgcctcctccgnatcttccagcagttcacgggcatccacgccatcatgttc

SEQ ID NO: 10987 - DNA, 847 bp, Zea mays
  Clone ID: MRT4577_110016C.1
cattgggtacctcgaggccggccgggacccatctccctctgctccgggcgcaccgtcaccgggtgaggctgtattgcgtcgacagcaacacctgctttcgctacgacgggagcaccagaggctaggcttgcttcatcagtgacagggagccaagatgccggccggagggttctcggtctcggcgccgtccggcgtcgagttcgaggctaagatcacgccgatcgtcatcatctcctgcatcatggctgccacaggcggtttgatgttcggctacgacgtcggcatctcaggtggtgtgacgtcgatggacgacttcctgggcaagttcttcccggcggtgctgcggaagaaactggaggacaaggagagtaactactgcaagtacgataaccagccgctgcagctgttcacgtcgtcgctgtacctcgcggggctgacggccaccttcttcgcctcgtacacgacgcggcgcctcggccggcgcctcaccatgctggtcgccggcgtcttcttcatcgtgggggtgatcttcaacggcgccgcccagaacctcgccatgctcatcgtcggcaggatcttgctcggctgcggcgtcggcttcgccaaccaggccgttcccctgttcctgtctgagatcgcgccgacgaggatccgcggcgggctcaacatcctgttccagctcaacgtcaccatcggcatcctgttcgccaacctcgtcaactacggcacgtccaagatccacccgtgggggtggaggctgtcgctgtcgctggccggcatcccggcggcgctgctcaccctgggcgcgctcttcgtgacggacacgcccaacagcctcatcgagcgc

SEQ ID NO: 10988 - DNA, 280 bp, Zea mays
  Clone ID: MRT4577_110017C.1
gggggcccaacagtttattgaaaatgaccgcttttccatggttggggtttttgtccccccttgcccaggtatggttccctaatttggtttttcttgtttcccgggggctttgtgggaataacatccaccacgcggttttaattaaaaacagggggttttcaaatttttttgccttcaaacccccattttttaaatggggtggccagggggaggaaataaaggcctgttgtttttgttgttctttaaaaggcgctttgaaggacgccccctttatcaaggg

SEQ ID NO: 10989 - DNA, 502 bp, Zea mays
  Clone ID: MRT4577_110018C.1
ttttttttttttttttttttccatgcaccatattgttggtaggtacaagagtgcaagaggacacttaattgtggcgtttcgttgtgcgttgaataacacccttccacccggcatgcaggtcctgctatcggaacaacgcatcgtcgatctgtgtgtttctatacagtagctcaatccttagggttctccatgcctacttttacgtggccgcctgtcgacgcgacaactccagtaaaacgaaaaccaatggctgcccggccggtccgtagtccgtactgtacgtcggagaagcgacggccacgagccaatggctgccccacgatcgaggcgacgaccacgagcaaccacacaccagctggagcccggagcagagcagagaagaaaagagaagtgcatgcccgtcgtcgtccatccgtggctggagctagctagctagcgccaccgccacacgacaacacacgctgccggagcccggaggtcggagcgcacagttgtgttcgtt

SEQ ID NO: 10990 - DNA, 986 bp, Zea mays
  Clone ID: MRT4577_110019C.1
gcacccgtccgtaagctcggaattcggctcgaggggagggagtccccgattggcggcggttcagagttctaccacttccagcacgccgaggacttgctggaccgcggcttcagctccaactcgctcatcgaggacatctccgcgagcctggaggcggcactatccggagtcggctccgtggggaggcaggctccgagctcgccgatggccggcgctcgtgcgacaccgacccgcgtttctccctggacgccgcgcgcatgtccatcgacgacgctggcttctcatgggacgagccccgcgcgtcctgggatgggtacctgttcggcggcggcgccggcattgggctcgggcgcgcgcctcggccgctctcccgcctccctcccatcctgtccgtcctggaggacacaccgacagacgtcgtcgggagtcgacggttcagagttctaccacttccagcacgccgaggacttgctggaccgcggcttcagctccaactcgctcatcgaggacatctccgcgagctcactatccgggcgcgccaagaagccgcgccggtggcgcaaggcgtggagcctgtgggggctcatccaccggcgcgccgcggggcgcaggagcggcggggggccgtcggacatcaccgaccgttccttctccgagccgtggccggacctgcgcgtccgcggagccaaccctaagatgcagcggtgcaacagcagcaacctgagcgcgcgcagctcgttcagcagcaacagcggcgggctcggcagctcccggcgcagctacgtggacgccaacggcaacgtgaggcggagggaggagcctcacgcgcaggcgcaggcgcaggtggagcggacccgcagcgcgcgctactcgcccgggcgcgccgccgcggacaacggcatgctgcggttctacctgacgccgatgcggagcggcagcgggcggacgcgcggcggaggcggcctgcccagcaaggccggggccgg

SEQ ID NO: 10991 - DNA, 373 bp, Zea mays
  Clone ID: MRT4577_11001C.1
gtcaagtgtggggaggccaatgaggctttggtttggagtattttcaaagtatgcggcggcggcggcggtcactgcggtgggggttgtcagtacttgtgctcagctgggtgctttggagcaaggaagatctggtgttgtggcgcagagagctttgatagacatgttcatgaaatgtgggcgcttggatcttgccatgttggcctttggaagcatggctgagaggagtgtggtcaattggaatgtgattattgttggacatgcaactcatggttatggtctggatgctgtcatgctgtttcatccaaaggaggcagaaagggttacagtggatgatcttagtgtaattgccatcctgactgctttgcacacatgc

SEQ ID NO: 10992 - DNA, 526 bp, Zea mays
  unsure (1)..(526): unsure at all n locations
  Clone ID: MRT4577_110020C.1
cctgtgcggcgctcgccggccgggccgggagcatcctcatacctggttggcgaagccgacgccgcagccgagcaagatcctgccgacgatgagcatggcgaggttctgggcggcgccgttgaagatcacccccacgatgaagaagacgccggcgaccagcatggtgaggcgccggccgaggcgccgcgtcgtgtacgaggcgaagaaggtggccgtcagccccgcgaggtacagcgacgacgtgaacagctgcagcggctggttatcgtacttgcagtagttactctccttgtcctccagtttcttccgcagcaccgccgggaagaacttgcccaggaagtcgtccatcgacgtcacaccacctataatatatatacacacaaacaatgattttaattgtgtccaagatgttagtgatggtttcgtggtatttaattgcaatgttcatagccnaaaaacccaaaaaaaaaaaaaaaaaaaaaaaaaaaaaaaaaaaaaggaaaaaaaaaaaaaaaaagggccccta

SEQ ID NO: 10993 - DNA, 263 bp, Zea mays
  unsure (1)..(263): unsure at all n locations
  Clone ID: MRT4577_110021C.1
cgcaaacacttgtcgccgccactgtcctcacatggtaagggccgtccattgtgtctccgggttcggtgcgtnngtgctgcgaagcgcattcgtggtgtgactgcgctgccatccatcatgccctgggctcgtctctttcctcgatcattanngccaaggagctnnngctcaatgggcatgaagggtgagtcgtcgtcccgcttgcgaaggagaatctgcanntgtcgggccggccctcgtcccgtcagaaaggattgaagtac

SEQ ID NO: 10994 - DNA, 1149 bp, Zea mays
  Clone ID: MRT4577_110022C.1
gtaccctcggagtctgccgggtagtcccggtggtcgaggagggccctgccgtcgtcccgatggacatttccggcgaggtggcagccgagagcaatgcggcggcccagggaggtaagtccgatggccatcaaggaccacatcgatctcgagtcggcgcagagcaagaaggcttcgcccaaagacctgcgccggtagcttctgggtcgccgcctccgtgttcagcaagaagtggcagaagtggcggcgcaagcagaagctcaagaaggaggctgccgtgagcaaggccgccgcagcggcaatgccccctccggagaagccctccaagccgtcgttctttcgccggagtcggctccgtggggaggcaggctccgagctcgccgatggccggcgctcgtgcgacaccgacccgcgtttctccctggacgccgcgcgcatgtccatcgacgacgctggcttctcatgggacgagccccgcgcgtcctgggatgggtacctgttcggcggcggcgccggcattgggctcgggcgcgcgcctccgccgctctcccgcctccctcccatcctgtccgtcctggaggacacaccgacagacgtcgtcgagcgctccgatggccagatccccgtagaagacgacttcgaccccgacccgcccggtggctcgctacagaccagagactactacctggactcctccagccgcaggcgccggagcctggaacgttcgagctccgtacgcaggccgtccttcgaggtcacggatccaacaaggccgatgccgcccgcggtaaacgggaccgggagggagtccccgattggcggcggttcagagttctaccacttccagcacgccgaggacttgctggaccgcggcttcagctccaactcgctcatcgaggacatctccgcgagcctggaggcggcactatccgggcgcgccaagaagccgcgccggtggcgcaaggcgtggagcctgtgggggctcatccaccggcgcgccgcggggcgcaagagcggcggggggccgtcggacattaccgaccgttccttctccgagccgtgggcggacctgcgcgttcgcggagccaacccttagatgcagcggggcaacaagcagaacctgagcgcgcgcaactcgttcagcaacaacag

SEQ ID NO: 10995 - DNA, 2177 bp, Zea mays
  Clone ID: MRT4577_110023C.1
gtcgacagcaacacctgctttcgctacgacaggagcaccagaggctaggcttgcttcatcatgatgaaactaaatactttcgttcttctgatgcgctatttcatggcgcggtgtggaagcaatttggagacctgaactgaggaaatctccatccccttcctttggctctcctcgtgtggctctgtggagaaacactcgctgcttgtctagcttccattatatcggcgtagcttgaccggccggcttgcgaagatgccgggcggagggttcgccgtgtcggcgccgtccggcgtggagttcgaggccaagatcacgcccatcgtcatcatctcctgcatcatggcggccaccggcggcctcatgttcggctacgacgtcggcatctcaggcggagtgacgtcgatggacgatttcctgcgcgagttcttcccggcggtgctgcgccggaagaaccaggacaaggagagcaactactgcaagtacgacaaccagggcctgcagctcttcacgtcgtcgctctacctcgccggcctcaccgccaccttcttcgcctcctacaccacccgccgcctcggccgccgcctcaccatgctcatcgccggcgtcttcttcatcatcggcgtcatcttcaacggggccgcccagaacctcgccatgctcatcatcggcaggatcctgctcggctgcggcgtcggcttcgccaaccaggccgttcccctgttcctgtctgagatcgcgccgacgaggatccgcggcgggctcaacatcctgttccagctcaacgtcaccatcggcatcctgttcgccaacctcgtcaactacggcacgtccaagatccacccgtgggggtggaggctgtcgctgtcgctggccggcatcccggcggcgctgctcaccctgggcgcgctcttcgtgacggacacgcccaacagcctcatcgagcgcggccgcctggacgagggcaaggccgtgctcaagaggatccggggcaccgacaacgtggagccggagttcaacgagatcgtggaggcgagccgcgtggcgcaggaggtcaagcacccgttccgcaacctcctgcagcgccgcaaccgcccgcagctcgtcatcgccgtcctcctccagatcttccagcagttcacggggatcaacgccatcatgttctacgcgccggtgctgttcaacacgctggggttcaagagcgacgcgtcgctctactcggccgtcatcacgggcgccgtcaacgtcctctccacgctcgtctccgtctactccgtcgaccgcgtcggccgccggatgctgctgctggaggccggcgtgcagatgttcctgtcgcaggtggccatcgccatcgtgctgggcatcaaggtcaccgaccactccgacaacctgggccacggctgggccatcatggtcgtcgtcatggtctgcaccttcgtctcctccttcgcctggtcctgggggcccctgggctggctcatccccagcgagaccttcccgctggagaccaggtcggcggggcagagcgtcaccgtctgcgtcaacctgctcttcaccttcgtcatcgcgcaggccttcctctccatgctctgccacctcaagtacgccatcttcgtcttcttctccgcctgggtcctcgtcatgtcgctcttcgtcctcttcttcctgccggagaccaagaacgtgcccatcgaggagatgaccgagagggtgtggaagcagcactggttctggaagcgctacatggacgacgacaaccaccacatcgtcaacggcaagctcaccggcgcctccgtttaactactccatctgctctgttcatgcatcagactcacttgatagtactacagtactactactgcaacaccgcaagtccgcaaccgcaatcccgatggcaattgctagtactgcaactgcgatggcaatgccgccttgttgttgtacaatagcccagtgtttcggccagagtccgtgctcatctttgatttgtagtatctttcaattttcaagcagagtttacacggattgtaatcacatccttgcctggtcatcgaaacctacatgtgtactatttctagcgccataacgtgtggttgattcatcactgaaaaaaaaaaaaaaaaaagcgccgtgtgaataacaagtggtatcctgtgggtgtgcaaaaaggaataagtaat

SEQ ID NO: 10996 - DNA, 307 bp, Zea mays
  Clone ID: MRT4577_110024C.1
ttttacgcgtgggcggacgcgtgggcagaagctcaaatactgatctgactgatccagtatggctatggcaaaggcaggcgcgccgagggtctcgggggcccagctggcgactctcgggctatcactcctctgcgctgcacaacggaccggccttccggctagaaggctggcccactgcctgacggatgctggcacatgagcggctactgaccgacgaccgacgcccactgcagtgaccgacgcctgtggggagctgataggtcatgtcgtcaccgtctccggtgctggcaagggctgcacgtctcac

SEQ ID NO: 10997 - DNA, 169 bp, Zea mays
  Clone ID: MRT4577_110025C.1
ctgtcctgtcgctccctccaccacacacttttactgaacacgcgcgcgcgcacgccattacgctgccgtagcgtgcggtgtgccgtcaattcaaaccaccaatagcaatgcctgcgacgtccgcaaactgcgccaccgccggcgtcgccgtcgcgagggacgacatgtt

SEQ ID NO: 10998 - DNA, 827 bp, Zea mays
  unsure (1)..(827): unsure at all n locations
  Clone ID: MRT4577_110026C.1
cacgaataagtgcctatacatcctgggtggtgcgaaccgaagatgtctcttggtggagccacaacgcaagcccccaaaacanatataatgcactccaagacagctcgtgctgcgaagaagctgaagatttgggcgctttatctcctagtagcagaggcttggacattgccggtcttcccatcaagaaactatctttcaacgcaagcactctgcgagaggcatgaaacaccacgcaagccttttgcccagatcatgccaggaaacaatgtctcgtcgatgcctgcgcggcccatctccaacgacacagaggaagagaacaaaacccccaaaacatttgcagggctcaatccaaaaacgccggtgacagtgacggctcctatgcagttggcggtgacaccagctgtggccaacaaggtcatagccactcctgcaacccttttccaggagaaggcagagtcgccagcgctgcctggggacatcgagtactcgttcgaagagaggcgactcgccgtttacctggccaggcaagtggcattttttgtacattcaccttctcccagttgcgctaatacccagctattacttagttgaaagctgagctgactgcgatgtctcgtcagaggccaatgttacctgttggtcgatactcgatagtagtgggcctcggtcttgctttgcactactattcattcatagccatattgctactagccagtaaagggagtttttagtcttgagcttgtggtctgtatcgtaagttgtatagctttatccggtgcatcgtcgatgacctgttattgttattatatggtttattactgttatcc

SEQ ID NO: 10999 - DNA, 361 bp, Zea mays
  Clone ID: MRT4577_110027C.1
tccacgcgtccgctcttacccgtaaagactgctcgtagggacttttataccattgttccgcccaggggttgggggttggttaacacactcatcaactttatagagcgcatgttgaatgccttcctggtgttgccactcctcttggcataaaagtgagctacaaaatgcccccagacacttggcgaaactgattgagactatgaacccttcaaacaaacctggatggatcactataattacaaagatgggggcagagaacatgaaaatgaaactgcatcatctgatccgtgctgatcgcaaagctgaattaaatgacacatggattaatgatcctatgcattgaaacaccatccaagcccct

SEQ ID NO: 11000 - DNA, 369 bp, Zea mays
  Clone ID: MRT4577_110028C.1
tgcgtgtttatgtgcttggatcagcctcacgattcgtagtctgtggaggttacggcggagcctaataagaaggataggactcctaattctagaggtgctgtttcgggtaatttggcgtcggagcctgtgatggatcctaatgtttgagttgagcatcctcggctgtatggttctactcttgatgttattcattgtgcgcctattcttgttcgtaatcatctttggcatgctattgagcatcatggtggtctgtcgctgttgtcgcgtgtttgggcgacgaattaggcgatgtgtgagattagttgtcctgctgataagcatgatgctatgtctgatgctcgttctctgctggcgtctctctagcttaag

SEQ ID NO: 11001 - DNA, 372 bp, Zea mays
  Clone ID: MRT4577_110029C.1
agccgatgctctggatcgagggaggaaggaagcatggtaatgtgcacggagagtaccgatacaggtggtctgcatatgtctgctcgtcttgacgccttcgggctttgatctcgcgggcctggatttgaccaacattcagagctcaagtgcccctgcacttctagttcttcaggctggtaggctgcatcagcgcgtccgtgtcagcacagcaggccggcatcggcatgtgcaacgggcggggctgcaagcgggagtccgccgtccgcgcgtcgctgtggctgggcgagcgccagactgcgtccgcggccggcgggccggggcgggggcggcactgcgcgacaacgaagcctgaggctggcgttgatcatacgg

SEQ ID NO: 11002 - DNA, 341 bp, Zea mays
  unsure (1)..(341): unsure at all n locations
  Clone ID: MRT4577_11002C.1
cggccgctcgaggcggnctgggctgtggctctagcgcacagcgcgccgcggcgaggtatcggcatggactatggccatggcgatggcgaatcctgcacctcttccaaccttctcctcgcaatcccgagcattcaccccaaacatctcactgcgaagcggcagagctatatcgcgctcccgagccctagctctaaccgcaacgaccgcgtgctccatccgcctccgcgtgcgggccgccaaagactgctcgcccccgccgtcgtatccgctctctgaggttttcccctacgtcgccgcagagtggcggaccatcgcgaaggggtggaagtgagtgacgaaga

SEQ ID NO: 11003 - DNA, 403 bp, Zea mays
  unsure (1)..(403): unsure at all n locations
  Clone ID: MRT4577_110030C.1
ggatcgtcgaaccgaacaacatggagaaggtcaatggtcttggccggggccctggtttgggaagttgcaacggcttttgcaaggcaaatgccttgcccttgcccggggctgaagggttggaacggggctggccccggcctgacaacaataatggcccccggcggctgtaccctaacccgagtacctgaggagccggagtgcacccgctggcggggcccctactacgccggtgtggcagccgagcgccatgtccagccgctccgggcacagtgctgccagcagcagatgaagatgatggacgtgcagtccgtcgcgcagcagctgcagatgatgatgcagcttgagcgtgccgctgccgncagcagcagcctgtacgagccagctctgatgcagcagcagcagc

SEQ ID NO: 11004 - DNA, 218 bp, Zea mays
  Clone ID: MRT4577_110031C.1
ggggggaacttacaaaattattacggggcctggggcaaaccctaaaacggttaaaaacaaaaaaaaaccttcctcttaggggggaacagggcccgggaaccaacgcctaccccgaaattaaacaacccaaccccaactggggcttttttattccaaaagaattgggcgcacgggcacgggcgcaccgaaaacccttaaaaaaaaaacaggtggtaccg

SEQ ID NO: 11005 - DNA, 788 bp, Zea mays
  unsure (1)..(788): unsure at all n locations
  Clone ID: MRT4577_110032C.1
cttcccggctgtcgacggcgccttgcaggcttgcaccgacccgcggtcatggcgccgtccgtgtccaagatgctctcgacgcctccgtaccacgcatattacacctggcgtcgccgcctccttccccaagaaacagccgcgtcgcccaatccgagcccggcgagccgtcgaatcgcgccgccgctcaggtgttgccgttgcgcgtgcagccggagtccagcgaggcgcttcgtcccgatctgcgcctcggcatcagaccgcgcaggcgcgacgacggcggccctggtcgaangccgaggaggaagcagagctcgacggcccgccgatggtccagctgtcttcagacatcctccgtacggagcttagtttgctcaaggccgacgcgcccccggccggtggcgactcgtctctcggcatcaccgcccttgaggaccaagacagcgaggatggccgccacntcgggaggaagagaaaccgctgcttacccagctgccatgaacgcgttgtacgcggcctgcctncgctgggaacgtgaccgagcagctgtggaacttcacctggcccgccgccatcgccacgctgcaccccacctctttccccgtcgccgtcctcggttctctcaaagctcggnggggttcgcgtggcccgccttgtggggggggaatcttgtgagctcgctcccccggatcccagcgtacgatcactaacggtgatccagacggcggngcacctggggnccgcggcgatggtcacgtacgccttcaccgtcccccgggctcagctgcatc

SEQ ID NO: 11006 - DNA, 527 bp, Zea mays
  Clone ID: MRT4577_110033C.1
agcagtggtaacaacgcagagtactttttttttttttttttttttttttttttttacttttttttttttttttttttttttttttttttttttttttttaataccacaattcgcatacattaaatatcacaattcacaaaccttataaccataaaactttaaattcatcaaggctgggaaaagctcacatatcctttcaaagccccaatcccatttcaaatattcagggttttcgttcaacaaactttagggattcaattcaattcatatggcccatcatccataatgggaaaaagcccaggtttaaaggcaaggaaacatgccagggtccccaggccccaaaatggctacttggattattagagggggggttgctatctggggggggaggggggtaggcgaaggactccacaaaagccattcccggagggcccggcccccttggataagtgggagtttgggaaattgaagagaaaaaaggactcaattggggcagcattggggggaagggcggtcgaaaccctggg

SEQ ID NO: 11007 - DNA, 346 bp, Zea mays
  Clone ID: MRT4577_110034C.1
gagcacaacataggggaagggacatattattcagatgttggcgatcaaaaagcgaatacagctggtgataacgtggctacatccaaattgcgtgtaacatgcctagcatgcctaacatatgaccttacatcaagcatcccattgccgcttcacacatactggttgactcctttacatagacagcacaaatggatgactagcacgaatcatagttctacaatatctggtctcccgattataaccgctgaccagaggcttcttctttgacgcggggactgtggacacggtcaaaaccatggatttcaccccacacttgtggctaacgttggaacaacctgcatatctt

SEQ ID NO: 11008 - DNA, 370 bp, Zea mays
  Clone ID: MRT4577_110035C.1
taaggcatgtgcccattctcctccttggtaaagacaccattgggatatatcagcagctcccgtgtgtctatgaattgtgttagttgtattaccagtgcgtagtgaacaaaaagggagccagcttatgaggtgttgagatttctgaccaagaggtcgatttgggatttatgggagtctttcaatgaacctcttatagttcggtacctcagtaaccgggaactgggaacatggccacgttcctcgttccaggaacgttcgttccgttccaggaacgtgggaacaatctcgttcccatagtgttaaaacatagttttagtagcgtactgtgtaccacattcccgttcctcgatcccatctatccgggaacctg

SEQ ID NO: 11009 - DNA, 265 bp, Zea mays
  unsure (1)..(265): unsure at all n locations
  Clone ID: MRT4577_110036C.1
tcgcctgcattcaagtttgccccacaaatcctgtaaactttaatgttgacaatgttggggtggctaatctacttgggggtgggttgcacaanttcttctgtggttccgtggcgttgcgttctagagaaatatgtaatgcttgttcggttatgacatcaaaaggngcggtagaagtgcaatatgtatcgctaaaaattgctaccttttcattcacatttcacactggttatacctgtcaaagatctatgcccttcttttctattga

SEQ ID NO: 11010 - DNA, 231 bp, Zea mays
  Clone ID: MRT4577_110037C.1
ggcacccacagacacgcatagcccttttagcttaagggcctatgggtacttactgggacagggcgctaaggactcggagattgcaatagcgcacgcagagcacaatgatcgacacacatgtgatgacgtatataggctaaaagcattagccggcacatagatcaagactgatgcatgaaaagcaccactactacgtctacgtaagtctggacaataagtatatgatgacaa

SEQ ID NO: 11011 - DNA, 421 bp, Zea mays
  Clone ID: MRT4577_110038C.1
cccgaattctaattacatcttattatccgttaggggcaaacaacatgacttccttatgacaacctgaggtttactcttactgttagtgcataaatcaacaaagagcgccaattcccttgaataactcccaagatcgaagaaggcacatcttttgccttattgtctgaactattcttaaggactttcacctttaccttgttgaggcaatccaaactgggaacaggacaacaactactgacgatacttttaaaagagggcacacaccaaatacatctctgttgcaaaagggtcagaatccaacaataccctttttatgaaatctaagcctcttaaactagacttctatgcaaaggttgccaggtcttccccgaagaagtgttaccccccttcaagttggcacaaggattcaaaaaaacccttt

SEQ ID NO: 11012 - DNA, 294 bp, Zea mays
  Clone ID: MRT4577_110039C.1
aaaataaataaaaaaaaaaaatataattatataaaaaaaaaatacaaatcttccaaaggagagtaaacaaatttgggtgggctttcatccaccctaaatacatattttataaaggctcctaaactgattaaactcttcagcttcttaattcttccttacttcatttaatttgctattcttgtttcatatctgtatatgcatctaacttttttttaaaatttaattttttccttttgtgaacctatatcaaactttttttttttggattcatccctttatatctaataaaaataa

SEQ ID NO: 11013 - DNA, 465 bp, Zea mays
  unsure (1)..(465): unsure at all n locations
  Clone ID: MRT4577_11003C.1
gtgccccagcaacaacngggcagcagcagcatggaagcaacgctctggtaatgaaggcacggacgccatgctaccggacctctagcggagaaagagctactctcgagtactgtcccatctctcttgtcgtgagtcccgagatacaagactcactctgcttgcggcttcataaggccaaataggttatgcgaggctccggacctttgcggactcataccggaccttaaaggcgattcaccaaggtcttcaagagcggcataaacgcgacgccggtgatccagtgcagcaagggccccttcgacaagtacatgctgatcagctctattctgcgcggtggggaacgggacgtacaatgactgccccggcgccggagaaagaacacctgctccaaggagatcctcttccaaccctccaagaagtgggatgcttaagcagcagaataaccaggacgacgacccttttcag

SEQ ID NO: 11014 - DNA, 1117 bp, Zea mays
  Clone ID: MRT4577_110040C.1
aacacttccgcagctctggaattcggaggctcaggaatcatgatgcagcagcctcaggcgcatgcgtcggcacttgcggtggcgcacccgcacgatccggcgggcggggacgcgccgccgaagcaggtggctcaggcgatggagcggctgggccgtgcgggccgtctcatcgcagacatccggctcggcgcggaccgcctcctcgaggccctcttcgtctccggcgacgcgcccccgtacagcgtgcgccagcacgtcgacaggatggagcacattatcgtcaaggaggatgccgccatgcgcctctacttccaggacctacgcgccctcggcaggcaactagaggagtctggagttcttaatggggcccttaaagctcgaggcaattcatggggcttgcacatgccacttgtttgtccagatggtgctgttgtagcttatgcttggaagcgacaactagcgggtcaggccggtgcatctgctgtggacaggactaggttagctctcaaggccttcactgaccagaaaagaagattcttccctcatctagaagatgaagttgttagccatctccatgatggtgaacctggtggcaccaaaaagccaaagttgtttaccagcaatggagatctagaggaaaaatctttgtctgacatactgaaaaaattgccagctatcagactctgtttacgaaggtttgcagcaaatgcccaccgcgtccgatgatggacaagtctttggctttgctgttgcctcctgtccaccgcccctatcaccagacttcaaatattggaccatatcttcaagaggcctaccacattggatgttcctcctacgacggctagctggtgcttctaagaaacacccgagactattttggtagcacaggatgtttctcgcgttgtcatcgacgaagcacgtgtacaacagtccttgtgtgtaaaacattgtcctttctggaatgtatccaacccatcaggtgtcctttttgtactttggttagtgtatgcatattgtcatgtgctgtacaaatatattagcattgctactttattacgggtggggcctagcccaaacttgatacagctaggataaagttagagcagttgctacagtt

SEQ ID NO: 11015 - DNA, 273 bp, Zea mays
  Clone ID: MRT4577_110041C.1
gggtaagtgataacggtaaatcatgtttgttttagtccaacgcgaatcgataccatactaaaatttggtgccggacttttcaaacttgttaccgaccgtaattgagtgtaaaccggtaccattaccctttacgttacatttggggaaccaaacaggacccaatttttttcgggattctggccagagttaaaatgctaatttttacaacattttttcaagaagagggctcggcgagctgtttgataatgttaatagaaaatactcctatgtttt

SEQ ID NO: 11016 - DNA, 859 bp, Zea mays
  Clone ID: MRT4577_110042C.1
cattgggtacctcgaggccggccgggaaccttcggcagctctggaattcggaggctcaggaatcatgatgcagcagcctcaggcgcatgcgtcggcacttgcggtggcgcacccgcacgatccggcgggcggggacgcgccgccgaagcaggtggctcaggcgatggagcggctgggccgtgcgggccgtctcatcgcagacatccggctcggcgcggaccgcctcctcgaggccctcttcgtctccggcgacgcgcccccgtacagcgtgcgccagcacgtcgacaggatggagcacattatcgtcaaggaggatgccgccatgcgcctccacttccaggacctacgcgccctcggcaggcaactagaggagtctggagttcttaatggggcccttaaagctcgaggcaattcatggggcttgcacatgccacttgtttgtccagatggtgctgttgtagcttatgcttggaagcgacaactagcgggtcaggccggtgcatctgctgtggacaggactaggttagctctcaaggccttcactgaccagaaaagaagattcttccctcatctagaagatgaagttgttagccatctccatgatggtgaacctggtggcaccaaaaagccaaagttgtttaccagcaatggagatctagaggaaaaatctttgtctgacatactgaaaaatttagaacatgaagcatctaacataaaaatattcacatactggcatctggattggtcaaaaagagcttcatcattagcatctctgttggatgatgactttgtggatccatctaaagagctgaacctgcaaaatatggacaaatcgagatctgatgctctgacaactacc

SEQ ID NO: 11017 - DNA, 749 bp, Zea mays
  Clone ID: MRT4577_110043C.1
cggggtgctctggcaactcccatagaccaagtcgcagttattgaattgctggttccttcagtatttagagctgtagtgtcattgcatcctgctggatctactgatcctgatgcagtggcattcttttctcccactgagggaggaagctatcttcatgcaaggggcacgtcggtacataatgtgtttaaacatgtaaaggaacatgctgacaaggcattgcagtacttcatcagtgtggagccgagtaaagcactacctcttcttttgcgttggattgccagctatcagactctgtttacgaaggtttgcagcaaatgcggacggcttctgatgatggacaagtctttggctttgctgttgcctcctgtccaccgcccctatcaccagacttcaaatattggaccagatcttcaagaggcctaccacattggatgttcctcctacgacggctagctggtgcttctaagaaacacccgagactattttggtagcacaggatgtttctcgcgttgtcatcgacgaagcacgtgtacaacagtccttgtgtgtaaaacattgtcctttctggaatgtatccaacccatcaggtgtcctttttgtactttggttagtgtatgcatattgtcatgtgctgtacaaatatattagcattgctactttattacgggtggggcctagcccaaacttgatacagctaggataaagttaaagcagttgctacagttttctagctagctaccttattctat

SEQ ID NO: 11018 - DNA, 1676 bp, Zea mays
  Clone ID: MRT4577_110044C.1
gtacccggcacgagggccgggagtctcctctcatgtattaagctttgaaatgagtctccttaattgacgagtaatttggttctatactcgatgccctatgatgcaatcccccgaattgggcttactactttaattactacacttctgcagttctggaattcggaggcctggaattcggaggcccaggaatcatgatgcagcaggctcaggcgcacacctcggcacttgcgggagcgccgtcggcgtcggcggtggcaccgacggtggctcacccgcacgatccggtgggcggggatgcgccgccgaagcaggtggctcaggcgatggagcggctgggccgtgctggccggttcatcgcggacatccggctcggcgcggaccgcctcctcgaggctcttttcgtctccggcgacgcgcccccgtacagcgtgcgccagcacgtcgacaggatggagcgtattatcgtcaaggaggatgccgccatgcgcctccactttcaggacctacgcgccctcggcaggcaattagaggagtctggagttcttaacggggcccttaaagctcaaggcaattcatggggcttgcacatgccactcgtttgtccagatggtgctgttgtagcttatgcttggaagcgtcaactagcaggtcaggctggtgcatctgctgtggacaggactaggttagctctcaaggctttcactgaccagaaaagaagattctttcctcatctagaagatgaagttgttagccatctccatgatggtgaacctggtgacaccaaaaagtcaaagttgtttaccagcaatggatatctagaggaaaaatctttgtctgaaatactgaaaaatttagaacatgaagtacctaacataaaaatattcacatactggcatctggattggtcaaaaagagcttcatcattagcatctctgttggatgatgactttgtggatccatctaaagagctgaacctgcaaaatatggacaaatcgagatctgatgctctgacaactaccatagaccaagttgctgttattgaattgctggttccttcaatatttagagctgtagtgtcattgcatcctgctggatctactgatcctgatgcagtggcattcttctctcccactgagggaggaagctatcttcatgcaaggggcacatcggtacatcatgtgtttaagcatgtaaaagaacatgctgacaaggcattgcagtacttcatcaatgcggagccgagtaaagcactacctcttcttttgcgttggattgccagctatcagactctgtttacgaaggtttgcagcaaatgcagacggcttctgatgatggacaagtctttggctttgctgttgcctcctgtccaccgcccctatcaccagacttcaaatgttggaccagatcttcaagaggcctaccacattggatgttcctcctacgatggctagctgatgcttctaagatgttcctgacattgtcattgacatagtacgtgtacaacagtcctgtgtgaaacaatgttctttttttttttggaatgtatccaacccattaggtgacatatgtatagaaacgttactggttgcttaggtttgtcatgtgctgtacaaatatattagcattactaactttattacgggtggggcctagcccaaacttgatacagctaggat

SEQ ID NO: 11019 - DNA, 753 bp, Zea mays
  Clone ID: MRT4577_110045C.1
tcgaagccggccgggcatctgcccaggattcgtggcagccatacctccctgaccctccttgaatacatatacgaggccaccccctagccatcaaccggagagctctgggtcggatgcccctccaccacggaccggtgcagagagaaaaaaaaacctccgcctaaactgcgttctggattcgcttaggatttggggcatgttgtttggccactgggatctccatggtgtgcgtgacgtccatgcatgggttgcgagcgtcgagatggactcacggctgggcaatttcttgtcagaatttgatcgttgtcgccatgccgctgcactacgtggcgaaaggtttcgcaactccgaggaccggtaagaccctctctcaatcctccgcttggtccttcttgtggcgattgaattcgttggtttgcggatcgggcagcggggcatcggcatggcctcgccggcgagcagcgccgccatggggtgccggtgcgtctctgaggctctggccggaggagagagagaaccttgtgaccgtcgattcccaatggacgatagggattagagcttggcatatcccttcgtacgtgcgatccgggccgttgatctcgggagcaaggatcgtgatcatgtactggttcgggtatgtgggtcatttaatcaggaccatccatatttgatcgggcagctctaggtccccaatacctcttcgccgttgcctttttgctaaagagcccctgtggatcatacaaatgaacccgc

SEQ ID NO: 11020 - DNA, 424 bp, Zea mays
  Clone ID: MRT4577_110046C.1
cacagaagaattgggtatctaattttgcttgtcccatggagattttgaaggaattctaccagcatgagttgacctcatgaaaacctccctcatatccaattcttgtgtttttcctgcacctcgtccaaacatttgttcttgcgttttttttgggtttgttcgatctataggctatagctacaggattcaagatactacggcaatcaattcctatgtctcgagatttttgtgccagagaggtcataatctgttagagacgaaaacaacaaagaacccaactcagcttttttcaagcacatatcacctccttcctatttacctgtacaaatgcatgcaagctcccaaagacgcggtttcttccaatccatctgctcgacggtccacggatcgtcgcctaaactagtggattctgatccgggatacc

SEQ ID NO: 11021 - DNA, 412 bp, Zea mays
  Clone ID: MRT4577_110047C.1
gacaccgttacacccaacacaggtctacgagatgctgtcccttcacaagtctaaaacgtgggataacctaaagagatatgaaacccaaaccactgaccacagcgtcctgttaacactctgctatggaactttctctcatactcctgcacggatcttcattcctcaaaacctagcacctgagcttcatgattccattacagaatacatcccaccactactgactgataatccactacaaagagctcgtaatccccaatctactgctcaactacgccaaaaacatcatctaggaattgctccataccgactggatctggcggcatatgacactataccaagtcgcacgcacccatgacacttctttttcgctgtcctatatacaactgcttcttcgagtacgcacctacacaat

SEQ ID NO: 11022 - DNA, 374 bp, Zea mays
  Clone ID: MRT4577_110048C.1
aaaaaaaaaaaaaaaaaaaaaaaaatttatataaaaaaaaaaaaaaaaaaaggggggatattaaaaaaaaaaaaaaaaaaaaaaaaaaaaaaaaaaaaaaataaaaaaaagggccgccctttttgggggttccacctttccttccccgtgcttgcccctttatattttttttttggtgtcccctattttaatttctttgcccgtgtttttacaccgtcgtaattggaaaacccttgcctaacccaaattaattgcttttggggaacatccctttttccccctttggttttttagggaaaagcccaacccttgttcccctttccaaatatttgcccacctttatggcaaattggcccccccccttaaccgcccct

SEQ ID NO: 11023 - DNA, 253 bp, Zea mays
  unsure (1)..(253): unsure at all n locations
  Clone ID: MRT4577_110049C.1
atggaacgctaccattttaagtggtttctttttttcttgatgacctntgagattaagctcatgtcatacctttctctcccctgttggcttctttttgaattgggtcctaacttgggtgcgggttccccgttgggccttttcctccctgcctcggggctggttggctcgcccggtcgcgtcgctttcggctttggctcgtccgggccggcggcccctttgttcggtgcctcctcgctacgggctgggctgctgg

SEQ ID NO: 11024 - DNA, 345 bp, Zea mays
  Clone ID: MRT4577_11004C.1
tggcgctatctacactacgatttagcacgggaccatggggccggagaggagaagctagctaactaggagcaactctgatggtgagagtgcgagaggaggggatctgcagccggcgctggatggaaaaggagagagaaacgacggggggtacgacggagctacagcggatcgagaacaagagcaaccgtaagacaactgaccccaagcgcccgagcgatctgctgaagaaggagcacgagcactgacggctctgcgacgaccgagctgcgcacagggtctgctgcagccgctgactgctataccagctctgtacgcggactaagcatgacgagaacacttgagagg

SEQ ID NO: 11025 - DNA, 286 bp, Zea mays
  Clone ID: MRT4577_110050C.1
aaaaaaaaatataaatataatataaatacaaaaaaaaaaaaaaaaaaaaaaaaaaaaaataaaaatggtaaaaatcaaccattggtgtgattcctaaacttattcacttattccttacatattattattttcgttggtcgtcttatatattcccaaacttccttgtccctccttttacatctttttcacttttttatccctccaatttcccatttctctagcctggttatactttcattgttcgtcttcctttccctattcctaaaaggttttcacccttcgttct

SEQ ID NO: 11026 - DNA, 229 bp, Zea mays
  Clone ID: MRT4577_110051C.1
gattttctttttctccgcggacgcgaaagcagggggggggcttccaaaccacatcctgcaagcccaccaaacatgcctaaagggagacggatacaagctagacatattgatcaacaaagctgttcccagcccaaaaacgttatgagacaacaatcgcacaccacaaaccagccggaactcaagaggaccaagccagctgggcctaaaagggacctgaaatacacaaatt

SEQ ID NO: 11027 - DNA, 286 bp, Zea mays
  Clone ID: MRT4577_110052C.1
ggttgggggggaaaaaaacaatcaataaattgttgatttttaggaaaaacccctcggtgtgagggggccaccattgtggacatcttatatgatgtcaaaaaaaaggggcctcccacaacgggggggtgcctcctcaagacaggatgcatcaaaaaaaactgctggtatggtagcaattattgttgctgatggaaggaggcgaccaacggggggttcaccaccaacggaggaattaactcctgttgctgttgtaggtacgccccagaggaggtcggaataatttgtt

SEQ ID NO: 11028 - DNA, 754 bp, Zea mays
  Clone ID: MRT4577_110053C.1
cttgtttctcccctcccctcccttcttcccttccctctcttttttttttttttttttttttttttttttttttttttttttttttttttttttttttttttttttttttaagggggggcctttttttttggcccaaaaaaaaaaaacacgggggtttttccccccccttaagggggccccccccccctttttttgaaaaaaaggttgaaaaatttcggggtttggggccctggctttccccccccccccggggtttccccccaggggattgggttattttttcggggtttaaatttcccaaacccgtcccccgggggctttaaaagaacccccaatttggttaaaaatttttccccctccttggggggcaaaaaccgggggggggaacaaattttttttccccccccccccctgggggggctccccccttttttgccccccggccccaaatttgaaccccccccccctttcggggggaaggggtcttttgggaattttggggccacaaatttcgttcccaattttaccccccaccccggttttcccccaaaaattgggtttccctaaaaaggctttttttccctcggggaccctgggacaatttttgaaaccgggttcaaaaatttccctttctttaattttttcaagggtttttccaccaccggccaaaaaaaagggtgtgccccggttttttaagcccttgaccaaaaaacccctttttttggttgggaaaaaaaatccacccccttttttt

SEQ ID NO: 11029 - DNA, 129 bp, Zea mays
  unsure (1)..(129): unsure at all n locations
  Clone ID: MRT4577_110054C.1
gtggggaangttcgctctctgcccgcgtccacttcctagggttcttggaacgcccgnccgtccgtccggggaaggagcaggatttaggtttagatgagggaggtggtgctcaacgaccgcctatggaag

SEQ ID NO: 11030 - DNA, 554 bp, Zea mays
  Clone ID: MRT4577_110055C.1
atacaagactacaagagtgctaagattactcctggtctttacatactaaggcaaggccgggccgacaaaaatcgaggccctatatgaaactacacaataaatcatttattctttgtttctttttttaaccaaattcatattttctctactgattgattaaagatatgataacgatagttggatcttaaaacactagacatctagtaaattaataaatatgcacacaaaagatgaaaataactattaaactattataattattaaaggataagataacagaatacaagaataaaaaattggtaaataacttatacggctggctggctaactatgtttgcagcccttcccctctatttaggcatgtcgctaacttccctgcttgctggattgatgatgatgtagatgacacgacggcatgatgtacgtgggcaagatgacgagttactgtcttggaaacggagataaattgacatgttttgctttcacgtggctggtggttacggtcctaagtagttgcttagaaaatattttcgggcccataaaaaatagcacta

SEQ ID NO: 11031 - DNA, 1576 bp, Zea mays
  unsure (1)..(1576): unsure at all n locations
  Clone ID: MRT4577_110056C.1
ctgttgtgcacatctgagtttgaaggccaattcacaacaaaaccctagctactgcttcgtctgccgaattccccctccgctcgcttcgcacgccgcccgtcgccgcggcggcgtctgcgattgtccctcccgctgcaaggagcacatgcttctcgccgcgccgttagcccgccgccgccaccaccggttcaccttcagctatgtcttctcaggtcgacaggcgcagccagtccgccgggaagcgcgcccgcaccgacggcagccggcgtgaggacgactgggtttgccccagctgcaagaacgtcaacttcgccttccgcaccacttgcaacatgcgcagctgcaaccagtccaggccagcagatcacacggccatgcaaaccccgcctcactatcccacgtcagggggttacatgggccctgggacgccaccatcgatgtaccttggtgggggcgctcccccatatggatcctcaatgtttaatgggcctgcggtgacacgctatggtattccgcaatttcctgggggttctgcgtattcatatggatatggtggtcccataccaatggggagcccctacgggccaatgcaaattgctgggccaactccatactctggtggaactatgatgacagcaggtggaatgtatggaattcccatggacaggtatgggccaatacctgctggtcctggtccaatgggcacaagggctggctcatattctgatgaaggttctcagaagaagcctgcaggagctggccgtgataatgattgggagtgtccaaattgccataacatcaactttggctttcgcacagtctgtaatatgagaaagtgcaacacacctagacctgcaaaccagggatctaagtctgatggtttaaggggctcaaaagcaaagatgccagagggcagttggaagtgtgagcagtgcaataacataaattatcctttccgaacaaaatgcaatcgtccccaatgtggagcagaaaagccatcacaaacaaacaatgtgaatggttcagcgacagatcaggacaatcagtgagtcctaggacagtaatgagggtcaagaaggtccagcgtcgtcgtcaaggttcagtctgaatgtggggtacatctctgtcagtagtcgctccagttgttacaagtttcttccccttgggaccttagtcgagttggcaatggagtcttgtcttccctaatcactacagataatggtcaagaacatcgttcttgcctttcctggctgagcttggttacttgtctttgttactacttactagtactctgggtaaagtgccatctgttatatgaatgccttttagttatctgtgtcatagaatatcactcatctgttatgaagtatcacaaccgtcatcattttgtcttggttttgtttatgtgctcttgtgattattcttctgtatacctattacctcatgctaatttaactactgttgccttacatgaagaactttcnaacatgttggttgttctgttactctattacattttttgggtgggaatttatgatttctggtgatgtgtctacatggattaaccccgtatgat

SEQ ID NO: 11032 - DNA, 501 bp, Zea mays
  Clone ID: MRT4577_110057C.1
gaagcgctgacgccgttgcatcaaacaaccagcactgtgatagtactaattaacgtccaggacccgccgtgaagtgtcgggcactgaaacacatactacttacgccggggaagccaaggtcaaacacttccgcagcccactgattttacaggaacttatcttagtacttctgacactgaccacatgtggctaatcattatggacataataggcctcggcggcagaggaagtgtaaataattcttccataaacttctgacgtagcaaatgtaacctaactttaaggcactattagggacgccttgcaaatcaaaaacttaatgtttctgctgagcctcctaaagccattataccaatgggtccacagctttcacgaaagattgcttgtccacgttttccataacctaccaggaaccacaaaaggacatccactttcacttaggacattttggaaatgccgacttattatcagatgaggaaacagcttcatgagattagccaa

SEQ ID NO: 11033 - DNA, 588 bp, Zea mays
  unsure (1)..(588): unsure at all n locations
  Clone ID: MRT4577_110058C.1
gnttgggagtgtccaaattgccataacatcaactttggctttcgcacagtctgtaataagagaaagtgcaacacacctagacctgcaaaccaggnatctaagtctgatggtttaaggggctcaacaaagatgccagagggcagttggaagtgtgagcagtgcaataacataaattatcctttccgaacaaaatgcaatcgtccccaatgtggagcagaaaagccatcacaaacaaacaatgtgaatggttcagcgacagatcaggacaatcagtgagtcctaggacagtaatgagggtcaagaaggtccagcgtcgtcgtcaaggttcagtctgaatgtggggtacatctctgtcagtagtcgctccagttgttacaagtttcttccccttgggaccttagtcgagttggcaatggagtcttgtcttccctaatcactacagataatggtcaagaacatcaatttgtcatgtggtttggtcaagaacatcgttcttgcctttcctggctgagcttggttacttgtctttgttactacttactagtactctgggtaaagtgccatctgttatatgaatgccttttagtt

SEQ ID NO: 11034 - DNA, 1528 bp, Zea mays
  Clone ID: MRT4577_110059C.1
gtttcatagagggccccacgcgtccgcccacgcgtccgcccacgcgtccgaagatgctaagttggctccgacgcttccctaacgatgtgatccataggaaggggggcagctcgggccggaggacctcctcctccacctcctggaggaacaagagcagcagcagcttcaccgcgcggatcatccgttgtgcgtcctccgtcgttgacacacaccaccagcaccgtggtgatgatgatgacgacgatggcgatgaagacgacgagtacgacgactgtcgtctaccgtcgtcgcctcctaacaacaacgctagaagaaacaccaccaccactgctgtcatctcggcccgagccttctccttccgcgagctagccgatgccgcaggaaacttccgccaggacaacctcatcggagagggaggcttcggtcgcgtctacaaggcccgcctgccaactcgggtgcagcatgctgctgatgacgccgatctgcagggccttccggtggccatcaagcagctggaccgcaatggcttccagggcaacaacgagttcatggtggaggtgctcatgctcagcatgctgcaccaccccaacctcgtcagcctcgtcggttactgcgccgagggcgagcagcgcctgctcgtctacgagtacatggcactagggtccctcgaggaccacctgttattgctgcgtgacgatggccatggcagccctttgccctggcgcacgaggatgaagatcgcgctcggcgcggcgcggggcttagagtacctgcacgaaagcgctgtcatctaccgggacctcaagtcctccaacatcctcctcgaccaagactacgcgcccaagctctctgacttcggcctcgccaagctcctccccgccccgcgcaccaccgactcctcctcctcctcctcaagcagcagcagcagcggcggcggcaaggtgatgggcacgtatgggtactgtgcgccggagtacttgcggacagggaagctcagcgtcaagtcggacgtctatagctttggggtgctactgctggagctcatcaccggccgtcgagccatcgacgccagccggccggatggcgagcaaagcctggtgggatgggcggcagggatgtttggtgactccacgaggttccatgagttgctggaccctcggctggtgatggcgattcgaggacggcctacagcatcacagctgaagcaggccgtgggtgtggcgtcgatgtgcttgcaggaacaccacgccctacgtcccgtcatggccgacgtcgtcgtggccctttccttcatcgctaatgattcccctgcttctcccccctgctagctcagctcgatcaaaaaaaaaaattgcaccacaatctctcgctcctcctcattcctctgtgtatctcactttttcttgttgtaaacattgagaagaagaattacatggcaaattaaacctagttatatttttcattcacggattaaaatgttaatgcatgcgtatgtatcacgtacgtatttgaaatagaacctaactag

SEQ ID NO: 11035 - DNA, 316 bp, Zea mays
  Clone ID: MRT4577_11005C.1
aggatacttacttagaaagaaaagagtacgctagatgttcttaaacacatcaacagtttttgaccttaaaaaacaccgtccgcctccatggcatgcaaatgtgccgggggcggggcaaattcccaaattaagagggggctatgacacacacgcccccacacattctggtggattaattcaaccaaaaatcgacttctaataacgatcggagggcccccccctggacatacaggtgttccggttttatttttttttttacgtatttcccaccctgtattctatatttcttggcgtgctttacttgacacggatgggg

SEQ ID NO: 11036 - DNA, 867 bp, Zea mays
  Clone ID: MRT4577_110060C.1
cctcgaggccggccgggatacataaattatcctttccgaacaaatgcaatcgtccccaatgtggagcagaaaagccatcacaaacaaacaatgtgaatggttcagcgacagatcaggacaatcaggtctgtgtttcagaaccttcagtatggtcctcaacatttgctgcacctttatttagaacattaacttgcatgcctattatatatttaatactgtttttaatcattttgttgccctcatgtttgattgcatatagcttgatttatcatgttacagtgagtcctaggacagtaatgagggtcaagaaggtccagcgtcgtcgtcaaggttcagtctgaatgtggggtacatctctgtcagtagtcgctcctgttgttacaagtttcttccccttaggaccttagtcgagttggcaatggagtcttgtcttccctaatcactacagataatggtcaagaacatcaatttgtcatgtggtttggtcaagaacgtcgttcttgcctttcctggctgagcttggttacttgtctttgttactacttactagtactctgggtaaagtgccatctgttatatgaatgccttttagttatctgtgtcatagaatatcactcatctgttatgaagtatcacaaccgtcatcattttgtcttggttttgttaaggttgcgttctggtcgttgtttttcgatttatggttggtttgttattttacaggtgttatttctgaaacctttctttccttccatagtagtttccttagggatgttgcaacttaatgaggagctctactgaaataaattaggagattatttccctgttagggctagtttggtagccagggaatttggagatagcaaggga

SEQ ID NO: 11037 - DNA, 1867 bp, Zea mays
  Clone ID: MRT4577_110061C.1
aagaccctagatactgtttcgtgtgccgaatacccccttcgctcgcttcgcacgccgcccgtcgccgcggcggcgtctgcgattgtccctcccgctgcaaggagcacatgcttctcgccgcgccgttagcccgccgccgccaccaccggttcaccttcagctatgtcttctcagcgaggtctcacgaattagtgcatgggtttgcaggtcgacaggcgcagccagtccgccgggaagcgcgcccgcaccgacggcagccggcgtgaggacgactgggtttgccccagctgcaagaacgtcaacttcgccttccgcaccacttgcaacatgcgcagctgcaaccagtccaggccagcagatcacacggccatgcaaaccccgcctcactatcccacgtcagggggttacatgggccctgggacgccaccatcgatgtaccttgggtgggggcgctcccccatatggatcctcaatgtttaatgggcctgcggtgacacgctatggtattccgcaatttcctgggggttctgcgtattcatatggatatggtggtcccataccaatggggagcccctacgggccaatgcaaattgctgggccaactccatactctggtggaactatgatgacagcaggtggaatgtatggaattcccatggacaggtatgggccaatacctgctggtcctggtccaatgggcacaagggctggctcatattctgatgaagattctcagaagaagcctgcaggagctggccgtgataatgattgggagtgtccaaattgccacaacatcaactttggcttccgcacagtctgtaatatgagaaagtgcaacacacctagacctgaaaaccagggatctaagcctgatggtttaagagggtcaaaaccaaagacaccagagggcagttggaagtgtgagcagtgcaataacataaactatcctttccgaacgaaatgcaatcgtccccaatgtggagcagaaaagccatcacagacaaacaatgcaaatgaaccagcggaagatcaggacaatcaggtctttgtttcagaaccttcactatggtcctcaacatttgctacacctttatttagaacattaagttgcatgccttattaatatatcactactatttttaatcattttgttgccctcatgtttgcttgacatagcttaatttatcatgtacttacagtgagtcctaggacagtaatgagggtcaagaaggtccagcgtcgtcgtcaaggttcagtctgaatgtggggtacatctctgtcagtagtcgctccagttgttacaagtttcttcccctttggaccttagtcgagttggcaatgaagtcttgtcttccctaatcactcactgtcttggtcaagaacatcgttcttgccttccttggctgagcttggttacttgtctttgttaacgcttactagtactctgggtaaagtgccatctgttatatgaatgccttttcgttatctgtgttcctgctgctggagcactgacacagtgacactgcggattggcagcagtccagtgagtttcaggacagtcttacaaactgatgtggctaccatttcgcatcggaaaacaaggtgaggaatttgcttatagtgtctcgagcgtcttgagtcttgccagatctgatttggaaattcgatatggtgttgagcattgtgatagtcagagtcaggatcttttaatgtagccatttcagtatttgctcggagtgatgcttgtcttatttttattcttcctttattcttttttctcattatgttctgtgtctagcactgttatttctcatcctacccttaatgtacatttcgtctttttcatttcccccccccccccccacgc

SEQ ID NO: 11038 - DNA, 390 bp, Zea mays
  Clone ID: MRT4577_110062C.1
tcggtcggaggcggaacgatcagcggctgggggggggttgtggcagggcgctctgcctcgccgccttcgccagcgccaagtcccggaccagcggctacaacccggccctcatcaagaagcaaaaggagttctacaagaatgctaaattaattagcaagtacaaaaagacaaagaagcaacaaagtcagccaaacaaccatccagaaattccagtccatgaggatggtggtgacactgcccgatatgtgccaaaaccgcataacaaagggaagaagcccactgggcatagcttgaaggaagagtttgagaaaaaacctgctgaggaggaaaagggctaagaagagcgtgatgcaatggttcacgcaaagagggagcaccgggagaagtctg

SEQ ID NO: 11039 - DNA, 281 bp, Zea mays
  unsure (1)..(281): unsure at all n locations
  Clone ID: MRT4577_110063C.1
cggncgcgtgggtaagccaccaaaccttgctatgcccgctcctccccgcgctactggctcagcacgctcgtgctccgtggggaccatggnacgctgagctgctggccacctgccaggcgctaagcgcaagcgccccgacgccgacatcaccggcgacgccgacgccgccgccgccgctgccgctgccgccgccccggtcgccgtcgacgaggcctcggacgccgaggtcgaggagttctacgccatcctgcggcgcatccgggacgccttccgctggttgt

SEQ ID NO: 11040 - DNA, 270 bp, Zea mays
  Clone ID: MRT4577_110064C.1
agaaccatggaggctgtaccagagaagaaaaagaaggttgccgctgctccaggaacccttaagaagaaaaaggttcctgcggtgccataaccccttaagaaaaagcgaaggaatttcgcagagtttaaggtcaagcgcctgaggaagaagtttgccctgaagacactgcgagatgcaaggacgaagctcatctatgagaaggcaaagcactatcacaaggagtacagacagatgtaccggactgagattcgcatgggctagtatggcgag

SEQ ID NO: 11041 - DNA, 1044 bp, Zea mays
  Clone ID: MRT4577_110065C.1
cattgggtacctcccggaaaaaaaaaaaaaaaaagaaaaagagaagaatcagttccatttctctcgtttgggaggaggaggaggaggcgcgcgccggtgcccgaccgtcgaccagccgctacgacgcggcaccaggataggtgctcctgagctacgaacccacaccccacggccaaactgttgcgtgcgccccggccttagcatgaggtggccgctggcgatctcgactcgccgccgccccctccttttcgtccttctcatcgccctctacacgattcctaggacattttcatcgaggcttgtcacactcgatactgttgagatatttactactcatgaatggtttgccaagccaacagtggctttccggtgcaatggagcaaacaaaacatatctgccagatgtaacggaggcgcacacgccatatacctttaagggtgaagaatcatggcagcccttaacagagcttccagaaaagaaatgcaagcgatgtggtttgtatgaggagggcacatttaagcctgatgctgtcttcgatgaatgggagatgtgttcgagtgatttcaagggcggaaaatacacccgctttaaggaaggccagttcaatgcaacattcctatgcccaaactgcactgcctctactggacatggaaaccctggaccaagcgaagatttggaaactaagaagacatcaattgctgtcatcataatagttagtgttcttgcttcagtccttgtcgtcactgccttgttcgggggcttcaagtactggcagaagaagaagagggagcgagaccaggcgcggttcctcaagctctttgaagagggagatgaccttgaagatgagctgggccttagtaatgaattctaaaatagtgcgtgcagtcttacttccgatgtttccagatgtaatttccacgtatgatgtatagaatgtgtgtttttggcgacctcctagtagcttttgcagagggagtgaatcttgcaacagttagcacaagccccgtaacgtacatatataaaagtgcaaaaatgaatggattc

SEQ ID NO: 11042 - DNA, 1199 bp, Zea mays
  Clone ID: MRT4577_110066C.1
gccggccggattcccgggtcaccaaccacaaccagcgtcagctcctccacgtacagtacataataagctaacagtccattccgtgcgcagccacaaagctagcttatttcccttcccttcacgcggcaagccgcggccggccttccgccgccatggccaccaccaccgctcccgtcctcctcgtcttcctcgttgccattgccacgtccgtcgccccctcaccattccccatcctgacgatggcggcggacgcggacaacggcaccacccacctgagcttcttcatgcacgacatcacgtcgggcgccagcccgaccgcggtgaaggtgatcaaggggcccggcgcggggtccacgccgacggcgccggcgctgggcatgacgttcggcgacaccatggtgatcgacgacccgctgacggaggaggcgtcgcccgcgtccgccgcgctgggccgcatgcagggcttctacatgctggcgtcccagaccggggcggcgcttatggtgtgcgccaacctgctgctcacgtcgggggcccacaacgggagcacgctcgccgtgctgggccgcgacgacaccggccaggacgtccgggagatccccgtcgtcggcggcaccgggacgttccggatggccacgggctacgtgctgtggaagacgccggatgggatcaacggcaccgacgccaccgtccagctggatgtctacgtcaccacggacggcaacggcaccacggacgccggcgacgccgacggcggaggcggatccccgtccgcagggtcagggtcgtcggggtcgtcgggaggctccaagtccacctccggtgccgagagtaggaggaggaggatgaccggcgggtgggtcgtcgccgtagtggttgcggtggttggatccttctgggtttggtgagcaacgacctgttgacgaaggatgggggtgggtgggtggtgtgtgagtggggtggtggtcccacatgctggtgggtgagagtgggtgcatgtgctctgctgcggcatgtcggttgccggcatcattcctatctatctgtattggacttgttctagagcttttgcttttcgcaaaaaaaaaagacatgcgggtcattatgttaaagtcagaagagttttctttacaacgacgatctttatgaactgttaaagatatgagacaaaaaaaaaaaaaaatagcgagcatcatcgt

SEQ ID NO: 11043 - DNA, 222 bp, Zea mays
  Clone ID: MRT4577_110067C.1
gaaagggaagcagcctgggggactttgtttccacaggtcaagtgtgtaaaacctgagagacgatcagttgtgcgctgtcataacactctagaagattacactatcgtggtcccttatcgaggagtttacacttgtaatagctgtcggcagacaagtgtttgattcacacaagatatatagatccgttcttttagccggctataaaaattctgattggtttgc

SEQ ID NO: 11044 - DNA, 503 bp, Zea mays
  Clone ID: MRT4577_110068C.1
aattctataaaaaacacgcgaaagcggaaggtctcaaaagagccaaaacaacaaccagcttaatattgtggactgtacacagctgacagctgccgatggcgctctgatgttcaaaagggaatcctgcggggtaagacacggatacccgtacaggacggttgacacggcttcaacaaagtacaaggcccttacgggtacagctgttggagcataaaaggagagaaagattgccacctgaggctcatactcatggacatgaaacaacataacctagtgcttgtgcacaggattgcatttctcaggtaacccacaagactcaattctaggggcacagctggccaaatgagcctagaaattatgaggatatgcggaactcttttctatggacggacgatcatatcactcatgctgcagaggtgcagagattcacctaacccagagatatcagcatcatcagagacactgacaatggcccaaggaactgactaattccagaggaagaa

SEQ ID NO: 11045 - DNA, 194 bp, Zea mays
  unsure (1)..(194): unsure at all n locations
  Clone ID: MRT4577_110069C.1
ttcgtttattgtgtggnaccttctttgttttcttgtgtgaaaactaaaaagttctttgctagtttcaaatctatagtggttgataactaataggacaatagatggagtgttgagcttggtcatttatagggtaggcacatcatcattatatcgtgatatgtcaatgctgttcatgggtggggggcttntgaaaa

SEQ ID NO: 11046 - DNA, 333 bp, Zea mays
  Clone ID: MRT4577_11006C.1
aaaacaaacggggcctaaaaattacaaccgggcctttacaacatttacaaaaaaggggacaaaagggggacccaagctggcaacccttttttatccggcccgataaccgggaaaattccgggtaaattaccatccgtttttcccccccacaaaaaaaaaggtcctcccctggtgttcccaaaattaattgggccttataataggccccatccgttgggccaatttttgaccccgaagagggggggttttttaacggggggggcgggacaaattccttgatctgaaacttgggctcccggtttggtttaaaaatggttgggggggggggggggg

SEQ ID NO: 11047 - DNA, 389 bp, Zea mays
  Clone ID: MRT4577_110070C.1
gctttagaccacgagctgccgcccttatgtttctgttggtggtaaaaaagacagacatcctgatcagaatcaccctatcaagcgtggtgacacgatcaagatatccgcgataaacgggcccttttcccacagtggcatgctgttcccaggtgctctagctagatctacccctggagaaccggattggcgatcgcttcagtcgcctccttcagtgacgaccaggatgactgccatgcctttttacaccatgaggtcaagacccttaatctgccctgatgaattctgtggatactgttggtatcttgcattctaaactgcccaccctaacactaaactacccttttggacatctttcttttatagatcctgactttcgtcggcctgtttaa

SEQ ID NO: 11048 - DNA, 294 bp, Zea mays
  Clone ID: MRT4577_110071C.1
atattgccgggtcgacgagtctatcagtcggcggccgccacggggcgcggtgataactttttagcccgctcgggtccaagtcccacagacaaggttaccgatgacggcaccggtaggccagcctctggactcctatacacgaggacactcccgagcctgttcgcggagtgctcgatgactacgagccccgtcggctccaagaccgagatgctgtccagggccctttcgggcctggcggacgtgctggtggccgtggaggccgacaagcgggggtccttgttgaggaacaggcgc

SEQ ID NO: 11049 - DNA, 149 bp, Zea mays
  Clone ID: MRT4577_110072C.1
ggcataatactggtttctttgttttgtaacatataaaacataatgttttatgggattttttttcaaggggccctacctcgcggccatggaggtaaaacagcggggggggcacctaaaccggggagcgtccggaaaaaggaaaagaatca

SEQ ID NO: 11050 - DNA, 632 bp, Zea mays
  Clone ID: MRT4577_110075C.1
aagccattggaacaacgcagagtacttttttttttttttttttttttttttttttttggtatcacaagttatcacttaaaacacgtttagactgtagagagtgggtgtttggtctatcctgtaacactttaaacccatcaaataaaagcaattcaactataattgttaaattcattagagaataaaaggtgatactttcaatatgaataaatagtaatataaaagataattaatatttgtataatctctactatattaaagaatcagtttcatcctttgtgcattgtacaccattaattgaccgaaagaaactaccgtcccaacacgacaggaagctacacgcagcacagcgctctcatatactaccacatcgctagatgaagtaggacgagcgaccgagcgacctataaaaaaggcttgactcctttttaactcatacatttctcacccttttagctaatataagttttattatttgttcttatcaatttaatatatgatgtgtggaccatatatttactctaatattaaatttattttttatgattatcaaatatgattatggtgttgttgcaatgcacaagcattttactagtataaaattaaaatttaagtgttttaatacattaatt

SEQ ID NO: 11051 - DNA, 224 bp, Zea mays
  Clone ID: MRT4577_110076C.1
acgaactcacgttctccatttccagccatggcggtatctatcgagctctccaaggagtacggctacgtcgtgcatggtgctggtctgactatgtcttcctcaatctttggatggtcttccaggtcggcaattgcattagaaactacaaggtgtactatcccaccatgtacgcaatcgagtctgagaataaggacgccacgctcttccaaatgcgtgcagagggg

SEQ ID NO: 11052 - DNA, 139 bp, Zea mays
  Clone ID: MRT4577_110077C.1
ggggggcggagtttttctccccttgcttatgagagaggacaagagcgcgaggcgcagctgatgcggtcccgtgaggagcgcaagtaccagcggttcgacaggaccatccgctacgcgtccacgaggggcacgccgagac

SEQ ID NO: 11053 - DNA, 378 bp, Zea mays
  unsure (1)..(378): unsure at all n locations
  Clone ID: MRT4577_110078C.1
agatgatggtggtgatgagggatcagatgacactgataatgaggaatatgactatcgtgatgatgatgatcctgcagccaatggctaagggggaacctatgacgacgaatatgatggtggagatgattaacatgatgatgacaacgacgacgataatggcgacgatggcaatgaccgaacacgacgaagaaatctgaanacagatgactgatgattatgaagtcgcccaaccagctactagctacaggaaatgatcatcngctgcgacgactagttgcttatactcatgaatgctgcctgttcgtccctgcgcagcagtttactgtttactgggtacagttttttagcttggtcgtggacaattcatagcctagtttg

SEQ ID NO: 11054 - DNA, 355 bp, Zea mays
  Clone ID: MRT4577_11007C.1
gtaaatgttacttttttttttttggtgggctgattcattagccaaaaaaaatatttttgattgacaaccaataagcaattctaaaaaaaggcaccccccatgaattgttggtggtagaaagcaggcgggttggtcaaagcaaggtgggcaaagggcaggaaccgtcggagttgtaaaaaggaggggggggtagccacaaaccgctggttgaacggaagcacttgctggtgggtcaaaaaagaagcggggcttgctggacctagctggccaaacaaaaggaggaattgctggcggaaataaacaaagggggtcagtgcggccaatcggttaaatggaaaaaaaaaatggtggttag

SEQ ID NO: 11055 - DNA, 198 bp, Zea mays
  Clone ID: MRT4577_110080C.1
ggcgatgtcgcgcttcgggcgctccgggcagccggagataccgcgaatgctttgctccctgcctgcgtccttcagacgtctcctatccgcactaccggctgatcgacctctatcccgctgcttcgattcgctagcggcataggtcttagacatcctacgatcccgctgcgaccacaggacctgggtgatccgcgaggg

SEQ ID NO: 11056 - DNA, 296 bp, Zea mays
  Clone ID: MRT4577_110081C.1
cccccggcgacccacacaacactcttcatcaatccatattcctacattttctctcccataaatgctcatattatctccccgcggtttttaaaaaatggtcacgctttaactaccattttcaaattgtaaatctctacctttaccacttattactcatttctttcattgcgtctcaataactttatatacataatcataattttcctaccttattacttctctcttcattttattttacaccttaattcctttatatccttatcctcaattctttactcaatttaattattccttta

SEQ ID NO: 11057 - DNA, 523 bp, Zea mays
  Clone ID: MRT4577_110082C.1
gctgcttcatttgttttttttcccttcaaatggggccctttagacttaaagcctcaatttcttggggaaaacgggtgcccctattccattctatgttcacaaatccccaaccggtacggccaacggataggacactccccctgctccaatgctcaaaccctcaaaactaagaccatgttaggcccccctaactaaagggggggcccccacaaaagaaatgggaaacacctgaaaaacctgctctaagcgttctggggggagcccccctgcccccggatggttaaaaggggtagaagccgcccccacctttgctacgagcttccaccaaccattgccatgaaacctcccagtgtggagagcaagggttcctctgaacattcgaaaagccatccccaagagcgggatgggcctggggaatcatcccaacttgggggtgtccagacgcgggggcctaccccttaatggcgaaccgaaacctgcaagcgttccaactaaccctatcccggggcgcaatacctcttgg

SEQ ID NO: 11058 - DNA, 200 bp, Zea mays
  Clone ID: MRT4577_110083C.1
tagagcgcaacaatcactgcacttattacatggcaaggcgttgcttcaccaggccacacagccgtttccggaaaaaacatggcacgtctcgcgccgttctttggcagagtacaccaatggttatattagctcattcctggtcctgactgccaaatcgcacggagaattgctgggggggtaccagacgctcagtgggaaat

SEQ ID NO: 11059 - DNA, 724 bp, Zea mays
  unsure (1)..(724): unsure at all n locations
  Clone ID: MRT4577_110084C.1
ttctcccgacatctccctcgttncaagactcctctcgcgcgcccgcattgcgcctcgcctccaacaccgatctcctgcgccatccgctcccatggaacgcaaacatcacgacatcaagtcccgtcgctgacaggaaaggggcacttccagacacacatctccaacaggcgtgcggtccttgacaccacgctgtcgacgaacaatcgcctcaccctgacgaagcgatagccctcgcaatcctcattgacgaggacatggaagcatcgttggtccccaacaacgggacagagacaaaaggggtgctggtgtgcacttcactgatgtaacatcaaaaatgtatctgtcccccacgtgaaagggaacatctcgcgcgtgaacgagactatgccctcgttcatggacagggaaagccactagtggtctgactgcaacatcaaggcactccatccatgatgttgtaaccatgccgaggctgagacattgatagagtatggtatacatgcctactacaaagacgactgtgtcggtgaaaacaacaacactgacgcgcctatccaccacatacgactaggttctgctcccttatctgatggtgaatcgaccgcctattactccctagcgctcaactgtttgctagtgaagattatgtgccactagcaatatgacacttattaactgccttgagccatgagagtaaaacctgatgtgcctagtgatctgagat

SEQ ID NO: 11060 - DNA, 515 bp, Zea mays
  Clone ID: MRT4577_110085C.1
gaacagcctgatatatatattaggtaggggtcgatcgaatctctgtgctagctgtacgtacgtactacggatatatagattcaatacagacacgacacgcgtaccaggcgccgccgaagtcgaaagagccggggcggcggatggggaccaagccgagcacgtccgtgtagaagcgcagcgacgcctccaccgaccggcacacgatgctgatgtggttcagcgacgccagcggcagcacgccgccgccgcagcttgccgcccccatcgtcgtcgtgctcttcaccatcctcctgcagcgctgttaattccgatccgcgctatctatctggtcgatcctgctgacaacctatagctagctgctgctgctatcaactggtatcagagagcagggcgtgggtaaccaaacaacaaccaatatcggtggagatagctgagcgagtgccacagcaatgcaagcactagatggatggtcccgttgcaacaacaagcaacacctacgcacgatacgaatagtt

SEQ ID NO: 11061 - DNA, 1233 bp, Zea mays
  Clone ID: MRT4577_110086C.1
cggtaccggccattcccgggtaaggattcgtaccttgcttgctttgctatggggccggggcggcgggaaagcgcacgaacaggcaacgcactactcgttcgtatctttaagcttgctgctgcagcgtaagaaaaagcagtctgcactcggtcggtcggtcgctctgttcagctagctgcatgctcggccaccatatctcctccagtacgttcgtcgttctccacgccgctatctggtctgcggtaagcagcagctagaggccgttgtgtaggctacacagaagatcatcgaggaggatgctggtgaagaagaacaacagcacggcgatggcggcgggcgtgctgccgctggcgtcgctgaaccacatcagcatcgtgtgccggtcggtggaggcgtcgctgcgcttctacgcggacgtgctcggcttcgtgcccatccgccgccccggctctttcgacttcgacggcgcctggctgttcaactacgggatcggcgtccacctgctgcagtcggaggaccccggcagcctcccggagaataagggcgagatcaaccccaaggacaaccacatctccttccagtgcgagagcatggtggcggtggagcggcggctcaaggagatgggcatcccgtacgtgcagcgctgcgtggaggagggcggcatcaacgtggaccagatcttcttccacgacccggacgccttcatgatcgaggtctgcaactgcgacaacctccccgtcgtcccgctcgccgccgccgccgaccagcgcgcgcctgccgtcctcggggcctgcaagcgggccgcggcggtcggcgtcaagcagcagcagcagcaaagcagcgccggcggcgtgccttcttccgccgccccagcaagcagcagcagcagggcagggtggtgcctgctttttccgctccggtcacgacggcggcggcgcagtgcattccgtcggcggccacggcggcgcaaaccatccgggtcgccgaggagttgtcgtcgcacattttgtgggggtgattactagcttgttgacgacgacgccagcgcaaggatttggcgcggacggttacgaagcaggcccgatggatcgacgagcgccgagtcacggccccaaaaggggtctctgtacatgcgcgtgcgtgcgtgcgtgggtgtaggttctgtatgtgcagtgcactcaaactgcctagcttttttttagtaaagaataaacccatggtacggtgggagtg

SEQ ID NO: 11062 - DNA, 1340 bp, Zea mays
  Clone ID: MRT4577_110087C.1
cccacgcgtccgcggacgcgtgcgcccacccaaactcccacgcgtccgcgcactcctgccagagaccaaactattcgtatcgtgcgtaggtgttgcttgctgttgcagcgtacgaacggaccatcaactagctaggtgcttgcattgctgtcgcactcgctcagctatctccaccgctatcggttgttgtttagttgcccacgcgccctgctctctggcctctgataccagttgatagcagcagcagctagctataggttgtcagcaggatcgaccagatagatagcgcggatcggaattaacagcgctgcaggaggatggtgaagagcacgacgacgatgggggcggcgagctgcggcggcggcgtgctgccgctggcgtcgctgaaccacatcagcatcgtgtgccggtcggtggaggcgtcgctgcgcttctacacggacgtgctcggcttcgtccccatccgccgccccggctctttcgacttcggcggcgcctggctgttcaactacgggatcggcatccacctgctgcagtcggaggaccccggcagcctcccgccggagaagggagagatcaaccccaaggacaaccatatctccttccagtgcgagagcatggtggcggtggagcggcggctgaaggagatcggcatcccgtacgtgcagcgctgcgtggaggagggcggcatcaacgtggaccagatcttcttccacgaccccgacggcttcatgatcgagatctgcaacctgcgacaacctccccgtcgtcccgctcgccggcgaccagcagcgcgcgccggccgcctgcaggcgggctccggcggcggtcagtaccgtcaagcagcagcagcagggcagcgtggtgcctgcttcttccgctccggtcacgacggcggcggcgcagtgcatgccgtcggcggccacggcggcgcaagccatccgcgtcgccgaggagtcgtcgtcgcacatttcgtgcgcgtgattaattactagcttgttgacgacgacgccagtgcatggattcggcgcggacggtgacgaagcaggcacgatggatcgacgagcgccgagtcacggccacatcaaggcgtctctgtacatgcgcgtgcgtgcgtgcgtgggtgtaggtgctgtatgtgcagtgcactcaaactgcctagcttttttttagtaaagaataaacccatggtacggtgggagtgaagagactagtgcgtccactccacccacgcgtgtcccgtctgtattgaatctatatatccgtagtacgtacgtacaagctagcacagagaattcatcgagttatataataatatatatattaggcctgttcaacct

SEQ ID NO: 11063 - DNA, 301 bp, Zea mays
  Clone ID: MRT4577_110088C.1
tggcttggaacctttgggctgatttatgtgcttgattatgtgcctgtttatgtgcctcattatgtgcttgtttatgtacttgtagatgtgcggctcgtatataatgtaagtctacggttgatctatgtggtcgaagttatgcctaagtacgatttgcctgaggcatttaattaatccaattgtctaccttatagacttgctgagaaggaagataccggtatgaggtgtgagacgacggtgatgatgatcaggaagctcaagcctagtgggttccgtagggtgatgaatttgactgattggc

SEQ ID NO: 11064 - DNA, 387 bp, Zea mays
  Clone ID: MRT4577_110089C.1
cttttcccgatcagagcgcctttccccgatcagatctattcctgtctagggctcccaccgccaccgcggcgatgagtgctcgcccgctgagcccacaggcaggatggcatggcacggcgctgttgaacattctgccgtgatgcggcgcacctggtataaccttcgcctccttgagaaggtgcataacggctaggccgccctcgtccgggagcagcacctgcagtgcgaggcgggacgcctgcgggagttggctctactcctcactgcactcagccgcagccgggagctggcccatgcggagatgcctcccgttcctcgatctcacctccgctgccccgctgatgcggcgagcgcgctttcttccccggcggaggcccttgcttcgcc

SEQ ID NO: 11065 - DNA, 465 bp, Zea mays
  unsure (1)..(465): unsure at all n locations
  Clone ID: MRT4577_11008C.1
gttacttgctagcgtgacgtatatgagatccccatccggcgcccgtcccagcagcggagggggcgcagcagcagacgacgacttcgccttctactactctttcttccaggacgccgccgccgcgtcgccgctcccactcgcgctcgacggagccgccatgcctaacaaccgccggaggaagcgcggaggggacgacgactccgccgcggagcccatcaaggacggtagcaacaacggaaggaagcgctccatcgccaccataataacttcgctcgccgcgctcgaggccgaggaccacgccgacagcgcggaggccgccgacgcctcccgccgtgagctcgcgctcctcgagtccaacgccgacaacaagtcgcaggccatgatggactacttcgccaagatggagggcagctttgatgccgacgccgactccgaggccgctgaagcgcgcagcggnctctcggc

SEQ ID NO: 11066 - DNA, 1859 bp, Zea mays
  Clone ID: MRT4577_110090C.1
cagtattagagtcactaacagtgaaatcaaatatgctagcaaaaattcctgagtgtggatcttatggaatacaccatgcaggctcctcaagttcagcagagcctgaacaagtgcatcaagctgaacctaaagtgagcagaagacaagcagatggacatcctgtggcttatggtatatttaactccgtggatgtggatggcaaacctccggctttggttagttctgacagtagctcgtgtgttcctctgagcagccatgacaaggaacatcaaacctcttccttgtatcggggtgtagtgcagtatactgcagatagagaagatgatgaaaattcttctgggtgcacgcatccaagcaccatagaaaataagggttgcaaaccacaatatctaggtaaccataggataaggaaattgcttgcctcgaaggtaaggaaggcagcacgtaataagatttgtggagggattccatcaaaaaagatctgtggagggttgtcaaaaaaaggtagcaagctaaacttatgtgggaaaaagatgtccaccacacaccaaaaggtgcaaagaatgattttcaaaaagaaaaagctagcgcaccgtacatcttttgctaaggagatgctaactgaagctagtgggacatcatttgctatggaaggtcaaaataaatcatgtgaagctgagaattaccatgttaagctaagaatcaagtcattcaacatcccagaattgttcattaaggtcccagaaaatgcaaccattggatcactgaagagagctgttatggatgttgtcaatagtataatggaaggcgacctacgcgttggtgttcttcttcaaggaaaagatatccaagacgacaacaagacactttgtcaggctgggatatgccacgataaaaagctaaataacatagacttcacgctggagtgcgagcgtgagcgtgagcctccctctggagtcattatacaagaacagatggatttcctcaccacagatatggtggagccattagctaggatgaagtgtgaggaaccttttcctgaagccgacgtcggagatgacagccagcagcctagagcgccttatcgaagccgctctctctctgacctgtactctgtccattgtcctgttcagatggcttcccaggacacgtcggtgagctcccaggccatcgtccctgtttcgcctgcgccttcagacgtgggcgctctagccattgtgcccctttgtaagtccaaggggtctgaagtcgggcagaggcgcatgaggagacccttcactgtcggcgaggttgaggcgctggtgggagcggttgagcagcttgggactggaaggtggagagctgttaaaacgcttgcattcgacagtatagatcaccggacctacgtcgacctcaaggacaagtggaagaccctggttcacactgcgagcatatccccgcagcaacgaagagggcagccggttccacaagaacttctagaccgtgtcctcctagcgcaggcctactggtcccagcagcagcagcaggcgaggctctaggacaagccccgcggcaaggctcctcttcttcctgagatctgttttccctaggagaagggaaagcttgtacttgtgtaaatactgtgcgtaatagaaaacgaggtagaaggggtgtccaaaggaaccagattagtttgtgtgttattgcatactcacaacattgttgttccttttcatgccctgctcgctggtctctgtcgaagccaggggctctctcgcatgtggataaataagggggagagaaccttgcgtggcacttgtaaatggtggcgcaaacttgccgtgttttaataagcctttgacatgtcgctcgaggaacct

SEQ ID NO: 11067 - DNA, 644 bp, Zea mays
  Clone ID: MRT4577_110091C.1
gttttcttcggttatcatcgctatctgcagctgctgcgatctccttgctagtgcagcttcttcttgatccagtctcgtctctcgatctccatgatggagtaggaggagcaccaattggacacgccggaggtgttcaaacggtggaagatctatgctgaccaggctggcgccgtctcgatgaacgactacctcgttgtgaacgaccgtcagtgcgaggtggtgcaggcgtataccgcggagacggttatccatgaaccgtgtccgtgaggctcttgggccgatggaatagtggctcacaaagtccctgaagatgttgttccgtcatgacgcaaaggtggtattgcgtgtgcgcatcatactgcataccctgtagattgtatatctgatgatggatgtgagagccttcagactgccgatgacgacactaatgatggtgttacactccgcagatgacgacagtcattgtgtccactacaggtgagaggatgaaagccgcgaggatcttgttgcgactgtccacgcagctatgatggaggagcatatctgtgcggtgaaggatggtgctctccagtaacttacctgccttgcaatactgcatctcagaacctatgtcgaacaaagaagtgtatccaggattgctacac

SEQ ID NO: 11068 - DNA, 367 bp, Zea mays
  Clone ID: MRT4577_110092C.1
cccacgcgtcacacgaccgcgatatcgtcggacatgccgagatatgacgataggagagcaccttacgggctgccacgattgaataatccttgatcgagtagctctcgaacggaatcgagagatcatgatctggatgctgactgttcgcaacgcaggtatgatcatagtgatgctgggtagcacgcttctaggcctgacgcctgtgcctttggactttgtcactcgtacacaggccacaattgaccctgaccatatactggctccagctaaccaagctgaccatgaccagatgcggctgaagacttaacaggctttgcaagacgctgaaagcgctgaagatgaacaacctttaggcgtagaagctcac

SEQ ID NO: 11069 - DNA, 642 bp, Zea mays
  unsure (1)..(642): unsure at all n locations
  Clone ID: MRT4577_110093C.1
cattgggtacctcgaggcnncggccgggaatggatttccaagccaccatctgacgttcaagtgtctttacgtacgagtgcaattaaaaaagcgattgcgatggcgaggagaccatggccctctcctccacgtgctttgccgtgaaggacgtgtgacgtgacgtggttgtccgccttcggcgaggcccgcgtgacgatgctcgttacggcggcgaaggccgagccagatggtgccgtccgggagtgcttggcaccgtccccaccgcgtgccgtgcctgagtccactgtacggctagccaccgagctacctgacaggagagttccctggcgactacgggtgtgacaccgttccgctgtcggtgcacccgcagacgttcttcaagatccgggaggtggaggtgatccacttccgctgggacatgctggccgtgctcggatgcgtcttacccgagctgctcgcccgcaactctgtcaagttcgtcgacgccgggtggttcaaggccgattccctcatcttcagctagggcgggctggactgcctcgggaagcctacactcatattcgtgcagaggatacttgctatctggggctgccagagcgtgctgcatgggagccgtccaggtgctactgcatcgccggctgc

SEQ ID NO: 11070 - DNA, 693 bp, Zea mays
  Clone ID: MRT4577_110094C.1
atgccgccgaagaaggcaccggtgcgaggggttgctctgcaaccactggacacaaatcaagatgccctctctccgcaagaggccaggaaccaaaagaggaacgatgactttcattatggtaactttatttttgatgatgcttctcctctggcagcaaaattgcaggctatcccatggccacaatcctacaagccaccccagttgcccatgtatgatgggcactcggatccaaagcaattcttgatgagctacgaggcaataatatcctcgtatgggggaataattacatcatggcagaagttcaacgatatgctgattactagtttccaaggttttcagacgaagcaaattactgctcaggccttgtttcaatgcacgcaagaccaggaggaataccttcaggcgtatgtccgaaggtttttgcatctaagagcacaagcacccatagtgcccaatgaaattgtcattgaggccatgatcaagggacttcggccaggacctacagctctatattttgccaggaagcctccacaaaccctggagaagcttcttcaaaagatggatgagtacatccgagccaataatgatttttgccaaagaagggaggaagcctacaggttttccgagatgaccaggggcttcggagggagacttcatcccatgcatgtccgatcaattcataacttcaattga

SEQ ID NO: 11071 - DNA, 256 bp, Zea mays
  Clone ID: MRT4577_110095C.1
agcaatatctcctccctctccctcacggatgcaatcgccatcgcagcgaaatagacatgtctgatcgggcacagatgtcgtggcacgcatacgtcggcgaccacctgatgtgcgagatcgacggccagtacctcgcggcggaggacatcgtcggccacgacggtgccacctgcgcgcataacagagcagttccccgagttcaagaccgatgacatggccaacatcatgaatgacttcgacgagcctatgcacctcg

SEQ ID NO: 11072 - DNA, 263 bp, Zea mays
  Clone ID: MRT4577_110096C.1
aaaaaataaaaaaactattaaaaaacaaattatcctttcaaactttaaaaaaaaaaaaacgggagcggttttaaaataaataccccacctactacataaaagcacacaacctctataatcaaaatttttctaactataaaaatcaagctcatacccactcacttatagcctacataaaatgctaactaaccagctcttctcactccttttactcttgatcacactattttatcaatgaacaattactttataccccatcctta

SEQ ID NO: 11073 - DNA, 860 bp, Zea mays
  Clone ID: MRT4577_110097C.1
attgaggctccggtgaagacgaacaagatcccaagacaggtccctgagcaggcttggtacatgaaccctgccttcaccattctgattggtggcatacttccgttcggagcagtcttcatcgagctcttcttcattctgattggtggcatacttccgttcggagcagtcttcatcgagctcttcttcatcctgacgtcgatctggcttcaccagttctactacatctttggcttcctgttcctggtgttcattatcctcatcatcacctgtgcggagatcacgatcgtgctgtgctatttccaactgtgcagtgaggactacctgtggtggtggaggtcctttctgacctcaggatcatcagcaatctacctcttcctgtacgccgggttctacttcttcactaagctacagatcactaaggtggtgtcaggcatgctgtactttggctacatgcttcttgcctcgttcgctttctgtgtgctcaccggtacgatcggcttctacgcctgcttctgcttcacaagattgatttattcttctgtgaagatcgactaggcatgttccatgggcctgcagcgagtatgcccattgcgtttttttcatgaattttcagtgcagctgtacttttggtgttagcttataaaccatttatgctcactgtggttcagagttgtacaaggataggacactactgctagctttatatggggtaattttaacttgtgctgttgagaactgctgcatacgttcaatccatagtctcgttatcgtctgccacccctttactgcttcagctgcatgatgatgtccatacgtgcttggctttcatcaagaaaatgttagcttcatctccccagaat

SEQ ID NO: 11074 - DNA, 624 bp, Zea mays
  unsure (1)..(624): unsure at all n locations
  Clone ID: MRT4577_110098C.1
gacgcctgcggtaccggtccggaattcccgggtcgacccacgcgtccgggagaatggagaccaaacctgtgnataacctgtctcaaaaccctcctcatcatctactccttcgtcttctggatcactggggtgatcctgttggccgttggagtctggggaaagctgactttgggaacctatatctccctgattgctgagaactccacaaatgctccctatgtgctcattggaaccggcaccaccatcgtggtttttggcctctttggatgctttgctacatgccgtggtagtccatggatgctgaaactgtatgccatgttcctgtccctggtgttcctggctgagcttgttgctggcatttctggatttgtgtttcgtcatgagatcaaggacaccttcctgaggacttacacggatgccatgcagaactacaatggcaatgatgagaggagccgggctgtggaccatgtgcagcgcagcctgagctgctgtggcgtgcagaactacaccaactggagcagcagcccctacttcctggaccatggcatcccccccagttgctgcatgaacgaaactgactgcaatcccctggatctgcacaatctgactgtggccgccaccaaa

SEQ ID NO: 11075 - DNA, 894 bp, Zea mays
  Clone ID: MRT4577_110099C.1
atctcggttcctctgtatttgtggggagctatctggtttcaagcaacctgccatcgaggctccggtgaagacaaacaagatccccagacaggtccccgagcaggcttggtacatgaaccctgccttgaccattcttattggtggtattcttccgttcggagcagttttcattgagctcttcttcatcctgacatcaatctggcttcaccagttctactacatctttggctttctcttcctggtgttcattatcctcatcatcacctgtgcggagatcacgatcgtgctgtgctatttccaactgtgcagcgaggactacatgtggtggtggaggtcctatctcacatcaggatcatctgcaatctacctcttcctgtatgcggggttctacttcttcactaagctgcagatcaccaaggtggtgtcggggatactatactttggttacatgcttcttgcctcgtttgccttctgtgtgctcaccggtacgatcggcttttgcgcttgcttctggttcacaagattgatttattcgtctgtgaagatcgactaggcaagttgcacgaccttgcagagtatgctgatctgaagcggcctccattttccactgtttttttttcctgatttttcaggaagctgtactttagcttgtgaaccatttatgcccactatggttcagacttgagttgtataaggataggacactactgtcagcttcatatggggttaattttccttgtcttctttgagaactgctgtatacgttcaatccatggctcattaccgtctgccacccaatttctacctctgctgcatgttgatgttgctgcatggtgatgttgatacgtgctttggtttcatcaagaattgcttgcattcaaaaaaaaaaaccac

SEQ ID NO: 11076 - DNA, 253 bp, Zea mays
  unsure (1)..(253): unsure at all n locations
  Clone ID: MRT4577_11009C.1
gggnttaaccaggatttgagcttcatagacatacatggggatgaaagtcgcaccaacacgtataagcttaaaggttttaggcgttaagaacaaacgggcatattacaggggtatgggaagcataactgttagatgaggctgggcttcaccgttacaagatagcacctttgcaacaccactcactatcaaataaaaaccgggacaggtgaaattagtttcagaacacaactgggaaaggaagggaaaaaaacaa

SEQ ID NO: 11077 - DNA, 1913 bp, Zea mays
  Clone ID: MRT4577_1100C.1
gggtacctcgaggccggccgggatcaagtcatcacataccaccaagaccacatcggcacatcgacgtgagctcgtgcgtgagtgccctggtcgacgaccgctcgcgcgccatggactcaacgacgacggcgccgctgctgcagccgtccgccgcctcgagcaaggaggggccggggccggcgccggctcagcacggtgagggcagccgggagctggaggcgatcctggccgacgcgtccaagccgtgggcttggcgggcctgggaaggcgcccgcctggagctgccgctgctgctgcgggtggcgctgccggcggtggccgtctacatgatcaacttcgtcatgtccatgtccacgcagatcttctgcggccagctcggcaacctcgagctcgccgcctcctcgctcggcaacaccggcatccagcccttggcctacggcctcatgctgggcatgggcagcgcggtggagacgctgtgcgggcaggcgtacggcgcgcacaagcaccgcatgctgggggtgtacctgcagcgctcgacggtgctgctcatggccaccgccgtgccgctgaccgtcgtctacgccttctcggagcgcatcctggtcctcctcggcgagtcggagcgcatctccagggccgccgccgtcttcgtctacgggctcatcccgcagatcttcgcgtacgcggccaacttccccatccagaagttcctgcaggcgcagagcatcgtggcgcccagcgcttacatctccgtggccacgctggcgctgcacctggggctcagctgggtcgccgtctacaggctgggcctgggcctgctggggggctcgctcgtgctcagcttcagctggtgggtcatcgtcgcggcccagttcgggtacatcgtcaccagcgcccggtgcagggacacctggaacgggattcaccacgcaggccttctcgggcctcggcaccttcttcaagctctcggcagcgtccgccgtcatgctgtgcttggagacttggtacttccagatcatcgtgctcatcgccggcctgctcaagaacccggagctctccctcgactccctctccatatgcatgaacgtgaacgcatgggtgttcatgatctccgtcgggttcaacgccgcggcgagcgtgcgggtcgggaacgagctcggcgcgggcaacccgagggcggcggcgttctcggtgttcatggtgacgtcgctgtcgttcatcgcggcgacggtgtgtgccgtcgtcgtgctgtgcctccgcgaccagctgagctacttcttcactggcggcgaggccgtggcgcgcgccgtgtccgacctctgcccgctcctcgccgccacgctcgtcctcaacggcatacagccagtcctctccggcgtcgccgtgggctgcgggtggcaggcgtttgtggcgtacgtgaacgtgggttgctactacgtcgtcggcgtgccgctcggcgtcttcctcggcttctacctcgacctcggcgccaagggcgtttggagcggcatggtcatcgggggaaccttgacgcagacgctcatcctgctctgggtcaccgtcagaaccgactggaacaaggaggtggagaacgccaaggcgaggctggacaagtgggacgacaagaagcagcccctcctagtcgaagattgaaggaagaatctagtagatcacgcagtgtagcgcgtgctggtggattttttgtgtgtcgtgtgtgtgttttggagtggattgaatggaccatttggcatttgggttttagagagcatgcatgcactcctatcatgaatgctatggccagcaaaaaatgcattgttagaaaattaaaacggactaagattaatttgataatgcaacataatagtatgcaattattgtttcttgaaaaatcaataaatctcacgattctcgtt

SEQ ID NO: 11078 - DNA, 363 bp, Zea mays
  Clone ID: MRT4577_110100C.1
ggaaggggcaacattttcagggagaaacggttgtccaagttcatggagcttaccagaaaccccgggcccgcgtcctgattttttcagccgaccaaacttataaagaaattaaagggtctggttcccccatttctaccccactgggggcgggattacctaaacagggagggagggaatcacattttaagacacccccccaccgggtccccctccacaagaacacccttcgcccccattgaattctaacccaccggccggttttttggggatggcccaaacggccaaaataatcccgggggggtaacccaaaaaggtgtggataaggaaaatccaaaacttaaccccgcagccgtacttgaaaaa

SEQ ID NO: 11079 - DNA, 315 bp, Zea mays
  Clone ID: MRT4577_110101C.1
cacctccggggctcaaacgtttcccccttctcccaaatcccgacgacgctccaccacgtaacgccacaccatgaggcagcgcattgcgatccacatcggccaggccggaacccgggtcggaaacccgtgctgcgagctgtactgcctagaccatgtcattcaggatgacggccacagggccggtgacaagaccattggaggaggagatgaaggttccaacaccttcttcagagagactggtgctgggaagcaagagccccgcgcagtaattgagagaccaacaaacgatgccctcggtcaaactacgacgggcac

SEQ ID NO: 11080 - DNA, 127 bp, Zea mays
  Clone ID: MRT4577_110102C.1
ttccctcgcgtccggcgcagccgtagtcggacaccgtcgtccaatcgtcccacctccgccgcagtcgtaccacaccgacagtgcctcattatcagtatgatcccacagctggtggattcgctcgaca

SEQ ID NO: 11081 - DNA, 218 bp, Zea mays
  Clone ID: MRT4577_110103C.1
tgtttcctattggtttgattggccgccatgatggctcaatctgtattagctctatctgatcatctccttggtgaagaatcgacaaaactcaattaaaggtagtagataatctcataatagtggcaggtgtcgagtgaataatttccctggcagccggtgaattatcctgggatgctgtacgtgggagtacaagtactacaagcacgtggattagtaat

SEQ ID NO: 11082 - DNA, 1649 bp, Zea mays
  unsure (1)..(1649): unsure at all n locations
  Clone ID: MRT4577_110104C.1
aacttcgaaaatctcccaactcatatattagattatttaactcaacattagctatgttgtgagctatataattaactactcgagtgaggcctctaggattaggggcctagggcgaccaccctggtggccctatgtacagacccgaccctattatgtgcgtaccttggcagccccataggtcactggttggcgcacctagcaccccgtcaacccgtgcgcggcaatgcgacactgatcggccacaagccaatcagcgtcactaggcagatagaacctcctccattggtggctgtctggagacctcgctgccgctcgtcgcccgataacgccttcgcggtgcccaacgctcgcgccctcgtcgctgctgacaacgacgaggggcaggcgaagcagatgtcgacccacggtcaggggagggtgagttgtgaaacatctcgtcccaattgatcttgatctgccccatcgccaccactgccgatagtcctgagatcgaggaagagagaggaccttgttgccgcttgtcgccagataacgccttcgtggcacccaacacccgcacccacgtcgctgtcgacaacgacgaggagggagacgaagccaatgtcggcctcacggtcgggagagggtgagctgcgaaacatatccacacaattgatctcgatttgccccgtcgccgccactgtcgatagtcctgagatcggagagaagagaggaccccactaccactcgtcgcccaacgcccgcgccctcgtcgctgtcgacaccaacgagggggaagcgaagcagaggtcgtccatacggtcgggggagggtgagatgcgaaacatctccttccaattgatcccgatctgccccatcgccgccatcgccgatagtccttagatcggggaggagagacaaccccgccgccgctcgtcatctgataacgccttcgcggcgccaaaaactcgcgtcgctaccgacaccaacgacggggaggcgaagcagacgtcggccccatagtcggggagggtgagttgcgaaatatctccttccaatcgatcctgatctgctccatcgtcgccaccgccgacagtcctcagatcggggaggagagaggaccccgccgccgcttgtcgcccgataacaccttcgtggcgcccaacgtccgcgcccgcctgcacccgcgtagctgtcgatgacgaagatggggaggcgaagcagacgtcggcaccgtggtcgagggagggtgagttgcgaaacatctccttccaatcgatcccgatctgccccatcgccaccaccaccgatagtcttgagatcggggaggaaagaggaccctgtcgccgctcgtcgcccgataacgccttcacggtgcccaaagccaacgagggggacgcgaagcagacgtcggcctcacggtcgggggagggtgagttgcaaaatatctcctcccaatcgatctgccccacagccaccgccgatcgacctgagatcggggaggagaaagattgaatggggggtttttgctgctatttttttgttgtgcttgtacnagggaagaagtcaggggtgtttagttctatgactacaaaagaatatttcctgattattgtgtggtttattaagtttttaaactatttctctaaaaaaaaaaaaaaaacggccct

SEQ ID NO: 11083 - DNA, 828 bp, Zea mays
  Clone ID: MRT4577_110105C.1
ggccgcttttttttttttttttttcgaatcaaaataaacggtgttcaacgatcggcacattataagttagtatatcgttaatatgattggagtcatccacgagaagctgctgatccatggcgccctctctctagctcgctcccatggaagaacgaagaagataggtaaaggtcccgagtcccgagcagggagataaggtggagagatccttgggctgccgcggtgcgtgcccgcgcttggtagctcttgggccgtgcggcccagcgcgcggcgcacgggcatcagttgggccgacgactgtgagcgtgggccttcgctttacatataaagctgttggattgtgtggattttggttagaagttgaggacgctggcgtagtaggcagaccaccagctctccatccgtgggctccgcagctgcgtcaggaaggggtcctgctgctgctgattcttcgccgcctcctctctcttcatgctcatcgcagctgacggtgagagcgagacgccgcccacgggcaccatcacgatctccgacgacgacatggagtcggcgggggagccggtgctgtgggacgcggacggcgtggcggtggcgcgccaggctcggcagctcccaggggtcgtgccggtacaggtgcaccgtggggatgatgtcgaacttgagcttcctcccgcgcgccgcctgcttcaggtaaaactccagcagctcctcctccgtcgggtggaaccggaaccccggcagatccagctgatgctgctgctccgccgccatgatggatggatggatcgatgttgatggatatagatgagggtgcgtgtcgcccggccg

SEQ ID NO: 11084 - DNA, 602 bp, Zea mays
  Clone ID: MRT4577_110106C.1
ctcgagttttttttttttttttttttttttttttttttttttttttttttttttttttttttttttttttttttttttgttttttttttttttttctccctttttatattgatttttttttttcatggtcatttttttgtttatccgttccctctttccccccaaaaaggaagggggacaaggggtccccccccaacttaaaaaaaattattcccaactttgaacgggataaaaggggacgccccggcccatccctggaagagttcagggggtttttcttccccttcatcccccaccggaacaacgggggcccccaaaaaaaggccccttgcgccccccgggcggggggggcttatttggttgcgggggtcaccacccccccccgcgggggaggcgccgccccccgcgggggggcccctttgaaaggcagaggggggggtttatagggggggcgggggcgcttgatttttttctcggggggggaagaccgggggggctccgatccctgcctccaagagccgaaacggggatgggaacagaggcaacccggggttttcatgaggcgaaaaaaaaagggatgagggggcccaccccccccctcc

SEQ ID NO: 11085 - DNA, 414 bp, Zea mays
  Clone ID: MRT4577_110107C.1
gagctgggcaaaatccgggctatatcggatttgcattgctcatggaataaatcaaatcaaatcaaaataaacggggttcaacgatcggcacattataagttagtatatcgttaatatgatgggagtcatccacgaaaagctgctgatccatggcgccctttttttagctcgctcccatggaaaaacgaaaaaaataggtaaaggtcccgagtcccgagcagggaaataagggggaaagatccttgggctgccggggggcgtgcccccccttggtagcttttgggccgggcggcccagcgcgcggggcacgggcataatttgggccgacaactgtgaccgtgggccttcgctttacatataaagctgttggattgtggggattttggttaaaagttgaggaccctggcgtattag

SEQ ID NO: 11086 - DNA, 504 bp, Zea mays
  Clone ID: MRT4577_110108C.1
ggtttttgtgtttttttttttatttttttttgtggttttttttttttttttttttttttttttttttttttttttttttttttttttaaacacttttaacctggggaggctcaaaattttccatcttaaaaaattatttccccccctttttggttgtggggggaaaaaaaaattaatcctttcccacttttactggccccccctgcccctccacatttacaaacaaggtgaaatttggggaaaccttgaaaaaaataaaaggataaacaccctttaaatcccaaaaatctcaatttctaactatcaaagtttttgaactcccaattttaaaagacattccacaattcctttttttacaacaatccacgtggatttttcttccgaggtccgcggttttaatccggggacaaaacaagttttttttttactaaatccccgcccccccaggaactaccctaggaaaggttcctcccgtcaaagagggaggaatccctttttttgccc

SEQ ID NO: 11087 - DNA, 242 bp, Zea mays
  Clone ID: MRT4577_110109C.1
tcttatgctacttgctcttactgcatgtgtttctaacgcgtcaattattcctcatatgctcacaagctcctatagcttcctttttttcttcattacctttcatcaatgaaagttttaacttgagaaaacccatatctataatcttataagcttccaacaagctatctctttaagcaatatatcttatattaccctagtttcaacaatttccagctcttatatttgtctctattattgataca

SEQ ID NO: 11088 - DNA, 150 bp, Zea mays
  Clone ID: MRT4577_11010C.1
ggtcgatttgagatcccccggcacgctcgtaagcttggaccttacagcggcgcctggtttcatctctcctgcactatcatggacagtcaagactcctatagacacagacatagaggcgtacctcttaagggaaggtgaaatggcgaacaa

SEQ ID NO: 11089 - DNA, 2059 bp, Zea mays
  Clone ID: MRT4577_110110C.1
ccgcctccccctcccacccccacccccacccctggccccccgagcggcggtggcgtggcgtccattatcacagaagatctcttcgagaggatgctgaagcaccgcaacgaacctgactgcaaagctcggggcttctacacgtacgacgccttcatcacggcggcggacgcgttccggggcttcggcaccacgggcagcacggaggtccagaagcgcgagctcgccgcgttcttggggcagacggggcatgagaccacgggcggctggccgaacgcgcccgacggcgccttcacctggggctactgctacaaggaggagaacggcgccaccgccgactactgcgacatgacgggcgagtacgcccagtggccgtgcgtcgccggcaagaagtacttcggccgcgggcccatccagctctcctacaactacaactacgggccggccggggaggacgcgaccatcgcccaggacctgctgagcaacccggagctggtggcgtcggacgccgtccatctccttcaagacggccatctggttctggatgacggcgcagccgcccaagccgtcgtgccacgacgtggccaccgagcagtggaccccctcggccgccgacaaggccgcggggaggcttccgggctacggcgtcatcaccaacatcatcaacggcatcgagtgcggcaaaggctacaacgagaaggtggccaaccggaccttcttctacaccagctactgcgacatccttggcatcagctacggcgacaacttggactgctacaaccagaggcccttcaacagcgcatcccttgctggaaccgctgctcacgctgaagcgtaaataattaaactaaattaagcgatgggggcgataataatatgttgtgatgggactatgggagtcgatcagatgagctgtgcagaatccgtgctatatcggatttgcattgctcatggaataaatcaaatcaaatcaaaataaacggtgttcaacgatcggcacattataagttagtatatcgttaatatgattggagtcatccacgagaagctgctgatccatggcgccctctctctagctcgctcccatggaagaacgaagaagataggtaaaggtcccgagtcccgagcagggagataaggtggagagatccttgggctgccgcggtgcgtgcccgcgcttggtagctcttgggccgtgcggcccagcgcgcggcgcacgggcatcagttgggccgacgactgtgagcgtgggccttcgctttacatataaagctgttggattgtgtggattttggttagaagttgaggacgctggcgtagtaggcagaccaccagctctccatccgtgggctccgcagctgcgtcaggaaggggtcctgctgctgctgattcttcgccgcctcctctctcttcatgctcatcgcagctgacggtgagagcgagacgccgcccacgggcaccatcacgatctccgacgacgacatggagtcggcgggggagccggtgctgtgggacgcggacggcgtggcggtggcgcgcgcgagctcctccatggccacccgctgctccagctccttgagcgacacggccttgcggtagaccttgcacagcaccacgtccacctgcggcacgcgcgcgtcgctgctagcgtcggcagcgtcggggaggcggtactcgttcatgacccagtccgtcttggtgccccgcggcgcgcggccctcgtagtagacgagcgtcttcttgagcccgatgaggcgcttggggtcggcggcgcaccgcacggcgcggtccgaccccgtggccttccagaacccgcgctccgtggtgcggctaggccggccgccggagccgggctgctgcttggccgcccgcccgccgccgtcgcggggcacgaagaagtaccactcgcgctcgccaacgacgcgcgccaggctcggcagctcccaggggtcgtgccggtacaggtgcaccgtggggatgatgtcgaacttgagcttcctcccgcgcgccgcctgcttcaggtagaactccagcagctcctccttattgaactaatcctgtg

SEQ ID NO: 11090 - DNA, 435 bp, Zea mays
  Clone ID: MRT4577_110111C.1
tttgggctgatttatgtgcttgtttatgtgcttgttagattattgtcccttctcatgagcatgctgtcaaaggaagtacttcggatacttcgcgcagttaggaggaccctttgtcggactcatgtacgaggactgtgactaagattgtggaagtgccgtagcattcgtacctgctggaaatcggtgctattggatatggtagtgctctggtgcttattacatcttctgataataattctgcattgaagtctattgagcctctgaggctacgcatgtcgcctaagaagagtgagatcatcctcgccgccggcgtcggagcgacgactatcggtagttcctcagagaaagtctcgaatgatgatttgctttgtcatggtctggcgccgacgaattcggagagtgatgcgcataggcctggtggtgcttcgacggtgt

SEQ ID NO: 11091 - DNA, 378 bp, Zea mays
  Clone ID: MRT4577_110112C.1
ggcgggtgtgaatcacagacgtcaagggcattcattggagggatcactagccactcctgtggagtataagggacgctgacacactgtttaagattgctattctcaagtggcaacatatctccaacatagggcacaagatataaaaaataaggtacacaataaacattactggacatgggtgaacatagtactgcaaaacaactgtgtgatcccagatccctcaacagaagttacgacacaaggcctaaagaccagattacagtggcatgtgtgctacagtgtactttgtttgcaaaagccactaaattgaatggaatggccaaaatggaaagctaactggactgaatataccattgaggtactgatcaagatgatgtt

SEQ ID NO: 11092 - DNA, 449 bp, Zea mays
  Clone ID: MRT4577_110113C.1
gggaaattaaactaggatatgcattggtcaaaataactttgttaaggaggagaaatatgtttacacttttgttttatacaaaaacggggggatgatttttcggttatacacaaacatgataacgatgagggggtccagggtgaattgggaacgacggaagggtcactttatgtacctttgaaaaaatttacgggggaaatcactcctgaggggggcggtgatgaaccgtttcgggggtttgggctttcctcgggcttgatttttgaataccaagtggggggcccacctttttttaaaactgaaggggccaggattggtgatattaataaaagggtttccccgcataagttaaacctcctttatttggggcttcttttttggttggtggcggtcctttttaaggttttcctggggttttttttttttaaacctttaaaggtttgccatta

SEQ ID NO: 11093 - DNA, 2737 bp, Zea mays
  Clone ID: MRT4577_110114C.1
ccggccgggccggggccggccgatcggaaagaaaatgtattttgccctccgctgttatatcgccgtcgccgtcttccggtcgctcatttcctcctagctcggctgcttgcctagggtttcgcctgctcccggccccgcctccagccgtcgcttgagatctcgccgctgccgccactcgatcctccttcgttgttcctcactgatcctgctgagctcggattttcgcccttcctccccgccggaacagcgtccggacgcgcgggcgcagatctgggttttggtggcccgcttgttgtatgagaaggcctctaaagcttgggagcaatggaggtggagccagcgaggagggacgcggcagcgctggacctggagctgctgcagctggcggagctcgcgccgggcgcgcttcgtgagaactccatagctgatgcactgtacgcgcagtggctcgtgctacccgagacgaccaagctggtaaagtctttgattgaggatgcaaagactggtgctgtgcttaatgttgctggaagctctactagcacaaatgctgcttcaagtagttctctaccatcgatgtttcctgctggtagtgctccaccactttctcctaggagcacttctggttctcctcgtgttatgagacgaggatctggagctggaccatcatccttgggttctccattaaaattagttagtgaaccagtaagagaagttatacctcagttttacttcaagaatgggcgtcctcccacaaaagatttgaaggagcagtgcttatcaagaacagatcacctattttttggtggggggggacttcaggttcaagaattcagatcggtcacgaaggacatatgtaaacttccttcattcttctctagtgtccttttcaagaaaatcgatgttgaatgcactagaactgtctcaagggatgcatttgttgagtactggatgaatgacaataaggttacaatggatatggctagtcaaatatttgaaatattaagaaagccaggttgcacatatctcactcaggatgatttcaagcctgtcctgaaagaactactggcaacacaccctggcttagagtttttacaagggacccccgagtttcaggagagatatgcggagactgtaatatacagaatcttttactccataaatagatctgggaatggtcatctgactctgagagagctcaaacgtggaaatttaattgctgcacttcagcagttagatgaggaagaagatatcaacaaagtgttgagatatttctcatatgaacacttttatgtgatctactgcaaattctgggagctggatgcagaccacgattttttgattgataaggaaaatctcatcaaatatgggaaccattcgttgacctatagaatagttgatagaattttcgcacagatcccaaggaaattcacaagcatgacagaaggaaagatgggttatgaagactttgtttactttatattatcagaggaagacaaatcatctgagcctagtcttgaatactggtttaagtgcatcgatcttgatggtaatggtattttaactttcaatgaaatgcaatttttctacgaggagcaattgcaccgaatggagtgcatggcacaagagcctgtgctttttctggacatattatgccagatgattgatatgattggaccagagaatgagagctatttaactctacgggacttaaaacggtgtaaactctcaggaaacatattcaatattcttttcaatctcaacaagttcatggcatttgaaactcgtgatccattcctcattcgccaggaacgtgaaaatccaactctaactgagtgggaccggtttgcacatagagaatatattagattgtccatggaagaagatggtgaggatgcttcaaatggaagtggtgatgtgtgggacgaatcacttgaggctccattctgaatggcgtcttgctgcatgaatttggttggacatggatgattatggttgtgaagcggaaggattgtaaatttggtggctaccctgttgaggccattgtaggctcacagcagattcagtaacatcaaaggctactgaaaagttttactgtgcagatctgattcaatatttgtcagttatcttgttgggcaaacatttttgctttgctggaaaattggggagggaggttggtgggggcgccctgcagtttcaaggcaacaacctcagcagtcatcaacggtcgactccatttgtgttctgattgatccttaggtggatatctgttattcaattgtgcgcaaattttggggctgaactgttaatgtttggctgctatttctttgttaaatcttggaagcgcaggctaccaattccatcacacaactaagatcatggcatgtagctttcaggttctgctttctcatcagcatggtgttctgtagttgtgttgccattcttggtgcatcttgggaggaatgatccgtgaccttgaagcatggatacttgtcattttgtaacattaccgagaagcagtggattgggtgcatagtaacacaggttgtaacgttaccgagaagctgtggattgggtccaatttttgttaaggtgtaaatttggagaatcttttaggttatcttacttgaaagtgctttgcgctttgcgtattgagctacttatgtcgtgatgcgctgaaactccatgtgtgtattcttgttgtattttccattttgtcaaggatcatgttttcttgcct

SEQ ID NO: 11094 - DNA, 667 bp, Zea mays
  unsure (1)..(667): unsure at all n locations
  Clone ID: MRT4577_110115C.1
aaaaccatgcattcctatacttgtggtcatgttcctagtttttttaagcataaatatacttgtggtcatgtgcatagttttttgttgtatatttttttttctgtttacaggtcttgctgcatgaatttggttggacatggatgattatggttgtgaagcggaaggattgtaaatttggtggctaccctgttgaggccattgtaggctcacagcagattcagtaacatcaaaggctactgaaaagttttactgtgcagatctgattcaatatttgtcagttatcttgttgggcaaacatttttgctttgctggaaaattggggagggaggttggtgggggcgccctgcagtttcaaggcaacaacctcagcagtcatcaacggtcgactccatttgtgttctgattgatccttagggggatatctgttattcaattgtgcgcaaattttggggctgaactgttaatgtttggctgctatttctttgttaaatcttggaagcgcaggctaccaattccatcacacaactaagatcatggcatgtagctttcaggttctgctttctcatcagcatggtgttctgtagntgtgttgccattcttggtgcatcttgggaggaatgatccgtgaccttgaagcatggatacttgtcattttgtaacattaccg

SEQ ID NO: 11095 - DNA, 579 bp, Zea mays
  Clone ID: MRT4577_110116C.1
gtgttctctgtaagagaagttatacctcagttttacttcaagaatgggcgtcctcccacaaaagatttgaaggagcagtgcttatcaagaacagatcacctattttttggtggtgggggacttcaagttcaagaattcagatcggtcacgaaggacatatgtaaacttccttcattcttgtctagtgtccttttcaagaaaatcgatgttgaatgcactagaactgtctcaaggcttcatgatttcctgaatttgtttattaagagaagtgttacagcttctagcttacctttcccctaccagtgtcagatctaacatgcactatagctttgatgggatgcatttgttgagtactggattaacgacaataaggttacaatggatatggctagtcaaatatttgaaatattaagaaagccaggttacacatatctcacccaggatgacttcaagcctgtcctgaaagaactactggcaacacaccctggcttagagtttttacaagggacccccgagtctcaggagagatatgcggagactgtaatatacagaatcttttacttcatatatagatctggg

SEQ ID NO: 11096 - DNA, 637 bp, Zea mays
  Clone ID: MRT4577_110117C.1
caactttcgcaggtttaagtgcatcgatcttgatggtaatggtattttaactttcaatgaaatgcaatttttctacgaggagcaattgcaccgaatggagtgcatggcacaagagcctgtgctttttctggacatattatgccagatgattgatatgattggaccagagaatgagagctatttaactctacgggacttaaaacggtgtaaactctcaggaaacatattcaatattcttttcaatctcaacaagttcatggcgtttgaaactcgtgatccgttcctcattcgccaggaacgtgaaaatccaactctaactgagtgggaccggtttgcacatagagaatatattagattgtccatggaagaagatggtgaggatgcttcaaatggaagtggtgatgtgtgggacgaatcacttgaggctccattctgaatggcgtaagtgtttgctaaatattgtccaatggatctaggaacacaacatgataagatagctaaattagttttgtaaggctacatcatgaaatgatataaacaccatgaaattttacagagtatatataggacaccttatttattttgtgcaatgggcttatatcttttgtgcaatgtagggaatattgctctagggact

SEQ ID NO: 11097 - DNA, 620 bp, Zea mays
  Clone ID: MRT4577_110118C.1
ccctcgagttttttttttttttttttttttttttttttttttttttttttttttttttttttttttttttttttttttttttttttttttttttttaaaacccaaaagcaaaggttgtttttttcaaaaatttcccccccctttttgttttttggccccacactttaaaaacggggttttttttttttgttctcccaaaaaaacccttccggaccccagggtttttttggggggaaaaaaaaaggggaaaattccccccccccccaacaaaaatttcccgcccaaaaattcacctttggggcggccaatttttgggggcatggttgcaacagggcccccttttttgggggttttcacccttgggaaacctttaaaaaaaaaaaaaattgggaacccggggggggccccttgggggttttttcaacaggctttctttaaaagtttttttttaaagccgggttttgcccggggaaaattttttaacctttttggccggggggggggaacccttggccaaaattttcccttcccaaaaaccttgcttagggctcacctccaaaaaagtggggagggccggggccctcaccgggggggcctttctggtttttccaacccggggg

SEQ ID NO: 11098 - DNA, 366 bp, Zea mays
  Clone ID: MRT4577_110119C.1
gggggaggggggggtaaccccagacgggttttaggggttggtaaaaaattttaaaaaagggttaaattttggggaaaatacagggccttggcaggggttttttaggaatttaatacaaattttattggcccgggttatttatcaatttttttttaaggtttaacagaatttcacagggaatttcttggaaaccattgatttttggggggccatttattttaatatctttcaaggggggcccccacaggggggtcactaatcaggtgttggggaactgggtttttggcataaaaaggcaaggggcgggggtttaggaacctttttaggggaaaaacaaaaattgggattttaacccttttttttttt

SEQ ID NO: 11099 - DNA, 528 bp, Zea mays
  Clone ID: MRT4577_11011C.1
ggccattattttgtcaatgaccatctttgaacatcccttatactgacttcaattcatattataagctttaatttataatcttgaattcagcttacaagctataattcagcttcaggttacaatctccaatttacaatctttggtttacaagcttactgtgtgaatgaaaaatctaaatgcattccattgcaacttgtaatttatcttgtaactgtgctgatattgcgcctctgttgcaaactattgtgcatattatatcatcattggtaccatacattactatatgcaagttgcaagttgacaatttgaatcaaaatcatttttgaactcaacacaaattaaattatgttgatggaatgaaaagcaatttgaatatggaatagtcaatttacaaattagctactggtagtactttggtgtctccagtacctgttcctaaggtaaaatctggttttgtgttcttttccaagtgaggtgagaagtgcatcagaaggatatgtgatacagatgccagatggaaaggaactg

SEQ ID NO: 11100 - DNA, 659 bp, Zea mays
  Clone ID: MRT4577_110120C.1
actcctatgggcgattgggtccctcgaggccggccggggctacccggacgtccggtgccattgaaggaacccggcggggtgccgaagccgcctccatccgacggggtgaagccggacggaggggcggtgccgaacgccagggagctgaactccgacgacgacgggggctgaagccgactggaggtgcgaagcccgtcggaggagagaggctggtcggcgggcttgcgcccaccggcacgctcgagttggaggagtcgcgcgacgttggcgacgacccagaggtcggcctcctcctggaactcggccacgtgctccagctgctcgttggggatggtgaccatgacctccgcgtcgctgcccgccagggagctcagtagctcagggtccgctccgcacagccgagcttgcctcgtctgcttagactgaacgatcttagcaaactctgacggagagttttctgaagccatcagtacgcctgcgggtttgtgaagactgtactgtaagtaaatccgaataaacattcacagcagcagactgtcactgcggtgactacggatcatcagatggctgaagagtaacactgaaggttcaatgtctggcttgctgtgttgggccgtggtgccttgcaatctggtgtgcgtgctagcccattatagaga

SEQ ID NO: 11101 - DNA, 899 bp, Zea mays
  unsure (1)..(899): unsure at all n locations
  Clone ID: MRT4577_110121C.1
aaaaatgttgtgtaatatcgggccgggccttgactcttcctcgtctccactctccaccatcatctttgattcctgtctccgcagcttgacccacagacgcgactagggcagtcaccgcggcgtagctgccgcgtcttgccccgaaacacagccgtcaacgccgccccggaccgcagcagcgcggcgcaaccccaatcggagccggagccagcgaagcgagcgcctcgcttccacaagtcgctagctgcatctggagcgccgccggcccgaccaacgcccgagccagccgtgggcgttcggccgccgattcctctgggctctggtggatgtcttgtaggaacacacttggatgaggttacaatacgcgtggaacgccatacccttcatcttgctattttgtgctatctcaacaaataaaatcttctccaacaacaaacctttcagcttcaccatagtgtctgctaggtcgttgcttgagattgacccaaattcaggactcgttcaggacaaggtaaaagttggacaaactttggaagaggacacccaaaacattgtcaatatgactatgaatgtgtcgtctggatggagcattgtgaaagaagaactcatacttcctgctagaggtgcccctttcaatagttgccatgcttctactattgtacagattgaggaagacaattttttggtagcatatttcggtggatccagggaaggtgctccggatgttaaaatctggttacagagatatagtgatggtcactggcatcctccagtggtggctgatgaacaagatggggtgcccatgtggaaatcctgttttgtttcagcttccctcccgtgagctgcttctcttctacagaattggtcaagaagtcnnaaagtggagcggtgccatgaaa

SEQ ID NO: 11102 - DNA, 357 bp, Zea mays
  Clone ID: MRT4577_110122C.1
aaccgctctaccatgtcatcggtggagcgcattacaccgacgcacctccatagatccctaacctgtagggaggaggagaacgtctggacgctggcgctacaactcccgactcgacggcggtgaacagggccgccctgcaccttggcccctatgctaatagatctagatgaacacctatactggtaatcaattggacgtcacataggaactcagtgagatactagaaaattatatcagcaacgtgtgctatactatctctagagtcatgtacggaagtgcattgttactgcatcaaaaagatatgacggtgatactattgttggagattctttgagccaattatatgcctatacgctt

SEQ ID NO: 11103 - DNA, 618 bp, Zea mays
  Clone ID: MRT4577_110123C.1
cattgggtacctcgaggccggccgggaaacccccacccgagattgtcgctgatccccacgtcgtgacagacattcaccgagttcgtccatgccgcccccacccgcgattcccctggaaatctcgcccgcgccgcgaccgctgcccctgcgccccgaaacttcgtcgtcaccccccgctcccagtgtcctcactagggacatagaatgtctctgctgcatctgcggcggcaccaggaccaaagtcggcatcagcgggggccgggaagggcgcggagggtcagtcggtggtgcggcggctgcaatcggagctgttggcgctgttgatgggcgacgacccaggcgtgtcggcgttccctggggagacaacatgctccactaggtgaatgtgctgtccctacgctattgctgtagcggaggtcgtgacggggtcaatgacgtgattcgggaggggctctcctgcatctccagctctgcgcagaggagggacagcgatgccacgcctaggcagataggattcatctatttcttcacgacttcattcccagtgttcttcttcgattctgaagccgcgccagattcccccctagcatcataattatatgacaattcgccaaagcc

SEQ ID NO: 11104 - DNA, 383 bp, Zea mays
  unsure (1)..(383): unsure at all n locations
  Clone ID: MRT4577_110124C.1
ccagttcaagaattcttcacatatggatgcaatagtaatataacgaatcgtacttttgtgccgtagctaacagcatcctcaagtttccctttatccaggaaagtcttggatgactccagcagggtgcggccatcagctgatgagcatgcaacatgctgcaagtaggcaaaataaaggttgatgtccatgaattctctaagaatttcttattcagctatttcttttagaaatgaaaagattaccttgtagataggaacaacactgataatatccgactttctgaatgggtttggcatatccatgtcataatcttttggcttctaaaaaaaaaaaaaaaaaaaaaaaaaaaaaaggcnnccaccaactaaagaactcaaaaaccc

SEQ ID NO: 11105 - DNA, 178 bp, Zea mays
  Clone ID: MRT4577_110125C.1
tcaaacacagcgcgctccgcagacgcccaccaagcttccgctattcaccagggggtccccttctgccctccgccctatctatccatggaaaggcggcacggcttcttcgcggcgctgcgggaggaggtggcgcgcggtctgtcgccgtcgcggtctcgccttatgcctgacgccacgg

SEQ ID NO: 11106 - DNA, 2180 bp, Zea mays
  Clone ID: MRT4577_110126C.1
cctcgaggccggccgggccgggaatacctacggggtactgctacctcaacgagcgtatctgcttttttttttggtaaaagaatttgtttttgcaaagctagctcctacgctgccgccgccatgcaccgcttcgccgccgacagggcgcgccgcgcggtggccgcgtccctgcgcggcgcagcttccagagcagcagcagcgccgtcgcgtcacgctccggcgcctcgccatccaacctccccagtcggggcggcggcgccggttgctgccgccgccatggcgagggccgccatgtccacggcggtcgcgggcgtgccaccaccggtgtcgctcgacaccatcagccccaaggtgccgccagtgtcgctcgacaccatcaaccccaaggtcttgaagtgtcaatttgcagtccggggagagattgtcacacgtgctcagaaactgcaacaagaactgcagagaaatccagagtcgcttccttttgatgagatactctactgtaacattggaaatccccattccattggccaacagccagttacctatttcagagaagttctatctttatgtgagaatccagctctcctggacaaaagtgaaacgcatgctttatacaggtcagatgctatagagagagcacggaaaattctagacaaaataccaggaagagctacaggagcatatagccacagtcagggtataaaaggtttacgtgatgaaattgctgccggaattgctgcccgagatgggtttcatgcaagcgcagataacatcttcctaacagatggagcaagcccagcagtacacatgattctgcagttattgataaggtccgagaaggatggcattctttgtcctattccacagtacccattgtactctgcatcaattgctcttcatggtggttcccttgttccttatttccttgatgaagagacagggtgggcacttgaggttgatgagctcaagaaacaacttgaggaggctcgatctaagggcatcagtgtcagggcgcttgttgtcataaatccaggaaatccaacaggacaggtccttaccgaggaaaaccagaagaaaattgttgagttctgcaagaatgaaaggctcgttcttctcgcggatgaggtttaccaagaaaacatatatgtcgaagacaagcaattccactcgttcaaaaaaatcgcacggtcgctgggatacactgatgacgaccttcctttggtatcgttccagtcgatttctaaaggctactatggagaatgtggaaagcgaggtggttacatggagataactgggttcagtcctcaagtacgggaccaaatctacaagatggcatcgataaatctgtgctccaatatcaccggccaaattcttgctagccttgtcatgaacccaccaaaggctggggatgaatccttcgaatccttcaggttagagagggatggtatcctttcatcgttgggtcgccgtgcaaaggctttggaagaagcattcaacagtttagaaggtattacatgcaataaagccgaaggcgcgatgtatctgttcccacgccttcacttaccccagaaggcgattggagctgcccaagcagccggcactgccccagatgcttactacgctaaacgcctactagaggccactgggatcgtcttcgtccctggttctggttttggacaggtccccggaacatggcacatcagatccacgatactgccgcaggaggacaaaatacctgggatagtatctaggttcaaggagtttcacgacaagttcatggatgaattccgtgattattgagtgtccatctcagttcagtcattgcatgaattctgccaagatggcatcctgtcattttgtcgcgatcggcaccgtctgcccgagttccagccacggtcggtcggtcggtcggtactcggtaccgactagctagctagcggtggataaccaccgatgaaccgttcggtatagaccatctctgctgccacgatgtgtcgtcttttcattagtccacattatttcaatgtccaaaatattttaagaacctaagaaaatatttatgaatcatgtaacatttatatttacatattatattttttaatgtttatgtcaattttatttatgatgtacaaactatgtaatttgtatttcttttatgaactatataattttgtttgttc

SEQ ID NO: 11107 - DNA, 645 bp, Zea mays
  unsure (1)..(645): unsure at all n locations
  Clone ID: MRT4577_110127C.1
aaggcgattggagctgcccaagcagccggcactgccccagatgcttactacgctaaacgcctgctagaggccactgggatcgtcttcgtccctggttctggttttggacaggtccccggaacatggcacatcagatccccgatactgccgcaggaggacaaaatacctgggatagtatctaggttcaaggagtttcacgacaagttcatggatgaattccgtgattattgagtgtccatctcagttcagtcattgcatgaattttgccaaaagggcatcctgtcattttgtcgcgatcggcaccgtctgcccgagttccaaccccggtcggtcggtnnnnaccgactagctagctagcggtggatccgtggatgaccacccatgaaccgttcggtatagaccatctctgctgccacgtgtgtcgtcttttcattagtccacattatttcgatgtccaaaatattttaagaacctaaggaaatatttatgaatcatgtaacatttatatttacatattatattttttantgtttgagtaattttatttatgatgtacaaactatgtaatttgcatttctttgnnnaactatataattttatttgttaaaaaaaactacagaaaacctatctacttggtggttgaaa

SEQ ID NO: 11108 - DNA, 307 bp, Zea mays
  Clone ID: MRT4577_110128C.1
aggaataaaagaagcctgcaacccacctaaatacagaaacagaacctactaaacgtaggacaacacaacaaaaacaagaggaaagaagaagaagaataggcgtagacggcaagagacagcacacaaacaaagcgccggccactctgtggaccccgcctacgcgtccgcccccaccccacagggcctccttttctagagggggaccaaattctctcgctcaggccgatgagctacaccgtcgtcacgggctatcccgccgcgtaccccaccttattccccgcctgcgcctcccccgatatggcccctg

SEQ ID NO: 11109 - DNA, 379 bp, Zea mays
  Clone ID: MRT4577_110129C.1
cgtccacgcttttctctccacagcagggcgcaccacacgtcgcggccacgcatccagcccatggggctgcttctcgccatctgctctggggacaactcacacagtgacgccatggtccagcatgacccctcctcctgctcgaaagtgcgtgatgtggccctccgtgccatccactggctctgcttctcgacgcccacctacaccgaccagtataatatccgacgggttcctcgaccgcgtcctctccctcctccgcaccgtagacaccacgctacagcactgcgccctgaaggcgatgcacctactgtgcccggcgttggaggagatcatgaaggcgatgggcgacgccgcattcatgcttgagctggtgagcgccctc

SEQ ID NO: 11110 - DNA, 548 bp, Zea mays
  unsure (1)..(548): unsure at all n locations
  Clone ID: MRT4577_11012C.1
ccccctctcgagntntttttttttttttttttttttttttttttttttttttttttttttttttttttttttttttttttttttggcccaaacaaaagcagtgggggcttttattttattcatataaataattaacttacaaaaatcaataaacaagttcctggaggaaatttctttaccgactggggtagtcaacaccgggcatgccatccgttgagcaattaataagttgttggaaatgttgcccccaattttaaaccactcggggggaaaaaagccaggcttgtcaacccttttgtaggggggacccccaaagtattccctttgggcctgcaccaggttggaaggcaccctgtccctggggtaggagtcaaagtaggccaggttaggggactttcccggggggctaaccccgttgttgatgggaaggcaaaccaccttgcgccacgccggttggttgtaaatgatttcctgggcaaactgggggtttaaaaacaggttggaaaggcccggtttcctgtcgaaggcctttttgaggcggcccaaaa

SEQ ID NO: 11111 - DNA, 201 bp, Zea mays
  Clone ID: MRT4577_110130C.1
gtttcgagctgtcgcgcacctctgatttggattcctgctgctagtcatggcactctgcaggctgctgctcggccgaactgaccctcgtatctctgtgcttggacgctcgtaccagcgtggcatgctcgccatcactcatggctacgcctgctccctttgctcgtgcgagagtctaccttcttttgaagcttgccctcctgc

SEQ ID NO: 11112 - DNA, 505 bp, Zea mays
  Clone ID: MRT4577_110131C.1
acttcagaaaaattaagccttcacaatggtgaaccccttgggcctgatgattcaacacggtatagaagcatagtaggtgccctacaatatttaactttgactcgtccggatctcagttttgcagtgaacaaagtgtgccaatatttgcattcacctacaacagatcactggacagcagtcaagcgtatcttaaggtaccttcgatacactcttcaccatgggttgaagatttcaaagtcaccttctctgctggtcagtgccttcactgatgcagattgggctggagatattgatgacaggcgctctacagggggatttgctgtttttctcggcagtaatttggtatcctggagcgcccgcaaacaaccaaccgtgtcaagatctagtactgaggctgaatacaaagctattgcaaatgccactgctgagttgatgtggattcagtctctattgaaggaactgaaaatttcttgtccccctacagcaagaatatggtgtgacaata

SEQ ID NO: 11113 - DNA, 367 bp, Zea mays
  unsure (1)..(367): unsure at all n locations
  Clone ID: MRT4577_110132C.1
accncctgggggacaagaacgagcgggttgtagcaaacgggggcccagttaaaagttaaccttccgatcaaattatgtagggaacaagggacccccctttttcattctaaacgggttggggtttaaaccccttgtaaatgctttggggggatttgtgctgcccgtttaattggttgcagttgcagcataaatttaaacctggaaggccaccaggcttggcctgtgttaaccccgtttttttttagagtttgggttttcgaaaaattgcgatgtttaataggaaaattcttgggttttttaaactgccctggcaccccttaggtctaccctggaatcaacggtttttccagaaattgctgggtacatt

SEQ ID NO: 11114 - DNA, 322 bp, Zea mays
  Clone ID: MRT4577_110133C.1
tcgaccaggcgtccgcccactcgtccgggaggtttgctttcgcgatggtcctgttcatggctggggccgggctgatcgccagggctgacggcgccgtcgctcagcatggcatgtggagcatgatcacccggcccatgttccacagcatgctgagccaccgcggcgacagcgggtgccagggcgccttctacacctacgacgccttcatcgaggccgtcagcaagttccccggcttcggcaccaccggcgactagcagacgcgcatgcgggagctcgccgtcttcttcggccagacgttccacgataccaccggtggatgggc

SEQ ID NO: 11115 - DNA, 676 bp, Zea mays
  unsure (1)..(676): unsure at all n locations
  Clone ID: MRT4577_110134C.1
tattaagttaataattaatacttacaggggggagctgggggtattaaggccctcccagnagcagaaagcaacaatatttctgtctctgttaattagcttgccacgtatgtggcatactggcttgtaatttatcgaggagagagaaaaaatttaaagcaatggtttttaattaagaaatcgtagtatcatctgtccaccttccagttgacagtgtcctatgggctcggctgaccggtacatttgttaatcccttcattactatcttcttttgtgctttacatagataacttctacatgccaaaacatacttcaaagatacatttttagaggtagtgtcttttcctgtacaaaatttcgcaagaatttaataacaagtgatgtacagttcgcggtaaatatgcaaggaacttgaataatgctataacctgactcagatgatgaggacgccatagccatcttcacaactttccagccacgacaggggctagccttttggcatgtgaatctttcaccgatttcaaatgcttctatggtatgagaaacgcttgaaatattaatgggatgcacacttcttcctcgaacacttggatgtttatgtcagggcatgcaggaaaaaatccctcacancatcattgggggaatatggcatgactgtgtccatagggtcggtttgctg

SEQ ID NO: 11116 - DNA, 232 bp, Zea mays
  Clone ID: MRT4577_110135C.1
cttgtcccagacaaggccacgaacacgctcttcatcatcgacagcggctttcgcatgaccaggtgcgaccttggcaacaaccgtgcgaccatcgccaggtccgggacgaaggagttcatggaagcccttgctgccggcgctgatgtgtccatgattggccagttcggcgtcggcttctactgtgcctacctcgtggccgatagagttgtgccgaccaccaagcacaactatg

SEQ ID NO: 11117 - DNA, 823 bp, Zea mays
  unsure (1)..(823): unsure at all n locations
  Clone ID: MRT4577_110136C.1
acatctcagtcctccgcatccattccagcagcagagagcggaagagcaccacacgctcgccatggacacgtggcacatcttcctcggctcgatcctcttcgccatcccgctgatcctactcctccgcggccgcaagggcggccggctccgcgtcccgcccggcccgccgtccttgccggtgctgggcagcgtggtgtggctgaccaactcgctcgccgacgtggagcccctgctccggcgcctcttcaagcgctacggccccatcgtgtccctgcgcgtggggtcccgcctctccatcttcgtcgccgaccgccgcctcgcgcacgcggcgctcgtcgagcgcggcgccacgctcgcggaccgccccgccctcccttcgctgaagctgctgggcgagaacgacaacaccatcacgcgcgccagctacggccccgtgtggcgcctcctgcgccgcaacctcgtctccgagacgctgcacccgtcgcgggtccgcctcttcgcccccgcgcgctcctgggtgcgccgcgtgctggccgagaagctgcgtgatgagtcgtcctccggcggcgcggccgtcgtggagacattccagtacgccatgttctgtctcctcgtgctcatgtgcttcggtgagcggctcgacgaggccacggtccgcgcgatcgctgccgcccagcgcgagccgctcatctacaggtcgaggaagatggccgtcttcgccttcctgccgtcggtgaccaagcacctctaccgcgaccgcctccagacactgcacgncatgcagcggcggaagaagacctgntcgtgccgctgatcacgctcg

SEQ ID NO: 11118 - DNA, 227 bp, Zea mays
  unsure (1)..(227): unsure at all n locations
  Clone ID: MRT4577_110137C.1
aacacactcccgaataccgggggggtggtcgtcgcgacaactgggcgaggccgccgtcgccgcctgagttctgtngaaatggctgncggcgaggacatccagcctcttgnctgcgacatggctctggaatttttttttcgtggttttccggcgccgangctctttttggtgggggggctnnccttgctggccgncctctcctcatttttggggggggggggatggca

SEQ ID NO: 11119 - DNA, 454 bp, Zea mays
  unsure (1)..(454): unsure at all n locations
  Clone ID: MRT4577_110138C.1
gtggtaagtagttatcacagaaacgagcgtgagcatgacctatcttgggcgcgttgcgcgcaccatataaactcataccggctcttcagaggtgttcatcagaagccctgtctcgngggtctagaacctgctcattttgcacattttcctacacttacaaggaatgtgccttgattgtagcgcctggacacagcgtggtgtcatcgagcccatctacccaggttggggaggactggctgcattcttcatctcaagggtcacgcccggagaggcgcggcctcaaaatcatcggctctcaacaccacattggggtggcccccaagttcttcgacgagcctgggcgcctgctcgatgacgccaaacgagagatctgcaaccacagctgcattggcctctacttggaggagctctacgggtgggctggaagagcaggacgccaccaccattacttcct

SEQ ID NO: 11120 - DNA, 1887 bp, Zea mays
  unsure (1)..(1887): unsure at all n locations
  Clone ID: MRT4577_110139C.1
agtccaaggttcagccaacaacattgatccctcagctagttgggaatatgtatacagcatcactctatgctgctcttgcatcggttatacataatagacatgaaactctggcaggccagagattgttatgttttcgtatggcagtgggttgacatcaacaatgttctctttcaagattaatgaaggccatcaccctttcagcttgctaaacattgcaaacataatggatgtttccaagaaattgaaggcaagacatgtggtcccgcccctcaaatgcgtcgagggtcggcagctgctggggctccgggtgggggcgggggtgttcgcgactcatgggatgggcgttatggacttgttgtttgcacagtctctcccgcttgtgctctccaagtaccgaaggttctatgacgtgaaaggtgacggtgtcacctctactgccatgtccatcctcttccgatcgaacgtatgcccggggctgctcctagtgcacatgcagacgccttttacaagcctgattctgactatctattagttgatgggtaacgatcagacgacatagtaccgcttggtcttggcctcgtgctacagtttatattgttaatggtaggagaaccatgagggtaaggagttttcagttttcgatgtaggattatgttgtgtttcagtccccatacaacaagcttgtacagaaaagctttgctcgtttgtactacaatgatttcttgagaaactgcagcacggttgatggagagtcaagggaaaagttggcaccgtatgcaggcttgtcatctgaagaaagctaccagagtcgcgaccttgaaaaggcatctcagcaatttgcaaagaacctgtacgagtccaaggttcagccaacaacattgatcccaaagcaagttgggaatatgtatacagcatcactctacgctgctcttgcatcggttatacataatagacatgaaactctggcaggccagaggattgttatgttttcgtatggcagtgggttgacatcaacaatgttctctttcatgattaatgaaggccatcaccctttcagtctgctaaacatcgcaaacatactggatatttccaagaaactgaaggcaaggcacgtggttcccccagagaaatttgtggaggcactgaaactgatggagcaccgctatggggcaagagatttcgtgacgagtcaagatacaagtctgctatccgcaggcacatactatctcacgcacgttgactccaagtacagaaggttctacgacgtgaaaggtgacggtgtcgccactgcaatgtccaacggccactgatctttcttctgcccgaagctgcaacaagtcaaataacagaggcaagtgtcctaagcatccttagatgatattatatctattaagaggggaagctcgagttatagattaatctatgcccagctgtaaggttgtaaagttagttagagctgcgcatgcttgtttagtaaaagctctgctgctcttcagttatttagcgaatcaagcacactgctgggctaataagaattgtaaacaataatctgcagaatcactggctacatccaggttatgctgatgaatgcacgatttcatgtttaacacgatcaatgcatctggttacatccaggttatgctgatgaatggacattttggttccatccccatatcctaatgtaggcactatataattccttgccctctttgatgaagtttccatgacctagttgttcgtgtggaaaatcaaacaagggccttaagagtacctgtgttcgtgcggtacttgaccagcatccaagttatatcaaaatgcttcggaagatggccaaagctaggcatgatgtacgcacagtccngttccggtacaccgtacacaggcagt

SEQ ID NO: 11121 - DNA, 170 bp, Zea mays
  Clone ID: MRT4577_11013C.1
aacgccgtcaacgctaatagctcaaatagagattcggcagttcacatgtcatgcaaaccacagcagttgttctgaagtcgcttcatcggcctcaacaacactggccaaggacttgactgtgatatcttggatagtgatcacactggagaagctaaatttgaggggggttg

SEQ ID NO: 11122 - DNA, 532 bp, Zea mays
  Clone ID: MRT4577_110140C.1
ctccctccacttcggctgaagcatgcacaactcctttactcctcctcgccggtacgccagcaagcctgcagcagcaaacccggatcccctccgcatcgagagcagccgcgtcgtcgatccatgcaacccctacgtctccgcgtctcgcttcgctgtcgatctgcacagtccccgtcgcgatgccgtcaatccgcgctggctatcagtgtcgcgtctcgtgctctgcctatgcgacgaaatgctagccggtggacagcacatgcgactcaccgattcggccaggttgttcgccttgaatgattcgcgatttgttttatttatgtaataagatcgatgatgtgcctgcgtgtttatatgtatgtgaaaatataattgtatgaatgaaagcgtgtagagaaggaaatgaagtggaaaagaactcgggaatttttattttgataggaaaatatgtgatgcgttgtttgatgcgaaaaactaagagtcaaaaatgcggattatattttggagggtgcaaaaaaaaaaaaaaaaaaaa

SEQ ID NO: 11123 - DNA, 2418 bp, Zea mays
  Clone ID: MRT4577_110141C.1
gagtagggagcaccagtggtccgggaggctttatcaaccggactttgtgaatcccctcaaggctgcttctgcattccttcgttcctctattatttctccacccctttccccccgtctctctctcctcacccctctctctctaaaagactgaaaacaatagaaaggaacaaggggggaagaacaccaaccaagcaggacttggtttttgggaactccatgggctgtggaattgtccccaggaatcccctctgggtttgacgagattcatacagatacatatatttaattttttcccctttcgtttgctcaaaaaatcaattgtacaggcgaaactgcttgtttgtgctttgtttcttccgtgtttgtttccttgggattttcctctggtccgttcttcttcacctgtggggtgggaggagcagagacaatcatgggaaagcaaggaccctgccgtcattgcggagtcacaagtactccgctgtggcggaatgggccaccagataagccggtgctctgcaatgcgtgtggctcgaggtggagaacgaagggttcattggcaaactacactccaatgcatcgcaatgacaatattgatgatgatgaacccagagttagcaagctgaagccaccgacgtcaaagttgaagtcacagaagaaaaaaacaaatcacattataatggagaatggaccattctctagtcagaatttccgaaagatgggggatgatgacccaagctatcggtctagttcaggatctgcagtatcatactctgggagttgtgccccatatggtgctgctgatgcaagtgaaatgactggttcagcacagtcacatgcttgggagtccctagtgccatcaagaaagaggagctgtgtcacccgtccgaagccttcacctgttgaaaagcttgcaaaagagctgaactctatcatgcatgaagagaagttatattacctttcagaatcatcagaggaagacctactataccatagtgaaactcctatcggttcctttgaaataggctctggaagtgtgcttctaagacatccaaactcgaaatcactggaggaagaatcaaaaacaagctcaattcctgcagataataaatcatatattacaagtgaatcctattcagactctgcctcatttgtcgttcacagtggaaacaaggcagcaattaacttaaatcttccaactgcaaggtcgaagaagtcgccgctgcatatggaagacaatgctagaagggataaacttcattatgagaatcagcatgtcctggagagtgttgattcgcctttagtttcagtagatttagaggatgttataaactatactaacttcatgaaatatctaactaaagaggatcgacgtcagttgctcaaatttcttcctcctgtggactccttaacacctcctgaaagccttagaagcatgttcagttgtatccaattctctgatgctattgacagctaccagatgctgcttcgagagggaattctcgacccatccttatgtggtgatgaggaatggaagaaagtgaagacgcttgccttaactaatttaacaaaatgcagttggctggagtgctataaacagaaaaagggagctaaagaaaccgggggagtggggggcatcagtggaccggaaggctttaccaagtctactatgaaaccactcaaaagaccccgtgacacccactttcagagtgacgcagaactagatggtaccatgaggagtcctctaagagttctaaaatccggggctttggctcttcagtttgaaagttcatctttgccaaaatctagctatgccaccgaagattcaacctgcactggaggagcacctaatctattcatgttacccctagaaaagctaccattactggtcccttctcagtatgccgtctctgatcaagacttgctgctggaaatacctctcaacgcacgacacccagaggcagaacttctctgtcaaccatctcagctgatgagctctataaccagcagctccacctctatgggcggggttgctgaaggagaagggtacctgaagcaaccatagtctcaggtcacatcagcaagcagcttaggaacagccagtagttgcagtttactttaacctcctggatcgtgtcgcctctctgtgccgatcaccaatgggcctaagtgtccttatttacataacaatgtgcttcgtatgccaacttggcgaattgtcggttcagctaatatttgtagcatgcttttggatcggctttctgctggttttctgtaacatatggctcatggagaaagcattaacttatctctgtatggaaaaaaaaatatcaccatattgtaggaaaatgaaaaaagaggataatggagagttgtttatgtaaaattgaattttgctatggatgttgatatattaactat

SEQ ID NO: 11124 - DNA, 565 bp, Zea mays
  Clone ID: MRT4577_110142C.1
gagattgttcacttgagagtaatcattcagctcacaacaaatcagtgaacagtattttagccatggtttatcagccaaacgaaaagacattttagaggagaaacagatcaaaaaacttatcattcagataataaaattccacagaaaacgcatgcatatcagtgaaccagcgtgaaaccgttcttgatgtacggcagacatgggaacggcaggtctagcgcacgctccactgtgtcggatttcgacaggagcttgccaaggacgaaatccctgtggctcagccccaggcgtgcgccgctcgctatccccttgtcgcggcaggcgacgagagtgatgttgcagagccacgggacggcggctgtgaaggccagcccgaagtgctgcttgtaggcctggcagacctgggagacgtgcctgcccatgggaagtatgctctggaaacgggcgttgccttctgcctctgagtctggcaactctgaatcggagtgcaagttcacgaccacggtgccatggacggggtgcactttcttctccaggttcttcatgaatgcgccgtcgacgtccc

SEQ ID NO: 11125 - DNA, 3421 bp, Zea mays
  Clone ID: MRT4577_110143C.1
tcacgcacagctccgggcgaggcaattcggcacgaggccaaatgtggttaaagttaggaacagtcttctccctgaaattgatttaggtgatttcaaacagacttatatgtgtgttgcaggtatggttattctactcatggaagatctacagggaaggtatcttttgttcttatattttggttgcttaacaaataccttatgtagaaactataatcttctctctaaccatatcttagtggaaagtttattcttccattgaacatcccactgagtgtaatgcatatgcagaaatgcatatgcagaaattgaggtagcatataactgccgcaagggaaaatatggtgtagcagatgaggatataatcttatatggtcaatgtgtttgaattggtccaaccattgatatttcttcgcggttgctagacttgagagtcgcagttttgcatagtcctatattctatctgcactaagagtaatatatacagccaagcggacgtttggtttaacatttacaaggtatgtttggtacttttgtttttttggaattaatggttgtccgatgcttgtcattcatatgagttctaatatcatgcccccttaaagtactcatcatcaaaagtttccatgtgaatgttttaaatgtatatttaaagggttggaagacatcagactgttattcaaacaggatcttaagtgtcgtgaaagactacaagtgaggttcaacttggcaaattatttttccagtaactaaggagcaacaattctatgtattttagcttgacatatatatctaggtacttacatttttggaatcgggcaaacagtgatagtttgaatcacatgttttgccaaaaggaattattagaactgttcaaaagttaggaaaaaatacatatttatgctttcttatgcacgggtaaattgctctgttcatatataaaaaaaataattgtagtattattgcttatattgattttaaatgatgaccttattagatgttccatcgagaccacatatattagcattttgtaactaaatacaatgcatgaatatatatagatagcctttacatcgtgctacatgcttcctagaaataaggaaccattacaacatatatatttttgatgatgtacaacttcgtcatcggatataccgttccttcttttttacatacattttgataagaatgtcaaaatgttaaaaaaatagcgcgcgcatggcgcgcgttagacactagtagatttcagaactatcatgaagcgcgtgctcgctggttgttagttgttacagagcaacagcccagggaggccaagatgctacttagctactaaaaccaactgacaacaagtgcacagcccagtgggccgctaagctgcaagaaaaccctcgcccctcgttctggattgagattctctgcagaggctgcgatgttgggccgtcctgccctgcccggtgggtatatgtaagctcagaccgccaccggaaccttctcgagcccgcggccgcacacctccgcccgaagccgccagtcggactacgagcggcggcggcgcctcggctcccctgatctccctcaccggaatggacggccaggctccgccgcttctcgacgccgtcgtgctcgagccccttgcagttggcgacgagctccatccgcggcgtcctgtcgaggtggaggacgctccggccgccgctccgccctccggtatggacggccaggttccacctctctacaacgtcacgcgggatcctctgaccgtgtccgacgagctgcagcccacgggcgaggtggtggatgacgccctactcgtcgcgcccgacatcgtcaagggcgaggtgatggaggacgacatcctacccgtcgcaaccgacatcatcaacgacgccgcctcggagtgccccgaggctggcagtgatggcgtcgtgctcaccgacgagctccgcaatcgcatcgtcaagcaggtggagtactatttcagcgatgagaaccttcctacggacgagttcctgctgaattatgtgaagaagaacaataagggctttgttcctattgagatcatcgcatcatttaggagaatgaagaaactcgttcaagacctctcagtaattgaagctgcactcaggacatcatcaaagctggttgtaagttcaaatgggaaacgggtcaagaggttacatccattgccacacaaagaattgaaagattcaaagaaaagcactgttttggtcgaaaatctacctccagatttctccatggagagtattcaggaaaaattcgcaacagtgggcaaagttgtgaacataacaattaatgatccagaatcagtgaaagaattttcaactgctaagaagcctgacttcaatttaagttttaaggctcatgtacttgttgaatatgaagcagtggaggctgctgagaaggctgttactgccctaagtgatgagagcaactggagaactgggatgaaagtcaggcttctgtctaaacaaagtgtaatgggaccaggaaagtataaaaaaccttctaaagaaaatcaagatgcagtttccaaaatgattgatcagaatcaacattcaaaagaagaccagcttaaaaccttggaaaagatctccggtgctgatgcagtggggattaccaaggacagagataatttgaaacctgtttttatcactgagactgagcaccaagatcagaagccaaatgctagaggacgaaaaggatggtacaaaggtcaaggtcagatgcagcaaaatgcaaacaaacaaggcagttgtggttccgagtcattaaacaagcctatttctggaccgaggatgccagatggaacaaggggcttcacactgggacgtggtagatctcttccactacagaagtctgagaaggctgaagagtagagctaccaaaaaaggcctgttaagaaccttatccaaagaagctgggtaaaatctaacagaaaacctttgcttttttttttttgaaacttaagatcatcgaagccgttctttgcatggaatgggacacagaagaaagggaatcttggaatggctttctctctgcaagaaatggaacacaaaagggaatctgggaatgacttgtacagaaacacaattgtctgggggtagttccgagttcactcgtatggaacacagtagaacctttgcatgtttcctgacttgcattgtgtcatatactcgtatcatgctgcatgcagcattgcagccctgtttgcaatttcagcagccgggggctggggccgtgagcccgtgaccctgcaccatccgggtctaccacgagcccccctgttctgcgaggcgtttggcccctcatccctatggatctgtactctgtaggctctccttataacgcatgattgggattgaaaaacacattgaatagaaaataaatgtaggaatacatatgc

SEQ ID NO: 11126 - DNA, 431 bp, Zea mays
  Clone ID: MRT4577_110144C.1
ataaccaagagtgctcaaagcgactgacttaaattacagatgcaacatactatagcagcataccaagatacgatggaaggaaacacccaaacattacctaggggggccaacacacttacaaaggactgttcacacaccacaacctggctcgacagccaacacagattaatgccaacagatcattatatcctcctcctcggctccgttgttactgacaacctctgaggagacctactagaatgccttcttcaaggcggacaagttctcaagtgcctcgaagaactaaccctgctttatgcattaagcaatgtaccattgtactaactggcgcttggtgtatattacgaccaactagcatttgatgcggtagaacacctcttcaacgctggaggagctgtatatcatgcacaccgggcgctgcaccttgaaaa

SEQ ID NO: 11127 - DNA, 229 bp, Zea mays
  Clone ID: MRT4577_110145C.1
cgtccagcggcatggtgtgtttgggtacggatcgcaggccgaggagggtcgccatcgtcgtcgccggcgacgcccgtgaagctggtttgggtacacatgagccgttcatcattccgcgcggatgtcggctcgtgcctgatcggggtgccgtgcgagctgatctgataagacgtgttcggtaacaatagcgagctcctgcgccaccacaaccccgtgcacgggaacgtgc

SEQ ID NO: 11128 - DNA, 505 bp, Zea mays
  unsure (1)..(505): unsure at all n locations
  Clone ID: MRT4577_110146C.1
cagcgcggnaccggcgataggggttcgtcngggagtggggcttcgtcggcttcttcgtgcaagctcatnncttcattcccatcaacaacattatcgtcgggttccggctagggctcaggggcgcgactaggcatggggagtagtgcngatactttttgtagagcaagggggatagcgagggannncttggtcttgtggggggagggatgtgttaatggaccatttnntttttccgggttgtggttnntctgggagtgaaatcgtgtgaacggacaagggcgttcagggatggtctgggatggtgggattctggagtgagacccttggaatnnccttggatgaagcccagccatgtgcttgggaaaggagaagtgtccattttgtgtgtgtccatttaaggctgagtttttggtgtgtgtgctaccagcnntctctcgggcgatgggtgaagccgccggatttgggtgggtgttaatggtgtttaaggtatanntctgaggccgga

SEQ ID NO: 11129 - DNA, 811 bp, Zea mays
  unsure (1)..(811): unsure at all n locations
  Clone ID: MRT4577_110147C.1
tctgtgcggaaaataaaaaaaaaaaaagaataccaaacatattccatcgacagcactgcacgaaaaccagaactagctagcatcagctggtgctcactgcccttcgccaccaagcgcgtggcgcaaatggccaccaccaccaagaccgccgccgccgccatcacggcgatcctcctcggcgcgacgctgctgctgctcgcctcccccgccgtcgtgcgcgcgcagcaaccgggcaacccgtgcccgacgagcgcggtggcggacctcaaggtgtgcgcggaggtgctggtcctgctcaagctcaggatcaacgtgccgcagggccagcagtgctgcccgctgctgggcggcctcgtggacctcgacctggccgcctgcctgtgcgccgccatcaggctcaacgcgctcggcgtccccgtcaacctgccgctcgacgtgcccctcgtgctcaactactgcggccggaacgcgtccgctgtgccgggctccaactgtcccttctgatttcggagtgcccatgcgtgcttcatgttgttatatgatgataaataagagcctgcctaatgacctttactggacatattatgagtttccaacaatccaaccatatatatgcccttattgngagctggctaatcaacgagtttttcgtttctgaaggtagtggtcacaaccttaacgacctcgatatgtgatggtttgagttttgtgccgaattgtgcngtgtaatgtactatttgtgaantttatggtgnatgtactatttgtgaactctgatgntgtaatggattttaaacttatggtttggacc

SEQ ID NO: 11130 - DNA, 370 bp, Zea mays
  Clone ID: MRT4577_110148C.1
gaaagtgaacttttttatctcttcaatattagataatatagatacaaatgtgtatagataaattaatagagatagagtgttagttactaaacttcgaaagatcatcccgtcggtatggtaatccagcaggttcctcgaccaactttgcattgggaactctcgcttgtttctcgacactggagcactgacaaggtacacatgaagtttattaagctctatgtgatgtgaaccacctcagattccagtcccgtgagtagttgattaaaccaaacttgctgcgttaaccaacggttaccatttgacagggataaataatctccgcgcaatccttagatagatatggatgatagataacgtttccttattacac

SEQ ID NO: 11131 - DNA, 1980 bp, Zea mays
  Clone ID: MRT4577_110149C.1
gtcacacccatttcttgtgtcagtctccctctccctctctccgatcctctctactagcagagaggcaagttcaatcttctagctagcagcatcggagaaggcagagctcgactgacacaatggcgggaggccagctcaacgtgctgaccacactcgaccaggccaagacacaatggtaccatttcatggcgatcgtcatcgccggcatggggttcttcaccgacgcatacgatttgttctgtatcgcgctcgtgaccaagctcctcggccgcatctactactccgaccccacctccaaggaccccggcagcctcccgcccaacgtgtcggccgccgtgaccggcgtcgccctctgcggcacgctggcgggacagctcttcttcggctggctcggcgacaagctcggccgcaagagcgtctacggcttcaccctcatcctcatggtgctctgctccgtcgcgtccggcctctcgttcgggcatacgcccaagggcgtcatcgccacgctctgcttcttccgcttctggctcggcttcggcatcggcggcgactacccgctgagcgccaccatcatgtccgagtacgccaacaagaagacccgcggcgccttcatcgccgccgtgttcgccatgcaggggttcggcatcctcttcggcaccatcgtggcgctcgccgtctcggcggcgttccggaacgcgttcccggccccgccctacttcgtggacgcccaggcgtcgctcgtcccggaggccgactatgtctggcgcgtcatcctcatgttcggcaccgtcccggccgcgctcacctactactggcgcatgaagatgcccgagacggcgcggtacacggcgctcatcgcccgcaacacgaagcaggccacggccgacatggccaaggtgctcaagaaggagatcgagaaagaggatgagcaggtggagcgccaggtggtcggcgccgacacatggggcctcttctcggcgcagttcctccggcgccatggcctccacctgttggccaccagcagcacgtggttcctgctggacatcgccttctacagccagaacctcttccagaaggacatcttcaccaaggtcgggtggataccgccggcgaggaccatgaacgccatcgaggaggtgtaccgcatctcgcgcgcccaggcgctgatcgcgctctgcggcaccatcccgggctactggttcaccgtcggcctcatcgacatcgtgggcaggttctggatccagatcatgggcttcttcatgatgaccgtgttcatgctcgcgctcggggtgccgtacgagcactggaccaaggcgtccaaccacaccggcttcgtcgtcctctacgggctcaccttcttcttcgcaaacttcgggcccaacagcaccaccttcatcgtgccggccgagatcttcccggcgaggctccggtccacgtgccacggcatatcggcagcggccggcaaggccggcgccatcatcggcgcgttcgggttcctgtacgcggcgcaggaccccaagaagcccgaccatggctactcgccgggcatcggcatccgcaacacgctcttcgtgctcgccggaaccaacttcctgggcatgctcatgtcggtgttcgtgccggagtccaagggcatgtcgcttgaggagatctccaaggagaacgtggatgatgaagctgaggccgaagtgtagagagaccgtctgcacctctgcgtgcagatgcacatgtgaattgtgttgtgaattgtgatgcaccgatggtgttgtgtggttttgcttgtgtcactgtatctgcgcatacgctacgaataaccgtatctggctggctggctgctggccatgctcgcgcgtgcgtgtctgggtgctcgtgtgcagcaaatcaatcagccgctgtgtgatttgctaccttttgatattgttgctgattatgtaataattcaaaactattatgggtaatttctccaaaaaaaaaaaatat

SEQ ID NO: 11132 - DNA, 1725 bp, Zea mays
  Clone ID: MRT4577_11014C.1
ccgatccacctacgcccccgccctacagatgtcattgatagagacaggatcaaagctcttagggatgagatgaagcgagccgggtttgaggagagcactgatgtgctggtgtcactgatgagggccttctccaaggaaggagatattaaagaaactgaggcaacatggcattggcttcttcggagtggttgtgagcttcctgcccaagcttatatctgccgaatggagctttatgcacgcactggtgagccaatgaaatccctagaaatgttcaaggaaatgaagaaccggaacatccctcctaatgttgcatcatatcataagattattgagataatgacaaaagctagagagatagagattgcagaaaaactcatggatgagtttgttgaaagtgatatgaaacatctgatgccagcctttcttgacttgatgtatttgtatctggatctggatatgcatgagaaactggaacatactttcaccaaatgccttggccgatgccgtccaaatagaatattatacaccatttatatggaatcacttgtgaggattgggaatgtctcgaaggccgaggagatctttgatgagatgcataaaaatgggatgataggtactaatgctaagtctgccaacatcctgctcagaggctatcttttggcagagaactatcagaaagctgagagcatttatgagttaatgtgtaaaaaaaagtacgatataccagtggaatctttggagaaacttcagagtggcctcctcagtagtaagaaagttgtcaagccaccaaaacctgtgagcatgaagttggatgaagagcagcgtgagattctgattggcttgctccttggaggcactcagatagaatctcatgcacagaaaggggtctacatcgtcaattttaagttccaggaagattctcatgctcactcagctctaagggtgcatattcacgaacgtttcttcgaatggctgccttcagcatgcagatcactgaatagggagagcgagatcccttatcgattttcaaccatacctcatgcacatttcggtttctttgcagatcagttctttcagaaaggccagcctgttctcccaaaacttgtccacaggtggctttccccacgggttctggcatattggttcatgtctgggggcgtcagactgcaatcgggtgatattgttcttaaggtcagtggcggggacactggtggtgttgagagaattgtgaagtccttgcaagcacaacaatctttagcatgtaaagtgaagaggaaagggagattcttttggataggtttccagggatgtaatgccgactctttctggaaaatagtcgaaacttatgtactggacagttttgctagttccaccgaggaaagccacaatgtaggttctgatggcttgcaagactatacatattatgagagtgatacgcagaggcatggtagagaaagtgaggagtgaggatagactttgttcacaagttgtctacattactttcctactaacacctgtcgcccagattgatctatcacctttccagctgatcgtctgtggttgcagtattgtactatagacagtcgtgagcagagagagatatgagtagcttggtggattcccttgttattgtacctggatttgcacagatgttcagtttttgctgcccattagtttgttgggttccatgatttccagctgaaaaaaaaaaaaaaaaaaaaaaaa

SEQ ID NO: 11133 - DNA, 414 bp, Zea mays
  Clone ID: MRT4577_110150C.1
ggggagacaatggagggggcgctccactatggagggtactgtgcaaaccggggacagatttacaaagctaagggtaggagaaacaggaaggaaggtgcgggttttttggtcaaacggccaaccctttacccactttttttatggtgggattttcgaaagggccccggggggagcggctcgacgatcaaaagaagggggaaaaaaaattaatgtggccaggggcccaaaaaaaaggggggataactgggaatcagggggggcaaaaatggatttccaggaatcccagggagataagctggggaactcgttttcttttccctttccaatggaggcaaagctagggaactactccaagggcgaagccaatggggccactgaccacttgagttacaatcaaggatgcggggggtccat

SEQ ID NO: 11134 - DNA, 276 bp, Zea mays
  Clone ID: MRT4577_110151C.1
accaacaaagtataaggaaaagggcactattggaaacttaatcaattgccacgggttctttcgccctgccgaaagggggggactagttttggcactggccttaaacttcttaagtttgcctcgaaccctgttttttgggggtttcagttaatatatgcggcccatccaagggggggttgaaaatacctcctaaaaaggggttagcttgaaaggcttttttcctatttcatatcctcttactctgccaaagccttttccatcagtctccacaaacct

SEQ ID NO: 11135 - DNA, 202 bp, Zea mays
  Clone ID: MRT4577_110152C.1
tgttgctcccccgtgctctcgggggaaggtttagagttgcgcgcgagagagatctaggggagaggtgggcaggtggtcctggaacgaatctgttgtcggcgttcatcggtcatgtggcgcaggtgccggctgagctgctggcggctgacagtcagacgccttttcccaaaactaaggcaccagatctggggcgtcacttcct

SEQ ID NO: 11136 - DNA, 213 bp, Zea mays
  Clone ID: MRT4577_110153C.1
gccacgcgtccgccgacgcggccgtccacgcgtccgaggaaacgtgtgactgcacacatagtcctggctgggctaggctccaccatggtcgacacaagcatggtgctcgagctacttcatctggtctcagaataaatctggttttgtcgtgccggaactgtgagctcacagagatgaacaaataccataacgatgttgctagctgatgtggtg

SEQ ID NO: 11137 - DNA, 599 bp, Zea mays
  Clone ID: MRT4577_110154C.1
cccttctccttctcattctcgaaccgaagctcctctcctctaggtcgtcgtaggatgatggggtcgtaggacgatgggatgtgatctccaacaaataaaaggaactactgcgactacgagggagggagtctatagatgcatggaataaattaaacaaatgatgatatgtgtaccgtgtgttgtgttgtgttatcatatcacgtaattatacgtatatatatacctgtaccgtgcgttgtattatggtactaataataagcacgtacgtataaaaaaaaaaaaaaaaaaaaaaaaaaaaaaaaaaaaaaaaagggtcttgatcgagagccgatccgcgctcaaattacacctgacgaacctggacttactgcataggaacctatcaagccgactcctatgaaaggagggagttgtgccccagcttcctttatcacattttgctatttctgcagtaaactgctggctggtattatgtattagaattagtctcagcaccaggagcttgaagagtggcaagtgacaccgtgtattctttatcttagtttctgttgacataccaggtatttgtagttggcagacaggcagaatttcatattaag

SEQ ID NO: 11138 - DNA, 187 bp, Zea mays
  Clone ID: MRT4577_110155C.1
gcgtctcatgtcgaccgtcgagtcggccttcgccgccacgaggtggcgctcaccgtcgctcgtctcgtgttcagacccgctccggtgatggacgtcggatttgcgggtcgctgccgccggcatggtcgtcggcctgctcagtctcgtcgctagcgtcgccttctaccggaacaagccgccacagggc

SEQ ID NO: 11139 - DNA, 176 bp, Zea mays
  Clone ID: MRT4577_110156C.1
ctcgtgggcgccgtgtggggctctctcgtgtaaggattgaagatggcttctgtgacttgcgacgttaaggttgacctacgacaaatggtaaggtagagtccaatatctagatcgtcgtcattggccacgtcgacatcgagcattcagcaactactggtgaaatgatttaaaaagtt

SEQ ID NO: 11140 - DNA, 257 bp, Zea mays
  Clone ID: MRT4577_110157C.1
gccggccgggccgggctagctctcccgatcctctcctgcctgtatcgcatagtcacaggctcacagcacaacgcctgccaaacctgcagccaccgatcgagctacgagccacctagtccggtagtccctgcagtagccatgtccaaggccttcgccaagtcgctgtcccagctgaacaaggccctggtgaggaggctcaaggccctcgtcgtcgtcacccgcgcgcagccgcctgcgccggcgaggccgacgacgtg

SEQ ID NO: 11141 - DNA, 398 bp, Zea mays
  Clone ID: MRT4577_110158C.1
gtagtagcagccgcagcccaaacggttggcttttctggcagctgcacagcagacccttggggaagcttttctggcagctgcagctacatgattttgtctcggtgtagtagcagccgcagcccaaacggttgtaggggtgaaaacgggtagggtacccgaaacgggtaccggatacggatactcattcgggaccatttttcggatacggatacgggtatttttatattcgggacggatacgggtaatacccggatagtacagcttcggattcgggtcggatatggaacgagtactacccggtaaatacccggatattcgggtcggatacgggtacccggaattcgggtacccgatttttctttttctgcataataatatagttataaaaacatgacttt

SEQ ID NO: 11142 - DNA, 426 bp, Zea mays
  Clone ID: MRT4577_110159C.1
gttggttatccttttttttgttgttttacacttttttacaaagaaggggagaaaaaaaccccagagcggggggaacaagagcaggtaaaaaaaaacggcaaaaaaaacgcacaggccgacccaggcaagggccgaccggtcccggcaggcggaccagccccccggagagacaggggaattacagcccggcccccgcaaggccacaaccgttccctgtgggaaagcgaaatacacccacaattacacacaacaaacaacccgcccgcgagaaaaaaaaacctggggcgcctaacgagcgagctaacacacataaactgaaaggggcaaaccggcggggccccaggagggaaacaaatcaaaccaattgcattaatgaaacggccaaccccccaggagaaaaaccttgcggaccggccgccaaaaaga

SEQ ID NO: 11143 - DNA, 247 bp, Zea mays
  Clone ID: MRT4577_11015C.1
cccacgcgttcgcccacacgtccgaccactcttacgtccactcgtccgcacacacgtgcgcgtgttaacatttattcaggttagcctcataatttttctccatgcacaatagtgtgattcacttaaatttcatactttcattttgtcaggaaacatgcttcaccatataactaaccatatcctttattagtgtactttgccatttgccctatatggccttttctatcaagctcaacaatgctaattt

SEQ ID NO: 11144 - DNA, 203 bp, Zea mays
  Clone ID: MRT4577_110160C.1
tccagcgcgtacggaaaatagttagtggggcagagagcatagagaatggacacgctttcatgcatattctacggagaaagcttactggtttatcctcaactgacgctgcaggatagtggcctgtggagcgaatccacacaggaatctgtccaaggacggagggcaatggaatgataagaggacccgcgtgacaacgtgtgacc

SEQ ID NO: 11145 - DNA, 673 bp, Zea mays
  unsure (1)..(673): unsure at all n locations
  Clone ID: MRT4577_110161C.1
gccccgcgggagccgctcctgctgcctcccccgcantncttccttcncccctggcnncttgcctctcctgctntttcngcngcnncgctctaccttcaacccctgctgggtgngccctgctccttcctggtccccgcggngncgccgnncacctgccgctgcgcctccgctgncccctcnnccnccgcnccncggctgccctccccccccngctncgccnccccnncncgcncnnccnncncccnncccgccggngcccccctccncccccccncgcctcncccccccccccccccccccccgcccccccccccccccccccccccccccccccncccccccccccccccccnnccccccccccccccccccccccccccccccccccccccccccccccngccccccccccccccccccgcccccccccccccccccccccccccccccccccccccccccccccccccccccccccccccccccccccccnccccccccccccccccccccccccccccccccccccccgccccccgcccccccnnggcccccccccccccccccccccccccccccncnccccccccccccccgcccgccgccccccccccccccccgcccccccgcccccccncctcccccccgccgcccggcccccccccccgccccc

SEQ ID NO: 11146 - DNA, 153 bp, Zea mays
  Clone ID: MRT4577_110162C.1
ccgatgtgtccccgagcgtccctgtgtacttcgtgcggcggtcctccctttcgacggagtaccctctcgtgtgcgagagcacgctggtcccctgcgcgaatacctttgagcgcaaaccatgcctgctatcacgagcgtcgcttgttgttggca

SEQ ID NO: 11147 - DNA, 405 bp, Zea mays
  Clone ID: MRT4577_110163C.1
aactactccggaacaagcaaacaggcccggccggaggatactggttcggcccgtactacagccacgctgcagatggaaaaggactgcacgggattgctggccatatcatgccctacaacgaccagccttgcaggctagaactgaccatggctaagcatgggagacaagcgcttggcatgtgcctgcgaccattgcatatgcgtcggctaccactactgtgacgataatgacaccacgctgctggaggactgctgcagcacgtactcatgcggcaaaggggccaaggttggaatcgaagctacacatgtcgagccaaggctatcgatactagaggctacgagatgacagctagaagacacaggccatgactgatatgacagggtgaatagctcaaataggcccatg

SEQ ID NO: 11148 - DNA, 309 bp, Zea mays
  unsure (1)..(309): unsure at all n locations
  Clone ID: MRT4577_110164C.1
cgaaancccggggccgaccacacccttccgcccacccttccnttttaacttttaatgtcatttttcagaaaatcttaccaaaattgaaggtggcttttatcccattgggtttgaacttccnaaaccaaaattccaatataaattttaaagttaccaaatttgtaaaaaaatgtaattatttttttccaactaatttttttaatgttcccccataatttaacatgtttaacctttttaaacacctattatacactttttatttcacaactttttacaataacttttaattttacttaaaaaatttctttt

SEQ ID NO: 11149 - DNA, 1841 bp, Zea mays
  Clone ID: MRT4577_110165C.1
tgaaatcgtccctccacggcggcagcaaaaacagagggctcggtattcggctcgagcgacagagaatccatggcggcggcggcgtggtgggagacgctggtggtggcagcggcggcggatggaaccggtgggagcagcaccacggtggtgtccatctgcatgttcacgacggtgctgtgcctgtgcctcgtcgccggccacctcctcgaggagaacaagtgggtcaatgagtccatcaccgccctcgtcatcgggtgcatcataggagtgatcgtatttctgctgaccaaggggaagcactcacacatcctgcggttcgatgagcagctcttcttcatctacgtgcttccaccgataatcttcaacgccgggtttcaggtcaagaaaaagcagttcttccacaacttcatgaccatcatgtccttcggcgtgttcggcgttttcatctcaggtgcaatagtttcggcaggctgctattggctcttcccgaaagtggggtttggagaacttggtgcggtagattatttagcactgggagccatattttcttcaacagacaccgtgtgcacgttgcaggtcataaaccaagacgagacaccaaggctgtacagcctggtgtttggagaaggagttgtcaacgatgcaacggcggtcgttcttttcaatgccatcaaggatctcgatatcagtcagctcaagggtggggttgtgctaaaagtgatatttgacttcctctatctctttgcaaccagcactgtcctcggaatctcaatcggtctagtaactgcatatgttctcaaagctctgtattttggtaggcattcgaccgatagagaggttgccttgatggctctcatggcctatctatcgtatatgctggcagagttgctagagctgagtggaattttgaccgtgttcttttgcggcattgtcatgtcccattatgcatggcacaacgtgacagagagctcaaggattacaacaaagcatatatttgcaacattatctttcattgccgagacattcatcttcctttacgtcggtatggatgctcttgacattgataagtggaggacatcaaaggaaagcttcaagacatccatcggtatctttggcatcctcatattgctcatactactgggacgagtggcatttgttttccctatatccattttgtcaaatatcatgagtggaagttctgaaagaaccccgatcacattcaagcaccaggttgttatttggtgggctgggctcatgagaggtgctgtttccattgcactagcatacaatcagttcacattctcaggtgtaacatcggatccagttcatgccaccatcatcaccagcacaataatcgtcgtcttcttcaccactctggtgtttggcttcttgaccaggcccctgatcagtggcatgctcccgcaccagtcgagggcgctgtccagaggccatagcacaggcagcaactccccgaaggatgacttcaccctgccgttcctgtcgggcgatgaaggcgcgtcaggcagcggtatcgtcttggagcaagccaagaggagcttgtctatgatgctggagaggcccgtccacacggttcacatctactggaggaagttcgatgacaggttcatgaggccaatctttggtggaccgcggtcgcactgactgcaggtgcatataagaggagttagtttctctgaattctgtcagcatagttcgcccatggcactgtaaagttgataacactgaatgctttcaagcaactctttattatttttagtacttatattacatcactgcaatcttacaaacataatttttttttaaaaaaaaaaaaaaaaaaa

SEQ ID NO: 11150 - DNA, 1159 bp, Zea mays
  unsure (1)..(1159): unsure at all n locations
  Clone ID: MRT4577_110166C.1
ngttttcttcaacagncaccgtgtgcacgttgcaggtcataaaccaagacgagacaccaaggctgtacagcctggtgtttggagaaggagttgtcaacgatgcaacggctgtcgttcttttcaatgccatcaaggatctcgatatcagtcagctcaagggtggggttgtgctaaaagtgatatttgacttcctctatctctttgcaaccagcactgtcctcggaatctcaatcggtctagtaactgcatacgttctcaaagctctgtattttggtagagttgctagagctgagtggaattttgaccgtgttcttttgcggcattgtcatgtcccattatgcatggcacaacgtgacagagagctcaaggattacaacaaagcatatatttgcaacattatctttcattgccgagacattcatcttcctttacgtcggtatggatgctcttgacattgataagtggaggacatcaaaggaaagaatgtcaacgagatgacgccctcgaaatctttccaaggttgttatttggtgggctgggctcatgagaggtgctgtttccattgcactagcatacaatcagttcacattctcaggtgtaacatcggatccagttcatgccaccatcatcactagcacaataatcgtcgtcttcttcaccactctggtcggtatctcaactaataagggacctagcaatacgtgaatgagacttgagcaggctgaaacttgcccatgaatgattgcaggtgtttggcttcttgaccaggcccctgatcagtggcatgctcccgcaccagtcgagggcgctgtccagaggccatagcacaggcagcaactccccgaaggatgacttcaccctgccgttcctgtcgggcgatgaaggcgcgtcaggcagcggtatcgtcttggagcaagccaagaggagcttgtctatgatgctggagaggcccgtccacacggttcacatctactggaggaagttcgatgacaggttcatgaggccaatctttggtggaccgcggtcgcactgactgcaggtgcatataagaggagttagtttctctgaattctgtcagcatagttcgcccatggcactgtaaagttgataacactgaatgctttcaagncaactctttattatttttagtacttatatt

SEQ ID NO: 11151 - DNA, 787 bp, Zea mays
  unsure (1)..(787): unsure at all n locations
  Clone ID: MRT4577_110167C.1
atcggcctaggcactacactatattgtttaatcgtaccatatcggcactatacgacactaacacattatagtgctcgtgtgcaccattttactttaagaactcaaaaatataaacgtttataccattataaagtgaatttattatgtttaaaatcataccaaattatatgcacacatcacaatctcatctatatataccattggttggtctaaacagtgcctaatcgtgccatacccatcatatatcggggtggtagcccaagcacgaaactagacccgtgtcgtaccggcgctggaactatatgattcgtgcatgtgccgtgccgaagcactacatgtcgtgtcatgcttagtgacgtcctatttagcatgtctcacttggccatctatagttgaaaaggatccttacccttttcttattggtcgatcgtcctccttcagctagaaaggcagtattatatccttaagcagtggtaacaacgcagagtcgcggggttgggcttgggtatgaatgtaaatggtatgtatattattctcgtttgtattcaaattggatccgcctaaaagggctaagatcttacctgtattcaagtccaggtacttagtatctaatccgtatcgatctttattcgtatttgtattctcaaagattggtatttaatattttgatatatatttaaatcttattctacacaacttaatattagtattgatctgaatccgaaaaaaaaaaaaaaaaaaaaaaaaaaaaaagtactctgcgttgttaccactgctnnaagggcga

SEQ ID NO: 11152 - DNA, 646 bp, Zea mays
  Clone ID: MRT4577_110168C.1
tgctactcttttatctttgatatctcttccccatattttgttcaggcattcgaccgatagagaggttgccttgatggctctcatggcctatctatcgtatatgcttgcagagttgctagagctgagtggaattttgaccgtgttcttttgcggcattgtcatgtcccattatgcatggcacaacgtgacagagagctcaaggattacaacaaagtgagctcaataatcaatgttcaaacatttcttaagaatcgaatgctgtgttcgattgatctcttcggatccattctcagcaatgtttatgctgttgccaagtcatccttgtttcttatggatgtgtctgcaggcatatatttgcaacattatctttcattgccgagacattcatcttcctttacgtcggtatggatgctcttgacattgataagtggaggacatcaaaggaaaggtgagcaaacagagaacaaagtctcgtctatttatctatttatacattctaaattataggctatgttttgatgcataataaagtctatgtatctacaaaaggcagaatggtttatatttaaaacttagggagtagcttctatttattattttctatttaagtaaaattatgcctcaaagctattatatatattttttt

SEQ ID NO: 11153 - DNA, 596 bp, Zea mays
  unsure (1)..(596): unsure at all n locations
  Clone ID: MRT4577_110169C.1
cgtggngttccattgcactagcatacaatcaggttactaaagtttttgctagcaattgtctttttctgaataaactgtttctgattcgaagctaatttttgacttaccaaccctttatgtattgttgtagttcacattttcaggtgtaacatcggatccagttcatgccaccatcatcactagcacaataatcgtcgtcttcttcaccactctggtcggtatctcaactaataagggacctagcaatacgtgaatgagacttgagcaggctgaaacttgcccatgaatgattgcaggtgtttggcttcttgaccaggcccctgatcagtggcatgctcccgcaccagtcgagggcgctgtccagaggccatagcacaggcagcaactccccgaaggatgacttcaccctgccgttcctgtcgggcgatgaaggcgcgtcaggcagcggtatcgtcttggagcaagccaagaggagcttgtctatgatgctggagaggcccgtccacacggttcacatctactggaggaagttcgatgacaggttcatgaggccaatctttggtggaccgcggtcgcactgactgcaggtgcatata

SEQ ID NO: 11154 - DNA, 700 bp, Zea mays
  unsure (1)..(700): unsure at all n locations
  Clone ID: MRT4577_11016C.1
aattcggcacgaggaccatacataccagggagcagggatcatgggggcgatgacaacaactgccgtctcctctgctcctccgccgtagtctcctctcctccgctcctcccctcctatactctccagatcgggatcccattcacacacactcgcgccctccagactcggggagacggctgaagaggccgatggtgcggaggaggagagggacctgcgggaggcgttcgacgtgttcgacggcaacagggacgggctcatctccgccgaggagctcggcaccgtgctgcgctcgctcgggctgcgccgtcagggcagcaccggccgggccgccgccgattgccgcgacatgatacgacgcctcgcaggggcggagccagcccttttttttttttggggtcagctgaccccgcttcgctacgtcgcctcgtcgaccgcgacggcgacgacatggtcagcttcgaggagttcaagcgcatgatgggctgatggccgtcgtcgtcgaggcctagcctcctcctctacaggcggagtttggtttggctttcacaggcgtccaccagtccaccaaacgtgccatcagttcagttcgtactccgcgttactagttntagctagcaagttaaaagatgtgtttggcccggcacgactagcgagtggctgctctgtctgtaaacactgtccagggaactcaataataaca

SEQ ID NO: 11155 - DNA, 291 bp, Zea mays
  Clone ID: MRT4577_110170C.1
aatccgaatacatcttgattaggaaggcacactaacagcatgacgatacactgtaatttacaaacctgtaccaagaagcacgtactctttaaaaagtgtgggttttcacaaatcatccatgtctagcagtattattatttggacctcgagttaaatacaacatctagattacttgatctttgaagcatttaggagcatattcgactgggctggcaccggaaagaatttgaacagccctttctttttattctgctagatccttttcattaagacccatcttttaagggggga

SEQ ID NO: 11156 - DNA, 295 bp, Zea mays
  unsure (1)..(295): unsure at all n locations
  Clone ID: MRT4577_110171C.1
caatcctaaaaaacacatacacctcttctactgctcagaatacttattttcttttcctcaanatcaacaacaaatcctactccatcgagctccaatccatcaactctctaatcttctactaccatttccctaacctcttcatcaacaatcctcacaacatcccttaacatcacttctctttccttgcctactcaactctccctctacatattccagcataactccatcatctttcctctgaccaaactattcattgcctcattcactctactactaactttcttccccactttct

SEQ ID NO: 11157 - DNA, 473 bp, Zea mays
  Clone ID: MRT4577_110172C.1
atgttcaatttttttagggttctaaccgcctaaactttaaattttacagagcgtatatgtatcaaacccaaaggtaaccatacacattttgcattcgtagaatgggcaagacacttttcacaggttatacaaccatgctggtgggggaacaaacaccaagagcatttccaaacattgcattcctggcctacctttgagaccatatataaagatcaccacccactgtaaggaaggtgactcaaacaacatttccaagctacaaaaccattgcataaggacggaggaacatataacttgaatggtataaaaaggcatactgaattctgtgctggagaaaggatttggctatagatgaattgatctggagtactgaaggaggctgacaaagacactgaattttgctacgaaaagcctttcttgtatcctgtactttatggctgctcgcaatgagtgggacctttcttcaaatttct

SEQ ID NO: 11158 - DNA, 229 bp, Zea mays
  Clone ID: MRT4577_110173C.1
gcacgaggaaactgaggagcttgtgaatcaagtacttgatgaaattggcattgatatcaaccaagaggtgattactgtgataattatacatttttaagctttcaaaaaaattgtccagtgcctttttagtttcttaaacatgctttcgttattggttgtgttttatacaaatgccactgagtcaccaggtcgtggattcgaagcaacctctccgcatatacaaggggaa

SEQ ID NO: 11159 - DNA, 877 bp, Zea mays
  unsure (1)..(877): unsure at all n locations
  Clone ID: MRT4577_110174C.1
ccggccggggcatcctccggaaaaaatcactccaaacctatgaacaaaatgcatgcctcagaattccattggctcaataattgccaaaatagagcggaataattactatcgtgtagaagaaactctactctgatctctttctgtcgccatggggcatcaaaactgccgtcgtcctccgcatgtcgtcgttgctcttgttgcgatagtcctgctgcaaccatgtttcgtctcggttgcatcctcgtccagctcggtggccatcgacggcggcgggaccaacgtaaaggtgccggcggtcgacggcggtgctggcagcttcgtcgagttcgtgaccgagaacgtggagctgtacagcaacgtgagcaatgagcacatgtacgggtcggcgggcaaggtgtgggatccgcagctgctggtggcgcagggcatggtggtacggtacgtggtgagccccgacggcaagggcaagttcaggaccatcaacgaggccgtcagggccgtgccggaggggaacaagaggagggtcatcctcgacatcaggacggccacctacagagagaaggtgctggtcccgtacacgaagccgttcatcacgttcttgggcaaccccaagaaccccccggtgatcatgtgggacgacagggcggcgacccacggcaaggacggcaagcccgtcggcaccgtcggcagtgccacggtggcggtggagtcggactacttcatggcctccggcatcgtcttcaggaaccacgcgccgatggctgcgccggggcaggcgggcagaaccctcgtcatgtaacaatcctcacggctactcttcattacataaattagctggtatcgtatgtacaaaaaaaaaaagaaaacaattgnggcc

SEQ ID NO: 11160 - DNA, 319 bp, Zea mays
  Clone ID: MRT4577_110175C.1
tcatagccaccgagccgagagagaatatactacgactacatcctgcctgctggcaaggcagtagagtttcgagctaaacctgatgacacagatatagagcgcgggacgtcgtcagctagcgagctagcctagcctagcctagctgtagcaatgattcagcgatggcgtcagcacccgccgcactcgccatggtcccatcctcttcagcatctgtgttggtggtgtcttctttggcaacagcactatccgccccagctgctccagcttcgaccgacatcttatcggcccctgcgtcgttcgcggtattggctactatcgc

SEQ ID NO: 11161 - DNA, 255 bp, Zea mays
  Clone ID: MRT4577_110176C.1
agatcgcgagcggccgccctttttttttttttttttttttttttttttttgggtaattccattcttcacatcttctttaatatatctttcttacaagggattcactaaaatcctgtgcattttccaaaggcatatcttgtgtttcctcttcaatcctcttgatcagcaaccagtttcctaacaatttgacgtatactagaattgccttctgctatgttttcaagtaaaaagaatctatgaaactgatgctgctta

SEQ ID NO: 11162 - DNA, 233 bp, Zea mays
  Clone ID: MRT4577_110177C.1
tcgagaacggcatggcaacagttgctgccacagaagctgcagtggttgacaagaaggcagatgctaagatggagattgctgggctggaggccaaggaggaaaagctggtgaaaggctgcatctttgggactaagaggaagttccctaacacagaggtgctggaggagtcgccgtatgttggtaaatttctgaggagaggaagggtacagcagttggtaagaacctccacatat

SEQ ID NO: 11163 - DNA, 967 bp, Zea mays
  Clone ID: MRT4577_110178C.1
ccccgccccgcagccatgcagcgccacgtacgacgtagcagtgatccattcccacgtacgttccagaagaatctgcagcagggagggacgaccagctagctagccatccatccagatggtccgttggttgaagccgggtatgtgctcgctgagggcggcccggtcgttccgggcgggggcgtgcgtgttccggcccgccccgtgcgggctgaccaagacgggcgggcgggcgagcgcggccgccagggcgcgcgccgggccggcccacgccggggacggcccgcgcgccagcccgcccgccgtccgcccctcgccccgcaccgcccgcagggcttccccccccgccaccgcttcttctccgactcccaccataataacacccccgccgacaagtgacctctactgataaattcatctcatccacgggtctgttgcgctctcgccgcccgcccgccaccaccgcccgcccgggcctcgacgccgcccgcgtatatatagtgtacatgtgccgggcgaataaaagttgagcctcttaaagttgagtctcaaaaaaaacccaatgggggcggccctcggctctatttttttttatttcgcgctttttttctattgtgtttttccccctcttttcccctccctctttgtctcttttttttttttcccccgcccccgccctttttcggtattttttctctttgctttccccgcccgcactccactcaccttttttgtctttttgtttttcccccttttttttgttgtttgtcgtctgttcttgtggttgtcccttttcatccccgcgtgccctgccgatgtgcccgccggctcagtgtgtacacgttgtaatacttgacgctgtcttgatacgtgggattgccttgtttttgctcccaccttttctccgcgccccgttgtgtttttcgccatgttttcaccccacccttttgtcgccccttctatttctatc

SEQ ID NO: 11164 - DNA, 499 bp, Zea mays
  Clone ID: MRT4577_110179C.1
attcggctcgagggggaatgggagccaatgggaggctgggacatggtggtgttgaagataagaaaaaaccaactcttgtggaagcattaaaagatcgtcacgttaaaagtatagcatgtggttctaatttcacgacctgcatttgtatacataagtgggtttcaggtgctgatcagtctgtctgctcaggttgtaggcaaccatttggcttcacaagaaagagacataattgttacaattgtgggcttgttcattgccatgcatgtagttcaaaaaaagttctgaaagctgctttggcaccaactcctggcaaaccacatcgcgtatgtgattcatgcttcatgaagcttaaggcagcggagaccagcagcaacagctcacatagcaaaagaaatgccattgctcgtcgctctgttgatagcaaagacaggtcagagagaccagaaataaggttttccaggcttgcaactggatcaacagcataaccactcaagcaagc

SEQ ID NO: 11165 - DNA, 101 bp, Zea mays
  Clone ID: MRT4577_11017C.1
gctttggaatgcttggtccacatggagccgggaccacatctttcattaatatgctgattggactccttaaacctacatctggtactgcttatgtccacgga

SEQ ID NO: 11166 - DNA, 225 bp, Zea mays
  Clone ID: MRT4577_110180C.1
gtgagaatcgagcggcagattggcaggaggcagagaaggcaaagtatcttgcaagaaactaggtttaggatcatctgggctctgtggtaaagaactgcagaacgtacggaagctatgcgaaacaggaggttgcagatttattgtttctttgaccttaaacattatgcaggtttcattgggaggaggcaaagatccaagcttgggaaaatctccagaaagcgaaaa

SEQ ID NO: 11167 - DNA, 380 bp, Zea mays
  Clone ID: MRT4577_110181C.1
caagcaactgggcaaccaaaatgaacgttatgactttgctaaaagccttagcggtctttaaagaccactccagtgggacgagtgaaaaaaaggctggtattacgcagggtctgcaccaagggcaaacggggccggctaacgacgttcatcataaactcctttacctatctcatcaaaaaaaacgcacagacctttgtctccatcttcgttaccaggttcaatcaacctgctctttatccagcccaccgttcatggcgcttgaatcttaaaacttgtcataaaatgttttttccattaggcccaaaaggtttggactttacggcatgaataagatcctgaacactgttaaagtcaaagtgtgggcttaatactaacttttc

SEQ ID NO: 11168 - DNA, 215 bp, Zea mays
  Clone ID: MRT4577_110182C.1
catcttgccgtagtcaaagatggtatggtaggctcccatgaagacgtcacccagtatccacagagggcctaccggagggggcacgtccagagccgtgaacccgctgatgcagtgcgcggcgaacccctcgccgaccttgaggacgtactggtcaggccggagctcgaacgcccttccaccgatgctgaacgcaacggtctgcagggaacccacgc

SEQ ID NO: 11169 - DNA, 3084 bp, Zea mays
  Clone ID: MRT4577_110183C.1
cattgggtacctcgaggaattcggcaggaggcccctcctccctgtctcggcttcgattccgcacttcccagttcttcttcttctcgacccgcctgccttccttcccgtcgtcttcttccccgctcctccgtctcccactcccgtacgtggtacgtcctcgggctcggagaaggaaaagcccgctctggcaccagctcctcgcatctcatctcccctgccaggcctcctcgtcccggtctggagcagatatgggtgtcatcggaggaacacctcctgcaagctgcccaacaacccggcactgcgcagaatgggcccgaatctacttgaagtactgcttgtgcagccagaaggaaggcgctgctctggcacttggactaatcagtgtcgtaagctggggcctcgccgaggtgccacagataatgacaaattacagacacaagtcaacaggggggctctctgtcgccttccttatgacctggattgttggagatttgtttaaccttgccggttgcttcctcgaacctgcaactctgccaactcagttctacatggcactgctatataccatcacaactctgattcttactggacagacgatctactatagccacatctaccatcatcttaaactaaaaaactccagggcagctagcaagcctcaaaagcatcaacaccgggatgcttcattacgcgaaaagcttttgggtgccaagggcagtgcagcatcaagaaacaatgaatcagatactacagttcttattccaagctcacctatccctgttaatatgaaattggttgaccaataccatggaagcagctccaacgctgactactactacatgtcagcaaggtccttgtccaggagtccagtgccaactgctggtatatggtccggcagtaatcgtcaatcatcaagaagtcctccacaaatgaatgatcaaaggggatctttaattggtgagatcgctccggaacattctgcaccatctactgttacaaaaaatgccctctcagtggcaccatggatgggtcttctattgggtacgtgcctcttgcacattttgattggaaacaaacatagggagatggcaagtggcactgtcataccaattggaggaaattcttcgctcagccatggcaatggaagtgaacttggacgctatcttggttgggctatggcaataatttatatgggtgggcgccttccccagattttgttaaatatgcaaagaggccacgctgaggggctgaatccattaatgtttacctttgctttactgggaaattcaacatatgtaggaagcatacttgtaaatagcttggactggtcgaaagttgggccaaatctcccgtggctcgtagacgctggaggatgtgttttgctggattcttttgtatcctttacacctctcctactttggtcacaatatgtttctactccataatacttgtctgagtataaataaaacaaacgtttgagaagaatactagttacagaaaaagactggcccttaagtgagtactgagtacacagcaagtaccctttatacttggccgtgacaatgttaacctctgattccttttggttgaggtcaacccatgtagaagttaaatattgaccaataattagtcaaattatatgaatacttaacatagatagcggcaccaatagcttcatattcaaatcacatttaagaccccgctgattttgtagcattgataataaaatgtaggataaaacatatttttaaaagctattcctaatttaaaatacgcaccagattgatagacgaatccagtcatttttgtgtgcgtcaatgttcaaaaaaaaatgggatgagcgtactaagcggttcatgtcatggaccttcggtccatagggatagttgtcttctccggcgaggttatacccctctgccgcaggcttggttctagggtagcagccctaggcgcttgagagttcaagagagagattggtttgataatgtattccttcttcctttgtctcctgcatacaggcctatatataggccaccggttgaccaactaggcaaccactaattaggtaagtgactaattggaattatcttccctacaagctaaccactaattaggtaagtgactaattggaattatcttccctacaatttaggtctatcaatttagccaccaaattagtcactttcctttgccatgccttccttgcgcgcgctttcctttgccatgctttccttgcgcgcgctgctgccaaatcagtcacttttctttgtcatgccttccttgcgcgtgctgctgccagcgcccgtgccttccttgcgcgcgctgctggcagcgccccctgcggtctctcgcttttggcgcgtataggtgcggccccacatgagtgaccgttccctatgatgcccatgacatctccccctcccttgaggaccagctcgtcctcgagctgccatagacttacatgagtgaccgctctctatgatgcccatgacagttcaaccaaaaaattgaactgatggaagaagttagtcaattcacttatatactttaacagtcctcatgcaggaaccgcacatgttggttttatgtgaacctgttaacctatgctccactgataaaatattctccaactttgctgcacaaaatatttggaatagttgtattgttaatttacttttagtggacagcccttaaccatgttgcacagatcattcttcagttcctttatttccattatcggaagcaaagggagctttcagatgagcacgacaaagcagataaagcctgacagaaatggtttcttcttcagtacaaagaactgaagctgaaatgagtgctcatacaactggctctgggtagcagcatcattcttacgtgaagagcaccactcatactcaggagtcggggacagatttggagcgtcatttcactggttgctgcttggggagggtagttctcacggcgtcatctcttgtggagaggcttgtgcacttaatttgccttgtagtatcaaaacgtcttgtataatattatctctgttctcgaatattggttcattatctctgttctcgaatatttgttctc

SEQ ID NO: 11170 - DNA, 620 bp, Zea mays
  Clone ID: MRT4577_110184C.1
gggtaccggcgcccctctctcgagtttttttttttttttttttttttttttttttttttttttaacatctaacctttcatataaataaatatttccctcagtcgtttcaaaaataaactaacaggtaacaaatatttggagaacggagataatattatacaagacgttttgatactacaagacaaattaagtgcacaagcctctccacaagaaatgacgccgtgagaactaccctccccaagcgaggaccagggaaatgacgctccaaatctgtccccgactcctgaggatgaggggggctcttcacgtaagaaggatgctttgtactgaaaaaaaaaccatttctgtcaggctttatctggtttgtcgggctcatctgaaagctccctttgcttccgataatggaaataaaggaactgaagaatgataaaagaatccagcaaaacacatcctccagcgtctacgagccacgggagatttggcccaactttcgaccagtccaagctattaacaagtatgcttcctacatatgtggaatttcccaggaaagcaaaggtaaacattaatggattcagcccctcagcggggcctctttgcatatttaacaaaatcgggggaag

SEQ ID NO: 11171 - DNA, 395 bp, Zea mays
  Clone ID: MRT4577_110185C.1
aagcccgaattcggctcgttcaccatccaatcgtactttctttactacctcatacacactctcatgggcacctttaaaacactgaggcgggacaccacagcctacatcatctactaactatagactgcatccaaacaacatgagttctaaacagatcatcaccactaaatacaaccccatatgaattaaaccacagatccctattatatagtgatctaacccacacaaattaattctttccaccaacctgcaacccaatgctcaaatccaaactaaaccaccctagtccatccaccaaccaatccacgaaaagagaaagacaagaaacttattagcctccacaaaacttacatctattagcaaacatacatcccctagttatacttaacccactg

SEQ ID NO: 11172 - DNA, 272 bp, Zea mays
  Clone ID: MRT4577_110186C.1
agtattttcaagggttcatgaccacagcagcgggatggaccagtatactgcgatgaactgcacaggacaattaaccatcacatggtgggagcgtgctaccacgccctgtgactgctgcccaaatgcatcgacactccatgtggcatgcaacatgaggcaagactcagatggcagaaacgtcatcgttcactaggagctttacagccacgacaatacttacacgaccgaagcgacgctgaagtaagcgcaagtcacacatagccttcggagga

SEQ ID NO: 11173 - DNA, 590 bp, Zea mays
  Clone ID: MRT4577_110187C.1
tttgcgactcctcagcttcctcctctccttccttccttagctgtcccccttcccgccacctctgacccgtttgctgctcctgatcctgacgcacgtacgtctgggctgctgtactacgcgattctcgcggcggcgcccatggacccgtggatcgggcagccttccctgagcctggacctcaacgtcggccttccgacggcggcgaggccgcctgcgaccaccaccaccgccgaggtcttggtcgaggaggacttcctggccgtcaagaaagaccgagaggtgcaggtgcaggtgcaagcgctcgaggcggagctccggcgagccggcgaggagaacaggcgcctcagcgacatgctccgggcggtggtggccaagtacgcggagctgcagggccaggtcaacggcatggcggcgccggtggtccacggcgggcaacagcgccgccgccgccgccgccaaccgccagtcctccgcgtcgtccgacgacggcggctccgcggccggctcgccgtccaggaagcggccggtccggagcgacagcctcgacaccgcgccccagcatcacaaccgcaagccgccgtcgccgtacc

SEQ ID NO: 11174 - DNA, 831 bp, Zea mays
  unsure (1)..(831): unsure at all n locations
  Clone ID: MRT4577_110188C.1
gttaaatattgaccaataattatgtcaaattatatgaatactcaacataggattgcggcaccaatggcttcatattcaaatcacattgaacaccgcggtgattttatagcagttgataataaaatgtaggataaaacatatttttaaaagctattcctaatttaaaatacgcaccagattgatagacgaatccagtcatttttgtgtgcgtcaatgttcacaaaaaaccagattgatagacgaatccagtcatttttgtgtgcgtaatgttcacaaaaaaatgggatgagcgtactaagcggttcaacccaaaaaattaaactgatggaagaaggtagtcaattcacttatatacttcaacagtcctcatgcagtaaccgcacatgttggttttatgtgaacctgttaacctatgctccactgataaaatattctccaactttgctgcacaaaatatttggaatagttgtattgttaatttacttttagtggacagcccttaaccatgttgcacagatcattcttcagttcctttatttccattatcggaagcaaagggagctttcagatgagcacgacaaagcagataaagcctgacagaaatggtttcttcttcagtacaaaggtctggttctcctattatgaacatttgttatgctgcactgtagttgtggtctgatgggaacccttgtacagaattcgcaattttgagtataatgtaagtcttgaatgatgtgtcaaactgaagtagggagatagaatgtaggaggcatattcactctattctattgntgtatacgtgcgtatgcagaactgaagctgaaatgagta

SEQ ID NO: 11175 - DNA, 1885 bp, Zea mays
  Clone ID: MRT4577_110189C.1
agggcctctcgagggaagggcaagagcggcggcgggaaaaaaaagatcgcgtcgacgcctcttcccctcccccagacctccccgtctaggcttcgattccgccctcctcgaacccgccttccttcccgtcgttttctccccagctccatcgtcctcgggctccggagaaggaagagccgctctggcaccaggtcttcgaacctcccctgccctgccccgcctcgtctccccctgtccccgtctcggtctgttgcaggtatgggtgttctcggtggagcacctcctgcaagctgcccagcgacccggcactgcgcagaatgggcccgaatctacttgaggtactgcttgtgcagccagaaggaaggtgctgccctggcacttgggctaatcagtgtcataagctggggcttcgccgaggtgccacagataatgacaaattacagacagaagtcaacagaaggactctctgtcgcttttcttatgacctggattgttggggatttgtttaaccttgttggctgcttcctcgaacctgctactctgccaactcagatgtacatggcactgctatataccatcacaactctaattcttaccgtacagacgatatactatagccacatctaccatcgtcttgaagcaaaaaaatccagggcagctagcaaggctcaaaagcatcaacgtgcggatgcatcattacgtgaaaggcttttgggtgccaaggacggtgtgttatccagaaacaacgggtcagatgctacagtccttattccaagctcacctattcctgttaatgtgaaattggtcgaccaataccatggaagcagccccaacaccgactactactacatgtcagcaagatctttgtccaggagtccagtgccaactgctggtacatggttgggcagtaatcgtcaatcgttaatgactcctccacaaacgaatgatcaaaggggatctttaattggtgaaatcgctccagcacattctgcaccatctactgttacaaaaaatgccctctcagtggcaccatggatgggtcttctattgggtacgtgtctcttgcacattttgattggaaacacacatagggagatgccaagtggaactgtcataccagttggaagaaggcttttagtgtttgtggagggtcatggaaattcatcgctcagccatggcaatggaagtgaaattggacgctatcttggttgggctatggcaataatttatatgggtgggcgccttccccagattttgttaaacatgcaaagaggccacgctgaggggttgaatccattaatgtttacctttgctttactgggaaattcaacatatgtaggaagcatacttgtaaatagcttggactggtcgaaagttggaccaaatctcccgtggctcgtagacgctggaggatgtgttttgctggattcttttatcattcttcagttcctttatttccattatcggaagcaaagggagctttcagatgagcacgacaaagcagataaagcctgacagaaatggtttcttcttcagtacaaagaactgaagctgaaatgagtacctcatacaactggctctgggtagcagcatcattcttacgtgaagagcaccactcatactcaggagtcgggacagatttggagcgtcatttcactggttgctgcttggggagggtagttctcacggcgtcatctcttgtggagaggcttgtgcacttaatttgtcttgtagtatcaaaacgtcttgtataatattatcactgttctcgaatattggttcattatctctgttctcgaatatttgttctcaaatatttgttacctgttagtttatttttgaaacgacggagggaatatttatttatatgagagattagatgtaa

SEQ ID NO: 11176 - DNA, 911 bp, Zea mays
  Clone ID: MRT4577_11018C.1
ctcgaggtcggccggggcgccctccagactcggggagacggctgaagaggccgatggtgcggaggaggagagggacctgcgggaggcgttcgttggacgtgttcgacggcaacagggacgggctcatctccgccgattagctcggcaccgtgctgcgctcgctcggcctgcgccgtcagggcagcaccggtcgggccgccgccgactgccgcgacatgatacgacgcctcgtcgaccgcgacggcgacggcatggtcagcttcgaggagttcaagcgcatgatggccgtcgtcgtcgaggcctagcctcctcctctacaggcggagtttggtttggctttctacaggcgtccaccagtccaaccaaacgtgccatcagttcagttcgtactccgcgttactagttttagtttagctagcaagttaaagatgtgtttggcccggcacgactagcgagcggctgctctgtctgtaaaccctgagtgtaccagtgtatttccggcgccaccaccgacgatccacttcctgagcccggggagtgggatgagaaccgattttcacctcgggttcccggtggaagtagcaatatatcctgggatcgtactgtcagactgatacagccgtcggacccaggccagccagaaccagaggacacgaccgacgttggaaacgaacggctctcgcctacttcttcatttgagtgcaaagctgccggcatctgatccttgcttttagaacaaagcgaaagcccctgaaaatggcaaaggtgcagggttcgttgttgtttgcgtgggtgtgaccgtgagtcagaaagtagaaacggttccgcttacataacttttacttttctacatggtatagattcatgcagccattgtttttttcgaaaaaaaaaaaaaaaaaaaagcggcc

SEQ ID NO: 11177 - DNA, 736 bp, Zea mays
  unsure (1)..(736): unsure at all n locations
  Clone ID: MRT4577_110190C.1
cgtcttaaataataaaggntaagccttgatgtaaaaggcttaaccttaagttgtgtcaggtaagtctatggcagctcgaggacgagctggtcctcaagggagggggagatgtcatgggcatcatagggagcggtcactcatgtgaggccgcacctatgcgcgccaaaagcgagaggccgcagggggcgctggcagcagcgcgcgcaaggaaggcacgagcgctggcagcagcgcgcgtaaggaaggcatggcaaaggaaagcgcgcgcaagaaaggcatggcaaaggaaagtgactgatttggtggctaaattgatagacctaaattgtaggggagataatttcaattagtcacttgcctaattagtggttgcctagttggtcaaccggtggcctatatataggcctgtacgcaggagacaaagaaacaaggaatatattatcaaaccaatctctctctctcttgcaatgactctcaagcgcctagggctgctacccttgttccaagatctcaatcaagttctgtgggccatataaagtgttggcccgtattcggtgttgcaacatatcgcctggaattgccaccatcgtccctcatcattcggtgttccacgtctccgaactgaaaccatttactcctgattatacagctgtaaacactgatcttcctcaggttctagacctgacttggacaacaacaggtgattccagagtctatccttcaacgntggctgatc

SEQ ID NO: 11178 - DNA, 691 bp, Zea mays
  Clone ID: MRT4577_110191C.1
aaagcaaaagcagaccagttacatctaatctctcatataaataaatattcactccgtcgtttcaaaaataaactaacaggtaacaaatatttgagaacaaatattcgagaacagagataatgaaccaatattcgagaacagtgataatattatacaagacgttttgatactacaagacaaattaagtgcacaagcctctccacaagagatgacgccgtgagaactaccctccccaagcagcaaccagtgaaatgacgctccaaatctgtcccgactcctgagtatgagtggtgctcttcacgtaagaatgatgctgctacccagagccagttgtatgaggtactcatttcagcttcagttattatactcaaaattgcgaattctgtacataaagggttcccatcagaccacaactacagtgcagcataacaaatgttcataataggagaaccagacctttgtactgaagaagaaaccatttctgtcaggctttatctgctttgtcgtgctcatctgaaagctccctttgcttccgataatggaaataaaggaactgaagaatgataaaagaatccagcaaaacacatcctccagcgtctacgagccacgggagatttggcccaactttcgaccagtccaagctatttacaagtatgcttcctacatatgttgaatttcccagtaaagcaaa

SEQ ID NO: 11179 - DNA, 387 bp, Zea mays
  Clone ID: MRT4577_110192C.1
tttgggtttacccacgcgtccgcggacgcgtgggctgacgcgtgggaaaaaaactataaatagtttaattttataaaaaaaaaaagataaaaaatggacatggagttaataataataacaataaaaatccatatacggggcggctcttgattggatccacccttcccttcccttgtcatgtaacgccttattttttttttatggcccccttattttaacccacggtccggctttttaaaacatgggaattggaaaatccacggggttacctaactaaatggctttggttaacatccccctttggccagagggttttatagcaaaaaggcccccactgttcccctttcctaacagttgcccagcatgaatggggattgggcccccccc

SEQ ID NO: 11180 - DNA, 1893 bp, Zea mays
  Clone ID: MRT4577_110193C.1
gggtacctcgaggccggccgggtgaaaaggactttgaaaagagagcaaagagtgcttgtaattgccgggagggaagcggatagacctccccgtctaggcttcgattccgccctcctcgaacccgccttccttcccgtcgtcttctccgcagctccatcgtcctcgggctccggagaaggaagagccgctctggcaccaggtcttcgaacctcccctgccctcctccgcctcgtctccccccgtccccgtctcggtctgttgcaggtatgggtgttctcggtggagcacctcctgcaagctgcccagcgacccggcactgcgcagaatgggcccgaatctacttgaggtactgcttgtgcagccagaaggaaggtgctgccctggcacttgggctaatcagtgtcataagctggggcttcgccgaggtgccacagataatgacaaattacagacagaagtcaacagaaggactctctgtcgcttttcttatgacctggattgttggggatttgtttaaccttgttggctgcttcctcgaacctgctactctgccaactcagatgtacatggcactgctatataccatcacaactctaattcttaccgtacagacgatatactatagccacatctaccatcgtcttgaagcaaaaaaatccagggcagctagcaaggctcaaaagcatcaacgtgcggatgcatcattacgtgaaaggcttttgggtgccaaggacggtgtgttatccagaaacaacgggtcagatgctacagtccttattccaagctcacctattcctgttaatgtgaaattggtcgaccaataccatggaagcagccccaacaccgactactactacatgtcagcaagatctttgtccaggagtccagtgccaactgctggtacatggttgggcagtaatcgtcaatcgttaatgactcctccacaaacgaatgatcaaaggggatctttaattggtgaaatcgctccagcacattctgcaccatctactgttacaaaaaatgccctctcagtggcaccatggatgggtcttctattgggtacgtgtctcttgcacattttgattggaaacacacatagggagatgccaagtggaactgtcataccagttggaagaaggcttttagtgtttgtggagggtcatggaaattcatcgctcagccatggcaatggaagtgaaattggacgctatcttggttgggctatggcaataatttatatgggtgggcgccttccccagattttgttaaatatgcaaagaggccacgctgaggggctgaatccattaatgtttacctttgctttactgggaaattcaacatatgtaggaagcatacttgtaaatagcttggactggtcgaaagttgggccaaatctcccgtggctcgtagacgctggaggatgtgttttgctggattcttttatcattcttcagttcctttatttccattatcggaagcaaagggagctttcagatgagcacgacaaagcagataaagcctgacagaaatggtttcttcttcagtacaaagaactgaagctgaaatgagtacctcatacaactggctctgggtagcagcatcattcttacgtgaagagcaccacacatactcaggagtcggggacagatttggagcgtcatttcactggttgctgcttggggagggtagttctcacggcgtcatctcttgtggagaggcttgtgcacttaatttgtcttgtagtatcaaaacgtcttgtataatattatctctgttctcaaatatttgttacctgttagtttatttttgaaacgactgagggaatatttatttatatgagagattagatgttgactggtctgcttttgctttacattcattttttttccttcc

SEQ ID NO: 11181 - DNA, 134 bp, Zea mays
  Clone ID: MRT4577_110194C.1
cccacactttcgtccactcgcccggggagaggcttaggttcctttgtagagacatagacaggaagataggcaaggcgaagctacagaatccgtactactgtgtctcaccccagagttggatgaatgtggtgata

SEQ ID NO: 11182 - DNA, 242 bp, Zea mays
  Clone ID: MRT4577_110195C.1
ccagtcctgttggacgtcagcctagcaattagctcattgacttcagattggagaactcgacaccatgaaggtgcttatcgttgcccttgctctactggcgctcgctgcgagcgccggcttcagtacaagcggcggttgtggcttgcagacaccacccgttcatttaccgccttcgctctatatgccggcttcggtctatctggcttcgcaacaataatccgagccattgcaataccccaatt

SEQ ID NO: 11183 - DNA, 267 bp, Zea mays
  Clone ID: MRT4577_110196C.1
gtaataaaaggcacaggggaatcgaaaaaaatgacccaagactgcacacaccacgggcctgtcctgcattaatgtataacctcaatgaagctgactgatcaagatgactggccgccataactgagagtgggacacatcacctctaccaggttgatctctacatagaactcatgtcgtgcttggtatactgaagctataccgagcacaagacaaggattatcattcagctgaggtctgggcacgggtcctcctgtcgcacagggggcg

SEQ ID NO: 11184 - DNA, 484 bp, Zea mays
  Clone ID: MRT4577_110197C.1
gcggtgtcgtgcaggtactcaaggccgcgcgcggcgccctgcgcgacacgcatgcgcgtcgcccagtcgagcggcgcgcgacccgggggcaggtccagcaggtggtcctccagggagcccagcggcatgtactcgtagatgagcatgctgtggtcggcgtcggtacagaagcccagcagcgtcaccaggttggagtgcttgagcaggctgagcatgagagcctccaccaggaactcgcgcgtgccctgcatgccgttgcggtccagctgcttgacggccacctccgggcccgacgacgaccccaggcggcccctgtacacggggccgaacccgccctcgcccagcagcgactccggccggaagccgcccgtggcctcggacagctcggcgtacgtgaaggcgcgcgccgtgaccttgcccgccttttccatcttgaggatatcctcggccacacccctgtgacggtagctcactgactcggcga

SEQ ID NO: 11185 - DNA, 337 bp, Zea mays
  Clone ID: MRT4577_110198C.1
aaaacacataaaaaaaaaaaaaaaaaaaaataaaaacaaatataataaaaaaaacaaactaaggctatttgggggaattcatcggactccacggttacatcgccttcattgcattacaatagcgtctactttcttgtcatataattccaatcccttgacttcaattaacaccgtcttctaccttcaaaatcccgacctaacacgcatttactgccatgtctgttgaatcaccttccaatacatggactacttcccaaactgccactacttacaaagacctgaccatttttcttcacgcttttatagtacatggcacgctcctctttcatcaatattt

SEQ ID NO: 11186 - DNA, 340 bp, Zea mays
  Clone ID: MRT4577_110199C.1
tttgcacggaggcatccgtcaaatttctcgaagggcaaccaggcgaggcctagtgtagggtttaacgagtgagaggggggaaatgctgcgccacgccgcccgccgtctcgtctcccgcaccgccgcggctcccaccgcccgccgcgcgctcgtcacggcagacgtgcctgcggaggccgacgatgactccacgtttgtggaggcgtgtaagaaggtcgccctcaacatcgagcccccaacgacgcccctctttctcatgcatcctttcccgtctacgctctctaccatcctcactaagctcaccgtcaacttcttacttccctacatgttctatatctcc

SEQ ID NO: 11187 - DNA, 283 bp, Zea mays
  Clone ID: MRT4577_11019C.1
gcgcagacgcgtgggcaggcggcaaggccccttggaagcatctggcgaccaaagcggcgcgcgagtcggcccctgcgaccggcggcgtgaagaagccgcaccgattccgaccgggcaccagggcgctgcgcgagatccgcaagtaccagaagagcacggagcttctcatccgcaagctggccttgcagcgcctggtccgcgagatcgcgcatgacttcaagaccgacctccgcttgcagtcctacgccgtcgacgcgctgcacgaggcctaccaggcctacct

SEQ ID NO: 11188 - DNA, 230 bp, Zea mays
  Clone ID: MRT4577_1101C.1
gcacgaggccacgtgtgggccgacgtccggagcgccggcgagcccgtggcgcctgccgcggacgccgacctgaacgacgtcacctgccgcgcgatccggcgcgacctcgccgcggacggcggcagcacgtgggggtacctgcggcagcgtccgcggcacggcgcggatgtagccgacgcggtcatgcagatcgagcggctgctgttcgtggacctcgtcgcggacaccat

SEQ ID NO: 11189 - DNA, 509 bp, Zea mays
  Clone ID: MRT4577_110200C.1
aagggaggcccccaaggttttaaaactttaaaagggggggggttaaaattccccaaaccagttttttagggttttcgggcttgccctgtttgggggtttttccccttttacgggggggtggggccccccccttccccaatttttgggggaggtcccaccctgaccctaaaccctttttttttaacccttaaatttttttgggggttttttgtttttttttttaaaaaccttggggcccattgggggggacccttttttttttttttttccaaagggccctatttgcccttttaaacccaattttttttttttccctttttgccccggttttaggccccttaaaaaaaaaaaagggggtgcccccaaaaaaaaaaaaaaaaggggtaaaaattactttttttgaaaaatttgggaaagggccccccctaaaggccctttttttaagggagggccctaaaaggttttttgggcccccctttgttggaaaaaaggggcccctgctttggggg

SEQ ID NO: 11190 - DNA, 497 bp, Zea mays
  Clone ID: MRT4577_110201C.1
ccgcccacggcgtgccgttcctgtcggtaaattacgagcggggcagcgataatggcgtcacccgtcgacgaggatctccccgggttgcctcccatcaagactacacctctgctgcccccggtgccgtcgtccgccacggttacggccacgtcctcggcctcgtcctctccgtcgccggcgtcatcggcgtctgcggtggacagcgcgaaggccgcggaggaagaggatcgcgagccgtcaacgccgacgtcggaggggagcaggctgcggtcgcccgccgtgtgcccgccggcgccgagcaagccgtcggccccgcggctgcccgccaagcggaagccgacgcccgcgcccgcgcgggtgttcgtatccgtgccgcgcgacctcttcaccgtcttacggtcgctgacccccaagaagcggatccggatatcgtgatgccgggaacgatccggccgcgatttgcctttgccaccatctttcctacaaggacggacgat

SEQ ID NO: 11191 - DNA, 354 bp, Zea mays
  Clone ID: MRT4577_110202C.1
atggaaaagcacatggccctggggcagagaaaaactaccagcatctatcggaaccaacatgggcaaaccaaaggagcataacctgactggccccctttggggctgacatacgctaactcaacatcgcgcgaattggacactcaagactccggacataaggcaacggtgctagccaccaatgctaaagactctcacgctagctgacaacggatctgaagacctttacaaacgcaagcaactgatctgccccacacattaagctggtctcccacggcccagagagcggtccgacaacgtcctgactgaactgctggcccacggcgagggtgacctcgcactcactccatggcacgg

SEQ ID NO: 11192 - DNA, 218 bp, Zea mays
  Clone ID: MRT4577_110203C.1
gggttttctttttttttttttttttttttttttttttttttttttttttggagaatttctttattaaattttttgggggagacacccagtcaaacgtgcctttcgccaaaaggcttcgggcgccacttggtttaaaaaactcaattgttcttgggattttgttattcaccccagggatgccattttgctacttttttcctcaatgcgagagccaaaat

SEQ ID NO: 11193 - DNA, 387 bp, Zea mays
  unsure (1)..(387): unsure at all n locations
  Clone ID: MRT4577_110204C.1
gagcttagttaaaaaccgccgcccgngannnanaagggggggnttaataaaaggangggcgggnaaaaacacacaaagggggggaagaaaaaacgggggccgaaaggggaaacaaaccaagggagaaaaaccgaacgccggcaaggaacacagaaaagaggggaggcacaaaggacgggcgaacngcaaaaaaaaacgagagccgcccaggcccaggacacgggaggagcaaaaaacaaggcaacgaaaggggaaccggagacgaaggacaaccacaggaggaaggggccgaagacatagaggcggaaaagggggaaaaaacacaaggccgagaacgacccaaaagcggcagacaacgagccagaggaaaactgcaaaggaagaaag

SEQ ID NO: 11194 - DNA, 332 bp, Zea mays
  Clone ID: MRT4577_110205C.1
aacgatcggtgcttttaatttgtgagcaagcgatcgagctcaccaagaaccaccgttgctcactagttgcagccggtcggagcctagaacgacgaggcggtggatggtgatgccgccgtgctgcgacaaggtgggagagaagattggtccgtggaccctctaggaggacctgatgctcgtctgctatgaccaggagctcggacccgagaactggcgcgccgcgccgaccaacagcgggctgatgcgctgcagctagagctgcaagctgcggtggacaatctaccttcggccgggaatgaagcgcgtaaactttaccgacctggaggagaagc

SEQ ID NO: 11195 - DNA, 325 bp, Zea mays
  Clone ID: MRT4577_110206C.1
caatgaaattgttccaatatgtacatatatacagtattgatttacaacaatgctggcttcgaagcggtggtgacaatgacagtcaccgtattatatataccccccctattaccttagtagcacaaaagggctcctaagtaagtcggcaaaacactgctccgaccgcaacacgtcccaaccacaaaggcagtggtaactgcaacgtattcagcaactttcacattgcgcaagaacgaatggactttaccatgcccgcttcggagtgcaagagctctcatagaaccaatgaacaaatcattattgaagcgggcgtcgaatgaaaaga

SEQ ID NO: 11196 - DNA, 935 bp, Zea mays
  Clone ID: MRT4577_110207C.1
gccgccccttttttttttttttttttttttttttttttccctccaaagtaagctaaattcaatcgcaattcagctccaaagtaagttcatggaatacaattacttagcagtaacagtacgccgaaggaaaaaaaaaacatatagcccctggccatggtgtacattgatagtgtgacacataaacacgccaacatgattaacttgctatcaaaaaaaagtacagaaatcattctctctctctctctctcttgttctattctgaaagcatcttcatctctcctagacgatagtgaagatgaacaacacttccagggcacaaccgctcaagtacccagactgaaaatccatctgcagctgctttttgctcgcacaaagcaggaacagtttcatgaaaaaacgtttaccatgtatccagcagacacgcagaaaccattcctggtattgttgcacataaactggcggcacatttggtacaagatgtgcccagggcgctagctaatcttgagatttggtaggctccctcttcttcccatagataaggccagtgtcctgtggatcaggaatcggtttccgcttctcgacgtaacgataaggatccgttgcagcagccaaagcggctcgctcctcctgctccttctggagctggcgcgcgggcttcacccagaggtagtaggcgagggttccggcgacggtccaggaggcgaggttgctccacccgcggaggccgcccagcgcgttgcccacgaacgaccgcgtgttccccaccgcccggccccacccgctggccggagccatctccctcttcactccctccggcggcctctacaccgcccctcaagcgctgtgaccgagcagagctgccgccgaccgacgccttccgcacttccctggccccgaccgcccttcgcctaggtgtctccccggccggcctcgag

SEQ ID NO: 11197 - DNA, 466 bp, Zea mays
  Clone ID: MRT4577_110209C.1
gggcgggggcttttttttttttttttttttttttttttttcttttttttttttttttttttttttcttttttttttctttgtttaggaataaaagctggcctctcccactcttaggaaaagatacatggaccccccgggaaccatgggggggggagccggaaagtaactttttatttctggggggccccttccctcatccaaaaaacttttttgtggaatacccaccaataatacactttaaaggggggcccccccaatgatgggtgctcggaagggggctgccgggtttgccaaaacaagggggacaaagggcaacaatgggtgtatttggaaaaggggtgcggggttacccgcaaactgcttgtaaaagggccccaactgttgctgggtaaaaaaggaagcacgatttgctgaagttagctcgcaaaaggggggtagattttgctggtggaaaaaaccgagggg

SEQ ID NO: 11198 - DNA, 656 bp, Zea mays
  Clone ID: MRT4577_11020C.1
gttacttcttgcttcgtcctcgctacgtgatactaccgcatacgattaatcttcgtgtcctctaacgcagatggtctcgcgctccagacgtgagtcgtcagatagcatccagacaccgatacttgatttcctgcatgggttttcaagctggataagtaaaccaggtgaggtggatgatctactgctgggtctgctgttaaatgtggtgatggaaaggcaggtcaagatgaccctgaaaacattaaaatgaatgagtggcttgaaattccatatactactcttaaagtactcaagcggaggttgttaaatgcaacagcagtgcattgcggtgtgcaacagtgatttatttatagagcggaccccattgacctactactagtatagcagtattaaccagagcgtgacgctggtgaagagtatcgagagtactagatataatctcgattatatctactgagaactggcatgaagattataataagggagatagggggtgatgaccgcggagcgcttataagatgcaacgatcaggtaagacattagataccactgccatttgaaaaatctctgtgagttgggcggatggctctcggaataaaagcgtaagtggttgtggctaagggtgacactgctatttaaaccaaaattggaagctt

SEQ ID NO: 11199 - DNA, 171 bp, Zea mays
  Clone ID: MRT4577_110210C.1
gcggcgggattttggctcttccgttcgcgtcctctgtctgtataagtgactgtgccatcttcctctgaatcaactctgttctgacacaacattgtcccgagacactcaaattccaacaactcgacatccaacattcacaatgaagagtgccgttctctctgtcctggccac

SEQ ID NO: 11200 - DNA, 236 bp, Zea mays
  Clone ID: MRT4577_110211C.1
ggggcgcatcaacaaacttaaacaaaaatgctttgttgcaccactacaggtaacgataattgccataacaaaaaaactgatcggcgtataagatatcactacttggatgggacgaatttttactcgaaatcctcgggggaaaaataatgcccgcccaaaaaattgagttggttgaacctttcaatgaaaaaggcctttcttttctcttatgtaaaggtcttggagaaaaacctttt

SEQ ID NO: 11201 - DNA, 585 bp, Zea mays
  Clone ID: MRT4577_110212C.1
gcagaaaaggagatcaaagaaaaaaagtcatcaggcaaaaaggtgacaaagggtaaaggagaatccgttgaagcagttcttcccagcaaggatgatctgaggaagaccattactgaaatcctcaagaaagttgacttcaacacggcaactttcagtgacatccttaagaagcttgacaatcactataaaatggatctggccccaaagaaagaagccatcaaagttatgatccaagacgagttaacaagttatcagaggaggacgaaggagagggagccggagacaccgagaagaaacagcagcagcctcaggcgaaggagatcgaggcatctcgttgattatcgccgcaccaactcgagaacctcacccctgatcgtgtatgttatggggcatgatgtgtaggcagcctccacacctttttagctgactgatcggagagttactcctaggcaactcttgtttctagatttgcaaatggtgtctgaaactctgcgtttgctgcggcagaacgtgtacttaattgttcgtgataggtctgaataacacatggatggtatcagtctgtagcttattttttttcccaac

SEQ ID NO: 11202 - DNA, 489 bp, Zea mays
  Clone ID: MRT4577_110213C.1
gaagagttttttttttttttttttatataaaaacagatgactatcacaattatatatatcatcagcagtctaaatattcaaatttagatactaaatactgattgaaactgtgatacatcatagagtcttgtaattaaatttgcagaaaataatgagtaaatttagccagtcatacatgtggccgggcggctcagccaagccaggcacggcccaagcggtccaagcatctaggcggtctggcgcgacccacgcggccaggcgcggccagcccatgaggcctggtgcggcccaagcatggccaggcggccagacacggtattaagggtattggaaaccctaaccgctcctaccttcttgcagccgccgccatggtgtttgctccggccaagccccggcggccactgccgatggcgcggcatgcggccaggcacgggatccggccatggtgcggcctgggcacggcgactccggccccagcagcattgcacg

SEQ ID NO: 11203 - DNA, 2531 bp, Zea mays
  Clone ID: MRT4577_110214C.1
ctgtgcggcgctgccggcccgggctcggaaaattctccttgtctctctcactctctctgtctgtgggaggaagttgagaaggcgaggagccagacaagcgacgcggctccactcccttctcaggcggccccctgctgctcaccgcccagctccagttattagagaaataagggtcggcttggttgcccgaggcctacccagcgcctgcgatggaggagaaggctatggcaaatggagcagcgactgctgatgttgctgctcctgataataaggataacaccaaggaagaggctagcgagagcaaggaaccagcagccaatcaggatgccgatgaccagaacaaaggcttggaaaatggcgccgagggccagtcaggtggagatgtcaatatggcagatgctgaggtcacagaggaaggcgatggtgatcctggtgttgcaaagcaggtggattctgaagatatcaaaacggatgccgatacaaaggaagatggcaatgcaaaggcagaagaagttgaggatgtcaagatgactgaggctgacacgggaagtacagaggtcaaagataaagaagagaagggagatgaagttgtggacacaactgtggataagcaggatgaatcgaaggagcaagaggaaggtgtttcggctgagcaagatgagaagcaaggagaggaagcagaagaaaaaggaaaagaaacggatgccgatgagaagcaagaagaggaagcagaagaaaaaggttctgctgatgagaaagatgaagatgaaggtgaccagaagatggaagagaataaggaggagactccgaagaataagaaagcaaggagtgccagggatagaagccagggaaatgataataaacatgatggatccaaatctagggaagccaaaagtttgctgaacaccccaagcccatatggtaccaactcgccctcaacgtgagaggaaaatagtggagaggttggttgaggtgattgataaagagccaaacaagaatttcgtggttgagaagggacaggggactcctctgaaggatataccaagtgtggcacacagaatatcaaggaagaagccttctgatcttaaatttcttcacagtattctttttgggaggaaaggcaaggctgtcgattttaaaggacatatactccaattctctggatttgtttggcatgagagtgatgaaaagcagagagccaaggcaaaagagaagcttgataagtgtgtaaaagacactctgctggacctctgttggacccttggtattccaactccgaaagcaaacattagaaaggaagatattgtgtcaaagctgttggacttcattgctgaacctcactctgcagctgaatcttggggctctgatgatcagggatcaaattctaaaaaacgcaagagaggaggtgaaagtgcaagtaagacgcctgatggcacacctagtaggtcgaggaagaaatttgtcgatgacggtacttctagtaaaaggcagaataaagcgctccagtatgatactgaggaggatgaatccatgaagtctgacagtgaggaaaacatagatgaagattcagatgaagctgctgacaaacaggaagttgactatggatctgggaaagaaaaggcagggaagaagttatcggaggtaaaagaatcttcaggtaaaaagaagtcaaacacagggagtggccacaaatcaggtcctccaaataaaattataaaaaatctggtaaaaaaagtatcatccaagattcacgaggaaaaagaaagccccaatggtagtgccaaggttttttcgagaaagaagaaacccacagcagaaaaggagatcaaagagaaaaagtcgtcaggaaaaaaggtgacaaaaggtaaaggagaatcagctgaagcagttcttcccagcaaggacgatctgaggaagaccattactgaaatcctcaagaaagttgacttcaacacggcaactttcagtgacattctgaagaagctcgacaatcactacaaaatggatctgaccccaaagaaagaagccatcaaagttatgatccaagacgagttgaccaagctatcagaggaggatgaagaaggagagggagacgaagacgccgggaagaaacagcagcagcctcaggcgcaggagatcgaggcatgagggatccgcggaaccccgtagctgtagtagccactgttaattatcctgtacttagtgcgtatgtgtcgcatgtacaggcatcctttgttgatttcagccaccaacttgagaacctcaccccctgattgtgtatgctaaaagacatgatgtgtaggcagcctccacaccttttagctgactgatcggagagttactcttaggcaacaacttgtgtttctagatttgcaaatggtgtctgaaagactgaaactctgcattcgctgtggcagggcgtgtacttaattgttcgtgataggtctgaataacacatggatggaccctagttgttcgtgttgccttgagctttttaaaaaaaaaaaaaaataaaaaaaaaaaaacccaag

SEQ ID NO: 11204 - DNA, 3406 bp, Zea mays
  unsure (1)..(3406): unsure at all n locations
  Clone ID: MRT4577_110215C.1
tggactactttgatttcacctgtaatctcttgttatgcggttgcttcttatattctcattatgttcttcattagaacaaanatatgtcattctctgttttttagggtttccacctaatgtttaagtttgtgaaatttctttagttttataatgttctctttcactgatttgccttttcttttgaaacttattaacagtgccagacaagcgacgcggctccactcccttctcaggcggccccctgctgctcaccgcccagctccaggtgatatgcacgaggtcaaaagtgggcgcgggaaataggtgctatgcgctcctgcgagaggattggggaagactttacctcactcaaatttacgggaacagtcaccctcgatgcgtgacgcgaaaaaatgggagaactttgcatgagctgttggccaaggtcctccctcgcctctctccgacgatatcctgaaactcacccccggctgcttcttctggtcgccgcccagctcaggcgatggaggcagacaagcgccgcggctccactcccttctcaggcggccccctgctgctcaccgcccagctccagttattagagaaataagggtcggcttggttgcccgaggcctacccagcgcctgcgacgggggagaagaagttgggcttcgttctcgagtactcttcgttctcaggcggcccccggctgcttctgctggtcgccgcccagctccagttattagagaaataagggccagcctggttgcccgaggctgacccagcacctgcgatggaggagaaggctgtcacaaatggagcggcagctgctgatgttgctgctcctgataataaggataacaccaaggaagaggttagcaagagcaaggagccagtagcgaataaggatgctgaagagcagaacaaaggctcggaaaatggtgctgagggccattcaggtggagatgtcaatatggcagaggctgagatcactgaggaaggtggtggtggtgatgctggtgcggcaaagcaggtggattctggagatgtcaaaacggatgccgatacaaaggaagatgccaatgcgagaacagaagaaggtgaagatgccaagatgactgaggctgacgtaggaagtacagaggtcaaagataaagaagagaaggaagatgaagttgagaacacaaatgagcaggatgaatcgaaggagcaagagaaaggtgcttcggctgagcaagaggaaaacgaaggaaaagaaacggatgctgatgagaaccaagaagaagaggaagcagaagaaaagggttctgctgataagaaagatgaagctgaagctgaaggtgacaagaagacggaagagaataaggagactcaagaaggataagaaagcaaagaaagacacgaacaagaatctagtgaaagaatagggagcagggtgaacccagaaggatgtaaaaggagagggagacgaagactccaggaagaaacggtagcaacctcagtcgcaggagatcgaaatatgaggaagggccggaacaggtgtctgaaatagacgctgttaactatttggtggttggttcgtatttgtagcatggacaggaaaattatacaagtctaggccacagaaaagccatgacgaaaccttgttaaagtaaacttcttgacagtatttttttgcggtggaaatccaaggctgtcgactttaaagggcatatacgccagtgctctggatttgtttggcattaaagtgatgaaaagcagagagccaaggcaaaagagaagcttgataagtgtgtaaaagacactctgctggacctctgttggacccttggtattccaactccgaaagcaaacattagaaaggaagatattgtgtcaaagctgttggacttcattgctgaacctcactctgcagctgaatcttggggctctgatgatcagggatcaaattctaaaaaacgcaagagaggaggtgaaagtgcaagtaagacgcctgatggcacacctagtaggtcgaggaagaaatttgtcgatgacggtacttctagtaaaaggcagaataaagcgctccagtatgatactgaggaggatgaatccatgaagtctgacagtgaggaaaacatagatgaagattcagatgaagctgctgacaaacaggaaggtgactatggatctgggaaagaaaaggcagggaagaagttatcggaggtaaaagaatcttcaggtaaaaagaagtcaaacacagggagtggccacaaatcaggtcctccaaataaaattataaaaaatctggtaaaaaaagtatcatccaagattcacgaggaaaaagaaagccccaatggtagtgcccaaggttttttcgagaaagaagaaacccacagcagaaaaggagatcaaagagaaaaagtcgtcaggaaaaaaggtgacaaaaggtaaaggagaatcagctgaagcagttcttcccagcaaggacgatctgaggaagaccattactgaaatcctcaagaaagttgacttcaacacgcggcaactttcagtgacattctgaagaagcttgacaatcactataaaatggatctggccccaaagaaagaagccatcaaagttatgatccaagacgagttaaccaagttatcagaggaggacgaaggagagggagccggagacaccgagaagaaacagcagcagcctcaggcgaaggagatcgaggcatgaggattcgtggaaccccatagctgtagtagccgctgttaattatcctgtacttaatgtgtttgtttgcgtcgcctgtacaggcatctcgttgattatcgccgcaccaactcgagaacctcacccctgatcgtgtatgttatggggcatgatgtgtaggcagcctccacacctttttagctgactgatcggagagttactcctaggcaactcttgtttctagatttgcaaatggtgtctgaaactctgcgtttgctgcggcagaacgtgtacttaattgttcgtgataggtctgaataacacatggatggtatcagtctgtagcttattttttttacttgatccgtttcttctgtgggttgtgatttgtgaatgaccaaaagatggatgctgtattccagtttctgttctctcagagtaggcatgcaagaataacagctgaaccacattgggctgctgaatgattttgaaaaacgaggcgccgatactgggtaaaccctgccaatcttcagaacagaagtaggtgaagatgccaagatgactgaggctgacctaggaagtacagaggtcaaagataaagaagagaaggaagatgaagttgagaacacaaatgagcaggatgaatcgaaggagcaagaaaaaaggtgcttcggctgagccaggagaaaacgaaggaaaagaaacggatgcttgtgagaaacacctttttgacctt

SEQ ID NO: 11205 - DNA, 676 bp, Zea mays
  unsure (1)..(676): unsure at all n locations
  Clone ID: MRT4577_110216C.1
attgggtacctcgaggccggccgggngnccccgataccacaaacgtgtggccgaaattcgtcccactcttgactagcaaatgccccactataccggcgagagcgagaccgtaccagtccggatgtccaatcgctcactaggcgaaggcgcactgccactctgaatcgggcgagagcctgggaggaccacgccaccatgctgtcccggcatcctgcctggcgttgtgctgcgcgctgtgagcgatgcgacgcgtgcccgacgagggtccagctgcatcgtgcaccacctccgcccgcatcgcctactgcggcctcttcccgctctccctcttctctcctgggcgctccgcaaagtctccgcgcccctcctccagacgatcccatgcatcaaccacttctgctacacccccgaacgcgactggttcgagacccacacggcgctcaagggcaaccccgagaacttcctcttcttcaccatcatcgtcgccatcatggccgtgataaacgaccacaaggacccccgtgacaagatccacctccccggatgcatggccaagatcttctgctgggacatcatcgtcttgctcatgctctacgtgccctacctggtggtcagcttctattactctatatacaagtgtgggtctgagctgtaccttctcgatcaggtcgtcctg

SEQ ID NO: 11206 - DNA, 108 bp, Zea mays
  Clone ID: MRT4577_110217C.1
agcgctccccatgaaagccggaggagttctcctacctggcacagatgctctacggtagggtcatcatggatgtggtcaccaagagcaggcgtgcatcgcagattcaca

SEQ ID NO: 11207 - DNA, 505 bp, Zea mays
  unsure (1)..(505): unsure at all n locations
  Clone ID: MRT4577_110218C.1
agaacacaccaagcgaagcnaccnagcaacgacggaacaacaagggcnagccaagaagnagcccgccgggcgccacnggcccnnngggggagcgcaacaaanngcggcannanaccacaaggcacacnagcaccaagagccaaaaaaccacagaaccaccgaccagnaacnaaaaggggcggggaagaccgagcngagcaagccnacaggcaacaacaagcggcggcggcgagcgncnaacaacaaccaannaaccaagggcaacaacaaaccggggcacaagaaaccaaacaaaccaacgcaacacaacagcaacaacaggaccaaccagcacngagccaaccagacgnggagaaccccgacgccagacagcaacaggaggggccggcacacaacccacgcgcccgggcaaacggagcngcacaccaacaacaacaacaagggcaacagagacnggcaacgcacagagaacaagccacggggaaaccggacggccaccaacaac

SEQ ID NO: 11208 - DNA, 597 bp, Zea mays
  unsure (1)..(597): unsure at all n locations
  Clone ID: MRT4577_110219C.1
actccatcagaaacccagaatattgtattagtatggagtccccttgacacctaaagttcaccttgagcaacaatttacagttagtaaagagcaggggtgagggaggccgtgtggcagcagcttttgacaatgaataaaccccattgaatggggagaaatcagaccaagtaatacacacatttttacaatgttaactatgtcaactcttcgacaaaaatcacgatttccccccaactgcaagtttgcaaccctactaatagtacatctcatcaagcttggtcattgttttcttacatcggtgattgcaggaaccttgtctgggtagctagacaaatccacatcaagcaattctgtgagatcataaagccctccaggatcgactttgtccttgattggggtagtcattgtctcttcctgatctgcctggttgcatgatacacttggtgtcactggactgtttgaagcccaacggtaatgccagccaactccacaccctgcccacttgtgggcagtgctccctgagggaaatttcgtttctgcattgtctccctcattgngattggagagcacatattcattggatgtaggagcaaactg

SEQ ID NO: 11209 - DNA, 447 bp, Zea mays
  Clone ID: MRT4577_11021C.1
gcagctggaagtagagtttttttatcacattatgacatcaaagatcactggtcacaccaccacacgtccaaaaatatttttttgcaaccatttccccctaaaaagccaaatccagttttgagttcgacaatccataaacaaccccacacttggcacgttcaattgttttttttggcaaaaaaccccccgaggcccccaaggttaaacccccccccgttgccgttttcgtcccccccggtagcctttttgcccccggtctttttggcccgggaggggggggccggcccggccccaacctttttgaggagcgggtccgtttccaccaagtggtcctttttgaaaataaaacccaaaatggtctcgccgaggccctttttcttcttggccggcgccgggccccccctggtggaagggggcggaacaaccagcacggaccggggccccggc

SEQ ID NO: 11210 - DNA, 608 bp, Zea mays
  unsure (1)..(608): unsure at all n locations
  Clone ID: MRT4577_110220C.1
cattgggtacctcgaggccggcccgggcccgggaaagcctatgcgtcacccactccactccactacagcttacaaacagccctccgctccgtgccgtaccacagcatcgtcgttagactctgatcatctgtcntagtccactgggactgcgaatcgctggacgcgacgacctactatgctcgcgccccttgcgctacatcgcttacattcccttgaccatctacctccgaacctacaaaatacatgaagacctttatggcatagcgtgaatcttgccgctcactaggtccatagacgcactaagtgctaccatgggcgcctccgaatctgtgtnaaacagcaccagaaagcgtcgtattacgccgctcgtcttgaacaaagattattgtgtgcgtcttgagagaagcgtatccatgaccgggcgttcgatgtctaaaatttacaatttacaatttacagctgtgcggaggcgggagcagggggcagcgagcacctagcagcgcgcaagcgcggacaggatataaacacctagagggacccattgggtcccaagcccggcttcatggcccagggcacctccattgagagcgcacctcccatcccttatg

SEQ ID NO: 11211 - DNA, 391 bp, Zea mays
  unsure (1)..(391): unsure at all n locations
  Clone ID: MRT4577_110221C.1
gatcaatattgctagttccgccgttcgctatccttctgcagagaggtgaagccactaatcggaccttctctagaggtcgtgccgaccggcctcttagagcgatgattnctgctgcgacgctcaagatgttactgagagtcacatagtttggggctctggagttggagctcgacgagatcgtcaaaaacaaaaagcatgattctggaactcctatcctagaataggatgtcgtcatgttcacgtatacaaacagatcaagtttcactatggagagccagtccattcgtgaacttaggggaactgatagagtaagccatgtagccatcttctttccatactcgcggaagtcaaagactcggcgagcgctgttacaaagcagcagcttgacaga

SEQ ID NO: 11212 - DNA, 118 bp, Zea mays
  Clone ID: MRT4577_110222C.1
gtgaaccacaggagattggtgctgaaaggagggctccccaggcgaatccacatccacatccagaggcagctacaaacacccatccggaggcagcgaagtacaggcaaccactatcgca

SEQ ID NO: 11213 - DNA, 906 bp, Zea mays
  unsure (1)..(906): unsure at all n locations
  Clone ID: MRT4577_110223C.1
ggggggtgtttttttggaacaatctgcttattaggggggatatatcaatccgcatacataccatgacccaatgatacagaccgtaagaaatgatcaacttacaatacctgagcaacaaatcttcaatttggtgctgggattcagatatatatacgggcatgcctggggctgctactactactacgcacacttattagcgctatgaactcatggagaaaaccaattaacgtacgggatatatatattgatgaaaactaaagcatcaaacacacagcaataacaatcatagatgcatgcaacttactagctagctttatacagtatttgccgggatcgatggcctgggtttggatcggagctgcttgcatggtagctaagctagctatattagaggcacctccctccgtagccagcactccgaaacaaggcctgttttatctcgtcggtgcttagaacttgcctcttattattaccgtcctcctcctcctacgtatataataccacaggttattcattggtaaacagatcctttgtgtaatgcatataccatgcatatgcagagattactaacgctagctgtggttgtttaattattactacgtactactatactatacagctgctgtttcatttcatgttcgttctagctgatttatacagtttccagaatgaaaaaggaatccgatcccttccccccccacgtagtactactactcacttgtgagcaagaggcctgcatgccaaagtcgctgaagcagctcaccacgcactgctcgatctccaggcccagcacctccagcgcgcttaccgtggacagcagcacctcggggtttgtggcgcagcagtcctccaccctcgtgctncccgttgcncccgcctnctngacgtncgaactgcaccnccggg

SEQ ID NO: 11214 - DNA, 1346 bp, Zea mays
  Clone ID: MRT4577_110224C.1
tgagaatggtgaagctgatgagtgtgatggaacgcctacaagtgtagctgaaagttctagttcggtatctgttggtgaagtagtttctcatggtaagaggatcaatgatattgcagaggacaacatgagagcacataacatattgtatgaagctgttggtgaaaatatttcaggtccttcattccatttgaatgaatattctagtggaaccatacaagctactggcaagccaaacgattgtcgacgtattgattcagctgtgcggaatttgttgctcaaaggattaggtcagccgtttagtgaggaagatattattggtatctatagaacaccactgctagatcagcgagggcaagttcgttgtggtctcttccagaaggagatcgaagagaccaggagtcgtcgggggaatgcaaatgtacgttatgcttggcttccttgctcaagatataccatggagcagatggcaatgcggggtgctctggaaatcgcgaagcctcataaggggtccatttgtggtgttgggacttggcttgctcctgcaaactgtacaaattcatgtgccagatattctgattttcatgaagatggcatcatcagaatgatgttgtgccgtgtaataatggaattacatcgtatgggatgctaatgtgcataaacacatatatgctgaatatgctgttattgtccaagcacctctcgtgaccaatgaatgttcgggcttgaaggatagcgtgcccaacatatctgagatcataagttctggttctcgagacaatctaaccaaggaggataggttcgcgccttgtggtgtcgaacaagaagcacctaggctggggcgtgctccaagggccccctcctcaccatggatgcccttttcgatgctttttgctgctatttccacgaaagtgcctcgttcggacatggagttggtcatcagatactatgaagaattcaagaggaagaggatgagccggagcgacctggtggtacggatgaggcaaatagtcggtgataagatattggtttctacaataatgaggcttcaccaccagaagaagcccccatcgatggcagcagcagcagctgggctagcaagagcactcgcaaggggggaagagggagggggagtagccgagtaagattagtttaagccgccttgtcttttgagaaatttatggagcacatatgctttgtcgacatggccagacccaaggtatcaaaagggagggagatgagctgagcaactgttgtagtgtagtctcaaactcaaagcgtttaggtcttgacatttgacaaactaaaactcagaaacattatcatgagtagtgtttttttttagattc

SEQ ID NO: 11215 - DNA, 416 bp, Zea mays
  Clone ID: MRT4577_110226C.1
cctccctctctcctcccctcgccttgtctcgcttttctgctgctcggccccatccgatctggatcaacacattgaccgagcagccatggaggttcaacactccctgtctcgacccctgagcggcaagggtctgtgcgagcacaccggcagccccaggcgcggattccccatcgccgtcgcggcgttcgtgctcgtcctagccctggtcgccggaggccacggccacgcaggaagctctcgccgcgcacgccccaaccgcgaccatctttgtcgaaccagacgtccgctctaagcagctcgccgtcgtctgtcccctggcctgcgtgcccaggccacgccctgcctctacgtcgttgtcgtgttatgccgccttccatcgcgcctcgccttgctgcgcaacggttcgctgcgtcgtc

SEQ ID NO: 11216 - DNA, 263 bp, Zea mays
  Clone ID: MRT4577_110227C.1
attcccattcgaccacgcgtacgcgtaccgttcgatctaacgttggtctaaaacctatctccctgcttcacctttcggctttgggtgccacagcacaacaccttaacctactatagcatgcttatggcataccatgtactgcaagtcaacttggtgttgaaaaatgacctcataatagtatcgctcttctatccgactcacatctactctatggcttacatcttcagatatccacttgccattacttcacacagcaactaagc

SEQ ID NO: 11217 - DNA, 500 bp, Zea mays
  Clone ID: MRT4577_110228C.1
aaaaaaaaaaaaaaaaaaaaaaaaaaaaaaaaaaaaaaaaaaaaaaaaaaaaaaaactaatctttttttggggccacgacgagcgacattcgttacttcggtaccgccctaggccaggggccccaggttttgttcggttccttggccggagaccaacgctgagaggaacttgattttaaataacaaacttaaagatgttctctggtccaggaaaaaatgattggggttttgtaaccccacgaccagggatggagctggtttattttaaacaacaaccaaaccagggttctgggcggggaggaaaacacagcacatccggccgggaggcaccaataatgctacttactggacaccggagggttccgtacgggatgaagttcaatcctgccggaactgggatagcatccggttcccatggcaaggatatcttcttatggcctgcccaaggggaaggaaaaaacttcatgggacggagagggcacagaaatgctttttttgat

SEQ ID NO: 11218 - DNA, 330 bp, Zea mays
  Clone ID: MRT4577_110229C.1
gtgaatactagattatccaaataaggccttagcgggaatgcaagcggtgccgaccaacacctctttgcccgccccgcaagaaagacctattgggcaatgcagccagccatcatagctattgcggtttggagcaggctgacctgcaaagcccagtgggtgatcagtggtgtcatgaaacaccagtcatacctgcaactgcaaggcccacttcaagtctgcgctagatcgctatgctgatagaggacaagcgatgcgacctggcacctgctggctggtcgtatttggtatggacgtcgtccttcacggtgaactcgtcgagccataacttga

SEQ ID NO: 11219 - DNA, 612 bp, Zea mays
  unsure (1)..(612): unsure at all n locations
  Clone ID: MRT4577_11022C.1
gaccctcgaggctggccggttgtgttgacctgcgaatatattgaccagcttaaacttgaagcaaaagaactgtacgtgtactcttttctccccccctccccctccctctccctaggcctgttcatagtctggttgcaacccagcccaacccaggaatcggaccatagcaaaccgcacagaggcaacgtacatgctgatttgcatcgtgtccaaaccacttaacccgtgggttcatcttcttcctgctgtcggtgcaccttcctatcttattgaagttgctgataccggtcctgccaattgagtaaagaaactgcagccgctaccttgacaatcctgccttcccatctcatctgtgccgcctcttcgtgccgtccgggtccggcgtccatgactggctgccactgatcatctacttccacggaggcggatatgtcctcttccgtgtggcctacgatctgttgtacgacacctgcatggcgctcactgccaccaccttggctgttgtcgtgtctgtgggtaccaaaccgtaggagaatagaggcctgtttggacagacgccgtaggcgccgcagcacgccacacctgcggcggcgattttggggcgccanaccc

SEQ ID NO: 11220 - DNA, 156 bp, Zea mays
  unsure (1)..(156): unsure at all n locations
  Clone ID: MRT4577_110230C.1
atgcaggccgcaacgagctgcccgaaccctcgagaccaccaccgcctgcctcgccttcttccccattcccagtccctagcacatcgcgntctggcgacacaccaacccgaaccttaggtagcgtcccggtccgcggtgccagccaccgcgtgccgc

SEQ ID NO: 11221 - DNA, 496 bp, Zea mays
  Clone ID: MRT4577_110231C.1
cttggtgcaacaacaaggaggagcacattcctcgtcccccccgaaggggaaacaacgttgagcaaaacaaaaaaaaatggcgcggaaaacaccggaaaaaagaggaggagaccccccctttcccacccacctgatggaagaaagaagaaaaaaaaaaagaattgaaaaacaaaccaccgagggggggaaaaccaaccaccaggaaaagaaaccccccgcggcccacgatgatgggagaaaaaaacaaattcacaacaagaaaaactacaaaacaactacgggggggaagaacccccccgtgatgggcggcgggaaaaaaaacaaccccggaacagctaaaaaaaacaaccacgggacggctaaaaaaaaagaacctcggggagccccacaattttatcaagaggggggggaaaaaaaacaaggggggctccttcaaaaaccccccgatcagcgggggcaacaaccacccccggggggttgatcccccacctaccgc

SEQ ID NO: 11222 - DNA, 288 bp, Zea mays
  Clone ID: MRT4577_110232C.1
aggcctcccagggagccatcaatatcccaccataggttaagttacccagatgtcacaggaaggacagctggcttccgaactcaatacacacagggtgtctatgatcccaggctccggacgtgccatatgcacaacgagaaggacaagagccaacaaggaccatactcatgtagctaccctgtggcgctgctggaagcagcggccgcacgttcgagatcacgaatctctgcgcgaccatccaacgtaataccgcctccacaaaggcactccaatacacttcaacgtcag

SEQ ID NO: 11223 - DNA, 217 bp, Zea mays
  unsure (1)..(217): unsure at all n locations
  Clone ID: MRT4577_110233C.1
accccgaagcggagaaccagacgcagcgccccnnncccgacgaggggcccaagacgagggacccgnggccggagcngaacgaggacaacagccncggcgccncggccacccagcgcgccagcnccagccccaaggcgccccccgacnncaacaccagccgcagagcgccgaaaggaacaccgncaagaagaaccngagnaaccangcggaccccaac

SEQ ID NO: 11224 - DNA, 486 bp, Zea mays
  Clone ID: MRT4577_110234C.1
taggtagttgtgtcgctcatcgggcccaacatgacacccaagagaccagtgtcggcggcggaggcggaggtgcaccccatgctgaaccgggcgcggaagcgggcggggggccagatcccggagcagatccgcaacccgctcctgaaggtgcgcatcttgctcaccacctaccacacgccgcagcagtacgaccccgcctaccacaacctccggcgcaagctccccgggcccaactaccccaccaactaccccaccccggagccgacggcggaggctttagcggagactccaaccgggagcgccagcgggaacgacttggtgtacgagtcggcgtcggcgtcggcgtgctccttgtcgttctccctgccgttggtggacctcacgctggacctcacccttgcgctggcggctgctgtagcagatcctatattagatacaagtttatgtacacgtatatgtcacgtattaggtcttctatagtgaaac

SEQ ID NO: 11225 - DNA, 315 bp, Zea mays
  Clone ID: MRT4577_110235C.1
ggaaacaatccacgaacaatttttttgaccagggaattgcctgccccgttcggacagggttataacacttgcaaacatattctttggttaacaggttgggacaacaaattattggccaaaacttgtgctttgccaatcacagaagatggagccccttttttaagccttcctgggtgggatctgagaatcggccttttttttaactggtttttccttttccaacaagaatagctttatttggcctggggggtgatttaagggttgattcgttctttaccccggtttttcctggggtgctttttttgggcctggtta

SEQ ID NO: 11226 - DNA, 899 bp, Zea mays
  Clone ID: MRT4577_110236C.1
gggtacctcgaggccggccggggttgtagaaacaaagaaataaagagagacgatgggcggagaagaaggcggcgacgggctgaagctgatcgggcagtacgggagcgcgttcgtgacgagggtgaagcttgctctcagcctcaaggggctgagctacgagtacgtcgaggaggatctcagaaacaagagcgcgctcctcctcagctccaacccggtgcacaaggcggttccagtgctgatccacagaggcaagcctatctgcgagtcgcaggtcatcgtgcagtacatcgacgaggcctttgccggcatcggcccgcccctcctcccggccgacccctacgaacgctcggtggcccgtttctgggctgccttcattgaagacaagcttgtgtccccgtgggaccgagtgttccgggcgaagacggaggacgagagggaagaggcgatgaagcagatgcttgcggcagtggacgctctggagggagcactgaaggaggggagacccagacccttcttcggcggcgacagcgtcgggtacgtggacgtcgttctgggcggtgccgtctcgtacgccaaggggcacgacgcgctcttcggttccgagctcatcgacgccgccaagacgccgctcctggccgcgtggatggagcgcttctgcgagctcgacgcggccaaggcggtcctgcaggacgtcgatagagtggtccagtacggcaagatgctgatcgccaagaatgctgctgccactcgtcaggcgtagtgtttttctgatcgatcagcttgtatgtatatgaattgaacttgtaaaaccaaatcgttcaagtttgatggtaagttccatgttagaaaaaaaaaaaaaaaaaaaaaaaaaaaaaaaaaaaaaaaaaaaaaaaaaaaaa

SEQ ID NO: 11227 - DNA, 518 bp, Zea mays
  Clone ID: MRT4577_110237C.1
gccatatgtggtggacatgtggactgcatgcacgcctgtgcgcgcggacgactgcatgcagcgcgcgtcatctacatctacggtgctgcatctgcatgcatgcatggcggagcacgtacgatggaccgcaacacagacagcagtacagcaccctccgtccctccctgaccccgcaccgcctcgagttgcgaccccgcgcatgcgcgttcctcgcaggtgcgcacacgcatgcgcagcatctctccatgtgcagccacacatgcttgttttcgtaaggagccaccagagcatgagatgcatgcagacgtcgtcgctgctacagtctctgcactcaagtactgaacaacacacacagaaatactggtgccgagatcgatgatcaaacagctagatgctatagggcatgctccatgcatgtagtatataccagcctgtgggatctctctgcccatcatcatatacacggtgccccgtgatgattgtccaaaaaaccgttgctgtcgctccttccctcacac

SEQ ID NO: 11228 - DNA, 288 bp, Zea mays
  Clone ID: MRT4577_110238C.1
gggccctctggaggcacgctcgcgcggtcgccggtgcgacccacgcgtgcggactctaggagcagcgtggaaagcagaccatgtcttattgctgggttagggcggaagtgtacccggtgctcgcgaccacagccatgggggtggcgatatgcctcaggaccctgtagcgtaaaatgcccaccaacccggctgtgcgggcggccatgcataagcgggccctccatttgtttgacaacctcgacaagggatgtagctactcccagtaaccaatgcgcgggctctgactct

SEQ ID NO: 11229 - DNA, 802 bp, Zea mays
  unsure (1)..(802): unsure at all n locations
  Clone ID: MRT4577_110239C.1
gccggccgggctgcgatctccagtactattgctagtagatagtaagtagatcacgcagcagtagctctggattaattaattaataattgctcgtgcgtgtgtccagagccgccatggctgctgcccatgtggacccgctggttgtggggagggtgatcggcgacgtggtggacttgttcgtgccgacggtggccgtgtcggcgcgcttcggcgccaaggacctcaccaacggctgcgagatcaagccatccgtcgccgcggccgctcccgccgtcctcatcgccggcagggccaacgacctcttcaccctggttatgactgacccagatgctccgagccctagcgagccaacgatgagggagttgctccactggtacggctggtggttaacataccaggtggagcagatgcttctcaaggtaaacaagaaaactactttggcatgcccagcaacggagccagaaaaaatttagaagggactaaactaaattgctgcagtataaaagctcattctacatatactgtatacattttagattagggaggatgtagtggagctccataggatccgaaacggtagggggggctcgagccccgcccgccccaccgctggatccgtccctgggcatgcctatagcttactttggcatgcctatagcttacaggtggagataaccacctctagttcaaagtttaagagcatctccaagagaattttcatttttactctatatttgactctgnatttacctttttataaagattacactctagttataccaaaaaaaaaaaaaaggcccta

SEQ ID NO: 11230 - DNA, 288 bp, Zea mays
  Clone ID: MRT4577_11023C.1
cccccctgcgagaggagtttttttttttttgatttatctttgctattacatggccctcttctttcagtttgtttatgcacaggcaatggagcgttgtaagtaccatctatatgtaggctctttctatctttttttttctggaatatcaggggaaacgaaccgccaccgccagcccaagagtctgtatggaacaactctagctactgaccctcaccggaagcccgccgatgacggacgcggagagccctcgaaccaacttggcacaccaggcggtggcgccactgaccc

SEQ ID NO: 11231 - DNA, 291 bp, Zea mays
  Clone ID: MRT4577_110240C.1
ctcgactatggagtctgagactctgcgacacacgaacagaaccctctctgcgccgccgccgccgttgcactcgcagccacatcgtcgtctatccatcgctagcgctctcactgctacgattcactagaggtgtcgctatgtctcagaacaacgcctcccagctgctcccctcagagctgatcgctcggtgcatcgggtccaagatctgggtcatcatgacggtcgacaaggaactcgtaggctacctctgcggctttgatgtctacgttcatatggtgctatagtacgtca

SEQ ID NO: 11232 - DNA, 864 bp, Zea mays
  unsure (1)..(864): unsure at all n locations
  Clone ID: MRT4577_110241C.1
ctgtgcggcgctcgaggcggccgttttcaaacatctccagtactattgctatttgcatagaagtagatcacgcagcagtagctctggattaattaattaataattgctcgtgcgtgtgtccagagccgccatggctgctgcccatgtggacccgctggttgtggggagggtgatcggcgacgtggtggacttgttcgtgccgacggtggccgtgtcggcgcgcttcggcgccaaggacctcaccaacggctgcgagatcaagccatccgtcgccgcggccgctcccgccgtcctcatcgccggcagggccaacgacctcttcaccctggtcagtactagctagctagctacttgcggtgatgaagatgtgcagtgcttgattccgatcgatcatcaggttatgactgacccagatgctccgagccctagcgagccaacgatgagggagttgctccactggtacggtattaacctcttgcttgctttgcttagcttcttgtaatgcattctactctactttttctggctaatttattttttttcccgggccggcgtttacttttgcggcgggatcatatgatcgacctcctgtctctgtacgctcaaattaaaggctggtggttaacataccaggtggagcagatgcttctcaaggtaaacaagaaaactactttggcatgcccagcaacggagccagaaaaaatttagaagggactaaactaaattgctgcagtataaaagctcattctacatatactgtatacattttagnattagggaggatgtagtggagctccataggatccgaaaaccgtagggggggctcgagccccgnccgcccccacgnntggatcgtccctgggc

SEQ ID NO: 11233 - DNA, 558 bp, Zea mays
  Clone ID: MRT4577_110242C.1
gaattcgagctcggtactcctgttttttttttataataaggtgaaaacacaaaatcggacagcatgctctgtgagacgagtatcgcacgcatcgcccgcccttggccgcatcgcccatgcatatgcacatgtgctcaccatgcactcattggcttcttccttgcttgatgatgtacgtatcgttcttccaaatacaaatgtacgcatgaacttgcagaaactttaagttcgctttagttttatattcttccctctgttttaaatcatatatatatatacgacgttttggtttgtctaaatctatgtttttgttgtgcatgcaaccagatatatgtattatgtctaaacatgtagtaaagaaatacattgcaagatttgatcaggtcatagtagtgtagtagacctagtcagcgtgtgcatggtaatatatgccgactgtattggttctatgtgaattattggaatttactggacttggcccatttactcaataataaattattagataaataatgtcaaatgtccactaatgtatggtgagaattaataaaagtggtg

SEQ ID NO: 11234 - DNA, 172 bp, Zea mays
  Clone ID: MRT4577_110244C.1
cttaattgggccaagcccataaatcctaacatatattactacttaaagaaacagcaaatcgttgatctttgtaggatcgtaatttgaccgatccagatccacaccacaccacacgtggcgcgcagggagaaaacatggcaagtacatgctcgtcacgtgcgtgttcctgcca

SEQ ID NO: 11235 - DNA, 315 bp, Zea mays
  Clone ID: MRT4577_110245C.1
gatacaaaaaaacgcccctattaaatcacatgcggtggccacgaggctgacaaacaggtgcatttacacacttacatgaagcactctatcataagcacaattggtgtgggtatggggcaccacctaacactagcccatatcattggaagaattaccatgctatgcctgagggcttatgttaatgcttgaacaaccacgcgaaacaccaaaagccaaatattacacctaaaaactcccgcacattgagaaaaacaactgtgctccgcaaaaaaaaaaccacaaggccatctcactttcaaaagggaagctaatcta

SEQ ID NO: 11236 - DNA, 1337 bp, Zea mays
  Clone ID: MRT4577_110246C.1
cgtcaggtttttttgttgaaaaactgtaatcgtagccgaaggtgagctgctttcaaatggcattttccaggtaaatacatgtggatttcctcccctggaggacagagaagcgtcagtctcattgctcatgggttttgatttctttgggggaggtgtaataccaactgaagaaacactaaggttatcatcactggaaaaaaaggctgtgaatgatatgtttgtcattctttcggatgtgtggctggacaatcctgagactatggagaagttggctgttgttcttgacgggtatgatagtgtggaagttgtgccttccctctttgttttaatgggcaatttctgctcccggccttgcaatctagcgttcaattcatttgaagaactcagatttcagttcggaaagcttggcgagatgattgcagctcgatctagattaaaggaacatagtcgtttcttattcattcctggacctgatgatgcaggtccttctaaagccctcccaagatgtgcacttccaaaatatctaattgaagaacttcagaagcacataccaaattcaatcttcgtaagcaacccctgcagggtgaagttttacacacaagaaattgtgtttttccggcaagatctcctttacaggatgcggcggtcatgtctcattccaccaacaacggaagaaacaagtgacccttttgaacacctggtagcaactatcacccatcagagccatctttgtccattgcctcttactgttcaacctatcatatggaattatgatcattgccttcggttgtatccaactcctcacacgattgtattgggtgacaaaagcgagcagaaagccttcaaatatactgggatcacttgctttaatccaggttcgtttgcgaatgacagcaccttcgcagcatatcgtccttgcaccaaagaggttgagctttctgcgttggaaggctaacataaagggagaataaactgaagttctccaatttgatgaagtgtaaagtcttcgacaaattaaagaactgccacttccacacaaggaaccgtgaaaatagcatggctttcatgacgatgtggtgtttctgtgaagagaactgatgctgatatctcatcataggctcagcaaagcagtaggagcagcacattggtgtttgtgcagcatctctagctgtttgtaacaatctttaatactgcacgttagaccagactattttacttgtactgtttagtttttcattgaatcatggtaacaactaacaagattactttctgacagtgctcataactgctgtatcttcatattttgatcacccacctttccaattgttataattggc

SEQ ID NO: 11237 - DNA, 626 bp, Zea mays
  unsure (1)..(626): unsure at all n locations
  Clone ID: MRT4577_110247C.1
cactagcgttcccttaccagggtcgaccatgccagcatccatgagcactgcctacaccatggccacggctggtgtgaacgtgaaggaggattgtccaccgctctctcatggagatgaagtgtaagaaagtgcaccgcttcacggcgtacaaacatcaaccagcagccgcgcgcccacctggaaggacactgaggttcaccctcggccaaggctacgacgagctcgtggccgcgctccccggcgacgactgccgctacgccgtcttcgacttcgactaccacaccgccctcaactgccataaagcattatcttattaatcgactggccccgggcgcacgatagggccaagacctgtcgcgaatctaatcacgcctgcctcggctgcttgacggggttcactactgaggcgcatgccaccgaaccatccgagatgggcttgctcctcatcagaggctcgngcgcaatgacgcccccgatgcgctctgctactatttacgtacttacctgtgcgagtgcgtgttctcctactacatactgctcagtcttcactatgcatctgcgatcacgaacggtgtacgtacaatacggaccgatgctaattctggtctgcgtgctcccactacgat

SEQ ID NO: 11238 - DNA, 372 bp, Zea mays
  Clone ID: MRT4577_110248C.1
atgcgccccaatttcccctctccctccccgaattcctttgcccgcgctcacccgccgttcgctgcgcagccgctgaggtccgccatcgtcgactcgggctgccgccgcgccttcgacgcaaccgaggagtccccggagttcgccttgaggccgagcccaaccctagccgtccgcctgagatccaacggcccagagccgtttctcccccgcaccccgccttcctgccatttgggccccgcctgtcagccgtccgcccctcgctgcccgcctggccccgcctgtcagccgtccgccccgcccggccccgcatgtcagccgctcacgccgccgcgcgctcgcccgcccgcccgcagatctaatctcgggcgttga

SEQ ID NO: 11239 - DNA, 215 bp, Zea mays
  Clone ID: MRT4577_110249C.1
aggataggttcacacgtagcccctgttaaggatgtccatacatgcatagttcaaagcgtcacgtggacggtgtggggctaaataccagtgctccttgcgtatgaaaaaaggcactatcctctctcccagccaaggatgactatgggccctggtattttggacaaccgcctcaatcacattacgttgctggttacaacagcatccacatggggcaa

SEQ ID NO: 11240 - DNA, 2379 bp, Zea mays
  Clone ID: MRT4577_11024C.1
atggccgtcaccttccagcacaaaatcatcctccgcctcggatccatgttttgcttcggaacaatctcgtctgtaacggatgaggagggaactctgcatcgcatcacggatccgccggagagaaagttttcctcaaaggtctccgagaaaatcggagcaaagcaagaaaaagcgcaaccttcagtgctccgaaaaaagatcaccttcaacaaaccaagaaccaagggtccgtctactcggagaactccgctgtccacctctccaacagaagaatggacacggatcataaggaggaaagaagcaaatgaggccacggaacaggccgagcaggagacaaggcaacatcgggaaaatccactcttcgggcgcaacctgaaccccgacttcgcccgagccatgaacatgccgagtgaagtcggtggagtactggctcggatagctgatggcctcccccggactcccgacgccgagggctaccggtggctattcactcaagcagccaatcatcttctacccctcgctcacccaccgaacgatctacgacacgccatcaacagtcggcgggacgcatggagctccatcaacgcttcgcgcgagcggcgacatgagaacgagatccgtcgccgggaagagtacgaccgggaccacgacatcccagcacggagtcaggctaccaggaccgagtcggccacggcttcaactggtggcaccacccggggacggtcgaggcaccacgacgaccactcccctccccgggacagacaacatcatcaacgacaggaggacacatgtggagtatcggcgcttactccgcgcctcagggccattcaatggccccctaacttcaaggtatccaacgtcgacaaatatgaacctaatcaggatccgggaggctggctggccatctacaccaccgctgcccgagctgctggggcaactgaggactctctctctgacaaaccagcacaaccatgggacctcaaatccatcaaccaccgaggggacgaaactctttgttcatacctcaaaagattccagaccatgagaaatcatatccctgaggtcacggaggcagcagtgatcgaggatttctacagggaatccaatgactcggcctttgtccgaaccatactacagaaggcgccgacaacctccgagcagctgttccgggaagccgatctctacatcaccgccgacgaacgagctcaggacctcatcgggggagcaaagcctgcaccagcagcaccgcgacgcgacacgaaccaacaacccgacaagcgctgggagaagaggcctcgtgaagaagtccacgccgccggaccgcccgcctctcgcgcccgaggaggacctcgaggaggcgaacgcacgctggacgacatcctcgacgcccagtgtccgtaccacaaggacatgcgccacaccctccggaattgcagggatctcaagcattccgtcgggcacggacgacccttccaacctctacctcctcccccgccgcgaggagggccaggagaaccgcgacagccccagcagcaggaggagggaggaggtgcagccttcccacgcgttgacagagaagtcaacgtcattttcagcgaacacgggtcgcaggaaagcaagagacaacaaaagctcaacgaccgtcaggtactggtggcggctaccggtcctcccaccccgtaccgatggtctgagcacccgatcaccttcacccgggcagatcagtggctcaacttagaccacccaggcaaatacccgctcctcgttgatccggtgatccgagagagcagagtaaagaaggtattagtggacggggggagcagcatcaatgtcaccttcccccagacactccaaggcttgggagttcacctcaaagagctccacgagtcggacgctcctttcttcggcatcgtgccgactgaaggagaatacccgctgggccacatttacatgccggtcaccttcggaactccggagaactacagaaccgagttcctaaggttcgaggtggcaaacttcgactacgggtacaacgccatcatcgggaggcctggattggcgaagttcatggccatcccgcattatacatacatgatattgaagatgccaggaccgcaagggatcataactgtgcgtgctgacttccaaggcgccgcaaaatgtttccgagtggccattcaggcggccctcaccaccaaaccatcggcgacttcttctgcgcaggcgaattctaagcctgaggaagatctcgcaatacccgcgaatgaagctcaagccgtgacctctatgcggccgactaaagaaaccaagagaatcaatctcgggttcaccgacgagcgcaaaactactatcatcagttccagtctggatgataaatag

SEQ ID NO: 11241 - DNA, 347 bp, Zea mays
  Clone ID: MRT4577_110250C.1
tcgtggacgcgtgcgcgcacgcgtgggacctgggcactttcaaatgggcgcatatccgtggcccgccaaactaggagggtcacgacggcttacggcaaggacgctgcgcctcgagaggcagaacgcactagacgcgccatggagccctgcaccaagctaacggtagctgatgaccgaaccgcacgcgtaataatgcagatgccagacatccatccgccagggcgcgagctgggcgcctagactacaacaatcaagggctactacaagatcctggtagcaaagatgcacatcgagcgcagtggaattactctcgtggttaccgacggcagagagtaaaccatatctta

SEQ ID NO: 11242 - DNA, 251 bp, Zea mays
  Clone ID: MRT4577_110251C.1
ggggaaaaaaaaaaaaaatttttgggtcgccaaaacaaaagggttacatgggttggggcaggggggattttacaggtggggaaaaaatattgggggatccaaaaattatttgaaaaaccaatgcctggcctggtttgttcccctcccccaaaaaaacttgaagctcccctgcacacatgctgaagctgatcccaaacctgttggttggatccaaaaacttttgtcccgcacaaggaccaccaagcaagcag

SEQ ID NO: 11243 - DNA, 330 bp, Zea mays
  Clone ID: MRT4577_110252C.1
atgaagccgttccgagagactttaagctactggtagcaggatgggttccggtgcgcgcttcctggtgtgcgggggcgtatcgtgcgcactcctggccagcaacaactgccacgcggggcgccgcttggccgacacggacgcgtctgccggtgctgctgctgctgcctgacctgggctccccaccgagccatgcttgccaacgactgcactctgcggcacatgtggcggcctcagccctgccaacctggccagcaagcccctctacgtagctacctttatgtcctttgcctacggctccgactacctgctcgccgattgcttcttgtacca

SEQ ID NO: 11244 - DNA, 145 bp, Zea mays
  Clone ID: MRT4577_110253C.1
agagatagtgccatcatgatttgttccggctggtcaggtgcgtcttcgacactttctggtactgccagtagatcccatacctcctcgatggcatgtaactgtaccgtgctggcacatttgtgaccgggaaaccatttctctgcac

SEQ ID NO: 11245 - DNA, 280 bp, Zea mays
  Clone ID: MRT4577_110254C.1
ccgctcgaggggaccggaaggattacagggggcagaaggagcgagatgggttccaggatagcacacggggttttggtacttgttcttctgcttattgttttgcctgcgctctcgatcggaggaagggagttggcggatgaaaaggatcacaaggagcattccactgcctcttctgaaagggagcggcgacggctgcaggggtggcgacaaatgattatgggcgctacgatccggctccggcgttttccaagcctcgcttcaagtttatacccaactgact

SEQ ID NO: 11246 - DNA, 267 bp, Zea mays
  Clone ID: MRT4577_110255C.1
gtgaacgctgtagccgaaacttctgcatcacgcaccggcatccactggaccatgattgctctggggaggggcaccaaccagccgggcaggacttgctgccatctccagagcacaagctgtggcttctacaagcactgtccccagcccaagtcaaaccatgccttcctgtacctctcccagcaggtaggcctgcccgtttccctgctccccctttttccccttcacacctctgagctccacctcttcaatgtctgtcgtagagccaca

SEQ ID NO: 11247 - DNA, 1012 bp, Zea mays
  Clone ID: MRT4577_110256C.1
ctggcgcacgaggttcaagggaccggaaggattagagggggcagaaggagcgagatgggttccaggaaagcacacggggttttggtacttgttcttctgcttattgttttgcctgcgctctcgatcggtatgcaccgcaggcagattgatttccctgttcaatctgttgttatctttattttctacacatttcttgttttttttcgtcaaattgtacgagcaggtatatatgtaaagagagaaaaaaactcaggaacttgtcaaaatatactcaacatgtgctattggaagtatgtagtagatttttgtcaggcatgcaaaagtgacggatttgattcattagtattctgaaatttgattttgcaggaggaagggagttggcggatgaaaaggatcacaaggagcattccactgcctcttctgaaaagggagcggcgacggctgcaggggtggcgacaaatgattatgggcgctacgatccggctccggcgttttccaagcctcgcttcaagtttatacccaactgactcactgtgctgcttggcttctttgtgccacacgaagtctctaaaaagtatggttttgtcgatgtttaagaagggttttctcagtctacctgatgagaaggttgatgacttatgtgaattgaggagtgatgttgcatctgcatgctagctatatggatggtgaggtctaagaaagattttatcaacttgcgtgggaggttctagctagccgcaggttaagtttgtttaaaaaacatattaatagtatgtatattatgtacatagatgacatatgagaattgagacgtgatccttcatatatgcttactatatatatgcacatgtggcatgtagaaatagccgtgtactgcaaagaatgtgtgtaacttgtgtagtatctggtgttgctgcccctacgtaccccctactgaacgtagtcggcttcggttcttcagttctggcgttggatctttgatccggatgccataaattggtttttttttaac

SEQ ID NO: 11248 - DNA, 156 bp, Zea mays
  Clone ID: MRT4577_110257C.1
cttatattccacttgccaaaagtctcgagagggagtctaaccataatgcgtgagggcaaaatcatctcaacagtgttgatctgcacacttattccaagctgtactgtcatcctattttctattcacagattcaagcccttgcagtactttactggt

SEQ ID NO: 11249 - DNA, 138 bp, Zea mays
  unsure (1)..(138): unsure at all n locations
  Clone ID: MRT4577_110258C.1
gctgattaccgacatctgattatctgttctagtatagtgnnnctcgaacttaggccctctttggaattatagtatttcttataggttttaaaacagtcctatgttatttggtgatactatagtattggagctcaaaag

SEQ ID NO: 11250 - DNA, 262 bp, Zea mays
  Clone ID: MRT4577_110259C.1
ctccatcacactggtggtcgctccaagatacatatagtagcacaagtcactcttataacaaagtcacttaagaattcatgtggcacaaagcaaacataagataagataaaccaaaacgtatggattcacatttcaactgtagataggacttaatcaacagcctcgaggaaagccttaccaagaacacccttctcaattcttccatggttaccgagcagttttgcgttgacaccatcacgaacaattctaccctcactcttgt

SEQ ID NO: 11251 - DNA, 418 bp, Zea mays
  Clone ID: MRT4577_11025C.1
taaaaaaaaaaaaaaaaaaaaaaaaaaaaaaataaaaaaaaaaaaaaaaaaaaaaaaaaaaaaggaaaaaaaaaaaaaaaaaaaaaaaaaaaaaataaaaaaaaaaaaaaaaaaaaaaaaaaaaaaaaaaaaaaaaaaaaaaaaaaagtgcctacctttttaaagatcccctttttccttcctcttctttcaaattattaaccttttttcagtttgcccaaatatcaattacctcacctatcttttaaaaccatagcatttgaaaaacccttgtttttcccaattttaatcctttttaaaattatcccttttttcccttttggttattaccctaaaagcccccattattccccctttccaaatatttccccctccttattgcctattgtaccccccctttaattggtccttaaacccc

SEQ ID NO: 11252 - DNA, 763 bp, Zea mays
  unsure (1)..(763): unsure at all n locations
  Clone ID: MRT4577_110260C.1
ccccccgcggcatccagtatcaccacgccaaaccgacaagatgggccgtcttcacagcaagggaaagggcatttctgcctccgctctcccctactctcgatcttcccctgcgtggttgaagaccacccccgagcaggttgtcgagcagatctccaagctcgcccgtaagggtgccaccccttctcagatcggtgtcattctccgtgactctcacggtattgcccaggtcaagcacgtcactggtaaccgaattctccgaattctcaagtccagcggcctcgcccccgagctccccgaggatctgtacatgcttatcaagaaggctgttgccgtccgaaagcaccttgagcgcaaccgcaaggacaaggactccaagttccgtctcattctcattgagtcccgaattcaccgtctggcccgttactacaagaccgtcggtgtccttccccccacctggaagtacgagtccgctactgccagcaccatcgtcgcttaagcgaacataaaaacgacggctggccaagttcggatggaagtgatggtttcccggatcacggagttagggacaaattatggaaaaagcttgcatttagagccatgatgcttatgcgccctatctgggaggactgacagcgaaatcgacggctcaaatagaaagcttttcgaccgctgcaaaacgcatgtatgcaatggagtatactacacccagtgacgataaaattcttaaacctgaacgccaaaaaaaaaaaaaaaacccgcggnc

SEQ ID NO: 11253 - DNA, 729 bp, Zea mays
  Clone ID: MRT4577_110261C.1
tccccttcaccactgctccggcagccgtcgttcagccttgcccctctcgccgaaccaaggagtaccgggcgcggcggcggcggctgccgcccgcagggccagcatggcgtttctcttcaacaaattccaggaggcaatcaaaacacttgctaagagtccaagctttgctcgagacccacggcatcttcagtttgacgctgacgtgaatcgtttatttctctataccagctataatcgtttgggaaagcattctagaagaaaaggacgccgaggagattattgaattggctagcaaagcatctgttactgaccagcagaaacaagtgcagcaaaatgttcattatcaacttaagcatatatgcaaatcaatggatagcattcttcgtcctgatacaaaagatccatcacaatctccttctgatgcttataataattctcgacgaagtggcttgagtttggccgttggcacaggagttgcagctgcaaacaagccagtgcagctgttcctgctacgcgacctttaactcgaactgaattgtcaaacaaattcagggatcagtttggctacacccttgacatcaagccgtcactaatacctcacaaagatgcagggcaaggtctgttcttatctggagaagctaatgttggtgctgtcctagccatctaccctggagttatatactcacctgcgtattatcgatatatccctggatacccaagaatcgatgc

SEQ ID NO: 11254 - DNA, 154 bp, Zea mays
  unsure (1)..(154): unsure at all n locations
  Clone ID: MRT4577_110262C.1
aatggctccggcaccggnggcctgggcggtggcttcggtctgccgcccgggagctgcgctcacccccgccggcgccgggcggtccgccagggaagccaaacgggacccnaaacacacnaccaccaaaancgagcaagaggcaacaaggaccgga

SEQ ID NO: 11255 - DNA, 558 bp, Zea mays
  unsure (1)..(558): unsure at all n locations
  Clone ID: MRT4577_110263C.1
aagctgtcaagggcaaacacctagctactaccatcctctaatctctccctagcatccagcagcagaaaactagctgacaatgtttcggcgcaccaagaccaccatggccgcgccagggccaccacctactgacggcgaggtgaggattcagaaagttgacaagatcgagctcgtctacaacatcctttccaagacgaaactgtacaaggcgactgcgggaaccgggaagcatcctgccgctggacatgatcaggcatcgggctggaagaagaccgtgaaccccagcaggcctgcctgctaggagtgtgttttctgtggaagacatcaacaagaggtctgaaacgtacatcacggagatgaagaaacggtttcttggctagctatatatagcagcagctgagcctgtgatgatgacaagaggtgaagatctggcagtcagtactggtgtcatccatgcatggaattggtttggctatagcctatatgtattatttgatattaccatgtggaatggaatatttgagagannnnnnnnnnnnnnnaaaaaaaaaaaaaaaa

SEQ ID NO: 11256 - DNA, 251 bp, Zea mays
  Clone ID: MRT4577_110264C.1
tagatttggctcctttttgcacccttaaatgtaagaatgttgcagaagaaaatacaagggtactctattccttatatggagttgttgaacacagtggtactatgaggtcggggcattacactgcctatgccaaggcaagaaccgcaaatagtcatctctctaatcttgttcttcacggtgatattccacaagattttgaaatggaatcaaaagggcagtggttcacatcagcgacacacatgtgcaagctg

SEQ ID NO: 11257 - DNA, 237 bp, Zea mays
  Clone ID: MRT4577_110265C.1
cgaggaggagttcgggttccagcacccgggcgtcatcagcatcccatgccccgccgcgcggttcgagcggtccatggccattgtcgccgaggcgaagaagggcttcagcaggtggatggcacacatgcggtggtcgttaattaagcagggagagacgacgcactacgcatgccttatgaccgcctccgtccagtggctgaagcacctgtcaaacattcatgtgcgctttgaaaaaga

SEQ ID NO: 11258 - DNA, 195 bp, Zea mays
  unsure (1)..(195): unsure at all n locations
  Clone ID: MRT4577_110266C.1
gncttcctccanccaagtcttgcgnctncgcncgcngtccgtntngagaatgggcccaaagcntcggtacgcctntacattaanctgncgaactaagnaggnggccnggaagtaaaattccggtaacnatgnnaaggcccgatgaagtnncgcgacnaaccatcaggcataacctatagtaanactaagncgaga

SEQ ID NO: 11259 - DNA, 729 bp, Zea mays
  unsure (1)..(729): unsure at all n locations
  Clone ID: MRT4577_110267C.1
gaggtctgccggggagggagagttgacaaacaaggagcctgcttcgtctaaaggaaacttcgttgtatacgaagatgcttcgtttaaaggaaactttgttgtatatgagagatgtttcgatgtgaacgaaaagaagggaatgtgtttttgccttcggctcaaaaagctcaagcgttggtttcgcccacaacaaagcagatgatatataaacgaaaggtaaatatcattacaaagaatttacaaacatttacaataatttgttcacttttagttacaactctttgtcaaataatacactctcttgtacaaagaatttccaagttttctacagatgtcagcaaaaggagtttctaaggccttcaatgctccaaagctagcttcggctcattgacctttggcaccatcaccctacgtcgcttccctgttttttctccttcggttacgttaaaaaaaaacagaaacaaaaaaaagatcgacatctcccgtttgatcacgccacaaaccgagtccacgccgcttccttgtttttctccttcggttacgtaaaaaaatagaaacaaaaaagatcgacatcttccatttgatcacgccacaaaccgagtcaacgccgcttccttgtttttctccttcggttacgtaaaaaacagaaaaaaagaaaatgaaagagaaaggatagaaccagagaacaaaaaaggggaaggaaacaaagcggntgtctcatctcggtca

SEQ ID NO: 11260 - DNA, 559 bp, Zea mays
  Clone ID: MRT4577_110268C.1
gctttcacggcttcctcggcctccccgtcgagttcgaggatgagatgccctgccgcgtgcccagcgccagcgccagcgtttttggtgtctcggctgaattgatgcaatgcacatacgatggcaagggaaattcagtccccacgatattgctgctcttgcaggagaggctgtatgcccacggggggctgaagtctgaggggatctttcgcattaatccagagaatgaccaagaggagcacgtgagggaccagctgaacaaaggaattgtacctgatgacattgatgttcactgcttgagcttgtgacactgttgcgccccactcaggcggcactcctcaattgggctgtcgagctgatgtctgatgttgtcgaagaggaggagctcaacaagatgaatgctaggaacgtagccatggtgtttgcccccaacatgacacagatgtcagatccactgacagcactcatgcatgccgtccaagtcatgaactttctcagacactgatcttgaagacgcttcggagcgcgatgatgcaaccaccaccgagagtacacaccatac

SEQ ID NO: 11261 - DNA, 1024 bp, Zea mays
  Clone ID: MRT4577_110269C.1
ctagccagctgccccccattcccctcaccgccgccgccactccgcctctgccgccgccgagatgggtcgcgtgatccgcgctcagcgtaagggtgcgggctccgtcttcaagtcccacacccaccaccgcaagggccccgcccggttcaggtcgctcgacttcggcgagcgcaacgggtacctcaagggcgtcgtcaccgatgtcatccacgacccggggcgtggtgcgccgctggccaaggtgaccttccgccacccgttcaggtacaagcaccagaaggagctcttcgtcgccgccgagggtatgtacaccggccagttcgtctactgcggacgccgcgccacgctctccgtcggcaacgtcctcccgctccgctccgtgcctgagggaggcgtcatctgcaacgtcgagcaccacgtcggcgaccgtggtgtcttcgccagggcctcgggtgactacgccatcgtcatcagccacaaccccgacaacggcacctcaaggatcaagctcccctctggcgctaagaagatcgtcccaagcagctgtcgtgccatgattggtcaggttgctggtggtggcaggactgagaagccaatgctgaaggctggtaatgcctaccacaagtaccgtgtgaagaggaactcctggcctaaggtgcgtggtgtggccatgaaccctgtggagcatccccacggaggaggtaaccaccagcacattggtcacgcctccaccgtccgccgtgacgctccccctggccagaaggtcggtctcattgctgccaggaggactggaaggctcaggggacaggctgctgccactgccgccaaggctgacaaggccacctagagttgttatcgtcgttcttgtttatctatctctctgctgtgctttagacggttaaaggacatgagtttcagtatgaatgtgttgttgcctagtactatggtgaaacattgtgtcagttttttgtggtcgctgtctggattttgcattatgcctaaagaagattacatggatgttttg

SEQ ID NO: 11262 - DNA, 779 bp, Zea mays
  Clone ID: MRT4577_11026C.1
ccgggtgattatggggagaatgatgaagagcaatatcctgtgcatacacgcatgagggagccctcaaccaccaaaaggaagcgccacagagatgtggctttggtcacatcaaactctcatgaaggcagtgagaggtctgatccccatgatgtaacagtggacatcaacaaggctttcacagatgcaaccaacatggttttgttgcaacaggacttggcttcacaagccatagagattcagaaacgtcgcttgcagattgaagcaaaggaactggaactcacaaagcaacgtcacaagtgggagcggttcaggaagaagaaggacagggagatagaaagaatggcactggagaatgaacatatggtgattgagaacaaacgcttggaacttgagctgagacataaggagttagagctagagcttaagctgaaaggcaaggggaaccatccataacttaattcttgatcaacactacaatatttaagatggtaaacaagtcacggttgagcttctggaagataaaggtggtagattagagcagaacctgacaaccatttctgtgcgtatgacttttgttctgtgtttttctgccctgtgtcatgtactggttgggcctcctgcatgtttaccctttctgcggcagtagtattgggcttgatgtgatctgtaagactgttacttccatcttgcccagtgtttcatttttttcgtcagcatgtatatcgaggtgatgcgatgatgtgaaggtagtggaaggtctgctgatccacattggcttc

SEQ ID NO: 11263 - DNA, 1770 bp, Zea mays
  Clone ID: MRT4577_110270C.1
cccacgcgtccgcccagaactccaccgagagaggggaaggactcggggagtaaactcgggtccgtgtgacggcagagagtttccgtcgaggagagagaagcagctgggaagggcactcacggagcttaccgagaaaaaggggtcgaggttcatgcccgtttggttcctcggttgctgcgtgaggcggccggaggagtcgtgaaccgggaatgacgggggtggtggtggtttccagcgcggggtgcaagggtggcggcggggggaagagggccgccggcggcagaggtggcggggaggaggagcggcggcggcgggcggcggttctggagctgctgctcgcggccgtgcggcgctccgtggtggcgtgccgggtggagcgcggggccgccggagccgggtggccggcgagagaggaggacgcggcggtggcgctcgaggagatggagatcggctggcccaccgacgtccgccacgtcgcccacgtcaccttcgaccgcttccacggcttcctcggcctccccgtcgagttcgaggatgagatgccctgccgcgtgcccagcgccagcgccagcgtttttggtgtctcggctgaatcgatgcaatgcacgtacgatggcaagggaaattcagtccccacgatattgctgctcttgcaggagaggctgtatgcccacggggggctgaagtctgaggggatctttcgcattaatccagagaatgaccaagaggagcacgtgagggaccagctgaacaaaggaattgtacctgatgacattgatgttcactgcttggctagcctgattaaggcatggttcagggaacttccagaaggtgtcctggatggcctgtcccctcagcaagtgcttcaatgcaattctgaaggggagttccttgagcttgtgacactgttgcgccccactcaggcggcactcctcaattgggctgtcgagctgatgtctgatgttgtcgaagaggaggagctcaacaagatgaatgctaggaacgtagccatggtgtttgcccccaacatgacacagatgtcagatccactgacagcactcatgcatgccgtccaagtcatgaactttctcaagacactgatcttgaggacgcttcgggagcgcgatgatgcagccaccaccggagagtacacaccatactcatctccagcatcatccagtaagcatgatgacgccgaatgctgctatggcagtgagcaggacatggacaggagctgtgagatgagtgacatgcatagccagatcagcaagtctgggcgacatgcagactatctcgtacgctacaatacctgttttgacagcgaacaagaggtcgacgatcatctgagtgaggttgaagaaggtttcttgcgtcggttggagcgtgatcttggagcagacagaccagaggtttcttgcagaaaaatctcagagatcatggccctggaggatgctgagccgaaagctgaaactagagcagtggagaagggcatacagaatgagaatgaagaggttgctgaacagctataatgatggaagttctgtgtttttaggcagtaaagcttattattgtaagtactgaacactgaccaatggtctttatccaacacctcggttgaatgtattgctccagtgtatgatgtaaacttggctgatccttttaatgcttggtgcccctttgttacctgggattgtatccatggaaatggtcaggctcactgggaacatgagcccttgatcataaaaatttcctgtgatcgagttgatatat

SEQ ID NO: 11264 - DNA, 295 bp, Zea mays
  unsure (1)..(295): unsure at all n locations
  Clone ID: MRT4577_110271C.1
cggacgcatgggtgactctaacaattattttattgacaatagatagggtattaaagggcgggtaggtttttaaagagtaataacaaccattgtagaggctgatacaaatgtttatggtgctaaaatatactgcgagcctacagctgatcatagtagcaagctctatgatcttgttacatcactcgggagctggaatataatgcagatgttgcttctgcaagngaaaagctactaaacaaatggattataatgctgttcgattatgatggtcatactactgagtggaataaatatg

SEQ ID NO: 11265 - DNA, 938 bp, Zea mays
  Clone ID: MRT4577_110272C.1
aattcggcacgagggaggcgaagacaggaaaaaagaagggagagacatgagagcgaggtccttcttgccttcttgttcgtttgctgctctccccgctgttcttgtggttatctcctccttttgccttcaatgctgccgcgttactactggatctgactgacagacacactgcgtccgccgccttgaagctaatcttggtgacttggtcccgggctcccggccggcctccccaagattctctttttctttcggaattccgtcattcctttgcagcctctccttcgcagtcgcagcagaatccgcgtggaacaagtgctgcgcgtgttgctggaggtgagttttcacctcctccgcgttcttcttcaccgccaaaggcccaagaggaatttcgattggttgaagcgcgaatccgcggggttggcaggctcgatcctcccttggattgcagcgtgtgccatggttctctcctccaatcccaccaacaaggcagcagctcagctgtcacagccggcactgtagtgctttctagcctgctgctgggctccaatggcgtcctcaccttcgccttccccgggcaccatcagggcccccttgccgccttccagcgcaaccccgtcaccggcaaccaccacgcccacgccggcctccccggccccggtgacgcagcccaatgctaccccggccgaccctccctcgtcgccggtcgcgcctccccccgtcccctccgcatccacgccaccgccacagctcacttctccaccgccctccttgcctccgcctcctccagacgccgtgccaccaccgccacttgttgcctctccgccacccgccccagcagccgtagtgcccccaccctcgccgccggcgccggttgcggtgcccccaccacctacacctgctgccccgccaaaggcgtcgcctatacatataagccccct

SEQ ID NO: 11266 - DNA, 371 bp, Zea mays
  Clone ID: MRT4577_110273C.1
ggtacgcgtcggcagacacgtggtccacaagcgcaacgcagtccagtgtacctctgttgcagaaccaggtccaggatatcctgcaactgtcgatgaagcttcggctatggctcacgtcgtaagtgccgcatgaagtaccctgatctgcatgatagcaccaacggcgcacatgccagcgtagtactcgggctggcacacgaaaagcaagcagcacacgtcttactcatcgccgctgaggacttcgtgaacgcgcgcagtgccgtcactgaggtcggcatcgcaagtgcgagctctgcatctgatgatgacatccattaacgatcatcgctctaactacaaccaagcgaccttgtcctgctgcatgagcaaca

SEQ ID NO: 11267 - DNA, 613 bp, Zea mays
  Clone ID: MRT4577_110274C.1
ggccgcttttttttttttttttttggtggggtttttttttttttttttttttttttttttttttttttttttttttttttttttttttaccgaaaagaaaaataccggatcacttaagggttgccaggagccgggataacattgaaccgaccgactatcacgggggccaaaaaaataacccccacaaagggcccaaccaaccacaaataaaggttaagggggcaccccggaccaacgggcgataactttggggagaaacggggccagccagaaactggagcacactcaagactggcaacaaaccggttagtccacctcctcgatcttggggccagggcccccgttgccggaaggggcgtccttgtccatgccgccagggccgcccatggtttaacccgggccctgggacattttggcgatgatggggttgcaaaggctctccagctccttaattttggcctcgaactcgcccgccttggggagctgggtggggtccaaccagctgatggccgcgtcaatggggtccccaatcttttttttggcatcggccgggagtttggacccaatcttttcgcccttgatcgggttgcccatgttgaaagagtagttctcc

SEQ ID NO: 11268 - DNA, 352 bp, Zea mays
  Clone ID: MRT4577_110275C.1
gttgatacaagtcatgtcgagcatgtactggcgcacacagggcgggaggaccagcaagagcaccaccaacaggaagaggacgatcagtaaggaccctgaggatactgatgaacatgctccgtgagacagcggatcacgtggtgacgttggacttgtagaccgttgaggtgtaccgacggcccactcacatgcgaggatgtctaggattgtcaagtcaagaacattacctttaccgctgaggtatacttaaatatgtctgcggtatcttttgatcctagatagaacggagcggcttcagttacatttaaggattttggttaatttggggcgatgaatttgcaagatggggaca

SEQ ID NO: 11269 - DNA, 620 bp, Zea mays
  Clone ID: MRT4577_110276C.1
acccctcccccattcgaacccaaaccaacccgagccgccgcccgcggaatcgaatcttcgccccctcccgccttcctccttcccttcccttcccttctcttcccttccccgcgcgatcaatcaagcgatcggagccctcctcctcatacaagatgtcgccggcggagatggagtcccacaagatggttgaggtggaggcggcggcggatcctgaggagcgcaccgcctccggtgaccccaaggcctgcgacgactgcaacaccaccaagacgccgctctggcgcggcggacccaacggaccaaagtcgctgtgcaacgcgtgcgggatccggtaccgcaagaggcggcgggtggccatggggctcgacccggaggccaagaggaagcccaagagggacgacgccatcctatccaaggcggaggcttctagtaccaaggaggaggaggaggaggacaacaaggccagcaccaacaagatcaagaccaagacgactactcacaccgtggagctccacatggtggggttcgccaaggacgcggtgcccaagcaacggcgcaggatgcggatgcggcggaggaagccgtcgtgcctgggcgaggaggagcgggccgccatcctc

SEQ ID NO: 11270 - DNA, 168 bp, Zea mays
  Clone ID: MRT4577_110277C.1
gatttctatggatttcatcgaagcactaccccgctctcagtcatttacatgcgttttggttattgtggacaccttcaccatatatgcaaattttttgcacctcaagcatccatttactgccctctctgttgctcggttgtttcatgaccaggtatacaagcaccatgg

SEQ ID NO: 11271 - DNA, 185 bp, Zea mays
  Clone ID: MRT4577_110278C.1
actatgtgtggtaccattgctttattttggagcctttaaacaaacaacccttgaggggcaccacttcgttctcttggtgccggagtcacaacaccaatatagggtcaaccatattgtccttctttcgaggggtcccaaaactaaaaagagtatacaacacggtctacacccgggagaccattaat

SEQ ID NO: 11272 - DNA, 367 bp, Zea mays
  Clone ID: MRT4577_110279C.1
aaaacgcccgggggttaatttaataaaaccatttggggggtttaaatattatccccagccatgggaaattttttgcctgctgcaaagaaaaaaacgggcatgccgggccgggccttggttatttccccaacatttttttttttattgggaagtaccattcctgggggggccaacaacatacccgtttgttaaaaaggggttttttttggggggggttaagttatgcggggcaaactgaaaagcctgggccccggttaaattttcccaaaacaaggttttaaacgccctccaaggacgtggaaaccttaagttctttcaaaaggttgaatatagccccaaagacattgccctggggaagaaaacagaa

SEQ ID NO: 11273 - DNA, 172 bp, Zea mays
  Clone ID: MRT4577_11027C.1
gaataataattacagaacaatacattgaccggagatgcaggctgtgctatgttgttgttgtttgacaattttaagtaatacagacttaaaaaaaaaaaaaaaaagggcggcgttaagatccaagttactcctgctgcatctacttttatggcacctaatattatgccgcgtt

SEQ ID NO: 11274 - DNA, 475 bp, Zea mays
  unsure (1)..(475): unsure at all n locations
  Clone ID: MRT4577_110280C.1
tcgagggttctactgtgctccaatttctcttgactttctcccgggagggcctttgcggggctgggctggagcttggactggtcgcgccgggcccagcgcanngccagnnccggactnnngcgggaggtcnnacctccaantggccttcggcttggctaccctgcaactnnnctccctcaagggttcaaagttgagggggccaagaaatgctaactagctactttttcctaggtgacctnnggtcaagtctcaatgctctcacactcaaaacatnnngcggtgctnctgcagagtgtnctcgacccaatatccaaacgggttggctttgtttcaaagctgtgaggannaggaggacatnnttcctgccgnngtgtctgcnnagttggaatcagnnngtctagggcttcaaatcggtcaacttgnnaggccgacaagcgaagaagcgnnatttgtcgcttggaagaacccgtcaaga

SEQ ID NO: 11275 - DNA, 564 bp, Zea mays
  unsure (1)..(564): unsure at all n locations
  Clone ID: MRT4577_110281C.1
gggaccctcgaggccggccgggatacaaattgaaaaagtataattctccgcacgaaggaggaaacatatcagcagaacaaaaatgaccccccgatgacggtctcttcctccgtctcatccatactctcgctcaggcactcgtacacctagatctcgtcgtcgtacgaccgccatcaagattaagatggagactgttatgatcatggccggcggcgtccattccatctgacagccaaccatgagaaggatgaagaagggtgctgacaacacgaggcaccacggtacgacaataggattcaggggagtctcaacagacgagacgactacaccatccctggaatcaaggaggtgtgcatattcccggaggatctcgcgatccacgatcatgcaccccaaagtgccagcttccatcgcactcaaatacagtgattgtggagagtatctccacggacaaactagctacaagatgttcttcctgtgatcattattcccncttgagcctgacgagatgaagcacctgaagatgattgccgactggatgcagatacaagtggatgatggcga

SEQ ID NO: 11276 - DNA, 1299 bp, Zea mays
  unsure (1)..(1299): unsure at all n locations
  Clone ID: MRT4577_110282C.1
ggtaccctccgnaggctcggccggnaaaaaaaaaaacacgactctcggcaacggatatctcggctctcgcatcgatgaagaacgtagcaaaatgcgatacctggtgtgaattgcagaatcccgcgaaccatcgagtttttgaacgcaagttgcgcccgaagccttctggcggagggcacgtctgcctgggcgtcacgcacgagcccccccgcgttcacgagccagaagagaagagaggctaaccaccgcagcggctgcgacctgcgagtgcgacaacctccgcggaggagttggagccggcggcggggatatttgcttgcccggctggggttgcggcggaaggagggagagacaaccggcgatggcggcgtccgcgaggcccggggagagggcgacaagcttcgccgtcgcgtgcagcctcctcagccgctttgtccgccagaacggcgtcgcggctgccgagctaggcctcaggatcaaaggcgaggtcgagcagcagaggacgccggcgacaactagcttgctccccggagcggagggcgaggaggtcgaaaggaggaaggagaccatggagctgttcccgcagagcgtcgggttcagcatcaaggatgctgctgccccccctagggaggagcaaggagatgcagagcctgctcgcacaaatgcttctgatatgcctattatgaggaaggcttctcttcaccgcttccttgagaagagaaaggaccgcctcaatgcaaagacaccatatcaaactgctccttcagatgcggcaccagtcaagaaggagccggagagccagccatggctcggattaggatcgaatgccgtggattccagcctgaacctcagctagtacacaacaacacagccataataagacggcacagcaacggcacccaccatgacctggaatttgctttgccactagatcgagtttggaaaccataaatattcttagttatcgtgttttagtgttcgcttatgtcgtggttctacgccctcttgtcgcatagttctggatgtaaagaaaagtagccagtcatgaccatcactgggagtcgaagagaagtttttggggggtattaacacacggtgactctgaaattggccatgctaaggaaaatgatagtgcaaagtgaagtatatgtattttctgaaagccagccagatcgtttggctctagccttgatgtatcatgtatgcagattgcagaaccagtgattattgtaatggatcctgattatcctcatcaaaaaaaaaaaaaaatccgccaaaaagaaaaaaaaaaaaaaaaaa

SEQ ID NO: 11277 - DNA, 1294 bp, Zea mays
  Clone ID: MRT4577_110283C.1
attgggtacctcgaggccggccgggacgagccagaagagaagagaggctaaccaccgcagcagctgcgacctgcgagtgcgacaacctccgcggaggagttggagccggcggcggggatatttgcttgcccggctggggttgcggcggaaggagggagagacaaccggcgatggcggcgtccgcgaggcccggggagagggcgacaagcttcgccgtcgcgtgcagcctcctcagccgctttgtccgccagaacggcgtcgcggctgccgagctaggcctcaggatcaaaggcgaggtcgagcagcagaggacgccggcgacaactagcttgctccccggagcggagggcgaggaggtcgaaaggaggaaggagaccatggagctgttcccgcagagcgtcgggttcagcatcaaggatgctgctgccccccctagggaggagcaaggagataaagagaagcctaagcagctcacaatcttctatggcgggaaggtgctggtatttgacgatttccccgccgacaaggcaaaggatctgatgcagctggccagcaagggcagcccagtggtacagaacgttgctttgcctcaaccctctgcagcagctgctgtcactactgacaaggccgtgctggacccggtcatcagcttggccgctgctaagaagcctgctcgcacaaatgcttctgatatgcctattatgaggaaggcttctcttcaccgcttccttgagaagagaaaggaccgcctcaatgcaaagacaccatatcaaactgctccttcagatgcggcaccagtcaagaaggagccggagagccagccatggctcggattaggatcgaatgccgtggattccagcctgaacctcagctagtacacaacaacacagccataataagacggcacagcaacggcacccaccatgacctggaatttgctttgccactagatcgagtttggaaaccataaatattcttagttatcgtgttttagtgttcgcttatgtcgtggttctacgccctcttgtcgcatagttctggatgtaaagaaaagtagccagtcatgaccatcactgggagtcgaagagaagtttttggggggtattaacacacggtgactctgaaattggccatgctaaggaaagtgatagtgcaaagtgaagtatatgtattttctgaaagccagccagatcgtttggctctagccttgatgtatcatgtatgcagattgcagaaccagtgattattgtaatggatcctgattatcctctaaaaaaaaaaaaaaaaagcggcc

SEQ ID NO: 11278 - DNA, 1524 bp, Zea mays
  Clone ID: MRT4577_110284C.1
cgtccgtacgagcacgtgggggagatggagagagaacccttcgcgacgtttatgtgggcgcgcctacacgagagcggcaaacaaccgaggctaccgaccccagcagctgcgaccagcgggtgcgacgagcttcggcggggggggtgggcggccggggggggtaattgcttggccgccgggggttgcggcggggagcggggggcgggccggggaggcccccgcgttcacgagccagaagagaagagaggctaaccaccgcagcggctgcgacctgcgagtgcgacaacctccgcggaggagttggagccggcggcggggatatttgcttgcccggctggggttgcggcggaaggagggagagacaaccggcgatggcggcgtccgcgaggcccggggagagggcgaccagcttcgccgtcgcgtgcagcctcctcagccgcttcgtccgccagaacggcgtcgcggctgccgagctaggcctcaggatcaaaggcgaggtcgagcagcagaggacgccggcgacaactaactcgctccccggagcggagggcgaggaggtcgaaaggaggaaggagaccatggagctgttcccgcagagcgtcgggttcagcatcaaggatgctgctgcccctagggaggagcaaggagataaagagaagcctaagcagctcacaatcttctatggcgggaaggtgctggtatttgacgatttccccgccgacaaggcaaaggatctgatgcagctggccagcaagggcagcccagtggtacagaacgttgttttgcctcaaccctctgcagctgctgctgtcactactgacaaggccgtgctggacccggtcatcagcttggccgctgctaagaagcctgctcgcacaaatgcttctgatatgcctattatgaggaaggcttctcttcaccgcttccttgagaagagaaaggatcgcctcaatgcaaagacaccatatcaaactgctccttcagatgccgcaccagtcaagaaggagcctgagagccagccatggctcggattaggaccgaatgccgtggattccagcctgaacctcagctagtacacaacaacacagccataataagacggcacagcaacggcacccaccatgacctggaatttgctttgccactagatcgagttcagaaaccataaatattcttagttatcgtgttttagtgttcgcttatgtcgtggttctacgccctcttgtcgcatagttctggatgtaaagaaaagtagccagtcatgaccatcaccgggagtcggggagaagtttttggagggtgttaacacacggcgactctgaattggccatgctaaggaaaaggatagtgcaatgtgaggtatatgtattttctgaaagccagatcgtttgggtctagccctgatgtatgcagaacaagtgattattgtaatggatcctgattatcctcatcatcctattattgttttctgatcacaaaaaaaaaaaaaaaaaaaaaaaaggggcgggccgttttaaaggatcc

SEQ ID NO: 11279 - DNA, 371 bp, Zea mays
  Clone ID: MRT4577_110285C.1
ttttaaagggggaatcaatttctatttactcgggtcatatttttcgcttcttgatgaagcaggctgctgcttcttacatatcgtcactcattacaagccagagacaatgcttcaaaattttaaaaaaccctccagaaagcaaaatcttacgctacgcaaacgcttagatgagttgctggaacgcgcggtcgagaggagatcggagaggcttgacctccttgtagaagtcaatggtagccttagcacgcttggcaataccctcaggggtgaactcaaacttcttgtagacctccttgtatggtccagaggcaccgaagcggttaaaaccgaattgctcgtgcgagtacttcttccaacccatggtggacatg

SEQ ID NO: 11280 - DNA, 290 bp, Zea mays
  Clone ID: MRT4577_110286C.1
gaaaacccggcgcgacccacgcgtacggctgtagacaagaatttgggcagccggtttgattattacaccaaggagcacatcggcgtggcctttaacgatggatccaagcagctccaagacatacgccggggccacaggggcaactcgttggtgctcatgggcaagaacacgctcatcaggcgctgcatcaacgacaacgcctggaagaccggcgaccacaccttagacccgctcatggacctgatagtcggcaacgtcggcctcatctataccaacggagacctcaagga

SEQ ID NO: 11281 - DNA, 623 bp, Zea mays
  Clone ID: MRT4577_110287C.1
cggccggagaccaattgttgatggagggtaaagccttttcttactacgtacatgatattaagggcttcttttcttgttctctttattgtgtacatttattatcctttgatctgaaatcacctgactcatctgggccatggcaatagagctctattagggcctctatttgtaatggttgtattcactggattcaaaggtttaatctggtgttctgcttctgtacctcaagcccaagcatgcctaaccttttaatggggttacacaatttgatatgtgaaacaatggcttagtttgctaaagacatcaataaaataaacagcccattccttttttttgaaatggaacaaaactgattatccacatgaagaattgtatctatttgattttgattttgagtttgagatcttgaatgactgcaggtaccacaactatgcactcgcctcaatgtgtctttgataaccccattgatgtctaaactctgaaatgtggaagtgataggatcaagcatagagatgaatagaattacacattgtaagcaacatgtaattgtttggtgcattaaacataattttctgaatggttacacaggattgtacttgaaacagaaggaagagagatagctg

SEQ ID NO: 11282 - DNA, 176 bp, Zea mays
  Clone ID: MRT4577_110288C.1
cgcaaacgcaccaccatcgcagctttttgagacacgccaaggaactcccgggggggggctaccatgagggccaacgcgaacaagaagcgcactgagtggctgcagaggaagctcacaaagaataagcataaccccaaggaggctgatgggcatagccgaaaatgacgaccccacaa

SEQ ID NO: 11283 - DNA, 524 bp, Zea mays
  Clone ID: MRT4577_110289C.1
cacaagcttttttttttttttttttttttttttttttttattttttttttttttttttttttttttttttttttttttttttttttttttttttttttttttttttttttttttttttttttttttttttttttttttttgtgggtggttttttttttttccccgggggggcccccccctaggggggaaattacaacacccggggggggggttctgggggtcccccccccggcccaaatttgggggtaaaacgggaaatggtgctttccggggaaaaattttattccctcaaaattcccaaaaaaaacaaggccggggataaaaatggtaaaaccccgggggccctaaggggggggcctacccaaaataatggggggggcccacgtgccctttttccaagggaaaaaaactgtgcgccccccttttttaaaaaacccccccacccccggggaaggggggttttgattagggggccttttccctttttttgtaaaaaaaccaggggagcatcggacattgggggg

SEQ ID NO: 11284 - DNA, 538 bp, Zea mays
  Clone ID: MRT4577_11028C.1
ggggtgttttttttttttttttttttttttttttttttttttttttttttttttttttttttttggaaataaataaagaccgcatgaactcaaaaataaaccaaacagccaaaagggcatgggcgggtttccctctccttttttttttaaggggggggggggcccaaggaccacctgccccgaaagggtttttattcaatagtagtacacctagcagtagtagacattcaagtcgtgaccatcattcctaggtagctagatttgggcattacgggcccatccccgggcccccacctacggggggataaattttgatcgggttcaagtggcccccctcccccctcgtcctcgtttaaggttcaattcacccttgaacaatccgtggaggtgcttattgtgtatgggattcttaccccccactttgaggggattcttgcggcttttcccgcctttaggccccttacccccgcgggggccttttttaagcattttcaagccgccccgcggtctgcggtggtgccggccgccttttttaagc

SEQ ID NO: 11285 - DNA, 318 bp, Zea mays
  Clone ID: MRT4577_110290C.1
cgtgtccgagccacgcaagccgagctcaatgcggagaggccagagccagggggggggggctacacgcgatggcgcaaaaggagaccaacggcagcaacggcgagcacatatccacccgcccgccgccgaccccgacgccccaacgatacgacaaggacagccaggcgaaccagcggaacccgggcacagggggggcgggcaacatcggcacgcaccgcagggacaggcgcaaggagaacgagaaacacgagggcatgggggcagataacaaaagcacagggacaaaagaaaaccagaagaaggggaacggccacccaa

SEQ ID NO: 11286 - DNA, 437 bp, Zea mays
  Clone ID: MRT4577_110291C.1
ttttcttttttttttcgggttggtttttttgaacagtttttcttttttttcccccatccatttaaatactctaaataacttgtttaacaaaactaaaatttgtgcaatatatttgagagtatgacaaatacatatgcacaaaaaaataaaaaatggctttactttcagatctcgattttcaggacaggatttagagggccctattgtgatgacaacggtaccctgctttggctgagccctttgttggcccagtattgttagccccactggcccgctgcgaaatggtttggaacaacgaaactgatagagcacgcccgtcaaagaccatgaacacccatgatgatgctcctcgcttactgccatgacgggcccatttgccaagtcacccaggctcttcgcacctgtagaggaagatgccagtggagttgacgtgcatg

SEQ ID NO: 11287 - DNA, 530 bp, Zea mays
  Clone ID: MRT4577_110292C.1
ggcccaaaacccccccaaaaagggggcataaaaaccttttttttataagttaaggcaaattcgcccccccggttaataatctttactgggctttttcccaaaaaaaaaaaaattcagttaacccccccccctccaaattcctgggaacggccaaagttaatccccaaagttttttaaaaaaatttaaaacactttttgggaaaacccatgggccaaaaaaaaaatttcaaggggggcctaaaaaaaaatttgttgggttttggccacccccccccaccaaaaaaagggtaaaaccatggggggggcccccggggggtttattttggaaaggggaaaaaaaatctccccaaaaaatttggccccaaaaccatttttgggggggaagttcaaaggggacccaaaaaaccccccgattagggagaaccccttgggggaattccccagggcaaaagcagggggaaaaaaaattttttaaaaatttgaaaaatttcaagaaatttttgaagaagtttgaaaagaaaaccatttgt

SEQ ID NO: 11288 - DNA, 223 bp, Zea mays
  Clone ID: MRT4577_110293C.1
aaaaaatgaatttgcttccatgagatggtgacctggtagaactaagaggacatccagagtttctattcaggcattcacttataacaggttgccttaacacattaataacacaataaacccaaactaatctacgcaccacaagaagcattatgagtagcaatgcagctattggaaggtatacaagcaatttgcagtcaaaactcttgtttgttgaataccaaag

SEQ ID NO: 11289 - DNA, 505 bp, Zea mays
  Clone ID: MRT4577_110294C.1
agcgagccatgcatatggcatgtatccactcgtacaggcatgcacgcgcctctgcatgctggagggattattggcaacgactgactttggtccaagtcaatctctctgactacctctcttcactctctagtctagcagtactatggtacttgttacaaaatattacatatgtgatcaatacaaggggtgtgacagttttgcccaagtgacacacctcttgggatacaccccttcacttgtatataagtataatgatctgtggaatacaaacaacagttctgctatttgtctctctcaatctcgttaccactgagtatacttcaacacgttatcagcacgtagactcgatgagtggtttcccaccagccatcggagcgatgaggatgaacttcagcggcgtcatcatctttctctcccagcaagtggcattgagtacgaaagcttgcatgcgctggtcccctcgggcgatggaattttggtttcaaccatgcgttgcagcgatgga

SEQ ID NO: 11290 - DNA, 1200 bp, Zea mays
  Clone ID: MRT4577_110295C.1
ccggccggagttctcttatcctcccgtcgctatctttctccctcggctcacggcgctccctccagctacttccaatggccgcagtgcgtcctgttcgccctccagcgctgcgccctgctcccagctcccttgccgtggagctctctgcgcgccctgcctcttctacgcgcgcagcttcctcggctggccgcggtgctcctccagcctccctcccatggcgtgcagttctctcttccctctccacggccgcgcctccctctagtcttcagcaagccgcggcagcagcacccagtctccatcttcctcacatcccgctccctcgttaccaggtacacgcgcgcggtctcctgctcgccgggatggccctcctgctgcccgcccatggcgcccagccgaggcccctccctcggtcgtgctcgccctggtcacggcggcgtcgtcagcatccgaccaggatcggccatggcgagccccctcccgtccctgctccagtccttgtccttgccaccgattctccgtgacgcagcaccctatccctgctcgtgctcgacacgccagatcgacagccgccaatccctgcgttcggcctccttccactgctcggtcatggtgtccgagttctgggccggggttgtgcgcgtggcctcgtcggtggtcgcgaactcgccaaactagcaccctagccaccaacctccgttcacctcgacgacggaacgtgtcactgctccatccatggctgcgagtctacctccgccgagctgccagtctctagctcctccggctattctgctcgctcgacaactcgtcaccactgggtctacgccatcggctcctcgtctggctttaacttcgtcgtggccagcagcttcaattctgtgagcgtccaacgccgccccctggttcactctctccgtacgcacatcgcccttgtcccctgtccgtgtagcatatctccgcgctctgcgtcatcgccgtcgttgcttttggagttcgtcatgacgcgctgtcgatgatctgagtataacgggtgatctttgcaagttcacctagcttcgtggtaattaattttgatggcgatctgcgttacttagccctataaaaaattcctttgtgtgtttgtgtttcgatgttgaagccgaagccagcgtgatgcttctcagttatctatactaaaaaaaaaaaaaaaaaaaaaaagtggtc

SEQ ID NO: 11291 - DNA, 275 bp, Zea mays
  Clone ID: MRT4577_110296C.1
tggttacgcgtgcggaaacgataggtacgggcggcattctacacgcagtgcaggtaataccgatgcaagacaaccaaacgagcggttctgcagggactggcaaacgcgatatagtatggggggaataggagaaatgatgaaatggagcaagctactgaagagaggagaagggctatctgatcgaaaggtaacgatctgagcatggggacaatccggcgggggaccttagaagtggtgccaaaacagggggattagctgaatgaggaggttgaaag

SEQ ID NO: 11292 - DNA, 370 bp, Zea mays
  Clone ID: MRT4577_110297C.1
atatgtattaagatattggaacttcaatctttgtgctaaatgaaacaggcccaaacaacattcagcaggctaatctggttgaataaacgattgttccgtaacatcattgcatattccacacaaaggatgtgttctgcccatggaagacacctttcaggatggcggggccggtcggtcctaaagttggatgatacctacggagctcctagacagtttggattcggtatttaagctttgctcgtaatgttggtggagagccagcccaggctcttctacagaacttagtcagttgaggcacaagtgctctggatgtgccagtgtcactgccgcatgcagtgtaatccaagcttgtgagtgatctcagtgcatt

SEQ ID NO: 11293 - DNA, 230 bp, Zea mays
  Clone ID: MRT4577_110298C.1
gttcgtttcaaagaccggcctacgaacacactactacagctcaaagaaggacatcaagactttactgactctactggaagcctcctacgataggaagatcgtgaacatgttcttccacttcaaccacctcaggttatgaccaaaccaggagctcatgtgcctgctgaaccacattgacatcctaacccccgagaggatggctgtaactgctacacatgttacttaactac

SEQ ID NO: 11294 - DNA, 239 bp, Zea mays
  Clone ID: MRT4577_110299C.1
agactttccgctctagattgctcatacttccattgtggttattagtggaacttttctcactggtcggagagggtcaagaccgtggacgtgcaccccacataggcatgtcaatttgtcggagagaggaccccatacatcaaacatgactaaagaagaagaagatgaacaataccttatagatgaataatatgcccttgcttgcgcaggtgggaacacatttagtttcacaacctttatgc

SEQ ID NO: 11295 - DNA, 337 bp, Zea mays
  Clone ID: MRT4577_11029C.1
aagcaagggctggaatacccacccgcttaaatttaaatcgctttttttaaagcagcttttaaaacgattctttggggggaataaaaattccatggggacagctaggggcatttttaaaccccggaggagcaagcaaccaaggggtttttgttcacccctcaatcaatttcatagcttcaacccgctgaaaatattggattccacaattttcgcccctggtgggcgaggggccttgaaaggagggtcacaagacaaggggactgccctttatttaaacccgccccaaccggaaaagggttaggaaaaaaacttttttggggtataaaaaaaacccaat

SEQ ID NO: 11296 - DNA, 2369 bp, Zea mays
  Clone ID: MRT4577_1102C.1
ataatccttcacttgccgcctcccggtccagaagaaataaatatacgtacatggctagtgattctggcgaaactgagagtcatagtgatttaccttctataaagatgtcttctactagaactgattttgagaatgaaagctatcttcagcatcctgtttatttttctgaggagcagacttctgacttcattgagaagcaaataaccgagtcttccgagagggaatgttcagaaagcgagactgaagatgatgctgaacttctgcaaaatgcaagtgtgattctacgtacagaatcacatgctccttgtccgtattctattccagtttctgacaagttcaagcatgtggattatgaggacaatgaggtgatctattctacttatatgccccagttgaatgaatatgaggaagaggatggttcttctgagctgggtgtctctcagtggcacatgaaaggtaaacgtaacaatcgtaatgccgtgaagagattagtggatatgagagatggaaatacatggttaaataaatacaatggatcattaaaaggatctttgcataacacaaatggtgggaatcccagaaaagaaggtatgcacacatctggtgagcagttttttgaggaaagcttttaccaaataaaagaggagcccaattatgattctgatgaaactaatttatttgagaacatgagccattcagagactaacttgtactatggtaaaaaatacccttcatacttgagaaccacaagagatcttagccgaggctacagttactttaatgactcttcaaatgtttctcccctaaacaaggacactgaacgaatatatcatgttgatcggaatgcatattgggatagaccttcattttaccaaaggaagttgacttcaagttttggtggcatgggaccaatgttgttcaatgttaacctcaaagttcaggccagctaccaaggagagcatgtccctcttgtctctttgatgagcagacttaatggcaaagcaattgttggacaccctatccaaattgaaatagttgaagatggttccacagcggtattctgtggtgacagtggtatgcaagagaccacagctgctccacctgcttggccaacaggtagaaggactgccatgcaaagagttccccgttcaaatccatcaggagcactgttggatggcgataatgaaggtggtcttgtgtattctgattatgagacgaaaccaaccttaagaaagtactcatcttcttcgaatcaccaggttaaggtgaataataaaatcagttctaatgctaggaggtcatcagctaagccccctaagaagtcatccaagaaaacaaacctctcaagccagaaacttagagctctctcttccatctccactgcaaaaaaccatcatggagaaggtggtcaagcgaaggcaaattggcacaatgacatatttggtggtttaatcggatcagaaggagcagttcctctagtgacatgtgtcccaacgaaggttgtgttcactaggatattggaagcagttggaaggccacctctgtctgccgctcgccgtgttagaatggctagtcctccggtacgagatcctccataggcttcaactgtagtgctacatgcggtttatgtcgccagccatcgacatgcaagttttatgtacattcctgttaattgatgaagaggcagaccattcaatcatccggtaacacctgtgaggagtcgattgacatggttgctccgtaataacttggaacagctgatcccttattagcagtggtgacaacctgtaaaaatcagtaatatttctgactggagactgaggtcatgaatgcttcagagcagctcacatatttctgactggagactgcgtccatgaatgcttcagagcagttgagccatcgataccatgaagaggtactcttcggtgtagctagcactggtaactttcgtcacaactgtctcctgtaaagtactagtttcaacattttaggtggcaatttagtcaaaacatttgtgccgtcatatatagcgataggtcatagatttcctaatgccatgtataatcccttaattacatcctgatgtgtctgtcatttgttgtcgagaagtagttggttcaactgtatgtttagagaagcatgtgtacctagtcgatgtaatatatactagtccagagcgcgcgccctgcgcgcgtttataaacaattaggtataaatgcataaacatcttttaatcatgaagttgcatattgaatttttcatatagtgatgcttctttgtaattgtaacggggctgcaaatattaatgccggagaagacaacgttatggccaaaaaaaaaaaaaaaaaaaaaaaaaaaaaaaaaaaaaa

SEQ ID NO: 11297 - DNA, 358 bp, Zea mays
  Clone ID: MRT4577_110300C.1
gatcatagaaattgcacttttagtggctacggaaaccacctaaaagattttcttaggggtgtttataggtctaataatgtcagtgacgcccacacacacgaagggggctctatttaagaagacactggtttccaacaaattggcttcgcaaccaatacttaaacacgcctagacatttggtgcaatgggtttattccaaatggtcgctgcaaaattcaacagtgggtcacaacacattttttgaccgtaggaaaatcccgcaattaacagcactcacaggacattttgacaacacattggcaacaagccaacatctagcttttctttgggttaagaaacgggcccattggggtaaaaa

SEQ ID NO: 11298 - DNA, 266 bp, Zea mays
  Clone ID: MRT4577_110301C.1
tgattatcatgaactattatgtgtgctaccatttccttttgtgcttttctaattactagcgggaatgtttagcttctacaaaaataataggaatgagtttctgtacaccggtggctatgtttgaattgttaatagtgagactgagagagtggtatggttaggatgttagatttgtgcttccagtgattgattagtatcttttttggtagctggtatgtgttagttttaccataagctaaaagtttaagtagaatgaagtggatgtg

SEQ ID NO: 11299 - DNA, 263 bp, Zea mays
  Clone ID: MRT4577_110302C.1
ggtccggaattcccgcgtcgacccacgcgtccgctgtcattgtagtcgatacatgaccgtgctacgaccgaggcttctattgtgttatagtgtgggaacatctggcggctcccgacgacttcggccaagccccttgcagttgctacagcaggagacaacaagaacctagccttgtgaaactctccggttgtcccatacaatcggcaaatgatctcagctgggtatggaagacgacatcctactcagcttatatggctacacac

SEQ ID NO: 11300 - DNA, 634 bp, Zea mays
  unsure (1)..(634): unsure at all n locations
  Clone ID: MRT4577_110303C.1
ccgagctacgacacagtgtctgagggcctctttcgctttcctttcgttcgtgcgatttttcnnacccaccacactaaggggtcatggagagagagggatacgattctaatcgtggggatgtgaggctgcttcttatagacatgtcagtgtcggaatagcaataagaatgatngtctatagcgcctatctcgagaagctctgtcccttttggttgactgttcatttatcgataggtatcacccttgctgatgtactggtgaagcttttctgatacccccacccatgatagaataacctctactctttctcactcttgacacattggacacagggcgcctgttcatcaatagtcactgggatattagccctctaagaacctattgataggtgtggcngatgggttgcaataacattacactgcacagtgcagaatagtgcattatggtagctgcatggctcgccacccagagatacccctaatgcatacccttattctttgaggggtggagctagtagccttgcaaggccgaggaaaaggttcaaggcttagtgcagtgtattctgatgagaaaagccagactctgaagaactctaagaagcaaacgggagcttagctgctgctacccaaagaaga

SEQ ID NO: 11301 - DNA, 193 bp, Zea mays
  Clone ID: MRT4577_110304C.1
ggaaaacaggttccgttttgacatactaaatacagaaagaatgggaaaccagggggcaaaatacaaactggaggatgaaccaagctcgagtggaaggaaagatctgcaccccgttgccattttgtataataataactgggaggcaaacagcgaaagaaagaaaaatggggactttggcaaaaattttattttt

SEQ ID NO: 11302 - DNA, 317 bp, Zea mays
  Clone ID: MRT4577_110305C.1
cctcgaggccggccggggtcagccatacactcccgcggcaagtctctctgaagtgacggactccggcgatggcggctctagctccatccaagattctgggcaccaagttcaacttcgccggctcctcccgctacgccaccgcagcgcccaccgcgggggctcagaagatcgtctccctcttcagaaagaagcctggccagaagtccaaggcctctgcggtgtcggagtcttctccagacatcagtgacgagttcgtccagtggcacggtactgacaggaggatctaaatgacgaatggtctcatgaaccgatcggag

SEQ ID NO: 11303 - DNA, 1091 bp, Zea mays
  Clone ID: MRT4577_110306C.1
gtgcggcgctcctcgaggcccggccgggctcgggcccggcgacgacgtccggcaacaccgaatcttgacggaacgattccaccaagaaccgcgggcaacaattcacaccgcgcttctcttctccagcgatgcagacgacggcggcggcggctgtggcatgggcgcctggcccatcggcgtccacctcgtcatcgtcctcgccgtccaccttcagggtgggggttgcgtcgacggccgtgcgggcttgttccgcgcccaggcttgttgcgtcctccgcgcccctgggctgtcgacggctgcgacaagtggttcaagctgttgccaatccagaccctgcgatcgagcttccattgactgctgaaaatgttgagatggtgttggatgaagtaaggccgtatcttatggcagacggaggcaatgttgcgttgcatgagattgatgggaacgtggtaaggttaaagctgcaaggagcatgtggttcatgcccggcttcagtaacaacgatgaagatgggtattgaacggcgcttgatggagaaaataccagagattgttgcagttgagcccattgctgatgaggaaactggccttgagttgaaccaagagaacattgaaaaggtacttgacgagattaggccataccttgctggcacaggaggtggcgagctcgagtttgtcacaatcgaggagcctattgtcaaggttaggcttacaggcccagctgctggtgtgatgactgtccgagtagcattgactcagaagctccgtgaaaaaatccctaaaattgcagctgtccagcttttgccataagattagaatcttttagaagccaggcaccagtcacagttgataatgtaaatgcactaccgcaataaatttaaggagttgtaatgtgtagcctgctgagcatttagctcctcttcagcgatattatgatcatcgatacacaatgttcaagtaaaggtgttggttggatttgtaaccagagttttggtttttgtctgtatgaccggtattctcgttaatcccgagtggaagaaactaaatcaggtcaaaaaaaaaatccgtaaaaaaaaaaaaaaaaaagtacct

SEQ ID NO: 11304 - DNA, 257 bp, Zea mays
  Clone ID: MRT4577_110307C.1
tttttttttttttttttttttttttttcttttttttttttttttcctttttttttttactttatcttattttattttttttttattttttctgcaccgctgggccgttcacccatcctatacacggctttttcctggaagaagacttactggcattaaaagccacgcgcccaccctagagacacaatttttctctgctacccgggccccccccctagaccaccgccccctgagggggggtgcccgagtccccccagc

SEQ ID NO: 11305 - DNA, 437 bp, Zea mays
  Clone ID: MRT4577_110308C.1
cttgcatttaaccaattgggcgtactgaaccccgctgcttatttgcagcagcaaataggactaccatttagccagctagctgcagcaaaccgtgctgccttcttgacacagcaacaggtgctgcctttctaccaacagtttgcggctaacccagcatccctctgacaactacaacaattgttgcccttaggccaacttgctttgacagacccagcggactgctaccaacaacacatcattggtggtgccctgtgttagagtgctaattagatgtaattgacatagtaaagtaggatggatgatgcatgtggacaaccagaaatacgaagttacattcacagaatctaacatgcatggacattgcttcggatcttccctcgcgaacttctccaccgtattccagcaaagaccttggaccagtactatagcagagatgc

SEQ ID NO: 11306 - DNA, 585 bp, Zea mays
  unsure (1)..(585): unsure at all n locations
  Clone ID: MRT4577_110309C.1
tgaattcgcacgaggtctcgggggggggggggctcnccactctctgggcgcgcttatctgccgccggggattttttttccaccggtcgacgggcagcagccatatctcacgcgcgctttcttcttgctcagctcccacgggcgactccctcccatgggtctcctccactcgggcggtggcgggattcccggtgctgctccccatggggcgcgccctcccaactcccgggcgcgggcctctgccagctcgaccgaccgcgacgagatcgcccatgattcttccccagccgcgcgcagcttttcctctgactcgctctccagcccctgcgcgggcggatcccctcctcccatggggtgcggccgctcattcctctccgatgggcgccgcgcgctcaagcctctgcttccattctgggcgcgccctggcccttgctcggacggcgctcggactgaggtttccctggcgcgtcctccctgccccagtccgtctccctcaagcatgcgcgctcgtgcatcttccctgtgcccagcccatctccatctctctcgcggaggtccctgggcgagctcccccatagcgccctct

SEQ ID NO: 11307 - DNA, 476 bp, Zea mays
  Clone ID: MRT4577_11030C.1
catcagctcaaccctacccagcgctagccctacgaaccgcagctgagtattcaactagctcggacgaccagcagtgctgctgcgtgcgtacgttgctgttatagctagccactgccccctgcaagaagcgcgcaaggcataacataaccaaccattcatggccggatcgagggcgcagccgagcctcgagttgagcgtcagggtcgtcagggtggacggcctagaccaagagcagctggagcgcggcgggaccctcttcctgaggtactacgtgccggcaggggacgggcggcggcggctgcgcgtggacacgcgggaggtcccgtgcggcggggacctgcgctggggcggcgagctcgcgcgcttcgagcgccgtggtggcagcagtggcactggcggcgcggcgccggccgcggggatcgcgttcgagctgcgctggaggccgcgcccgtcctagttcgggctggcggcggcgt

SEQ ID NO: 11308 - DNA, 178 bp, Zea mays
  Clone ID: MRT4577_110310C.1
gattcggctcgagtgcagagtgatgcgtcaagaagagatcctagctgggcagcagcagcagcatggaaggcgaccgcagctgcacctcctcctgctaccaccagcctgttgccgatgccgctgccggcgacgttcgtcgctgcagcatcatcaggattctccaataccggcacgacag

SEQ ID NO: 11309 - DNA, 695 bp, Zea mays
  Clone ID: MRT4577_110311C.1
tcgcgcctctctcgcccttcccgccgccaccgccgccgccgccactcccctcgccgccgcagcagccgcagccatggggcgcatgcacagccgcgggaagggcatctcgtcgtcagcgctgccgtacaagaggactccaccaagctgggtcaagaccgccgtcgccgatgtggacgagttaatcaccaaggccgcgaagaagggccagatgccgtcgcagatcggcgtcctgctccgtgaccagcacggcatccccctcgtcaagagcgtcaccgggagcaagatcctccgcatcctcaaggcccatgggctggcgccagagatcccggaggatctctactttctgatcaagaaggcggtggcgataaggaagcacctggagaggaacaggaaggacaaggactctaagttcaggctcatccttgtggagagcaggatccaccgcctcgctcgctactacaagcgcaccaagaagctcccgcccacctggaagtacgagtctaccaccgccagcactctggtggcttaagggagatccagatctagtgtgctcttagctgattaaagcttgattgttctggaaaccattcttatgtaatgctttatgagagtttggagccaagcagatgctgcaaattttctatgtttgcctggaggatgctgtaaaacctttatggtttcactgttctgtctgt

SEQ ID NO: 11310 - DNA, 433 bp, Zea mays
  unsure (1)..(433): unsure at all n locations
  Clone ID: MRT4577_110312C.1
attcggctcgagaagaggccctatttagctaactattttctttctttcttcgtcggcgggaaagatgggagtggctgtttatttggacaccattttcgtccctttgagtcttttcatcacagtgggttaccatgtctatctttgccacaccatcaagaacaaaccttcacgtacaacttatggaatcagtaagaagagaaggacagattggagtctcaacttaaatcaggtaattgcatagatcaattgtgcatgtaatatgtttatacatggaatttattctcagagtaattgtttggtttcatgttttcagatatgatttttcacgtgtcagaacagaacatgattttcagaaattaaaaataataattaactttcacatctcanacatatataatttttctatttccaacgaagtttcaaacacacaata

SEQ ID NO: 11311 - DNA, 400 bp, Zea mays
  Clone ID: MRT4577_110313C.1
attgaggttattgctaacaccgacaccgccacccttggggaggcaggacaaatttttaccaaaaaatcggcggtaaatgatgaaagtagctggctacccagcagctatactagaggaaataggtgccatcaggggggaacaccccccccacaaaggaaggggcatggaggggcctgctgcaggccccacaccacctgcatttgctggggtaggtgcccccccaacaacacctaaagccgccacgtttgaggttgctgctgaagaatgaacgggaggaccaaaccgaaaatcgcccggaaccgcgggcgaggatccacctgcttgagcgggtgggatcactggtgccggaagaactggcactaaggcaatcatgggggcgtgggcggaggcccccacggat

SEQ ID NO: 11312 - DNA, 476 bp, Zea mays
  unsure (1)..(476): unsure at all n locations
  Clone ID: MRT4577_110314C.1
caggaaccaccggtgatcagtgctaatccctccgtccacaaaaggatgcaattttcacttttcgaggagttaacgattcaaagtttgaccaaagttatataaaagggtacataatatttttttagtaaacctagttctgagacataaatggtaatactgttcactataaacttggtcaaaccgtcaaagttagtgtgacttccacaaatcccatagttgcatccttttgtggaaggagtatttctacaattatatcttccataataaactganttattccgtgtgcctattccaactcagaagaattttcctgtcacataggggggggttaatctgtcagatagaatcatgctatattttcgacctcgtgcaagttcaagtgtattacttttatggctgcttgataagttatctttttttaaaaaaaatagtttcactttctctgttttaatgaatttactattccctataagaag

SEQ ID NO: 11313 - DNA, 634 bp, Zea mays
  Clone ID: MRT4577_110315C.1
ccttctccagctcccacgaacggaaccaacaaatccccagccaatctcgcctccgatcgaccccaggctcgtcgaatcctcctcccccaccgcctcaagatgcagatcttcgtgaagaccctcacaggcaagaccattacccttgaggttgagagctccgacaccattgacaatgtcaaggccaagatccaggacaaggagggcattcctccggaccagcagcgtctcatcttcgctggcaagcagctggaggatggtcgcaccctcgctgactacaacatccagaaggagtccacccttcaccttgtcctccgccttcggggaggcatgcagatcttcgtcaagaccctcaccggcaagaccatcacgcttgaggtggagtcatctgacaccatcgacaatgtcaaggccaagatccaggacaaggagggcatccccccggaccagcaacgccttatctttgctggcaagcagctggaggatggtcgcacccttgctgactacaacatccagaaggagtccacccttcaccttgtcctccgtcttcggggaggcatgcagatcttcgtcaagaccctcaccggcaagaccatcacgcttgaggtggagtcgtctgacaccatcgacaacgtca

SEQ ID NO: 11314 - DNA, 592 bp, Zea mays
  Clone ID: MRT4577_110316C.1
gaaatacagatcagaggaggccaccagaacagaagccgttataatatagttgaattcaggataaacggtattggcacaaaaggctaaattaaataagaaggttaatgtaaatcagaataatgaaggcgtttgtatgctgttgtggtcagtatatttggcgtctgtatagacagattagttgaagggggttgcagagttggtggtggcatagcctagggtgccggcagcaccctcctccactcacacatgaatgtcatcgtcggcttagtcacaagaactgtcgttggcattggtgtccactccaccagccgtatcttcgtaactagcgttattgggtgcattggtggtgtcttcaccaacggttggagtgtcagcctccgcggccacggccgcagccatctcggcagccccaaagccctcgacataaattgtagtggcgactccgactttggccgcatttttggcagcaccggtgccatcgcccacagcctccgctccagcctccttagccgctcctcccgcttcaattagctcgttattggcactggctccttctttgttgctactgccaacgtcaccgccaccccgcgcc

SEQ ID NO: 11315 - DNA, 224 bp, Zea mays
  Clone ID: MRT4577_110318C.1
gggggggaaaccagggtttttttggacaaatgggttacctttcatttgggcataccaaacccttacgaacagcggtcacacttttccattaaattaaaggggtggaattttttttaggaaatcgaccaaacaatttggccggatcgagtcggataatatatattcggggggatgcaatagcatgcctttgggtaggcttggccacacttttccccacacgttcc

SEQ ID NO: 11316 - DNA, 208 bp, Zea mays
  Clone ID: MRT4577_110319C.1
agcttggatcctgtagagcggtcgcgggcgctgacctcttaagcctcctccacttcccgctgcgagaaaccaactgggtgggtgatgaatggttagccgtccaccttgccgctgtgcaggaagttgatgcacagagcacacgtgtccttgtaccgtaacacgctcacctagtccaccttccgctccgacgacgacgttagggcaacct

SEQ ID NO: 11317 - DNA, 645 bp, Zea mays
  Clone ID: MRT4577_11031C.1
tttttttttttttttttgtgatgtggaatggaatatattcacgtcgtcagtcgcacgaacgcgccccatttgatcgatccgaaagaaggaagaagggtgtatcgcctcgtccaacttcttaccagaaggtcgagggcctcttggcgacgaaggtgctcctgtacctcttcatcggcacgcgctggacacggtggggcatagggaacttgatcttcgagtcgtggaactgcttgatgttgggacggacagtctgggcagccttgagctcgttgacctcaatgatgttgatgttgttccaggtagccttgtggaccgaggccatctcgttgtacatctggttgacggcaccgacgcgggtggtgtccctgaactccttgtgaaggttgtggataccagtcctcgatcggtaacggaggaagatgccgaagttcttgatggtggtgggcttcttctcggtcagctcgttgacggagaggagctcgccgttcgccttcttgaccttggcgagcttgctgaggaagtaccagaagcgggacttggccacaacgtcgttctgcgcgaagatgcgcatgcggtagaccttgggggtggggtcagcatcggtggggatgcggcgaccgacgacctgatattcgcgatgggcca

SEQ ID NO: 11318 - DNA, 340 bp, Zea mays
  Clone ID: MRT4577_110320C.1
tttcttcttttggtcggtctaccgttttattcatgggggcatttttattacaatctgcccctcaaaactgatactagggatcattaacggaaatgccacccaccgcccgtggggtactcgtgcacataaccttacggggatacactacttgccgccacagagcccaacacctttcttattggggtttctgtttaactccgccctatatatgtaactcccccctatctctctgcctacagactcccagaaactaggcgaaggagacacattggcggcttggttttgttccatgcttacccagccccagacgctcgcacgttgcaaggtcacagctcgtaca

SEQ ID NO: 11319 - DNA, 730 bp, Zea mays
  Clone ID: MRT4577_110321C.1
tttttttttttttttttttttatttttatttaaagttcaattaatttgaataccatataatattcatcgaagctaattcataccatcatcacacacatataagggttcacctttattcacacatatagatagacaatataatataaaaaatggaatacaaatctcttggttaggaacttctgcactagaataaattacgagtttaatctctttttcacaagcttcatgtggaatgccatttcatttttcttctccatgttggtttcatgtgttgcctccactctcactagcgttggggttcaaatcttggaggagacgatcttgtactggatcttggagaagaccatgtactgggtcttggagacaacagtgtattgtacatagtgccgcggaagacggtggtggaggacagcaaactgaggcagagatggcggtgaatgacgacaaatccgagacggtggcggtggtggagggcaccgtcgcctcacgtctcgctcacgactgcttcggggaaggacgacgatggagtagcggcagagcggatggcagcaatgtggacgacgatggagcggcggcggagcggatggtggtggcgacggagggcgcggacgcgcggtcgcttcgctcggatccgctcgtgtcccttccaaactagggaagcttgcccgacctcgggtggccgggagccaccccggccgcctcgagccaatgctcgtgccgaattcctggg

SEQ ID NO: 11320 - DNA, 1321 bp, Zea mays
  Clone ID: MRT4577_110322C.1
ttatatcccaggacctgccgagaggatcaagctgctgcaggaaaagatcggccagtagcagaagaaggcgccgggcatgctcagcgttttccgggacctcaaccccgacgagatggtggccaggaacaccccaagtccgacgtggtgcgaaagaagggcggcgacacccgggtggagatctactatgccgcgtgcacttcaacggtgatggctcgtgggatgtgattagggatggatgcaaacatacttgatgtgtttgtccccagggtgcggcaaacatttgatacaagggaagaagcctacctcttttaccttgactatgcaaagttagctggttttagtgtcaggacaaagaggtgtaattgcaacttctggtgtggtgtgattgcaaccccgcattaggtgtgattgcaactgctgtataattctactcaaatatctgttaaaaaatgattgcaatgattgcaaccgatggtgtgttgtaattgcaactgctggtgtagtgtggatgcaactgctgagttgctctgatgtgattgcaacttctatataactatgtccaaaaatctgttaaacaaacaatgattgcaactgctggtctcgtgtttgtctggtgtaattgcaactgctggtctggtgtgattgcaacttctatataactatgtccaaaaatctgttaaacaaacaatgattgcaactgctgcctggtgtaattgcaactgctggtctggtgtgattgcaactcctatataactatgtccaaaaatctgttaaacaaaacaatgattgcaactgctggtctggtgtaattgcaactgctggtctggtgtgattgcaacttctatataactatgtccaaaaatctgttaaacaaaataatgattgcaactgctgtctggtataattgcaactgcaagtctggtgtgattgcaacttctatataactatgtctaaaaatctgttaaacaaacaatgattgcaactgctgtctggtgtaattgcaacggttggtctggtgtgattgcaacttccatataactatgtccaaaaatatgttaaacaaaacaatgatcgcaactgctgtctggtgtaattgcaactgctggtctggtgtgattgcaacttctatataactatgtccaaaaatctgttaaacaaacaatgattgtaactgctggtctggtgtgattgcaacttctgtataactatgtccaaaaatctgttaaacaaaacaatgatcgcaactgctgtctggtgtaattgcaactgctggtctggtgtgattgcaacttctatataactatgtcaaaaaatctgttaa

SEQ ID NO: 11321 - DNA, 594 bp, Zea mays
  Clone ID: MRT4577_110323C.1
ctctaaattaagatcatggattggcttgggcagtcacagtatgctacccaaacagtctgggggtcatctttatcgtcagcaatctcagaggtagtattctcaaagaacgcgaccgtgaggctactcgtcgcctactgggcgcatctcatcccaaacaccgagaaatacctgaagagcctactgtactccaacgttctctgcgcgtcttcgtcgtacaaccactgcggcggcaaggtcgagatcaagtactacgtggttcctgggcacaacgagaccggacctgctctgtcccagggcggcggcgcgacggggaaccgttaccctggcttcaccagggtgaaccacggcaagtacgccgtcagcgacgtgagggcgaacgtcggcaccagcaacctcatctgggactacttctacaccacggctggagtcagcttcgggacatacaaccccagcattgtcgcgcagctgcaggatgtctttgatgcggactggtattctccttatgccgtgccggttgaaccgctggaagagtctgcgtaggatcagctgagagttcaatcctttgtgtgtgtgtgttaatttggggtttggggg

SEQ ID NO: 11322 - DNA, 489 bp, Zea mays
  Clone ID: MRT4577_110324C.1
aggtcttaggtttaatttaaatgcttaaaatttaaattgttcacgtccactgccccttccccgttccaaatgcctaggcaactttaacaccaaaactatgttttttgaagtgcatagggagacccaccataacattcaaaatcaacgaaataaagtggacatatccagagggctttatatttatgcattttcgggcatagggaactcaaaaaccacatctttcccacacagcctgagggaaacccaagtgcacgtctccagcttggattcagggctgttcctctcctttgggaccaaaaaaatcttgataaacccggaaccatccaaacggtatctgacacgcttacccacaatttgaggggggaaaacaacatcctccaagatgccaacagaaacaacagtcatagtcctggggcgaggaccaaaaacacctgaacccttttggggtggactcacaatcgtgcgagtagcaacaattcccacagcctt

SEQ ID NO: 11323 - DNA, 277 bp, Zea mays
  Clone ID: MRT4577_110325C.1
aagcagagcacgtagtagcagtactgacattacattcattacgcgctggcaaaacatgcatatggggaaaagattggacaggtctacacataccaacttggcacttaattctatattccagggggggccggccatattttacttacttcattacataaggcaaaataaacggggggggcccccgccggaccaggaccaccattccccaaccccaggttttttttaggggtggcttggttttattgaagctggcgtccgtttaaattacccccagggc

SEQ ID NO: 11324 - DNA, 299 bp, Zea mays
  Clone ID: MRT4577_110326C.1
gttctagatcgcgagcgccgcccttttttttttttttttttttttttttttttttttggggttttttaacaaaagcattgtgttattacttccatgtatcacaaggtcatcaacaaaatgggcgtccatccaaaaccgctcagattgcataatctaaggggggtcattgttgcggaacatgccgtttcttgaatggcaccgttcctgctaaattctcaagacatgcctcctcccaactaatggaaaacgggttaaaaaaccgggaaggtgccagtgcatttcttttattaatttattta

SEQ ID NO: 11325 - DNA, 540 bp, Zea mays
  Clone ID: MRT4577_110327C.1
ggaaaacggaaaacagagttaatggccttttaataggcataaggaaaattaagttacggcggggaacagccaacattcgaggattcgacggaaacccaaattacaaaacccagcatatttttacatttttggagcgggccctgaggacaaaaaatatgacgtttaggccctttccccggggaggcggggggcaagctggatgtccttggccatgaggggaacccccttggcggggagggcccaaaggttggggtcctcaaaaagcccgacaggggaggcctaagccgcctcttgcaggggggaaacagaaaagttttggaagcgtaggtcggttttgaagtcctgggcaatctcccgaaccaggcgctgaaacggaagtttggggataaaaagctccgggctttttgggaactgggggatctcccggagcgcaacggtcccggggcgaaagcgggggggttttttcactccgccggtcgaaggggcaaatttggggcccgctttagtcgccagttgtttcctcggcgccttgccgccggg

SEQ ID NO: 11326 - DNA, 345 bp, Zea mays
  Clone ID: MRT4577_110328C.1
tttttttttttttttttttttggtttgtttttttttttttttttttttttttttttttttttaaacacaatggggggaacacaacgccccaaaaaaattctgggggccaaaacaaaaaacttaaacttgggggggaacaggtcccaagacaaaacccacgggtgcaagaaaaagtcccgggacaaatgttaaaccggggcaagaacaagtttcggcaacgggggtttgggcctgtagacacaaaaaaaaccattttcttggggccctgaaaacaggggaaaaactttaagccgccggggaaaccaaaaattttttgttaggcacaaaaaatcctatatagccggg

SEQ ID NO: 11327 - DNA, 610 bp, Zea mays
  Clone ID: MRT4577_110329C.1
cggacgcgtgggcggacgcgtgggcggacgcgtgggcgcgcgcgcctcccgctgttctctccacaaagaaagaagagcaacgaagccatggcgccgagaacgtcagagaaaacgatgacaccggcggcggcggctgccgccacggggctcgcgcttagcgtcagcggcggagccggagccagcggcccgcacttcagaggcgtcaggaagcggccgtggggccggtacgccgcggagatccgcgacccggccaagaagagccgcgtgtggctcggcacgttcgacacggccgaggaggctgcgcgggcctacgacgccgccgcgcgcgactaccgcggcccaaaggccaagaccaacttccctttcccttcgtcgtgcatgccactcgccgccggcgccggcgccggcagcttgcctgcggcgaaggccgtcaccggtggcggcggcagccggagcagcaacagcagcaccgtcgagtctttcagcagcggcagcgacgtgcaggcggcgcccatgcaggccatgccgctcccaccgtctctggagctcgacctgttccaccgcgcggcggctgcgggcacgggcacgggcggcgccgccgtacggttcc

SEQ ID NO: 11328 - DNA, 545 bp, Zea mays
  Clone ID: MRT4577_11032C.1
tcgagcggccgcccgggcaggtacaagcttttttttttttttttttttttttttttgtttttttttttttttttctttttttttttttttttgtttctttttttttcttgctcacaaaaaacgattttttttggaaactcttcaatcatgcccaacacaggggggcgcttccgtccctacttctaaattcggattcccagcaggcaaccaacggggccaaattctcctatctccaacggacgaacacccctagaggggggaggaggctttaacccgctgcccaaaccccttcgaaattgggggggcggcaaacaaggcgcctttggaacccctctacttacggggcgttattcaccccgattcggcaggggttgaaaaaaccgccctttcggccccataaatccgatggcttttcccccacctcctgggccccccctggcagctaatgaccatgcgggacggtcctcaccctccccatgcatacctttaacaaaacggcccggtgggcccaccccagtttaaacccgggccgtacccacgcttag

SEQ ID NO: 11329 - DNA, 486 bp, Zea mays
  Clone ID: MRT4577_110330C.1
agactgagagctacgagctgcacaaactgcggccccaggggatgacctgtgcaaggagttcgacgccctggtcgacagacctctggatgagagggaggacctggctgcaatcttcaaggtcctcgaagagatcagggacaagatcaagatcaaacacggtggcaagaaagtagacgacgacgagctccttccgcggagcaagaggggggacctagccaacctgctccccctcatcaggactgcactggagctacgcagcaagccgccgccgcctgtgcagcaggacgccacgggcggtgcccacgacagcaagccgaccggctgcatcccctgcaagcctcgggcgtcgcagcagcacaaggaagaaaaagaaggcagtaaggaagtcgtgtcactcaagctgctgctccggctgacccagaacgtgctggagccggagcagtactacgagtggacgaccagctacgtggacgaggagaggatcta

SEQ ID NO: 11330 - DNA, 519 bp, Zea mays
  Clone ID: MRT4577_110331C.1
cggacgcgtggggtgccagaaaacacacggccgccaccccgcgccaccacccagttcgatcccattccaagcgcgcgcagcagcagcgccagcatgggtcgggcgccgtgctgcgacaagacgagtgtgaagcgggggccgtggtcgcccgaggaggacgaggtgctgcggagctacgtccagaaccacggcacgggcggcaactggatcgcgctcccgcacaaagcagggctcaaccggtgcggcaagagctgccggctgcggtggctcaactacctgcgccccgacatcaagcacggcggctacacggagcaggaggaccgggtcatctgctccctctacagctccatcgggagcaggtggtccatcatcgcgtccaagctgccggggcggacggacaacgacgtcaagaactactggaacaccaagctcaagaagaaggcgatcgccatgcagcagcagcagcaagagtactaccaccaccagcagcagcagcacagctcaggaggccgcggccgc

SEQ ID NO: 11331 - DNA, 307 bp, Zea mays
  Clone ID: MRT4577_110332C.1
gcaagctcctatttttataaaagagttcattttgactgcaacgtcgcaataaacagcaggactagctgccttatgtacagatctttattctttaatgactttgactatccggatattgtcttcaaggaggaatgcttgaccattcgcaccatctgagctaaagctaacacgaatattatctatccattgacctttacttgcaatgccggtgctaaactgggaccactttcaaatctcaacaaagctacctgacagctgtgttaactatccactaccactgtgacaccgaaaagctagcatcttaccc

SEQ ID NO: 11332 - DNA, 3914 bp, Zea mays
  unsure (1)..(3914): unsure at all n locations
  Clone ID: MRT4577_110333C.1
ttgatgatggctctcattacatgtggatttttctgttgcgcttgaagtccgatatgtccccccatgctttctcatttctttgcctgggtgtccactcagttcggtagcacctgccaagccattcagtgtgataactggacagactttgacaacttttctcgtgccatcttcctcaatcgtggcgtccatattcagatgtcatgcccctacacttctccctagaacagcaaggctgagcgcatgattcgcactaccaacaacatcatacgcttcctgctcttacaagtctcgattcatgttcggttctaggctaaggctctctacattgccaactacctgcttaatcgtctgcctattgaggcgatctgtgctctcacccctcactttgccttatttggctcacttctacctatgaacatcttcacgtcttcggatgtgcttgctatcccaaccttttcaccactgctcataagcttgcccacggttcgacaagttgtgtctttcttgggtactcccatgatcacaaagggtactagtatgtcgatctttccaccaaccaccttttaatctctcatgttgtcttagacgaggcttcctttcttttctctgcttccccctccacctctgttcctaaattggattcccttttcgcgaattgtcgtgtggactcccctatacaaccccacttgttttttcctctgcaggctcattctccgccgcgccatcagcggcctccgcgtcgttgtaacgtcgtgcatagcctcgttgtcccccattacaccccttgtggccctgtcatcccctgtcgtgccacacacggccttgccatcccccactgcgcccctcgcgaccttgccatcccttgtcatgccatgtgcgtccttggcgtcctctaccgcgccttgcgcagcttcagcgtctcgattcactgatcctatgcatgtctatgagtgacatgcacagagcatgcacgacctcatatttgtctcctacgcgatgaggctacgattcgccgaccctgtccatgtctatcatctctgtgcgcaggattgtccatcgacccgctcttgcatcgagccgtcggtgtaccacactcctctcctttgttgagatccctgtcacatccatccgatggtgactcgccaaaccgtgcggtcctctggcctgttgatcgtcttgtcctttcgactgttgcctcatcgtcagtggtctcccttatgccactgttcgctcgtcgtgctcttgtagatcctcactagtgttgtgctatgtaggacaagcatgtggccctgcttgccaatcacacctaggacttggttcaccgtcccactcgctgcaacattgtcactggcaaatgggtgttcatccacaagcgccacgccgacagctccttcgattggtacaaggcttagtggatccttcgggggtttactcggcttcatgtcgttgactatgatgagaccttcagtcccgtggtgaagtcacgcattgtccgcacgattctgtctttgcctctctcacggtcttgacctgtccacccgctagacgtaaaagaacgcctttctctatggcactttgactgagacaatgtattgcagccagcggatcggttttatggatcctgctcatccgaacatggtctacaaacttcacaagtcgttgtatggtctgaagcaggcaccccgctttgcttccttggtctccctaggctttgttgaggcctagtcggacacgtcgctcttcatttattgttgttgtggtggcactgtatacctacttatgtatgttgacgacattgttctcatggtcttcggtcctgctatcttgcagcgaaccatctctgccttgcagcgggagtttgctatgaaggatctgggacaacttcattacttgtcattgccgttgagccccccaccctagccgcctcatgtttcttcaacaacgggcgtacactggggatctttctgattgagctagcatgacagttgcatgctttgctccaccccagtggatacacaggctaaggtctcctccgttgttggtgtccctgttagtgattccactgcatactggaccctcttcttgcgctatccagtatctcactttcaccaggctagatattgtttatgttggttagtagttgtgcctacatatgcatgatccctaggagtcacaccttaccgctgtgaagtggatcttttagtaccttcggggcacactcgactatggccttctctaatgctcctccgcatcagcacttgtctcctacactgatgttgactaggcgcgttgctcggacacgcgtcgctctacttctggctatttcttctttttgggcagtaaccttgtatcctggtcgttgaagtggtagcaggtcgtctcccgctcgagtgtcgaggccgagtatcgtgttgtggctaatggtgtggttgacacatgatggattcgatagtttcttctggagctttagtcctatctccagcaccaacctcgtctattgtgacaacgtcaacgtcgtttacctctccaccaaccctacccaacaccaacagacaaagcatgttgagatcgacctccacttcgtccgcgagtgtgttgccattgatgatgtttgtgtccatgtgcagacgacttctcagttcgtcgacatcttcaccaagggcctcccaacgtcgttgttcttggagttacgctccagtctcaacatctgtcgctaatagagtttcgactgtgggaggaggcgagggggtgttagagtgtattgttcctattgggcctaggccttgtatccatcccactatggggcttttatttgtacctacacctatgtcctgatattgtattccaactcttcctctccaatatcttgccttggcatgggcggatcctctcctatatcttgccttggcaggggcagagctatttgtactgctctgggtgcggctgcacctacacccaaaaaaataactttggcaagaatcaatttattactatatttgcagcgtgcatgtgccacaaagcaagcgcaccctctctgatttgctctagctccacccctatgccttgacctggatttcttgttagttcttagacagttatagtatgtgtatgtgtgctaatttaaccacagttctgtttcgatcaaatggaagactaaaaatctattatagaatatgctggcattgcaagaataacaaaggggctgaatatgaacttatccagcttatttgataaaaagttggtatgtactttcctgcaagtttatctggctagatatcttccttttgatgatacttgaaccttgaaatattagtagttccttcaagaaaggtcatagcaagggtttatctgaagcccagaagcatgaaaagtcgcttcctggctcttcaattgcatgtgatattgaagatgccggtgattgcaatgataaccttgtgaaagcaccttcatcaaacaacgtaacagccaactttaagaaaaagggtaagagaacactggagttggtgaatttgcagaatagctcagatttaactgatgttgtcacaaaagataacgttcgacagattagagcaaggaaggtgccagtgtaaacagctactcacatatgatcttggtatttatgtaatttccgtccgatgtaaataaatacttagttctgaaatcatttatacatgcatatccacttgagagtactgttataatggtaggaatcttggtcccggttcaccatgtaacattataatttaaatagggatgggcatgagcctcttaggctatttctagtagatcctctaccttgtatcctatttcaaatttttctgcaaacactgtcagtgtcatctacaattttgtgctccctattttccatggtctacttgagacagttttataaaaaaaaaaaanaaaaagcggcc

SEQ ID NO: 11333 - DNA, 363 bp, Zea mays
  Clone ID: MRT4577_110334C.1
cttggagggttaaaccacccttttttccaacaacaacaaaacaccacaaacaacccttcccctactattaccacccccatattatacacaacaccatccttaacgccccccactccccttccccaatcactggcaccccctcaaacccccattcccaacacccctaccatcataccataaccccaacccccctccaaaaaaaacccgcaaccacaaccaacttccttcttctgcccctcaactttcccacccaaaactgataacctaatttgaatcaacaatcctcaaaacacccttcgcgccctccatattctcgccctaaaacaccatgttcgcatccaaaacccctaaaaaccccccaaa

SEQ ID NO: 11334 - DNA, 292 bp, Zea mays
  Clone ID: MRT4577_110335C.1
aaaccatattctgaaaaatctgctattagggggtgctatgggttaggagcatacttcaacattgatgcaacaataaaagattgtatcttttacgatagactagtatgatgaatgaaacatgttacgagatgcgatggtaaaaaaaaaagaaaaaaaacaactattgagctagaaaaaatgaaaaaaaaaaataaaatatataaaaaaaataaaacaaaatataaacataaattatttgtttttatagctttgagtaatcatggtaaatggggttttattttgagaaattttt

SEQ ID NO: 11335 - DNA, 621 bp, Zea mays
  Clone ID: MRT4577_110336C.1
ggtacgcctgcggtacggtccgatgaggaaacattattcatccattgatatgctatgcaaacgggtggcttcaagctgattatcctccagagagcctttttggaaatcagaatttgttgtttacaagctcaaggagatggggaagattactgaaaaagatatcatgatgatatgtgatcaattccagaggctggacacagggagctgcgggaagatcacactttcagatcttctggagagccatcacttggtttcagaacccagggataagaaaaaggggaagaaatcttaaacatgtgtcatagtatgcacaagaattgaagggcagtgctaaaattttgggactagaaagcacgccaaatgagcaagggtgcgacaggaggcattctcctacacggaatggaaaagacggaatccgctgaaggtaggatagctccgtagaagttgtaggtgcgctccagatatgattctaccctagaaatggtggaaggataataactgttttaggaggcggctgtaaatatgaacataattatacaggatggtctattcagattctttatgtggatcattcctactcatttttaagaatatatttttctggccacacagttgacgcgc

SEQ ID NO: 11336 - DNA, 1030 bp, Zea mays
  Clone ID: MRT4577_110337C.1
gtcaacagaggaaaggcttgcggtggatacctatgcacccagagacgaggaagggcgtagcaagcgacgaaatgcttcggggagttgaaaatttcaaccgtccccaccgccgcgggctcctcctgacggaccccgaaggtcgccgtgactcccgcccctcgccggcgacgtccggcatgccgtcctcccgcctcttccgcctcttcctcctcgcgacgctctcgctcctcctcgcgcaaaccctagcctcctctgcccccgtgcccgccgccgcgtcggcgtcggcggagtccaccgacccctgcgcggccgccgtagctgacggggaagctggcgtttctcaattcggcacgagggcaccctccactccaccgacatgtaccagcggcagtaaattccgaggccgagcagccgctgccgagcctcgaggctcccttctcgcttccctcacccgcctactcctcctagggtttcctcccgcctcgctggcgtgccgcctcccctcgccattgccgcggggcgttccgccgctcgtgggacccgcatcgagactcgagagctgttcgtgctgattcccgcggagccttgtggctgcgactctgcggcgtcgggtggggtggggaggttttgacgcccgtggggtttggatcgagggcccggagctgtgtctccgcaatgccgggctggtctggcggcgattgctagggttttctggtcggatttcggtggaagagctgaggttttgcttcgagtgcgggagctgcctgcaacccccccgcttgccttggcccgagctcggtgtttccgcagcaatgcctagccgattttagctcgctctggggttccgaagggcgaaggggctgtcgggcggttcgagattgcaaggagtcggtggctcggcccaatgtccggggcaagcgcgagggggcggctgtcgccagcgtccggcggcgccggggactccgaacctcggtccgcggtgggcaggacgcgctcggtgtccgctacccgcggccgtaagccctcgccg

SEQ ID NO: 11337 - DNA, 545 bp, Zea mays
  Clone ID: MRT4577_110338C.1
ggccgcacctccaagacttccggccgagtctgagctcatctccgcgcgctgacgccgccgccgccgacgctcgacgcccaccgcgcaggcatggcaggtgcaccaccgagaaggattttctgcatgcagactaaggtgttcctcttctccaataaatctcggggaggtgaacaacccagctcagggaggcaatccattttgcaacagcattggccttggacttcaagactcccagcgaagcaattgaagagacctacattgcacaacaaatgaccattcgctgaaaccgttctctatcagaggcagaattattgctggaacatgccacagtgctaatacggacagaaccatctttgttcacaggaactacctcctctttggtaacaaataccagagggatgataagaggtgctccaacattccagatcacatctccccatgcttccgtgcgaatgaaggcgaccatgtcatcattggtcagtgcacgtccctatcgaaactgagaccggcaatgtcgtaaaagtcattccagccggatctgctgc

SEQ ID NO: 11338 - DNA, 792 bp, Zea mays
  unsure (1)..(792): unsure at all n locations
  Clone ID: MRT4577_110339C.1
gccggccgggcttcgctccctcttgtcgcagctgccctccattttctgctggccgccgctgctcctctctccattgcagcgcgctccctgctccagccaagtcccatggtgcccagccgagttcccttgcgagcgccaccatgcatcactggtgctcgttcctccccagggtcgtcagcctcacctcccatggcggctccctctgtttggcatccagcacaagtcgcgccctcctcctcctgcggcaggtcgacgacatcatccccctgctcctcccatgtccgcctctcctccatcccctctccatcttctctcatgctactacgcgatgctgctctctcgatcccagagtctagcactgtccctccctggtttcagccctcaaaccccatcgccaatctccctcgtcttgctgccggtacgttaagtgatcacgtgatgtggaggattggaactgagtcgaccacaagatggtgttaagcgtgggtttctttgcaaggtgatgctgatgaacgaacttaaggatggatagactgaacctgtgccaacacacaaggctagttgccaagcggacatcatctaacaacagtgacttagtgttatcccaggttataattttgttctgttgtggatggtgctaagtgtcggtgggctcggccttcttatataagtatttcccatctatagcttctttattgaggattgtcacttaagctagcatgtattatacgacttnataatggtttatacattcaaaatgtaaatctttgaatcactttcttttgtaattac

SEQ ID NO: 11339 - DNA, 816 bp, Zea mays
  unsure (1)..(816): unsure at all n locations
  Clone ID: MRT4577_11033C.1
tccacacccatctttcctgaagttgtcaatagcgattccacgaattgcgccaggaactcgcgacaatgcttatccccaaggacgaccgcaagaagatccacgagtacctcttccgtgagggtgtgctcgtggccaagaaggacttcaaccttcccaagcacggtgacattgacaccaagaacctctatgtcatcaaggctatgcagtccctgaactcccgtggcttcgtcaagacccggttctcgtggcagtactactactacaccctcacccccgagggtctggactacctgcgcgagtggctccacctccccgctgaggttgtccccgccacccacatcaagcagcagcgctcccacgctcccccccgcggcatgatgggcggtgaggaccgtgagcgtcgtccccgtgctccccgtgagggtcgcgagggtggctaccgccgccgcgaggagggcaaggagggtggtgcccctggcgagttcgctccttccttccgtggtggcttcggccgtggccgcggtgctccccagcagtaaaggactcttccttgatgccttggtgtcctgtcatccactgctcggtcatccttaggggctgatgttatcgacctccggtctggagtaggcccttggaatccatcgacaccgaaacgggccggtcggacgatgcatcttctacggtcccccggtttctgaagctttgnggacacggaaaaatcaaaaaagttaaaatgatgccgctggctttatgatgtagctagtctcaatggcacactcatgactcagtacaaaaaaaaaaaaaaaaaggccccta

SEQ ID NO: 11340 - DNA, 1069 bp, Zea mays
  Clone ID: MRT4577_110340C.1
cccccctcgagtttttttttttttttttttttttttttaggagtgactctggttttcagtactaacaagacacaagcaaagtagtttcctacagaaaggaatggcaacatccagttcgtcgttaagacaagaaaccagactactcgtcccaatgatcgaaagcttggagttggttgcatttgcatatgtacagataaattacagggacaatttgtatacaccaatcaggtacacacatcttgatgcttgtccagaacactccaccgttgagctaatcactacacacacctaaaaaaggggaaacctaccaggctaaaaaaaaaaacaagttcatcactgagactgcgcgtcggttcaattcctgtatcgagtgcgcacggcactacgccaagaacgtcggcccctcggcgctgcagcgcgtgggcgccttccagagcgcgctgatgccggcaccggcaccggggcgcgcgccgcagcggcggcaccgctcggcggggggcaggtcgacggccagcacccggcggcagaacgggcaggaggagtgcgcgcgcagccacgtgtcgacgcaggcggcgtggaacgcgtggccgcactgcggcagcacgcgcacggcctggcctccctcgaactcggcgaggcagatggcgcactcgtcggcccctccctccgccgccgccgccgccttgccgctgtcggagacgtacgtgacggtcgggagcgagcgcagcacctccttcttgacgcccctgttcgcggctttggcggcgcccggctgcgcccggccggactcggtggcccagcgccacgagcacgcgcagcgggcgacgaggcccaggccgaggacgcagaccagcgcgcagagcaggccggcgaggatgaggatcatgtccgagttgatggagtcctccggcgagcccgagcctgcgggcgcttcgacgagtatcctcgccatgtgtttgcgctgcctgaagatgcgcgagtcccgtggtggcgctgttgttggctgatgcagaggctctgggcaggcggcgtgagaagtcccggcccggccggcctcgagcgtccgcac

SEQ ID NO: 11341 - DNA, 362 bp, Zea mays
  Clone ID: MRT4577_110341C.1
ggagctggacggcattgagcggtaccgggataaggagaggagggataggcataggagggaggagaaggatcacaatggcaggggaagaagggacagggagaaagagaaggacgaccggagaagggacaaggatgatggcaagcatagggatagagatagagatagggagagagacagggataaggatagcaagtacagagaccgggataaggagccagaacgtgaacgtaaccgtgaccgtgaccgtgaccggggcaaagatcgggagcgggaaccacatcggcagcgtgacaaggaccgtatcataaatcgtgataaggaagcagatcgtgataaggaaagggaagcggagggacaaggga

SEQ ID NO: 11342 - DNA, 241 bp, Zea mays
  Clone ID: MRT4577_110342C.1
agtactaagtcggcggccgcccctggtttctgcgaggctattattgacacaatcgtgtctaggtccacatcaaaggataccgagaccagggccagaaggggcggccactaacatcctagccccgaggcctctcaggagactatgcgcttagtccgcgatgaccacgagccccacaccatccaggcccgagcggctatccacggccccggctggcctgcgtaccgcactgaacgggtgagac

SEQ ID NO: 11343 - DNA, 115 bp, Zea mays
  Clone ID: MRT4577_110343C.1
agagaccaaccgtgggcatacttcacgactatatgtagtccccgcaccgaagtgagggcgcgtcgtgagcatgacacaatggaagcaccgtgacatctatgaacgcacaatctac

SEQ ID NO: 11344 - DNA, 332 bp, Zea mays
  Clone ID: MRT4577_110344C.1
gactcactaagggcgattgggatcatcgagccggccgggacgaagctttaccaagtcatactcgtgttcatctgtatggcatcgcccccccatcaaccggacatcaccacggagatgatgctactgccatcgcggctgcgactgttgctctaagggggcggaggggaactctctccaaatacccttccctgcataggatcctctggctattatcggaggcgaacacccacccgtgcaaacacgactaccacaacatcaagcagggaaccaacacaactaaatgacgggacagggtgtccacgccccactgggaaaaaaacaatgacatcgag

SEQ ID NO: 11345 - DNA, 357 bp, Zea mays
  Clone ID: MRT4577_110345C.1
aggacaagcagtagtagcaaggtaatatagcaaagctgcctacctcttttccgattatatttcccactatatatgcactcaacttcagttgacgcttcatacacagaatccggtgttgtttcctactacatgacgttgtcgtctagatgtcggacgtcgaagtttaattgagtacatcaggtagtatatatacatgcatattatggtaataaattgtgaagaaacagcttaaaaacgggataataacacaatggctactagctagctagtaatcgcgccatgctttattaatttatttgtgaccatatataatgcgataatgcactgtctgcagattaaattatactatgatctaac

SEQ ID NO: 11346 - DNA, 445 bp, Zea mays
  Clone ID: MRT4577_110346C.1
aaaaatgtgctttcttttttctgggaagccacaaattttagcaaaaaaaactttttttttgaacttttactcataagccatctaaaagagggcccccccaatgatgggttgttggtagaacactgctgggtttgtcaaaacaagttggtcgaatggcaacaattgttgcagttttaaaagggtgccaaccttaggcccagtgtgcaggtagaaccgcaacaaatttttctttttcaaaaaagcaacagggcttacaacaactagctggcttaatggtaataattgttgttgttgtacataaacctgaaagttcaatgcttccaattggttgaatggaaaaaatttcccggggtaggcaacaactaactggcttaatggtagtaattgttgtttctgcaaataagcagcaaagttcaatgcaacttgttggttgaatggcaaaaac

SEQ ID NO: 11347 - DNA, 314 bp, Zea mays
  Clone ID: MRT4577_110347C.1
tatgattcctcagcttattctgttatacagtcaagggcagcatcatgtacccgcaggcttttttcttcagctgattctttcacaccaataaataaatactgcgttaccaatctgcttgtatccataaacagaatttttaagattgaaaaaaacaataatacttatgaaattgaaagtgcatttcagaccttttgtctaattttttcaacaagtcaaagagcacatttctttcttacatcatcaaatgttcccatacattttttctactcatcctttgaccgctaaggggagggtaaacacctccctcctttaca

SEQ ID NO: 11348 - DNA, 269 bp, Zea mays
  Clone ID: MRT4577_110348C.1
gatggctggctggcctccgccgccgccggcgtgctcctcctcctccgccaccgaccgcacaccgcgctccgcttccatgccttcgccatccgccgcctccttccctcccgctctcctccccctctcgtcttctctgccgccgcagcccacgtcgcggcggcctcccgccttcggggccctgccctctccatccttgcctctgcctcccgccactgctcaccggcccagatcttcaatgccctcgctgccacctaccgctgctttgcctc

SEQ ID NO: 11349 - DNA, 885 bp, Zea mays
  Clone ID: MRT4577_110349C.1
cggcacgaggtgagtacttcactagtacacccctattaattaactaaaatatagaattagtactaattagtgattatttgtatgttctttgtgtgatctttaatagcatttatacgatctagattaatgtttatgttttcttctgctcttttgttcttgttattatttttgtagtttgtattattatttaaattagattgatcagatagaggttagacacttaaggttattcaaattactgtttctcttgttatttctccctctgttaatctctagtatcatttatatgttttatgcttgtttttcttttatcttccctctctccatttatgttattactgtgattttttgtatgaattagaatggtagggtgattatatgttttaggatttttttttggtcctccctccttcatttatgttagtaccgtgatatttttgcatgtgagttagaatggtcgggtggaggttaaagacttggtgcaaattattttccccctttctatgtaatttctggtgtcactttagatttttagtttgcctttgtatcgcaaaacaaacgcgttgacttgattattatatatgtttttaccaagtcagtatatatatgtgtgcatgcattatctatattgccagcctccctaacccgaaatcctggctccgcccctggttttactgtgctgtattgtgcagcacataggtcccaccacatgcatgcacaagcacaacacacggtcaacaagaacataaacttgttcctaatgactgttcggttgtcacttttgttttttctcaacatgcaggagagttgataccagttcactaaaacttaaaaatgtatcttaactgtctaagcctacccctgtagcaccagttacaaaatgag

SEQ ID NO: 11350 - DNA, 293 bp, Zea mays
  Clone ID: MRT4577_11034C.1
taagcatataaataagcggaggagaagaaacttacgaggattcccctagtaacggcgagcgaaccgggagcagcccagcttgagaatcgggcggccttgccgcccgaattgtagtctggagaggcgtcctcagcgactgaccggtcccatgttctctgttaatgggacgcctggtaggtttagtgccccttccggtctggtccttttttcaccacgtggctcctgtatcgagtcgggttgtttttttttgcatcccattattctgtcttttatttccttccaatgtttaattc

SEQ ID NO: 11351 - DNA, 123 bp, Zea mays
  Clone ID: MRT4577_110350C.1
ggccgacccacgagtcaacttgtcctcaacagccgttagggcgtccacattgtagaagcctcctgggtgtgacaagaatacgttcccattggtttcagtccgggagggatatcgactaacatt

SEQ ID NO: 11352 - DNA, 568 bp, Zea mays
  Clone ID: MRT4577_110351C.1
cggtcattatggccagcttctccttgaaaccacagcacaatggcagcagcagcaggatctaccatactatctgtagtgctactgcctcagaatggaggtcgctcctgcggtccagaagcttcgtttcatggagctggaagaagcacacaaggttgcgattgcgatgctgtcagggttccgacgggggtgatgacagccgtctgagccaaaacaccggcattttccacccatcgatatggggggatttcttccttggttgctctagcagccctgaagaagctgctgcttcgtcccaacaaaaggcttggatggaacgatgcgatgaactgaaggaagaagtgggtcgtctgatggtagtagaagcaaactcaccattgcatgagaggctgcatttcatagacgcgctggagagcctgtgcttggaccacctgctggaagaagagatcggtgctgcactgacgcagatcgagaccgccggtgttagtgacgactgcgacattgggaccgtctctctctggttttacttgctccggaaacaccgccacagggcgtcgccagatgtgttcgt

SEQ ID NO: 11353 - DNA, 149 bp, Zea mays
  Clone ID: MRT4577_110352C.1
attcggctcgaggggagcttgctagcgagcgttgtctgaacgggtgggacggcaacatcgacccgggagacgtatgcaatcgcttgcagacaacgataggtgcaagaaaaataaccccatggacccctacggggctccactggtaagag

SEQ ID NO: 11354 - DNA, 439 bp, Zea mays
  Clone ID: MRT4577_110353C.1
acgcgagggcaccgccctgcctcagagagataaatttcgctatctgcggcggtgatggcactcccggtgtttagctccggcctatttcgattcgactccccgcgcaaccgcccccagtccaccgacatagcgcctgccgtcttatggggagacctccccgggaccgccggtctctaagtggggcagccattggactggattaagaaaactttcttaccgaaaccgcaaccagaggcataaattgtttgcaaggctgcgacgtcggtacttcacttttatccgggatggttcctgactgaggagaactcggttaactcagcaaaccatacgagaccccctggtgtacccctgtgtgatttttatgaaacagatgtaagcaatccccagccgggagacagggaacaaccacactggttggataaaacgtgtccatataata

SEQ ID NO: 11355 - DNA, 1952 bp, Zea mays
  Clone ID: MRT4577_110354C.1
ttcccggcgatatcatcatgtgtcctaaatccaaagccagcgaagaagagattccgccggtgccgtagccgctgagctaaccaccagccggttcttgtcgcgttgtctgcaactttgcaagtaagcaactcgtcaccggtcagccaccaacaaggcaccttggttaggctgtttgcccatccatccatccatcgtcttgcacgtccaagaaatcgagaactcaggcaggcgtcgcccacttgccctcctcctcctcctcccgtcgtgaattccacgctggttcagggatgtcgatcgagctcctgacgaaattcctcacattgctgttcgggtatgccatgccagcgctggagtgcttcaaggcgatcgagcagcggcccggccgggcagatcagctccgcttctggtgcgagtattggatcatcctagtcctcctcgtcatgttcgacgaaattgctggggttctcatttctaagatcccaatgtactacgagctgaagctagccttcctcgtctacttgtggtacccaaagacaaggggaacggacatcgtgtacgagaccttcctccagccgctggtgatgcagtaccagcccaacatcgaggccaggctccagtacctgcgcgccaatgccggtgacatcctcgtcttctacctcaagaacttcgccgagagaggctacgagctcttcctccgagtgcttgactacgtccggtcgcaggcgtccagagggtcaagaacacggagtttcttctcgttccgaggtgaacgttcggagaggccaagcttcaccgatgactatgtcactggcggcgaccggagggacgggggaaggcaccgtcgaccacgcagtggctactagtagaccaagtagtcactggatgtataggatgtgcacagaaacatatacgattactggtatagtgttaggtaggagtaggatcaaatcaagcaaaccttacggacagaacttgtaggatccactggaaaaacagatagcttcttataaattttctattcatattgtcactttgtcagcctattcataatataaaaaaaaaaaaaaaaaaaatttgagaagatctaaatgattgtgcttttgtgtatggctcattaagttttgacaaagtttcatgtggaatagctctaagacttggcttgggcttagttccagctgcttgttcgctgctttcagctatagcagccagtgttacagtttcaccgtgagatttcacagtaattgctcgatggaatgacactgctgctcgagcctgaagatgttagcgacctggtcaattcgttttgacttcgtatatatagtctgaataaattatgacggaggggatatactgagacacgtttgaatagggattagaagtgacataggggggctaggggcaagaagatctgtgttgatcatactgagctttacaagtttccagctgtttgttcgctgctttcagctatcttcatttcgaaagcctcaaaactgccaactaggcacatgtagcgacgatgggcaaggaaaagaatatctctggtccttgttctacgctataatttcattgtatatgtagcatcatgattgaaaagaaatatcttatatttatattgatgggtgaaatagtgtcctgtatgctcatgtaaattgtctctacatttggaagttaaatatgcttgggaggggatcactaaaaaaaaaaaaaaaaaaagattaaaaaaaaaaaaaaagggcactcgacaaaaaaagttgatcctgagctttacgtcatttggcccttcaatgtaaatataacttagcttcattttgaaagcctcaaaactgccaactaggcacatgtagcgacgatgggcaaggaaaagaatatctctggtccctgttttacgctataatttcattgtatatgtagcatcatgattgaaaagaaatatcttatatttatattgatgg

SEQ ID NO: 11356 - DNA, 285 bp, Zea mays
  Clone ID: MRT4577_110355C.1
aacaaagggggattcattgatggctaaattttaggagtaatttttttcatgtcattggggcttaaaataaacaaatttaaaaacatccccttaaagcacacactttgggggggccaactttttccatttaggcaaacttgccaagtatttgattggattacaacagggggcacatggctaactttaatattttggaaagagctccctcccttggttgttttatataggggaataacgggacctggttctgtattgggatgccatttccaaaataaggtccatggg

SEQ ID NO: 11357 - DNA, 436 bp, Zea mays
  Clone ID: MRT4577_110356C.1
acctttgtggctgtttttttttttctcgaatgattcataatgggctggggattcttaccaaatgtttatccgcatcctccattatatgtggaattcacataagactaggaacagttctgcagagcatgagaacccttctaaggctaaagctgggttcaacagcatgttcagccttacatttcacaaaccagaatcacttgcatcactgtggaaatgaggtattcaactacaatgatacacagctcacagcaaatattctcccagcaatgcaaagtgtgtataatgcccttgttaatctaggactgggacaacaagttactgttacgactgctcattctttcaacattctagcctattctttttctccttcatctggggcattcaggcaagatctgatacaatacattcaacccctacttagctttcatgctcaaat

SEQ ID NO: 11358 - DNA, 576 bp, Zea mays
  Clone ID: MRT4577_110357C.1
aaaccccgtttttaccagcgttcttttattttttttgtccgaaacgtggtggggtggggggttaaaagcaaattaaaaatttcttcattttttgtacattgtacaatttactccttgacccattctaatcagcttaccagcaaccaggaatgttttgttttcaataaagattgttaagacatgcaattaaatttgtttgcgggagaacaaggtatgcatcttagcgatatccgtaatcatatatgtatactaagtgcatatgcgaatggtgggtgtgcggtgcgtggaagccactaaggccctaggcgctgagcgcgagcacctggtggctgtcgtggggtcggtcggtcagtcgatcgtgaacgtcaggatcccaggcgatgtttccaccataacggccgccaccgctacaggtggatcctgtttcccaccaagtcaaggtttgtgaattcgggagtgctagaatcttgatcttccacaagagaatgcctccagaagcaatggatatgcttctagaaaaagataaatgtcaaatccatgctatagagtatagactgaggattcaacactggcatg

SEQ ID NO: 11359 - DNA, 214 bp, Zea mays
  Clone ID: MRT4577_110358C.1
agcgtgccgggctcgacagcaacttgagcccttgggtggcccgagcacggcccgttataagccgggcctgtaaaccggcccgttcacacagccacctacctaataaaattctgggctgcctctacctgcctcctcctagtcctaatggcccagcccaaataggagcagaccgcactaggcaccggcaggcgcgcagggcggcaccgcatccgcg

SEQ ID NO: 11360 - DNA, 633 bp, Zea mays
  Clone ID: MRT4577_110359C.1
gcgctcaggcggcgggtgcgaccgcccaaatcgacggctacacgccttcttcgtcctttctcctctgtctatagactctccttcccctcggtcgttcacatgtagaccacttttcctgtctcttcatctgcgatcatcgccctcccaaatgctgaaggcaggactacgtagcaaacaaccatatacataggctgagaggctccgatcgagaaggcacccatattcataccagtactggacacgatacatccagcggctgatacggacgggcaagatgatgctggccaaagagattcgtcgcgccgacgactgcgtcgcggaagcacatgagcagctgcactaggatgctggtgtgcgtgtccatcgcacgtgctggtctacgtcgctgaatatcctgacgaggatccgtcgatgctgacgtggcacttctaaggcccagagagacgcctgcgaggacgctaccacctaggcccggccaacggaagctctcactggaacgtcgccttgatgctaccatcctcctcctcaagatcggcagcttccactccaccatccctacatgtggggaccccgcacggatgcagagatcgatatcctgctcatggatactccaagctcgaacgtatgcccttg

SEQ ID NO: 11361 - DNA, 198 bp, Zea mays
  Clone ID: MRT4577_11035C.1
aaaaacattgctttatatatacacttaaaaccatcaatccattacctttctttcttttttctctttatacttatataagggagggtgcttttcttttcaccttattaaaagggcataattttattcttactggtgtgtaataattaatattttgtataaccggctaaaatttttttatggctattaatatttattgtt

SEQ ID NO: 11362 - DNA, 388 bp, Zea mays
  Clone ID: MRT4577_110360C.1
cactactatccacctgcctagccctggtggctggtgcttcacgccggcagcctccagcgagaccccagcagcagcccgccgcctccaagtacgccgatccggcctccaggggactgcctccttctcgccgaccttagatttggtcgctgcaccggtcgattagtcatcgggccggtagatttggctgctctggccgccgatcgcacgtccggttgggggcggctttgatgggcgacagcggctggcgctgtgtgagcgagctgggcgagcgcggcgtctgcgcgtcgcctgtcgcggcgggcaaatgcaggggtcgcggggaactcgcttttggggctgcgggactgggagcgcgtgggggtgggcgcggcgttcgtgtggcttgggg

SEQ ID NO: 11363 - DNA, 338 bp, Zea mays
  Clone ID: MRT4577_110362C.1
gcgacgtaccatccagaaacacactcaagctgaatcgccactaacaactaacctaacgacaatagagctaccaagatgggacttcatatatgcgcttgttgagctatacgcgcgcgcacccgctgctactattagaccccagcgctcactcgctcatatacgaccattataaataggaggcatacacactactacgaacgcatgacgtacaggaaattgagctagcctaaaagcgacaatttgccatgacaccaaacagtatcacacaacctggcaggacatgagagcgacactaccagacatgtatgcatgggcatgccgtccacatgacactgcaa

SEQ ID NO: 11364 - DNA, 391 bp, Zea mays
  Clone ID: MRT4577_110363C.1
gacctttgggctgatttagtgcttggtaaacaaagacaagaaagaaagacccggccgatcctccgagacgtatgtcaatagcgagggagacacattagccgtcgcgataggcgatacagcagtgtccgtcggctcgaaagatataaccatcggcgaaatatctcgcgatttagataagttcgcagcgtccgaatgcacggaacccttcgacttcgctaccaaggccgtcaccgaatttaagattaaagtcgacgttgataaaacggtcatcgggccaactaagtccgtctaagaagatttgctaccttatcctctcagagatgaggaaattaattagatcgccaccgaaggaacgggagaaccgtactccgacactaccgcagatagatca

SEQ ID NO: 11365 - DNA, 482 bp, Zea mays
  Clone ID: MRT4577_110364C.1
gccgcacagcctccctctccgcatcccccatctgcattcgtcggcggctcaacgcatcgatccccttgacagccaggatgacacaagcaccattcttgccacgagagaggctgttgaaactgcgcatgcattcacagagcatgaccatcacacgctacctgacagggcgctacaatgtgaccaccttcgtggccagcccttttttttttttttgcctccagcatgtgcatgaacgggcgaggaggtgacaacatgactcatggaatagcgaaaaaggagtgatctaccacaggataactagctattatactaggcatgggagcaccatccacactatgaacgccttctttgctcgctaaataaaactgcgcacagaacaaggcgactacgatcttgcatcatatcgctgtatggatctgcggatctgaaatgccatcaactagaagatcagcaacggtactacaaaaaacctacgaagacca

SEQ ID NO: 11366 - DNA, 1236 bp, Zea mays
  unsure (1)..(1236): unsure at all n locations
  Clone ID: MRT4577_110365C.1
gggtanccctcgggtccggcccggaggtgcggcggcgaccttgtctaggattttacccgtggaacgtggcgaccacttccgacgggccactcgccgccgctcgcccgccctgctcttcaccccttctcccgggaccgggacaagcgatctcccgtccccgtagtccgcaggagagagatttttttctcggttgcaatgaagagttatccgtgggcgggggcccgccctcttgccgtcgtgcagctcctcctcttcctcgccgataatatgtccggcaagagcacgctcagtgaggtccgcaccagctccggcaccttcctcaggaagggccaggatcctattgttgagagtatagaggacaaaattgctgcatggacattccttccaaaagagaatggtgaagatatccaagtcctaagatataagcatggggagaagtatgaaccacactatgattacttcactgacaatgataacactgtccgtggtggtcatcgctacgctactgttcttttgtacttaactgatgtaccagaaggaggggaaacgaaaaaaaaaaaaaaaaaaaaaaaaaaggttttccccttggctgaggagcccgatgatgctaaagatgcaaccttgtcagaatgtgctcagaaaggcattgcagtgagaccacggaaaggtgacgccctccttttcttcaaccttaacccagacggcaccaccgactcggtgagcctccatggtggctgcccggtcataaaaggcgagaaatggtcggctacgaagtggatccgtgtggcctcgttcgataaggtccatcacccacagggcaactgcaccgacgagaacgagagctgcgcgaaatgggcggccctaggggagtgcataaagaacccagagtacatggtgggaaccacagcgttgcctggttactgccggaggagctgcaatgtgtgctagggtcaggacgtgagagtactagtatttgttagtgcataccacttgtatccatagtctgttgttggtctcctacatctcgcataaaagaaatactcctatgcccgatggaggtgcatttagaataagcctagtatttgatctattgatttattagattgcttggttctgctagctcataatttgtaccgggaccttagaagatctttgattcgttgtcgtctgtaacattttctcgatatatatggtgtgcatttctggtcatcccaaaaaaaaaaaaaaaaagcggcc

SEQ ID NO: 11367 - DNA, 399 bp, Zea mays
  Clone ID: MRT4577_110366C.1
ggcctctagcgtaatggttaaggcttccgagtagcacctttagtttctgggttcgattccccctcgggtacgaatttgggcttggttaacagaatcccctcgctgtgccccgcccgctcctgggttacgtcctgcgtgccaccctctgtctgggctgttgcagagtgggcggtgatggcatgctagtgatggggggctatggttcggggattttatcgtccgggactatgtttcggtctgttcttaatataataccgggagggcagtctttccctctccggccgagttttttttttatcatgaggcacaatgtgttcctttgttcctctggtgtaaccctgtaactatgaaaaatatgaccaatcatcttttattttcaggttgctgatttgcagcaga

SEQ ID NO: 11368 - DNA, 478 bp, Zea mays
  Clone ID: MRT4577_110367C.1
atactgaagtttatgtttttgttacctcctgacaagctattcgttctagaaccaccagacaagcacaagctaatctaagccaacacacatatcttactgtcctgcctccgaacaaatcaacttaccttccagcaagccttccgaagtaaataattcgattaacataactctcactacaatgcattgcacaatcatagttctatataatataatttgaattgacctaagaaaatttcctaactgcatcgatcaaaatcatgaggtgtacagatcaggagcaacacgcggcacaggtcatcgaactttcgtaccttggtccgtgacaagattgaagacgatagttgggtctaaagcaaataagaccatctaaaatagagttaggtaaattctgataggagctagttatgcatgtttaacgtttgaaattaggttattttatttacacagattgttttttgaaagaatgaataggcatatc

SEQ ID NO: 11369 - DNA, 1569 bp, Zea mays
  Clone ID: MRT4577_110368C.1
gcattgggtacctcgaggccggccgggaggtgcggcggcgaccttgtctaggattttacccgtggaacgtggcgaccacttccgacgggccactcgccgccgctcgcccgccctgctcttcaccccttctcccgggaccgggacaagcgatctcccgtccccgtagtccgcaggagagagatttttttctcggttgcaatgaagagttatccgtgggcgggggcccgccctcttgccgtcgtgcagctcctcctcttcctcgcccacctcgtcgaccgcggcggtgctgccggtggaggcagcaagggcagctcggtgtacccggcggctgtcgtctacccgcatcactcccgccagatctcctgcaaacccagggtgttcctgtatcagcacttcctcagcgacgacgaggctaaccacctgatctccctcgcgagagcggagctcaagaggtcagcggtcgccgataatatgtctggcaagagcacgctcagtgaggtccgcaccagctccggcaccttcctcaggaagggccaggatcctattgttgagggtatagaggacaaaattgctgcatggacattccttccaaaagagaatggtgaagatatccaagtcctaagatataagcatggggagaagtatgaaccacactatgattacttcactgacaatgttaacactgtccgtggtggtcatcgctacgctactgttcttttgtacttaactgatgtaccagaaggaggggaaacggttttccccttggctgaggagcccgatgatgctaaagatgcaaccttgtcagaatgtgctcagaaaggcattgcagtgagaccacggaaaggtgacgccctccttttcttcaaccttaacccagacggcaccaccgactcggtgagcctccatggtggttgcccggtcataaaaggcgagaaatggtcggctacgaagtggatccgtgtggcctcgttcgataaggtccatcacccacagggcaactgcaccgacgagaacgagagctgcgcgaaatgggcggccctaggggagtgcataaagaacccagagtacatggtgggaaccacagcgttgcctggttactgtcggaggagctgcaatgtgtgctagggtcaggacgtgagagtactagtatttgttagtgcataccacttgtatccatagtctgttgttggtctcctacatctcgcataaaagaaatactcctatgctataggttatgccgatggaggtgcatttagaataagcctagtatttgatctattgatttattagattgcttggttctgctagctcataatttgtaccggaaccttagaagatctttgattcgttgtcatctgtaacattttctcgatatatatatggtgtgcatttctggtcatcccacaaaaaaaaaaaaaaaaaaaaaaaaaaaaaaaaaaaaaaatgtcactgcttgcatgatgcatggcatgcagttgtattcgatgaggcgcaaataacgggggggggggggggttcgatctgaaaggcttcccttttattgctccttagagaaagagaaactttttc

SEQ ID NO: 11370 - DNA, 977 bp, Zea mays
  Clone ID: MRT4577_110369C.1
ttagtcaatcaattttccttcatccttcctttattcagacatctgtaccatacaagttgcctgtgttattcactatgtttacagataaatagaaaagattctgcagttaaactgtgcagtaaaatatttgcatcaaagaagttctacggctatgggaggaacaaaacttaatttgtggcctttaaactatattttgctttccctttgtacaaaaagaaaaggattataaacaggttatatgttatctcttcatggtagcaacagttgttagagtttctgtgaagagatataaagctgaaaatttcatcctgaagattctccgcccatcataattggttgttcaccttcaaactccgatatcacaatgagcgaatcattcatttcaagggacagcggctccgatttgttgataggattaatatgctgcttgccgtccttgatgtaaccaatcgcaacttcacggcgtaaaactgctctttcagagagctccaagaatgatattttctctccttccttcatgtacagcccaatttccttaatatagatctcatcgccttcagcgttcaggatatccttccatacttcattcagctcactactttccgcaacttgtgctgtcacacgactcattatttcctctgctccaataaatgaaagggatggtcttattttagatatttgttttcctagtcccatgtcaacgatttctgatacaagattctcaaccataacgccatgtttctggcaaatgttttcagcaagaagaagggtgtatgccaactgtttatcagcctgtgcagcatctccaacaaaccagtctctgtcagatatcacaactattgacagtggaacctctttatctgacttggcagattctcgtacgttaattattgtttccttcagagtatcatagttcaaaggacaccccacccggtgagtaactttaacattttaagcccggcgacaccgagggtacc

SEQ ID NO: 11371 - DNA, 2126 bp, Zea mays
  Clone ID: MRT4577_11036C.1
aaacatactcaatgtatccatgaatctgggactggatatcagtgctgaggctgagaaggagaggggcaggatcaggagcttcgaggaacaggagttcgacgcgttccagcgggtgaagagggagctgttccgcgacgtgccctatctgctcataatcgacaatctcgagagcgagagggattggtgggaaggcaaggacctccatgacttcattccaaggaacaccggagcaacacatgtcatcgtgacaacacgtcttccacgcgtgatgaacctcgagccgatgcagctgccgcagctctcgtacatcgatgcgatggccttgatacaggggaagagaaagaaggactatctgcctgaagaagccgaagtcctcaggaagttcgatgagcggttaggcaggctgagctttggcctgtgggttgtcggttcgctgctttctgagctcatgatcgctccttcaactctgtttgaggccgttgatcgaatatcgctgaacgagaatctgttccccattggcgccaacgacgatggattctgccgcaacaattctttcttggtgaaggtcttggtcttctgctttgctctgatggaccgagcaaaaggaggaagccttacgtcaaggatggtcatcgctggttcttggttagctccaactcctgtatcgtccacgctactagctgcaaccgcgagcaagctaccgatgaaaggcagtggtatgcacctgtttggtgaatctctcaggactgcatttctatgtggcacacattgtttcctagctccaaacgggcggaaggctgaggtggagtcggcgctcttgcttgtcaaccttgggttggcaaggaaggcaaacaggcatcctggttgctggatccagttccatcctatcacgcagctcttcggcaagatcaggggaggtttggtgcctacgactgcagcagtgaatggagtgatgaggactggaaacccctcggtatactctgaccacttgtgggctagcgcgttcctcgtgtttggtttcaagtccgagccgcccgccgtccagcttaaggcggtcgacatggtcctcttcatcaagaagacggcgctgcccctcgcggtcgactccttcatgtcgttctcgcggtgcggctcggctctggagctgctcaaggtgtgcacgaacgtcctggaggaggtggagaagtcgtacgcgtcgcggatgcaggactggagccgcgggtcgctgtgctggaggaagaagctgcagccgaaccaccgcgtcgacgagctcgtctggcaggaggtgacgctgctcaaggcgacgctgctggagacgagggcgaagctgctgctccgcggcgggctgttcgacacgggcgaggagctgtgcaggacctgcatcagcatccggactgtcatgctcggccacggccacgcccagacgctagctgctcaggagacgctggcaaagctggtcaggtataggagcaaaatatgagatgagatgatggtgtccaagaccctttgcaagcttcttcccccctgctgtttcagaagttttcacgcccccatttttgttcctgaatctgttatgccaccggctacagttttgttagcgatcatcagtataatagccaaggtccatgatgccatgtgtaacttattttagagcaggtgccatatgtaagtggaggtgttatgtacagtgcagtccatctgctatttggtagaactaccattgagcttcccatgctgaactttcagaattgaagatgttcttccttttgataacttgagtttcagatttggagagcaaagagctgcatcacgccttagagttgctgtagggtgttatgttttctccaaaaaaatgcatgcatctatggtcaaatctgatgccaaacaacaagagcatgtagtctttctgaaatgttttctgtcaccctccatgatcaggtgggcggtacagctatgatatgaacagtcgttttgttaattagtttattaccacttgcggtagtgatttggtgtctgcaaacctcaatgtgttgtttgtgtttcctaaatgtgaaatttcatgccgtggggatggtaggatgcttcacagtgtttactgtgttctgtttaaaaaaaaaaaaaaaaaa

SEQ ID NO: 11372 - DNA, 246 bp, Zea mays
  unsure (1)..(246): unsure at all n locations
  Clone ID: MRT4577_110370C.1
tttccttaatgaccgcactgtcgcagccacccgcccctcataaactatatttcacgcacaaaaaaatcgactaccataacaaaaacatcaaagacatgggncgccagaatgctaacccaccgatcagagataatgctgactttggctcaacgaaccaaaaccttcaaaaaaatctcaaaataaagatataaagctaaatgaatcattaaaccctctaaatcatctattatagctccacaaccaaaa

SEQ ID NO: 11373 - DNA, 252 bp, Zea mays
  Clone ID: MRT4577_110371C.1
gcattcagaaatagctaatcgagcatcgcaggcttagctcctgtactctgctgttctctgcgacgtcaaggaacttctctacggcggctgccatataaaggaggaagaagagaacagcatcgctagctagccggccagactccgtcgacaccggcgtcgtcaactagctagctaactgtcgatctccaattactgcgcccgccccacgcccgggcgtggtgaatcgtcagcaatataatggcatgaggcctc

SEQ ID NO: 11374 - DNA, 307 bp, Zea mays
  Clone ID: MRT4577_110372C.1
ctccaagtcccagcgaacccgcgtgcaacctgtcccgactctagccgcctcttcagctcgccatggatcccaactgctcctgcgccgccggtgactcctgcacctgcgccggctcctgcaaatgcaaagagtgcaaatgcacctcctgcaagaaaagctgctgctcctgctgccctgtgggctgtgccaagtgtgcccagggctgcatctgcaaaggggcgtcggacaagtgcagctgctgcgcctgatgtcgggacagccctgctcccagatgcaaagagagtgacccgtacaatcctggattttt

SEQ ID NO: 11375 - DNA, 495 bp, Zea mays
  Clone ID: MRT4577_110373C.1
agctctgcgcagagcagcggacgccggccacacctcgctcacgccaccatcataacgccactcccacgctccactccgactcccgtcgcgttccatttcaaaaacgccacctttcgccccctgcatttccaccaaggcctacatgtctccgaccaccgccgcgtcccccgcgccggcgccggcaaccgacgcgcccccgaagccttcgccaggcgcgaagcgcagcctgatgggatccctcatcgacgccaccgcgctgctccgggcggcctccttcaaggaggactcgtacgtggccgcggcgctcccggcctcggacctccgcgcgctcgccgacctcagggcgctcctcgccacccacccggaccaaatctccatctggggcgtgccgctcaacccgcccagcgacgcccccgccgacgagcgcacggacgtggtgctcctcacgttcctccgcgccacggacttctgcgcccgcgactcgcacgccatgct

SEQ ID NO: 11376 - DNA, 458 bp, Zea mays
  Clone ID: MRT4577_110374C.1
gcgctgcatggtctgtacaccaagaagctgcactctatttaaaaactacaagctgatggcaacacagcatgtggccaaggcaaaagacgaagctatttgggatacatgcaaatattcctgcctatggatatgtgtaatttggactagctaaccgttatgttactccataaatgcaatgccatggagtaatgcacactacactaaccatgtaacaactgcagattggttaagctaccaccataatgatgatatggtcttgaatgccagtgtcctctattacagtgaccttgaaaagaggacccttgtgtgctaactgccgaggacatgctctgttttcgtgaccatcttacgcattcggggccaacctgttacatgtggaaaagaactctctgcatgtgttcctgacagcaacaacagtgacgatcaagaacttgctgttggtgggatcctcatctacc

SEQ ID NO: 11377 - DNA, 160 bp, Zea mays
  unsure (1)..(160): unsure at all n locations
  Clone ID: MRT4577_110375C.1
tagcgagtagctcgcatcgctcgagctcatctctctanccttcnntctccaccacgaagctcactaggggttagcgnnncgcgcgagatcgtgcagcgcatcacgtancggaagcgtcacagctacgcttacgagtcaaactagactcgagtcgtcaaga

SEQ ID NO: 11378 - DNA, 823 bp, Zea mays
  Clone ID: MRT4577_110376C.1
ggccggccgggctccccactctcaattccttcctcgttcggttgttccttcccacttcctctctctcgcgcgcctgtactacttttgaagccgcaaggagaagctcgattccaccttgcagatccaatggcgcaacctgaaattcctgcatttggggattgggaaaccactggaaacacaccttacacacaaaagttcgaggatgcacggaagaacaagaaaacaggaattcttgcacaaccaaatgatccaaggaggaatctggaacctcctcgcaagtcgcctttgcacccaacggtctacaaaactaatcctcaagaccaaggtccaaggaacccaccacatcgaccaagacctgaacttgacaaccaacgacactctgaccggcctactcaccgtgagtctgcaccacgaagacattcaaatcttcagagagaacaagggagtaatgctgggacaccaagaagcccctacagaacagctgctgggtctgcttcaccaatgcagccaaacaaccaatcaaagccaaagcacaggtcaactggaatgcagactccagagaggagggcatcttcagaggggcttggccagcatacacctggaaggagcaggatgaagccgggtggctatgagcctgaagaagtggctgtaccaccctttggcgaatgggatgatgcaaatgcagcatcaggtgaaaagtacactggtatcttcaacagggtgagggatgataggttgtcacctacctcttctgctaggcaaccgtctactactcgtagtgaagagaataaggtgcaacagaaatgttcttgctgcatacttg

SEQ ID NO: 11379 - DNA, 1898 bp, Zea mays
  Clone ID: MRT4577_110377C.1
ctcgaggccggccgggccggggtcttctttctcggcttctcgcttccttctccttttcttcctctcctccccactctcaattccttcctcgttcggttgttccttcccacttcctctctctcgcgcgcctgtactacttttgaagccgcaaggtcagaagagaggatccacctctcagttcgattttcggtggctgaagtccttctacctcggggggtttgagcgttttccttgataaatttgtgtttcttcgagagtttattttttgtgttttctcttgagagattcgtgcgaaggacgtcgtcttcggtccattttcttgggtagtcgaattgctcttatacagcgtcaaagcatccaactttgacttctccgtggtggcttcttctactactctgtgttgtcgaggagacaatttaatctttatttaattgggttggatgcttgttcaagttgcagttgaaagggtagcagaagacaccattaatcctggtgattttggtgcttatctgctgaataattgagggtcaaagtaaccatttgcagttcttacttctcgttttcttgggaagatttggtgaatttcgttgcaggacagagcttccttcaatcctccctccttgtttttatgcatttgggtggttggggatatcttcactttatcctcgctgcaaaaagactataaacttgggagttcctatgatatccatttcttgtgaggatttgatcttgattctgttggttcttggtgaggtggttgagatgaaaggagtactatgctaactcatcgaggaaagaacagcacagtcagtactgttctaaggaaaagctgacatttctgtgcttttctttggaggactgcggtctgttcctgcaagaatttgtgtaaaaagggtggtaattctagatttctacaatttttgcacaggagaagctcgattccaccttgcagatccaatggcgcaacctgaaattcctgcatttggggattgggaaaccactggaaacacaccttacacacaaaagttcgaggatgcacggaagaacaagaaaacaggaattcttgcacaaccaaatgatccaaggagggatctggaacctcctcgcaagtcgcctttgcacccaacggtctacaaaactaatcctcaagaccaaggtccaaggaacccaccacatcgaccaagacctgaacttgacaaccaacgacactctgaccggcctactcaccgtgagtctgcaccacgaagacattcaaatcttcagagagaacaagggagtaatgctgggacaccaagaagcccctacagaacagctgctgggtctgcttcaccaatgcagccaaacaaccaatcaaagccaaagcacaggtcaactggaatgcagactccagagaggagggcatcttcagaggggcttggccagcatacacctggaaggagcaggatgaagccgggtggctatgagcctgaagaagtggctgtaccaccctttggcgaatgggatgatgcaaatgcagcatcaggtgaaaagtacactggtatcttcaacagggtgagggatgataggttgtcacctacctcttctgctaggcaaccgtctactactcgtagtgaagagaataaggtgcaacagaaatgttcttgctgcatactttgagaaaataaggacaggatctcgaagagttctagacaacttcctatgctgctcctgtgatgagatccctatcttgtaactcttcctgtgctagttgtcatgtttgttattgttggtgtgattatgtatctgtagatggattgtttcatttgagctcttcaattattacaaggaacatatatatgatacctagaattgtaaagtatggagtgagcaatttctttgcaacaataaaaggtttatcg

SEQ ID NO: 11380 - DNA, 359 bp, Zea mays
  Clone ID: MRT4577_110378C.1
actcactatgggcgattgggtttctcaagggcggccggaagtaccacgtctctcccaccaaagaccaaaccccacacatcgagtctgcgttctccccctttacaccgggaagagctcgtcgatggctcgttgcagctctccgactacaggcagagagcaggtatgctccacgagagggtgaaggccgaggcgatgcagatcctgtccctattccacgtgctcacccgcctcgacgtcttcgacctcgactataccctctggcccttctactgcgagtgccgtgccaatatggattcgacgaggcttttcatgctagccatggtgatcatgtccgatcctcacgagaacgggaccgacat

SEQ ID NO: 11381 - DNA, 284 bp, Zea mays
  unsure (1)..(284): unsure at all n locations
  Clone ID: MRT4577_110379C.1
actcgaagagtaccagcttactatatacatgaccccaactagcgctctgcgagtagtcatgcctcagatctgcttcgtgattaccgttcggagcggctcagaagtccggatcccatacgatggggacnncaacgangtgcccaagaccgcgganaacttccgcgcgctgtgcacgggcgagaagggcgtgggcaagtccgggaagccgctccactacaagggctccacctgataccgcgtcatccccgagttcatgcgccanggcggcgacttcacccgcggca

SEQ ID NO: 11382 - DNA, 286 bp, Zea mays
  Clone ID: MRT4577_11037C.1
cgcgagggaggaatgtggtgctcgatcagtagggcgaccccaaagttgtgtgtggtggagtcactattgaccacgctattgagctctatgaaccaacggaaaatgcccgtgcagcatttatttcagaggtagctctgccgaccaagaaaaacagctggagatgttactacaactggacgcatccttgcttttgaaaacatcaaactaagcctgctgagggttacaactggggcacatcctccttcactaaaaaaagtaatagacaaaactttgccaccgccccctt

SEQ ID NO: 11383 - DNA, 288 bp, Zea mays
  Clone ID: MRT4577_110380C.1
atttcgtgttcaccgacccgttgagtatactgggggggttttttaagtgggagtgctgggactcaccactctgtcatgacgccatggggggcttactgtttgtggtttactactactagtgggaaacactaccagttagttaagctggagcaactcgtcatatagccagccgtacaggagtgccctagtattgtgtctcaaggcaaggtattgactttcaatactaaaacactgacgagtaggggagataaaaatggtactgcaaggtaatctgcttcaaagagacgc

SEQ ID NO: 11384 - DNA, 298 bp, Zea mays
  Clone ID: MRT4577_110381C.1
caagaaccgaccggctcatacccttctgccttcgatgcgctcatggccggaactgaccgggggcagcactacaagccgagacttaaaacaaacaacagagctcaaaccaagccatcgctctcaatacataaacataagacaacatcatactattcccgtcctatcgattaggcattataaatcggagtaatgaacaatactcacacccgggagccttcatataaaatagtgacatatcaaattctaatagttagaaacgactatcacatggtaaagcctgatcaaaggaaattatgat

SEQ ID NO: 11385 - DNA, 121 bp, Zea mays
  Clone ID: MRT4577_110382C.1
gcaggatcctcgtgcgctgattgcacgtgggcgatagcaggtggttcacgtgcggttgttgagtagggtcatatcttggatgtcaatgagcagagtaactgagggatgtcagcatgaacaa

SEQ ID NO: 11386 - DNA, 411 bp, Zea mays
  Clone ID: MRT4577_110383C.1
ggccgggtattttttttagagaagaggcgatgagcgcactcatgggtgtcgagtcctggagggtgccaaccccagtgcaagtaactgggcgcagtcgtgctggagccactgacacaattcgagctgcaggagcaggatcgacctcggatctggtacactgctctatcgcactgtacatgtcggagcccgtcagcgtcgacgacctcagcaggctggtggcggccgaggaggctcgcatgctgcggtcagcactgtagacccgagggctcttcctggttgcgaagcacgagatagaagtatctctacatgcacgatgtgatgggcgtgtctctcgattttttctaccagacgctctgacgggagcaggaatacagcaacctgataggcgagaaggcgggtccagtatcgagc

SEQ ID NO: 11387 - DNA, 383 bp, Zea mays
  Clone ID: MRT4577_110384C.1
ctcactctacccaattttcgacaatctttttttacaggacttcttacaataataacattgggacctacggggcatactccattctgcatcgagcattcaagaactatttattctattaattgcactgtattataattgggcttgtaccacttgagtacaattacttcatatgcgcatgatgatacatcacaaattacatctaccatgactgttattatatttacatacttcatattcttccttactacctagcttttcatctatgacctgtgcctgtctgtctacatcatccaagattacctactcgtgtatgacaccatcatacctcttctataatgtatatctaattcatttgattgtccgtatttttactacgtaatgac

SEQ ID NO: 11388 - DNA, 450 bp, Zea mays
  unsure (1)..(450): unsure at all n locations
  Clone ID: MRT4577_110385C.1
gggcacgagagtcaagctgccccccaagtcccaacctccggagaaaacagaggaatctccttcagcccctgatgcacccacctgcccaaagcagtgccgccggacaggcaccttgcagagcannttctgtgccagcagccttgtggtgactgcgacagtgaagtccatggttcgggagccaggggagggccttgccgtgactgtcagtcttattggtgcttataaaactggaggactggacctgccttctccacccactggtgcctccctgaagttttacgtgccttgcaagcagtgcccccccatgaagaaaggagtcagttatctgctgatggnccaggtagaagagaacagaggccccgtccttcctccagagagctttgtggtttccaccggcccaaccaggaccagatcctcaccaacctaagcaagaggaagtgcccctctcaa

SEQ ID NO: 11389 - DNA, 2037 bp, Zea mays
  Clone ID: MRT4577_110386C.1
atggcggctgttgtagcaatttggaggaaagactttcggaattttcgggctcttaattcagcctttgttatcctccttcccaaggttgagaacccgtctaatgccaaggagtttaggcctataagcatcattcatagttttgctaaactgattacgaagatccttgcaaaccggttgggaggtcaacttgatagtatggtgtccaagaaccaaagtactttcatcaagggaagatttattcaagacaacttcatgttggtccaacaaacaacccgcttccttcattctcagaatcagccaacaattatgctgaaactggacatatcaaaggtgtttgattcagtatcttggcccttcttgttggaagtcttgcagagtctggggtttggtgctggatggtgtgacattgtgagtgggctgcttgccacatcctcctctcagattctccttaatggtattccaggggacttcattccgcacagaagagggctgcggcagggagaccccctctcccctatgttattcattttggtgatggacgttctaaacctcatggtggggcgagctgttgaagctaggctgttgcaacccctgtcaacttgttcctttctgcatagagtctctctttacgcggatgatgttgcacttttcatcaaacctacagtggatgaccttgttctggtgggaaatatactcaggctgtttggtgaagcttccggtctccaaacaaatattcagaaaagtagtattatccctatcaggtgctcacagtcggaggtagccactgttcaagatcatctgccttgcaagctggaggaattccttttcaaatatttggggctgccactgtccttaaaaaagctcaataaagcgcaattacagcccttcattgaccgcttggcgaactctctcccgggttggaaggctgatcttatgactaaggcaggaagagcggtccaggttcagtttgtgttgacagctactatcgtctatcatgctatggctctagatctctctccttgggccctcaaggccatggataaaatcatgagaaattttctttggcgtggtagaagcgagactaatggaggtcattgtctgattgcttggcctaaagtcactagacctaaagagctgggtggtctcggcatctctaatttacagtctttgaattgggctctccgtgttagatggctttggcttcaaaagactagtccggacaaggcttgggcttcttttcaactccagttttcagatcagatcccatggcagcgactagcgagttcaaatgcttctgcttctgcatctactgaggccagtgacagcgaagtgttttttgagaaatggcgtatcggggtatcgacgtatcgcgtatccgtatccatatccccgtgtcagggtaacatagatggcaggaacaccttgttttggggtgacagatggttgttagggcagcgcctggttgatctggccccccacctatatgctatggttcctaagagagtagctaacaagagaacggtcgttgagggcttaactgatatggcttgggttcacgatcttcgtggtacggtcactgttgtggtcatcgcagagttcattaacttagcggaagctgtttcagaggtgttgttcttgcccgatacccctgataagcatatctggagattctcaagctcgggccagtattcagcaaagtctgcttatgggatgatcttcatgggctcaatcactttcgagcattgcgatcttatttggaaaagttgggcgcctccaaagtgtcgattcttcttatggctggaggaggagacgatcaaccacctgctgctgtcttgcgttttcgctcgacaattctggtttatccttctccaaaggattgggcttgctggtgtggcaccgcaaccgggtgaagaggacttcatggcatggtggaaaggcatctccgctcccttggggggatcttctcaggctggccttaattcctgggggcgtggtgtctttggaagcatcggaatgattgtgttttcaatgggatga

SEQ ID NO: 11390 - DNA, 1023 bp, Zea mays
  Clone ID: MRT4577_110387C.1
ggccgctttttttttttttttttactggtaaggcgtaagcaaatacaatatgacactggtccagttccaggaatgaatggaatatgacattggtccgagatttgcaatacaatacaatatcatcatccaggaagctcatagctgctgctagtaggatactccggtcggagtagctaggtggagacaaggcaacggaagagcagcacagccgccgctgcggtaatggtgcacatgagctggccggggcgcggcggcgtggcgttgcacgaggggcgatccggagcgctgaagcagccatgggtctggtcgatgcccttgccgccggcctccaggagaaaggtggagttggggctgccgctgctgaagaggaggcaccagaagaagggcccgcggcggtcgaagccggcgcccacctgggtgtgctccttgccgcggatcaccgagagcgcggtggctgatgccagcgcgtcctccgggccgtcgcggtcccggtggcagccgaagaggcggccggagatgacgtccaccgtggggagctccacgccgcagttggcggcgtagacctccgtgatgtgggcctcgggggtctggcacgccatcgtgttgccgctgctgcaggcggcgccgcccgtggtggccgccatgcactcggagatgtactgcagcgccatgcacccgaggcctctgctgttgcgcagcgcaggcagcctgctcgcctccctcttgccgttgatgagggccacgaggtcgttggctgggttcccatggatctttgcagaggatacgcccgccggcagcgtcctggtgcagagcagcagaagaatcacaagcttggggatgcagattcgccgcattctgttgctgcggtgacccggtggccgtgccgtacgaattgaattgaagagacggggggaaggaaaaagggggcggtggctcctgttgtgctgtgctgtgtttcgaggggaggggagggagggagtacggtatggcagccgaaaggaagtgggacaatgtcaacccgaa

SEQ ID NO: 11391 - DNA, 3006 bp, Zea mays
  Clone ID: MRT4577_110388C.1
aaaaggagacggtaaattctactccacgtgctcaacccaaaaagggtgcagaacccgtagcggtgtccagcacgagtgggaaaggctctgccattagaagggtgacacttgtgattcttgctgccgtgctttttggagttagcattgccttgaaggacggggccgagaaggcatcggagtattttgctgggtcaccttccattgatcttgaggccctcgggatccaacaccatcttctggatcaccttgtcaactcatgttcggaagaagaagtttgggataccatcaagcagatgccctctgacaaagcgccggggcccgatggcttcacgggaagattttataaggtgtgttggccaatcattaagaaggacatcatggcggctgttgtagcaatttggaggaaagactttcggaattttcgggctcttaattcagcctttgttatcctccttcccaaggttgagaacccgtctaatgccaaggagtttaggcctataagcatcattcatagttttgctaaactgattacgaagatccttgcaaaccggttgggaggtcaacttgatagtatggtgtccaagaaccaaagtactttcatcaagggaagatttattcaagacaacttcatgttggtccaacaaacaacccgcttccttcattctcagaatcagccaacaattatgctgaaactggacatatcaaaggtgtttgattcagtatcttggcccttcttgttggaagtcttgcagagtctggggtttggtgctggatggtgtgacattgtgagtgggctgcttgccacatcctcctctcagattctccttaatggtattccaggggacttcattccgcacagaagagggctgcggcagggagaccccctctcccctatgttattcattttggtgatggacgttctaaacctcatggtggggcgagctgttgaagctaggctgttgcaacccctgtcaacttgttcctttctgcatagagtctctctttacgcggatgatgttgcacttttcatcaaacctacagtggatgaccttgttctggtgggaaatatactcaggctgtttggtgaagcttccggtctccaaacaaatattcagaaaagtagtattatccctatcaggtgctcacagtcggaggtagccactgttcaagatcatctgccttgcaagctggaggaattccttttcaaatatttggggctgccactgtccttaaaaaagctcaataaagcgcaattacagcccttcattgaccgcttggcgaactctctcccgggttggaaggctgatcttatgactaaggcaggaagagcggtccaggttcagtttgtgttgacagctactatcgtctatcatgctatggctctagatctctctccttgggccctcaaggccatggataaaatcatgagaaattttctttggcgtggtagaagcgagactaatggaggtcattgtctgattgcttggcctaaagtcactagacctaaagagctgggtggtctcggcatctctaatttacagtctttgaattgggctctccgtgttagatggctttggcttcaaaagactagtccggacaaggcttgggcttcttttcaactccagttttcagatcaggtcaagtctctcttcgatcttgccttagtctctgaagttggagatggcaggctggcagcaacaccttgttttggtgtgacagatggctgttagggcagcgcctggttgatctggccccccacctatgtgctatggttcctaagagagtagctaacaagagaacggtcgctgagggtttaactgatatggcttgggttcacgatcttcgtggtacggtcactgttgtggtcatcgctgagttcattaacttagcggaagctgtttcagaggtgttgttattgcctgatacccctgattagcatatctggagattctcaagctcgggccagtattcagcaaagtctgcttatgagatgatcttcatgggctcaatcactttcgagcattgcgatcttatttggaaaagttgggcgcctccgaagtgtcgtttcttcttatggctggttgcccacaaccgttgatggacggccgaccggttggctaggcgcaacctcgaccatcccgacgcttgtgtcctttgtgaccaggaggaggagacgatcaaccacctgctgctgtcttgcgttttcgctcgacaattctggtttatccttctccaaaggattgggcttgctggtgtggcaccgcaaccgggtgaagaggacttcatggcatggtggaaaggcatctccgctcccttggggggatcttctcaggctggccttaattcctgggggcgtggtgtctgtatacattatataaattagaacaaacaactgaacctgacatgtgacatcccataatggcataatctccaattcttcatctctccatctgtccatcaatcttgcagccctacctcttgagtcttgaagacttgattcttcagcaggtccagattcatcatcattatcctcgtccatttcatctgctgcatcaccttcaggatgttggtctatgtccctttgtcgctttcgtgtagaagcagcacgaggcaagttacgaccccttagaccctccgttgcaccaacaacttcatccacattggcccaagtaatatcagcaccatcacctgcatgaacctcatcgttttcaacaacccattcactctcccattgaaagtcatttagcagtagtggattgctcctctttcctttagaaccgagctctctgattttttgaaatctgttttgcatcttacggttgtagctgacatacaccaatttatccaatcttttgtgctccaacttgttcctctttttggtgtggatattagcaaatacactccaattacgctcacaaccagatgctgaacaacaaagactaataattctttttgctagacattgaagctcatatgctaggccaccatacgaaccccaccaaagaa

SEQ ID NO: 11392 - DNA, 2304 bp, Zea mays
  Clone ID: MRT4577_110389C.1
ttaaagcaaatcatcatccaaatggaagcctgcatcagcaacttcagcaggtccagattcatcatcattatcctcgtccatttcatctgctgcatcaccttcaggatgttggtctatgtccctttgtcgctttctagaccgagaataagcaataatttggctagaaactgcagcacgtgtagaagcagcacgaggcaagttacgaccccttagaccctccgttgcaccaacaacttcatccacattggcccaagtaatatcagcaccatcacctgcatgaacctcatcgttttcaacaacccattcactctcccattgaaagtcatttagcagtagtggattgctcctctttcctttagaaccgagctctctgattttttgaaatctgttttgcatcttacggttgtagctgacatacaccaatttatccaatcttttgtgctccaacttgttcctctttttggtgtggatattagcaaatacactccaattacgctcacaaccagatgctgaacaacaaagactaataattctttttgctagacattgaagctcatatgctaggccaccatacgaaccccaccaaagaataggattttttttgtctctgtcccttattgctccttgctttgagaagcactctccttccgacctctcatagtcgtcagcttgcttactaatcaccgtttgttcattatcatcggcaaccatcttccacatacaatcattgaacatggatcttagccttgcagcttgtcttctgtctttgtcccttatggcaaaaaacttccctggattcaagaacagtgcagccccatacaatttttgctcaatttgggtttcccatctcttctcataacaatttagaacctctgcaagtaacctttggttgtctttcaaagcttccttgattgtgttttttgccacatccatggctgcaagaatttcaggagctgctggtgtctcatctccatcagctatcctcaaggcaacaagtagtggttgtgttgctttaaggcaattttcaactttattccaaaatggggccgacaggacaatattttctgcttgttgtccttctgctgccttgaaattggccccattgtctgtgacagtctggaccacatactccttcccaatcttgttgatttgcttctccaataaatctgccagcatttgagcattagctacctcacttgaagcatcaacagactcaagaaagaaggtccctgctggactgttggcaagaaaatttattatgtggcgttgcctcatatcagtccacccatcagacataagactgcacccatattctttccaagcctcctcatgtttctttctcaattctgctgtcctgtccacagctctatcaagcaaaggaaccctagtgtcatggtatgatggtgagcgatatccagggccatactgcccaattgactcaagcataatctcccaacttctagatttaacaacatttaatggaatattattctcatataggaaatcagcaacatggtcatcaactatttgtttggcctccttatcttttttggtgcagtgctcaagtgtagattgagatgttttagatctatgcctctcagcaaccacttcttctggtgtcttgcaaagcatagaactcactgacttagagtgcttctgagtttgtggttttggtggtgctgaaacaacaaatgcactaatggctgactgatttatcttcttcttcgcttgcttaaccttagtcccagaacttggttcagctgcaacttgttcttttttaccttcactttcatcttctccaccatcttcatccacattcacaaccaaagaccttgcattcttccttaggtaagcaagcatctcttttgaaaccaattcaggcacactaccacacttcattgtatcaccaaaacctccagcgagatgttgcttgaacctttttatcccagaagggatgatcttcctacagaaaatgcactgcacaaagtcctttgtagaatctggccaccaaccatatttccatcctgggtcttgtgatttggctttcctcttcacgtcaacagcttgggatgcaagctctggtggaagtgctgctatagccttttcaacaaaagcagcagagtctaaagtagcagaagctgctgaaccaggagcaccacctgatgcggctgatgattctacattattcataataacttccacttgtgcacggccagcaacaaattctgtacagggcagcaggccagcaacacagcattggttgaattgggggagcaggagggacaacagcaagtcagcaaccat

SEQ ID NO: 11393 - DNA, 338 bp, Zea mays
  Clone ID: MRT4577_11038C.1
cacggtctgcttcgacatcgacgcggggggttttttgaacgtgtttgctgaggacatgacaacgggtgtgttgaacaagattcacaattaccaacgactagtggccttctgttcaaggaggagatcgcgaagatggtgcatgtcgcggagaagttcatgttgtaggacgaggagcacaagaagaaggtggagtccaagagctcgttggagaactactcctacaacatgcgcatcacgatcaatgacgagatgatcgagttcaagctggctgtcgactacaagaagaagatcgaggactccatcgtcgcggccttcagctggctggtctccaactagtt

SEQ ID NO: 11394 - DNA, 299 bp, Zea mays
  Clone ID: MRT4577_110390C.1
ggcgagcctatcataacataccgactaagcttacgcaagcatgcgccggccatttgacgggggggtcttcacagaggtgagggattacacctacgttgataacttaaaaacaacagtgcaagaagaggagggaactccacaggacacggtgaaataaaagaggaggcataattccgagtcgaatgcgatgaattagctcaagcatcttaaggcgaaggacaaatttaattccatgcaaaacgtagcgggtgcaaaccataaacctttccaatccagtcctaggtgaaatataaaataat

SEQ ID NO: 11395 - DNA, 278 bp, Zea mays
  Clone ID: MRT4577_110391C.1
cccgctcgctcgctcgctcgctttatatgccagccacccagccccgcccgatcgtcatctccatatccccgtatccgtccacgcccgcccgcccgccttgccaccagccagcacctccctcaaaccacggcttcgatgtcgaggtcgtacccccgaggcggcgctgcagggcgagcatggctcttctaaaagcaccgcactgtctcgctcttgcaacttaccgaggtatacaattacagacgtctactccatccgagatcacccatttcgtcgacgcg

SEQ ID NO: 11396 - DNA, 191 bp, Zea mays
  Clone ID: MRT4577_110392C.1
attcggctcgagcgaacttcttcatctttctgccacggtccaaccatccaccagctcatgtagatggctatgcaaagcctgttctccggaaaaagttgaactgcacgaggacaggccccgctgagagctatccggctccaacgagatacaaacctccacataatgaactaacttactgaccacatacaggt

SEQ ID NO: 11397 - DNA, 450 bp, Zea mays
  unsure (1)..(450): unsure at all n locations
  Clone ID: MRT4577_110393C.1
tcgagcgcacgcgcagacaagcagcggaagctgtcggcggcctgctcctgcccgccgcgcgccctgccccaggcgcgaggagcgggggggtgacgtcccccaaatggaagcagcacaggatgcccacgacgcctcacgggaagttccccatcatcgggcacaacaacctctatcggctcccacgcgcacgtcctccttgcgcgacctccacggcaagtacggccacaatgggctgatgctggggcaggtcggcgcccgtgcccacaatcggggggcccacgccgcaagccgccgaggccgtgctccggaagcacgaacacgtgctggcgttcccgcccgcggaacccccgtcggcgacatcatgccgctacaacttcgacgggacgggggcctttggcgccggtacggcgaggtactgggcgcacgggngcggcaaggggggtcaaacac

SEQ ID NO: 11398 - DNA, 444 bp, Zea mays
  Clone ID: MRT4577_110394C.1
cataaccaggcaactactggcatggtttcaaatagtttgggcaggaaagacatttacttttcttaattcggcgttttcattcaagttgcatgaagaaaaaaaaagacctaactatggtacaaggagcaacaaaacaagcatctaaaactggctaccggtatgggggctacctgcttactatggctttccaaggatccgcgtgactgcccattattttacaacctggaccatacccagccttgagagcacccacatggtgctgagacgttgctaacaaggataccaacaccgccgaaacccgagacgagttccaggccattcctcttttgataataataaaaatttacagcggcttgggatctaattgatctgggtacattgaaggttcatgatactctggaaacacgccaaccgtgccgttattagccgactcaaatggtacac

SEQ ID NO: 11399 - DNA, 302 bp, Zea mays
  Clone ID: MRT4577_110395C.1
cttctttatgtttttttttttactgataacataggtcagtgccaatttaaaagcgtaatgttaatatgttatcatgcattctacatccaactacttgatgattcgtcaggaacccatactacagaacccagcacatcttctacatcttcgtgatcggtcactgatgaccagaaaatactaagcttaagtcactttcccacatgtgctgctggcaagctggatgttcttgggcatgatggagacgcgcttgacgtgtatggcgcagaggttggtgtccttgaatagtccgtcaaggtatgcct

SEQ ID NO: 11400 - DNA, 2787 bp, Zea mays
  unsure (1)..(2787): unsure at all n locations
  Clone ID: MRT4577_110396C.1
acactgacgcgtccaagccagagagatatctgtcatcatcggagttcagaaaaaagtttgggatgacaaaggaggcatttgggaagctaccaaggtggaagcagaacaggctcaagattgcccttcagctattctgaaaacttggcataggcactcgaaatctctcgcagtcaattcagaagtggtaaagagtaattgtaagtgtagcctagcagggtcaagggaccctcgttgggtctgggaggagcaagtccagtgagttttttgctgctcatgttgctgatttgtgtgtgtcactgagaaagtgcatgtaaaagtggctcagctcttcttaagcgacaacggatttaatttcaaggatccagcaaaagctgcttctgtaaagcaagagcctcaacctcagattgattgcactggcaacttacaggtttggcgcgtaaatggcagtgataagactttcctttcgttttctgagcaatgcaagttttatagtggagactgctatatctttcaatacacctaccctggatatattggagatgaatgtcttattggtaacaggaatgggaagaagagtgtccaggaggaaagaagtgcagccatttcactagctgacaagatgattgagtctttaaaatttcaggctgttctggttcgcatttatgaaggaaaggaacccactgaatttttcccaatatttcaaaacttggttatatacaagggagggacaagtactgggtataagaaatttgtctcagaaaatggcattgaagatgatacttattcagaaaatggggttgcactttttcgagttcagggctcagggccagagaatatgcaagctattcaagttgacacggcagcaccgtcgctgaactcttcttattgttacatattgcatgacggagatacagtatttacatggatcggtaatctaagctcatcaatggaccaagagcttgctgagaggcagctagatgtgatcaagccaaatttgcagtccagaatgctcaaagaaggatctgaatatgatcagttttggaagttgcttggagtcaagtctgagtatggcagccagaagattgtgagggaccaagaaagtgaccctcatttatttgcttgtacatttacaaagggggtgcttaaggtcagagaaatattcaacttcactcaagatgatttgatgacggaggatatatttattttggattgtcactcatgtgtcttcgtatgggttggacaacatgtggacacaaaaatacgagcacaagctttgaacattggagagaaatttctagaccttgacattctaatggagaatgtatcacgagaaacaccactttatgtcatcaatgaaggaagtgaaccccaatatttcactaggttcttcagttgggattcagcaaaatcaataatgcatggtaactcatttgaaaggaggttatctttagtgaaggatggagtaaaaccaagagcagataaaccaaaaagaaggtcaacaacatcaacacacactggaaggtcgagtgtacctgataaatcccaacgttccagaagcatgtcattcagtcctgatcgtataagagtcagaggaaggtcgcctgctttcaatgcattggctgctaactttgagaacccaaacgctcgaaacctatcaactcctccacctgttgttaggaaacaagttccgaagcctgtatcttctgattcttcaaagccacctccaaggacagcttcaatcgctgcgatttctgcttcttttgagcggcctaaagcaactctaataccaaagtcaattaaagcgagccctgatgcaagcaagccccaaattgaagcgaacaagcctacactagagacgaatgccaaggaaatcaaccctacaaaggatagtcaaattgcaactcctacagtagaggaagatgtaaaagagagtcaggcagagtgtcaggcaggacttcctatatacccatatgacagcttgaggacatcttccaccaatatccccacagacattgatgttaccaagcgagagatatatctgtcttcatcggagttcagagaaaagtttgggatgacaaaggaggcatttgggaagctaccaaggtggaagcagaacaggctcaagattgcccttcagctattctgaaaacttggtactgtcaaacagactgcttttctttgctaagtcaaaagcacaatgactgttttcaaaggtaaaacctttttccaggcataggcactcgaaatctctcgcagtcaattcagaagtggtaaagagtaattgtaagtgtagcctagcagggtcaagggaccctcgttgggtctgggaggagcaagtccagtgagtttttagctgctcatgttcctgaattgtgttcttcactgacattttgcatgtagtgccagatcactgcattggtgatccggtcactccaattctttcctatccaaggtcacaggtttgtttgtgagcttgcgaaccctttttttttcccctgtgaagccatatttgttctatttttttgttgaaaaaactagagtcccgagataataagggatatatatgtgatgtaatttagacgacagagcatgctgtacaaaagagtttgtaaaatgttatttctgtgggctgttgttttgtactcactccgttcttttttatttgtcgcggtttagatcaaaaatgaactagcgggtgacaaatatttgtgaacatgctgtttgtttccgtaacaacagatcatgtttgtaaaattttccagataggtattgtctggcatgattncc

SEQ ID NO: 11401 - DNA, 550 bp, Zea mays
  Clone ID: MRT4577_110397C.1
tttttcccccccccccccccccccccccccccccccccccccccccccccccccccccctcttttttttttaaaaaaaaaaaaaatccttttttattcccacattttttggggggcaaaattacggccttgacctttttttttcccccccggggggggggggcccccttgaaattttatttttcccccccggggggggggggcccccatgaaaaataaattctcactaactttaaaggggacaggacctttggaatcgttaaaaaaaaaaattttggaacccgcatccctcataaattttaaaaggctaaaaaagttttttttttttttggcggcgggaaaaatttatcgaaactaacatatttttgccatcgaaaaaaaaacggatttggggggtaaaccctatagggggtaaaaaaaaattttggactttcaaaaagttaaaggaaaagggggaacatcccttgcccaatgtataggggagggaggggggggaggtttatggacaaaatttcaaccccaaaaatttgggggaaaaaataacccttttt

SEQ ID NO: 11402 - DNA, 447 bp, Zea mays
  Clone ID: MRT4577_110398C.1
attcggctcgaggggtacgtacgcgaaggttcgtgcacgacgagaggggttatggggtgggtacgggcggatgagaccaccggatagcggaggcattacaagtagccgcgagagcactaacggctggcgatgggcggagggcgcaagactggacgggctggctcacgcccgcatacagcagttaccgctgcctcgggacgacccgtctgagggtgcgcatgaaccaggacgcgtgctcaaggtccagttaccatggtcacgctaatagtgtcaaggccatgcacctgctgcggtggggacggggtggagctgccagaggcgcccacatcgtcgtgcacttgcgctggaggtgttcactgcgctgtgtgtgaacccggtcctcagggtactggctgtacgttcattaaagctacatacaacgaggcgctccagaactacaaaccagct

SEQ ID NO: 11403 - DNA, 960 bp, Zea mays
  Clone ID: MRT4577_110399C.1
acggacgcgtgggcggacgcgtgggtcagaagagtaaaacataatgctggagtgagcttccaacaaggactaatcaccatgcgcatgctgcgagcaatgaagggtttttcctaccatacatgtttaaatgcaatgcactgcaacttgctggcagcaaagagtatgtgctcggttagcttcttgctcatctgactgagggtactgctgattggaatggcttttggatctataactagagtatccaggtcatttgtacttaggcaagtgtgtatactactctatgctggattatcgaaatgggggatggtttcttccctacgttgtaaggtggcggaggaacagatgatatgcctaggaagaggaactagtagatgataagagtttgcccctgatattaggcttcctttgaaatgcaggaagtctagaggaatatacaggaatttcacaagaatcagtctattttcacagaaaaaatgcaggaaactgaaaaaaaatccccgcattccaaagggggcctcatctaggatttcttcataccgaattatcgattgacttcgaccacataccgtgcttttgttcatgtctttgaacacaggcacacccaaatttcgaggtagcaaattttgcccacatacactgtatataaagtagttacagtacaagaacaatgctaactgatcaggtgatgtctcgtccttccccaggtttacaagtaaaatcgccaggctgtaaaccttcaattcttatggctaggttttcattctgaaagtcatgtcttccgcgtcagcataatcctgtgttcctgtttaacctctgttcggacttagtagtgctcatttgagttctaattcggcccggcaactgtacattctgtagtgttcgagaaaaaaaaactgtaaattctgtaaataattgccaaaaaaaaatttaaattttacctttaaaccttttcccgggttt

SEQ ID NO: 11404 - DNA, 261 bp, Zea mays
  Clone ID: MRT4577_11039C.1
atgccaaccccgacaccatcacttgggaggaattcagagataattttcgtcggtatcatgttccagcagctgatgaaccacaccttccccacatttcaacacctgatcgacagagcaatcatgacagagaagaagcgcaaggagatggaggatcgcaagcgcaagattggtggacctcggcctgggagcagcaatcgcccccgtttctcaggcaacccacctcagcagttcaagcagaatcagcacccacctcagcagtag

SEQ ID NO: 11405 - DNA, 759 bp, Zea mays
  Clone ID: MRT4577_1103C.1
ttccccacgcgtccgcccacgcgtccgcggacgcgtggggttcgatgaccgccgtgtcccctacaacataatgtccggcacctccatgtcgtgcccccacgtcgccggcatcgtcggcctcctcaagacgaagtacccagcttggagccccgccatgatcaagtcggcaatcatgaccaccgcgaccaccacggccaacgacggcaacccgatccaagatgagaccggcgccgtcgccacgccgttcggctacgggtctgggcacgtggaccccgtgaaggcgctggacccggggctggtgtacgacaccacgctgctcgactacaccaacttcctctgctcactgaagcccacgcagaacccgcttccgagcctcccggtcgacctcctcccgctcctggtggcaacctctcccagcctctcgtcggcctcctgctcccactgttcgacgccgccggcgagccgtgcaagtgtagcaagggcccgtacggccgccccgaggacctgaactacccatccatcgccgtgccgtgcctgtccggcagcgccacggtgaagcgccgcctcaagaacgtcggcgcgcccggcaagtacagggctaaagtcacggagcccgcggggatcaaggtcaccgtagtgccgagcgaattgtacttcggggtcggagaggagaaggagttcacggtgaagatggacgtggacgtcaacgccccggcggctaataatgactacgtgttcggcagtgttgtgtggtcggat

SEQ ID NO: 11406 - DNA, 310 bp, Zea mays
  Clone ID: MRT4577_110400C.1
cacatttttcccactaagcattccaggctgggggtgctggccatactctttctatcctcctccccgatcacgctgccccatgagaacgaagaaccgtagagccactcgcgggagacctgctatgcagcctagaccgggggcgaccctctgcctgacagagcaaaccgccagatgctgtgccctgtgtcaacataccgtacgggctgctgcacatatgcatcataccggacgtgctcgtgtcgacgcagaccgtccctcgcattccgactgttagtggaagcctcagcccgacgaagaagggacaccgtaa

SEQ ID NO: 11407 - DNA, 551 bp, Zea mays
  Clone ID: MRT4577_110401C.1
aatgggggatggtttcttcccctacgttgtaaggtggcggaggaacagatgatatgcctaggaagaggaactagtagatgataagagtttgcccctgatattaggcttcctctgaaatgcaggaattctagaggaatatacaggaatttcacaggaatcagtccattctcacagaaaaaatgcaggaaactgaaaaaaaatccccgcattccaaagggggcatcatctaggatttcttcataccgaattatcgattgacttcgaccacataccgtgcttttgttcatgtctttgaacacaggcacacccaaatttcgaggtagcaaattttgcccacataccctgtatataaagtagttacagtgcaagaacaatgctaactgatcaggtgatgtctcgtcctccccccggttctattattgttactgtatagctgtaattagtccaagtgtacagctgaatctactaaggtttacaaggaaaatcgccaggcagtaaaccttcaatgcttttggctaggttttcattctgaaagtcatgtcttccgcgtc

SEQ ID NO: 11408 - DNA, 463 bp, Zea mays
  Clone ID: MRT4577_110402C.1
tgttttcacacctataaggtttagactttccgacgaaggcgagacggaacccgacgatgacgaaggatgatgacgcggtgcggcacagccctcggggcgatgcgctccgtatcaccgactactatgtctgcccacggtctgccgccacggggcaaatccttctctggagatagcgaacgacgtccctgacgcgcggctctcagcggtgcctcacgatctccaggacgtcggttgcgtcgatcaccggtgaacaggcttctgtgatgccgaggcacaacttcctcacgtgacagagatgctcacctccatgcacgggctaatatatgcgtcttagctttgtgtctccaacatgaatagtcacgcgtcaatatcaacatgaaagagtatgatggatacttggctggttgttagtaccattctatataacaggaagacctgaaatctttcataaaatgacaagaaa

SEQ ID NO: 11409 - DNA, 558 bp, Zea mays
  Clone ID: MRT4577_110403C.1
aattcggcacgaggcgcgcctcccggatcgcctcggcgcgcggtgagtctggcgtgctgttgggccgcctgcctgcctgcccgtctctcttcggtctggatgcgtagccattgactccttcccggtcggggttgctttgctgctcgaggctgtgcggattggtagtttttttggtcgagaatggctggttcgattttcgggttcctttttgcacatgtcgatgagatcgccgctgggtcactacgggattagagcctgttgcccccttttgttactcgaggagatgtttggagtcgtaactatgtgaaattcaggccccataattttggtagcagcagaacggactttacaaaactggtgttacatgtgtgggaaaatggacaattgctgcatgtgtgtgtgcatgatccgaaagattacttggccttctctatgaatggacaccggtgtgggggatgtgggtggcgggaggtgggactaggtgacaatgtgtcgtgctgactgagcaagctgtggggggggtacgggcgtggcgggggggcgtgacggcctgggtgg

SEQ ID NO: 11410 - DNA, 101 bp, Zea mays
  Clone ID: MRT4577_110404C.1
aagatcatagctagaaatacagataattccacagcacatcggtgggaaaggtagcctattcctattctctagcctagtccttaccacctgtaatcttgacc

SEQ ID NO: 11411 - DNA, 215 bp, Zea mays
  Clone ID: MRT4577_110405C.1
gattaaacgggttcattctccaaaatccaacatagcactcccaatacagaactcgaactttctgcatcgggtatcatagaaccaatttgcttcagacgattgaggacatgctccctaactccaggacttgcttggaaaatcatgggaatccgatagcttgtttgattttgacaccgaggaaacttacacgtgtccagatcgacctccaaacgggg

SEQ ID NO: 11412 - DNA, 407 bp, Zea mays
  Clone ID: MRT4577_110406C.1
atctacgagtccggtattctccgtctcccgtttgtttccactcgtcctcctgcttgactgcgtcccaccaatgagtggatgtgtgcgcgctccgacactcaaagcctcgaagccgcactcgccgaccaactagaatccattgcatcggcactctcacagcataggaagaagtaccatactgtgcgcttcccaccacgcgtgcaacgtcatttcccctaatctgcgtacgcggcgagatatgataccattctgaaattgctgatcggtgtgatgaattataggccaatacttcttatcttactcctgctcgtgctcattgtcacatcacattttgagtggaagcagcatattggtgaggcttaagctaatccaacagctacacgaatgaggcaacaagcgcttggaag

SEQ ID NO: 11413 - DNA, 509 bp, Zea mays
  unsure (1)..(509): unsure at all n locations
  Clone ID: MRT4577_110407C.1
tcgagccgccgcgattctgctccttgtctctcctctcgaccnagttgccgccgccgccgcctaagcagggtggtgaggttttcgttggnctcttcgccggcagngagnacccaccagnagttttgtagaaatggttgatggtgaggacattcagcctcttgtctgcgacactggcaccggtaatgtccaaggatggttttgcccggcgatgatgcacccacggctgcattccctaacatccttggccgtcctcgtcacaccggtgtcatgctatggatgtggcagaaggatgcatatgttggtgatgaggcacagtcccaagagaggtattctcacgctcaagcccccgactgagcacggcattccaagcccctgggatgatatgcagacaatccggtatcacactttctaccactccccctccccgcccccccccacgacccccctgcgcctgcccaccacaccccccttcccaccccccaccccccccaccccacaaccacccaccc

SEQ ID NO: 11414 - DNA, 508 bp, Zea mays
  Clone ID: MRT4577_110408C.1
gccttgcgtcgcatcctagctacacactgccaagtagccgcagtctcccatggcccatggccacgcaagcatgcgcagctacgcgccaactgttggtggaaagatgagcacctgcgggggagacgctgcagacacaactcgcaactcgaactgcaagatccaggatacggagggcctgccccggtaccagcatccactgatgtagggtgggaagcacctaaggactggcgcacacttacctactccaaaatacaccaagagagaactttggaggtagtactgccggtctggtgaggaaggcacatgttgaggaatactatgacttgaaaggactattaccctaagaggaagtgttctaaaagcatacccaacgtgaaggcctaaagccagaagaaggaaaccttttgtagataccacgcaaggatcattgtctgccgctaggaactagaggacgctcgaaggccaagcatcacttcaacagttctaaacgagtagtaccctaacagtt

SEQ ID NO: 11415 - DNA, 209 bp, Zea mays
  Clone ID: MRT4577_110409C.1
gactcagactgctgcggctgacgctcactgatatcgtggtagggactccagcacaacgtaacactgagctttatgggacatgactacgccaggtgcagggacgctaactcatgaacctgagcgcgctgtatgagagactctgactgactcctcgtgaactgatgtactggatcgacagagcgaaccccaattttgggataccgagctta

SEQ ID NO: 11416 - DNA, 961 bp, Zea mays
  Clone ID: MRT4577_11040C.1
caagccgattcttccgttgcccttattggtttcttttcttgcctccttccatcccaatcaacaaacctgctcgtagcgtagccggctagctagccgctatggttgcccgccgtcgcaagctggccgtgcggaggagcaccctgtcggtgggcggcaacccagtggtgaacacggtgacagcgcggccgggcgtcgcgcgccggtgggtgtacaccaccctgtggcgttaccggttgcaacaccgctactccgccgacggcttgacggtggggctgggcgtgcagtggacgccgccgttccgcaagctagcaccgggcgccgagcatcggcctggcacgctgcagatgtgcgcgggcaacagctgcctggtcttccagatcgcgtgcgccggcggcgcggtccccaggatcctgcggcggttcctggccgacgcccgcgtcacgttcgcgggccgcaacgtggcggccgactgcaggatgctgcgcgcgcaccacgggctggacgtggcgtccacgctggagctccgcaggggcgggggtggtggtggtcgccagtccttggcggagatggcagagcggctgctggggatcccccgcggcctggtggagaagccccagtgggtcggcatgagcaagtgggaccgtcggaggctgtcgccggcccaggagcgctacgcggccgtcgacgcgtacgtctcgtgccgcctcggcgagtgcatccgccgcggcgtggacgccgtgtcgagccaagacgactacgtgtccagcgacggcgacgagttcgtggagagtggaggccgtgaagatctgtggtacttgttgcgaaacattcacatgtgatcaaacccatccgataggttactaaccaagagtcgcaccccttggagagtacccctgcagtctgtatataatccaatgttcccctgcaataaagacttatcgctgtcaaaaaaaaaaaaaaa

SEQ ID NO: 11417 - DNA, 250 bp, Zea mays
  Clone ID: MRT4577_110410C.1
acgtgttcaattggcaacctatgttctttttttaatgaacatgcacaatatagaaattagaaacaggttgcaccctcattagtagggttagagttcatgccataaccacattttaaaaacctaaaacttggagtagttgtaacaaaaagcctacagaccttacattagacaagatagtctttgacagcacaagtgaaattttgtaatggctaggtgaggggggcctcttaagcgaacagggttaaaccca

SEQ ID NO: 11418 - DNA, 530 bp, Zea mays
  Clone ID: MRT4577_110411C.1
gaaatacaatataaataaaaagaaaatatacttttatagacacatacacctgttcatactggtttatgaatttgagcatgttatctaagcctgaacttcaccacaaaatttgaattcaaattttagatttaaaataaaatgaaaagaaaaccagaaaataaaaggcaaagaaaagaaaagagatctaacctagctgggccggctaacctcgcttttggcccacggaaccgttgccccatgcgctcggcccaactcacgggtgcggcgccgacaccgtccccactcgtcattcttacacactcgcgctcgtgtcgtgtaccgtcgacatgtggaacccatcgggcagacacacgaccgcacgccagcactcccatgcgaccaacgctctactgccgacatgcgggcccgcgtgccagcctccatacgtgtgctcggtggtcttcgttgctgctttgtgggccctattggtcagcttcgtcccttaactgaacctcggcgcatgtcggggcgcgccgttgtcgctcagtccg

SEQ ID NO: 11419 - DNA, 1668 bp, Zea mays
  Clone ID: MRT4577_110412C.1
cgctgtccacacctaacgcggctcgccaagctccgctcacacctcacagtcacagcagcatgactctgtagtccatctccctttgcagccgccgccgccgccgcctcgagtggctcccagatccgagccgacgccggagcagggacaagccgctgccagcggcaatggcggacgccgtgggggcgctacctcctcctcctctgccgccgccgccggagtgcgagtccgggaggtcctcgccgtcccacgccgcgtcgccggagttcgagttctggatggtgggcaggaacccgtccccggcgctgctcaccgccgacgagctcttctccggcggcgtcgtgctcccgctccacaccctccaggcgccaggcgctccggacggcgacggcgcgcctcagcctcaagccgacgcggacgcggacgcaccgcggcgctcccgctgcctgacgcgcaggcgcaggtggaaggggaggccgcgcagccgctcgcggagtccgccatcgcgccgacgccggacctccccgcggtcacgttcaagtggaaggacatcttcaaggcgggcgccggcgccggcgccgagggcaaggagcgcaagaaggtggaacggcgcgtgagcagcgtcagcgggaacgccgagctgattaacatcaacatatggcctttctccaggagccgctccgccggagcaggtgccggcaccttgagtagggccaagcccaatccgaatccaaacccaaacccaaaccccaacgccgccgtcgccgccagcggcggcgccagcgttaacgccaacaccaccgccaatgccaccgccccgagcgcgccgccggccccggcgccggtcccgcgcaaggtgagcagcgcgccgtgctcccgtagcaactcccgcggggagtcctccgggcctgtgccgaccatccccaccgccactgcaactgcagcgccagaagcagcagccggagaagaagacgccgacgcggccacccaggttcaggcggcgccactgaccgccgccggcacatccagcgccacgtccatgttgaggaggtgggtgcccggacagggccgtaataacaacaacgcagcagggcccggcggcatccgcgtggggcggcccagcgccgtgtggaagctgaggcgcaacaagctgcagcaaaccgccgccgagcagaagcaggtgggcggcaagaagaaggcggccccggcccaggaacccgccgcggccgcggacgcggacgcagatgcagccagcgacgacaaggcgtcgccgagcgtggccgcgccagctgccgggtgccggaacaacgtggagggcgccggcgaggaagggaacccgccgcaggtgctcttcgggctccggaccttcttctccaagaaggtgtactgatcagcagcaagccatggcattgtactttgtacatacaaattcgagctctaggctcgctcttccacattttcaccttacctgcccccttcttttcttttttttttttgccttttttttattactctccttcctctgctctaattcgatcgagtagcttcgatatcctctgtactgtactagaacgaagctaggcctcaagtagtcgcctcaagcaggccagccatgagccaaaaaaaaaaaaaaaaaaaaaaaaaaaaacacgagggggggccccggtaccc

SEQ ID NO: 11420 - DNA, 618 bp, Zea mays
  unsure (1)..(618): unsure at all n locations
  Clone ID: MRT4577_110413C.1
ttgggtacctcgnagccggccggganaccccaggtagaaggagagatgcactcgtttcgcatcagccttatctgctgactatagctagccctaccaaaacaacaacgacaacacctgaacagcaatagtagcaaggcaatgaagcctttcatctgcagcagccatttcgtcgttctcgttctgtccatcgtcattgccgccgagatggcgtccgtcgaggcggatcatgactgctaccacctgagcggaaagttcaaggggtggtgcttgtatccggaccactgcgcagacgtgtgcttcactgagagcgacaacaaccttggcggcaagtgtcgcggcttcccgtctcgttgctactgcaagacatactgcgcgcaggggccaaaggccgctcctaggactactgttgctgctagccctgctctggtgtaatgtttgcctggtagctcgtagtaatgtctgtggttgtgagaaaatcaattcgtgacaattaattcgatcagcatcatagacatgttcggctgtattgttctaccgtggcgtggattgtgagactatctatctcaccttctatcatatctcttattttaaacgaaaaaaaaaaaaaaaaaagcggcc

SEQ ID NO: 11421 - DNA, 140 bp, Zea mays
  Clone ID: MRT4577_110414C.1
cgtaagctcggaattcggctcgagggccgcggaaagagacagtttactatagcggctgcggaggcaacaacgatggacgtcttcgacacgacaacgcagaccgccacctcggggactggcagggcacagccgcggaccgc

SEQ ID NO: 11422 - DNA, 470 bp, Zea mays
  Clone ID: MRT4577_110415C.1
aggggaactctttaaaaaacatgaactcgcattgccccccttccttaaagcctgggtacctttagacggggcggcctttcttttttttttttttttaatagagaggatacggctatacatgatcatattacatgtaatggcaggaaaacatgataagtgattcacgtctaatagataggaacctctacaattctaaccaaatagtagtctagcaaactccttaagtatttcaatgcaaagaaattgtcgaacaggttcatatagacagcgtatatttcatggcacgagcataagacggggctactcactgacattaatggatatgagctgggttgatagcaggaaagactgtgcttgaaagttcaaatcatatctagaatggccggccaccggaggtataagcacgaccaccagggaattgagcacgctggtcagaactacgacgacgaactcatgcccccataatggaa

SEQ ID NO: 11423 - DNA, 477 bp, Zea mays
  Clone ID: MRT4577_110416C.1
aaataaccggaaatttgattcgcattctcgaaaaccttttacatgttcgaaggtggttaccgggcgttttgcagctgtttgacaagaatcccttgctttttaacgcccataaataaattgggaataaaaagcctttttagctaaaaatacaggcttttgctccttggattttctctgttcaacaaatgggcaggggcttccccttccacttcttgagggacttgagcaacgggtcgatgtgcttgccctggttgatggcaaccagcaccttgttcaacttcttgccgggagagggcgtttttttgccggggagggacacgggttcgagcttcttgcgcacaaaacggtaaaacgggtaggaacggcaatcggcgatttttttcggtattcctgccgggccgtttttgacaggcgcccgtgcagccttcaccgccttgggcaacgccccacccaagttgtccttaaactgggcgacct

SEQ ID NO: 11424 - DNA, 660 bp, Zea mays
  unsure (1)..(660): unsure at all n locations
  Clone ID: MRT4577_110417C.1
aatattatcagaagatgtctttataaaccacatattcattgtactgtacaatattgatgctgatatagggatctacttagcatatttgtgtgtgcatgcaccatgttattcacaatgctgtatccttatcttagttctttcaggacttccctgatcatttgcatgaaagggccgtttactctcagcaaatgttcatgattacgattttatcagtatcctaattgctgttagttgatagctgtaacttaggagtctgaaagaggctgggaaaaaatgatactggtgacttaccagcacctggttgttaataacttattccacttggattccatattttgtcctaggattccgaaataaaatggagaacatggtgctcatagcctgattggcacaaaaggcatatgtattagccaactcaaaatagttctcccaacactttgatctaaaaatacataaatgttaaattgcagattggatagctgctctagcatgcctatttgctgtgaaaggattactacagaattcaggcccataaagaagtggatgtggtattcttgctatgttggcattntggtagccatcttttggacatactacatcttgaggtatatcgtcttagtcaacttatcttttttttcccttccatgcactcaatgcttt

SEQ ID NO: 11425 - DNA, 285 bp, Zea mays
  Clone ID: MRT4577_110418C.1
gggaaagacccttgactagtgaccccattgatccactgcaaattggacaggaagcatcagttcatcagtttgggaatactgttgtgagttgttctggatcatctcagaggtattcttgtggtaacgatagctttaggaaaactaacaggtcatcatcaagcagaatatgccggcatgcagaatctgctgttggttcgaaaactcttgcagaaatgtttgctttatctgattctgaaagactgaagctaaattcagactcaaatgctccagttctatgtaatatga

SEQ ID NO: 11426 - DNA, 194 bp, Zea mays
  Clone ID: MRT4577_110419C.1
gcttctctccaagtgaggacacccaagccctcgccatggcgtcgcagatctggcccgatccaaggcccttcccctcgtcgacgcactcacccctgctgctgccaaagcagcaacgcctatcgccggagcccaggagctctcgtccctgccgcgataaagcgagtgcttcgagatgccccgatcagctcgggaaa

SEQ ID NO: 11427 - DNA, 487 bp, Zea mays
  Clone ID: MRT4577_11041C.1
accacgcgtacgtcacgacgggatgttgggaagggagcttagaggaggcccggcgcaggccctggctctgaccggctgatccacatggtactggccctaggagcctagacgccataacgaggctcggggcaaggcggcgagacacaggcggccggtagctagcatcgggattctggacttagcaggagttcagttataatgcggcacacagtaaattcccgcctactggctcttgtcatacacaaccacgatgaccaatcgggtgaataaacggatcctctcgtataggttgaattactatttacagcgcgagtgcataagttatggtaaaactaacctgggtcacgacggtctaatcccagctcacgatgcctataggagagggaacaatccaacacttggagaaggctggttgacaaagataagaagagcacgcatcaagcgtacatgaaaccacttggatatgaacgcttggctgtgacatgcc

SEQ ID NO: 11428 - DNA, 158 bp, Zea mays
  Clone ID: MRT4577_110420C.1
gtcattgcaacctggactctacttagctccttgttcgagatccgccgctccttccgggggggcgaatccccttctttggggtcattgagcttcgtcaaggcgcagctcatccgcctctctgtattcgccataggagagcctacaagcatgggaggcct

SEQ ID NO: 11429 - DNA, 667 bp, Zea mays
  Clone ID: MRT4577_110421C.1
gccggccgggttcgatctcttttgttactgataggctcttctcggttattcctcttctatgcctcttccaacgtgttagaatacatattaacttgatatggatttaatttaacttaatacccctcaatccacatggctatattgaacaccacaagacaactgtagtttcgatttctgttaagatgtgaactatgcgaacccgattcagaagtatctccctgtagaatgtgatgaccagatgacttccactgtctaggatgctatccaatatttctaagatatgtatttcactgatgctgcccgagagatgatggacgagtacttagtgcctaagatcgatgccgccactatacctcaccgaatcgaacgacatgccccccttccatactgcactatcatccagtaacgagcaaccatcgagttcggtcgatcaggtatccctccatgctttctgatacccgcctcgctattactgcgcgctgccctgtccgtgtaattgtatgtacaccaagactgaaactgcctagtctcttgccatcttagtctcatagatcattctcccactgtatacggttgtggtaatatgctgcagagaccattagatcggacacttcaatctttgctcgaccgtgatgcgtactgctattagtataagatcacatctaga

SEQ ID NO: 11430 - DNA, 339 bp, Zea mays
  Clone ID: MRT4577_110422C.1
caccatgagacagacacaaacgccaataggaagaccaaacaacgtaatacgggcgaacagcaagtatagtacgcactcatgcagctttccatggctccctaccgcctacgccgcagtacggaggagacgttcgacttcgcagcgctcctagacctcccgtccatgctgcaagcgttcaggacgacgccgaccgatggccgccaccgacgggtaccgcaacagcatgaggagaaagactcccgcgccaggaagccggctccgacgacgagatgaagcggctgtgccgaatcctcagagtcgtccatcaggcacgaaagggcgcacccgaatcgcactact

SEQ ID NO: 11431 - DNA, 1907 bp, Zea mays
  Clone ID: MRT4577_110423C.1
tccgtgccgggacacttcaccttagagcgttcctgttcctatcccttcccacctctcccgtctccggtgccgccgccgcccgctcgccctcatcccctcaaacctccagctccccacctcccccgctcgctcccttccaggagctgccataccggcgacggctcccaactctccctccacatctcgccttctccccattcctctcctggcaagatctcctagccactgcgtccgcccccaccctcgttgcctggatccggcagtccctccatgctcatccgcgcctttcccgctctctcctcgaccggctcgctcccgtttgcaaccacccacatcccgttctgctacagagatagtcctgatggcgctgaaggaggagacgcagcagcggatggatgacgcatcgactggaggtcattggtggccactcacgcctcctcagacctcaccctcacttcgtcgttagcgcaggttcggccaacggcccccgacccgatcgcaggtcctcctcacggcgaggcacagttatagcaaaagaaagaaaaaacaccttcctagcagaactgaagatgccatctcatcaagataaaaagaggaatatatcttcaaatttctcaaagcacgccgtcaaagatgaagatgaaccagcatggacacctcttcgtgacacatacatgcttggttctaaattgaaggattgggacaaaatgaaggcttttgcaaatgctcttgtgcacattcatccaagccacccagggcacttggactctgctaattccattgaggagaaggacaagatcattgagataacaggactccagaacttggccaagtcattatctgcacagcattgtgttcagataaagtctgctgaatacatggaaaggagagcttcaggtgttcatgagaagtataatttgcaatcaggaaaaccaaagttaacaggaagttcaatattcaggctagggattaaaacgaggcttactccatttatgaaagccctacttacaacagaagttaagtgatccagccaaaaattcatgatcctttacatgccaattataaaagtaccaccgcatgggaagaaaagtagcaactgcaattctgaagtttttgtggtagatgccgactgcattatttggtttgtccgaactctaaaatgccaccattctctttgtccttccgatgccaccattctattttagttaattactccattcctgttgatttttgcgtctccttccaattaaagaacatcctcgattttataaacttaccaaggacatcatttacaggcaattggttggcaattcactataaccatttcatctcctagcagtacattttaagggttcaaattgatcgaaagtgtagatctagctcctctcgaggagctgatcgatcccctgacaggaaccgggccatgctgatgttcaaaagagttgtcagaagttcatgacatctggtatttattatatcttcttttgtagtgggctggtgtggtctgcttagcagcaggtagcactacaaccagcaatgtatggatgaattgaaggtagtaaagaacgcagacaattttatagaaactctgcatcttgaaactggcatgattgacaaagaagctggatgaatcctttggattggtgtcttcttatcaccaagcagtaatgtgaagcaagttcatttgttgactaagaacagatgagcacaaatcagtgaagagttcgttgcactagagatggaggatggataggtggtagatttcaatatggctttgatactattgtttccctttacaatctttgtacagaacaagaaaaatgacgttgtatgtggatactattgtaattcaagaatttatttctgaataataaatatatttgtttataaaaaaaaaaaaaaaaaaa

SEQ ID NO: 11432 - DNA, 591 bp, Zea mays
  Clone ID: MRT4577_110424C.1
cccgacgtaactgctccccacagtggtctccatattcttcagccttcagtccctgaccttgcggaaagaccaccacaccacacgcacgttgctgtacctgtacccaacaagccctacacctctcagctctcggtcacacatggatcccacgccacgggcagtgctgatctctatcagcagtggcggggcgaagggaggaggaggaggaagccacgcgcactacaggggcgtgaggaagcggccgtggggcaggtacgcggccgagatccgcgacccgtggaagaagacgcgggtgtggctgggcacgttcgacacccccctggaggccgccctcgcgtacgaccgtgccgcgcgcacgctccgcggcgccaaggccaggaccaacttccctgacgaccacgccgggcagcagctgcagcagcacctccgtcggcgccaacacccgccgccgcagcacgtctcgttcggaggcgtcggcgtcggcgtcgacgtcgactgcgctcctccgtggcatttcgtctgcttccagacaccgacgacggccccggcaaccgagacaccgtcaacggcgctggagctgggcacgggccg

SEQ ID NO: 11433 - DNA, 253 bp, Zea mays
  unsure (1)..(253): unsure at all n locations
  Clone ID: MRT4577_110425C.1
gcggacgaagcggggagcccctagagcaggcccagccccnttccacaaaaannnaacagaaaaaaacccaaggggggccaacagggagncagcccaaaacccaccnggccggaacaangnnanaaaccaaacaaacaacaaccaaaagncagnncagaagaagaccaccaaagaaaangcagagggccccaacaaaggcaaagccccggaccacccaacagggaaacagggccagacaaccaaccaaagagac

SEQ ID NO: 11434 - DNA, 369 bp, Zea mays
  Clone ID: MRT4577_110426C.1
gccggccgggtcgggcttccggctccgctgcttcgtctaccgagactggcaatgccgccaccgctctcgttggcggtgtctctttcctcggtctcgttgccgctgtcttggctctgtaaattggatggcctcttttggaaattcggttgatggaagagaaggatttaatgggtttgctctagagcggtaacgattggagtttgatttcagatgtgatacatgttgggcatcatgacgaaggcctctttgggccggatcgacttttcatggacaaattattgtgacaccttacgcgttcacatagggctcgacacgagcatcaatacaatacctctttttttgcaaaaaaaaaaaaaaaaaaggccccta

SEQ ID NO: 11435 - DNA, 167 bp, Zea mays
  Clone ID: MRT4577_110427C.1
aagctcaacaaacgcctcgggatcccgccgccgctccatctgcctatgctcccccacccgacagcagcgagcgacagcctggcgaagggatggccaaggccaggtcgttggcgaacggaagcaggcgcagcatcaaacggcggcggcggccacggctagtcctccaa

SEQ ID NO: 11436 - DNA, 276 bp, Zea mays
  Clone ID: MRT4577_110428C.1
ccccccccccctccccctttgtagtttttaggggaatgcccgggtcccccctatcaggggggcccatggaacccttaggcaggtgtccagtttttgtaacagattctttttttccagcccaggttttaacacccattaaacagaccaagcccgccatgaattggggaaatttaaggccctcactgaccggaacaattttaggtgaagatgtccataccctacaccttctttgggacccaaaaattgggaaaggggggctttggcaaaacaaaagct

SEQ ID NO: 11437 - DNA, 356 bp, Zea mays
  Clone ID: MRT4577_110429C.1
tggggggattattgttggtgttattcttttttaatactaatagtatacataaaatggaatatctatacgtctagtacactaaattactcgcaggaattggcttcgacaccttcacttggtttgtcagatgaagcggaagtctccgaggaggtagtcacttcgctgtcagaagtacctgcgagagactcttttgtgaaaatgctgctggtttttgattcgcgaatgcttatggagcaatcttcatccgtaccaggatttacgacattattgccatctggcgttcgaacaacacaattccaaattacctgatcttcttttgcttgttcactaagctttgtttggatgttgtctacaaa

SEQ ID NO: 11438 - DNA, 514 bp, Zea mays
  unsure (1)..(514): unsure at all n locations
  Clone ID: MRT4577_11042C.1
atcccattatagtcacatttaaatgttaaagataatgtccatgttacaaagacagcaaacaattacaacatatagattgcacacatggcatgcatggcgtccatccaagcacttatattcacttaaaaaaaagggggggggaaagatggatgcatatatagcatggatcgatcccggccggcaggtcgtcgtcgatcgttggtgaagaattccgatcaggtgcgcaggaagacgtcgagctcgaggacgacgtcgtggtagtcgctgctccagctctttgtcttgaagaggacgtagcccgtcgccatgcggaagctgcccgtgccgccgaccaccggcagctcgcgcaccggagcgaggaggtcgttccggccaaccacgaccaccgtgctcccggtgtaaggtgggtagtccgtgagcaccacgggcagggacatgacaagtaccgactcctgccgggacgccatcacgtgggaacccntgcacgcgccccnatccggggggacctccggtt

SEQ ID NO: 11439 - DNA, 251 bp, Zea mays
  Clone ID: MRT4577_110430C.1
agcagtggtaacaacgcagagtacttttttttttttttttttttttttttttttgcttcatgaacttactggtttgagatgaataaataagccatgctattttgttttaagcatgttttcccaaaactaagcacattcaaacataaattgctatttttaagtatgtacagaaataacaaatttatcttaattgtataacagaactcacctttgagtccactgcccgcgtactctgcgttgttaccactgct

SEQ ID NO: 11440 - DNA, 356 bp, Zea mays
  Clone ID: MRT4577_110431C.1
gaaaaaaccggcgcccaaacctaaaaaaatacccaaaaccggggattcatcaaaccaaacataacaaccacatctttataggcccccaacccaaaaaaccccattaaaaaaacttccgtacccaaaaaactaacctcccttactttaaaggaatacccggaaatcttaaccaaaacaaccgtaaaacccccaaaaccaaaaaaaaaaaggattcccggaaatcccaccttgatcttggtttaaaaacaaaaaggccggaatcccggaaaaaaaaaggcccgggtaaacaaccctgttcttggggagtagggtacccaaaaggaacaaaccggtcctcttgaggaaaaacagttttt

SEQ ID NO: 11441 - DNA, 143 bp, Zea mays
  unsure (1)..(143): unsure at all n locations
  Clone ID: MRT4577_110432C.1
tccggatcccgttcatacccctgctgggatttcatcacacgactcctgcgtgtctgaatttnnttnctgctgtgtctgttggccggacagagttgttgctacacgtatattattctgaaaagnagacgagtagaccagcgtgt

SEQ ID NO: 11442 - DNA, 261 bp, Zea mays
  Clone ID: MRT4577_110433C.1
ctcattcgatcggatgaactaatctattctgatggcatcatctaaacgtccttcgctgctctctgatgtgcagtcggggtgccattagcctttagataagactcactggacttcgttaaaggctactgatatctttaaataattctgtttttctctcaggtttttaaactttgaaacacaaatatgcacttatactgcacctactatataaacacacccatatcttaactaggtcactattactagaactgttgaaactgg

SEQ ID NO: 11443 - DNA, 669 bp, Zea mays
  Clone ID: MRT4577_110434C.1
gccggccgggccggaggaacaaccgcgctcggccgctctctcccccaccgcgcatgccatgcgccgtagctgcgcatcgcgcccaccagtccgcccacctcctattcctcttctcccaaaccgcctcccacagatgtctctccctcgccggttccatttggagcctcatcaccctatttccctctccctcgcgcgcgcccacacctctactgccgagccgcccttgctcctgcgcccatccggtggatgcccgcccgccatagcacattgtgcccatcagttctgtggaggagccctgctgttcgtgccgaatcgctagtttggtgctcgccgtcgaatttcgtcgtgatcgcgatttgtttccgagcttcgaggaatcaacgttcaagcgtcggcgaccaagagatcaagctcttcgagttctataaagttgaagtcactgagcatctgtttggtgaaggcaagtgtcctctgacccattatgtcctatctacttataattcactgtcccgcattacttaattgaaacataaggattgactaactttctatttacttatcattgtttaccttttcggttatcatggttagctttatgctattgctttactttaatcaatgaacatgatgtgaatattatggtaaaaaaaaaaaaaaaaaaggccccta

SEQ ID NO: 11444 - DNA, 420 bp, Zea mays
  unsure (1)..(420): unsure at all n locations
  Clone ID: MRT4577_110435C.1
ccggggggaccgtccctacctctacctcctctgcctctgcctgcctcgctccattgtgtgtctgtaaaacccccccgacactggcaccatcaccacatttgtcttgtctcctctcccggccctctctccctctctgcccctctccgctcccctcaacccacccttgatccttttccatctgtcccgtctgccgttccgaaccgaccacctgtctgaggcccgccacttccgtagtcgcctcctgacctgccttcttccccgtctctctacgtcctcatccccttctccagcctattacgtcctaccgacgtgcttgcgacttaaaatattaggccaaatttctcacggacatgccgcaacatgtacaccggagagccctagatnggtaccgaccaagacgccaatcgtgttgatgatcaa

SEQ ID NO: 11445 - DNA, 262 bp, Zea mays
  Clone ID: MRT4577_110436C.1
attgggtacctcgaggccggccggaagcgactctggcgcgtctggcctctggcctatgctcccttgtctgccagcgcctatgcgctcatcggactacggtcttctgcactctgcagatctatcaccggggaacactacccgatatcatgcatgtggagaacaccagacgcgtcatgcgaagcttacaccactcgacctctactgatctctactgatacgcgtttctgcgcagcttctccgacacgccgctcgcagaaggccc

SEQ ID NO: 11446 - DNA, 664 bp, Zea mays
  Clone ID: MRT4577_110437C.1
ctccacccgtcgccgcttcctcgcggtagactaggctaggctaggctacggtgacgaccagttcgcgctaatggcggccttcaggttccatcactaccaggtggtgtggtgcgcgctgccgacgcccggtgacgagcaccccaagatctaccgcatgaagatctgggccaccaacgaagtctgcgccaagagcaagctctggtacttcctgaggaagttgaagaaggataataatagcaatggtcaggtcctggccatcaacgagatcttcgagcgtaacccgacgacgatcaagaacgatggcatctggctgcgctaccagagcagaaccggctaccacagacatgtacgaagagtaccgcgacacacccctgcacggcgctgtaaagcacatgtacaatgagatgggttctcgtcaccgcgtgaggtccccctgcatccagatcgtcgagaccgacacagaactcttcaagctgtgcaatagggacaacgccatgtcctatcacaacagtgagatcgagttcccactcatgtacggcaaggtcatgtcgccgatcagtaagctgaagaccacgtgtcaaggcttccagtgcccacctgttcatgcgatgtagatgtggtcaccgcatgtgatcgtaagaatcagaggtttaaggatcgacac

SEQ ID NO: 11447 - DNA, 651 bp, Zea mays
  Clone ID: MRT4577_110438C.1
ggaaaaaaaaaaaaaaaaaaaaaaaaaaaaaaaaaaaaaaaaaaaaaaaaaaaaaaaaaaaaaaaaaaaaaaaaaaaaaaaaaaaaaaaaaaaaaaaaacccccccaccctttgtttttgaactttgatcgaagataaaaggggtgcccgttaagtaaacaatggtttccgccaccctcgaaaaggccatggacccgggaaaaaaaagcaccgtaaagtttgtttccgtttggcccatattggcctcaagggcctgggtaatccttggttacaacattgggggaatgaggggagcggcatttaacttaaaaaaggccctgaaaatcccggccgtccagttggaaatcctgataggaataataagtttttactcgtttttggaatctttcgttggcgcgcggacttccaaaaggatcggccgccgtttgaccgtctttttccccggggtaatttttttaatgggcgcgttgttaatgggtttttccgtaaactacggaatgctaatgggggcccgtttcggggccgaagttggcgtggcctacgggggcatgatcgcccccgtgtacaccgccgaaatctcgccgggggggtcccggggtttcctaacgtctttccttgaagttttaataaacctgggattcctgttgggtt

SEQ ID NO: 11448 - DNA, 724 bp, Zea mays
  Clone ID: MRT4577_110439C.1
gtaccccgggccccccccctcgagccacccccccccccccccccccccccccccccccccccccccccccccccccccccccccccccccccccccccccccccctttggacacaaaaacaatttttttttaaaatttgttttggccccaacaaaaattttaatagttgggccttgaaagcccaaacattaaaaaagcccccgttgggcccaaaatgggttcttttgaaggcccccgtccccccctaacccgaggggggggaaagatttttttgtttttgacctaaacgggggcttgggttgtaaaaaacaagcccccccaaagggggggttaaaaaaaaccccccccccttttctgggggccattaaaattaatttttttggacaataggcccttggggggggaaaaagtttcccacccctttttttagggaggacccctaaggccctgtttttggggggttcccccttgttttgcccccctttccagttggagggggaaaaggccccccccaagttttaaagttttttttttttggggccaattcccattcctggaaccggggaatcccgggggggtttcccatttttgggggaaggtttcccaaaggggagaaaaaaaagtttggcctttaggcggttaaactttttgggggccgcccccttgcaaaaacaattttccccgtaaacaaggaaattgggttttttatttacggggaaaaccc

SEQ ID NO: 11449 - DNA, 254 bp, Zea mays
  Clone ID: MRT4577_11043C.1
acccaagcgttcgtagaatatcaagctaaatatccactcccgtcgtcctggactcgcagttcatctacgacccacacgacccagcatggcgatgttcctgagaagctcaccggtgctcctcgctcttcacatcaccaggtcgctcatctccagcgcgctgccccggcacccggtaattgcggagatgcacagtctctgtatcgatgcacaccgaatgcatcgagccgtgcactctctgcgagcgcaaccacaac

SEQ ID NO: 11450 - DNA, 3096 bp, Zea mays
  Clone ID: MRT4577_110440C.1
atggattgctacaactttggagagcttggtcatcttgctcatcaatgtaacaagcccaagaagaacaagttcaagggcaagaaagaagatgacaacgatgatgagaaaaaggaaaagagattcttcaagaggaaggatgggaagcacaagaggtttcacaaaaagaaaaatggaaaggcatatattgttggtgactggctcactgacattgagtcatcaagtggatcttcttcaagtgaagaagaaaatgatgaaaaagttgtcgccatcattggggacttctctagaccaccaccatcgccatcatcgacttctcacctatgcctcatggctagaggtgaacggaaggtacaaaatgataatgatattgacgatagtgatagtgatagtgatgatgaatttgcttcaccttcctatgatgaactaactgacttgcttaaagaatacactcaaatcattaggaagtcaaaatctaaatatgctaaggataaatgtgagaagttaaatgaagctaatagggagttgaaagatatactagtgaaaatcaaggaagactatactaagattaaatttgatcatgataatcttcttgttgaaaatgaacttttatcttgcaatacacatgaggctattaaccatgttgttaagattgatgtagcaacctcatgtgatgatttgagtcaaggagatcaaactagtctacatgatgaattgactgaaaaagttgaagtcttgacattagacaaccaaaaattgaagagatacttgactgatgcaactactaggggaaaggttgccattgagaacaatgatttcaacaatgagttggcagtggataatgaaaggcttaaaaatgaggtcaagaaacttaagagtgaaaatgaacatcttgcaacaagtgtgcaaaaattcaacaagggccaatacctccaaaatgaattgttcatgaacactgtcataaaaaacaacaagagtggtattggatacaattcttttgtgcaaaagaaagctgcaactcaatacaagccaaagcaaactcataagcctattaaatgctttgagtgtggaaaagagggtcattttgcccacaattgcaaagctaaaccaccaactcccttgcctaagcacttaagaccatttgccttcaatgctcattatgttctaagaaaagtagcaaatggaaaggtgaactacaagaccggtgggagccattgggttattgatagtggatgcacacaacatatgacatgcaacccacggatgttcacctcacttgatgagaatgttgatggacaagacaaaatcacatttggggataattcaaaagggaaagttcaaggacttggcaaggtggcaatttcaaatgatctatcaatttcaaatattctcttagttgcacctttgagcttcaacttattatcagtggatgttattgtatcaaaaatggatgatgaatcaatggtgttcaaaggatttagatacaacaatctctacttagtggatttcacccctgaagatgtagacttaagaacttgcctcttcacaaaagcatcacttggatggctttcgcataggaggcttgcacatgttggaatgagcacactcaagaaagtattaaagaaggacatggttagaggattaaaggatgttgtatttgaaaaggacaagccttgtagtgcattgatagttgatgatttctcaagatacacttgggtgttctttctccatgataaatctgaagttgcatctatattcaagaagtttgccaagaaagctcaaaatgaattttattgcaagatcaagaagattagaagtgataatggtaaagaatttgacaacaccaacattcatgaatattgtgatgagattgggatcaagcatgaagtgtcagcaacatatacacctcaacaaaatggagttgttgaaaggaaaaacaggaccttgatcacacttgcaagaacaatgattgatgagtataacacaccagagaggttttgggctgaagctgtcaacactgcatgttatgcatcaaataggttatttcctcaccgactacttgcgaagactccctatgaactgctaaatgggaaaaagccagacgtctccttcttccgggtgtttggatgcaaatgctacatctacaagaaacgccatcacctcgggaagtttcaaagacgttgtgatattggttttctattgggttattcatcaaagtccaaagcatatcgagtattcaatcatgccactggcgtgttagaagaaacatatgatgtggaatttgatgagactaatggctcccaaggagcacttgaaaatcttgatggtgtaggtgatgagccacttagggaagctatgaagaacatgccaattggagctatcaaaccaaaagaagatgaagaagaggtgcaaaacattgacatgccttcttcatcaagtgtaccacaagatgatgaaaaagatgagagacatgcaaatgaagacacatttgtctctcatgaacaagcaagggatccggactgggtgaacgccatgcatgaagaactaaacaacttcacccgtaaccaagtttggaccctggagaagcccccacaagatgcaagaatcattggaacaaagtgggtgttcagaaacaaacaagatgatgaaggtgtgattgtgaggaacaaggcaagacttgttgcaaagggattctctcaagttgaaggcttagattttggagagacctttgcaccgcaaccacctgggtttgaagaccctagatatcctaaccatgcttacaggttgtccaaggcactatatggattaaagcaagctccaagggcttggtatgagcgtcttcgtgacttcctcatcgaaaagggcttcaagatcgggaccatcgacacaactctattcacaaagaaacataacagtgatatattcatttgtcaagtatatgttgacgacataatctttggctcgacaaatgactatcattacaaggaatttggtgagttaatgtcgaaggggttcgagatgtcaatgattggtgagctgacgtacttatttggctttcaagtcaagcaaatgaaagatggtaacttcctctcacaatag

SEQ ID NO: 11451 - DNA, 4968 bp, Zea mays
  Clone ID: MRT4577_110441C.1
atgtccggtggggatggacctcctcccgtttttgatggtgacgattttccttattggaaaattcgtatggaagcatacttagaggctatagacattggtgtctataaagccgccacacaaggattccccgaacctagagatcccacaaatcttgtaggtgatgagttcaattatgagaagtggaatgctaaggccaaaaacaccctttttagaggcctttgcaaagatgtgttcaatagagtaagaaatcataaaaatgctcatgatttgtggatggacatttgtgctctacacgaaggaactagaagtgagcgtgaggagagatatcacatagccatgcgaaagttaaattcttttgaaatgcttgctaatgaaaatgcaaatgctatgtactcacgtctaaatattcttgtagaggaagttaatggattggggcttactcaaatctcacaaccggatgttgtgaggaagattctcagtgtcctcccaatagacaaatatggacacattgtcactgtgctacatcaaatggatctttcagttaccacacctacacagattttgggaaagatcaatgcccatgaaatgaagaccaccaagatgttgaagaagctaaatagagaaggcatcaaatttgattcaagaaagaaaaaattcttttccaacaaaagaaagcccatttctgagatggactgctacaactgtggtgagctcggtcatcttgctcatcaatgcaacaagcccaagaagaataagttcaagggcaagaaacaagatgacaacgatgatgaaaagaaggaaaagaaattcttcaagaggaaggatgggaagcaaaagaggttccacaagaagaagaatggaaaggcatatattgttggtgactggctcaccgacattgaatcatcaagtgggtcttcttcaagtgaaaaagagaatgatgaaaaagttgccgccatcgccggggacttctcttcaccaccaccatcgccatcatcgacttctcacatatgcctcatggctaggggtgaacggaaggtacaaaacgatattaatattgttgatgatagtgatagtgatagtgatagtgatgaggaatttgcttcaccttcatatgatgagctagctgacttgcttaaagaatatactcaaatcattagaaagtcaaaagctaaatgtgataggttgaaaaatgaaaatgaatctttaaatgctaaatatgacatagttataaaagctagtgatgaaataaaagaagaaaataaaactatgtcatcaactgtaaatgagctcacaaactccctaaaagatgctaaggaaaaatgtgacaaattaaatgaagctaatagggagttgcaaaatagactagttaaaatcaaggaagactatactcaaattaaatttgatcatgacaatcttcttgttgaaaatgaacttttatcttgcaaaacacatgaggctattaaccctgttgttaagattgatgtagcaacctcatgtgatgatttgagtcaagaagagcaaactagtctacatgctgaattgactgaaaaagttgaagtcctgactttagacaaccaaaaattgaagaattacttgactgatgcaactactagaggaaatgttgctattgagaacaatgatttcaacaatgagttggcagtggataatcaaaggcttaaaatgagtgtgcaaaagttcaacaagggtcaatacctccaaaatgagctgcttatgaacactgtcatgaaaaacaacaggagtggtcattttgcccacaactgcaaagccaaaccgccaacccccttgcctaagcactcaagaccatttgctttcaatgctcattatgttctaagaaaggttgcaaatggaaaggtgaactacaagaccggtgggagccattgggttattgacagtggatgcacacaacatatgacaggcaacccacggatgttcacctcactggatgaaaatgttgatggtcaagataaaatcacatttggagacaattcaaaaggaaaagtgcaaggacttggcaaggtggcaatctcaaatgatctatcaatatcgaatgttctcttagttgcacctttgagcttcaatttattatcagtgggtcaactctgtgatcttggacttcaatgcttattcactccaacagaggttattgtaacaaagatggatgatgaatcaatggtgttcaaaggttttaggtacaacaacctctacttagtggatttcacttcagaagatgcaaacttaagaacttgcctcttcaccaaagcttcacttggatggctctggcataggaggcttgcacatgttgggatgagcacactcaagaaggtattaaagaaagatatggttagaggattaaaggatgtggtgtttgaaaaagacaagccatgcagtgcatgtcaagctggaaagcaagttgctaatacacatcctactaaagctttcatgtcaacatcaaggccactggaactacttcatatggatttatttggacctacaaattatgtaagtgtcggtggcaacctctactgtctagtgattgttgatgacttctcaagatacacttgggtgttctttctccatgacaaatctgaagttgcatctatattcaagaagtttgccaaaaaggcacaaaatgaatttgattgcaagatcaagaagattagaagtgacaatggcaaagaatttgacaacaccaacattcatgagtactgtgatgaaattgggatcaagcatgaagtatctgcaacatacacacctcaacaaaatggagttgttgaaaggaagaacaggaccatgatcactcttgcaagaacaatgattgatgagtataacacaccggagaagttttgggccgaagctgtcaacactgcttgttatgcatcaaacagactatttcctcaccggctacttgagaagactccttatgaactgctaaatgggaaaaagccagacatctctttcttccgggtgtttgggtgcaaatgctacatctacaagaaacaccatcacctagggaagtttcaaagacgttgtgatattggttttcttttgggttattcattaaagtccaaagcatatcgagtattcaaccatgccactggcgtggtagaagaaacatatgatgtggaatttgatgagactaatggctcccaaggagcacttgaaaatcttgatgatgtaggtgatgagccacttagggaagcaatgaagaacatgcctattggagctatcaaaccaaaagaagatgaagaagaggtgcaaatcattgacatgccttcttcatcaaatgtaccacaaaatgatgaaaaagatgagaggcatgcaaatgaagatacatttgtctctcatgaacaagcaagggtacaagccgaagatattgatgctccaggatcttcttcccaagtggttgacaggagaaactcatcactacttcaagctcatcctcaaaaccaaatcatcgagagtccttcacaaggggttattactcgatcacacagacatgcttcttttattgaacatcactcttttgtttcttgtgttgagcctacctgtatagatgaggcgctacaggatccggactgggtgaatgccatgcatgaagaacttaacaacttcacccgtaacgaagtttggaccctggagaagcccccacaagatgcaagaatcattggaacaaagtgggtgttcagaaacaaacaagatgatcaaggtgtgattgtaaggaacaaggcaagacttgtcgcaaagggattctctcaagttgaaggcttagattttggagagacctttgcacctgttgctcgactggaagccatccgtatcctacttgcatatgcatcatgctatgatataaaactttatcaaatggatgtaaaaagtgcatttttaaatggcttcataaatgaacttgtatatgttgagcaaccgcctggatttgaagaccctagatatcctaaccatgcttacaggttgtccaaggcgctttatgggctaaagcaagctccaagggcttggtatgagcgccttcgcgacttcctcatcgaaaagggcttcaagatcgggaccgtcgacacaactctcttcacaaagaaacataacggtgacattttcatttgtcaagtcaagcaaatgaaagatggtaactttctctcacaagagaagtataccaaagacttgttgaaaaggttcaacatggagaagtgcaaaccaatcaagacccccatgcctacaaatggacatctcgacttagatgagggaggtaaccctgttaatcaaactctctaccgttccatgattggtagtttattgtaccttaccgcatctaggcccgatattatgtttagtgtctgcatgtgtgctagattacaatctaatcctaagaaagctcatcttcgcgctgttaagagaattcttaggtatctcaggcacaccacaagcgttggtctgtggtatcccaaaggagctacttttgatttaattggctactccgattcggattatgccggttgcaaaattgataggaaaagtacttctgggggatgccatctgcttggtagatcactagtttcatggacatccaaaaagcaaaacagtgttgccttgtcaactgccgaagcggaatacattgccgcaggtgcttgttgcacacaaattttgtatatgaaacaaactcttctagactatggagtagttctagaaaaggtacctttgttgtgtgataatgagagtgctgttaaaattgctaacaatcctgtacaacactctcgcaccaagcacattgatatccgtcatcacttccttagagatcatgttgctaaaggagatatcattttagaaggagtgaggttggaagatcaattagcggatattttcactaagccacttgataagacccgcttttgcatgttgaggaatgaactaaatattcttgatctcagaaattttatgtaa

SEQ ID NO: 11452 - DNA, 155 bp, Zea mays
  Clone ID: MRT4577_110442C.1
ctctgccggagtggactgccatgctatctctcgctctctctacccccgcacgccgtgtccagctcagctttggagacaccacctgtccgttgctccaggcgcctcttcctctgccaccccccgtgacgctctgctctgcgggctgcggctgcagg

SEQ ID NO: 11453 - DNA, 1108 bp, Zea mays
  unsure (1)..(1108): unsure at all n locations
  Clone ID: MRT4577_110443C.1
gtcattgtaggtacctcgaggccggccgggagagaagcagagggagagcagtcaccaaaccaaaccgctctcgagtctccatccattctctccgctcatccgcagctctctagtctccagctctagctagccttagcctcgtccaagggacgaaggggccaccatgagcgtggtgatcctggacggctccacggtgcgcggcttcgtggcggacgaggcggccttcgcgcgcagcctggacgcgcggttcgccgcgctggacgccaacggcgacggcgtgctgtcccgcgccgagctccggcgcgcgctcgagtccttccgcctcctcgacggcggcggcttcgggtccgcccagccggcgccgctccccgccgaggtcgccgcgctctacgacgccgtcttcgagcagttcgacgccgaccacagcggcgccgtcgaccgcgccgagttccacgacgagatgcgccgcatcatgctcgccgtcgccgacgggctcggctcccagccgctccaggtcgccgtggacgacgagggcgggagcttcctgctcgaggcagccgagcacgaggccgctgggatcgccgccaagatcgaagccaaccgcaaggccgaggcggaggcggaggcggaggcggccaagtgacgacgtgtccctcgtgcgggccctgcgcttgattttctgggtgtttgctactacgtactatactagtactacttacctggcggccgatgtgccgccgcacgtgtacggtatactacgtaactagaagcggccagcaccagctactcaaatcactgctgatgctacttgtgaacggaataaaacctgtcaatcattttagtggtcttgcttgcataaaacacttctttgtcgtcaaaaaaaaaaaaaaagaaaaaaaaaaaaaaaaaaaaagggcggccgccctttttttttttttttttttacgggtgaaacgtagtagcatattttgacttgcaaagaacatttcaagaacaagctctccnctgaatgacagacttatttagatacataaatttgctgaccccaaaccaagccatgtggagctatgaacagcctttaaactgacaagctcnaaaatgaaaaacg

SEQ ID NO: 11454 - DNA, 6282 bp, Zea mays
  Clone ID: MRT4577_110444C.1
ctactggaccgctgccaagtgagcctgctgttgagtgagagtctggagaatctccgcaagagcagggtcaatggcaggaggggcagcaggggcagcaccattggaactcccagcctcatgatcatgagaacgtggaagcataggaggcggaggtggaatcccaaaatcatcatcatcattatcatcatcatcatcaactgttgtgtcctgagcttcgaactgatgaagagcagtatcctcggcctgagtgtcaaatactggagcaggtgctggcacaggatcctcaggcgctggacggtaggacccaaagaggaggtgtgaggcctcaagtgtgccctggaactgtggaggccgaatcagctgagcaaaaatgtgacacagatagtgagcataaggcagctgtcgacgagcacgcagaccatccagtacggtgtcctcgatctcacaaataaggaaatccacaacatcaaactctgagtgagagactagggcaccaagaagccagagctggatatgagtggcagcctccctgtaccccatccgcggcagaagtgtccgtctcataagctgatataaaaactttgctgctgtggtgaagtctgccggagagcgtcgcgacccatcaggagcaacaccaccgtgagggtgacgaggagggtcagaggtgccatagcataagttgtgaagacgagtcgatgactcatgaaatccaaatagctggcgaatctggctggcatgaatagtgacatcctctcgctcaaaacgaaatctcatccagtggtgatcagggtcgatccatacagtagcgtagaaaactcggacccattcctcaacatatctgccgctggtagtcaaaagagtgagaagtccaggcagataggagagatgaacctcagagtcagcaccggggctagcagaaaagcgggaaggtccaaaagctggtgcacatgcagagcaatctgtgcagacatctgggccctgaagaaggactcctgaatcctggtgctgaagagatcgacggcaacagtgtccctctgagccggtagccaggtctccatgggtacgtgtctgaaccgatgtacccgtgccgctcagtctcatcgcgctcccggaagcgagcaggtgggataggaggagcagaagcgggagcaggaggaggagcagtggaagatggtgtagtggaggtggtggatggcgcagcagggtgacgggagcaggcaaagtgggtggtggagtggaagcagtgatgggagtggaggagcgaggccgggaggcgaggcgacgaactcggtacgcaatctgatctgaaggagtctgtggctgatctcctagctcggcctgctcagtggctgttgctgccgctgctcgggctgctctgtccatacgccgcttcctgcggccttcctgctgctccaagtacatggtctttcccttgacctgcctgaaggggcgacgaggatcctcatcatcgcctccccctggcgccgacacattcttcgtgcgcggcatcctgacctgacgaacgagaggtgaaaatccaggcaggacaggagacggctcacgggcaggcaaggtcactccctcatctaggtcgagatgtccatttgttggcataggtgtcttgattggtttgcacttctccatgttgaaccttttcaacaagtctttggtatacttctcttgtgagagaaagttaccatctttcatttgcttgacttgaaagccgaggaagtacgtcagctcaccaatcattgacatctcgaactcttgacaaatgaaaatatcaccgttatgtttctttgtgaatagagttgtgtcgatggtcccgatcttgaagccctttttaatgaggaagtcgcgaagacgctcataccaagcccttggagcttgctttagcccatatagcgccttggacaacctgtaagcatggttaggatatctagggtcttcaaatccaggtggttgctcaacatatacaagttcatttatgaagccatttaaaaatgcactttttacatccatttgataaagctttatatcatagcatgatgcatatgcaaggaggatacgaatggcttccagtcgagcaaccggtgcaaaggtctctccaaaatctaagccttcaacttgagagaatccttttgcaacaagtcttgccttgttccttacaatcacaccttgatcatcttgtttgtttctgaacacccactttgttccaatgattcttgcatcttgtgggggcttctctagggtccaaacttggttacgggtgaagttgttaagttcttcatgcatgacgttcacccagtccggatcttgtagcgcctcatctatacaagtaggctcaacacaagaaacaaaggagtgatgttcaataaaagaagcatgtctatgtgatcgagtaataaccccttgtgaaggactcccaatgatttggttttgaggatgagcttgaagtagtgatgaatttctcctgtcaaccacttgggaagaagatcctggagcatcaacatcttcagcttgtatccttgcttgttcatgagagacaaatgtatcttcatttgcatgcctctcatctttttcatcatcttgtggtacatttgatgaagaaggtctgtcaatgttttgcacctcctcttcatcttcttttggtttgatagctccaattggcatgttcttcattgcttccctaagtggctcatcacctacatcatcaagattttcaagtgctccttgggagccattagtcacgccagtggcatgattgaatactcgatatgctttggactttaatgaataacccaataaaaaaccaatatcacaacgtctttgaaacttccctaggtgatgacgtttcttgtaaatgtagcatttgcatccaaacacccggaagaaggagacgtctggctttttcgcatttagcagttcatagggagtcttcgcaagcagccggtgaggaaatagcctgtttgatgcataacatgcagtgttgacagcttcggcccaaaacctctctggtgtgttatactcatcaatcattgttcttgcaagagtgattaaggtcctattttttctttcaacaactccattttgttgaggtgtatatgttgcagatacttcatgcttgatcccaatttcatcacagtactcatgaatgttggtgttgtcaaattctttgccattatcacttctaatcttcttgatataatttgtaggtccaaataaatccatatgaagtagttccagtggccttgatgttgacataaaagcttttgtaggatgtgtgttagcaacttgcttcccagcttgacatgcactacatggcttgtccttttcaaataccacatcctttaatgatctaaccatgtccttctttaataccttcttgagtgtgctcatcccaacatgtgcaagcctcctctgttggagtgaataagcattgaattccaagatcacagagttgacccacttgccaagtctttgcactttcccttttgaattgtctccaaatgtgattttgtcttgtccatcaacattctcatcaagtgaggtgaatatccgtgagttgcctgtcatatgttgtgtgcatccactgtcaataacccaatggctcccaccggtcttgtagttcacctttccatttgcaacttttcttagaacataatgagcattgaaagcaaatggtcttgagtgcttaggcaagggagttggtggtttggctttgcagttgtgggcaaagtgaccttcttttccacactcgaaggatttgataggcttgtgagtctgctttggcttgtattgagtagtagctttcttttgcacaaaagcattgtatccaataccactctcatttttaagactttcattatccactgccaactcattgttgaaatcattgttctcaatggcaacctttcctctagtagttgcatcagtcaagtatctcttcaatttttggttgtctaaagtcaagacttcaactttttcggtcaattcatcatgtaggctagtttgctctccttgactcaaatcatcacatgaggttgctacatcaatcttaacaacagggttaatagcctcatgtgtattgcaagataagagttcattttcaacaagaagattatcatgatcagatttaatcttagtatagtcttccttgattttcactagtctatctttcaactccctattagtttcatttaacttgtcacatttatccttagcatcttttagggaggttgtgagctcatttacagtggatgacatagttttgttctcttctttcatttcatcactagctttcataactatgtcatatttggcatttaaagattcattttcatttttcaacttatcacatttagcttttgacttcctaatgatttgagtatattctttaagtaagtcagctagttcatcatatgaaggtgaagcaaattcctcatcactatcactatcactatcatcaataatatcaatatcattttgtaccttccgttcacctctagccatgaggcataggtgagaagtcgatgatggcgatgatggtggtgaagagaagtccccggcgatggcggcaacttttttatcattctcttcttcacttgatgaagatccacttgatgactcaatgtcagtgagccagtcaccaacaatatatgcctttccatttttctttttgtggaacctcttttgctttccatccttcctcttgaagaatctcttttcctttttctcatcatcgttgtaatcttctttcttgcccttgaacttgtttttcttgggtttggtacattgatgagcaagatgaccaagctctccacagttgtagcaatccatctcagaaatgggctttcttttgctggaaaagaatttcttctttcttgaatcaaatttgatgccttctctgttgagcttctttaacatcttggtggtcttcctcaccatcaaggcaatgttagcatcaagatcatcatcacttgaggattcttcctcaatttgtactttagcttttccttttctttcttgatttgctttgagagccaaattctttctcttggaagatgactcatctttgtcattgatgtgcatgtacatctcatgagcattgatctttcccagtatctgtataggtatggtaactgaaagatccatttgatgtagcacagtgacaatgtgtccatatttgtctattgggaggacactgagaatcttcctcacaacatccggttgtgagatttgtgtaagccctaatccatttacttcctctacaagaatattgagaattgagtacatagcattggcattttcattagcaagcatttcaaaagaatttaactttctcatagcaatgtgatatctctcctcacgctcacttctagttccttcatgtagagcacaaatgtccatccacaaatcatgaggatttttatgatttcttactctattgaacacatctttgcaaaggcctctaaaaagggtgtttttggccttagcattccatttctcataattaaactcatcacctacaagatttgtgggatctctaggtgcggggaatccttgtgtggcggctttgtagacaccaatgtctatagcctctaaatatgcttccatacgaattttccaatatggaaaatcgtcaccataaaaacgggaggaggtccatccccaccggacatcgttactcggtgcgccaacggcgcgccaacggtcgactccaacggctagttctgacaagtagtcgttgggcatttgtctaccctgtcggaaggccgtgatgatagaagcatcagaaatacgaggtatcgtacctcgcaccttggtgaagcgggagatgaacttccggagagtctcccctggctcctgcctcactgcatggaggtgggcctccacaccgtgcttttggtaagcactggcgaagttcgccacgaaccgcgcaaatagttcttcccatgagtagacggccaaggggacacccgtttgggaccgggtgcccattggtgtctgcggtgcaatcgcagcaaagtcttgattgaggtcgcgaccatcgatgtttttgcgacgctcacgcgccctttccaaggatacccaagcgtcctctcccgcacgcctgcggttgagctctgcccgaaggtcgttggtctgtgcgccccttactgagggcgagcgcacagatgctggtgcctcgtgttggcgtcgggatgaccgtgtcttcaacctggtcgaggtagaatgcaccatactgagcagttggtcgacatcgtcccgccattgcttcat

SEQ ID NO: 11455 - DNA, 182 bp, Zea mays
  Clone ID: MRT4577_110445C.1
cgagcgacccgtcctgatggtgcaccaactgttactggagcggttactgctgcagatctggaaaaacctactgagcttccagaaccaggagtggggataaactctgcccctgatggaatggtcaaaaaagactggttgtctgatagctgcagttcatagtgatgcatagctcctgtactgtg

SEQ ID NO: 11456 - DNA, 198 bp, Zea mays
  Clone ID: MRT4577_110446C.1
gactgctcccaccatgaacaatgacgagctgcagcgcttgctcactctatgaccatgcgtccggttgcagaactactgctgctcctgccctcgagacactcaacctactgctcggacagcagtcacgagtgcgaggaccacctacgcgcgattgcatggactcgggctgcgctcttgaggtgtagatgcctaatatga

SEQ ID NO: 11457 - DNA, 4173 bp, Zea mays
  Clone ID: MRT4577_110447C.1
atggaagcatatttagaggctatagacattggtgtctacaaagctgccacacaaggattcctcgaacctagaaatcccacaaatcttgtaggtgatgagtttaattatgagaaatggaatgctaaggccaaaaacaccctttttagaggcctttgcaaagatgtgtttaatagagttagaaatcataaaaatgctcatgatttgtggatggacatttgtgctctacatgaaggaactagaagtgagcgtgaggagagatatcacattgctatgagaaagttaaattcttttgaaatgcttgctaatgaaaatgccaatgctatgtactcacgtctcaatattcttgtagaggaagtaaatggattggggcttacacaaatttcacaacaggatgttgtgaggaagattctcagtgtcctcccaattgacaaatatggacacattgtcattgtactgcatcaaatggatctttcagttaccacacctacacagatattgggaaagatcaatgctcatgatatgtacatgcacatcaatgacaaggatgagtcatattccaagagaaaggatttggctctcaaagcaaatcaagaaagaaaaggaaaagctaaagtacaaattgaggaagaatcctcaagtgatgatgatcttaatgctaacattgccttgatggtgaggaagaccaccaagatgttaaagaagctcaacagagaaggcatcaaatttgattcacgaaagaagaaattcttttccagcaaaagaaagcccatttctgagatggattgctacaactgtggagaacttggtcatcttgctcatcaatgtaacaagcccaagaagaacaagttcaagggcaagaaagaagatgacaacgatgatgagaaaaaggaaaagagattcttcaagaggaaggatgggaagcacaagaggttccacaaaaagaaaaatggaaaggcatatattgttggtgactggctcactgacattgagtcatcaagtggatcttcttcaagtgaagaagagaatgatgaaaaagttgccaccatcgtcgggaacttctcttcaccaccaccatcgccatcatcgacttctcacctatgcctcatggctagaggtgatcggaacatacaaaatgatattgatattactgatgatagtgatagtgatagtgatgaggaatttgcttcaccttcctatgatgaactagctgacttgcttaaagaatacactcaaatcattaggaagtcaaaagctaaatgtgataagttgaaaaatgaaaatgaatctttgaatgctaaatatgacatagataaatgtgacaagttaaatgaagctaatagggagttgaaagatagactagtgaaaatcaaggaagactatactaagattaaatttgataatgataatcttcttgttgaaaatgaacttttatcttacaatacacatgaggctattaaccctgttgttaagattgatgtagcaacctcatgtgatgatttgaatcaaggagagcaaactagtgtacatgatgaattgaccgaaaaagttgaagtcctgactttagacaaccaaaaattgaagagatacttgactgatgcaactactagaggaaaggttgccattgagaacaatgatttcaacaatgagttggcagtggataatgaaaggcttaaaaatgaggtgaactacaagaccggtggcagccattgggttattgacagtggatgcacacaacatatgacaggcaacccacggatgttcacctcacttgatgagaatgttgatggacaagacaaaatcacatttggggacaattcaaaagggaaagttcaaggacttggcaaggtggcaatttcaaatgatctatcaatttcaaatgttctcttggttgcacctttgagcttcaatttattatcagtggggtttagatacaacaatctctacttagtggatttcacctcagaagatgtagacttaagaacttgcctcttcaccaaagcatcacttggatggctttggcataggaggcttgcacatgttgggatgagcacactcaagaaggtattaaagaaggacatggttagaggatcaaaggatgttgtatttgaaaagaacaagccttgtagtgcatgtcaagctgggaagcaagttgctaacacacatcctacaaaagctttcatgtcaacatcaaggccactggaactacttcatatggatttatttggacctacaaattatgtaagtgctggtggcaacctctactgtctggtgattgttgatgatttctcaagatacacttgggtgctatttctccatgataaatctgaagttgcatctatattcaagaagtttgccaagaaggctcaaaatgaatttgattgcaagatcaagaagattagaagtgataatggtaaagaatttgacaacaccaacattcatgagtactgtgatgagattgggatcaagcatgaagtatctgcaacatatacacctcaacaaaatggagttgttgaaaggaaaaataggaccttgatcacacttgcaagaacaatgattgatgagtataacacaccggagaggttttgggccgaagctgtcaacactgcatgttatgcatcaaacaggctatttcctcactggctacttgcgaagactccctatgaactgctaaatgggaaaaagccagacgtctccttccgggtgttcggatgcaaatgctacatctacaagaaacgccatcacctagggaagtttcaaagacgttgtgatattggttttctattgggttattcatttaagtccaaagaatatcgagtattcaatcatgccactggcgtggtagaagaaacatatgatgtggaatttgatgagactaatggctcccaaggagcacttgaaaatcttgatgatgtaggtgatgagccacttagggaagcaatgaagaacatgccaattggagctatcaaaccaaaagaagatgaagaagaggtgcaagacattggtaggccttcttcatcaaatgtaccacaagatgatgaaaaagatgagaggcatgcaaatgaagatacatttgtctctcatgaacaagcaaggcctacatgtatagatgaagcgctacaggatctggactgggtgaacgctatgcatgaagaacttaacaacttcacccataaccaagtttggaccctagagaagcccccacaagatgcaagaatcattggaacaaagtgggtgttcagaaacaaacaagatgatcaaggcgtgattgtaaggaacaaggcaagacttgttgcaaagggattctctcaagttgaaggcttagattttggagagacctttgcaccggttgctcgactggaagccatccgtatcctacttgcatatgcatcatgctatgatataaagctttatcaaatggatgtaaaaagtgcatttttaaatggcttcataaatgaacatgtatatgttgagcaaccacctggatttgaagaccctagatatcctaaccatgcttacagattgtccaaggcgctatatgggctaaagcaagctccaagggcttggtatgagcgtcttcgtgacttcctcatcgaaaagggcttcaagatcgggaccgtcgacacaactctattcacaaagaaacataacggtgatattttcatttgtcaagtatatgttgatgacacaatctttggctcgacaaatgactatcattgcaaggaatttggtgagttgatgtcgaaggagttcaagatgtcaatgattgagaagtataccaaagacttgttgaaaaggttcaacatggagaagtgcaaaccaatcaagacacctatgccaacaaatggaaatcccgacctagatgagggaggtaacccggttaatcaaactctctaccgctctatgattggtagtttattgtatcttaccgcatctaggcctgatatcatgtttagtgtctgcatgtgtgctagatttcaatctaatcctaagaaagttcatcttcgctctattaaaagaattcttaggtatctcaggcacaccctaagcgttggtttgtggtatcccaaaggagctacttttgacttaattgactattccgattcagattatgccggttgcaaaattgatagaaaaagtacttctgggggtgccatttgcttgggagatcactag

SEQ ID NO: 11458 - DNA, 6690 bp, Zea mays
  Clone ID: MRT4577_110448C.1
atggacctcctcccatttttgatggtgacgattttccttattggaaaattcgtatgtgatgagttcaattatgagaaatggaatgctaaggccaaaaacaccctttttagaggcctttgcatagatgtgttcaatagaattttgggaaagatcaatgcccatgaaatgtacatgcacatcaacgacaaagaagaatcatcttccaaaagaaaggatttggctctcaaagcaaatcatgaaagaaaaggaaaagcaaaaatacaagttgaggaagaatcctcaagtgatgatgaccttgatgcaaacattgccttgatggtaaggaagaccaccaagatgttgaagaagctaaatagagaaggcatcaaatttgattcaagaaagaagaaattcttttccaacaaaagaaagcccatttctgagatggactgctacaactgtggtgagctcggtcatcttgctcatcaatgcaacaagcccaagaagaataagttcaagggcaagaaagaagatgacagcgatgatgaaaagaaagaaaagaaattcttcaagaggaaggatgggaagcaaaagaggttccacaagaagaaaaatggaaaggcatatattgttggcgactggctcaccgacattgaatcatcaagtgggtcttcttcaagtgaagaagagaatgatgaaaaagttgccgccatcgccggggacttctcttcaccaccaccatcgccatcatcgacttctcacctatgcctcatggctaggggtgaacggaaggtacaaaatgatattaatattgctgatgatagtgatagtgatagtgatgaggaatttgcttcaccttcatatgatgagctagctgacttgcttaaagaatatactcaaatcattagaaagtcaaaagctaaatgtgataggttgaaaaatgaaaatgaatctttaaatgccaaatatgacatagttataaaggctagtgatgaaataaaagaagagaataaaactatgtcatcaactgtaaatgagctcacaaactccctaaaagatgctaaggaaaaatgtgacagagtaaatgaagttaatagggagttgcaaaatagactagtaaagatcaaggaagactatactcaaattaaatttgatcatgacaatcttcttgttgaaaatgaacttttatcttgcaaaacacatgaggctattaaccctgttgttaagattgatgtagcaacctcatgtgatgatttgagacaagaagagcaaactagtctacatactgaattgactgaaaaagttgaagtcctgactttagacaaccaaaaattgaagaattacttgactgatgctactactagaggaaaggttgctattgagaacaatgatttcaacaatgagttggcagtggataatcaaaggcttaaaaatgaggtcaagaaactaaaaagtgaaaatgaacatcttgcaacaagtgtgcaaaagttcaacaagggtcaatacctccaaaatgagctgcttatgaacactgtcatgaaaaacaacaagagtggtattggatacaatgcttttgtgcaaaagaaagctaccactcaatacaagccaaagcagactcacaagcctatcaaatgctttgagtgtggaaatgaaggtcactttgcccacaactgcaaagccaaaccaccaactcacttgcctaagcactcaagaccatttgctttcaatgctcattatgttctaagaaaggttgcaaatggaaagatcaaagtgaactacaagaccggtgggagccattgggttattgacagtggatgcacacaacatatgacaggcaacccacggatgttcacctcactggatgaaaatgttgatggtcaagataaaatcacatttggagacaattcaaaaggaaaagtgcaaggacttggcaaggtggcaatctcaaatgatttatcaatatcaaatgttctcttagttgcacctttaagcttcaatttattatcagtgggtcaactctgtgatcttggacttcaatgcttattcactccaacagaggttattgtaacaaagatggatgatgaatcaatggtattcaagggatttagatacaacaacctctacttagtggatttcacttcagaagatgtagacttaagaacttgcctcttcaccaaagcttcacttggatggctctggcataggaggcttgcacatgttgggatgagcacactcaagaaggtattaaagaaagatatggttagaggattaaaggatgtggtgtttgaaaaagacaagccatgcagtgcatgtcaagctggaaagcaagttgctaatacacatcctactaaagctttcatgtcaacatcaaggccactggaactacttcatatggatttatttggacctacaaattatgtgagtgtcggtggcaacctctactgtctagtgattgttgatgacttctcaagatacacttgggtgttctttctccatgacaaatctgaagttgcatctatattcaagaagtttgccaagaaagcacaaaatgaatttgattgcaagatcaagaagattagaagtgacaatggcaaagaatttgacaacaccaacattcatgagtactgtgatgaaattgggatcaagcatgaagtatctgccacatacacaccacaacaaaatggagttgttgaaaggaaaaataggaccttgatcactcttgcaagaacaatgattgatgagtataacacaccggagaggctatttcctcaccggctacttgcgaagactccttatgaactgctaaatgggaaaaagccagacgtctccttcttccgggtgtttggatgcaaatgctacatctacaagaaacgccatcacctagggaagtttcaaagacgttgtgatattggttttcttttgggttattcattaaagtccaaagcatatcgagtattcaaccatgccactggcatggtagaagaaacatatgatgtggaatttgatgagactaatggcacccaaggagcacttgaaaatcttgatgatgtaggtgatgagccacctagggaagcaatgaaaaacatgcctattggagctatcaaaccaaaagaagatgaagaagaggtgcaaatcattgacaggccttcttcatcaaatgtaccacaagatgatgaaaaagatgagaggcatgcaaatgaacaagcaagggtacaagccgaagatgttgatgctccaggatcttcttcccaagtggttgacaggagaaactcatcactacttcaagctcatcctcaaaaccaaatcatcgggagtccttcacaaggggttattactcgatcacatagacatgcttcttttattgaacatcactcctttgtttcttgtgttgagcctacttgtatagatgaggtgctacaggatccggactgggtgaatgccatgcatgaagaacttaacaacttcacccgtaacgaagtttggaccctggagaagcccccacaagatgcaagaatcattggaacaaagtgggtgttcagaaacaaacaggatgatcaaggtgtgattgtaagaaacaaggcaagacttgttgcaaagggattctctcaagttgaaggcttagattttggagagacctttgcaccggttgctcgactggaagccatctgtatcctacttgcatatgcatcatgctatgatataaaactttatcaaatggatgtaaaaagtgcatttttaaatggcttcataaatgaacttgtatatgttgagcaaccgcctggatttgaagaccctagatatcctaaccatgcttacaggttgtccaaggcgctatatgggctaaagcaggctccaagggcttggtatgagcgccttcgcgacttcctcatcgaaaagggcttcaagatcgggaccgtcgacacaactcttttcacaaagaaacataacggtgatattttcatttgtcaagtatatgttgatgacataatctttggctcgacaaatgactatcattgcaaggaatttggtgagttgatgtcgaaggagttcgagatgtcaatgattggtgagctaacgtacttcctcggctttcaagtcaagcaaatgaaagatggtaactttctctcacaagagaagtataccaaagacttgttgaaaaggttcaacatggagaagtgcaaaccaatcaagacccccatgcctacaaatggacatctcgacttagatgagggaggtaacccggtcaatcaaactctctaccgttctatgattggtattttattataccttaccgcatctaggcccgatattatgtttagtgtctgcatgtgtgctagatttcaatctaatcctaagaaagctcatcttcgcgctgttaagagaattcttaggtatctcaggcacaccacaagcgttggtctgtggtatcccaaaggagctacttttgatttaattggctattccgattcggattatgccggttgcaaaattgataggaaaagtacttctgggggatgccatctgcttggtagatcactagtttcatggacatccaaaaagcaaaccagtgttgccttgtcaactgccgaagcggagtacattgcccgcagacatcagttcaggatgtcgcgcacgaagaatgtgtcggcaccagggggaggcgatgatgaggatcctcgtcgccccttcaggcaggtcaagggcaagacagtttacttggagcagcaggaaggccgcaagaagcagcgtacggacagagcagcccgtgcagcggcagcagctgcagcagccgctgcgcaggccgagcttggagatcagccgcagactccgtcagatcagatcgcataccgtgttcgtcgtctcgcctcccggcctcgctcctccactcacacctctgcttccactccgccacccactctgcctgctcccgtcacccctgttgcgccatccaccaccacagccatacccgctacctccactacgccagcttccactgctcctcctcccgctcccgctacagctcctcctatccctccacctcatttccgggagcgcgatgagactgaggtacaaccacttgctgcggatcctagattgtttgaccttcagcgtgctacagcagcacgggtacgtaggttcagatacgtacccgtggagtcttggttaccagctaagagggaccctgtggcaggtgacctattcagcacacgtattcaggagtcgtttttcagagcccagatgtctgctcagatagctctgcgagtgcaccggctcttggaccttctagcttttctgctcaccgtcggtgctgactctgaggcgcacctcacatatctgcctggccttctgacccttttgactaccagcggcaggtatgttgaggagtgggtacgagtcttctacgcctctgtatggattgacccggatcatcactggatgaggttttgttttgagcgagaggatgtcaccattactgccagtcagatccgccagctttttggattccccgagtcgacgactcgtcttcacagcctttgctacggcacttctgaccctcctcgtcgccctcacggcggtgtggctccgggtacagctcacgtcgcggccctgttccgcccgcccttctctgatgggtcgcgacgttcaccggcagattttactacagcagccaagtatttatatgagcttatcagacggactcttctgccgaggatgggatacagggaggctaccacacatattcagctctggctccttggtgccctggtctctcactctgagtttgatgtcgtggacttccttatttgtgagatcgaggacaccgttttggataggattcgtgctcgtcgtcagttgccatatgctcactacttatgccacatctttgcgcagctgattcagcctcctcggtttcagggcacacttgaggcctcacgcctcgtttttggattctaccgtcctgcgcctgagactcctgtgccagcttctgctcctgtttttgactctcaggccgaggatgcagctcttcatcagttcgacactcaggctacagcagttgatgatgatgatgatgatgattttggggttcctcctccgcctcctatgcctccacactcacatgatcatgaggctgggagttctagtgctgcccccgctgccccttcggctatggaccctgctctggcttcgattctccagtctatcactcagcagcaggctcacctggcagtcgagcaggcccggttatccgagaggatgctctcgatgtttcagaacatgcaggacaggcaggatgcgcttcagcagcagctactccaggatcgggctgagagcagggcattcatggctcttatgctacagcagtctggtgtctcagttcctccggttcagtctcctccacctcctccgcttcacgctccagttgtgccatcgattctgtcaggaccccctgttggtccttctccgctccggccggtcactttggctttcacctctccggttctcagctctgtctgcccgcagccgccagtgccaccagcctctgctgttaccactactgttgtggcagtatctgtgacctcttctgttccggtagctcctgcagcgcgacctcagtccgagtcagtactagctctagcttctaccacagatcctggatccgagactgactctgaccctccgccggcgttcgctctgctgcctcgaccgtga

SEQ ID NO: 11459 - DNA, 5207 bp, Zea mays
  Clone ID: MRT4577_110449C.1
acaaccaaaaattgaagaattacttgactgatgcaactactagaggaaaagttgctattgagaacaatgatttcaacaatgagttggcagtggataatcaaaggcttaagaatgaggtcaagaaactaaaaagtgaaaatgaacaccttgcaacaagtgtgcaaaagttcaacaagggtcaatacctccaaaatgagctgcttatgaacactgttatgaaaaataacaagagtggtattggatacaatgcttttgtgcaaaagaaagctatcactcaatacaagccaaagcagactcacaagcctatcaaatgctttgagtgtggaaatgaaggtcattttgcccacaactgcaaagctaaaccaccaactcccttgcctaagcactcaagaccatttgctttcaatgctcactatgttctaagaaaggttgcaaatggaaagattaaggtgaactacaagaccggtgggagccattgggttattgacagtggatgcacacaacatatgacaggcaacccacggatgttcacctcactagatgagaatgttgatggtcaagataaaatcacatttggagacaactcaaaaggaaaagtgcaaggacttggcaaggtggcaatctcaaatgacttatcaatatcaaatgttctcttagttgcacccttgagcttcaatttattatcagtgggacaactctgtgatcttggacttcaatgcttattcactccatcagaggttattgtaacaaaaatggatgatgaatcaatggtattcaagggatttagatacaacaacctctacttagtggatttcacttcagaagatgcagacttaagaacttgcctcttcaccaaagcttctcttggatggctttggcataggaggcttgcacatgttgggatgagcacactcaagaaggtattaaagaaagatatggttagaggattaaaggatgtggtgtttgaaaaagacaagccatgcagtgcatgtcaagctggaaagcaagttgctaatacacatcctactaaagctttcatgtcaacatcaaggccactggaactacttcatatggatttatttggacctacaaattatgtcagtgccggtggcaacctctactgtctagtaattgttgatgacttctcaagatacacttgggtgttctttctccatgacaaatctgaagttgcatctatattcaagaaatttgccaagaaagcacaaaatgaatttgattgcaagattaagaagattagaagtgacaatggcaaagaatttgacaacaccaacattcatgagtactgtgatgaaattgggatcaagcatgaagtatctgccacatatacacctcaacaaaatggagttgttgaaaggaaaaataggatattgatcacccttgcaagaacaatgattgatgagtataacacaccggagaggttttgggctgaagctgtcaacactgcttgttatgcatcaaacaggctatttcctcaccggctacttgcgaagactccttatgaactgctaaatgggaaaaagccagacgtctctttcttccgggtatttgggtgcaaatgctacatctacaagaaacgccatcacctagggaagtttcaaagacgttgtgatattggttttcttttgggttattcattaaagtccaaagcatatcgagtattcaaccatgccactggcgtggtagaagaaacatatgatgtggaatttgatgagactaatggctcccaaggagcacttgaaaatcttgatgatgtaggtgatgagccacttagggaagcaatgaagaacatgcctattggagctatcaaaccaaaagaagatgaagaagaggtgcaaatcattgacaggccttcttcatcaaatgtaccacaagatgatgaaaaatatgagaggcatgcaaatgaagatacatttgtctcttatgaacaagcaagggtacaagccgaagatgttgatgctccaggatcctcttcccaagtggttgacaggagaaactcatcactacttcaagctcatcctgaaagccaaatcatcgggagtccttcacaaggggttattactcgatcacatagacatgctactttcattgaacatcactcttttgtttcttgtgttgagcctacttgtatagatgaggcgctacaggatccggactgggtgaatgccatgcatgaagaacttaacaacttcacccgtaacgaagtttggaccctggagaagcccccacaagatgcaagaatcattggaacaaagtgggtgttcagaaacaaacaagatgatcaaggtgtgattgtaagaaacaaggcaagacttgtcgcaaagggattctctcaagttgaaggcttagattttggagagacctttgcaccggttgctcgactagaagccatctgtatcctacttgcatatgcatcatgctatgatataaaactttatcaaatggatgtaaaaagtgcatttttaaatggcttcataaatgaacttgtatatgttgagcaaccgcctggatttgaagaccctagatatcctaaccatgcttacaggttgtccaaggcgctttatgggctaaagcaagctccaagggcttggtatgagcgtcttcgcgacttcctcatcgaaaagggcttcaagatcgggaccgtcgacacaactctcttcacaaagaaacataacggtgatattttcatttgtcaagtatatgttgatgatataatctttggctcgacaaatgactatcattgcaaggaatttggtgagttgatgtcgaaggagttcgagatgtcaatgattggtgagctaacatacttcctcggctttcaagtcaagcaaatgaaagatggtaactttctctcacaagagaagtataccaaagacttgttgaaaagattcaacatggagaagtgcaaaccaatcaagacccccatgcctacaaatggacatctcgacttagatgagggaggtaacccggttaatcaaactctctaccgttctatgattggtagtttattgtaccttaccgcatctaggcccgatattatgttcagtgtctgcatgtgtgctagatttcaatctaatcctaagaaagctcatcttcgcgctgttaagagaattcttaggtatctcaggcacaccacaagcgttggtctgtggtatccgaaaggagctacttttgatttaattggctattccgattcggattatggcggttgcaaaattgataggaaaagtacttctgggggatgccatcttcttggtagatcactagtttcatggacatccaaaaagcaaaatagtgttgccttgtcaactgccgaagcggaatacattgccgcaggtgcttgttgcacacagattttatatatgaaacaaactcttctagactatggcgtagttctagaaaaggtacctttgttgtgtgataatgagagtgctgttaaaattgctaataatcctgtacaacactctcgcaccaagcacattgatatccgtcatcactttcttagagatcatgttgctaaaggagatatcattttagaaggagtgagacatcagatcaggatgccgcgcacgaagaatgcgtcggcgccagggggtggcgatgatgaggagcctcgtcgccccttcaggcaggtcaagggcaagactgtctatttggagcagcaggaaggccgcaagaagcggtacgtacccgtggagtcttggctaccagctcagagagaccctgcagcaggtgatcttttcagcacacggattcaggagtcattcttcagagctcagatgtctgctcagatagctctgcgagtgcaccggcttttggatcttccagcctttctgcttgcagccggtgctgactctgaggcgcatctcacctatttgcctggccttcagacccttctgactatcagcggcagatacgttgaggagtgggtccgagtcttctacgcctctgtttggattgacccggatcatcactggataaggttccgctttgagcgagaggatgtcacaattactgccagtcagatccgtcagctctttggattcccagagtcgacgactcgcctacacagtctctgttacggctcttctgaccctcctcatcgccctcacggcggtgtggcaccagggacagctcacgtcgcggctctgttccgcccgcctttcacagatgggtcgcgacgttcaccggcagactttactacagcagcgaagtacttatatgagctcatcagacggactcttctgccaaggatgggatacagggaggctaccactcatattcaactttggctccttggtgccctggtctcccactctgagtttgacgttgtggacttcctgatttgtgagatcgaggacaccgttctggatgggattcgtgctcgtcggcagttgccttatgctcactacttatgccacatctttgcgcagctgattcagccacctcgctttcagagcacccttgaggcctcacgcctttttgacactcagggtacaacagctgatgatgatgatgatgatgatgattttggggttcctcctccgcctccgcctcctatgcctccacgctcacatgatcatgaggctgggagttctcgtgctgcccctgctcctccttcggctatggaccctgctcttgcgacgattctggccaacctggcagccgagcaggcccggttatccgagacgatgctctcgatgtttcagagcatgcaggacaggcaggatgcacttcagcagcagctacttcaggatcgggctgagagtagggcattcatggcccttatgcttcagcattctggtatctcagcacctccggttcagtctgctccacctcctccgcttcacgctccagtggtgccatcgattttgtcaggaccccctgttggtacctctccgctccggccggtcactttggcgttcacctctccggttctcagctctgtctgtccgcagccgccagtgccaccagcatctgctgttaccactaccgctgtggcagtatctgtgaccgcttctgttccggtagctcctgcagcgcggcctcagtctgagtcagtaccagctccagcttctaccgcagatcctggatccgagactgactctgaccctccgccggcgttcgccctgctacctcgaccacgaccgaatgcgcccccgccgcctcctcctgcttcagatgtttag

SEQ ID NO: 11460 - DNA, 364 bp, Zea mays
  Clone ID: MRT4577_11044C.1
ttcgttttgaccaaccctcccaaaccttcggccgggttttttcattcttgaaacacggaaagcttccttaaagagcttttaacttgcagccattttttgcacgtacggtcttctttttcctatggccctccccttcttcacatctatatgattgtcgctggagtgtatatataccccccctctgaatatcctccgatggtaatattttataaagattgtggtgttaactcaaacacccattctctacactcatgacgaccctcccgggagataactattgatttttttgctacgcgggacctcctgctctttttacagcatccagccgttctttctctcaaccatttcatccgtcatcattttt

SEQ ID NO: 11461 - DNA, 380 bp, Zea mays
  Clone ID: MRT4577_110450C.1
ccttggagggcccggggatttcggaaacagatgcccaggctttctccccccctctgaggaagcaaacatagtcacagttcagacttgccctactgtcagttgcacaaaacgtacagcactctggtgcacctcgggacacgaaaaggtctttttctgtgggcatgtgcccatccgtttcttgcctcaatctacgcaagactgccgcatcttcgtgcgcgcaaagtcatcgtccccccccccaggagacattccggtggcctcttaattcggcggcgccctcagtgggaccatcaacagaacattgccagaaggttccgacaacgtcccggctgaaccgggcgcgcttgtccaccgccgccttggccaggtctggctggacg

SEQ ID NO: 11462 - DNA, 10722 bp, Zea mays
  Clone ID: MRT4577_110451C.1
atgtccggtggggatggacctcctcccgtttttgatggtgacgattttccttattggaaaattcgtatggaagcatacttagaggctatagacattggtgtctataaagccgccacacaagggttccccgaacctagagatcccacaaatcttgtaggtgatgagttcaattatgagaaatggaatgctaaagccaaaaacaccctttttagaggcctttgcaaagatgtgttcaatagagtaaggaatcataaaaatgctcatgatttgtggatggacatttgtgctctacatgaaggaactagaagtgaacgtgaggaaagatatcacatagccatgcgaaagttaaattcctttgaaatgcttactaatgaaaatgcaaatgctatgtactcacgacttaatattcttgtagaggaagtcaatggattggggcttactcaaatctcacaaccggatgttgtgaggaagattctcagtgtcctcccaatagacaaatatggacacattgtcactgtgctacatcaaatggatctttcagttaccacacctacacaaattttgggaaagatcaatgcccatgaaatgtacatgcacatcaacgacaaagaagaatcatcttccaaaagaaaggatttggctctcaaagcaaatcatgaaagaaaaggaaaagcaaaaatacaagttgaggaagaatcctcaagtaatgatgaccttgatgcaaacattgccttgatggtaaggaagaccaccaagttgttgaagaagctaaatagagaaggcatcaaatttgattcaagaaagaagaagttcttttccaacaaaagaaagcccatttctgagatggactgctacaactgtggtgagcttggtcatcttgctcatcaatgtaacaagcccaagaagaataagttcaagggcaagaaagaagatgacaacgatgatgaaaagaaggaaaagaaattcttcaagaggaaggatgggaagcaaaagaggttccacaagaagaagaatggaaaggcatatattgttggcgactggctcaccgacatcgaatcatcaagtgggtcttcttcaagtgaagaagagaatgatgaaaaagttgcggccatcgccggggacttctcttcaccaccaccatcgccatcatccacttctcacctatgcctcatggctaggggtgaacgaaaggtacaaaatgatattaatattgatgatgatagtgatagtgatagtgatgaagaatttgcttcaccttcatatgatgagttagctgacttacttaaagaatatactcaaatcattagaaagtcaaaagctaaatgtgataggttgaaaaatgaaaatgaatctttaaatgccaagtatgacatagttataaaggctagtgatgaaataaaagaagaaaataaaactatgtcatcaactgtaaatgagctcacaaactccctaaaagatgctaaggaaaaatatgtcaaattaaatgaagctaatagggagttgcaaagtagactagtaaagatcaaggaagactatactcaaattaaatttgatcatgacaatcttcttgttgaaaatgaacttttatcttgcaaaacacatgaggctattaaccctgttgttaagcttgatgtagcaacctcatgtgatgatttgattcaagaagagcaaactagtctacatgctgaattgactgaaaaagttgaagtcctgactttagacaaccaaaaattgaagaattacttgactgatgcaactactagaggaaaagttgctattgagaacaatgatttcaacaatgagttggcagtggataatcaaaggcttaagaatgaggtcaagaaactaaaaagtgaaaatgaacatcttgcaacaagtgtgcaaaagttcaacaagggtcaatacctccaaaatgagctgcttatgaacactgttatgaaaaataacaagagtggtattggatacaatgcttttgtgcaaaagaaagctatcactcaatacaagccaaagcagactcacaagcctatcaaatgctttgagtgtggaaatgaaggtcattttgcccacaactgcaaagctaaaccaccaactcccttgcctaagcactcaagaccatttgctttcaatgctcactatgttctaagaaaggttgcaaatggaaagattaaggtgaactacaagaccggtgggagccattgggttattgacagtggatgcacacaacatatgacaggcaacccacggatgttcacctcactagatgagaatgttgatggtcaagataaaatcacatttggagacaattcaaaaggaaaagtgcaaggacttggcaaggtggcaatctcaaatgatttatcaatatcaaatgttctcttagttgcacctttgagcttcaatttattatcagtgggacaactctgtgatcttggacttcaatgcttatttaccccatcagaggttattgtaacaaaaatggatgatgaatcaatggtattcaagggatttagatacaacaacctctacttagtggatttcacttcagaagatgcagacttaagaacttgcctcttcaccaaagcttctcttggatggctttggcataggaggcttgcacatgttgggatgagcacactcaagaaggcattaaagaaagatatggttagaggattaaaggatgtggtgtttgaaaaagacaagccatgcagtgcatgtcaagctggaaagcaagttgctaatacacatcctactaaagctttcatgtcaacatcaaggccactggaactacttcatatggatttatttggacctacaaattatgtcagtgccggtggcaacctctactgtctagtgattgttgatgacttctcaagatacacttgggtgttctttctccatgacaaatctgaagttgcatcaatattcaagaaatttgccaagaaagcacaaaatgaatttgattgcaagattaagaagattagaagtgacaatggcaaagaatttgacaacaccaacattcatgagtactgtgatgaaattgggatcaagcatgaagtatctgccacatatacacctcaacaaaatggagttgttgaaaggaaaaataggaccttgatcactcttgcaagaacaatgattgatgagtataacacaccagagatgttttgggccgaagctgtcaacactgcttgttatgcatcaaacaggctatttcctcaccggctacttgcgaagactccttatgaactgctaaatgggaaaaagccagacgtctccttcttccgggtatttgggtgcaaatgctacatttacaagaaacgccatcacctagggaagtttcaaagacgttgtgatattggttttcttttgggttattcattaaagtccaaagcatatcgagtattcaaccatgccactggcatggtagaagaaacatatgatgtggaatttgatgagactaatggctcccaaggagcacttgaaaatcttgatgatgtaggtgatgagccacttagggaagcaatgaagaacatgcctattggagctatcaaaccaaaagaagatgaagaagaggtgcaaatcattgacaggccttcttcatcaaatgtaccacaaaatgatgaaaaagatgagaggcatgcaaatgaagatacatttgtctctcatgaacaagcaagggtacaagccgaagatgttgatgctccaggatcttcttcccaagtggttgacaggagaaattcatcattacttcaagctcatcctcaaaaccaaatcatcgggagtccttcacaaggggttattactcgatcacatagacatgctaattttattgaacatcactcttttgtttcttgtgttgagcctacttgtatagatgaggcgctacaggatccggactgggtgaatgccatgcatgaagaacttaacaacttcactcgtaacgaagtctggaccctggagaagcccccacaagatgcaagaatcattggaacaaagtgggtgttcagaaacaaacaagatgatcaaggtgtgattgtaagaaacaaggcaagacttgtcgcaaaaggattctctcaagttgaaggcttagattttggagagacctttgcaccggttgctcgactggaagccatccgtatcctacttgcatatgcatcatgctatgatataaaactttatcaaatggatgtaaaaagtgcatttttaaatggcttcataaatgaacttgtatatgttgagcaaccgcctggatttgaagaccctagatatcctaaccatgcttacaggttgtccaaggcgctttatgggctaaagcaagctccaagggcttggtatgagcgtcttcgcgacttcctcatcgaaaagggcttcaagatcgggaccgtcgacacaactctcttcacaaagaaacataacggtgatattttcatttgtcaagtatatgttgatgatataatctttggctcgacaaatgactatcattgcaaggaatttggtgagttgatgtcgaaggagttcgagatgtcaatgattggtgagctaacatacttcctcggctttcaagtcaagcaaatgaaagatggtaactttctctcacaagagaagtataccaaagacttgttgaaaagattcaacatggagaagtgcaaaccaatcaagacccccatgccttcaaatggacatctcgacttagatgagggaggtaacccggttaatcaaactctctaccattctatgattggtagtctattataccttaccgcatctaggcccgatattatgttcagtgtttgcatgtgtgctagatttcaatctaatcctaagaaagctcatcttcgcgctgttaagagaattcttaggtatctcaggcacaccacaagcgttggtctgtggtatcccaaaggagctacttttgatttaattggctattccgattcggattatgccggttgcaaaattgataggaaaagtacttctgggggatgccatctgcttggtagatcattagtttcatggacatccaaaaagcaaaatagtgttgccttgtcaactgccgaagcggaatacattgccgcaggtgcttgttgcacacagattttatatatgaaacaaactcttctagactatggcgtagttctagaaaaggtacctttgttgtgtgataatgagagtgctgttaaaattgctaataatcctgtacaacactctcgcaccaagcacattgatatccgtcaccacttccttagagatcatgttgctaaaggagatatcattttagaaggagtgagtcatcagatcaggatgccgcgcacgaagaatgcgtcggcgccagggggtggggatgatgaggagcctcgtcgccccttcaggcaggtcaagggcaagactgtgtatttggagcagcaggaaggccgcaagaagtggcgtatggacagagaagcccgtgcagcggcagcagctgcagcagccgctgcgcaggccgctcttggagatcagccgcagactccatccgatcagattgcattccgtgctcgtcgtctcacctcccggcctcgctcctcctctcacacctccgcttccactccgccacccactctgcctgctcccgtcactcctattgctccatccacctccacagccatacccactacctccactacgcccgcttccactgcttcccctgctcccgctcccgcttcagctcctcctgtccctccacctcgcttccgggagcgtgatgagactgaggtccgtcctctggtttcggatcctcgtctgtttgatcttcagcgtgctactgcagcatgggtacgtcggttcaggtacgtacccgtggagtcttggctaccagctcagagagacccagcagcaggtgttcttttcagcacatggattcaggagtcattcttcagagctcagatgtctgctcagatagctctgcgagtgcaccgccttttggatcttccagcttttctgcttgcagctggtgctgactctgaggcgcatctcacctatctgcctggccttctgacccttctgactatcagcggcagatatgttgaggagtgggtccgtgtcttctacgcctctgtttggattgacctggatcatcactggatgaggttccgctttgagcgagaggatgtcacgatcactgccagtcagatccgtcagctctttggattcccagagtcgatgactcgccttcacagtctctgctacggctcttctgaccctcctcgtcgccctcacggcggtgtggctccagggacagctcacgtcgcggctctgttccgcccgcctttcacagatgggtcgcgacgttcaccggcagactttactacagcagcgaagtacttatatgagctcatcagacggacacttctgccgaggatgggatacagggaggctaccactcatattcagctttggctccttggtgccctggtctcccactctgagtttgatgttgtggacttcctgatttgtgagatcgaggacaccgttctggatgggattcgtgctcgtcggcagttgccttatgctcactacttaccgaggatgcagctcttcgacagtttgacactcagggtacagcagctgatgatgatgatgatgatgatgatgattttggggttcctcctccgcctccgcctcctatgcctccacgctcacatgatcatgaggctgggagttctagtgctgcccctcctcatcctcaggctatggaccctgctcttgcttcgattctccagactctcacctagcagcaggctcacctggcagccgagcaggcccgtttatccgacaggatgctctcgatgtttcagaacatgcaggacaggcaggatgcgcttcagcagcagctacttcaggatcgggctgagactgccagtgccaccagcatctgctgttaccactaccgctgtggcagtatctatgaccgcttctgttctgagacaaatgacggcttggtggcgttgggagctcggtgatcaccgtgaagatcttgttggtgacccgactcaagttttggtctactacgagaccgactcttcgtcaccctccacctctggctcggaatcggcctccactacttcaaagcgcaatgagcgcaagaagtatagcaaaccacctatgtttgaagatgaagattattctatgtggagtgataaaatgaggcatcacctaacctcactccacaaaagcatatgggatattgttgagtatggagtgcaggtaccaaagaagggagacaaggattacgactcggaggaggtcgaacaaatccaacacttcaactcccaagccacaactatactcctcgcctctctaagtcgagaggagtataataaggtgcaagggttgaaaagcgcaaaggagatttgggacatgctaaagaccgcgcacgaaggagacgatgtgaccaaaatcaccaagcgggagacgatcgagggggagctcggtcgcttccggcttcgccaaggggaggagccacaagacatgtacaaccggctcaaaaccttggtgaaccaagtgcgcaacctcgggagcaaaaaatgggatgaccacgaaatggttaaggttattcttagatcacttgttttccttaaccctactcaagttcaattaattcgtggtaatcttagatatacactaatgactcccgaggaagtaatagggaattttgtgagctttgaattgatgatcaaaggctcaaagaaaatcgtcgagctagatggcccctccatgttcgaagcacaactggtcgcattcaaggcgatggaggaaaagaaggaggaatctacatcaagtagaacacccatcgacgcctccaagctcgacaacgaggaaatggcgctcatcatcaagagctttcgccaaatcctcaaacaaaggaggggggaggattacaagccccgctccaagaaagtatgctacaaatgtggtgagcccggtcatttcattgctaaatgtccattatctagtgatagtgacatgggtgacgacaagaaggggagaagaaaggataagaagaggtattacaagaagaagggcggcgatgcccatgtttgccaggaatgggactccgacgagagctccaccgactcctcctcctatgaggacgccgcaaacatcgccgtcaccaagggtcttctcttccccaacatcggccacaagtgtctcatggcaaaggacaacaaaaggaagaaggtaaaatcaagatcctccactaaatatgaaacctctagtgatgaggataattgtagtgatgaggaggataacttgcgcaccctttttgccaacctaaacatgcaacaaaaggaaaagttaaatgaattaattagtgctattcatgagaatgatgaactcttggatacccaagaggacttcctaattaaggaaaataagaagcatgttaaggttaaaaatgcttacgctctagaagtagaaaaatatgaaaaattatctagtgagctaagcacttgccatgatactattgccaaccttagaaatgaaaatgctaaacttattgctaaggttgattctaatgtttgtgatgattcgatttccaatcttagaaatgataatgctaatttgcttgctaagattgagaaattgaataattctcttgctagccttagaaatgaaaatgaaaatttgattgctaaggctcaagactttgatgtttgcaatgttactatttgtaaccttagaagtgaaaatgatatattacatgctaaggttgttgaattaaaatcttgcaaaccttctacatctatcgttgagcatacttccatttgtactagatgtagagacattaatgttgatgttatccatgaccacctagccttaattaagaaacaaaatgatcacatagctcaacttaatgcaaaaattaatgagcatgacttggaaaatgaaaaatttaaatttgctagaagcatgctctataatgggagacgccctggcatcaaggatggcattggcttccaaaagggggacaatgtcaaacttaatgcccctcctaaaagattgtcaaactttgttaagggcaaagctcccatgcctcaggataacgagggttacattttgtaccatgtcggttatcctgagagcaaaattaggagaattcattctaggaagtctcactctggccctaatcatgcttttatgtataagagtgagacatctagctctaggcaattaacccatgctaaattgcctagaaagaaaactcatattgcatcaaatgatcataatatttcatttaaaacttttgatgcatcgtatgttttaactaacaaatccggcaaggtttatgcatccgggggctcaagttggattatcgatagcgagtgcacaaaccacatgacaggggagaagaagatgttctcctcttatgagaaaaaccaagatccccaaagagcggtcagattcggggatggaaaccaaggcgttactgtctttagaagatgtgacgattcaatagcatttaagggagtgttagagggtaagctatacttagtagattttgatagagctggactcgacacttgcttaattgctaagactaacatgggctggctctggcatcgccgactagcacatgttggaatgaagaatcttcacaagcttctaaagggagaacacattttgggactaacaaatgttcattttgagaaagacagaatttgtagcgcatgtcaggcagggaagcaagttggtgttcatcatccacacaagaacatcatggcaactgacaggccactcgagctcctacacatggacctattcggcccgatagcttacataagcatcggcgggagtaagtactgtctagttattgtggatgattattctcgcttcacttgggtgttctttttgcaggaaaaatcgcatacccaagagaccttaaagggattcttgagacgagctcaaaatgagttcggcttaaggatcaagaaaattagaagcgacaacgggacggagttcaagaactctcaaattgaaggcttccttgaggaggagggcatcaagcatgagttctcctctccctacaccccacaacaaaatggtgtagtggagaggaagaatagaactctattggacatggcaagaaccatgcttgataagtacaagacttcggatcggttttgggccgaggcggtcaacgccgcctgctacgccatcaaccggttgtatctacaccgaatcctcaagaagacatcatacgaactcctaaccggtaaaaagcccaacgtttcatttttagagtctttggctgtagaaggctttttactaggatatgattcaaacacaagggcatatagagtctttaacaagtcctctggacaagttgaagttttttgtgacattgtgtttgatgagactaacggctctcaagtagagcaagttgatcttgatgagataggtgatgaagaggctctgtgcgtcgcattaaggaacatgtccattggggatgtgtgtcttaaggaatccgaagagccaccacatgcacaagatcaaccatcttcctccatgcaagcatctccaccaactcaagatgaggataagtctcaaaatgatgaaggagaagatcaagaagttgagccacctcaagaggagagcaatgatcaagggggagatgcccatgatcaagatgaggaagatgaacaagttccaaggccgccacacccaagagtccatcaagcaatccaatga

SEQ ID NO: 11463 - DNA, 533 bp, Zea mays
  Clone ID: MRT4577_110452C.1
cattgggtacctcgaggccggccggggaacacctaaaggcatccttgattcttccattcaccggcaaactcagacgagatggttcaacgagtcacccttcgcacccggaaatcctacaacaccagctcgaacgtgagaagaatcatcaaaactcccgggggcaaactttcctaccttcgacttcacaagcaggccactgctccaaaatgcggtgattgtcacacgagtctccccggtgttcctgccctccgacctgtacgctacgcaactgtatcgaaacgaatcaaaaccgtccagagaccatacggtggttcccgttgtggaaactgcgtgcgagataggatcgtccgagccttcttggttgaggaagccaagattgtcaagaaggtgttgaaaagtcaagccgtccccactaaatcgaagaaataaacctaccctccccttggtttaccatatgcagccaccaactcgctattatgttttgaaatttagtacaaccctatctgacgaaaaaaaaaaaaaaaaaagcggcc

SEQ ID NO: 11464 - DNA, 2640 bp, Zea mays
  Clone ID: MRT4577_110453C.1
atgaaggctattaaccctgttgttaagattgatgtagcaacctcatgtgatgatttgagtcaaggagagcaaactagtctacatgatgaattgaccgaaaaagttgaagtcttgactttagacaaccaaaaattgaagagatgcttgactgatgcaactactagaggaaaggttgctattgagaaaaatgatttcaacaatgagttggcagcagataatgaaaggcttaaaaatgagagtggtattggatacaatgcttttgtgcaaaagaaaacaactactcaatacaagccaaagcagactcatatgcctatcaaatgctttgagtgtggaaaagaaggtcactttgcccacaactgcaaagccaaaccaccaactcccttgcctaagcactcaagaccatttgctttcaatgctcattatgttctaagaaaagttgcaaatggaaaggtgaactacaagaccgatgggagccattgggttattgatagtggatgcacacaacatatgacaggcaacccacggatgttcacctcacttgatgagaatgttgatggacaagacaaaatcacatttggagacaattcaaaagggaaagtgcaaggacttggcaaggtggcaatttcaaatgatttatcaatttcaaatgttctcttagttgcacctttgagcttcaacttattatcagtgggtcaactctgtgatcttggacttcaatgcttattcactccaacagaggttattgtatcaaaatggatgatgaatcaatggaggcttgcacatgttgggatgagcacactcaagaaggtattaaagaaggacatggttagaggattaaaggatgttgtatttgaaaaggacaagccttgtagtgcatgtcaagctgggaagcaagttgctaatacacatcctacaaaagctttcatgtcaacatcaaggccactggaactacttcatatggatttatttggacctacaaattatgtaagtgttggtggcaaccactactatctggtgattgttgatgatttctcaagatacacttgggtgttctttctccatgacaaatctgaagttgcgtctatattcaagaagtttgccaagaaagctcaaaatgaatttgattgcaagatcaagaagattagaagtgataatggtaaagaatttgacaacaccaacattcatgagtactgtgatgaaattgggatcaagcatgaagtatctgcaacatatacacctcagcaaaatggagttgttgaaaggaaaaacaggaccttgatcacacttgcaagaacaatgattgatgagtataacacaccagagaggttttgggctgaagctgacaacactgcatggtatgcatcaaacaggctatttcctcatcggctgcttgcgaagaccccctatgaactgctaaatgggaaaaagccagacgtctccttccggtccaaagcatatcgagtattcaatcatgccactggcgtggtagaagaaacatatgatgtggaatttgatgaggctaatggctcccaaggagcaattgaaaatcttgatgatgtaggtgatgagccacttagggaagcaatgaagaacatgccaattggagctatcaaaccaaaagaagatgaagaagaggtgcaaaatattgacaggccttcttcatcaaatgtaccacaagatgatgacaaagatgagaggcatgcaaatgaagatacatttgtctctcatgaacaagcaaggaccctggagaagcccccacaagatgcaagaatcattggaacaaagtgggtgttcagaaataaacaagatgatcaaggcttgattgtaaggaacaacgcaagacttgttgcaaagggattctctcaagttgaaggcttagattttggagagacctttgcaccggttgctcgactggaagccatccatatcctacttgcatatgcatcatgctatgatataaaactttatcaaatggatgtaaaaagtgcatttttaaatagcttcataaatgaacttgtatatgttgagcaaccacctggatttgaagaccctagatatcctaaccatgcttacaggttgtccaaggcactatatgggctaaagcaagctccaagggcttggtatgagcgtcttcgtgacttcctcatcgaaaagggtttcaagatcgggaccgtcgacacaactctattcacaaagaaacataacagtgatattttcatttgtcaagtatatgttgatgacataatctttggctcgacaaatgactatcattgcaaggaatttggtgagttgatgtcgaaggagttcgagatgtcaatgattggtgagctgacgtacttcctcggctttcaagtcaagcaaatgaaagatggtaactttctctcacaagagaagtataccaaagacttgttgaaaaggttcaacatggaaaagtgcaaaccaatcaagacacctatgccaactaatggaaatctcgacctagatgagggaggtaacccggttaatcaaactctctaccgttctatgattggtagtttattgtaccttaccgcatctaggcccgatatcatgtttagtgtctgcatgtgtgctagatttcaatctaatcctaagaaagctcatcttcgcgctgttaaataa

SEQ ID NO: 11465 - DNA, 225 bp, Zea mays
  unsure (1)..(225): unsure at all n locations
  Clone ID: MRT4577_110454C.1
tatcntaggagctntcagcngtatcancactatcattagtatatnacccccngcgatgacgcnatatcngaacacctctctttgnntgatccgtactaattacagccgtcctactagttctgctcantgcnagnattggcagcaggtatnactatnctncnttacngancggantctaangactactntnttcgaccccgctggnggtggagncccntttcccga

SEQ ID NO: 11466 - DNA, 2535 bp, Zea mays
  Clone ID: MRT4577_110455C.1
ctaaacatgtgcatcactttgcaacggacttgtgaggtccagggagtgtttgtacaacttgagcaccataataagcaacaaaatgcagaatgaactacgcaacctgcaaaaggtcttctcatctagaggcttagtgaagatatcggctagctggttctcggtgctaacatgaaacacttcgatatctcccttttgctggtggtccctcaaaaagtgatgccggatgtctatgtgctttgtgcggctgtgctcaacaggattctccgccattctgatagcactctcattgtcacataggagtgggactttgctcagattgtagccaaagtcccggagggtttgcctcatccaaagtagttgcgcgcaacactgaactgcggcaacgtactcggcctcagcggtggatagggcaacggaggtttgtttcttagagttccatgacaccagggaccttcctaagaattggcacgtccccgatgtactcttcctatcgaccttacatccagcatagtcggagtctgagtatccaactaagtcaaaggtagaccccatttgtctcggagcagaagcagtcacagatactgccacagcggtggtggaaacagcagatgctggtggcactggcggctgcgggcagacagagctgagaactggtgaagtgaacgccaaggtgaccggccggagcggagaggtaacagcagggggtgcagacaagatcgaaggcactactggagcgtgaagcgaagaaggcggagcagactgaactggagacgctgagataccagaatgctgaagcatgagggccatgaatgccctattctctgccctatcctgaataagctgctgctgaagtgaatcctgcctgtcctgcatagtctgaaacattgagagcatcctctcggacatacgggcctgctcggctgccagctgagcctgctgctgagtgagagtctgaagaatcgaagctagagcagggtccatagcctgaggggtagcaggggcagcactagagctcccagcctcatgatcatgagagcgtggaggcataggaggcggaggtggaggaggaatcccaaaatcatcatcatcatcatcatcatctgctgcaccctgggtgtcaaactggcgaagtgctgcatcctcagcctgagtgtcaaacacaggagcataagctggcactggaatctctggagcaggacggtaagatccaaacacaaggcgagaggcctcaagggtgctctgaaagcgaggtggctggatcagctgcgcaaatatgtggcataagtagtgagcatagggtagctgccgccgagcacgaatcccatccagaacagtgtcctcaatctcacagatcagaaagtcaacaacatcaaactcagagtgggataccaaggcaccaaggagccaaagctggatatgagtggtggcctccctgtatcccatcctaggcaggagtgtccgtctgacgagctcatataagtacttcgctgtagtagtgaagtctgctggagaacgtcgcgacccatctgtgaaaggcgggcggaacagagccgcgacgtgagctgtcccgggagccacaccgccgtgagggcgacgtggaggatctgaagtgccatagcagagactgtgcaggcgagtcgtcgacacagggaagccaaatagctgtcggatctgatcggcagtgattgtgacatcctcgcgctcaaagcggaacctcatccaatgatgatccgggtcaatccacacagaggcatagaagacgcggacccactcctcaacgtatctgccgctgatagtcagaaaggacagaagccctggcaaataggtgagatgagcctcagactcagcaccggctgctagcaagaaagctggaagatccaataggcggtgtactcgcagcgcaatctgagctgacatctgtgccctgaagaaagactcctgaatccgagtgctgaaaagaactcctgctgctgggtctctctgagctggcagccaagactccacgggtacgtacctgaaccgacgtacccgggctgcagtggcacgctgaagatcaaatagacgaggatccgaacccagtggacggacctcagtctcatcgcgctcccggaagcgaggtggagggacaggtggagctgaagcgggagcgggggcaggggaagcagtggaagctggcgtggtgctggtagtgggtatggcggtggaggtggatggagcaataggagtgactggagcaggcagagtgggtggcggagtggaagcggaggtgtgagtggaggagcgagaccgggaggcgagacgacgagcacggaaagcaatctgatctgatggaatatccggctgatctccaagtgctgcctgtgcagcggctgcggcagctgctgctgctgcgcgagcctctctgtctgaacgccgcttcttgcggccttcctgctgctccagatacacagtcttgcccttcacctgcctgaaggggcgacgagggtcctcatcgtcgccaccccctgatgccgacgcattcttcgtgcgcggcat

SEQ ID NO: 11467 - DNA, 187 bp, Zea mays
  Clone ID: MRT4577_110456C.1
agaactcagtatagagcgatctagaaagtagaactgtgcatgtcaatttcccatcatgaacaatctcaaagtctggtaccctgattatgtcattaatatgatggtagtgatgtcgcccaaaagatagtgaatgcgatcatactagttgcccttgacttctgtctcaagtgcacccatacctagaagg

SEQ ID NO: 11468 - DNA, 1117 bp, Zea mays
  Clone ID: MRT4577_110457C.1
aataaaaatgcccaagacgaaggtgcaccccaacgccgccgccgccgagccagtgctcacggtgagcaccgcctgcgcgcgtgcagaccccggcgaggaggagccgcccacggtgctgacggtgtggcgcaagtcgctgctcttcaactgcgacggcttcaccgtgtacgacgccaggggcgacctcgccttccgcgtcgactcctacgactccacgggccggcggcgcgccgaggtggtgctgatggacggcgcgggcaccccgctcctgaccgtgcgccgcaagaggaggctcggagtgctggccgagcactgggtcatctacgacggcgacgccgcagcggaggcgaaggagacgcccagcagccgcatcagcaggccgctgctctccgtgcgccgccacagggcgtcgtcgtcgtcgtcgaaggccaaggccaaggcactagcccacgtgacgcccctgccagcctcctcttcgtctttatcaggctatcaccgcgcctccgccgaggcgtcgtacgtgatggaggggtcgtacgggcggcgggcctgcgttgtgcgggaccgcgcgcacggggatgccgtggtggccgaggtcagccggaaggaggccgcggtgggggacgacgtgttccgcttggtggcggacccgcgcctcggcgccacgctggccatgggcctcgtcgtcgccctcgacgagatgttcgcgaggggccgctcgaccaactaattaagcgctaccatctcttcatatcaataaccacaccatgcaagtgttactcattcacctatcctcccggcagcgagtgcataaattgttttttcaagtaaagtacactagggggtccacaaacttgctacgcggtgccacttaaccctcaaacacaaaaaaccaagaaaacgggttctcaaactttgtcgatccatgcaaaaccattcaaagtcgagtttgtaaaactggatgccgacgtagtatgtcacgttggagcaacttgtggtctccaatttgaccaagttgttggcttggctttaatccaaaatggcttgtactatgtttctacaatgttttgtctctatgcattacagctgcatcagtccaaatagctggctttgatcc

SEQ ID NO: 11469 - DNA, 556 bp, Zea mays
  Clone ID: MRT4577_110458C.1
atgatacaacgcgacctgcaggaggtcagatcgtgatcggaagcttccataagcttccatcgggcttcgccgctcgccggtatggcgtatcctgcaaggggtcttcgtacgcacgacgcggcacttctcgcgctcgcctctgacgccgccgtcgcaggggaggtcttcttccaggagaagatcaacaatggtgttaaagcggaggatcaagccagagcgtaagaatgatagataacatgtgtgattgaaagacatcacacttgagcactacgcaatgtgaatggcaatgacgacaatatgcatgacaccgaggattacaggccgtatgggaataaaatagcataccctgagaccccatatcacgctaagatacaggaggtggaattatcggcgacaacacagcataacgatgaatgtcttgatgagaatgtccaggctgaagctatcgtaagagacttaaatgaagtggctgcttcaagcattaacatttctaaggatgatggatgtagatcggcagatgatgacacaaatgccatagatatacaggctgaccctg

SEQ ID NO: 11470 - DNA, 259 bp, Zea mays
  Clone ID: MRT4577_110459C.1
agggtggggaggattttaatacagggatggaacattgtaatgggtaaggtcttgagaattggacaggatgtgcccgagacagcacggattgggaaggctgccctctaggccccaggtgctgggacgggacactccaagcgggtacgaccatgacctggggacacaagcaaggtcaggaaactctgagtccccttttcaaccctcatggacgccatctagcactttctatggaagaacgtgtgctatttttttgaaacca

SEQ ID NO: 11471 - DNA, 285 bp, Zea mays
  Clone ID: MRT4577_11045C.1
gagtcattcttttggggtgcttggcaagtctgggcgtggtcttgctgaacattatggagtttctctcccaaacaaggcctaactgtttggtgaaatgcttgggacaaagtagccagcaagaatggagtcatggaacattggcaggagggttgcggcagcgacaactgatgtatcccttagacaatctggttttgacatgatgcaaataaatctgatggcacactgaatccggaacttgcacagattgtttggttaattacaagattatctcagtgttttggtttg

SEQ ID NO: 11472 - DNA, 484 bp, Zea mays
  Clone ID: MRT4577_110460C.1
ctactctttccctcgccgccgccgcctccgtcgcctcctcctcgggtgcgcacagtcgtccaccatgccgaagcagatccacgagatcaaggacttcctgctgacggcgcgccggaaggacgcgcggtcggtgcggatcaagaggaccaaggacgccgtcaagttcaaggtgcgctgctccaggtacctctacacgctctgcgtcttcgacgccgacaaggccaacaagctcaagcagtccctcccaccaggtttgagcgtccaggaggtttaagcatcaagccagacaatgccttttctagtagtgggaatgttctatccatcttgctttagtaactgttagcaggctctccttgtttacccccattaatagagttttgatgttccaagactggaatgtaatgttgggagctatgtggttgaacctgtgaggatatttgtgttattttcacttgctggagaaggagatcaattatcttatccg

SEQ ID NO: 11473 - DNA, 241 bp, Zea mays
  unsure (1)..(241): unsure at all n locations
  Clone ID: MRT4577_110461C.1
gcgacgctcccgcgacgcagcttggctcctagcagcggccgcccttnactaanttttctttttttttttttatacagggggggatttatggaaggttagggggttaccaccacggaccaccaaaagcatcctagaaagagataaccaggcctgccccaacaaaggagatccattccccgaccgggcccagagggcaggaagcctctacccggatcaagaccctgggaaacaatggtaccag

SEQ ID NO: 11474 - DNA, 1126 bp, Zea mays
  unsure (1)..(1126): unsure at all n locations
  Clone ID: MRT4577_110462C.1
cattgggtaccccacgcgtccgcgtggcgccaccacccaagtgagtgacccatcccctccatcggactctccactcccaccgtcccacgaccacgaataccgccgcccccggccctttcctcgtctcctcctcctcctcctttcaccgccaccatcgccgtcggtgcgcctcgcaggaggcgcgagaggtcggtcgaaaagcacagccatggcggcggtcaaggtggacaaggccaccaacgagctgctgctgggccccgactggaccctcaacatcgatatctgcgacgccgtcaactccgatcacgggcaaggaaaggaggtgattaaagctttgaaaaaacgtattcaacacaagaatgcaaatgttcagtttcttgctttgacgctattagagactctaataaagaactgtggggatcatgtacattatcaagttgtagagcgcaatatactggaggaaatgatgaagattgtgaagaaaaaggctgatatgcaagtgagggataagatcctgatgctcttagactcttggcaagatgcatttggagggcctggtggaaagcaccctcattattactgggcatatgctgaattgaagcgatctggtgttgaatttccaaagcggtcacctgatgctgcatcgatgtttatttctccggtcacacaaccagaatctttgccaacatatcttcaagcagggtatggaatgccagttgattcttcctcaaggcttgatgaggcaatgtcatcaaatggagctcctctgagcatctcagacttggaacgaatgctgggggctgtggaactattaaatgagatgttgagagctgtcaatccaaatgaaaaagatgctgccaatgatgaaataattacagaacttgtgacccaatgccggtcataccagaaaaagatcatgagttcagtaagcttagtaagggacgaggaactcttgggccaagctcttgatttaaacgatagattacagattctgcttgagaaacacgattcgatcgcatcgngttctccttcatctgctgacgtgataaacgtggtgtgtgaagtgccatcgggaacagcttcaaaccaaggaacaaatttccctccacaagctgcacttcgtaca

SEQ ID NO: 11475 - DNA, 339 bp, Zea mays
  Clone ID: MRT4577_110463C.1
caggacgtgggccgtgccgctgcggacgcgctgaaccgtggcggtcgacaggctcgaggacgactccaaggtggtagtccaactaagtgcgacgctcaagggtgcgccgtcctgtatgtggttggagtgaacatgacgtatggttgccataggtgagcggattacatactttagcacttactgcttggttataagatgcgtcatcatctaattcgtcagctggctcggttacccaatcgtgatcctgacatcgtcgtatcatatcaggaacgctgtcacatcgtcttgcgactaaggtcatgttggtcagttgctccagcgtcgagactgtggaaatga

SEQ ID NO: 11476 - DNA, 714 bp, Zea mays
  Clone ID: MRT4577_110464C.1
acactctctctcgccgtctgctcgctcgctcgtcccccaaatccctactccccctccccgaccgaaccccggcggcgtcgccggcgatggagtgcgtcatcggcgtggtcggcagcgacttcgcggtcgtggcggcggacacgtccgccgtgcagagcatcctcgtccacaagacggacgaggacaagatcatgctcctcgactcccacaagctcatgggcgcctccggcgagcccggcgaccgcgtgcagttcaccgagttcatccagaagaacctccacctctaccagttccgcaacaacatgccgctcagcaccgccgccaccgccaacttcacccgcggcgagctcgccaccgccctccgcaagaatccctactctgtaaacatcatacttgcagggtttgataaagacgctggtgcatcgatgtactacattgactacatcgcgacgctccacaagatcgacaagggagcattcgggtatgggtcgtacttctgtttgtcgctgatggacaagttgtaccgccctgacatgactgttgaggaagcggtggaccttgttgacaagtgcatcaaggagatcagactccggctggtcgtcgcgccccagaatttcgccatcaagatcgtggacaaggatggcgccagggactatgctaggcgtgacatcggaggtgacagtcctgcaacccgcaccgccacaatagcaacaa

SEQ ID NO: 11477 - DNA, 432 bp, Zea mays
  unsure (1)..(432): unsure at all n locations
  Clone ID: MRT4577_110465C.1
gccgggcgccgggccgatccccaggccnngggcgggcngaaacccccaccctctactgccgcccggcaggcgggtacntttccttcggcctgggtaaggggaggactacctcacattgtggtcgttgggcctggtcgacttggcaggtcggccggggggtggcaccttggtcttcccgcttgggggttttggcggcgggggttggggggttcggggagggggctgccggggtggcangcggtcattcaagtatgcgtgggtgcttgacaggctcagngctgagcgtgagagagntattacaattgatattgccctgtggaagttcgagaccaccaagtactacctgcactgttattgatgccccgggacaccgtgacttcatcaagaatatgatcactggcacttnccaggctgactgggctgttcttatca

SEQ ID NO: 11478 - DNA, 388 bp, Zea mays
  Clone ID: MRT4577_110466C.1
atgctcatcattaaccgtactccgccgccgacaacaccgtagtgtagtgtactgccttagagggttggggacagtagctctgctgccacgatggcgtacgctgcaggctgctgtggttgacgtcacccggacttagtaggcaaggtcgggatcgacggcccccggggctgatgcgcccaaggtgcagaatgcgcataacgagatatcggcccttaacgacaacgaactttccgctgcgaacaagacagcgtctcaccctccctacgttgaaatgattgtagagtcgatccctgccctgcttgagaggaagggcgcgagctcgatggacatctgtaagtacatggcagcgtgaagaatgcgcggtgaagctccccaccgatttccgcga

SEQ ID NO: 11479 - DNA, 529 bp, Zea mays
  Clone ID: MRT4577_110467C.1
cgacccacgcgtcagcggacgcgtgggcgtgccggccgcctccgctcatcgtcgtgcaccatgccaactccgagaagacgatcttgcaaggaaagcgcatgcaagaacgtcgtcacatatatagaggagtagcagccagcaggaggtggaatcgacggcttgatcccgagaccgagcgagaccagctgcaaaagctcctagcgcattggccgccggagtgggctgcagtgcaagtgtggatcgcatgcgaggaggatgcgagtgctggaggaggacctgtacccgtcgacgccggggaaggtgaaggtggagcgggcgggggcgatgagccgatacctgcaccgttgcttcgcgtccacggggaccatgttcctgtgggcgctcttcctggtggccatgacggccacgtacctgagcgtccactccatcgtggacacctcctcccgctacttcgcggcgtcgtggggcgggctgcactgggagcggcagatccgggcgtcggcgtcgccgcggcggccgctctagagga

SEQ ID NO: 11480 - DNA, 720 bp, Zea mays
  unsure (1)..(720): unsure at all n locations
  Clone ID: MRT4577_110468C.1
cattgggtacctcgaggccggccgggattttactccctctcctctgcttggtgtccaccaccgctcaacgagtcttgcgtttctcacctctactgaccacttctcattccgaattgcggatatccctctgtctattccctaccatgcagccatgtcgcctcacatcgaaggtgatcctgtctcgagccgctccaccaaacggcaacgacccacggaagcatcccaagagcctagcgcactcacaggtctcaccgcagccgggcaaccgtatactgcnctaggtctgccctcacaggaccgcgcacggacatcgcgcgcagcacgagtccgcgatccgagcagctcccgtgcgctacactcacctgccagtgactcagagatatcattagctagctcgagcgcttgttcgagcctggatcgaatcatgaccgcaacttgcactgactatgatacataccgtgactacgtgcctgcgtatgcatgccagaatcaaacgctcctgtgacgcactgaagcagctcatccacgtatctgctgctgcatgctactcactatctactagctagtgtagtaatgtactatatccatactctgtgtgaatcccgaaacaacgtcgaaaaccaaaacccaccaagatgagcttggtgacaaaaataaantccttgactacgcctggagctcctcctttagtgctgccttatcaacatgtaatctgcgcac

SEQ ID NO: 11481 - DNA, 498 bp, Zea mays
  Clone ID: MRT4577_110469C.1
atcccctcctcgccgtctgccttctgacccgtcatttcctcctctgccccttggcagttcaatctcacctccaccatgggtaaagagaactcccacatcaacattgtggttatatgacaggttgactctggcaagtcaaccaccacaggacacctgatactacagcttgcagggatctgacaagcgtgtgatcgagaggtatgacaaggacgctgctgagatgaacaagcgttccttcaagcactcatgggagctcgacaagctcatggttgaacgggagagaggtatcaccattgatatcattctgcggaatgatgacaccaccactcactactgcacgcacattgatgaccctggacaccgcgacttcatcgagaacatgaacactgtgacctcccaggctgactgtgctgtacttatcattgactccaccactgctggtcctgaggctggtatctccgatgatgaccagacccgagaacgtgctctccttgagct

SEQ ID NO: 11482 - DNA, 671 bp, Zea mays
  Clone ID: MRT4577_11046C.1
tttctcgatatatgttgaatccaatacacggttgcagaaaggtagaaaacccaaggaacatggacgtatcagggactcctcatggtagtagatctcctgctcgccgccaatttccttgtcatctcagaagcaaataacgaccagcaaccccaaatgaggaatcaggtcgtggataacaaattccagctgctctactaccgcggcaactacgcgctctatgtgcgacgcgcatagatacctccgcgcgcaagaagataaccccggcgtgcataaacaagctgaagaggctacactggaagcaggcgcctccgctctgcaggagtgaacagcatcgcaacactgcgcgctcacattatggccgcgctgctcgagtgcctgcctcgctatttacatgatttgcccgaaaaaccatgaaacacctggtgcacaccgagggcctcaaatgaattctgatcagtaaatgacctacgatgacgtctatacgacgactcttatcttagatacctagtttccactacttccgtgtcctctatatgagacctagccctactatacgtcgtcagcggcccttctggcctttatttgcataataagatgcacctatatgagcgtgatatatgtacttcgtggtgacttaagtactgcgtggtgactgtactcaatagtaatta

SEQ ID NO: 11483 - DNA, 432 bp, Zea mays
  Clone ID: MRT4577_110470C.1
cgggggaaatcccgacccaggcctttgctttggaaaatcccgaaacagggaacaacaggagggggacgtacgtacaaaaacacgccgttgttaaaaggcccccttctagaccgacgatcgaacgcttaaacacacgacgacgatacaattgggcataaaaaaccggccacacccttgtttttcatgcatggacccatggactggtcgcaacccaatcaacgggaaccccagccggccgttgggcaaacaaataaagggcagggcggggggcaaaaacaggggggggggaagccccggaacctgcccccggggaacccctcggtcctgcaaactttggcccaattggaccgggggaggcaggggccccgaaacctggggctttggaactggaaagttcgggcctccgccaccgacaccggcccaacctttggg

SEQ ID NO: 11484 - DNA, 615 bp, Zea mays
  Clone ID: MRT4577_110471C.1
tcgaggacataaagaaccatggcaaccctacgagtcataagccagagctagtactgaacaacttcactacacgccttggtcatcgtgttggaaggatgatccagtatctcttccctcaagaccccaatttccgcgggcggcgtgttgtgaccttccacaaccagcgagactacatattattccgccatcacagggcctggtaaaactacacagctagcattttaacttcatgtacatcttcgagacaaaagaaaagaaggttgcttcgaaggacaagaagaaggccaagacatctgaaagcaagagcggatctgagaagcaagtgatttgtcgccttcaggtcgcagcctgcagaaacggtcgtcgacggcggctgagcggagattatccaagtgacgccctaccagcagaaaccatggcagcaaacgacccgatatataatgcagctgagcctgatgagctaagaatgagaagagaccaccggacgccggcctcgatcgacatgcatggtgtcgagcatggcctacttacctactgcggtactgctactgcacgtagcgcgacggcaccaccactggacagcaggagccctgggcgggacgtacgtacgtacgc

SEQ ID NO: 11485 - DNA, 398 bp, Zea mays
  Clone ID: MRT4577_110472C.1
atcttcttcaccctctttggcctccgagttggtcatctacaccgacactaattgggtcgattgtctgacacgtgtcggtccatctcaggctacaccgtgttcttaggcaccaacctcttctcctggtcgtcgaagcactagcttgttgtctcccgctctagcactaagattgagtatcacacaatggccaacggtgtgactaaggcgttctggctccattaactgctctaggagcttcatagccctctcgctcgcgccaccctcgtctactgcgacaatgttagcatgatctacctctaccaatctgcaccgacgcacgaagaatgtggagatcgacctccactttgtccgtgagcatgtcgctgttggcgatgttcgcagcctccatgtcccaacca

SEQ ID NO: 11486 - DNA, 370 bp, Zea mays
  unsure (1)..(370): unsure at all n locations
  Clone ID: MRT4577_110473C.1
aagaatcttagttgtttttgtttattttttgcactggtgtctttcatttccagtagatgctaggatctggaaatcaagtgaagggtaggatctatactacctgaggtgaattttcttgagaggagtatggggaagacgaaggggtggagagatagagagagagagatgctagctagattgattcaatcctggatgaaagaacaaatgctcttgcgaacgagtgaagctgccagcatgatctagctctgatttggttggcaccatattagcaggcgtccacgcacagctagactagagtggcctcgcgcgctctcgtntggtctgtgtctcgctctgtacgtacctgcaaattcgtgttagatcatgcatg

SEQ ID NO: 11487 - DNA, 263 bp, Zea mays
  Clone ID: MRT4577_110474C.1
ctggatacttccgatgcctgttccgctgtttctcttctcccgtgtcttctcccgtttacctgccgtgtgcgactactaggaggtcgccgccgccgtacgctcagcttctctgcgccggcgacaagcacccaccacaccaggattgtgtttattggatttgagtgtctgattgtgtcagtcaaatttgagttcatcacatccagcccccgcaaccccgtccggtggcttccccatgcgctgtgtggcactacggtagccgaccc

SEQ ID NO: 11488 - DNA, 309 bp, Zea mays
  unsure (1)..(309): unsure at all n locations
  Clone ID: MRT4577_110475C.1
agnagggggggaggaccgnnanaacanaagnaagnacgaggancgaaccgacagggcgcaccgaacaggggcacgcacaccccacacacgcagcgaaggagcgaacgccgcagccgagaacaagaaaaggcccgacagggccgaggagaagaagctttttcaaaaggggggggacccccagggcgagcccaacgcgggcagcgcagccgcacagcgccggaggagaagggacaggccaacgagcacccggacgcggaccaaaaggaacaagagcgagcaagcgacacaggcgccaaccagaagcacaag

SEQ ID NO: 11489 - DNA, 204 bp, Zea mays
  Clone ID: MRT4577_110476C.1
acgagacgcccctcgcgctccgcgccatagggacgccattccatctcccggcgggataacccagtggtgctcgcagaacgatgccgggagttacgtcgctagccatgtgccaagcggatgcaccgtgccaatggacgtagcatggagctccaagaacaactgcccacagaaggatcgccgagctccgctacacggcgaatggag

SEQ ID NO: 11490 - DNA, 1954 bp, Zea mays
  Clone ID: MRT4577_110477C.1
cccggccgcggtggaaccgagaccaagaccaccagcaggactcgcgaggagagcgcgcccggaaagaaaaaaaaaccctagccccgcccgggcctccgcctcgcgatgtcttgcacggtggccatcccgagctcgccagtcttctcgccctcacgccgcccactctcctgcaaggccgcctccgcctcaccggagcccaccgtccccgcctctaccgcggcgcccgcgcccgccgccgccgccggctcgccgctccgccccttcgcgctccgcgcgctgctgcgggaggaggtctccccgtctccgccgccccagccgacctccgccgcagcggtggctttggtaccgagcggggccgcgctgaagcggcggcgaccgacgccgcttgtcgtgccggcgtccggcgccgcggcagctgctgctgcggcggcggcggtggccgctgtggaggcggatccgaggaacgaggtggaggaggaaggggaggagttcgcagcgtactgccggaggggaaagggaaggagaagggtggaaatggaggaccggcatgtggccaaggtcgctctcggcggggacccccaagtggcactgtttggtgtgttcgatggccacggcgggaaaaacgcggcagagttcgccgcggagaacatgcccaagtttatggccgaggagttgacgaaggtaaacggcggagagatcgaaggagcggtgaagaggggttacctcaagacggacgaggagttcctcaagagggacgagagcgggggcgcgtgctgcgtcacagccgtcctccaaaagggtggactggtcgtctccaacgctggagactgccgtgcggtgctcagccgagcagggaaggcagaggcgctcacctctgaccaccgggcgtccagggaggacgagaaggaaaggattgagaatttgggtggatttgtggtgaattaccgtggaacatggcgagtccagggctccctggcagtgtctaggggcattggggatggacacctaaagcagtgggttgtggctgacccagacaccacgacgctcctggttgaccagcagtgcgagttcttgatacttgcttctgatggcctctgggataagatcgacaatcaggaggcggtagaccttgcacgacctctctgcatcaacaatgacaagacctctcgcatggctgcctgcaggatgctcaccgagacatcgatttccaggggctcgactgatgatatcagtgtcgtgatcgtgcagttgcagaaattttcaagctcgtaacctagttggagaagctggaacaaaactctagccagtagcactaacagactggtgataggtagacatgatatgttacttcgctggcgaaagttttcatgagtcagcgctatttggaggggattttaacattcattctttggtgtagagccattcgtcttattattacatcatttaattcattcttggtaagtactgaaataaggggtgatatctcgcttcatgatattttttcactgttagggctagttttggaacactgttttcctaagcgattcggtgaattgcctctgtatattatattcatagattaaaacttaccgtgccttttgaatttattgtcgattctagcaaaaagaaagaatactagtagctttgcgcctgaaattgaactgagcctttttgtgtgggaattttaattattaagcatgtactaggaatctaaactagttcagtcttaatttaagaaaaataaggtgcgtagtgtgcttataatatttagtgtgccgattttatgtgattttgaatttattgacgctcctctttaaactggcacgaaacatgcaatgttttttgagctttcttgtctaaagcacgattggctcagactgtgttcttattactcgtatttatatttgtttcctttttttttgtttgcttcagcatgaaacccgtgtttagaact

SEQ ID NO: 11491 - DNA, 532 bp, Zea mays
  Clone ID: MRT4577_110478C.1
ctggccgggatgttcagattcaggaaccatgcaaatggactgggctgtacggttctctggatttgcttgtccttctgtttatagttatctacctcagtgtggtttccttaaaaaaaaaaaaaaaaaaaaaaaaaaaaaaaaaaaaaaaaaaaagaaaactaaaaacaaggaacaaaaagcacagctatgacgtaaacatgaacaatagctgacccctgggcgaaaataaagaggggggcgcccctgaccccacattcttgcccctttcaaggggggataagcccccgctgcctaaagagagggctaacgcgcgttcctggggagaagtttactgcctgatatttaccccgaaaacctggcgcgccgccttcaataatgaacccggcggcgcccaggggggggcgccctcccgattaagcgcgttggcgctttctccctgtttgcctcggggaacccggtcgcccccctgcgtttagcggaatcccccccccccggggcggggggtctggtcttttggagccctttccctttt

SEQ ID NO: 11492 - DNA, 287 bp, Zea mays
  Clone ID: MRT4577_110479C.1
cggcttggtcctctgatcggcgtgtttgcccctgcaaagcccgcccagtctccatttttgtttcccagcccggatctccctgctcgccttgctcctccggcgccgcggatttctgctcgcttggccggccatggtggctgttcatgcctactggcggtggacggttctggtcccggccaccgtcgcgcccagggaaatggtgcgcattcctgtgcccggtcttcttttccgtcgcgtcggtctgtgctctgtcctggccgtcttctctgcctacgatctgtggcgct

SEQ ID NO: 11493 - DNA, 848 bp, Zea mays
  unsure (1)..(848): unsure at all n locations
  Clone ID: MRT4577_11047C.1
ccggccgggccgggatggcagtccctcttctgtcacgagccaagccgagcgcagcaccagcaaaagagagcgacgccgcctgcgccaaagctcggattcccgtctattttacccccgcccccgccgactcaccgtcgcaagatccatccgcaggtgtcggcggcccgcggcccgcgcgaaagatggcgcctttcccaggctccccgggggtttgtcatcgtttcttggcccctatctaaagcggcggtttccagggagctgccgtccccgcccaattcagctgaggtggcggcaagtgggtttagggctcgattcagtgtgttgggtcgtgtctgactctgacccgggtggggagcggtggttcttggctagttcttgagctggttgcggcgcttatccctcctcctggagttgttggattggcttgggggaagcagattcttgccaccgagggtccagcctagcgagctgctgcttcggttatcgtagaggagttttccttttgagttcggttggggggagagagatggtgctcttgcgttctctggattgagcattccgattggatttcggcgtttcgtgcggcttccagtccatggaggattggggctgtggaaccaggcgtggatgtgggtgctgttccagaagcacatactggcgtgggcgcacacggcggcgtgcggcagcagggagcgcctcgccttcttggtcgatcgccactggccggccgtgtcccggggctgcgccacctcctcgcgcctcacgctcgccgcactgcggnaatggcgtgggtgtatggcgcgcgnggtgctggcggtggcgagcctcggccctgccgccgtcttcgt

SEQ ID NO: 11494 - DNA, 646 bp, Zea mays
  unsure (1)..(646): unsure at all n locations
  Clone ID: MRT4577_110480C.1
acaaaacaccagcggactcgcgaggagagcgcacccggnaaagaaaaaaaaaccctaccccgcccgggcctccgcctcgcgatgtcttgcacggtggccatcccgagctcgccagtcttctcgccctcacgccgcccactctcctgcaaggccgcctccgcctgaggggagcccaccgtccccgcggcagctgctgctgcggcggcggcggtggccgctgtggaggcggatccgaggaacgaggtggaggaggaaggggaggagttcgcagcgtactgccggaggggaaagggaaggagaagggtggaaatggaggaccggcatgtggccaaggtcgctctcggcggggacccctaagtggcactgtttggtgtgttcgatggccacggcgggaaaaacgcggcagagttcgccgcggagaacatgcccaagtttatggccgaggagttgacgaaggtaaacggcggagagatcgaaggagcggtgaagaggggttacctcaagacggacgaggagttcctcaagagggacgagagcgggggcgcgtgctgcgtcacagccgtcctccaaaagggtggactggtcgtctccaacgctggagactgccgtgcggtgctcanccgagcagggaaggcagaggcgctca

SEQ ID NO: 11495 - DNA, 400 bp, Zea mays
  Clone ID: MRT4577_110482C.1
gcgctcggaattcggctcgaggtttcggccaacaattttgtctgctgagtcagcggacatatcgggggcgcttataaaattggtgcacgtggtgcatatattaaattatacaccactgatttgagatctaacgtctgtaggggatcatttaatttacaaataacacctgccagggtctcaccactacacaccaccactttggagggtgcttttagtaaaatatgccaaacacctcgaaacgttcgatctacaatgagaggggatgatttaatatgtgcatcatgtgcaccaaggcttccatgtgcattagatatggtctcgctgagtaatgcacctggggcgaataaataaagcactcagttgtgatcgtgccatgagagctgggcctgcttggaatgcg

SEQ ID NO: 11496 - DNA, 255 bp, Zea mays
  Clone ID: MRT4577_110483C.1
ggataagcagattctgatatcctgtactgttcccaatcggatttacgggcactatgctaccgttcattgaatcggctacgggaaggatcgctatctgcccaagaaatcttggagcaccaaagactctgtgcatcacccattcagtggcagcattggtcagggttctgtgctcaaaggtatgaggaccagggacttatgaccgtgcatgtgggtagaagttgctgatgtgcatggcacgcctgattatgcttatag

SEQ ID NO: 11497 - DNA, 387 bp, Zea mays
  Clone ID: MRT4577_110484C.1
cgaccggcagagcacttcgtcgaacagtgcgccctgccgtccctggggtcactttgcctgtctggagggcagattgaggaagaggcatccatcaacctcaatgctatcaacaagtgtcccctgcggaagccatgggccttgactttctcctatggccgagccctgcaggcctctgctctaaaggcttggggtgggaagaaggagaacctgaaggcagcccaggaggagtacatcaagcgagccctggccaacagcctcgcttgtcaaggaaagtacactccaagtggccagtactggagccgcagccagtgaatctctcttcatctctaaccatgcctactaaccagagctgatctaaggctgctccatcgacactccaggcccctg

SEQ ID NO: 11498 - DNA, 341 bp, Zea mays
  Clone ID: MRT4577_110485C.1
aatgtataggaaccacgcccactgacacgggagctccaaggcagacctcctctatacggcgaccgaacttcatgagacagggggacggtccatagcggcgcgaacgccataacgttggtcgtaccgaacttaaagcacaggcaccacatgctagcttggatagttacttaaatacgtacaaggataatacggatcacggttgctaacagccactgactctgaatccaaactcgaacaccaactgtgtgaatgcactaatcccgtcgtacgaggtggaatcactcagggggagcggtcctcttgacagcgaaataaagctcgctcattacggtttattccct

SEQ ID NO: 11499 - DNA, 344 bp, Zea mays
  Clone ID: MRT4577_110486C.1
ggcgctattcagctgattacattagcatggaatcaacgatgacaaatacttctcccatacctccagctatgcaaaatgctaccagaaagaaaaagggctcccattgccaggggagccttagtattcatactaatgaaccatcacaccataacgaggcctaagccgctacaaaactgcccaaaacattgcataaataaaattctcatattggccctgaccacgacttttacattgaagccccaccgggcttatcactcctgccgcacattattttggaaaaaccaagccttaccagatcggcccaaccaccggtcatttagatctggttgcattaaaatgatcac

SEQ ID NO: 11500 - DNA, 747 bp, Zea mays
  unsure (1)..(747): unsure at all n locations
  Clone ID: MRT4577_110487C.1
gccgttcctgtcgcagcccccgcagccccgcggccgttgaccccgccgtctctctcgcctcgccgtctctctcgccccgcaggcgttccactctacatggaaggtgagccgccggcgccgaaatcgacggaatcacatcccgtgcatccccatctctcgagctccacatggaaggccctcgccaaagccgctcgatctgctccctgaaagccggcgccccgctctcccctgctctcgcgctctacatggaaggagttgctggagcccaaatcgacggaatcactgctcgcggacggcggcctcgatccgcgctctcccctgctctcgcgctctacatggaaggaggtgacagcgcccaaatcgacggaatcaaacttcgccgccgcggttacagatggccgcgctatccatgggatctctccacagccgcagtacggaggcactccgctcagctcgccccccaagctcaacctgttccaccaaactcgcccccagttccaccacttcccgtcgccgcaggttggcggcgccgcgcccggcgacctgccaatcttggagaacctgatgccgatgggccatctagaccagttcctcgctgacccaggcttcgccaagcgcacggcgcgactgtccgatttcgacggccgccacggtgagtggtaatgggnggggggggcgcgtcccgggacagtttggcctcccggacgccggccccatcggcgcattgaaggagctggagctcgggaa

SEQ ID NO: 11501 - DNA, 148 bp, Zea mays
  Clone ID: MRT4577_110488C.1
gatactgtgaccttgagctacgatgaatataaaatgcccaactactgatatgcgaccctgctagccacttgtttacaataaggccattagcgcctggctcaacgagcaggaagcaataaattatctggagaacaaagtgaacgatgac

SEQ ID NO: 11502 - DNA, 551 bp, Zea mays
  Clone ID: MRT4577_110489C.1
agccccccacttgaaaaagcccccctgtttaaattttaaactttgaagggccctttaaaaaaagcactggaacgcaaaaagttacccaagctcccccaaaaagggggcaaaaaaatttcgaaattggggggagttaaaaaaaactttaacttttattgccccaccaggccaaagggccttattttcccccaaaaactaaaaaaaaaacccgggttttggaactttcaaatttcaaaacaaaaacaggggggccccaatctggggccaaaaaggaaaaaaacctggggccttcctgaaacctgaaacttatttgggaaagaagggcggaaggaaatcccattttttgccaaagacccggccccgggtgtaaaggaaatttttcatcccgggcaattaaaaaacggggccctaggaaaaaacaccaatggggtaattaaggggggggcccggggggtcccgccccaagaaaaaacttggggacagggcccaaaatttttgggggaattttttaaacttttggcaccactttaattttttggggggggggaaaa

SEQ ID NO: 11503 - DNA, 622 bp, Zea mays
  Clone ID: MRT4577_110490C.1
ttcactttctaggaccaggatcgcaagttctgtgcctgtgtctctggtcccctcccctgctgtgcgtccaatcctcttccatgcttatcctctcgctgttctttccatcgctcgtacacgcgcccgcttctcgcaggcaaggaaccgtggcgtcggcagcggacggacatgatgcacgccaagtcagattcagacgtgaccagactgccggcgtctgcaccgccgggacctgcgaaccggggcgatctggacggcaacgacggatactaccatcagagtccgtctggtgagtcccaacacgacgggtatcagtattcgtcaattgaggccactgcggtctactactgccccaacgactcgactactaacccctcctacagccgcaactcttgctcctcctccgtcactggattatccaggaaccttcgcacgggagcctccgctccaaggaaggcgctcaacaacaagggtgggactgagtgtacctccatcgcacgaggacggccgtacaactacctcgccggcaatagctctctctcgcgccgctgagagatgatactcgagtttctcaccttcgtctgcatcttcaccgtctactgcctcatcatctggggcggcaccc

SEQ ID NO: 11504 - DNA, 264 bp, Zea mays
  Clone ID: MRT4577_110491C.1
tctgggacccaggggcccgagccgcccacgcgactttttagctcttttatggtgaaaaaggagtttatcataaggttcttataaagtcatcattgtgagtggatacattatctattctcataccttcatcacttagcaatataaaatcccgtatgaagatcacttatttctttcctttaagccaaggttgagatttgcccgtccaatttgcatttacatacctgggttacccttactcagttttcgctttaaaaaagacttgtg

SEQ ID NO: 11505 - DNA, 782 bp, Zea mays
  Clone ID: MRT4577_110492C.1
ttattctcattaacatgtatctagtattccgtatctatctcatcttgatagattctatcttaccttgggacattcacctcatacaactagttaccccagtcttgacataaaacatctggtcaagccccgccaaaggatcttcagtacataaccaactattagcttattcattttgcctaccaaatgattcccttgcaaaactatcttaccatatgctcctaacttagatggtcaataccaggaagggaggaggaattgatctacctgccaatccatataaccgaagggtgcttagacaacaacaacaagcggagatgaatcccccaaatcctccaccagtcggtgctgatccagttatctcagcccagatgcaaataatgcagcaaatggcggacactatggcagacatgcacgctcagatgcgacaggagcgtcaagagatgcgccaagaaagagaggacatacgtcgggagatgcaccaagagcgggaggagatacgtcaagagagaagggcgcaacagcaacagcaacaagcacccctgcctccacctccaccaccagctccatccagggataagcaccgggagtttatgagtcacaaaccaccaaccttctctaactccgcggacccactacaagcagacgactggttaaagtctgtagagaagatgctcaacatagctcagtgctcggacagagagaaagtgctctacgcatctggtcgtcttactggtcaagctgcggattggtaggatgcatactgcgccgcacatgctgccgtc

SEQ ID NO: 11506 - DNA, 1376 bp, Zea mays
  Clone ID: MRT4577_110493C.1
cccagcgtccgcgcagcccgccgcgacccgcgcatcctcagtcctcatccgccactccgtcgaacgcccctgcgcacgctccagctgctatgctcctccgcccgcgcccctccttcttccgagccgtcgtgccgccgccgctcacccgtgcctgtgtcccctcccgtcgcacgctttcagcttctgcagaggcgggaacagcctccccgaaggatgcagcgtcagcgccggttccggcggccacgcgcaagaaccccaggaaggccgggtcgccacctatggggatcgtgaagacggcgctgtttctgccgcccggggtggagcgggatgcgttggtgcccgcggacatggtcataccggggtcgaacatcgtggtcggtccctacgcaggggacgcgagggtgaagggtgctgagttcgtcaagagcagcgcgcgcgcacgggactgccccaatgacgaccggcccgagttcgccgtccttggccggtccaacgttggcaagtcctcgctcatcaacgccctcacccgccgcaaggaagccgcgctcacttccaaaaagcctgggaagacccaaacaatcaatcactttttggttaataagagttggtaccttgtggatttgcctggttatgggtttgcagctgcatcccaatcagctcgaatggactggtcttcatttaccaagggttacttcttgaacagagataccttggttggcgtacttcttcttattgatgccagtattccacctcagaaaattgatctagactgtgctaactggctcggtcgtaacaatattggattgacgtttgtgttcaccaagtgcgacaaagtgaagaaaggtaaaggagggcggcctgacgagaacatcaaggagttccatgaaacaatcagcgggctttatccagatccaccgccatggatcatgacaagcagcgttaccggattaggccgcgacgggctactcctccatatgtcgcagctgaggaactactgggataatgaagcagtctaggtggagctacatagatcaagtgccactagcaacggtagcagtacgtgtatgggaacagtcatatggcctaaactttcatcgatagatgtcgcttctcatggggcttcttgttcagttttgtttccgttttttttttgggggccttttgatgtatagttgaaatgcggttgctcctagtttctgtttcactcaccctgtacaatgcccagtctcagcgggagcttcatgacattgttactaagattcacaggtattgaagacagtacaaacaagttgcatcctcgtaaaacttatgaaactcccattatctatttccatttgtaatatgacatgtgagcttatttaatatacttgaatctc

SEQ ID NO: 11507 - DNA, 344 bp, Zea mays
  Clone ID: MRT4577_110494C.1
gcggatccccaaatcctccttcgggtcttgcattcaacgcaccccacgtgttaaagaaagggggccccgaggaaaatggggctcgcgttctggaagctctttaaccggctcttcgccaaaaaagagatgcggatccttatggtcgggctcgacgccgccgggaaaaccaccattctctacaagctcaagctcggcgagatcggtaccaccattcccaccattgggttcaatggtggaactggtgaggacaagaacattaacttcactgtctgggatgtcgggggtcaagacaagatcagacctctttggagggattactttcagaacacccaaggtcttatttt

SEQ ID NO: 11508 - DNA, 156 bp, Zea mays
  Clone ID: MRT4577_110495C.1
tgcttacgcgtgcagaggcacgggcttgcaggggctgctccactcgtggagggcacacctctcacggctgaacaagcttgctgccaacgactacccaccggcaaagaggctggaccacgagcttgggctcatcgatgctccccaaagacgtcagga

SEQ ID NO: 11509 - DNA, 622 bp, Zea mays
  Clone ID: MRT4577_110496C.1
cggccggggagcaccggcaggaggttaagcagttgccgcagcggccggcgtggagcgggcgcgtcaagaacccggatctaaaccgggcgcccagccccgagagctccgacgccgagtgacatgagaagcgagcgagcagcagcagcagccaccgcaaaggctcaacgtcaaagacgacgtccgttgttgcgacggcgcccagcgcagcatgccgctgtcgtcttcgttcgtatccacgtacgtacaacggcccagctgacccgcctgcctacccgtccgttctctgcgactggatggtcggtcggcgggcgtcgcggcgagggctttcggtacgtcgtggataagcacgaggggagggcgggcaggcgggaacggaggcggaggcggcggccccaagtggcggtctttccaaatgtcaaaaaggacagctgtaacagtgataagaaaaacaagtcatcatcctcgtctctccaccccccctatctctctctctctctatcctctcgcgcagtagcttgttctcgttccgagtagataagcagcaacgattagtactccactactatgatttttcaaatccaatccgcctaccccgaaaaaaaaaaaaaaaaaacccgcggcc

SEQ ID NO: 11510 - DNA, 286 bp, Zea mays
  Clone ID: MRT4577_110497C.1
ctcccccggaacaggggacaaaatacataaccaatccccggtttacggggaaacatgaacttgccaccccggtttttcttgaggggggggccccaagagggggaaagcccgccctttaaaaaggaaattctacttggttttttcacaaacaaacactttttgaaaaacgggggggcggggggggtccactttggagaccctcgccgcccctccgggggattaaaggggcttaacgggccggtatccacgccccgggctcccccttttttggcccccaaaactaacc

SEQ ID NO: 11511 - DNA, 389 bp, Zea mays
  Clone ID: MRT4577_110498C.1
aaaaaagagggggacccgcgcggggggggggaggggttgttaatgacaaaaccgggggggggcccaaaaaagggggggcaaagttaaaaatggcccttttccccgggggtttacttataacccctcaaaaagggggggcgtggggaaaaaaaaaaaaaccccttttttttttccccacccccctaaaatgtttttccaggggcaagcctagaaacattattgccattgccctgagaaaaaccaggggtgggccccgcctttgcccctgaaaaaccaggggcccgtttttggaattgccccccaagcccccccaggttgtttaggttgtcagggcccacctggtttataatggccggaagcaaatcttgaagcttttttgggtggggggt

SEQ ID NO: 11512 - DNA, 376 bp, Zea mays
  unsure (1)..(376): unsure at all n locations
  Clone ID: MRT4577_110499C.1
agagtaaatcgtgggtctccattttgtctttgataaaaaccgnacatttttgtcatcaatctcctatgcattaacaaaataagtctttctatgcttcacagaaaaacataatactcgtcaaactataacaggatcttgataaatacgtctaattcctgcataatgtgtcctaacaatggatcctcttcaccacaattgttcatcgcatgaaatgacctcaaacaccggcctttacaacgggatggtcgacgaggggctacatgcacaggattctgggctgcccagaaatagacattgtcatgtgcaaagtgaaccggatatcatcataacccgtgaactaaactcattttaactaaacagcactcaactaagacta

SEQ ID NO: 11513 - DNA, 408 bp, Zea mays
  unsure (1)..(408): unsure at all n locations
  Clone ID: MRT4577_11049C.1
gcgtctcgatcgggttagtacctggcagtcatccatctggggaggtatctcatccttgggtnncccgtgaatgggtnncagcgatagtggaccgatnngtgccatcgtacatcttcatctggcttccatcaacttactatctgcactnatattgcagttggaatgctcatcangtgtctattttaatctggcttcctttttttccatcagctcagcagattnnagaatagatcccttctancctttttcaagctgaaagggtcagtanttgaaatatagaaaagtaggttatgctgaagtgatcaactgttggcatantgtcctcactnnttaatggggcaatatcttctttgtaacccggtttgcgaacccttattatgccttatatggaataccattgatgggttt

SEQ ID NO: 11514 - DNA, 815 bp, Zea mays
  Clone ID: MRT4577_1104C.1
attggccccatccacctcgctgtcttcttcttccagttccccctcgccttctcccccgcctgatcggagtctcagccgcggcagccatggcgaagacctaccccgtcgtcagcgccgagtaccaggaggccgtcgagaaggccaggcaaaagctccgcgccctcatcgccgagaagaactgctccccgctcatgctccgcctcgcgtggcactcggctgggaccttcgacgtgtcgtccaagacaggcggcccgttcgggacgatgaagaagccggcggagcaggcgcacgccgccaacgcgggcctggacatcgccgtgcggatgctcgagcccatcaaggaggagatccccaccatctcctacgccgatctctaccagcttgcgggagttgtcgccgtggaggtgtccggtgggcccgtgatccccttccacccagggagggaggacaagcctcagcccccacctgagggtcgcctccctgatgctaccaagggttctgaccacctaaggcaagtcttcggcaagcagatgggcttgagtgatcaggatattgttgccctctctggtggccacaccctgggaaggtgccacaaggagaggtctggctttgagggaccctggacaaggaaccctttgaagtttgacaactcttacttcacggagcttctgagtggtgataaagagggacttcttcagcttccaagtgacaaaaccctgctgactgaccctgtcttccgccctcttgtggagaatatgctgcggatgagaaggctttctttgaggactacaggaggcacacctcaggctctcgga

SEQ ID NO: 11515 - DNA, 423 bp, Zea mays
  Clone ID: MRT4577_110500C.1
ttcacgcgtcgagacaagcctccgaccaagccttcggcccacgcgtccggtgaaacgctgagaagtattcaacatcggaatcttcttcccatcataactgcatgctcgagtatagatacaacgggaaattcttttaaggctttaatttatgagcttatgcctaatgggaacttggataaatggatacatcacaaagacaatgaggcacttccaaagcgtctaagcttagctcaaagaattgcagttgtcgtcaatgtagctgatgcattggattatttacaccacgactgtggaaggcccaccatccattgtgacttgaagccaagcaacatccttctcggtgacgatatgaatgctgtcttggcagattttggcattgcacatctttattctgattctcagtcaacttggaaaagttcattt

SEQ ID NO: 11516 - DNA, 614 bp, Zea mays
  Clone ID: MRT4577_110501C.1
ctcagccccagcgctccttccaccgccaccgcctccgcctcccgcagcggcaggatgcggcccttggagaagagctggtccgcgtccatcatgggccggctgcccgccggcgagaactcgaagtccgcgtccgcgcgccccggcggcctcggcggcggcggctccagcgcgaagtcgctggagaaggacatccgcggcggctccatcagctgccggccgcggctgctccgggttgtacgtgtcaacacgtacgtgccatctaggactacacgtactccaaactgtcgagtgacgactgatcgacgaacagacgaagacgctagtagtgtgtgtgctagctgcaggaggccggtagcagcagcatgcagtgaagtgtgcgggttcggtcaagctcgccaagctatggacggaatggcttgggcagggtgcagccgtgcaactgtgcaagggatgttatataatagcagcagtggggaggccggctgcagtggaaggggaggagagtttgtgcaaacataattgcatgcgtggcgtgggtgcagtgaaacggccggtggcaattcaagcagccactcccgtaccaacttgttcttacggctagctactagtctact

SEQ ID NO: 11517 - DNA, 567 bp, Zea mays
  Clone ID: MRT4577_110502C.1
ggtacctcgaagccggccgggccggggattttccgacccagcctgctctcgcttatgccgggacggccgacctgctcgtatcaggccagcttctctgatatacttgcaagatctattcatgtatgtagagtccccacatcccgcgtggaccgagcaggcaccgaatcggtgtcacgttatcgcctgccgcctgcttctcagcagagatgcaccccagcgggacgctatgacgtttactacccaactctagcatagagcgcgagccatgactactataccaatgtttcatgcctccgaattcccacaaagagactgggtcctctctgactatcccttcggtgccgccacttcactgtaccaaattttagttgttggaatgaacatggaaaggtggaaagcaactgggatcacttctgcaacaatcatccttaaaggatactgtacgggagcaattcacacattgcagcgaattcctaccatatgtacaagacagacctcacattgctcacggaaatgggcatgcacacatataggttctctatctcttgggccagaatcctgccgaag

SEQ ID NO: 11518 - DNA, 285 bp, Zea mays
  unsure (1)..(285): unsure at all n locations
  Clone ID: MRT4577_110503C.1
nnnnnnnnnnnnnnnccaagcnggaagggggggggnagngnngcagaaggnggaccaaangannacncnnggncnnacannncccaaacggcaagccancnaacagcngcagcaganagaaacacngggggaccanaacganagagcgaaggganacacgnnaanacananccnangacccaaacanaacacncggganaaaacnacaagnngcagaaanccacacngancagangcgccnccgcagaacaacagngaanncagnngcacgcancaaagcgcacg

SEQ ID NO: 11519 - DNA, 255 bp, Zea mays
  Clone ID: MRT4577_110504C.1
cgcgagaccgcaagcacaccaaacccgcgttcatcgacggacgatctcgccggggagagagcgactgatatggaggcgagcggcagcggccggccggccgaggagctagggctgcttcgaacccccagatcgcgacgcaggcggagatggcggacgcccggttgccagtggcctaccagaaccagtgctgcgacctcctcatcacgttcaacatgagccaagtcgccgagttctacctcccctggaagtgccgag

SEQ ID NO: 11520 - DNA, 345 bp, Zea mays
  Clone ID: MRT4577_110505C.1
ggggtcggcgccgtcgccggcggcggtggtgagggagcgcgtggcggtgaagctccggggctacttcgacctcgccaaggaggagatggacaaggccgtgcgcgccgaggagtgggggctccccgacgacgccaccgcgcactaccgcaacgcgatgcgcgtcatgctcgaggcccaggccgcgcgcgtccctgatgccgtctcctccaggtgcgcccgcgttctcttcctcgcgcccgtcgcggctagggcttctggaatgattcgtgactgactagtgggtggtgccctgcggagcttgagaggcttgcagcgagagggggcaagtcagggtgtaccaagaga

SEQ ID NO: 11521 - DNA, 125 bp, Zea mays
  Clone ID: MRT4577_110506C.1
tctttttgttttgcacgtctacagaagcaaagaggcatttacctggactccaacggacaacgtgctgatccttgtttttggacgactcgagaaaagacttcctgtacgatgatatagtacgtttc

SEQ ID NO: 11522 - DNA, 1036 bp, Zea mays
  Clone ID: MRT4577_110507C.1
cattgggtacctcgagcccgggtccgcccaggcgtcgaagcagacccagggagaagtgaccaagtgtctcaagcaacctcccgtcctccccgccgccgcttcctcgtttctctcctccaatccacacccacccaccactctcctcttctcttctctcgaaaaaagaaccagctagcgagcaatccatatccccgccatgtccgcgtcgccggagttctacaagccagcgccgccggcgttctcgccgccgacgctcctcctgcacggggcaggggcggacgacagcgccgccgccgcgaccatgtggcaggaggatcaggactaccgctgccggacgccgacgggcggcgagagccaggtgaagccgccggggacgtgcccgccggcgccgcggaagccgcgggcgcccgcggcgtgccggaagcgcctgttcgaggtcgaagtgctcagcctgcggctggaggagctggagcagctcttctggcgcccgcgccccgcgcctccgccgccgccgcccgcccagaagaagaagcgccggagggtggcctgcacggggcccaacaagaagagcatctagatagctagggctagtagcttcgtgtactgtaggtgccagtagtggagatcgagtagcagcggtagctaggtgcagggccaagtggtcttggctggatgagatgagaggaggtgcatttcagtgcatgcatggtagtagggggtgttaggagtactgcgtttttttactgctgtactacagtctgctgttcctagatgctgttcactcgttcagttcagtgcatatatacgatgctagtgttgtgtccaaaaaaaaaaaaaaaactcttatcaacaagccctactaacgcctctcaaaaagcccatgccattttcgaattagaaaccagaaccagagctttgctctgtctgtctctgttcctctcgaagatgctctataaacttattttactaaacgttcatgtaaatcgcttttaacttcattggataatctgcttcgcgttaaaaaaaaaaaaaaaaa

SEQ ID NO: 11523 - DNA, 262 bp, Zea mays
  unsure (1)..(262): unsure at all n locations
  Clone ID: MRT4577_110508C.1
antntagaagatccagatttttttttttttcttgtcacgttttaccttttggttgggttacccttattttagggggggaaaacccaaaggggtttaaggggccggctttaatttccaatgccaaattttggggcgtttaacaaggtgttgttggggggaatcccccaaaatttccccgggcccaaacaaagggtttttaaaaacaaaaactgggtttgaaggccaaaaggattatgccaggaggttaagttttcttcttctt

SEQ ID NO: 11524 - DNA, 380 bp, Zea mays
  Clone ID: MRT4577_110509C.1
tttggacggccgcccactctatctccttcgggggacgatagcattgccaggtggcttaacccggcccactcccaggcctgctcaggcgtggagcaatgagacaccgaaactgccagaaccacaagctctacagagtgcataggaacgaaagatgttgaccacatccgtgaagctcccaacaccctgaagaaggaaatggcgaaatgcatggctttcacatactacaaacttgcagtaagctaccacggtttaggacagctagtccagttcatcacctccaccggtatcctctgccagtccagagtctacgccggctgcgtcagacatgtggagccccaaatacaggacataggcgactctggactccaatacgagaaacc

SEQ ID NO: 11525 - DNA, 2864 bp, Zea mays
  Clone ID: MRT4577_11050C.1
gcaaagcacctccgactcggagtcgcggcgagggccgagaaccttctcattcatcttcctcttccatccatcctgcctgcctgcttgcctccgtattccagctagatctccgggcagccgattggccgagaagtttgtggttgtggcggcggcggagagggaaacggggagcgggagggcggcgcggatgccactgctgcgccggcgccggcggggccggtgatgcccgccgtggcggtcgcttgaggccgccgtgcgtgggaggtggacgggggagcgaggcggtgcggaccgaggttgcgttgggttggattcgattgggctgcgtctgctgagagtaaggacaattggatcaatttaagtaggtctgggcacacaaatttgaactattaacgcattgggagtgcttgtgtgttagaggtctaggaggagctatgaggtactacttccgtcaggtccagcgtttggttggagatatggaaggaggagctctcttgtttatagatgacctcaactccaagtgacaaagcgaacagctgttgaacttcccgtctatttctgtttctttttgctggatttggagatggagatgaattcctctggcgaggaaactgtgataaaggtaagaaagccgtacacaataacgaagcagcgggagcggtggacagaggctgaacacaaacggttccttgaagccttgaaactttatggcagagcatggcagcgcatagaagagcatgttgggacaaagacagccgtgcagatcagaagtcacgctcaaaagttcttcactaagttggaaaaggaagctatgaacaatggtacttctccggggcaagcccatgacattgacatacctccaccacggcctaaaagaaagccaaacagtccatatcctcgaaaaagttgtctcagctccgagacacaaaccaaagaacttccaaatgacaagtcaacaaaaccaaatatgcccttgagcaatgggcatgtaaaaatggtaggcgatgcatctcttcagaattttcaaaggaaggagttgtctgaaaaaggaagtcgctcggaagttcttaatctcttccgtgatgccccatctgcatcattttcttcagttaacaaaagctcttcaaatcatggggcacccaggaggaccgaggcaagtaaaacagaaagccgagatatgtccatcatggaaaataattcttttaaccccaacacccaagaggatgtaaaggtgatcagtgatcaggaaatggaaaggcttaatggtatccagatcagatctaaatgtgaacattctcatgaggggtatttggacatctcaacgcaacaaatgaagctaatgccaaagtctgtggagacaacatatgtggatgaacaaactgcaagagcttcacacaccctagcagagagcaacgggacagctagcgttccagtgactgtacctgaaggaactcatcctgatcaaacaagtgatcaagtgggaatcaatggaagcatgaacccatgcatccatccaatggtttctgcagacccaaaaatttggtagtagtgccacaccacagacttttcctcataattatgctgcctttgctccaatgatgcagtgcaactgcaaccaagatacgtacagctgccaggctcgcagcatcatactggccagcagctgaaggtaacactcctattgatccgaatcaagaaaaccctgcagatggcgtccaaggaaggaacataggctctcctccaagcatggcttctattgtagcagctacagttgctgcagcatctgtatggtgggcaacacaaggtcttctccctttcttcgctccacccgtggcttttccatttgtaccagctcctagtgctgcctttcccacagttgatgttccacgaccttcagagaaagacagagattgcccagttgaaaatgcacagaatgaatgccaagaagctcgaaaacaggtacagttcgaaggtttaagagttgctgcttcttcagagtctgatgggagtggaaaaggcgaggtgtctctccatacggagttaaagctatctcctgcccagaatgctgatgccacacctaccacaggagctggcacaaatgatgcattcaggaataagaaaaagcaggatcgctcttcatgcggttctaacacaccttcaagtagtgatgtagatgcgggcaatgttcctgaggaggacaatgctaatgagaaggcgaagcaagcctcctgcagcaactcttcagctggtgacactaaccaccgcagatttagaagcaatggaagcacaagtgattcatggaaggaagtttccgaagagggtcgtctggctttcgatgcgctgttcagtagggaaaagcttccgcaaagcttttctcccccacaagcagtagactcgaaggaggttgccaaggaggaggaagatgaagtgaccacagtggcagttgacctcaacaagaatgccacaagcattgatcatgatgacctcgacacaatggatgagcccagggcttcctttcccaatgaattgtcgcacctgaagctgaaatcgcgccgtacaggcttcaaaccatacaagagatgttctgtggaagcgaaggaaaaccgggtgccgactagcgacatggttggtaccaagaggattcgtcttgatagcgaagcatccacataattgatttcttcaaagttatatttacatctaagctactataggacttcagatcttgcaatgcagtgcttcattaaaactcaatctgttgtgtgctgtattttaatgcttgtcaagcagcccgctagactgctttaaaaccttatctcgtagactctgatttaagcatcatgcaactatcaaacttttttttggtc

SEQ ID NO: 11526 - DNA, 414 bp, Zea mays
  Clone ID: MRT4577_110510C.1
gggtcgacccacccgtacggggtttccatctaaactgcgatcgtagactttacttttgccgttttatgcatgctgcgctagtgaacgggacggggccgtggtctattacgcatacgcgcacgcagagctcttttttcaccgggatcctatccttgcgcgctgtcgctggcgccctatagtggagatggacactgtgttcgcgttcctgagtggcacttgctacccttatcctgactacatgggcactttaggccgggaggaccgtaatatgatggtgctatgactacgcggctttggaagattactgtcatggccgtgaatcattatattgcttgacaccggttttttcgccacgggcactgtgatctttctatctggttcgtgtttacccctttcttcttcatccactttgca

SEQ ID NO: 11527 - DNA, 262 bp, Zea mays
  Clone ID: MRT4577_110511C.1
tgtcgtgttcatccgctccctgcgctgcgagcggacccagaagcaggtccgggggatctccatacacgagaagcttaacgggcccttcgactcgcgacgctacctcggcctgatgcgcgcccaccttaggccctagcccttcgaccgcccgctccgcgacgccttccgcgtcctcgacaaggaccgctccgtcaccatcagcgtctccgacctacggctcgtcctcacgtccataggagagaagctcgtggtgcactagttc

SEQ ID NO: 11528 - DNA, 476 bp, Zea mays
  Clone ID: MRT4577_110512C.1
aacccaacgacaaccttttatgaaaaacttttaacatgaataatctggttcgaaatcacgccccacaagccgaggaccggagaaattaagccccgtctcgacggggttaggggaacaacgggccccatagttacggttggttttggccaagaaaccccccaaaccatttttcatcatgggaaaaagcagggctcccccaaaagcaaatgatcggatccagggttagccccagtctttgccttttgggttttgggcctttaaggcccgggtcctggtgttttttgaagccctaattggtggagaagagtgggggggtaatagtttcacgggcagaaagcctgtcctgatgatcataacgcaaaagctggggggggaaatctagggcctaaggaaacattagggggtgggtggccggcattaaaaaactttgcccagggtttcctgttatgccttccaacaggggcttggagcggggg

SEQ ID NO: 11529 - DNA, 310 bp, Zea mays
  Clone ID: MRT4577_110513C.1
attatatgtttttttcaagaagccgatcaccagtacgatacactcgccgggttgaggcacccatggttcacccatggaatctatatgtaaaaatgccccctaacatgaacctgtgaccgcaggcccccaatagagtggtacttggcatcacaagcagctactgtccgaagtaagcgaccaatgggaacccctttgctggggattgaacattctggagaatctcgttgacgaccccactgctgtaacccacctccatttggttcgaatgaaaccatctgggccaagtaggcattcagaactgtcccagctt

SEQ ID NO: 11530 - DNA, 566 bp, Zea mays
  Clone ID: MRT4577_110514C.1
tttttttttttttttttggagaaaaaaaaatgaatagtccactagatttagctgagcgtagctagatgaaataaaccatctcatattatgagaaccgttagataaaaaaattgaaggaaacggcaggaaccattgaatgaacatgcatgcacacctgaagatggaggctatagaatgtcttgttcccaaaggtggagtaggttgatgagctgatgaggtgaaggcctgcgtcctccagcacctttatgcacttggagagagggagagccgtggctgccacattgctgtgcaggctgacctgaaccatgatctccgtgtcgttgaggcaagtagcagaaacaatgggagtagttacgatctcgctggtgttgagaactcccggcttgcagttggcgttggtcagctcccgcttcctcctctccaggttgtccacctgcttctgcagctccgggatgtacttgaggactcgggacacggtggtggggatgctcagcttcttggtgtggtcagcgtccgggaggagggagcggagcgaggagtaaaggtcgttgagctgcttccgtcgg

SEQ ID NO: 11531 - DNA, 438 bp, Zea mays
  Clone ID: MRT4577_110515C.1
cgtccgccacgcgtccgcggacgcgtgggttcttctactatgccgctagaaattgctcctgcaaaaccgaccgctgctggagacaacatgttttatggataaaaatccgatttttttgctgcgaaaaataatgttcttgtagcgaaattgtaagaggctggtttagatccgagtagagtagctagcaatgacaagagatgtgtacatagaaaagaagagaagtgttttttcttcccatccttagcagcagtcgtggttttgacagcagcaatgcatttccctgctgatcctctctttcttgccctataatgagaatagtaataatatataatccttgaacaccgaactaaccgaggaacgaattcgtaggcggggcctgtccaacttctacgcgggcaagtccaagtcgttcacgagcctggcggaggcggctgcgac

SEQ ID NO: 11532 - DNA, 615 bp, Zea mays
  unsure (1)..(615): unsure at all n locations
  Clone ID: MRT4577_110517C.1
attgttttattatgctatgcattttctagattacatgaatgattgaaaatggaaaaaaaataatcaaaaaaaaaaaaaaaaaaaaaaaaaaaaaaaaaaaaaaaaaaaaaatttgttctggctgatagggatgtcccctaagacttgtaacgtcatgttcgttcttgggaactatagcgagggaataaaactggttaatgttggatgttcaaaaaaaaaaaaaaaaaaaaaaaaaaaaaaaaaattttttttgggctgaaaggggggcccccaaaaacttgaaccgccatgttcgtttttgggaactttagggggggaaaaaaacgggttaaggtggggggtccaaaaaaaaaaaaaaaaaaaaaaaaaaaaaaaaaatttttttttttggttgagggggagcccccctaaaatttggaccgttttttttttttttggaaactttggggggggaaaaaaccgggttaaggggggcttcccaaaaaaaaaaaaaaaaaaaaaanaaanannttaaaatttttttggggtaaagggggcccccccaaaattgggggggggtttttttttttttgagaccaaggggagaaaaaaaaaccggttttgtgggggtctccc

SEQ ID NO: 11533 - DNA, 320 bp, Zea mays
  unsure (1)..(320): unsure at all n locations
  Clone ID: MRT4577_110518C.1
ccactccttccatatcataaactacttttcttacttatccttccgaatacacaatcaggaggctccacataacagcacgctatccaaacttaccttctcacacttacaacctattacatatatcatattanttataccttcattccaccatatgttctacactaattccctcacatcatatacaccatacctgaatactcactacaaccaactcacacactacatgcacacacagagcatattctcctttaatccttacacaattcattccacacaacatgtctcttctcctacaccatccgaaccacttccatactatc

SEQ ID NO: 11534 - DNA, 338 bp, Zea mays
  Clone ID: MRT4577_110519C.1
ccggccgggccgggctcacttcgcgcatctcccccctccctgcgcacagccgcacaccaccaacacctttcaccagacgccgccgccgccgccggcgacaccccccatacctgtgccgtcccgcgcgcgggcgccacatccgttcgagtctgttcatctccgcatgcacgctgcgacgcgggtcggacgccgcagttttgttgctgctcagggtctgcccacgcaccgcgacactggtcctttgctattgcaacgcgtgtagcgtctccgtctctccacgtcctcggccactacgactgcccgtgattagaatccagaccctaaagctcctcctcctc

SEQ ID NO: 11535 - DNA, 396 bp, Zea mays
  Clone ID: MRT4577_11051C.1
ggacaatggaaaacgttaattaaggcattactaaattagggggaattcacacggccattattgggggaggcccggggtatttaaagggatatatatttatttaaaggtctggggcaaggaaaggaaaaaggggctagcttatatattaaaaacccatggggggggtttgggcaacaatgtcaacaaaaaagcggacacgggtagggggaaaatccgggggaaccacggagccgaggggcaaaaccacaatgggggggtccgggttggccttgaggataacctttttggggtcctcaaagctaaacccgaccacctaagggcaaaacgttttggggcccgcggcgccgccggcgaactttggggagctaatggggtcaaaaactgccggaccagttg

SEQ ID NO: 11536 - DNA, 283 bp, Zea mays
  Clone ID: MRT4577_110520C.1
atacgatacaccggaccacctactctgcctgcctatttgttaactgtgcatggaataatactgaaagtgggtttcctgccgtccaatgcactgagatatgatgcccaaccaataaatgtacctatcataattattctacttccaaaccaaatttaaataactgacataataaccaaaaagcacaaaaccgatcatccttcacaacaaatacacagcctaaactggtacaatgatacacgccatgtaacaatgcattaaccccactacatgtacagtctacaca

SEQ ID NO: 11537 - DNA, 329 bp, Zea mays
  Clone ID: MRT4577_110521C.1
gccggccggtacagggatgaacatcaatatcaacaaaagctaccacaagaataccaacctcagcatcaacgtcctagtccgttacaaaaattgataaaaaaagccccaacaaatgaaaagtcatctagtgtattttatagattagcacagactcccactagatcttccaaagctaaaataacataccgacatagtagtggtagtgtagaagagctaaaaatgaaatgggaaccagtagagaaaagaccacaaagtgcaataatgagtcactttatttaataaaatatttttttattactgttcaaaaaaaaaaaaaaaaaagggcccta

SEQ ID NO: 11538 - DNA, 108 bp, Zea mays
  unsure (1)..(108): unsure at all n locations
  Clone ID: MRT4577_110522C.1
gtccctcatgcctcnncggtggagttgtcgctagcttttcccgagtatggaaaagatttgtctgtgaaacacacacttggatgtctagattgcanggtagttttcaaa

SEQ ID NO: 11539 - DNA, 107 bp, Zea mays
  Clone ID: MRT4577_110523C.1
ggacagttcttctcccacttcaccatcaggaagttcgccgacgactagaggaagctggtggacgggggttattgacggatcgttcctccccttgtccgactgcgcag

SEQ ID NO: 11540 - DNA, 609 bp, Zea mays
  unsure (1)..(609): unsure at all n locations
  Clone ID: MRT4577_110524C.1
ggtgtttttttttttttttttttttgcaatccatagctagtctctcttcatatatatatttgataaatataatgtaccttattacaccagccgatacgccaagaacgtaggtgtatataaagaagaaacaagacctgtatggagtaaaacagtgtgaattctttcaaactcgacaatccctctcttttcccaactacagactgatgttagttaagtacaattcgtcatgcatcatatacccggttttttattatcctctcggtgtcggcagctgccagatgcctaatgccatgttccctcaaccaattcttatctttaaacgccccctctctaagctgctgttcgtcaatcttcagtaacctcaatccctcggacagtcgagggaagaagccttcaggtctcagacaccatgctgaaaaaatagcgaacaaaacgctgaggtcgccctgtagcctctccactccatcgctgctaacctttgtgccgcttgtgaaaatgccggcgaaaagcagctggtctaccccgcttgccacacctctncatacggtcacaaaatcaaccgtatttaggccaccttgcagcttggatagttgctcttgcatgtagtct

SEQ ID NO: 11541 - DNA, 498 bp, Zea mays
  unsure (1)..(498): unsure at all n locations
  Clone ID: MRT4577_110525C.1
tttaacacnnaacaccgcactcacaactactccagcggggaatctcgtnccagcccgcgagcccgggagcagtaggtagatatttgtcgcnnaggggaacgggacggacgcccgtcgacggatagcgagcgacggtcgcgtcacccagcnnggagtaccaccctatcanatctctccnatcaagcgccnnntccacggcttgcaccaaattctaagaagaagcgcacctcnnaacgcctattaagcgagtatcacgcgaacgtttgcaccagannaggccatgggcacccaacggacccgtcaggaattcgatgtgaagcttcaaccaagcacatnnctggagcagcgggatcacggaagcgtgctcgcggagggttcgtgtgaaggatctgcccgcaagaaggaaccgatgaggaggatgcccaaggaggaacctctactcccttgtcaaccgtcgccggagatctcctgccgaggggcttgaaaagggctggggac

SEQ ID NO: 11542 - DNA, 301 bp, Zea mays
  unsure (1)..(301): unsure at all n locations
  Clone ID: MRT4577_110526C.1
cggacgcgtagactgacacgtgggcttactctattgctangatcccatctctgtggttgttttttacaacattattgacagcnccaccaaccttgactggtacaagggcccaaccctacttgaggctttggacttgatcaatgagcctaagaggccttcaaacaagcccctgcgtctccccctacaagatgtgtacaagattggtggtattggaactgttcctgttgggcctgtttagactggtattatcaaaccttttatggttgttacctttcgtcctagttgccttactactgaggtt

SEQ ID NO: 11543 - DNA, 1899 bp, Zea mays
  Clone ID: MRT4577_110527C.1
caccgttgccgagccctcgcctcaccctcacagtcgtctcaggatgatgccccaggccagcgctagcctcgacctcggcctcagcctgggcctcaccctcacctcccagggcagcctctcctcctccaccaccaccgccggctcctcctccccctgggcagccgcgctcagctccgtcgtggccgacgtcgccagggcgcggggtgacgcgtacgcgcagcaccacgctggcgccgcgatgacgatgcgcgcgtccacgtcgcccgacagcggcgacaccaccaccgccaagagggagagggagggggagctcgagcgcaccggctccggaggcgtccgcagcgacgaggaggacggcgcggacggcggcgccggcgggcgcaagaagctcaggctctccaaggaccaggccgccgtcctcgaggagtgcttcaagacgcacagcacgctcaaccccaagcagaaggtgcagctggccaaccgcctgggcctccggccgcggcaggtggaggtgtggttccagaaccgccgcgcgcggaccaagctgaagcagacggaggtggactgcgagtacctcaagcgctggtgcgaccgcctcgccgacgagaacaagcgcctcgagaaggagctcgccgacctcagggcgctcaaggccgcgccgccgtcgtcggccgccgcgcagcccgcctcggccgccgccaccctcacaatgtgcccgtcctgccgccgcctcgcctccgcgtccgcgtccgccgaccaggcgggccgtgcagggccctgctggggccctctccccgtgttcgtcgacggcccagcccggaggccgtgatccacgaccccgatatggcatgagatggatgcgcttgctaatcgctaccgctagctaagtagctagtgctaattagggctggatcttctttttttctttgtttggttcttattatactcgcaggctattacagcttagtagtgtttattagtccgatatgataaaaatcttcgttgtttggcagtgttttatttgctgaaaaatagataacgatgtcttatgtctttgtactcataagtgatgcaaaattgtcttactactcctttgcatatataaggttttctttggttgttatttgcctctaaaaaaaaaaaaatgctaaaaaaaaaaaaaaaaaaaaaaaaaaaaaaaaatttttaactttcgctttttgtttctgtttctgtttgagacaggttaatataatcgccgtcgtccgagggtgtagtgtcagggattgatatccctgtacaccgattattggattgagatgcttctagctagtcttcgtactgataagcgtgcgtgcgtacgtcagagcaccacagtgctggaatggatgatgacatgagagacaggtagagaagcccagctgcgtggctcttggacctttctgcaggtgtacgtggtgtgtacacacgcacacccttttttatagtacatatatacggctcaaaaaaaaaaaaaaaaggccggcgggccccccccccaaggccgagcctaggcccgacaggcccaagacagccacccaccaattttttaaccccttcacccactcccccgcctgctgatgatgagggcagggcagcacgcaacgcagcggcagtaaacagagccccgccccgtgcagataataccacgtctgtacgtgtcccaagtaattaacaaacgtatggtcctcctctctatctatttttttgattccggagggctaagttagttgtttttgtgtcgatcccaaatgcatcagctaatccatcaatcataggcttgatagagtagtcgaaaaaatagccgtagctttcttagcactccctccaccccacatccatgtatatttctgttgtaattctgtccctctgtcgcggtcc

SEQ ID NO: 11544 - DNA, 761 bp, Zea mays
  unsure (1)..(761): unsure at all n locations
  Clone ID: MRT4577_110528C.1
gcacgagggaattctttgtaaatttcccctatatctggttctgttatcatcattattttccttgcgttagacaataatgtcggagaacgaattagcagtaataaaaccagaggcattgaaaacttatatttggcttcagtgctttgatggctccatacaacaagtggaggaagatgttgcgatgttctgccctatgatatgtctggaaatagtgaaaaatgggacaggatcatctaagaatcatgctatagtactaccagaaagagttagtccggacaagtttgagtttgattcttaattattgtcgctttgcatcaggtccctgggcgctcaaacaaggagcggaagtcatttgatgaaaagtttgtccggatagacacagaaaaactctgcaagttggcttccgcagcccttggtctgcagttaaggccactagttgatcttacttgtggagcgcttgctcgaatcattggaggaaagacacccgatgaagttagagatattttccatttaccagatgacttaacagaggaagagaaactagagccactaaaaaatgtaaatgatgatcctacgattcgattattgaaccgattgtatggcaaagaagccgggaaagaactggcaggaacgcccagaaactaaagggtttccaaacacaagagcaaaaagatgagagatctttgggatgaattactttgttttataaatggacatgggagattccagaggtggggaaagcgtctaagatnaaaaaaaaa

SEQ ID NO: 11545 - DNA, 286 bp, Zea mays
  unsure (1)..(286): unsure at all n locations
  Clone ID: MRT4577_110529C.1
aaccggaaaacccagcccanagaaaagggccanncanaccnngcacggaagcccagannacaacgcccncagaanncaaanacanacaagcggcacaggccaagccaaacananaacnagcaggggcggccagccacgcacaacaaaccaancaagggggacaacccancccacgaaccagggggcacgacagacacagcgggcccgcacaaggaggggagccacaacanacaaaggggggagcccagccccaagaagaccgcaggaccgacggaaacaaacaaac

SEQ ID NO: 11546 - DNA, 843 bp, Zea mays
  Clone ID: MRT4577_11052C.1
ctgtgcggcgctcgacggccgggttcgggactagtttgaaccaccatacgctctggctagagctgctgctgctgccacacccatatacgcatggctccgccgcggactggcctgaaggccctgaatctcaaacactacatcctggcagctctgatggcgatcctcgccgtggcggtcgtcgtcaccgtcttctccgtcctgctgagccctgcacgcattttcttctccgtaaccaatcctaggagccacctgttggtgggcaatggaggtgcgaatctcaccttcaccctcgccgccaacaacaccagccagcgcgcggcagtgtggtacaacaccatcctcgtcgacgtgctcaacagcacggtggtgaccccggcgtcgatctggaccaaggccgacctgaagaagaacgcgacgtcgctcatggctgggtggcagacccgtgggagcgtggcgactgtcgacgctacagtgtcggtgtctcggggatcgatggccatggccttcatcaacggcgccgacgtcaatagctctgctttcaccgtgacggtcaccgccgtggcccggttcaaggtcggcatcgccaagacgcagttgtacgacatcaatgtgatgtgcactcccgttatcttcttgctccaaaaccgctcaggcataagtgtggccgcctcaggtgccaatgtggattgcgggccctattgattggcaagcaacgaacgagcgatgctcatatccatgtgtctgttcttctctttgaaagcttgctggcattaagcgatggtcgtacccatgtttgtgttcttctctttgaaagctggcgatgttgatttcctttcagtccac

SEQ ID NO: 11547 - DNA, 3331 bp, Zea mays
  Clone ID: MRT4577_110530C.1
tcgtacgattgggttggacgtgcccttgccgaccgagcctttcgttctatcctcgccgccgccgtcgccgtcgccgccgtctcgtatccctcggagattctccattcccgcctctccggccgccgcaggtacgcctggccccagggccaatcgtttcctcccaacctgcaggtacctctctatacggattactcactcggtccatctgtagctgtatgctgcaagcctgccttgtcttcttccatcacctccagcggcccagcgtgcacgcaaactcccacccactgatggctggccctaccgtcgctgccgccctacctcgtctcctcctacggcgacgagcacccccatacgcgctgccctgtctccccttcctgctgtgcgaaatcttgcgcccaaaacctaacttcctattcgtattcggatctgaattcaaattacaagtgtataccccatttttcttatttttttgtcccaatttatgtagctgacaaaatcccttgacttgtgcatcttttgccttgttctttctctactttagattaccaaatacggtgaaccgtgtggtccagtggaattttgcacctcattgtactttgaaggcaaataaagccattctccaatctgaaggcgaaacaaggagtgcacatctttgttgtagagggcaaagtttgctcagctgctgctggacattggagagcgcagtggtggttgtacgcctgaaaggaattctttgtaaatttcccctatatctggttctgttatcatcattattttccttgcgttagacaataatgtcggagaacgaattagcagtaataaaaccagaggtacatctcctgttgcacttcctgttaattagagattaaatgttgcattcttatcttgattgcatcatttgggcctaaatcaactaatcaagtttattggtgaactctgacaggcattgaaaacttatatttggcttcagtgctttgatggctccatacaacaagtggaggaagaagttgcgatgttctgccctatgatatgtctggaaatagtgaaaaatgggacaggatcatctaagaatcatgctatagtactaccagaaagagttagtccggcaagtttgagtttgattcttaattattgtcgctttcatcaggtccctgggcgctcaaacaaggagcggaagtcatttgatgaaaagtttgtccggatagacacagaaaaactctgcaagttggcttccgcagcccttggtctgcagttaaggccactagttgatcttacttgtggagcgcttgctcgaatcattggaggaaagacacccgatgaagttagagatattttccatttaccagatgacttaacagaggtaagggtaccacttatagttgtatataggaaaaagttctctttatctccctgagtacaactcccccacctggagctaaaaaaacagatttcatcaacacaagctcagcttgataaagtggaccatttcattttagatgttgatacatttgatacttatttgtcaggaagagaaactagagccactaaaaaatgtaaatgatgatcctacgattcgattattgaaccgattgtatgcaaagaagcggaaagaactgcaggaacgccagaaactaaaggatgtccaaacacaagagcaaaaagatgagagatctttggatgaattactttgttttataaatggacatggaggttagcgtttttatcgaatatttgaaaatcttgccacagaagaacaaccaaagtgtgtggtgtttgccgtacaacattaggtgtcctgcccactgcagtctctacaaaataatgtcttacatcaaaatataaatgttactgtagtctctacaaaatatcagtttttggtgcttattcagaaagaaactaaaatgactttcaaatggcaaattgcacactttttataagctatgttgttctcacattagaccagttgattaatattgaacaattaatacagcaaaaaaaatgccatgaaccagctactatgtatgaacttgataagtatttttagcaggcactcaagactattacagtggactattcgtgtgtcacaagttttttgtagaaccagcacttatgatggtatttttcccattgaagctaaaactttttttattggtagactggttgctgggattgaaggaaaaattaactaagcgtgttaggagcacgtgattatttttgttaagttgcttccttccccttctggtgtgtcgtacccacccaccaaaaaccctgaccccctccaaaaaaagctgcagaagcatgtggcgcaacaaatcattgcatgagttcattatatttttttattaaaaaacttctgggcttcatgtaaccatttcacagattccagaggtgggaaagcgtctaagaataagaaaaggaataaaagaaggaaagatcaagttaagaatcccacaaaagcggactctgaacctgtaaataaggagggagcttcctgtgtggttccgtgcaaagaagatagtaataacctctctaggcatccttgccaaagtccaaatttgcaagatgatgttgagtaccccttcgacaatgctgaccttgatgatggacttgatcctgcaatgagggaagagcttgataggtgagggcattagatgtcttataggttgatgcatgtaggctcttcgctgtgatactggcctgtttttcaattgaaaaaggcctgtttttgtatgcgacacagcaaaatttctaatgtttatatgctggcattttaataagtacaggctgatttctggacgtaaaatcgatgaattctgttacttgcttccactcttcattcaagttctgcttgaaacttgtggttgctgtctgttctagcttggaccgaaagaatgagtttggaggatgctattaaaccaacaaatggagtcacatgttgatacgcggtgaaaaccttaggcaggatagagttttggtcgataggtacaggatgacattgcgaggtgctattgtcatatgctgtgatttgtatgtaccctgctcttcaagaaagtagtgcccaaccatgttactgttaccccccaaagaaaggtgggtgactttgttagtgtaaaaaccagaagttttgaatctatgtatgttcattaattttgacaggaactcttatcattatgaaatgaataaaagggaaaatgatgtgttgttggaaaaaaaaaaaatatgacaatataacacaaaccagaacgacaagtataattactacaaaaaaaactttctaattgaacgatctctgacatactatatatgagcaacagatgtatgtccgaagctt

SEQ ID NO: 11548 - DNA, 387 bp, Zea mays
  unsure (1)..(387): unsure at all n locations
  Clone ID: MRT4577_110531C.1
cccacgcgtccgcggacgcgtggggtctatctcgtcgtttgccgncaaggggggggacctgacattttttgttcggaccccacacaaccagctcgcttcaaacaccatctcgtcgtccagcttcgccttaaccttaactcgtcagtcacgctcgcccgatgttcgatcaaggactttagctgaaggttgtccgccaggaagcaactaccataccaagggacccttctcgccgtcgcctaaccacccgatgcagtcaacttagctgtaagttgaccccaagcggggactacgtcgcatgaagaagctgatggaccatcaataaaatggttaaatcaagctcgtgctccgtttagggatacccctcaagaggacttcatttaacaaaca

SEQ ID NO: 11549 - DNA, 290 bp, Zea mays
  Clone ID: MRT4577_110532C.1
ttgtataaaatgactgcgcggccgcgctgatgggccaccacttctgctttcgcacccatcggcgctcgcaagaaccgtcagatcaccgccgcttgcaactgtcgttttcgccgctggtgacgagatcgacgacaagctcgctgacgctgcgccatctaaagactgccgctcgccgtcgaccccggtacgctgccatgcccccctctcgcagtggtggtgcaactccgtcgccgcaccacggggcaggaagggcgttggctcttcctctactagggttccatgctccggtg

SEQ ID NO: 11550 - DNA, 529 bp, Zea mays
  Clone ID: MRT4577_110533C.1
aattccgaagatcgatcaaattcttcttcaactaccttccttacgaaattaaagaaaccaggaaaattaaaatataatttgaaagataaactagaaagaaagtattaaaaatatttttcatgaagtgcatggccgagaaagttaatgactcctttgagcttaaggtataagggttggtaaacaaaaatttagtaaaaggcgggaactgcaaagttgatgccattcagagattttggaaaatttggcgttagaacccaagggggaaaaaaaaatgggtccgagagaccttgagctccttttggtgttccaaaataaaaaaagaataatggggaacatagaaaaaaaaaggggcccaggggccccctgagtgaaatttttatccccttacaagagggcaaaaatgcgagctgggaaaaaaaagggaaaagcctgttcccgccgaaagattgaaatccctcacattatttgcgtaaggttcactgccggatttaaagtgggaaaacctggggggccaaatgcgtgaataaat

SEQ ID NO: 11551 - DNA, 474 bp, Zea mays
  Clone ID: MRT4577_110534C.1
tttttttttttttttgtaatatagaaaatgatattttatagttgtagtggggtatagagggagtatttagggggaaccactgcgggagatgaaaaaatagggggtgaaatgttgatgatgtgacccaaaaaagtgatatatggggaaaaatttaggggtaacgcttgcggatagcctaagaggctctatattctttctaatctatataaataaagtttttaaaaaaaaaccctccaacagactagcaaaacgactatccaaatatagtcatattctattccggatttctcgctagccaaatatagaaatgtgattatgtgaatgactatctagagtgtatataagatatagaaagacttggaaattgaaaaaaatatagaaagtgattttacgcaaataactctacaaataataatttagcgaactcttgaagtcgttctaaagctatctccacatctttttattttaaactta

SEQ ID NO: 11552 - DNA, 645 bp, Zea mays
  Clone ID: MRT4577_110535C.1
aaacaaaccatgtgccttctcatttctttcagaaccatcacaaaaacaacagcaacctctaccaatgtaatagaatgcaagcgaagcaagcatacatttgctgataaatttgctcctggtctaaaaacatcgcagcaaccgaaacaggaaagaaagaaaattagcagggaccatatttgaatcagatcattagcggcatgatgcaacactcgcgttgcgcacaaggtaatctggaaatgctctgaatggttggtttgttggttcttgccttcacttcttgtgcgccctgtagtctggggagttgtggggcaatggggacaatggatgccttgaagaatctgcacagccgaaatcaagagccctgccagctgtgttgccatccctcaagctagacgacttgcgcttgttcttggtggatgtactggcagatttctttctttcagaccggcgctgtcgctccttctccaacaaactcagcagccttttgatctcttcatcaagagccctgttgtcctcactcagtgtcacgacctctgcctccgccgtatcaagattcatcttcagaatctccttttccttatgtagctcttgcacttgcaccatcaatgctgccaaatctgagttctggtttaggcgtgcgcggag

SEQ ID NO: 11553 - DNA, 254 bp, Zea mays
  Clone ID: MRT4577_110536C.1
caggtgcgaaacaaggcgagaacagcattcggacatccgggacatggatcggtgatgattgattgtgttgtcgacttacatgccatatggcgtcctcgcatctcatcaagtcgtcgagtctctgtgactcgtatcagagattgggtgggtgcacactgcttgagatgagatcatttctacgtggaggcatgctgacaagagtcacgcatccagcattggctgaagtgctttggtcgcatggatgtaggcatcac

SEQ ID NO: 11554 - DNA, 371 bp, Zea mays
  unsure (1)..(371): unsure at all n locations
  Clone ID: MRT4577_110537C.1
cctaccaacaatagcagccaaaaagatnttcttaaatattctgcgtactctttctacaagttctactacctcaaccattttcccacaatgctcacaatctcctatatcttcctttcttcccccatacctctcaccatctttatcttcagtatgtcaaaacccaattcttcaaccctacattatccaacatgcaatcacatcatccatcttacctttatcacccttattcctccaacaaccgtcatccctattacatcatttacctttggtgcatttatttgcacataacatcatatcacaacaactactacaactttttctataaaacctttcttcctactctcatcaacaacaatatccttcattcaacc

SEQ ID NO: 11555 - DNA, 635 bp, Zea mays
  Clone ID: MRT4577_110538C.1
tcgagcggccgcccgggcaggtataaaaaaaaaaaaaaaaaaaaaaaaaaaaaaaaaaaaaaaaaaaaaaaaaaaaaaaaaaaaaaaaaaaaaaaaaaaaaaaaaaaaaaaaaaaaaaaaaaaaaaaaaaaaaaaagttttttccttgggccggaacccccttaagggcaatttttgaaaatttccttcaaattggggggggtttgaatttttttttagggggcccatttcccctttttgggggtggttttaaatttcattggccgattttttaaaacgtggagatgggaaaaaccttggggttcccaaatttaatggctttgaaaaaattccccttttttcaatttggcttaatagaaaaaaggcccgacccattcgccttttcaaaattttgcccaccctgattggggattggccccccctttaacgggccctttaaccgcggggggggggggggttccccccatggggccctttactttttcaagcgccttaaggcccggtcttttgggttttttcctttcttttttcgccaagttggcgggttttccccttaaggttttaaagggggggctccttttaggttcccatattagtgttttacgggcccttacccccaaaaaactgtttggggg

SEQ ID NO: 11556 - DNA, 771 bp, Zea mays
  Clone ID: MRT4577_110539C.1
ccggccgggcccattttttttttttcatccgcacccggccgggatcgacgtcctggcggagcgataaataccctgaggccggacggcgacccggccagccgccatagcaggggcaggggcagtatcgtccgacgtccggtcgtcctcgccgccccgtcccatcccagtcgccagggcgtacctacgcgtcggttctctcaaacccccacacgggcacacccacctgcaagggttcgacggctgcgtctgcgtgcgagatgataatggtgggttggatctggactggactggacgtgcagcgattctcgatcatgcttgcgaccggctggcattttgtcccgacgctcgccgccggttggttggatccgtgccccccccgatcgatcgactgtgcgtatggtatgattgggtagctgttgccgtgttggaggtctggcgtccggcgatggcacaccacagcggcgcggcgcggcgcggcgggcgagccatggccatgaatcgatcgggtgtccagatccggtggagggaggtccggccaggcagagccgcagccagcctgcgttgcggctgcttgttcgaagtgatcgatcagccggaggatgccgcggaggtatcagattccgatccccggccccagccgcccccgtgctcgtgcaagcctgtccttccctctctgttgatcatgctacggccttctacgtgctagtataggaaggttctccacatgacatgtatacttcatttattatgggactgatatattacagtatc

SEQ ID NO: 11557 - DNA, 732 bp, Zea mays
  Clone ID: MRT4577_11053C.1
catgcggttctaacacaccttcaagtagtgatgtagatgtggacaatgtccctgagaaagagggcaatggtaatgagaaggcgaagcaagcctcctgcagcaactcttcagctggtgacactaaccaccgcagatttagaagcagtggaagcacgagtgattcatggaaggaagtttccgaagagggtcgtctggctttccatgcgctgttcagtagagaaaagcttccgcaaagcttttctcccccacaagcagaaggctcgaaggaagttggcaaggaggaggaagatgaagtcaccacagtggcagttgacctcaacaagagtaccacaagcattgatcatgacctcgacacaattggcttcaaaccatacaagagatgttctgtggaagcgaaggagaatagggtgccggctagcgacgaggttggtaccaagaggattcgtcttgatagtgaagcatcaacatgagcgatttctacatggttaccgctcggacttcctctgccgccatgaagtttatgacaaagttgtatttacatctaaactagtataggacttaaagaccttgcaatgcaatgcttcatgaaactgttgtgtgctgtattttagtacttgtgaagcagcccggtagactgcttttaaacctttatctcgtagactctgatttaagcatcaagcaactattgaactttatatttttggcgggaaggaaaataattttttttgattt

SEQ ID NO: 11558 - DNA, 219 bp, Zea mays
  Clone ID: MRT4577_110540C.1
ttttcaaggacccatgcagcgtatacttgtgcgcgaaaagggacatggaggacaagggaacatcacctgtcggggcctgggccggctatctattcatgaggtacgccgatgccgaacaaacccgcttgagtaaagggcaccggatcaatatgaaaccaatccccctccgtggggcaccgccgtggactgtgggggccggaaagtgttcgccctgaccga

SEQ ID NO: 11559 - DNA, 1138 bp, Zea mays
  Clone ID: MRT4577_110541C.1
cgggtccacgcatacgtccgcccacgcgtccgcagatttctagtggaacaattgtcaaaggttaatcctagctgtatggatcgcgatcagcggctagccttttggattaacttatacaatgctttgataatgcatgcgtatttggcatacggagtacctcgaaatgacatcaagcttttttctctgatgcaaaaggcttgttacacagttggcggccagtccttcagcgcagcagaaatagagtttgtgattctaaagatgaagactccagttcatcggccccaactttctttgatgttgactctgaataagttcaagattactgaggatcacaagaagtactcaatcgatgaattcgaaccccttcttttgttcggacttagctgtggaatgttctcttctcctgctgtacgcatattctccgctgcaaatgttaggcaggagctccaggaatctctgagagactatattcaggcgactgtcggtacaaatggcaaagggaagctgctgatcccgaagctagtgcagagctacgccaagggagctgtcgaggactctctgctcgcagactggatctgccaccaccttgcacctgatcaagccacggtcatccgggactcttcctcgcagtggaagcagcggctactcggagctcgaagcttcaccgttctcgccttcgactccaagttccggtacctcttcttgccagacagctgtggctcccagagccagaagccagaggcaaagcaatcttacaaacttcctgagccgtgttcagaatcagaatagataataagagctcagtttggtatatttggaccatcatacattcttttgcatagcgggccatgtgattggcagttgtatatgatgtaaattttgaggaagcttgaattgctgtgtttgcaaaaccggatcctctccacggagttggtggcaatttgggggtcgtattggttttcttttgtattcacttgtcttccatactgaagataacattcttttgttgtttttgttttatctgcataccttttcctttttttcccctctccttttctgtaaacctgtatggtcaatttgatctgtaacttctgcacaaataaaggtggtgagcagtctttacttaaaaaaaaaaaaa

SEQ ID NO: 11560 - DNA, 772 bp, Zea mays
  Clone ID: MRT4577_110542C.1
ctcgaggccggccgggattgtcctctctcttattttgcctttgctttctttctgtctttgatgttgactctgaataagttcaagattactgaggatcacaagaagtactcaatcgatgaattcgaaccccttcttttgttcggacttagctgtggaatgttctcttctcctgctgtaagtagtacgccggctaatcttagccctgtcaagctgtgcatgtgcttcagcaaattcgtcacttaataagttgctggagaaactagagccatgctgtcacccattctgctattcttgtcctacctaatcttagtcttgttaaggcctgtcatccttcagttctatttgtctgatttaccgttgcttgagctggacggttataagattgctaaaacctaagctattgctgggtcaccctgttgtcgcacaggtacgcatattctccgctgcaaatgttaggcaggagctccaggaatctctgagagactatattcaggcgactgtcggtacaaatggcaaagggaagctgctgatcccgaagctagtgcagagctacgccaagggagctgtcgaggactctctgctcgcagactggatctgccaccaccttgcacctgatcaagccacggtcatccgggactcttcctcgcagtgggagcagcggctactcggagctcgaagcttcaccgttctcgccttcgactccaaagtccggtacctctttctgccagacagctgtggctcccagagccagaaagcagaagcaaagcaatct

SEQ ID NO: 11561 - DNA, 224 bp, Zea mays
  Clone ID: MRT4577_110543C.1
agaagcgggcaaaatgccccccagcatacgaaccgggaaagttaacgtgtcaaagcaggggggcccaacggggggagccacccaaatttaagggggtggagtaaaatggcgatttccgggggggaaaacggggcggcccccccccataaaggagggggcccaaccccggcaaaggaagtacggtattgggggcaggggggttttttttttaaccgaagccggga

SEQ ID NO: 11562 - DNA, 364 bp, Zea mays
  unsure (1)..(364): unsure at all n locations
  Clone ID: MRT4577_110544C.1
tctcgttctgtgtnntcgtgtcaagcagctcagnctgaaaaatgggtgctcggnaggctaggnatgnaccgnagnaagggagctgggnagggagctaggnnagctaagtcgcctctgtgctactcgnngcggtgggctgctggctagtgctaaagcggtctgctcctggtgggagaaagctctgcctgtgtcacggtnntggggctagaatcaaagnaaaggcgatctcctgcctgcacttgcttttcgagctgctttcctgtgctttgaggtcnncttctcctnactgtgnngcccactgaacctttggcgaacctgcncnngcggcgcttccttcttaccttcnngcggtggnnccgtgata

SEQ ID NO: 11563 - DNA, 313 bp, Zea mays
  Clone ID: MRT4577_110545C.1
gcggtggggcctaagctgaagggcccaaaaaaatggcgaaccaaatttttcacccccatcctaggggggggggaaaaacaaagggggggaccgggttctatctttatgggccgccccagggggcttgaatgaacccatgggtttaaacccccagcttaacccatttttccaccctaaatctaaaacccccccccttttggaagcccggggcctgaatcgatcagggcttgacctttgtaaacaacacccttgggacccgccccaagcctgttgaaaaaaaagtacccaacaccgcccttgaatttctgacccg

SEQ ID NO: 11564 - DNA, 601 bp, Zea mays
  Clone ID: MRT4577_110546C.1
aaagtgcaaccaaacccgccccaaatgttcctcccccgtcctcacctcgcgtatactcctctcggctgaaagcgcgccgccgacgacgcctgccagcacgccgacgcggacccggcggccccttcctccaccctacgcggaccctgttcgccacgagggccatcccggcggctctggtttccatcctgcgccccctcagttcctaccgccgccgaagcagatcctcccgcaggcccccttctccgtcgcaaccgacattctctccgggacctggcccttggagtatagtaggattggacgagccttcactgttgtgggatcccgttagagtttatcgtccccgagtgaaccaccatcctcgtctctgcctcctccaaccccagctccgtcaccttcctagcctgcagtatcaaccatgaaacagcggcgggggtcccttgatatccgtcagatgttcttcagctatttcaaatcaattgcaaaattcaaggggtggcagtctagtccattgatccccgtggaagacgccacgttaccactaattcacagagctttggatcagtttaggcatgcgttctttgcggaccccccaccagacgaa

SEQ ID NO: 11565 - DNA, 971 bp, Zea mays
  unsure (1)..(971): unsure at all n locations
  Clone ID: MRT4577_110547C.1
ggatgggtccaaacacaagagaccaccttaatcaatatgtcatcactcgcaagtccagctatcaccaaccagacagagctcggctgcaagcctccaacccaaggagacagatacgttcgcagatggcgggtgcagcaaaggcgtcgtggatggtggccatgagcgttcgagggcgccgtgggacctaaacacagcaccaccaagcaagcaacctcactcgctacaaacaggaaacaacaagcgaaagttctctcgagagaagagaagaagaccaacaccgggaggagatggcagcagcagcagcgacgaaggcgtcgtcgtggatggtggccatgagcgtgggcgccgtggaagcgctcaaggaccagggaggcctctgccgctggaactacgcgctgcggtccgtccaccggaccgccaaggccaacgtgcgcagcagcagaagcttcgccgcgcagcgggacaaggagctgaccccggcggcgcagaaggggcggcaggaggacaaggccgccgcggaggagggcttgaggaccgtcatgtacctcagctgctggggacccaattaactagcctttcgtatcttagcttgcctttggccttcttcggcgaccgagctcgcgagctggggcttgagaccttcttgccggcgttgctcaccggccgcctgtctctgattattgtaaatatacgacgatgatcggatgatgttgaattgatgatgatgaaaagttctgccacttccgttcgggcgttttcgactgtgtacgatcgactggcttctgatcctgtacaatgtactggcgtgaaatctgagagctttgagtccacgattccaaattccaagtagacanggagggagggttcatcgcataccggcgttgcattccctgtccttttagatgaagtttatgctcaattataggaacttatacgtttggttcacnataatgtgcatattcagcatcaaa

SEQ ID NO: 11566 - DNA, 298 bp, Zea mays
  unsure (1)..(298): unsure at all n locations
  Clone ID: MRT4577_110548C.1
gggcgattggngtcatccaggccggccgggaggtttctagtgctttcgcgccgccgccgccgccgcttcgtcgactccgccgcagcgatgccgtcgcacaagaccttccggatcaagaacaagctgtcgaagaagatgcgtcagaaccgccccatcccctactggatccgcatgcgcacggacaacaccatcaggtacaacgccaagcgcaggcactggcgccgcaccaagctcgacttctgaccgcgcggatcgaccggatcatgcgccgcaattccaggcactctacctttccttt

SEQ ID NO: 11567 - DNA, 469 bp, Zea mays
  Clone ID: MRT4577_110549C.1
aaggctccagttttttttaaacggcggacctttttgaaggtaacagaacaggggggttcccgccaaaatattgggattaaggaacttttccctaaagaacattttagttaaagattttttaaaatttttaaatgacaagtaaccccggttaattggtttaaaggggttctttggggggccgttgcctaaagcattttggaatgacagtagcattttcctccacggggacgttttccttttttttaaacgaagccagggctttggaagcctttttagtaaaaatgtcacctttgggtccataaacgttaaattaaaagcacactttggtttttttgacacgggggttttggtaattttgcacagggccaaggtttctccgtgcaaatgatttttgttgttggggcttttcctgctcggaatgatacgactcagggaacttttttggttccttgttgaaaaaagccttttt

SEQ ID NO: 11568 - DNA, 1466 bp, Zea mays
  unsure (1)..(1466): unsure at all n locations
  Clone ID: MRT4577_11054C.1
ccacgcgtccgctgcctgctcacttccgttccgtagtccagctagatccccgggcaaccgatccaccgagaagcttgtggttgtggcggcggcggagagggaagcggggagcgggaggtcggaggcctccgtgcgtcggaggtggacgagggagcgaggcggcgccagaccgaggttgcgtcgggctcgatttctactgggctgctgtctgctgagtttacggaagtgtttggccctagaagagttgaagataaggagtggagctaggtttaaactctggtgacttggttgttgtgtgcaacgaatcaactatgctgagtttttctgtagagtaacagaaattggatcaattcaagtagaggtctaggaggagatatgaggtactacttgcgtcaggtccagcgtttggttggagatatggaaggaggagctctcttgtttatagacgacctcaactccaagtgacaaagcgaacagctgttgaacgtttcccttctatttctgtttctttttgccggatttggagatggaggtgaattcctctggcgaggaaactgtggtaaaggtaagaaagccgtacacaataacgaagcagcgggagcggtggacagaggctgaacacaaacggttccttgaagccttgaaactttatggcagagcatggcagcgcatagaagagcatgttgggacaaagacagccgtgcagatcagaagtcacgctcaaaagttcttcactaagttggaaaaggaagctatgaacaatggtacttctccggggcaagcccatgacattgacatacctccaccacggcctaaaagaaagccaaacagtccatatcctcgaaaaagttgtctcagctccgagacacaaaccaaagaacttccaaatgacaagtcaacaaaaccaaatatgcccttgagcaatgggcatgtaaaaatggtaggcgatgcatctcttcagaattttcaaaggaaggagttgtctgaaaaaggaagtcgctcggaagttcttaatctcttccgtgatgccccatctgcatcattttcttcagttaacaaaagctcttcaaatcatggggcacccaggaggaccgaggcaagtaaaacagaaagccgagatatgtccatcatggaaaataattcttttaaccccaacacccaagaggatgtaaaggtgatcagtgatcaggaaatggaaaggcttaatggtatccagatcagatctaaatgtgaacattctcatgaggggtatttggacatctcaacgcaacaaatgaagctaatgccaaagtctgtggagacaacatatgtggatgaacaaactgcaagagcttcacacaccctagcagagagcaacggggacagctagcgttccagtgactgtacctgaanggactccatcctgntcaaacaagtgntccagtngggatccatgggagcatgnacccatggatccatcccatggt

SEQ ID NO: 11569 - DNA, 531 bp, Zea mays
  unsure (1)..(531): unsure at all n locations
  Clone ID: MRT4577_110550C.1
gccgggnaacacaggcaccaccaagcaagcaacctgactcgctacaaacggaaacaacaagcgaaagttctcttgagagaagagaagaagaccacaccgggaggagatggcagcggcgaaggcgtcgtcgtggatggtggccatgagcgtgggcgccgtggaggcgctcaaggaccagggaggcctctgccgctggaactacgcgctgtggtccgtctaccggaccgccaaggccaacgtgcgcagcagcagaatcttcgtcgtgcagcgggacatggacctggccccggcggcggagtaaggggcggcaggaggacaaggccgccgcggaggagggcttgaggaccgtcatgtacctcagctgctggggacccaattaactagcctttcgtatcttagcttgcctttggccttcttcagcgaccgcgagctgggcttgccggcgttgctcaccggccgcctgtctctgattattgtaaatatacgacgatgatcggatgatgatgatgaaaagtactgtcacttccgtct

SEQ ID NO: 11570 - DNA, 583 bp, Zea mays
  Clone ID: MRT4577_110551C.1
ttttttttttttttttaaatcatataagtgtattcaaaaattttttttaaataatacaatatagtttttaaattttgtttatttaatatggaaaaataggagacaaaaagagataaattactcaacgagtttgtagtgtcttgtgcagacgatgtcgtcgacggtgagagtcatgctgatctcctcgggagtgatttctcggatgattttcgtctctttgtcgccggcttggacttcgatcaatttgttgtcgccttcttgggtgatggtagttttgactttacgtccgtcgggagtttcttgttcgaattcctggccgagtttgaagttgatgaccgtattcttgaaggttgaggaagatttgagggtgtagttgtcgccgtcgacggtgagctcgacgaccggcgaaacgctgtttcccactttcctcgtcagcatcccgaccccgagggccttcatgtattcgtcgaatttctcgcttttcgacagcttgtatttgagtccgctgaatttgttcatttttaagccgaaaaacttatttcacacacgagaagaggaattgttattcgagaaacgctcgtgc

SEQ ID NO: 11571 - DNA, 910 bp, Zea mays
  Clone ID: MRT4577_110552C.1
tcgttcgcccacgcgtccgcccacgcgtccggcgagccgcagacggtgaggagagcccccggtatccaggaaaaccaggggtccgcgcccaccaatttccgccgccccgttcccgtccccgtccccgtccccgtccccgcccgccggtacatataacccacccgctccggctcgcctctccagctaggccggccggggccgaaacctcaacacagcaccaccaaccaagcaacctcactcgctacaaacaagaaacaacaagcgaaagttttctctcgagagaggaggagaagaccaacaccgggaggagatggcagcagcagcagcgacgaaggcgtcgtcgtggatggtggccatgagcgtgggcgccgtggaagcgctcaaggaccagggaggcctctgccgctggaactacgcgctgcggtccgtctaccggaccgccaaggccaacgtgcgcagcggcagcagaagcttcgccgcgcagcgggacaaggacctggccccggcggcggagaaggggcggcaggacaaggccgccgcggaggagggcttgaggaccgtcatgtacctcagctgctggggacccaattaactagcctttcgtatcttagctggtctttggccttcttcagcgaccgcgagctcgcgagctgattattgtaaatatacgacgatgatcggatgatgatgatgatgaaaagttctgccacttccgttcgggcgttttggactgtgtacgatcgactgacttctgatcctgtacaatgtactggcgtgaaatctgagagctttgagtcccagaaaaaaaaaaaagaaaagcgaaaaaaacaaagaacaaaaaaaaaaagaaaaaaaaaagaagatgaaaaaaaagaaaatgaaagaaaaaaaaaaggggggggcgcccgaa

SEQ ID NO: 11572 - DNA, 426 bp, Zea mays
  Clone ID: MRT4577_110553C.1
gcactcccaagacatgggggcacggtgtagggaagccagcgttcggggtggccgtcgcgccaaagacgcaggcggaggagcggatcgccctcgcggagcacgcgctgctgcagtggactcgcgtcacccggagccgactcgggcatcgggcacgcaggggcgagctacaccaacagagggctgctggcggaggcagacgaggtgctactgctggcggcggataaccctttcacgctaccggaggccgccttcgcgcgccgccgactggacagggccgtctgcgccgccgcgtcgcgcatggtggaggagttcttgcgcgtgaggcgccggcgaaaggaacagctcggaggtcaccgccggggtggtggacgctgcacgacgggagccggtcgagggacatgctcgagcgtgcctcacgaggtgcgc

SEQ ID NO: 11573 - DNA, 389 bp, Zea mays
  Clone ID: MRT4577_110554C.1
ctcgagaccgcttccctccctccgctccacccccgcaaccctctcccgccgcacacgcgccaccttccattcctccactccccgcttcctcccaatcttaaccacccggcgcgccccatgccgccacgccggcttcctctcccactgttcttcgtccctcaaacacgacgcttgtcctgcagtccgacatgagctgctgctgcaacggcaaacttaagaggaggggagatgaacaaagagttggggaaaggtgctaagaataggcaagatggaaggtgaggagcaggcccgaagctataggaaaagggttgcaggtactgaaatgaacaaggataatgcggagcctgaggatgaaggaacagagcaggagattgggttcattgaagaaa

SEQ ID NO: 11574 - DNA, 542 bp, Zea mays
  Clone ID: MRT4577_110555C.1
tcaccccagccgccccccaacgccaaatctaacagcataggtgcggaaccttctagccgcacctagggtggggattggcgccgagcatggagaacgtcgaccacgccttttacatctccgacgaggacgacctcggaggcggcgccatggggggcccgcgcggggcgcccgtgaaggagatcgccttggccgtcgcgctggtcgacttcggggcgctcggtaccggcggtggcctgctaatggccgagaaccgcgtgggaggggaccgcgcgcacggaattttcttcatgaagtcgggcattgtaatgaacatacgctgggttctactacacaaggagcgcctactatgcttacaaaggagacaagggctgctctttttccaacatgccaccgatctgaaggagtgtgctgctgcctgctggatatgaagcgggagtggatggcttaagagaatgatgactcgtgacgagatggctctgcagacacccttgctctacatatgacatgcggacattgtcttggaacactctagaatgaactgg

SEQ ID NO: 11575 - DNA, 1677 bp, Zea mays
  Clone ID: MRT4577_110556C.1
ccccgcgtccgccccccgtccgcgcgcattacggttacacggtccgccgtactctccctcccgaggtcagtcccaacccaaaatggtgaatcccctcctcatcttcctccccttcctcagcgtcgccgccttgcccggcaacgccgacgccgcagggccggacccatgcgcaggacggcggatccacatccgcggcttgcccccgcgcttcaacaccgacctcctccgccactgcggcgccaacgccttcccgctcgccgacccgtccgccgcggccacctcggtcccgccctgcgagtcgctcgccaaccacgggctcggccctcgcactcaccctcgcagccggtcctggtaccgcaccgacgcgaggctcctggaggccttcttccaccgccgcatcctggagcgggactgcctcgccgacgacccagccgatgccgatgccgtgttcctgccctactacgcggctctcgacgcgctgccgtacgtgatcgatccggccctgctcgacgaatccgcgaggcacggcgtggcgctggcggagttcctgtcgcgggaccaggcgcatatcctgtctcgccggcacgggcatgaccatttcctggtggtcgcggggtccgcgtgggactacgcgcagtcgccggtcgcggagccgaggctatggggctcgacgtcgctgctgcgactgccggagctggccaacttcacgttcctgactctcgagtcccgcacgtggccgtggcaggagcacgcgatcccgcacccgacgtccttccacccgtcgtctctcggccacctccgcgcctggctcgcccgcgcgcgccgttcgcgtcgcgccacgctgatgctcttcgcgggcggcgcctcccgcccgtcccggcccaacatccggggctccatcctctccgagtgcgcgaaccgcaccgacgcatgcgtggtcgtcgactgctccggcggcaaatgcgcgcacgaaccggtccggtacatgcgccccatgctgcggtccaagttctgcctgcagccgccgggggggacgccgacgcggcgctcgacgttcgacgccatcctcgccggctgcgtgcccgtgttcttcgaggacctgcggcgcggaggcagtacgggtggcacctgcccccggtgcggtacggtgagttctcggtgcacatgcccaaggaggccgtggtgttcggcggggtccggatcgtcgagacgctccaggccgtgccggaggaagaggtgcggaggatgcggcagcgcgtgctggagatggcgccgagggtggtgtaccggcggcacgggagcacgcccgagctgagacaggccgtgaaggatgccgtcgacctcgctgtggatggcgtgctgcagaggattcggtggcggacgcgtgcactggaggacggaccgccggagaggatttacgcgcaagaggaggacagcgtcgacagatagaggatgaggaccattcccttcggctgcaacaggacatccacatccaatagtgaaatacagtgtgtacatgttgctgttgtagtggagaaatgagatttgtgttcagtgtaactgcagtagtttagtatggtgcgaacttgttggcttcttcgtggtgaatccgtgaatggcatttcgaacagtccatacctcacccaaggagccatgacacgaaatcatttttgaacc

SEQ ID NO: 11576 - DNA, 269 bp, Zea mays
  Clone ID: MRT4577_110557C.1
ctctattatgtgctccttaatcttcgaaagcggaagtggtaccacaaagccttggagcttgttgaatatgttcaaaattcacaactgctcgaactcggagagcgtgattatgctgcacgcgttgatttaacagctaaggtttatggtctacataaagcagaacagtatatcgagaaaattcctgcatctcataggagtgaggttgtgtatagaacacttctggcgaattgtgttgctgaaggcaatgtaaaaaaatcggagcaagtttt

SEQ ID NO: 11577 - DNA, 507 bp, Zea mays
  unsure (1)..(507): unsure at all n locations
  Clone ID: MRT4577_110558C.1
gagaatcgacgcgtcnatgccaccgtgcgggactgaacggcactgccctgccaacaaaaggcacgcgagcccacacgacagcgagggagaggcatggatgcaccaaagctcgagacgcgggcgatggccgcgctcctggcggcgaccgcgcgggctgccacggccgcggcgcgcgcggcgaggaccgggcaccaccggggacagcacgctgaggccgcgcctgccgagctggcagatgggcggggccatgccgacccagacgcgctgcggcgggatgcgcagcctgctgcagcaggccaacaacacccccgaccgccgcaccatctgcggctgcctcaagaacgtcgccaacggcgccaacgggagcggcacctacatcagccgcgccgccgcgctgcccagaaagtgcggcggcgccctgccgcacaagatcagcaccaacgctaactgcaacacgattaaataaatgacgcggcctgtgcgcgtccgagcgaggaacgcatgcat

SEQ ID NO: 11578 - DNA, 391 bp, Zea mays
  Clone ID: MRT4577_110559C.1
gtagcagcgatcacaaaccgggtcggaacgaagctgatgttgtttgctgtgaacccagtatggaacacgcgccttggatcctggccctcggactgctagcgctcctgtacgctgacgccagccctgcctgtctgcaaaagtgcggctgccaggcaaacttctgctgctcaagtttggatactgttagcacgacctacgcctactggggtgactgctgccagtctggcccgtgccggtagggctgctgaggcggcggtagcggcacatgaggcagcaaaggcagtggcggctctaacatggctcatgtggtgaccgtcaccttgtataacgtcatcaacaaccagaccaagagcgggtgcgagggcaagaactactacacgcggagcgcgtt

SEQ ID NO: 11579 - DNA, 249 bp, Zea mays
  Clone ID: MRT4577_11055C.1
cgaggccgcactgcacgcgagtcctccactccgaccgcacgatgggtgggctgcgcctcgtcttcttcaccctccgccccgccgctgcctcggcctccgcctcctccggcgcgaccccagccgcgtacggctccgtctgcgtctccttagcccgcgcggcgcgggggctgacctagctccggctggccccgcccagacggcgcggggacctagacaggacatgtgcccgggatctacaccacgggggac

SEQ ID NO: 11580 - DNA, 629 bp, Zea mays
  Clone ID: MRT4577_110560C.1
ggtacccgcggcccctcctcgagttttttttttttttttttttttttttttttttttttttttttttttttttttttttttttttttttggggaaaatttatttttaaaaatttttttttgaggttaaggcccccaggggggcttacaaaaggttttcaggctgaaatctcaggttttgaaaaccacagttttggggggaaatcaaatcaaatatcccgacgggcctttttttacgggacataacccatgttccatatccaatcccctaaaacttttttcaaaagggaacatccccccctttttgggcactaatttccccccatcaaaactccaaaacccaacgggttccacagttttttttcgcaaaaaagccccattaacctccattttttggagccatttaaaacccccttatgaattcattggggggggggccccccctggggggatttttattatggaccacaaaaggggggaccccggaaatgcccgaagagaactttttgagcttttcctgaacctcagggactcctttggtaggatcttaaagcagttcctcggccccttttatgcccaacttttttgcggcatccagcaaaacctgtttggcaccaaggtactttccttg

SEQ ID NO: 11581 - DNA, 405 bp, Zea mays
  Clone ID: MRT4577_110561C.1
ctcccggaaggtttcctcgacaggaccaaggaggtgggtctgctggtcccctcgtgggcgccgcagacgcaggtgctggcccacagcgccaccggcgggttcctcacgcactgcgggtggaactccacgctggagagcctggtgcacggcgtgcccatggtggcgtggcccttgttcgccgagcagcggctcaacgcggtgatgctgtcggagggggcaggggctgcgatacggctgaccgagaccaaggataaggagaccatcgcggcggtcgtgagggagctggtggaagggcaaggaaagggagccatggtgcgggtcaaggtggccgagctgcaccaggctgcggcagagtgcctccgtgatggtggtgccgccacgacggcacttgacgaggtgctggac

SEQ ID NO: 11582 - DNA, 275 bp, Zea mays
  Clone ID: MRT4577_110562C.1
gttggttctttggtcttttttttttttactgtaattgaagtgggtgttcaggtttcttttttaacgttcccaaaccccttatgcacaaagaaaaagtctaccaacataatcttttctggcgcgagatttgggggggggccccactgggaagattgttttccaaacacaacatgccacacacttatccttgctcaccatacattagatgccgtaacccctggggggaatcacaggtgaggaacaggccatggctttaaccaccgggaaagaaacag

SEQ ID NO: 11583 - DNA, 1844 bp, Zea mays
  Clone ID: MRT4577_110563C.1
attgggtacctcgaggccggccggggtgactgatgagcacaagacccccccaccggccaccggccaccgccgcgagaagaaccgaccgacaaccgagcatgaaggccgggcctccgcacgtggccatgctggccacgccggggatgggccacctgatcccgctggcggagctggccaagcgcctggcggcgcggcgcggggccacggccacgctcatcaccttcgcgtccgccgcgtcggccacgcagcgcgcgttcctggcgtctctcccgccctccgtcgccgcgcgcgcgctcccgcccgtcgacctctccgacctgccccgcgacgccgccatcgagacgctgatgaccgcggagtgcgcgcgctcgctccccgcgatcgcggccgtgctcgcggagctcggcgagaccgcccgcctcgtcgcgttcgtcgtcgaccagttcgggatggagtccttcaacgccgcgcgcgacgccggcgtcagggcggcgcggtgcctcttcatgcccatgaacctccacgcgctctcgctcgtcctccacctccccgagctggccgcctccgtgcccggcgagttccgggacctggccgaaccggtgcggctgcccggctgcgtgcccatcccggggcccgacatcatctcgccgctccaggaccggtccaacccgtcgtacgcggtgatggtgaacctcgccgtacgctgccgcgaagccgccgccgccatcctcgtcaactccttcgacgccgtcgagcctgaggccgccgaggcgctgcgccacccagcagagcccggctggccgcccgtgtaccccgtcggcccgctgatccttcagtccgagcccgagtccggcggcaccggcgccgatgtcgacggcacgcctccacgtgcggcgtgcctcgattggctcgaccggcagccagccaggtcggtcgtccgcgtgggcggacgcgtgggcggcgcgctgccgaaggagcagatgcacgagctggcgctcgggctggagcgcagcgggcagcggttcctgtgggtggtgcgcagccccggcgacgacgaaggcacgctcaacggcaactactacgacgcggagagcaagaaggacccgttcgcgtacctcccggagggcttcgtcgagaggaccaaggaggtgggtctgctggtgccatcgtgggcgccgcagacgcaggtgctggcccacggcgccaccggcgggttcctcacgcactgcgggtggaactccacgctcgagagcctggtgcacggcgtgccgatggtggcctggcccttgttcgccgagcagcggctcaacgcggtcatgctgtcggagggggcaggggctgcgatacggctgcccgagaccaaggacaaggagagcatcgcggaggtggtgagggagctggtggaaggggaagggaagggcgccatggtgcgggccaaggtggcccagctgcagaaggctgcggcagagggcctccgtgagggtggtgccgcaacgatggcacttgacgaggtgatcgacaagtgggaggcggaagccaactagaaggtgcattcgcatgcatgcccaacaacacaatcctctccgccaaactctttaaatcatgagttgtcagtgttcatgttcttcaaactctcttaattcgttaattatatgtatgcgtggcgtggataaaggttcgagagattcgtgatgtttatttgggtcaagttaatcactggaatatgcctgtaaaatatgcgtcgtcatagattactttgccgccaaaataaaagtaccgttcttcaaaaaaaaaaacaaaaaaaaaaaaaaaaaaaaaaaaactcgaggaagggccgcggtacc

SEQ ID NO: 11584 - DNA, 158 bp, Zea mays
  Clone ID: MRT4577_110564C.1
aagctacatccccagaccgagctctccgtggtgctcgctcgtttccggctaagagagcacgcaactcacacgcccctgacgcgactgactgactggcgcaactgtgatgctcgatccataggagcagacatacgcgttgtattcgcagatgagagatg

SEQ ID NO: 11585 - DNA, 579 bp, Zea mays
  Clone ID: MRT4577_110565C.1
ttttttttttttttttttaaacaagaaaaaaaaaacaatgcaagctgccatgcttgatacacagatgagcacactgcacacagaatttagcgctgaccatcagcctagcctagcacgccgtagagatcaccactgtaggagccgtcatcacccttctccttggtgctcttcctcctggagaagaggatgtcgccgataagcggcacgatgggcttgaccttctgcgccttcctcctctggccgcccatgagctccacgtcgtccatctcgccgaggctcagcgcgtgggagaaggacggcaggtactcgctcgcggcgagcctgtcgccccactgctcgctccggagcgagaacgacgccacgtcggtgtcgcacgcgatgctgctgtgactggaatggttgttgccgacaagtatgcggtgtccgaacacggctacggcctccttgacggaccggaagggccgtgcagtgtcgacctcaccacggtcggaggccgcagccatggcgccggagcgggcagactacaactttgaaacaaggatcagttcatccggactcaaaacatctcaagcttgtaag

SEQ ID NO: 11586 - DNA, 307 bp, Zea mays
  Clone ID: MRT4577_110566C.1
aaaggggaaaaactttcccaatttccacttcacgggtaaaaaaacaataaattattaaaccccggttgagggtgaaaaagggcaatctttttttttaaaaacaaaaataaagggattgggttcttaaaaaaaagggtgggcccaaaacgggaaaaatttacaaaggaacaccaaaagggggaacaccaccggtcagggggaacaaaatggcccccccttaagcaacccagttgtggaagaggtggaaaaaccaaaaaaacacccaagcctccccccttaaaaaaatcacccccatcttgagggaggg

SEQ ID NO: 11587 - DNA, 307 bp, Zea mays
  Clone ID: MRT4577_110567C.1
aaccgaaattttttgtgtgttttcgttttggcaagtttgttttgcgttgggttcaaaacctaggaattttttgttttttgggggggggggcaagcaaaaacttaaattcgtttccataccggtcaggggttttaaacagaaaaaaaattttacattgttttttggaatgcaaatttttcttcccagaaggggccaagttttttttacttcatggggggttattggaaggggaccaagggggtggattttttccataacccctgattaacggggggggagatggcccaaaaaaacccggccccggggg

SEQ ID NO: 11588 - DNA, 398 bp, Zea mays
  Clone ID: MRT4577_110568C.1
atgatgtctatgcacgcgtaccgcatgctcggaattcggctcgagggttcacggtcctggtcgcgttttatatgtgccgcggcgagaaccggctgatggtggacgtgttagctaacctcctgacggggacgctccactcgcgcctgaagacgctaccgttgtcacacatccccaagaaggaggcggaggtggcgtcaaccaactacctggcgggcggtgccgggagcgcgcagaacccggccctgttgtgccataaccaggcgctgtccgggggcatcgagcccgttcccgcacgcagcggtgaaacggccaacgccaaggccgaggccgtgtccgcctccgtcgcggacgacgactagcgagtgtcccaagccgctaataaaattgggaccgagacg

SEQ ID NO: 11589 - DNA, 640 bp, Zea mays
  unsure (1)..(640): unsure at all n locations
  Clone ID: MRT4577_110569C.1
actctgagaaccgcacagaanggcattctgctactcttacatctccacagaacacagcagaacaccgtctcccactcctctcacatgtcccaacgccgcctgctctacctcctctccatccaccacgaggccaccgcctctcgcatccacactccggcattccggtatccaacccgaaaacccctgctgccaactgcactgcctccaggatggaattcacggtgatggccacatgcccgcggaccagaccattgcttcaggtgatgatgttctccacaccttcttcaaagagactggagatggcaaggacaggcccccaagctgttcatgatgatctccaaccacactgcaattgatgaggtgaagactccgacctatcctcacctattccatcctgatcaactcattagcggacatgaggaggcaggcaacaactgcgatcctggtcactacaccattgaacatgcacactgcacgacctgcggctagaacggaacgcgaaccttgcacataattgctctggtataccaaaagattgctcgtcattcaaggcatgtgtgagccacagaacaaaaatcagggnctagtgtactactcctgctggacgcgtctgcactgactgactgatgctaaaaactgc

SEQ ID NO: 11590 - DNA, 2924 bp, Zea mays
  Clone ID: MRT4577_11056C.1
cctgccgggcttctattcgtcttcctcctcttccacccatcctgcctgctcacttccgttccgtagtccagctagatccccgggcaaccgatccaccgagaagcttgtggttgtggcggcggcggagagggaagcggggagcgggaggtcggaggtaggcgcggatgccactgttgtgccggcgccggcggggccggtgatgcccgcttgagctgggcctccgtgcgtcggaggtggacgagggagcgaggcggcgccagaccgaggttgcgtcgggctcgatttctactgggctgctgtctgctgagagtaacagaaattggatcaattcaagtagaggtctaggaggagatatgaggtactacttgcgtcaggtccagcgtttggttggagatatggaaggaggagctctcttgtttatagacgacctcaactccaagtgacaaagcgaacagctgttgaacgtttcccttctatttctgtttctttttgctggatttggagatggaggtgaattcctctggtgaggaaacggtgataaaggtaaggaagccatacacaataaccaagcagcgggagcggtggacagaggctgagcacaaacggttccttgaagccttgaaactttatggcagagcatggcagcgcatagaagagcatgttgggacaaagacggccgtgcagatcagaagtcacgctcaaaagttcttcaccaagttggaaaaggaagctattaacaatggtacttctccggggcaagcccatgacattgacataccgccaccacggcctaaaagaaaggctaacagtccatatcctcgaaaaagtggtctcagctctgagacaccaaccaaagaacttccaagtgacaagtcaacaaaaccaaatatgcccttgagcaatgagaatgtactaatggcagaaatttcaaaggaaggagttgtctggaaaagaaagttgctcggaagttcttaatctcttccgtgatgccccatctccatcattttcttcagttaacaaaagctcttcaaatcatggtgcaccgattgaggcaagtaaaacaaaaatccgagatatgaccattatggaaaatagttctcttaaccccaacatgcaagaggatgtaaaggaaatcaatgatcaggagatggaaaggcttaatggtacccaaatcagctctaaatgtgaacactctcatgagggatatttggacatctcaatgcaacaaatgaagctaaagccagagtctgtggagacaacatatgtggacaaacaaaccgcaagagcttcacactccctagcggagagaactgggacaactagcattccggtcactgcaactgaagaaactcattctgttctaacaagtgatcaagtgggaatcaatggaagcatgaacctatccatccatccaatgtttcctgcagatccaaaatttgatagcagtgccacaccacagccttttcctcataattatgctgcctttgctccaatgatgcagtgcaactgcaaccaagatacccacagatcattggtcaacatgtcatccaccttctccagcatgcttgtttccacgttgttgtcaaaccctgccatccatgcagctgccaggctcgcagcatcatactggccagcagctgaaggtaacactccgattgatccgaatcaagaaaatcttgcagatggtgttcaaggaaggagcatagggtctcctccaagcatggcttctattgtagcagctacagttgctgcagcatctgcatggtgggcaacacaaggtcttctccctttcttcgccccacccatggctttttcatttgtgccagctcccagtgctgccttccccacagttgatgttccacgaccttcagagaaagatagagattgcccagctgaaaatgcacagaaggaatgccaagaagctcgaaaacagggacagtttgaaggtttcagagttgccgcttcttcagagtatgatgggagtggaaaaggcgaggtgtctgtccacacagagttaaagatatctcctgtccagaatgctgatgccacgtctgccgcaggagctgacacgactgatgcattcatgaataagaaaaagcaggaccgctcttcatgcggttctaacacaccttcaagtagtgatgtagatgtggacaatgtccctgagaaagagggcaatggtaatgagaaggcgaagcaagcctcctgcagcaactcttcagctggtgacactaaccaccgcagatttagaagcagtggaagcacgagtgattcatggaaggaagtttccgaagagggtcgtctggctttccatgcgctgttcagtagagaaaagcttccgcaaagcttttctcccccacaagcagaaggctcgaaggaagttggcaaggaggaggaagatgaagtcaccacagtggcagttgacctcaacaagagtaccacaagcattgatcatgacctcgacacaattggtgagccaagggcttcctttcccaatgaactgtcgcccctgaagctgaaattgcgccgaacaggcttcaaaccatacaagagatgttctgtggaagcgaaggagaatagggtgccggctagcgacgaggttggtaccaagaggattcgtcttgatagtgaagcatcaacatgagcgatttctacatggttaccgctcggacttcctctgccgccatgaagtttatgacaaagttgtatttacatctaaactagtataggacttaaagaccttgcaatgcaatgcttcatgaaactgttgtgtgctgtattttagtacttgtgaagcagcccggtagactgcttttaaacctttatctcgtagactctgatttaagcatcaagcaactattgaactttatatttttggcgggaaggaaaataattattttttgatttattttgcagggtcatgc

SEQ ID NO: 11591 - DNA, 432 bp, Zea mays
  unsure (1)..(432): unsure at all n locations
  Clone ID: MRT4577_110570C.1
cttgattctgcagattttactgaagtgcagcgtatcagtcaaagcaaggatgctgtacagagtcctttgcagattcaggatgggaagcctgttgattcagagacagcagattcaatatttattgaagacttgatattgcagttttgtgatgatcatcagatgcaatggcgctgtccaaattgtaccaaggatcatgaggagccaagtgccagtgaaagtaaaaatggtgagcagatggtgggaagcggcaaagaagacacaacagttgttggggaccagattgaacaatcagacaggaaagcaaggcacagtaaagaatctgaatgtcacggaggtaatctttcagctgcaaaacagactgagctgttgggaaccaaccaaactgcagatgacagcaaacaacttatgatgcatcncgagaacgtgaaggaa

SEQ ID NO: 11592 - DNA, 349 bp, Zea mays
  Clone ID: MRT4577_110571C.1
tggagttcctggggatgtggctgtttttcgtttttccgctcctttagctttgacttgtgctacccaaaggttcccagagtagacttaactttgcacgccttcaggctgttcgcgcccaaaaccccttaataaatccattcttttgcctcacctcgcgttaaactgttacttacgcggggggattcgagaaaaaaaaacccttggcgttccatggcgtttttgcggacgactggccacccgagcggcggactgaaaacacaggttcccaggccgggagcttgacaaaagaggacgatctccatagcctggtccccaacccatttcggagccggcgatcgaagactctctt

SEQ ID NO: 11593 - DNA, 352 bp, Zea mays
  Clone ID: MRT4577_110572C.1
tgaaccctctatgaaacttggctgttaagcagtgagaaatacacccatactgagatcaatgtcaaccagctattgttaagtcggatgagaaagtcgttgttgcagactttgttgagtcatctgatgggaaaaggtcttggtgtgggtactagcaatcctctggtaacagtgcccggaggtggggaacacatcaacacaccagtcgtttataggtcggatgcaaatactgcaacttctgtgaagcccccagcggaaaggcctaggtggttcgatgggataagtggcctctttcatgatgttgttggttttgacgttcttgtgagagcggttctgggggttttctgtgttgctg

SEQ ID NO: 11594 - DNA, 573 bp, Zea mays
  unsure (1)..(573): unsure at all n locations
  Clone ID: MRT4577_110573C.1
ttctcaggcgcgnaaggtcctcgccgccccgcgcgccgctgcttcccccacanatccttttacagaaaagaagaaacgatgaggctagggctgcggtggccgatctcaagcgcctcctcgaccttgagtgggccaacctcccgccctccacgctcgagctcgtcgccggggacgggtcccaccagactggtgccgctgccgaccacaccatgccgaagcgtgaaattttagctaagcctgtgcaggttggatccgcttctcatcaatcaattcggacgcaagttgctgataacgcgagcaatgccaataaagctgatggcgcccggcgagatgaggcacatccttctaattctaatgtaaactatgaggctgatagtgatcgtgaaagtatggttgggcaccaaaatgcatcggttaaaggagcagagggtcaactttcagagaagtctgtctttacttctaaaaagcgcgttcttgtggagagaattccgaagtgggatagctctgatgatgatcagccagtgcggaagcgcaagttagatccatttgagagaaaaccatatccttctcctc

SEQ ID NO: 11595 - DNA, 873 bp, Zea mays
  unsure (1)..(873): unsure at all n locations
  Clone ID: MRT4577_110574C.1
ctcgaggccggccgggccgggactgcctcgtcgtctcgcatattggcgttggcatcaccgtcggcattgtgcccattaccatgccgccgctgcccgcggccgacgatttactcattctcgagttcatcgcgagcaaccgccgtatcccccacgccgtgttcaactccttcatcgcctcccaatccccaccctccgccttctcccgcacctcacagcgcctccgaaaagccctagtgctccgcgccctcgacgccgccctctacaccgtgggcgcctcctgctcctccagcctcctcctccacaaggcgcgaaaggtcctcgccgaccccgacgcagccgcctgcttcccccaccagattccttttacagaaaatgaagaaaacgatgaggctagggctgcggtggccgatctcaagcgcctcctcgaccttgagtgggccaacctcccgccctccacgctcgagctcgtcgccggggacgggtcccaccagactggtgccgctgccgaccacaccatgcgtacaaagcttcgcctgttcggggagtcagcgaagcgtgaaattttagctaagcctgtgcaggttggatccgcttctcatcaatcaattcggacgcaagttgctgataacgcgagcaatgccaataaagctgatggcgcccggcgagatgatgaggcacatccttctaattctaatgaaaactatgaggctgatagtgatcgtgaaagtatggttgggcaccaaaatgcatcggttaaaggagcagagggtcaactttcagagaagtctgtctttacttctaaaaagcgccttcttgtggagagattctgaagcgggatagctctgatgatgatcagncagtgcggaagcgcaa

SEQ ID NO: 11596 - DNA, 241 bp, Zea mays
  Clone ID: MRT4577_110575C.1
ttctttttttttcgtgtgtttagccaaaagaattcacattttttattatttgttgcaataaaggtaactcatttgggttcatttatatttgtgttacacttggagattgcttctcatttttagtcatagtagtatggttctactatattagattttgcttgtgatagcatttttttttttatcttctatgatgggtttgttttgtgttgtaatgtatatgttattttcaaatttctatttt

SEQ ID NO: 11597 - DNA, 1409 bp, Zea mays
  Clone ID: MRT4577_110576C.1
ctgatcccacactgcaacaagactgacaaagcatctatactagacgagacgattgagtacctgaagtccctccaaatgcaagttcagatcatgtggatgacttctgggatggtgccaatggtgtttcctggtgctcaccaatacatgccaccaatggctctaggcatgaattcaggttgcatccctgcagcacaaggcctaagtcagatgcgaagattaccatacatgaaccaccccatgccaaatcatatccctctgaactcgtctccagctatgaatccaatgaatccactgaacactgtgaaccagttccaaaacggtcacctcagggaggtaccaagacctggaccccatgtttatggacaccaaatagcacaagccgaagaacacaacagaatactggaagtggcagctagtactgttataccaacttctaaggcagggcaaccacctacttttgatggagtttagagtggtcataaatcctgtaaggtgttgcactgataatctgacgatgcatagcgttggtaccttgagttgtatatctgtgcagtagtgtcagcagcatactctttgacatctaagcttggttctagagttattaataggagcctagtataggtaacaagattgcaagacaactacctgtctaccaccatattctctgtggaagaactggagctgcatactgctgtgcagtacagtgttcaagagagaatggaacagatgagtatttgaagcacaacctgaacaggaaatggtcttctttctggcaatcgctgaaaatactgacgtgatgaggagcagattgcatccctatggctgtattgtaatatatctacatcaacatggcaatacgtgtctggacttggatgctacagttacatgtaaatgcagagttgcaggtttggtcggcaggagcatacatcttcacacgacgtggacagtggactacgggccgagacagtggcccaggcacgacacggctcttatatcaggctagcccagacactatttaatgtgtcatgcctcaggccggtccacgagacacggctgaccatctataccacatactctactcctccacggcaacagttcagcatcctcctggcaatggcaacggttcagcgtcctccatggcaactgtgcggagccctagactagacctgctgcaagatggcagaccctcatcttcagagcggattgggtttggatcccctgtactcctccttgctcccctgttgctttcagttcgtctcacggttattgttcagacttcagatacatatgtcgttgtgcctggttggctgtatctggacatcagtttccgtgttgctactattttcccccctgtatttctttataacggacattcaccttataaatatacacacaaaacctctatttct

SEQ ID NO: 11598 - DNA, 246 bp, Zea mays
  unsure (1)..(246): unsure at all n locations
  Clone ID: MRT4577_110577C.1
accaactcttgtttattcaatcttgttctgctcaagaagcgagcgctcgaagttcggtggcgcctcgttctngattcgccccancggtttcaagcctcacgccgggagggggctttgtgttctgtgtngtctctgtgaacgcgcaggcgttgtcgttggcctgcttgtcctccgcctgcttgntttgctccacctcagatttctcgctgctttgcgtgcctggcttgctctggccccggcggttgc

SEQ ID NO: 11599 - DNA, 289 bp, Zea mays
  Clone ID: MRT4577_110578C.1
aacggggggcattcaaaagcattattggttccttaaaaaacaaaggaaaacgggggacatttttatggccggggggcttttacaatttcaggaagcgaagggggttcccccccattgtatttacggggcccgggggggttcccccttaaccgccggttggtggccaccaagacttgcccggtttctggttcaaaagcgactgaaaacttgtcttctcccccatcacctttgaacaccggggggatggaggcatccataagggttcctttgggggaaaaacctggttttt

SEQ ID NO: 11600 - DNA, 536 bp, Zea mays
  unsure (1)..(536): unsure at all n locations
  Clone ID: MRT4577_110579C.1
tcgcagtcgactcagtcgagtcgagagccagcactactactgcacgtcagctaangctaggagcccagcagtcagtncggcgggcgaatgggcggctctcccaatgatccctcctcgtnncagctcttggnncggtggcngcnnctcaggnnngcctgctcgccnnncctcggctnnngccgtcgcctccnnntccttcgctcgnntcgtctggctccccaagaagaaagaatcaagtacccgtnacaagccctaccgggnnattgggggggtggcctgactcgtcngtnacgtcgactgccaacctgggagaaaggggcaanggggcatagggggcgtgtacccagtnnntcgtcgaccaaagtacgntngcgctaacccgtcgaccgggatacccagctccaatcttaccaaccgagtgatgaaactggggtctccctaaccggcgaaacgtctaccgtnncggtgganacccactnnngggcttctgggatccctgggcccccgtcacccttncgcttgggaatcccctcggc

SEQ ID NO: 11601 - DNA, 321 bp, Zea mays
  Clone ID: MRT4577_11057C.1
ataggtctagatcgctagcgatcgagctagtttattcacgctactacacacggggaagggggactattgcattgtttcagcggctcctaaatcaatgctgccagcagtagatttggatgatggacattcagtacatctcgcagaagctaaacattatgatgcatgattgagcgttccgctgtcgtcagtagcatcatttacgagccagctatgatacaatagcaacatcagatgttgccaacccagtatttaaaacgcactgccattatgatatcataaaacatgccggccatagcttgactgtaccattaccagttccat

SEQ ID NO: 11602 - DNA, 1437 bp, Zea mays
  unsure (1)..(1437): unsure at all n locations
  Clone ID: MRT4577_110580C.1
aagcggtttctccaacgctggctggttacaatgacacagagcaaaagactccaattttcccacggctactgaatcacggatgcttaaatctccccaatcccctccggggcggccgggacagcgcggctgcctgtaaccactccaggtctccagcgaagcaggctcaggcgcaacgcaacaacacaaggcggcggttatggcctctgctgctgcgacggctacgatggggacggggaaggtggtttgcgtcaccggcgcatcagggtacatcgcgtcctggattgtcaggctcctactcgaccgcggctacaccgtccgcgccaccgtgcgagacaccgctgacccaaagaaaacattgcacctgactgcgttggatggtgctaaggataggctgcacttatttaaagctagcctgctagaagagggttctttcgatgctgcagttcatggatgcgacactgtatttcatactgcctctcccttttatcacaatgtcaaggatgctaaggcagagttacttgacccagcagttaagggaacactcaatgttctcggttcatgcaagaaagcttctattaaaaaggtggttgtaacatcatctatggctgctgtagcctacaacaggaggccaaggactcctgaggtcacagttgacgagacatggttttctgatccacaaatttgtgaaacaaatcagcaatggtatattttgtccaagacgctggcagaggaggctgcttggaagttctcaagggataatggacttgaaatcgttactataaacccagcgatggttattggtcccctgctgcagcctacactaaataccagtgctgaagcaatcctgaagttaatcaatgggtcatcgtctacatatcccaatttttgctttggatgggttaatgtcaaggatgttgccctggcccatatccttgcatacgaggttccctcatcaaatggaaggtactgcatggtggaaagagttgttcactactcagaactggtgaacattatccgcaacatgtatcctacccttcctcttccggacaagtgtgcagatgacaagccgtttgtcccaccctaccaagtatcaaaggagaagataaaaagcataggcatcgagttgattccactggagacgagcgtcaaggagaccatcgaaagcttgaaagagaaggggttcgctagtttttgactcgagcaagctgtgaaacataagtgttactgtactacgtgatgttgcattgtatacatgcatcggacttcgcagttcccaagctattttggtagctttggtctgtaagattacctaaaataaactgagccacgttgccacgctgtagcttttggacatgttatgctttgatcggattgagacacgtgatatatgatcgttgcttacaaaaaaaaaaaaaaaaaaacgcactnnaaccccaa

SEQ ID NO: 11603 - DNA, 274 bp, Zea mays
  Clone ID: MRT4577_110581C.1
atttccggctggacccactcatccaaacattctatccacttcaaccacaattttactcttaatactctcaaccataaacaaggcctccgaatacttacagaggccttacataattctactattgcactatcaacacactcacaacctaatattaatattccactcattactactactcataattcaccaattcacaataaagtaaccttaattatattcaaatactttgaactataatcaaaccttatacaaaaatttaaaactcctatcaata

SEQ ID NO: 11604 - DNA, 423 bp, Zea mays
  Clone ID: MRT4577_110582C.1
ctctggcagggacacactaacgataaaccgcagagggctctaaagggtaagagcatggcgagtgtgaaagtgaacaagcagctaacatagagacatagctggacgggctgcatggccaaatatcttacgtggatagccaagggacgtaaaccgtgctcactgcaaagatgttatctatgaaacttggagataagcttgctatcatgccagtggcaaaattggatgaccataagaccaataggcgaggagcaaagattaatccaactccatacgaagaatctgatcagagtctgaacggactaggagaaagacccaggctgaacgagccatactgaaaagaagcaattaaggcatataggagaagtgggaaacgcatcttaaacaatccaacagattgtggagcacactatgtggagcacaata

SEQ ID NO: 11605 - DNA, 394 bp, Zea mays
  Clone ID: MRT4577_110583C.1
tcataacttcccccccactaggctatataacctattttctttgattcctaacctttctacttcagaagaactttttaataaaacagcaaaccttcacttctccatctactttcccaattccactccctattcttcaaccccctctcaattatctcataaaaacaacttattcttaccttatacatatcaccttattataccaattatttgcttcctcaatttacattccaacctctaatccactttcaacttttttaccttgaatcattatcaattttaaccaatccattacatttttactttacactaacatcaagatcaaaactctaatatccctatattcattttctactattttcttatcatcctaacatttataaaatttcacttcctt

SEQ ID NO: 11606 - DNA, 828 bp, Zea mays
  Clone ID: MRT4577_110584C.1
atggagcggcggccgccgcaccaggagaaggcggcgaggcggacccttccgcggcgcgggcagatcaaggcaggcatcttcgcgagcctgttccggtgcatcgtcgcccccgaggcacccgcgcgcaaggaaggcggcacgaacaaagatggcagcagcaaccaccgcggctgcaagaacaaagatggcggcagccaccgccgcgtctcccccgttctcacccacgaggccacagtgcatgttgacggtgtactctgtttctttcacttgaacaaggattttactcttccagtgaagatcatcctccacccgacgcccatggacttggatgacacacgcccacctgatgacgcgattcccaacgtgccttcgccacccgaagcaccggctttctccgtcgcgccctcgccggctgacgcgattgccttgctgccccgtcgtccaggctccggccggccgtgctgcaggaaggtaatgggaggcgaggtggcagcctccccaggcctcagtttatgggcccgtcttcgtttggctagttcgacatcatattacttaggactgggcattcgggtaatacgggcggacggcggtggagctcgagcagtacgcccaagcaaggagtcgcagtcgcagtacgccgccggctgcctgctggtgctggagcttgagcagtcgagcgcagccgcgcccacgcaaggagcagaacgccggacgccgggagcagttgacggcggggcggcggccgagcaatggagtccaggcggacggcggtggacggcggggcggcgggctgcggcaggcggcggccgagcagtgcagaagatctag

SEQ ID NO: 11607 - DNA, 512 bp, Zea mays
  Clone ID: MRT4577_110585C.1
agcgggaaagcaccggcaacatttaaatacaaacttaggggtaaacccaaaaaccccccctaggtttttaccctagcccccccgccccatcgtgcccttaattactggggaacaacgtgccccagttactggggaaaaccaagtctacactctttgggggaaaaaaaatttacaaggcccccgtccctgcaagagggggagaaccactcctctccaaaagggggcagccatgtgcctttctacctaaaacgatcctgaaaatgggggcccccgaccaaactcttgaccttgcgaaccccccggcttgataggtcccgggagccaaagggtaacccacgttggccgttaaaagggcccggaaaagccctggtaatgaaggccggaaagcaattcgcgaacctaatgtaaaaactgatgagcgcagggaatgggcgcgccccaggtaaaactagatggggcgcgcgctgccttaaaagaagggcagagcccaccggtcgaatactgatggggaa

SEQ ID NO: 11608 - DNA, 833 bp, Zea mays
  Clone ID: MRT4577_110586C.1
gtttctgtatggttatggtgcgatatttaactttattgggcttgttgtcactgctatcatccaagggcccggtagttttaacattctagaaggccactcaaaggccacgatgtttcttatctgcaacaatgctgcacagggcatattatcatcatttttcttcaagtatggagatacaattttgaagaagtactcgtcaacaattgcaagtatcttcaccggagtagcctctgctgtgctgtttggccacacactgacgataaattttgttcttggaatttcaatagtaatcatatctatgcatcagtatctttctaaccaaattaaggacgaagtgcctagcagcaaagttgaaatggctgaagctcatgatcacagcagaaaggaacctagttatgtcaacgtgcctgattcaggggcaagtgagatgaagtctaaacaccgccatggatctgacgagaggcagccacttcttcccgtatgattttgtagaagaggcgcactgtttcctcaacagagcagcatgtaaagagtatttttagcgggtatttgacctaattgtctctgaagcaacattggtgccatgctgttggcggggtaaagtatatgcatattcggcggcagtgacgagcttcgtgaagtacactaatagagtaatggtctttggatgaatgagtcgataactttagcctaatgggtggtaaaactagtgtgataagatcagcgaggaataaagtcaccaccattgatacagccatcagccgtggttctactctctctctcgcggcaccatgtaaatagaaatatcagttcatttctgatggcgcgtgcca

SEQ ID NO: 11609 - DNA, 238 bp, Zea mays
  unsure (1)..(238): unsure at all n locations
  Clone ID: MRT4577_110587C.1
aaaattaggttgaaccataaattctgattttaccacaaaaaacccaggagggaaaaaaaacatttgtgacgggactgggcaggacatgcgagaggaagcaaaatgcaggaactggacaacaaagacaaattncntcgcggtgcgggaaggtttacggtacaagaacaaaacaaagactctccacttacttgaggaacaagcaaagtaaacaaaaaaacaaggctcctcttaatacagg

SEQ ID NO: 11610 - DNA, 457 bp, Zea mays
  Clone ID: MRT4577_110588C.1
aatacccgggccagacccacggcgtccgacgagttgcctgcaatctgctgcgctatcctgttatcaaccaagtacgatatggcaaagggtttggccctactctcatcaacatcaattctttccattcaaccaactgcttacatcgtaccatgctgcttatttgctgcaacaactattaccatgcagacatatcgctaccggctactctgacaaacaacaactacttgcattctaccaatcgtccgcaatcaaccgtgctgctgatttgcaggatccaactctactaccatgtacacatgtcgccgccggatgatgtgcttccttcttgacacaactacagtagttgcctttctaccactcattctcatctcaacccacaaccttgttacaactacaacaattgttgcacttcgtgcaacttgctttgacaaagccagcatggtcctaccaacaacac

SEQ ID NO: 11611 - DNA, 1896 bp, Zea mays
  Clone ID: MRT4577_110589C.1
cctggccgggaaaaatatatgtacattttcaggtcccctctccctctccgctccccattgccgcattgctctccctcggctcggtccctctccggctctccctcacggcctcgcccactgcgccttcgaggagctccgaatcccgatcgcctcggtccccgcgagctcacatggtgggggcgcgcaccagaggctagggttcccagttcccatcattctcctgctgattaaaaccgtggggttttggagagcctgaggctgtggcggcggcaggaatgaacggggaggtggaatgcagcgtgtgccatgcgaaggtgccggtgccgccgccggtgtcgaaagcgtacgacagccaccggagcactgtgtcgtcgcggcaacgtgcgctaaacgtgctcctcgtctccggcgactgcgtccttgccggcctccagcctatattagtgtacatctcaaaagtggatgggaaattcaaatttagcccaatcagcgtgaatttcttgacagagattacaaaaattatgtttaccattgtaatgctattcatccaggctagacgtctaaaggtgggagacaagccactttttacagtttcaatatttatgcaggctgctcgcaataatgttcttctttcagtacctgcttttctctatgctatcaacaactatttgaagttcataatgcagttatattttaatcctgctagcgtgaaaatgctgagtaatctcaaggttctggtaatcgcagtgcttcttaagatgataatgaggaggcgattttccgtaatccagtgggaggcccttgcccttttgttaatcggaatatctgttaatcagctgaaatcattgccagaaggttctagtgtgctaggtcttcctgttgcagctggagcctacctatatacattgttttttgtaacagttcccgcattggcttcagtttacaacgaaaaggctcttaaaagccagtttgataccagtatttaccttcagaacttgtttctgtatggttatggtgcgatatttaactttattgggcttgttgtcactgctatcatccaagggcccagtagttttaacattctagaaggccactcaaaggccacgatgtttcttatctgcaacaatgctgcacagggcatattatcatcatttttcttcaagtatgcagatacaattttgaagaagtactcatcaacaattgcgactatcttcaccggagtagcctctgctgtgctgtttggccacacactgacgataaattttgttcttggaatttcaatagtaatcatatctatgcatcagtatctttctaaccaaattaaggacgaagtgcctagcagcaaagttgaaatggctgaagctcatgatcacagcagaaaagaacctagttatgtcaacgtgcctgattcaggggcaagtgagtctaaacaccgccatggatctgacgagaggcagccacttcttcccgtatgattttgtagaagaggcgcactgtttcctcaacagagcagcatgtaaagagagtatttttagcgggtatttgacctaattgtctctgaagcaacattggtgccatgctgttggcggggtaaagtatatgcatattcggcggcagtgacgagcttcgtgaagtacactaatagagtaatggtctttggatgaatgagtcgatacctttagcctaatgggtggtaaaactagtgtgataagatcagcgaggaataaagtccccaccattttttcctgtcttgtgagttggtgagttgatattgatacagccatcagccgtggttctactctctctctctctttctcgcggcaccatgtaaatagaaatatcagttcatttctgatggcgcgtgccacggtgccaaccaaagatttttttcttgtt

SEQ ID NO: 11612 - DNA, 307 bp, Zea mays
  Clone ID: MRT4577_110590C.1
aaaaaaaaaaaaaaaaaaaaaaaaaaaaaaaaaaaaaaaaaaaaaaaaaaaacaaaaaaagggcgaacaataatgggaagggccggcctctttaatggtgccagctataccaacgctttcttgcagcgtcataaatattcaatggtgtgacctaaattcaatacactggccgctgttaaaaccgtggggaccggaaaaaccttgctgtgacccaaattaatcgtcttgcagcaaatgccctttccaacagttgccgtaatggcgaggaggcccacaccgatcctccttcacaacattaaggcaccct

SEQ ID NO: 11613 - DNA, 240 bp, Zea mays
  Clone ID: MRT4577_110591C.1
aggccggccgggccgggaatctccgccgacactgtatacactaagagtgagcgtagagcgacagcccggtcgaaacagcggccggtggcaaaatgttgtgatggttacaattacctcaagcgccatctctacgccattaaagctctgcacaccccattgtttgaaattcctgtgggaatggttgtgtattattacaccatgaatggcgccaatattctaacatgtgcctgctctttgcat

SEQ ID NO: 11614 - DNA, 406 bp, Zea mays
  unsure (1)..(406): unsure at all n locations
  Clone ID: MRT4577_110592C.1
tcctctcttcggccgccgccgccgccggttccgtcgtctccgcccgccgtcgccgccgcttgcgtcgtctccgcccgccgtggccatgccgtcgcacaagaccttccggatcaagaagaagctggccaagaagatgcgccagaaccgccccatcccctactgggtccgcatgcgcaccgacaacagggggggggacaacgctttttttttttcactggcgncgcaccaaacncggannctgagcggnggaagaaaagctggctcaccgcgcctagagggtatagggctctgcaagctaggaagctcttgcttaattttttatagctagaggtatttgccattgcaggaccatgccctgcctgatgggtaaagaaccgcctttatgctatggggaagggaaaagaaa

SEQ ID NO: 11615 - DNA, 1410 bp, Zea mays
  Clone ID: MRT4577_110593C.1
cgagatctcgattcgtctggaagacatcgctactaccccagccacagtacccattgggtatttatctgctcccttgctgaagctggaatgtgcagctcgatcggttagcgctacgagtcctcgctgaatccagccaaatgatccccttgagcttgccagttagagcacgaagtaacagctagctaagagaagcacaagaaaaatctggtagcttgagttctgactcgaactcagagatggcttatgcaagccccgggactgatgatacgtcgacagatctagatactgacgagaagaatcacatgttggagctagggcagcttgtgtcccttacagcttctgattccggcaacaaagcaaaggacaagctactaggtcaaaaggcactgcgccgtctggcccagaaccgtgaagctgctaggaaaagccgtctaagaaagaaggcatacgttgagcaacttgagaatagcaggctgaaacttagccagctggagcaggaactccagcgtgctcgccaacagggcatcttcattcctactccgggagacgaccagcagccaaactctactagtgaaaaaggtgctttggcgtttgacaaggactacgctggatgggaagacgagcacaggaagcagataagcgagctgagggccgcgctcagcgcacacgccggtgacgacgagctccggcgcatcgtggacggcgtcatggcgcatcaccacgaagcgttcaggctcaagtgcgtggcagccagggccgacgccttccacgtgctgtcggggatgtggaagacccccgtggagaggtgctttatgtggctgggcggatttcgaccgtcagagattctaaagttcctcgcaagccatctggaccccctcaccgagcggcagctcgcgagcgtacacggcctgcagcagtcctcgcagcaagccgaagagggcatctcgcagcgggtgcaagcgctgcagcagtcggtcgcggagaccctcgcgtcgtcagggtccccgtgcctgcctgtgcctgcaggtcgtgctcctccgcctggcgacgacgccgctccagactgctcggggacgatggcggcggcggttgcgaagcttgtcgctcttgaaagcttggtgcatgaggctgacggtctgcggaggcagactcttgagcagatgcagcgcgtgctgaccacccgccagtccgcgcgggcgctgcttgtgatcagtgactacctttcccggctacgcgctctgagttctctctggatcgcacgaccacgggaatgaattcagctcggcttatgtatctttgtttgacccggccgtggagaaaaataagaatcgaagatgcctccgctccttccatcatcactgcatgtaattgtaatctgaacatcattataaacagccgtaaccgttggcc

SEQ ID NO: 11616 - DNA, 1887 bp, Zea mays
  Clone ID: MRT4577_110594C.1
cggccgggatccggctcgcgacaggtttctgggcgagcagtctgcgagatctcgattcgtctggaagacatcgctactaccccagccacagtacccattgggtatttatctgctcccttgctgaagctggaatgtgcagctcgatcggttagcgctacgagtcctcgctgaatccagccaaatgatccccttgagcttgccagttagagcacgcacctaatataatgctggccttccgtcagaagtaacagctagctaagagaagcacaagaaaaatctggtagcttgagttctgactcgaactcagagatggcttatgcaagccccgggactgatgatacgtcgacagatctagatactgacgagaagaatcacatgttggagctagggcagcttgtgtcccttacagcttctgattccggcaacaaagcaaaggacaagctactaggtcaaaaggcactgcgccgtctggcccagaaccgtgaagctgctaggaaaagccgtctaagaaagaaggcatacgttgagcaacttgagaatagcaggctgaaacttagccagctggagcaggaactccagcgtgctcgccaacagggcatcttcattcctactccgggagacgaccagcagccaaactctactagtgaaaaaggtgctttggcgtttgacaaggactacgctggatgggaagacgagcacaggaagcagataagcgagctgagggccgcgctcagcgcacacgccggtgacgacgagctccggcgcatcgtggacggcgtcatggcgcatcaccacgaagcgttcaggctcaagtgcgtggcagccagggccgacgccttccacgtgctgtcggggatgtggaagacccccgtggagaggtgctttatgtggctgggcggatttcgaccgtcagagattctaaagttcctcgcaagccatctggaccccctcaccgagcggcagctcgcgagcgtacacggcctgcagcagtcctcgcagcaagccgaagagggcatctcgcagcgggtgcaagcgctgcagcagtcggtcgcggagaccctcgcgtcgtcagggtccccgtgcctgcctgtgcctgcaggtcgtgctcctccgcctggcgacgacgccgctccagactgctcggggacgatggcggcggcggttgcgaagcttgtcgctcttgaaagcttggtgcatgaggctgacggtctgcggaggcagactcttgagcagatgcagcgcgtgctgaccacccgccagtccgcgcgggcgctgcttgtgatcagtgactacctttcccggctacgcgctctgagttctctctggatcgcacgaccacgggaatgaattcagctcggcttatgtatctttgtttgacccggccgtggagaaaaataagaatcgaagatgcctccgctccttccatcatcactgcatgtaattgtaatctgaacatcattataaacagccgtaaccgttggccatcatcacggtcagtccgcgcgggcgctgcttgtgatcagtgactacctttcccggctacgcgctctgagttctctctggatcgcacgaccacgggaatgaattcatctcggcttatgtatcttgtttgacccgtggagaaaaataacaatcgaagatgccttcgctccttccatcatcactgcatgtaattgtaatctgaacatcaatataaacatccggaattatttttttgttctcacgaacaccgtttcacattaaaaaccaaacgaacagcttggctgattataacctggtccttgtaactatattcaaaatctattctacaaacaatacggtctacaatgtaaaacaatgttttagatgaactatgagtggactgtcaaaaaagtcgacgcggccgcg

SEQ ID NO: 11617 - DNA, 779 bp, Zea mays
  Clone ID: MRT4577_110595C.1
gcgagaatctcgattcgtctggaagacatcgctactaccccagccacagtacccattgggtatttatctgctcccttgctgaagctggaatgtgcagctcgatcggttagcgctacgagtcctcgctgaatccagccaaatgatccccttgagcttgccagttagagcacggtgagtcagcaaagattaaaatagcctccgcacctaatataatgctggccttccgtcagaagtaacagctagctaagagaagcacaagaaaaatctggtagcttgagttctgactcgaactcagagatggcttatgcaagccccgggactgatgatacgtcgacagatctagatactgacgagaagaatcacatgttggagctagggcagcttgtgtcccttacagcttctgattccggcaacaaagcaaaggacaagctactaggtcaaaaggcactgcgccgtctggcccagaaccgtgaagctgctaggaaaagccgtctaagaaagaaggcatacgttgagcaacttgagaatagcaggctgaaacttagccagctggagcaggaactccagcgtgctcgccaacagggcatcttcattcctactccgggagacgaccagcagccaaactctactagtgaaaaaggtgcttttggcgtttgacagggactacgctggatgggaagacgagcacaggaagcagataagcgagctgagggccgcgctcagcgcacacgccggtgacgacgagctccggcgcatcgtggacggcgtcatggcgcata

SEQ ID NO: 11618 - DNA, 337 bp, Zea mays
  Clone ID: MRT4577_110596C.1
gacaaaaggggccctcgaaattaatgaatgcattcccctgggggccccttgccaatgggttcaaatttgatacctttcaacgggaaccaattccaaagaataccccttaaggtgggaaactacccaacctactagtttacaacaacgtttcctcctaaacccaacaaccgggtttcgatggatacaaaccaaaacattcagggcccgtgtatgggggtacaaaatttgaaacaaaacatggtcaagtcacgggcccggtattttggcccggccccgaagcactggacaaaaattagatgggttgacaaatttatacccgcgcagggggggcttttca

SEQ ID NO: 11619 - DNA, 670 bp, Zea mays
  Clone ID: MRT4577_110597C.1
cagccagggcggacgctttccacgtgctgtcggggatgtggaagacccccgtggagaggtgctttatgtggctgggcggatttcgaccgtcagagattctaaagtacagttcctcgcaagccatctggaccccctcaccgaacggcagctcgcgagcgtacacggcctgcagcagtcctcgcagcaagccgaagagggcatctcgcagcgggtgcaagcgctgcagcagtcggtcgcggagaccctcgcgtcgtcagggtccccgtgcctgcctgtgcctgcaggtcgtgctcctccgcctggcgacgacgccgctccagactgctcggggacgatggcggcggcggttgcgaagcttggcgctcttgaaagcttggtgcatgaggctgacggtctgcggaggcagactcttgagcagatgcagcgcgtgctgaccacccgccagtccgcgcgggcgctgcttgtgatcagtgactacctttcccggctacgcgctctgagttctctctggatcgcacgaccacgggaatgaattcatctcggcttatgtatcttgtttgacccgtggagaaaaataacaatcgaagatgccttcgctccttccatcatcactgcatgtaattgtaatctgaacatcaatataaacatccggaattatttttttgttctc

SEQ ID NO: 11620 - DNA, 314 bp, Zea mays
  unsure (1)..(314): unsure at all n locations
  Clone ID: MRT4577_110598C.1
cttnaaaaaaaaaaaanacaccgtggggcgggggcgggtgggatccagcagtccaggggggaccggggcacatnnttattctcagcatagnaccaagcagcaaaaatggtgctgcgaccaaaggccatcgggngacgacctctcgataggggagggcgagaaatatctctctctacnntgggtcttgaacatgtggggggggcaggntcnacnacgctggttgctttgtagccccacttcgttgtgcgtaccaagagaacgagcttgatgaaagtggntcgttcaagttctagatcgcggagcggcgcgcttct

SEQ ID NO: 11621 - DNA, 153 bp, Zea mays
  Clone ID: MRT4577_110599C.1
attttaatcctataatatgggttaaggcacccttcataattacgttcttctcaaaaatctataaccaaactcctttacatcaaatctatatttcccaaaatcttcccaattttccataaacccgctatttccataataccattctctaccctc

SEQ ID NO: 11622 - DNA, 364 bp, Zea mays
  Clone ID: MRT4577_11059C.1
aaagagcttgccgagcccgtcgtgcgccgggcggcacatgtccactactttgcgccatcgacggagccgaccgcttcggatgcgcacgcggcaatggcattatccttcgcctcgacggctgagttgaaccctttacagacgccgacgactgcgaatccctctgaaacaccggctccgaccacctcgcaggcgccatgcctatcgccttcaacgttccagatcagctttcagaaacagccgcaatcacagcaacagatggcgccggcggagcaacctccggagccgtagacgcagacgcagtcgcagccgcagaagctgatgctggacacgacagatatgaaatctgcgggatacagcaccaagt

SEQ ID NO: 11623 - DNA, 372 bp, Zea mays
  Clone ID: MRT4577_1105C.1
gtccagtgaaatgtgtaaaacaggaggttgataggtgtggggaaaaggaaacggtgagtcaccatggatggaagtgctgggagaggagggggatgtgttatttctggctggctgccatggcacggcggcatggcatggcatggcagcagctcttgggcgcttcttggctgagattcggaacatgcgttgtgcggttgagccttcccggatctgtcctggctgcacggcatggtatcccacacgtgagagagcaacctccttcgcctgtacggaggtgtagatacagttttctcttgctttttcatgtgtgtgggcctgttcgcctgtacgaatggtgaaggtaaacagagagtctccgctggattagggaga

SEQ ID NO: 11624 - DNA, 273 bp, Zea mays
  Clone ID: MRT4577_110600C.1
caccgccaaaatggtcaagaagagaaagaacaacggccgcaacaagaagggccgcggccacaccaagcccatccgctgcagcaactgctcacgatgcactcccaaggataaggcgatcaagagattcaccatccgcaacatggttgagtctgctgccatccgtgatatctccgatgcctctgtcttcgccgagtacaccgtccccaagatgtacctgaagctgcagtactgcgtctcttgtgccattcacggcaagattgtccgtgttcgttc

SEQ ID NO: 11625 - DNA, 402 bp, Zea mays
  Clone ID: MRT4577_110601C.1
taaattaaacatgcatgtcatgattctcaatacatatatttaaaaaacggacataaaaacaaacatcaacatccaatgatcagatttttatcaaacaattgctttcaaactctaccaagcctaatgatgtatcaactggcatgacatgacttgaatttctctctcttatccttggaccctggaacaccatgagacaaatgaatgaatatgcacaataaaccaaagcaaactgcaatagaaaaaatgtgaagcaataacacaacaatagatggacaagtatataataggcattgctgctaatttccaagtgtacatgcagtagtagaaaacagaaacaatcattgtggttaataagtgcaaatgttttttcatgctcagcatttgcttgtcatgcaatttaaa

SEQ ID NO: 11626 - DNA, 778 bp, Zea mays
  unsure (1)..(778): unsure at all n locations
  Clone ID: MRT4577_110602C.1
gactcctatagggcgattgggttcatacgagccggccgggccctcctactccccggccattcactcacccactcacctagctagtcatcactagtcacgttcgtctaccagagacaacaatggccatggagacgtgcttcagagcgtgggcgctgcacgcccccgctggcagcaaggacaggctcctcgtcggcaacctgcaggtgctgccgtcgaagcgggcgctcgcgccgctgtccgtcggccgcgtcgccacgcgccggccgcggcacgtctgccagtccaagaacgcagtggacgaagttgtggtggcggacgagaagaactgggacgggttggtgatggcgtgcgagacgccggtgctggtggagttctgggcgccgtggtgcgggccgtgccggatgatcgcgccggtgatcgacgagctggccaaggacgacagccccaacgtggcgtccacctacggcatccgcagcatccccaccgtgctcatcttcaagggcggcgagaagaaggagagcgtcatcggcgccgtcccaaagtccacgctcaccaccctcatcgacaagtacatcggtagctcatgagcatgccatgcatgcatgcatcgacgactaaacacatatgtgtatctctagtagcctttgcatacgggatatgatcaattcaagcagccagccgtctgctactgctgtgttatatataccatacctccatgtcgaatccagagtacattnaattagtttcagttcacgatttcgattcagtatatatatat

SEQ ID NO: 11627 - DNA, 585 bp, Zea mays
  Clone ID: MRT4577_110603C.1
gccggccgggttcggattcactcactcacctagctagtcatcactactcacgttcgtccaccagagacaacaatggccatggagacgtgcttcagagcgtgggcgctgcacgcccccgctggcagcaaggacaggctcctcgtcggcaacctgcaggtgctgccgtcgaagcgggcgctcgcgccgctgtccgtcggccgcgtcgccacgcgccggccgcggcacgtctgccagtccaagaacgcagtggacgaagttgtggtggcggacgagaagaactgggacgggttggtgatggcgtgcgagacgccggtgctggtggagttctgggcgccgtggtgcgggccgtgccggatgatcgcgccggtgatcgactagctggccaaggactacaccgtgaagatcacgtgctgcacggtgaacacggactatagtcccaacgtggcgtcgacctacattatccgcagcatccccaccgtgatcatcttcaagggcggcgagaagaaagacaatgtcatccgttgtcgatacagagtccacgctcgccaccctcatcgacaagaacatccctagatcgtgagcatg

SEQ ID NO: 11628 - DNA, 216 bp, Zea mays
  Clone ID: MRT4577_110604C.1
gccctaccatgaacgaagcttttgattttgatattagcgatgctgacactacaagaagggctgatggatatgaaagcaacacaaggcagaatgattcgttgccctctacatcaaagagagatccagagtcgaatcattgggcaagtgatggccagagacaactgactactggtgggagcaatagctcaacatctgaaaggggctatggattcgaga

SEQ ID NO: 11629 - DNA, 1568 bp, Zea mays
  Clone ID: MRT4577_110605C.1
gggtacctcgaagccggccgggtcaggattcactcacccacctcgagcccggccgggactcggccggccgggacagggacgaaggccctgcccacctcacgttgctgctcccaaatatctggcagggaaccgcccggggccggctcctacgccccggccattcactcacccacctagctagtcatcactagtcacgttcgtccaccagagacaacaatggccatggagacgtgcttcagagcgtgggcgctgcacgcccccgctggcagcaaggacaggctcctcgtcggcaacctggtgctgccgtcgaagcgggcgctcgcgccgctgtccgtgggccgcgtcgccacgcgccggccgcggcacgtctgccagtccaagaacgcagtggacgaagttgtggtggcggacgagaagaactgggacgggttggtgatggcgtgcgagacgccggtgctggtggagttctgggcgccgtggtgcgggccgtgccggatgatcgcgccggtgatcgacgagctggccaaggactacgccggcaagatcacgtgctgcaaggtgaacacggacgacagccccaacgtggcgtccacctacggcatccgcagcatccccaccgtgctcatcttcaagggcggcgagaagaaggagagcgtcatcggcgccgtcccaaagtccacgctcaccaccctcatcgacaagtacatcggtagctcatgagcatgccatgccatgccatgcatacatgcatcgacgactaaacacatatgtgtatctctagtagcctttgcatacgggatatgatcaattcaagcagccagccgtctgctactgctgtgttatatataccatacctccatgtcgaatccagagtacattaattagtttcagttcacgatttcgattcagtatatatatataaaaaaaaaaaaaaaaaaaagcggccaaacggccctattccaagaactgggaggggttggtcctgacaggaggatctacctgccgcatgtgctggtggaccgatcggaggtgccggagtacctcaccggagaggtccctggacgacccttttggcctgggcaagaagcccgaggacttcgccaagtaccaggcctacgagctgatccatgccagatgggccatgctcggtgccgctggcgctgtcatcccagaggcctgcaacaagttcggcgctaactgtggccctgactgtctggttcaagaccggcgcgctgctcctggacggcaacaccctcaacgtgtacttcggcaacagcatccccaccgtgctcatcctcaaggtcggcgtgatcgaggagatcgtcatcggctccgtcccgaagtccacgctcaccaccctcatcgacaagtacatcggtagttcatgagcatgccatgccatgccatgcatacatgcatcgacgactaaacacatatgtgtatctctagtagcctttgcatacggaatatgtcaattcaagcaaccaaccgtctgctactactgtgttatataaaaaaaaaaaaaaaaaagcggccccccgaagcccccagcctttttgttccccttt

SEQ ID NO: 11630 - DNA, 158 bp, Zea mays
  Clone ID: MRT4577_110606C.1
ctcaaatgtatccagtgctgtcacttgatgatggaatcgatacggagctgatggaccaagttcgctgatcatcatgacggtgtgcggactatggtacgtgcgttgtagcagatgtccgctgaaacgtctaacggttgtcgggtatcgaggcgtctcag

SEQ ID NO: 11631 - DNA, 516 bp, Zea mays
  Clone ID: MRT4577_110607C.1
gacaagcttttttttttttttttttttttttttttttttttactatttttttttttttttaataggaaacttttttttttgtttattttgattacacctctagggaaagggaaaccattatacctgggacaaaagcaccccaaggggggggtccacaacactggaaacccgggcgggggacccccaaagggggaacaccctcaccggggggggggggataagggggccccgggggaaaaccaaacccggggaaaattccgcgaaaacaaacggtccggggggaaaaagggaaaccccccaggggcccaaaaaataaacccccgaaccttaaaggggaaaggcgggggggcccaatgagggagggaaaacccattaaggggggggggctaatgggccggccaacaggcgggaaaacgggggtgccaacttgaaaaataaaccggccaccccccggggaaaggggggttcccaattgggcccctttcccgatccgtattaactgactcaaaggggggg

SEQ ID NO: 11632 - DNA, 307 bp, Zea mays
  Clone ID: MRT4577_110608C.1
gttcaggctacatggatcaccttataggaagtatgccatactttggggcttcaccagcatccctggcgtgtcatagccaactctatggtgcctggtgactgtgctagattcatgagaatgctatgcatctgctcattcgatacggatcaacaccttgacttgtatatatgctgtacatcccgaacggtgaacatgtactaactgcaccctgtgtccttacctagggtacataaatgccctgtattgattgaaaaagaaaatgtacatactatcatgtggccgccaaatggaaccgtgccagttatac

SEQ ID NO: 11633 - DNA, 191 bp, Zea mays
  Clone ID: MRT4577_110609C.1
gtcataatgtaccaattggtgtgtcaatgtacatctttataggacataatgactaccaacttcacttgctttcatcttctttcctaccaaagaaaatgaaagcaagtgaagttggtagtcataatgtaccaattggtgtgtcaatgtacatctttataggacataatgataattcaaatcaagttatgatc

SEQ ID NO: 11634 - DNA, 455 bp, Zea mays
  Clone ID: MRT4577_11060C.1
ggaacagaagctactagctccagcacaaaacacctactgcttcaactgtaccgttagacatgtcaagggtgttggagcctctcattgtggggaaagtgattgggaggtcctggaccatttcaaccccacggtgaagatggtggtcacctacaactccaacaagcaggtgttcaacgggcacgagttcttcccttcggcagtggccgccaagccgcgtgttgaggtccaagggggcgacctcaggtccttcttcacgttggtgatgaccgaccccgatgttcctggacctagtgatccatacttgagggagcaccttcactggtaataatttttatcatcaatgcgagaattcataataatatagtctatatatatcttgctagataaagtaatcgtataagtaaatactgtacttaataagggggtatcacctattatctactatagtgtagcgc

SEQ ID NO: 11635 - DNA, 1687 bp, Zea mays
  Clone ID: MRT4577_110610C.1
agactgttttatatacaataattcttcatggcgcctgaactactgcgttggaggagaggttactacaatgtttcacttggatcggcctatgtatttattaggatatcttgctaaccaaagtcgtgtatatcttattgacaaggaatttaatggggtgggttatactttactactcagtttgattgagtacaaaacacttgtgatgcgtggggatttggaacatgcgaatattattttaccatccataccaaaggaacaacacaacagtgtggcacatttccttgaatcgcgtggcatgttggaggaagcccttgatatagccactgaccctaattacagatttgatctggctgtgcagcttggaagcctcgaagttgcaaaggaaattgctattgaggcacagagtgaatcaaagtggaagcagttgggggaacttgctatgtccactggaaagctcgagatggcagaagaatgtctccttcgaattcggcaccagagtgggttattgcttctatattcatcacttggagatgctgaagggataacaaaactggcatccatgtctaaagaactaggaaagaacaatgttgctttcctttgcttgtttatgttaggcaaattggaagaatgtcttcaattgttggttgatagtaatcgtattccagaagcagcactgatggcacgatcttaccttccaagcaaagtttctgatattgtctcaatatggaaaaaggacctccaaaaggtgaattccaaagctgcagaatctctggcagatcctgctgagtacccaaacctgttcgaggactggcagattgctctgaatgtagaagctactgttgctcccaagaggggtgtctacccacctgctgaggagtacatgacttatgcggagaggtctaatgacagccttgtggaagttttcaaaagtatgaatgtggaagaagtaccaagtgataatggagatcctgttcatgaggtcactgaggatgacggagtcgagggaagtatggatgatgttgttgaagttgaacccgatgattcaacagatggcggtgtccttgtgaatgggaatgatggtgaggaacactgggtgcttactcctgaccagcagtagagatatcacgacaacattctgcaccagcagattagttgcctattgtaaaaaattgtaggtcgccacatgttcagactcgatagtcatgtaaaagaagttcctccccatttgtacaaggcgttgtgcgtggtctagtattgcggttacagaaacagtcttggatggtaattagcatttggtctagataagaaattttgtaattcgattcattttgggtgggcattgtagatttgtggtatgttatagattatctacccttgtatgtttaccacatgatacgatactaacattctttaaggttggaatttgttcaccgacacatgggctgcgacctgcatagcatgtgaaagttgtatttttggttccccagttgtcgataacttgatccttggtttctgccatgtattgtactgccttcttgtaacttattttgccttttttagatgtactgtttttagtatatagtgtatttagatacaatgtataaccagttgtataataaaaactagttaagtgtccgtacgtcgctacgacacataaatcaaaaaaaaaaaaaaaaactttgcggcc

SEQ ID NO: 11636 - DNA, 638 bp, Zea mays
  Clone ID: MRT4577_110611C.1
cccagcgtccggccgacttcctcctcacgagttcgccgcgctatccgccgctgcaggggcgtcggatgatgacgaagacgtggaggatgaggatggtgggctcgctggcggggagggctccggggaggctaggcggcggaggatgctggcgagggaggaggcgaagctggagaaggagattgttcggatggtgctggccggggaggccgaggacaagctcaagcccaattcgggccagtccgtggctgtcggcgaccaccacctctgcgtcggtttccacgacgatgccagcggggagtatcgcatctgggaatggcatggccacgtcatgctgttcgacgacgaggaaggatactccgcagagtacatttatggcaatgccaatcgctccaaggagaacggtagcagcggagggcccagggtagtgcgcaggaatgtcgtcaatggcccaaccacgcctgctaggtaatggctttctagagcttgcagtgtgcttggtggaagaagcagtgccgcagtgcatcaatctgtgtgacaaaagcaaataaagatctgttgtccttttctcgcttatagctgtttaagctgtctattgtattctgttgagaaatcaatcacatctatactttgtttctgtt

SEQ ID NO: 11637 - DNA, 425 bp, Zea mays
  Clone ID: MRT4577_110612C.1
gcaggcacgcctgcgggagccgggccggacagtaactgagctgggtcgacgagctcatcttttcggcggccgccctttcttttttgctgtgcgatcagtaacgagagcggtgtgcatatcaggaggagctgaaaacgcatgtgtcgctcttaatgcggagaagaaggctgccttccactactctggatgctacacgaacgtccgcaacgtccaaaagttcttcaactgcgcgcaggacgtcaacgaggccgacataaatactagggggagcgcgggcggcactgaggaccattggaaacagatcaagagattgtaacaaggacacgaagaaaggagtgtcctgtgagtgtcacgaggctggccctatcttctaggcgcgagaggagggcaccacggttctgtactcatgaccacacagagagagg

SEQ ID NO: 11638 - DNA, 1256 bp, Zea mays
  Clone ID: MRT4577_110613C.1
cattgggtacctcgaggccggccgggggcgtggtcattccccaatccccaagtccccaacctgcagccctgcttccacacgaccacgaggcaacgcaacccccaaacccaaaaccctaccacggcgcccatggcttcgccgccgccgccgcctcctcctcctgcccggcaccccacctccgcagcaaccgccgctgcggcgggcaatggccacgacacctccgcagcaaccgccgctgcggcgggcaatggccacgacacctccgcttcgccggtggacgccctcttcctccagaacctcatgacccgcgtccagctccgcccgcccttcctcgacaccaactcattcctcactcaggaccttgacgacttcctcctcaacgagttcgccgcgctatccgccgctgcaggggcgtcggatgatgacgaagacgtggaggatgaggatggtgggctcgctggcggggagggctccggggaggctaggcggcggaggatgctggcgagggaggaggcgaagctggagaaggagattgttcggatggtgctggccggggaggccgaggacaagctcaagcccaattcgggccagtccgtggctgtcggcgaccaccacctctgcgtcggtttccacgacgatgccagcggggagtatcgcatctgggaatggcatggccacgtcatgctgttcgacgacgaggaaggatactccgcagagtacatttatggcaaccacttcgagccgctcgctgctgccacagccagggccaagaagaaggagaaggagatgagagagaaggaattgagcatgggtcttcgggatttggtcgtggacactgacgacggtggcaatgccaatcgctccaaggagaacggtagcagcggagggcccagggtagtgcgcaggaatgtcgtcaatggcccaaccacgcctgctaggtaatggctttctagagcttgcagtgtgcttggtggaagaagcagtgccgcagtgcatcaatctgtgtgacaaaagcaaataaagatctgttgtccttttctcgcttatagctgtttaagctgtctattgtattctgttgagaaatcaatcacatctatactttgtttctgttaccacaagtacactttacctcttggggttttaaatatattcgttattcactttgcttctgttaaaaaaaaaaaaaaaaaaaaaaaaaaaaaaaaaaaaaaaaaaaaaaaaaaaaaaaaaaaaaaaaaaaaaaaaaaaaaaaaaaa

SEQ ID NO: 11639 - DNA, 363 bp, Zea mays
  Clone ID: MRT4577_110614C.1
attcggctcgagggcacaggcactttgtatgcgaacaccgacggtcggtcggccgcgggaccgttcaagcgcgggctgtgccccctcacacagctggggccctggcacaccataagcaagatcaagaggtagaaggggttcaatttccgcttccacaacacagactgacaaccttggctacgccatgactcacttaatgtatctgccacactcagcggcggccaaccatcccttgctgtagaggctataaggtctgatatatgcccacgagacactaatcataaatatgcgctgccaatcgcgcccgccatgcccacggcatcgccctgctgaaccagtcacctactcaccacggtaaaatat

SEQ ID NO: 11640 - DNA, 354 bp, Zea mays
  Clone ID: MRT4577_110615C.1
ctcatctactccgggacccgagggctcctgacagctagactatatggtcccgtgccaaggcccgcttgtcttttcgagctctccaatcgccgtgcctggggcgagctctctgacccgatcgcgctttcagtcccgcgcggtttttcagacgcctaccggcgggcgcgcgccaacatttcagcaattcacgtctagtatgccctttgcggactgcgtggcgtcttcattttcctgttctggcaggaggatacatgctcgatcttattgcctgcttctccgcctgggtcgagctctactttctctcggaccgctacatagacgggacgctcgggatttgtggcggggcatagggga

SEQ ID NO: 11641 - DNA, 2303 bp, Zea mays
  Clone ID: MRT4577_110616C.1
accgctggccggctcacagtaccagaggagtccaccggaggagctcagctagactcccaccctggtggctcgatcggcaccggccgctgcctgcgagactccgccagcgcgcgatgtaccgggtgaagagcgagggggagggcgagggcgagggcgactgcgaaatgatgctgcaggaacagatggactcgctggtggccgacgacgtcagcagcggaggagggtcgcctcacaggggcgtcggcacgcccctgaagaaggggccatggacgtccgcggaggacgccatcctggtggactacgttaagaagaacggcgagggcaactggaacgcggtgcagaagaacaccgggctgttccgctgcggcaagagctgccgcctccggtgggcgaaccacctcaggcccaacctcaagaagggggccttcacccccgaggaggagcgcctcatcatccagctccacgccaagatggggaacaagtgggcgaggatggctggtcacttgccagggcgtactgacaatgagatcaagaactactggaacactcgaataaagagatgtcaacgagctagccttcctatttatcctgctagtgtatgcaatcaatctacaaatgaagatcagcaactgtctggtaattttaacggtggcgagaatatatccaatgatcttctatctgggaacagcctttatctgccagattttaccagtgacaatttcattgcgaacccagaggctttatcctatgcaccacagttgtcagctgtttcaataagcaatttgctcggccaaagctttgcatcaaaaagttgtagcttcatggatcaggttgaccaagcggggatgctgaaacaatctggctgtgtgcttcctgcattgagcgatgccattgacagtgtgctttcctcagctgatcatttttcaaatgactctgagaagctcaggcaggctttaggttttgattatctgaatgaagccaatgctagcagcaagagtattgcacctttcggggttgcacttactggcagccatgcctttttaaatggcaatttctctgcttctaggcccacaaatggtcctttgaagatggagctcccttcactccaagatactgaatctgatccaaatagctggctcaagtatactgtggctcctgcaatgcagcctactgaattagtagatccttacctgcagtctccatcagcgaccccttcagtgaaatctgagtgtgcatcgccgaggaacagtggtcttttggaagagctgcttcatgaagctcaggcactaagatctgggaagaaccaacaatcatcggtccgaagttcaagttcttctgctggcacaccttatgagactaccacggtggttagcccagagtttgatatgggtcaggaatattgggaagaacagcccagttctttcctcagtgaatatgctcattttagtggaaattctttcactgaatccactcctcctgttagtgctgcgtcacctgatatcttccagctctccaagatttctcctgcacaaagcccttcaatgggctctggcgagcaggcgttagagcctaaacatgagtcggcagcttcacctcgtcctgaaaacttgaggcctgatgcattattctctgggaacacagccgatccatccattttcaataatgccatagccatgctcctgggcaatggcattgatgccgagtacaaacctgttcttggtgatggaattgtgctcgattcttcgtcatggaacaacatgcaacatgcttttcagatggcgggattcaaatgagttccatgcacttgtttgtgatgctgaagggcttcttgttgcttgttttggggtcagtatcagcgaaggccgcattgattgtgacgctgcattcctgacagagggcgtgcaggtgcagcagctaccatatgtgatcttcatgctaatagtccttttgtctaataaagtgcatgaagataaaccggatatttttttttttgctttgtattagagaaccgtttttgtcaaccctgtcaggattctgttggaaatgtgtcatgatttttgtttgaacaatttaatatctgtcattgatactgtgctgtgtgccaaaaagctggctcaagtatactgtggctcctgcaatgcagcctactgaattagtagatccttacctgcagtctccatcagcgaccccttcagtgaaatctgagtgtgcatcgccgaggaacagtggtcttttggaagagctgcttcatgaagctcaggcactaagatctgggaagaaccaacaatatgaaatctcgtgac

SEQ ID NO: 11642 - DNA, 220 bp, Zea mays
  Clone ID: MRT4577_110617C.1
cccactcgtccgcccacgcgtccggttctagatcgcgagcggccgccctttttttttttttttttttttttttaattcataactgtagtataaaatatattccataacgatcacattccaaactaaaatccagggggattttaggaaattcccaatttttccaaagtgttgcgtggcccaattcctcggtaaggacaaggagtatggcacggggttaccc

SEQ ID NO: 11643 - DNA, 1392 bp, Zea mays
  Clone ID: MRT4577_110618C.1
gtcaagtattgcctcaagtgcctccttaacaggtatggcgagagtgccgaggaggcggccggcaaggaggactggatctgtcctaagtgcaggggcatctgcaactgcagcttctgtagaaagaagaaaggcgagatgccaactgggataatggcccacatcgccaaggcttccgggtgcacctctgtccatgatctccttaaaaaggggtcagatgtggtttctgctgcacaggcgattctcaaggtgaatggtagtgacaagggcacaaagagatcccgagggacagatgctgctgctgaggtggcgactgaaaaggatgtaaatataggcattgatatcaatacagttatagcagatgaaggagatgaaaatataggtgttgatctcaattcacttccttctgttgataccaagaaaaggcagaagcggcagaagctcaagcacaggacaaagaaggatcctgctgatgcaacgtcacatggagtcaatactgaaccattgcagatggatgggaaccttgattttctcaatagtaaaactgtgcgacccaggggtaccccagtcactaaaattgcaggcgcagagcttgatgacgaggatactggggctgcaattcagtttatagaattctgccgtgcatttacagaggtagtccaagatttttcaaataaagaaaggccaaccagaaaaaattcttcaagatttagttggaggccgtgaacttcggtttgtatcctcagttgttgctgggtttcatataaatttgttatctgtcattcaagaaggaaaggggaagaagcctctggcttacacaagagacggagatgcatgggtaattgatattggcaaatatataagtgaatcagcttctatatcaaaagggttccccctcaaccatatcaatcaggggatatcaggatataaaaacttgagcccttcttcaagctgaggaactggattgacatgcaaaatgacatagctgctgaaccagtgaatgctgctagagaaaaggcgcgtgctgcaaaagaaatggtaaaggagctaaaggaaaggctaaaggacaacatgaacaaaataattgtttcaccaaatgaagcagcagcctctaacagtgaagcaaataagtatattatttcccaaataaaggaggcacaggaagtcaagcgtgcagccataaatgacatggcaactatggagaagcaaggaggtttttggaccaagcctctgatggtagagaaaggggcagcatattggaagttagatggttactgtgataactcagcaatattgcttcaagagtatggtggcgatgaattaatggcaaataaagacaagtggtttatgtttactgaagacgaggagaaaataattgaaaaacatttagccact

SEQ ID NO: 11644 - DNA, 290 bp, Zea mays
  unsure (1)..(290): unsure at all n locations
  Clone ID: MRT4577_110619C.1
ccgcagttccacaccaccaaatccctaggggctcaggcctcacccattcattcgtccatcccacctaccatggccaccgcctccggcactgacgccggtgcccagccgcgcgacgaccccagcctcctccccttcgcgtccttctcgctcgggctctccatccgggcgccgggcacccccaggggggggggggggncctccacccttcacctncccacttaaatttttacactcgccgtctgcaaaaaggtggggagaaagggggtgtcaacgcggaagaactttttggg

SEQ ID NO: 11645 - DNA, 1752 bp, Zea mays
  Clone ID: MRT4577_11061C.1
acgggtagatgccactgccgtcccctacagaagttcgatacagttcggattcgctgtcgctcgaggccggccgggccgggggttcctccagaagtagccatacggattcagatcgcggccgcggcgactccccgagcagaagaacccgatcgaacgcggccgcggcggcgactccccgatctcagatccctgctgcgagcgaagggttccattcgagcagagatggcggcggcatgggaggtgctggctgtgttgctcgtcgcggcgcaggtggcgtcggcggcgcaggtcacggcgccagcgttcctgtgggcgcccaaaaactacggattcagctctgatgatgctaaggaggtagtccattaccaaacaatctcaccaaagagcttagctaaatctgttctcgaggaaggtggctggtcaaacttcatgtgctcaagggaggatactcagaataatgttgatgttgccattgtttttattggctcaaagctgcaatcgtcagacatatctaaagataagcaagttgatccagctttagcagacacactgaagctctccttcacacgctcagagttttccatggcattcccctacgtttccacgacagtcgacgagagactagaggactcgttgctatccagctttgccgagaactgcaacaatggtttcggaagaaaccgcgtcacctacacagacacgtgtaccggtcaagatctgaagaaataccacaacatggatgccatcaatgacctggtagtgtcaggggtagcgtcaaggagagccaaccacccaagtggacagaccgatgtaatcgtcttctgtagcggcgggttcgagaatccaggcactgcgaaatcagaaggagagctgctttcccagcttgtggactcgctggacttgtcgggagccaaatacacggtcctctatgcgtcccaaccgtctggtttgctggagagcccttccggcctgccgctgggtaggcatctcgcggagaagaagactaacggcacgaaagctgtccagggcgaaaaatgcgatggcgagtgcctcgtcaaatcgagtctcctcgaaggaactttcgttgggatagtgcttctcatcatcctgatatcaggactcatgtgcatgatggggatcgatactccctcgaggtttgaagctccccaggagtcttgatctctcccttggactgcagaatccgcgggggggttgtgacgagggcacgcggcggcgttgaggggggccggtgttctgttggtgtgcactgtggatatatattgtttagcttcccatttggaaggggagtacgccttgtgtatttttttgtaccgagccaactgtcactcacgatgtgctagaattttttggtgtaatatttgcgtttcgcgcctatggacaactaataagctgaggcattgcagcagataaattcatgtgctgcgtgaggcaggcttgtgttgtgtaccagacgcacagcattgttgcctccagctagtgctttctgtgtgaaataaacctgaaacccagtcccaggccaccgcaccaataaagatgggtactatgcatcaatcaaaaaaaaaaaaaaaaaaccctaaaaaaaaaaaaaaagaccccaaacgaatgcatgtgtgtgaggcttgtgctgtggccagacatagcattgcctccaggtgttttctgtgaataacctggaatttcaggtgggtactgtgcatcaaataaaaaagatgaaatcttgctgttgcaccc

SEQ ID NO: 11646 - DNA, 489 bp, Zea mays
  Clone ID: MRT4577_110620C.1
gggaaaacaaaaattggttgattttccccaccaaaaataaaatttggatggcaacatggtcttaaatgttttaaaaaacatgattttaaaatagtccaataatttcaaaaattttccccattcaacaccacagtaaaattggtcgccccccaattaaattaaacttggtttaatagcaacatcaagtcgtttaaactaaaaaacggccacaaaacgcaaaacacccattatgggttgggggccccggggtatatttgcgggctaaaaagaacaaaaaccatccttatgagcccctttgccataaaaaccttgatggccccccgggccaaggatccattaaccctgaggggctaaaaaaggaaggatggggggaactgcttggacttgggccccttggagagcaccttattgtagggggcctggccaaaaaacacaatgttttagaccttttccttttggtaacccctggtccaattttttttttttttg

SEQ ID NO: 11647 - DNA, 2073 bp, Zea mays
  Clone ID: MRT4577_110621C.1
cccacgcgtccgcttcttttaactggagcagcagagaactgaaagtgcccgcctctcgctcgcatcaggaaatcaacgactgagtctccacgactgtcggtcacttcggatggcggcaccaccggaggggaatgtccgcttaggcgaggggtgggacgaggacgacgtgctggagccgcagccgctggaggtcatagcgccggatgtcaagtccaagaagcgcaatccggcgcccggagttcgggttgttggtcgccggatctacgatccagagaatggcaagacctgccaccaatgccgccagaagacaacagacttcgcagcggcgtgcaagcaagtcaagaagaagggtccgtgcccagtcaagtattgcctcaagtgcctccttaacaggtatggcgagagtgccgaggaggcggccggcaaggaggactggatctgtcctaagtgcaggggcatctgcaactgcagcttctgtagaaagaagaaaggcgagatgccaactgggataatggcccacatcgccaaggcttccgggtgcacctctgtccatgatctccttaaaaaggggtcagatgtggtttctgctgcacaggcgattctcaaggtgaatggtagtgacaagggcacaaagagatcccgagggacagatgctgctgctgaggtggcgactgaaaaggatgtaaatataggcattgatatcaatacagttatagcagatgaaggagatgaaaatataggtgttgatctcaattcacttccttctgttgataccaagaaaaggcagaagcggcagaagctcaagcacaggacaaagaaggatcctgctgatgcaacgtcacatggagtcaatactgaaccattgcagatggatgggaaccttgattttctcaatagtaaaactgtgcgacccaggggtaccccagtcactaaaattgcaggcgcagagcttgatgacgaggatactggggctgcaattcagtttatagaattctgccgtgcatttacagagatttttcaaataaagaaagggcaaccagaaaaaattcttcaagatttagttggaggccgtgaacttcggtttgtatcctcagttgttgctgggtttcatataaatttgttatctgtcattcaagaaggaaaggggaagaagcctctggcttacacaagagacggagatgcatgggtaattgatattggcaaatatataagtgaatcagcttctatatcaaaagggtttcctctcaaccatatcaatcaggggatatcaggatataaaaacttgagcccttcttgtaagctgcgtgttctgaattttctttgtgatgagaccctctctactgacaagctgaggaactggattgacatgcaaaatgacatagctgctgaaccagtgaatgctgctagagaaaaggcgcgtgctgcaaaagaaatggtaaaggagctaaaggaaaggctaaaggacaacatgaacaaaataattgtttcaccaaatgaagcagcagcctctaacagtgaagcaaataagtatattatttcccaaataaaggaggcacaggaagtcaagcgtgcagccataaatgacatggcaactatggagaagcaaggaggtttttggaccaagcctctgatggtagagaaaggggcagcatattggaagttagatggttactgtgataactcagcaatattgcttcaagagtatggtggcgatgaattaatggcaaataaagacaagtggtttatgtttactgaagacgaggagaaaataattgaaaaacatttagccactaggtaatgagtttgtcttgccacgtttggatgtgtttctacctttccaatgatggtgaacttctcttttgttgcttgtatatcatgaaatttatctgttggaaaccctatctgtattttcttctgttgttgatcctccaactattgctatcaaaaaccattttatgtagtagcatcctaacaaatgtggcatacaattcattccagtatacctgaactattgtgatcaatgaactccaacatgtaacgaatgattagagttgacaatcagtccttctacgg

SEQ ID NO: 11648 - DNA, 266 bp, Zea mays
  Clone ID: MRT4577_110622C.1
tcgagcctttctttttttttttttttttttttttttttttttttgggttttttttttttttgtttttttttttttttttttttttttttttttttttttttttttttgaggtggaactttttttccagccctaatggagaccttgtcttatgggtgggtacatgttctgtaatccttgacaaatgccggcccatattaaaaccaggacccttccttgcccaaaccttttggaacagttgcctgcactggacttaataaaccgtttt

SEQ ID NO: 11649 - DNA, 537 bp, Zea mays
  Clone ID: MRT4577_110623C.1
gggacaggggggtaaataaaaaaaaaggggaaaaactttttacaaaaggaagggggggggaaaccctaaaaactagaaaaaattggggggcccgggttaataacagggccccttgattaggggaaaaaaaaaaactactatcgacaatttttttttgggaaaaacccaccctttttttttgcccccccgcaaaacccaaacgggttttttttggcccaattccatgggccccggcacatttccccgattccaaatggggccccccaggcaagctttttttaagccttttaaggggacgcgaaaacccccgggggggaacccgggctccgggggcacaactgggggggaaaccccttgccgggggcctttttgaaccccccccccctttccaaaacggaggggccggcccctgtccccaaattgggggcccccccccctattttaggagaggccaaaagctttttggcccctgggagggccccatcgggagggccaacaacgggtatggaacccctgaacggggggccgccccggggg

SEQ ID NO: 11650 - DNA, 245 bp, Zea mays
  unsure (1)..(245): unsure at all n locations
  Clone ID: MRT4577_110624C.1
ccccacnccatccacggcggagatggaccggngaagagatnggccttgtncctcgcccggncntngaacttcccgcaacaanganatcgggctgcncacttgccngcggcgggggcancgggncngcagcgggaacaatgaagagcaancnaacggttggaacgccgccgattcnatgaagacggaacccagaaanacgangannangangacgaagangaantcnggaancatgtcggnanaac

SEQ ID NO: 11651 - DNA, 666 bp, Zea mays
  unsure (1)..(666): unsure at all n locations
  Clone ID: MRT4577_110625C.1
tcgagccggcccgccagatgtgattggaatatcatgcagaacatctcgccctttaagtcgatggtcgcaggcacgagtgtactctactcaccaagtcggatgtacttcggtactgtgaaaatacccaattctttcaacncctaacaggactcncaacatggcaactcgcagcttggcactcattacncttttaatcacccctttggttccttccaacaattcactcatgcccttcttacaacaagttacnctttatggtgcattttacttgngcaccaaaaacaactcatgggcaccaacanaccttccaacaaactgtggtgcttaagcaaacccttgcttgccttcctcttcagcaaccaagcagtttctttcctttcaaccaactaggttcattgaactctgcttcttatttgcaacaacaacaacttccattcagccagctacctgctgccttcccccagcaatttcttccattcaccaacttgcaacattgaactctcctgcttttttaccgcaacaacacttcttccttcaccactactggtgtgaagcctgctaccttttgacaaaccacagtttgccgttctaccagcacgttgcgcctaacgctggcacccttttacaactgcaacaattgctgccattcaaccaacttgctttgac

SEQ ID NO: 11652 - DNA, 393 bp, Zea mays
  Clone ID: MRT4577_110626C.1
acggacgcgtgggcggacgcgtgggcggttgcgattttgacaccatagaaccttcagtatctacatatttgtaaggtgagtaacaatcattcttattgcaaggcacattcttcttgattcttattcctaatataatatttggcaaaacaataaaatacaatggtgcttgtaccagaagtagaataaatatttgtgcttgcctacgtatcattgctttgagaagaaagaggtggggaaaagaaaccccccaagttacagaccaccaatacaaacaaacaaagagcagtgacccactaaaatcagccctaacagaattcatagtattccatacaaattcaacacttattaatctaggtttatgcttttgattccatgttttataaacacagttca

SEQ ID NO: 11653 - DNA, 683 bp, Zea mays
  Clone ID: MRT4577_110627C.1
agctccttgtgcgcgagcggctggccggtcacgggggatgcgccgttccctccgtccagccagcctctgatggtgtcgatctacaaagttggtctaaaacagttgtgttctgagggggtgcggtgcgggatccactccacgccgtcgcggccaaccggcaacggccggaccgagcagatgtgacgacttgctcatctactacaacccaagttctggtagtcagtcaggtcttcatctcatcggagatcagacgacagggcaacagccttcagtagatctgcttcagtagatcgccggctacaacagattatccctgcaccagttcgagttggagaaaacaaacttccaccgtcttgggaccctatatcctctcctttagataacagagctgtgttggaaggagggttcatcggagagtggccactaacatattctgcagactgttgatccatatatttcagatgagagagtaggattagttgaacctgcagaaggaatacagactgtgccctcctcatgggaaaaaactagactatttaatatgctttctatgctcacgccattgagcacaacacacaatttgaacttgttgctttgagttgcttgtactgacttgcctgtgaaaaaactttgctttggtctgaagaacaccgaaagaaaaaaaaaaaaaaaaaaggccccta

SEQ ID NO: 11654 - DNA, 388 bp, Zea mays
  unsure (1)..(388): unsure at all n locations
  Clone ID: MRT4577_110628C.1
tttctgccaaccggcagtgcgtctagtaggatcggcggtcggcatcagcatgtaagatggtcatcgttctcgtcgtgtgcctggctctgtcagttgccagcgcctctgtcttgcagatgccctgcccctgcgcggggctgccgggcttgtncggcgctggcgccggcctgacttcgatgatgggcgccggcgggctttaccccttcccggagtacctggggcagccgcagtgccgcccgctggcggcggcgcccttcttccccgggtgtgggcagcctggcgccttgttccacccgttccggtcactttgctgcctgccgccgttgaggatgatggccttgcattccggttcgcagcatctgctgttgatgttgctgtttgagcgtgc

SEQ ID NO: 11655 - DNA, 314 bp, Zea mays
  Clone ID: MRT4577_110629C.1
aaaaaaaaaaaaaaaaaaaaaaaaaaaaaactagaaaacctaaccaaacaaaacaatcaaaaagaaaaaatttcaactcactgaccagacgaaacaaaaaaaaaacaaggcttgtaacctaccccgggcggcctctttaaaagggccatttcccggcccctggctggccgttctttgggaatccccgcttggtcccaagccgggggtattcagggcaaaacctggttcccctggaaaatggtttcccccccactattccccacaacctccctgccggattcttaaagggaaaacccggggggccctcagggggg

SEQ ID NO: 11656 - DNA, 333 bp, Zea mays
  Clone ID: MRT4577_11062C.1
cccacgcgtccgcggacgcgtggggcagttagcggagggtgcccaactcgtcggacccgcggcacaaccgctgaagcgcctgccattcgtgctgcttccacggttccacctctgctgttagttatacataccgtacctctggtcgcatgctttttggctgcacaatgtggcttggtattcagacttcagagaatttaattgcgtatacgagagtaaatgtagctgattttggtctagctggtttgccgtttcgagcgcttgtaaacacaaattcgtcggcagtttacaccgggccgtgtgtatataaatttcctgaagtctgtgtcttcgctc

SEQ ID NO: 11657 - DNA, 1827 bp, Zea mays
  Clone ID: MRT4577_110630C.1
atgagattccgttcggccggctgttccccaccacggcgagcgcgagctgcgctgccggtgtcccacgcggtgactgggactcggcgaggcagcggtcccggcgtccacatcgcgcgcggcgaggcaagcgccaagcgaggcgtcggccagcccgctggtccagctgttgctggattgctgctcgagcttggcgaggccagcccgcagtccgccacccgctcgttcagccggttcctctcaccgcgctgccaccgatggcgacgaacctgggcgtcttgtgccgtgctccccgaccctcgcccgcgtcaacggccgccgccccctcgcagtccctctctccctcctccgcctccgtacacattccccattcgacccagcgcggccgcctcgccgcagctccaccactgccacgttgtgtagctagtcccatgcttggccgtgtgcaagacgaaactggggacgacggcgccgcggggtacacgctgactggtgtctgacagacagccaatcagttcttcatgtatatgaaaccagaaacaaaggactggagaaaattattggtgtttagagaggagtggcaaaggtatagagggcacttctacaagcgttgtcaagtgcgcatacatatggaggctgatccctcattgaaacaaaagttggttgtacttgctagaaaagttaaaaagatagatgatgaaatagagaagtacatggaactcttcactgagctcagagagaaccctgctgatattaatgccattgttgcaagacgacggaagaagttcactggggaattcttccgccatcttaatttccttgtgaatgcttataatggccttgatgagcgagatggaatagtcaggcttggggctaaatgcctgtctgcaattcatgcatatgattgcacactggaacagttggatattgaatctgctcagtcgaagtttgatgatatactgaattcctcttcactagatggtgcttgtgacaagatcaaaagcttagccaaggctaaagaacttgattcatctctaattcttctcattaacagagctttggctgctgcaaaagattttacaactatgaatgacaaggtcaaggacataatgtatcatatttatacaactacaaaagaaagcctcaagagcatctcacctccggagatgaagctgctgaagtatttgctgaatattgaagagcctgaagagagatttggtgctcttgcaactgctttctctcccggagatgggcgtgaagctaaggatgaagatgctctatacacgactcccagcgaactccacaatggatcaaaatgcttctcgactcataccatctcaacaaggaggagacggattttatggatgcgagaaagatgagcgacccggtgatcatccaaaggctaaccttgctgaaggagatgatcgaggaagaatacatgaagcggtatatacatcctgaggaggaagaagaacccatggacgacagctagcaccagaatgctctgagcgaagcgagcctgtatgtgtaacgccgactcggaacaaacggtgaagatttagaagggacattctaatcgctgccaacgttgacgatccatataagtagtagatagccgatgccctgctccttttttttacgaggcgatggatggtaaatttgtagcatggcaatggcatcatcaggaatggtactttctgttacatgtgtaaagctcaggatttgttttgttcttaggttcgcaattttaaagatgacacgtttaattcaaaaaaaaaaaaagcggccaaaaaaaaaaaaaaagggcggctgtttgcgatccccaggtcc

SEQ ID NO: 11658 - DNA, 336 bp, Zea mays
  Clone ID: MRT4577_110631C.1
tgataaaaaaaaaaaaaaaaaaaaaaaaaaaaaaaaaaaaaaaaaaaaaaaaaaaaaaaaaaaaaaaaaaaaaaaaaaaaaaaaaaagggcggggcgttttagaggtatccggtcttactttcgccgtccttgcgacggccctcgttttttcttttgttgtctccttaactttaattccctgcgcctgtcttttccatcggcgctgactgtgacaacccctggcctttgcccaactccttgtggtttgcccttcttgccccttttcgcttgctgcggttgttagcaaaagcggcccgggcccgctcgtctttccctttggttgggcttgctgaatg

SEQ ID NO: 11659 - DNA, 223 bp, Zea mays
  Clone ID: MRT4577_110632C.1
ctcacactcgcgaactccatttcgatcacattctaaatcaacgcattctcgtttatgtcctccagcattctctcagggtcagggccaatatcacaattggaaccaatgaaagacgcagcatcggaagtactctctcacgaatctcctcccataatctcctcgctacatgcgctggccacgctcgttcctttcctggcctacattcacgctttacctttgctcc

SEQ ID NO: 11660 - DNA, 470 bp, Zea mays
  Clone ID: MRT4577_110633C.1
gagcagcggagatcacgcttgatgaactgagctttaaacaccattcccgaacttagagacaaaaatgctctacctgctgccaccggagaagtcagctaaaaccgtatgctgcttcacgtacacccatgatcccctagcatgcaccctcagaagcgggggtgggagctttcttctttttctatcaacaagaccccttctccattctcacagaccacgcttacagactgacacatgcacagatgcataccactgaggacctgccagagcatccttccatacggtccaagaagaaccttaccgacggccttgacaataccgtggctgctggtaaagatggtaaagcttggaaacatgccacctctacacaccttagttgacgtgccatacacagccttttgggcggcagggatggcatgaacaagggccataacgccctcacttatgaccaagttggcatgaatgaccttaac

SEQ ID NO: 11661 - DNA, 781 bp, Zea mays
  Clone ID: MRT4577_110634C.1
tctcttgagcggaaccgactgtccggcaccattccaccttccagcatcggattgcttccatcgctgaatatccttgatttatccggcaatgaaatcaccggtgccataccgccggacttcaacaacctgaaactcaacaagcttgacatgtcgtcaaaccagctcaccggcgaggtgctgccctcgttgcagagcgcggcatacgagagcagcttcgtcggcaaccacgggctctgtgctaggaaaggctcgggggtagacctcccgaaatgcggcagtgcccgcgacgagctctcgaggggcttgatcgtcctcttctccatgctcgccggcattgttctcgtcggtagcgtgggcatcgcatgcctgctcttccggcggcggaaggagcagcaggaggtgaccgactggaagatgacgcagttcacccatctgggcttcaccgagtcggatgtgctcaacaacatccgtgaggagaacgtgatcggcagcggcgggtctgggaaggtgtaccgcatccacctgcctgcccgtgccggcggcgacgaggagcacggcggcagcggtggcggcaggatggtggccgtgaagaggatatggaacgcgaggaagctggaagcgaagttcgacaaggagttcgaggcggaggtgaaggtgctgggcaacatccggcacaacaacatcgtgaggctgctctgctgcatctccagccaggacgtgaagctgctggtgtacgagtacatggagaacggcagcctcgaccggggctgcacccccttga

SEQ ID NO: 11662 - DNA, 1543 bp, Zea mays
  Clone ID: MRT4577_110635C.1
cccacgcgtccgcggacgcgtgggtgagaagcctgttaaaaggagtaccataatagcaaaaaaactcctctggagcatcgaccgactctccacctgaggaccgccagctccttcctccgcctcgacaagcgttggagagatggtgaagagaagcaagaagagcaagagcaagcgcgtcacgttgcggcagaagcacaaggtgctgcgcaaggtgaaggagcatgacatggaaaaaatggttacaaaggctgatccaagtaaacggattgtactacttcacaacaagatagatcttgttcctaaggaagcggtagagaagtggcttacatatctgagagaagaaatgccaacaattgcgtttaagtgtaatacccaagagcagcggaccaagccgggatggaaatcttcaaaactagataaaacaaacagcatcccacaaagtagtgattgccttggtgctgagaatctaattagattgctcaagaaatattccagaagccacgagctcaaactggcaattacggtgggtattgttggactccctaatgttggcaagagcagtctgatcaacagcctgaagaggtcccgagtggttaatgtcggttccactccaggggttactagatcaatgcaagaagttcaattagacaagaagatcagtgatcctgcgccgtggtgatcgcggccatcgttcgccgatggtctgcgtcgtcttcactcgtcagggaaccggctgtgacggcttggttctaacaggcgccgatggaggccatggagctcgtcgtcgcgctcaccgcctgcgccgactccgtcgcagcctgcaaccacgacgtcgccaactactacctcgtgcggctgggcgagatggcctcccccgcggggcccacgctgatgcaccgcgtggccgcctacttcgtggaggtgctcacgctgcgcatggtgcgcatgtggcccagtcgagatctggtcattagattcaatagtgtggtactggtggcatgtggcccagccgagatctgacagttcttagaaaaattcagctttcatttccaatcgttacagctttaaactattatgatcgttactttttcattggcattattacttgagaaaccattcaaaacatccactttgcttttgataaccatgaatttgtaggttcatgcaaaagcatttaagtttgctaagttgcattctaagaacatgtatcaataatgattggaaatgaaagctgaattttttaccggcgagaggctactggagtttgcacctggtggtgtgagctgcgcaccacctccttcataggcagatgtcatctatatggaagcggcaggaggtggaagcactatatatgacacctctatcgctcttgttgattgctggggtcaacatgtgccgctgctgcacttggtgggcctagggaattctaggactctgggctggtttggtgggtagtgaaatttaaatagcaagtgattttctctctggatctcatctattttcttgtccaccgaaccagccttaagatttgttctgtctggat

SEQ ID NO: 11663 - DNA, 298 bp, Zea mays
  unsure (1)..(298): unsure at all n locations
  Clone ID: MRT4577_110636C.1
ttggctcgcatcttctggtggggtgggggctggctgaactacttctttcctagaggggatggatgccaatcattcttgctcgtatgactggccttttttctacctttgacatgatttgtgttacctcaggatacctgaagctggcttcccaactctncatccatatctttgggggcttgttcgggggacatttcccttctnactcccttttctctctcaattacaacgttatttcttctccctcacctcctcttactcctcccatcttttcttctcttctcactaactttacaccata

SEQ ID NO: 11664 - DNA, 306 bp, Zea mays
  Clone ID: MRT4577_110637C.1
ttttacttcagtacccaaagggagattcttgggggggaggtttttaaacggtttggggaaagcaaaggcccaagcttcggaacagggccccatgaaagaaaagccccccaaaaaagaaaggacccccaaaactggcgcgtgtgcctcaccctctggttgctggccacccacccgaacaagaggatgaaccccaccaaaaggcgggcacttacctgaaattggagggtacgggggcatactaggaagttgatgcacgccgctcaactaagttagcaggcgggtgagggggaacaatcccagggaact

SEQ ID NO: 11665 - DNA, 216 bp, Zea mays
  Clone ID: MRT4577_110638C.1
gaagcatctttaccttttagcatccacaatgtcaatgtcaaacatcatattagcccacccaccaaaaaaacttgggggactggaacggtggcggtttttgactgagttttttgtttccaggggggttaaaacaccttccgaaggcctgacctttgtcggggaaatcttgtttccacacttccgaaagtaggggggctgcatcaaggggaaggattt

SEQ ID NO: 11666 - DNA, 416 bp, Zea mays
  Clone ID: MRT4577_110639C.1
tgcaaactagcaaaatctgccactggctacttattagatatgggtaacattatacttttcaaagaattgacaaccaaattgtgaaaggtgtaggaatttacctgtgaaagtgaaataaagtttggtgaagttcaataatgtttattcagagaagctagttctgtcaggagctaaaagtcgtcttcacttattctagtgctaagttattagtggtgaccacagggtactggtgggagaagtatttatggtgaatgctttgatgatgaaaattttacactgaagcatgttggtcctggtgtgctaagcatggcaaatgctggccccaacacaaatggaagtcaatttttcatttgcactgtgaagacaccgtggttggacaaccgtcacgtcgtgtttggacatgtattaaaggggat

SEQ ID NO: 11667 - DNA, 451 bp, Zea mays
  Clone ID: MRT4577_11063C.1
cgatcgatcgatcgatcagcatacattttctggcgttatatgggccagtagtttgcatagatttaggggatttttaaccggggggggctggaatacaagcagcagtaagagctcgaaaaaatatgcactcgttttgtcacacactcacccaggcttttgcttttagtaaattatgttcggcgctgctttggcacactgtcctttggtgaacaataagggaaaaaaacaccctttcttttgttgttctacctcggcctgcactggctttgccgaagcagcagcagcagcagtttccttttttttgccccacagtacagggtggagcccaagaataaccagcactgaccccagcacgcttccaaggtaaagaggctcgggggggataaaaagatcgatgccggcgacaaaaatctgggcgagcgggctgaaggcagcattaaacacggggccc

SEQ ID NO: 11668 - DNA, 586 bp, Zea mays
  Clone ID: MRT4577_110640C.1
ggggctctgatgagcgtgatgccacagtcgaggcgcgctggcgttacgagcgtccacccacgtacggcgacgtacgtcctctggacatgaatgcacgctgtacgtactcatatggggttctgatgttgcagtcaaaatgcccttctgcgctggcctccttcaagcagatagtagccaacgcacagggcaggaggatcgctgtgttcttggattacgacggcaccctgtcgccgatcgtcgacgatcccgacaaagcgttcatgtcccctgtggtaaaccagaaccgcctgtttgtttcaagtacttagcgttatctgaccaatgaagcaaccgcttatgctttgtctgaaaaaccttctgctcagatgagagctgctgttagaaatgtcgcgaagtacttccctaccgcgattgtcagcggaaggtcccgtaagaaggtactgatgaaacgtttgcactgctgttttttttttttgttgcccacttatatgtttacatgtattgctgtatgaatgaacctcgacatcctaattgtatgtaagttgtctgatgtgacatctgttagttaaatttctcatcttcgttc

SEQ ID NO: 11669 - DNA, 201 bp, Zea mays
  unsure (1)..(201): unsure at all n locations
  Clone ID: MRT4577_110641C.1
aatgtcagatgcattggnnnntttaacacacactcgctgtccagtactccagagtccagnctgggtaaacagtacagcagaagcctagttcctgaagacgccaatacttcaccagcatgttgactccatagctctgatactagtcaatctagacaccagacttcatcaaaaggagtttcacatgacatgggtcaaaataat

SEQ ID NO: 11670 - DNA, 182 bp, Zea mays
  Clone ID: MRT4577_110642C.1
ccaacatccttaagaaaactgtccaataacggacaaagtgacttgcccaaaattactggcggcgctccctctagtttactatcccaatccattggttttccgtaaaaggagttccctaacaaaagaaactcatgacctgattgaccaacggggcatacctaacccttacaatacgatacttg

SEQ ID NO: 11671 - DNA, 621 bp, Zea mays
  Clone ID: MRT4577_110643C.1
gccggccgttccgggagacatagacacagagagagacacacagccacagatagagacaccaccttacacagagaccgagacagagacgagagaatatgtcgatcctcaagaactgctctgatgtgtcgagcagacataaccatgatactacaggttcatgcggggtgcaacagctgaactctgccgtctgaacgacggcggacttcgacaagtctcccctagatgcgtgcgtgctcccatacgacacgcagaacatgaatgacctgtccgtttggtccgaacccaactcctgcggcgtcatgcacgccgcccacatgacgaccagagcctgctgcgtcatgctgcgtcaagctgaaacctcctcatgcacccctgtgagggggacgtgttcctgctgtactcgctgctggacacgcacctgcgggtcgcctccaacaactgagatgtcgcatttaacatgagccggaagccccaccctctctcatggacccatcctcgaccacgaccgtgcggcgttcttgctgcccctccgtgaagctgcgtatgtgaaccaatctggacgagctcgtgaacgtgccggacctgcccgatgccgttcatgtaccagtacgcgactccgac

SEQ ID NO: 11672 - DNA, 677 bp, Zea mays
  Clone ID: MRT4577_110644C.1
ccctcgaggctggccgggcgatggcgctgctacaccactgctcattccccttctctcgccgtattgccaacgcgtctcgtctccgtcgcttctggcggccggggcagttatcagacctctcatttgtctcttcccccacaatcaccgccactacgatgcactctacccctctgtccccaatgtgtggccacgccaccagcgccgccgcaggggcgcagctgcttccgtcgaccaggaggagtctagcgcctctgaaaccgcagtcgctcccgaggaagacctggagctgctgaagaagaacagagacatgacctttggcgaggttaagcttaccatcatgattgaggaccctagagatatagaaagaaagagaacactcgggatagaggatcctgatgaaattactagggatgatttagctgacgctttggctgaggttaacgaaggaaagattccagagaatcgtgttgcacttcagttgcttgccaaggagatggcagaatggccagacattgagatagaagctccaaaaaagaagagcaaacctgggaaatctgtctatgcaaaagccacagatactggcatcgatcctgagacagctgctaaaagacttaaccttgactgggactctgctgctgatatagatggcgaagaggaggacgatgatgaaactgaag

SEQ ID NO: 11673 - DNA, 1552 bp, Zea mays
  Clone ID: MRT4577_110645C.1
gaagacctcgaggccggcggaggtcacggttcacgaagcgcttcggtagaccatggcttggcagacagcagactactactagcaacaacatcagtcattaaatcgatccgatcggttcacatcccgcgagataatccatggctgggtgctagagtttacggcttcctccattcgcacgcacccctgggcgctgcgggctcgcagtgcatgatcgatcagttcgcgcgggatgaaggatggggagacggaggaggcgcagcgggacgcggtcacggcgaggatgcgggcccaggactacgcgggcgcaagggcgctgctgctgcggacgcttcagacgaaccccaggctggagggtgccctgaagatgctcccggtgctcgaggtcctctgctgcgccgccgccggccgtgggggcgtggactggtacagagtcctccaggtgctgcctgtggatgacgccgccagggtcgaggcgcgctacaagagcatcgtggcccaggtggagccggccatgggggctctgcccggcgccgaattggccctcaagctcgtcgacgaggcttacgcggtgctgtctgatccagagaagcgagaggggtttgattcgagcaacgttttcacccggttcgttcggtccggtgtcgttgatgctccaccgcccggtggcacactcgtccgtcctgacagggtgagcagccttcacacaaacaagattatggcgttaaatggtacgagcaatgcagtctcgcgtaccaaccacgccgacaggccatgctttgatggaagggattcccgtctttcaaatgtggcgagttcatccggtactaagaggatggatccttgctttcttgctgatgacggtgagttgcagtcacctgatggcactcatgttaacaaggggcaaaagagtgtcagtgaaaaggatgtttattgcatgtctccctcacaggaaaactgggatacctgctttgatgatccatcacatgctaaggaagaagatttggatgcctgctttgatgatccatctggtaccaaagaaggtgagctatgcagtagcaagtcgtatgaataccataattttgaagaagatcgagcgatcgagaattttgctcctggccaggtttgggcagcatatgactgggggaggtttcctcgtagatatgcactgattgttaaagtactgacggataaaatgcagttgtatgtctcatggttcatgccctgtccgcaaactcctgaagagaagaaatggtcccttgtggggttgccattggtttgtggaactttcgttgcagatgaacaccgaatctcgttaacatgtccaactatgttctgtcaccaaatttccaacaacaacatgaatcaagatcttgaagtgtatccacaggaaggtgaaatatgggccatttatagaaattgggatatcggatggtacactgatcctaggatgtggaagaatagtgacttctctattgttgaaattcttactagctattctaatgaatcaggttacactgttgcacatttgacaaaggtggatggttatggaagt

SEQ ID NO: 11674 - DNA, 477 bp, Zea mays
  Clone ID: MRT4577_110646C.1
gactggctgaattatcatttggtacagcactttttatttttttctatcttttttctgcagaacctgttaaactctcctattcagcgattccaaatacctgggacaaggccaagactcatgcccacactcaaaattattccgaggcgggggggagatacatgattatagtgccaaataacctgtgctcaaaacccaaatctaatatgaagccacctttacaaaaaaccagcctgggaaaaccctggatggtgcccccatggagcccttgaacgataaacatctaacattatgcccacttttttttaacaaaagacgctaccaactgaaagctaacctgagaatggctgtaggaattattattcctacattgacaagttacccaccgtgaaccctgaaacgactttcttaaatacaacctcaactgtaacctttgatttatacaccttgaatcccagggatttctgccaagtgaccaca

SEQ ID NO: 11675 - DNA, 1233 bp, Zea mays
  Clone ID: MRT4577_110647C.1
cattgggtacctcgaggccggccgggccgccgctggccgcatgccgcgacccgaagtgataagccaccgcccaccgccgctggcatgagcccgatggcgctgctcacaccactgcccattccccttctctcgccgtattgccaacgcgtctcgtctccgtcgcttctggcggccggggcagttatcagacctctcatttgtctttccccccacaatcaccgccaccacgatgcactctacccctctgtccccaatgtgtggccacgccaccggcgccgccgcaggggcgcagttgcttccgtcgaccaggaggagtctagtgcctcggaaaccgcagtcgctcccgaggaagacctggggccaccggtatcctctgatgcggctgccgaggacggggtcgcgacttctgcccagccggcggaggcgagcccggaggacctggagaacatccgcgaaattaaaagggtactggagctgctgaagaagaacagagacatgacctttggcgaggttaagcttaccatcatgattgaggaccctagagatatagaaagaaagagaacactcgggatagaggatcctgatgaaattactagggatgatttagctgacgctttggctgaggttaacgaaggaaagattccagagaatcgtgttgcacttcagttgcttgccaaggagatggcagaatggccagacattgagatagaagctccaaaaaagaagagcaaacctgggaaatctgtctatgcaaaagccacagatactggcatcgatcctgagacagctgctaaaagacttaaccttgactgggactctgctgctgatatagatggcgaagaggaggacgatgatgaaactgaagtgccgtctgcagtgggatatggtgccttgtatttgttgacagcttttccggttattattgggatctcagtcgtcctaattcttttctacaattctctgcagtagctcctccccttcttgagtgagaatgtgagatgttgctgcattcttgtaaatctgagttacaaggctagttaatcagtaacattttttacgccagtgttgcaaagatatgacaacttgtatagatgtcaaattccaaattttggaatgtaagatagttttttttaaaaaaatcgtgtgaaatataacttcttgttgtttgccagtaatccaaaaaaaaaaaaaaataaggcccctaatatttgaataaataaagtttttgtcaac

SEQ ID NO: 11676 - DNA, 542 bp, Zea mays
  Clone ID: MRT4577_110648C.1
gcaaagttcaacagggaatggcaatagctctattaatctggcctctcaaggtcactgtgcgagggtatttataggcacccgagtaaccaccgtcctttggcaaggacgtttatgccctcaggtacctggactatccctagaatattcccacaaaaggaggttacagaccgtcattatagaaaaggctattacagacgcggcccgtaacatgcttatccgcgcggggcccgttacaatgggctgaatcccacttgggcctcccaacaagataaggacgtgggactagcagacttcgatggagccttgccttcgtcttgcaacggagaggacgaagggcagccgcgccggtcctcatccggccggcgccctcggctcgctcgggcgtggtcttcgttggtgtagcgaggcgacgaagacttcgagcgaagggtagcgtcttcgccttcgccccaacaccatctccactccacgtcctttatctcgcacgatcatcatctctcggtccataaacaaacccggtcggtgccgctgcacacatggcg

SEQ ID NO: 11677 - DNA, 425 bp, Zea mays
  Clone ID: MRT4577_110649C.1
ggaggctaacaacaggggcttttgaaaataaggcaaaaacctttgcaagcccccacaaaagggagaagtggggggttggggtttccccaaaggccaaaaaaaaatcgggcccccttaggaggagcagcaaaaccttttttggttgacgggttgaccggggatctgcacgggcgctggccttgggttagccccaactggggggcgggccaccctggccttggggggggccgccatagccatgaaggcccgccccacattgagggggttttgggcacccgcctccatgaaggggaggcccattttataaaaaaacccctttggtggctggggtgccacaactttggtagcagttaaaacgctcttgttcccaacaaggggcttgggaacattggcacttgcaaaacgggcaatctcgtttaaccatt

SEQ ID NO: 11678 - DNA, 281 bp, Zea mays
  Clone ID: MRT4577_11064C.1
ctcatgacatgtttgcgaaaagggcctcttaaatgcgggggggacccaaaccccggagaaaaagcttcacataaaaaagcccaggagaaagggcgccaaagagacgaccaaagccaaggagagccgcgacaagagaagacgccttaaatgctacctgggcaacgggcagaagggacagaaaggggacagctagaaaagggggggcaaaacgcaagggagataaaacacgcaccggcgcccctaagacaggcgggactaacctggggggacccaacaagaga

SEQ ID NO: 11679 - DNA, 126 bp, Zea mays
  Clone ID: MRT4577_110650C.1
aataaccaaaaagatgttagcaattcctaaactatctagacacatgggttattttcatgcttctatgtctaatcaaaactacaacggtgacctttcatgggttcttaactatgtttacttgcccaa

SEQ ID NO: 11680 - DNA, 408 bp, Zea mays
  unsure (1)..(408): unsure at all n locations
  Clone ID: MRT4577_110651C.1
gganaacacatggaccccttcnggactaanggcagcnnngcaaancacaacggaangnnnnngggaggaacaagaaannaaancncncnnnggaaagggggcaaancganncaanannaagaaagaacnnnacngacccnnggannganggagacaacaagagaaccncnagaacngnanggnncagaacncnaggacnccnggaacacnngnncanggnggngancaaccngaccangcgccnanaacaannggacgngnnnanngcnggcnnagaananagncgaccanncagacccaagnggagngggacacnnggcnaaannnnncagcangcnggngcncgnganganaaagggaanccggncancagggannncaaaaacagccaanngacngccagnggac

SEQ ID NO: 11681 - DNA, 653 bp, Zea mays
  unsure (1)..(653): unsure at all n locations
  Clone ID: MRT4577_110652C.1
aattcggcacgaggccgacatccacgctgcctcagcccgccgtccagcgccctctctgcgcctccctccccacaccgcctcagcccgccgttcgccacgctccccacgctgcctccccccgtcgcccctccctcccgcgcggaactccgccatgctccccacgtcgcctccccccatcgcccaccagccgtcgcccaccagcccacactatctcacgccatggatggtggcaacagtccccgcccccgtacctcacacgcatcaggctgggctggccgatcccgccgccgcaaacgccgcgcccagccccgatgtcagcgcggcccgcccgccaacgcactttcggcctccccccgcccctcccttcgcccgcccacccgcaacctccgcgccatccgcaacctccgcccgcttctcacgccaccgacccgacctccgcgccatccgcaaccgtcgtgcgtcttatcccttctctaccgcgcactccgtgtggaacaacctccgcgtaggaagcctcctcccttccccatccccattccccaccacgcgcttcggngacggcgagctccgggcgggagcgaccgccgggcgcttctgctgctggtgcggaggaagaggancggcgagggtggttcggcgcaagctccacggcg

SEQ ID NO: 11682 - DNA, 475 bp, Zea mays
  Clone ID: MRT4577_110653C.1
tctcgtacgcgagctccaagcgcaacgaagacaacgcggagggccacaccttcatgcggggcggcgcgcgccagccccggccgcgggcccggacgcgggagcggcaccaccggcgggaggcggtgcaagagaccgtacacgacgagctcacgctggacggaaggccgcgcgtgaacctgagggcggggggggggcgaccgtggatcggagcccggggtgctgacaagcctcatgataggactccatcaacgcgaactacgtgcacatggacgagtccccggccaccactgagctccagagccgctgcgcagacagaatggctcacctgtccaacgcgccgggtcaaggcggacgagacagctattggggtcgggacagtgcgaacctcgcaagcgatcatgcctgcagggctggcggccaacaggaaatggctggccagggggagagagcaaggcaacccgtgtgacagtcccaa

SEQ ID NO: 11683 - DNA, 646 bp, Zea mays
  Clone ID: MRT4577_110654C.1
attagctctcaaatcagctttaacccgagatctggagcaatttctcctcggcgcagacaagccaatcgaatgcgaaataccatgatgaactccaccgacaccagagcgagggcgatgagggaaaaagggaacgccctcgctgaagataagctctgcaaggaaaaactcaaggtcgagggacgagaatgtcaggctccatgtccccggcgcgcagatcgagaggtacttaaaaaaagtccgctacgcgaaaagtggctgtgcgggattgctcgaataactcctcctagtgatggaataactcgccgctgaagatcaggagatcaacctaaaggttgtcacgtatatgatcaatactcacattattttgcgacaggtggttctgctaatacggcaactcgatgagttctggaagttacctgagcaaactgaccatagctcacggaggtgtggtccgcaatatctaccctggactgttgcccaagatagaacggaagaaggtgaccatacgtctgcaatgatgataaagacgattcacagagaacgccgcctctgacactcatgaagcttaatccgtgtggccctatggaaccggagcccagcaagactgcgctgcctgcatgaaccgaagcagaatgttttgattgga

SEQ ID NO: 11684 - DNA, 112 bp, Zea mays
  Clone ID: MRT4577_110655C.1
tggacgactggcgcaagactgttatcggcatttaccttggctacgcactcaagggggaggggcgtaccctctacgggtacggcgtctaggccgcacccactcccggaagaaa

SEQ ID NO: 11685 - DNA, 574 bp, Zea mays
  unsure (1)..(574): unsure at all n locations
  Clone ID: MRT4577_110656C.1
gattcaaaaagcgccatccgcacctcactctttccccctgctcctccgcctcctgtcaagaccagacaggccagggagcggcatgttttactcggaggagcaccactcacgatcgaaggccgacgccggagcgcccaggacccacccgcagcaggctggcaccgtgcgtaacaacggctacatcgccagcaagaaccgcccctgcaaggttggggaggactctaccacaaagactggtaagcagggtcacgccaaacggcacgttgctgccatagacatattcaacgggaaaaagctagaagatatcgtgccgccagcacacaaccgcgatattttttatgcgaccccccccgagcaccaggtgaatgatatatcagaggatggagctgtgagccagcgtacgacgnatggcaacactaaggaggatcttagacacccaactgaggagactctagtgacccagatcaaggaagggttcgaaagcggcaaggagcttgttgagactgtccaggctgctatgggggaggagcagaacggcgcgcgggaggatgatggccccaagaaactgacctgc

SEQ ID NO: 11686 - DNA, 247 bp, Zea mays
  Clone ID: MRT4577_110657C.1
gcacgactaccatccatcgacatggctagcttcaccaccacgctcctccacctgctactgtgatacgctagactcgcgaccggcgccacggcggctgatgacagcgtgttcactaccttcgacgtatacttccatgacatcgtcgcggagacgagcgcgacggctatccgaatcgcacaggaggctgcgtacaacacctcgtccgacagcttcagcgcgatggtggtgatcgacgagccgatgacga

SEQ ID NO: 11687 - DNA, 840 bp, Zea mays
  Clone ID: MRT4577_110658C.1
ccggccgggccgggatttctcaaaccctagattcggatccgccatcatcaggctccgccatcaacaggctcgaacgccctctcctcaaaccctaccagatcttgtcgttcggcgcctcaaaccccagattcggatccgccatcaccatagaggtgggggcagacggcatagcgctcatcaccatcgccaacctgcccgtggtggatgcgccatcgcctgaggcgagccgcggggaaatgagggatccttggaggcagagctggcgtcgcgtcgccggtggacgctggtgctggtgaacatggcgtcgatgctggaaaagatagacgagatgttgctgctcgccgtgtacaagaaggtgtgcacgtcgctgggcgcttctcgacggcgctgggctcccaaaccctttgtcgcgcgctcgttcaagccgcctactacctactcaaagcctacgcctccgcgcgtcatggtcgggcccgtgtcgtcgctgtcggagccttcacctgggccaccatcgccttcctcgtcgccatctccggcagcttcctctagattcaggaggggactgctggatggcacaaagtggcgaatgaagcagccaggactattccgggaagggagaatggtggtaattgtgacataaaaaacctaagcagaggttccaaagtttatctgccagtatttgtcgaaggagcgaatcttagcaccggtgatatgcacttctctcagggcgatggtgaagtttcgttttgtggagcaattgaaatgagtggattccttgagctccacttctcccagggatcatacctttgatccatccatcaaaaacaaagttcagtgcag

SEQ ID NO: 11688 - DNA, 434 bp, Zea mays
  Clone ID: MRT4577_110659C.1
cccacgcgtccggtttaagctatttatgagctttttattaaagtaatgtttaataatgtggttcataactcattaaccttagatatataacatatatcttctctaaaaggttaaaaaggtttaatattgttctaacgtgttttatcatcctataaactcttaatcttagacatatgtgatatgtctaagattaagagtttataggatgataaattggtgaacctaatatttgtatattttaattaagatatttttaagctcatgtcttgttttataaagtatagaacacacatttttgaaaagaatacttttttattataacctttgcgtgtaatgttttcgaaaagtgaatactctttctgttaagctttcttttagctatgcgtatggtgaatgtcgtatgttattgagtggtgtttgcttcttcttgtttt

SEQ ID NO: 11689 - DNA, 395 bp, Zea mays
  Clone ID: MRT4577_11065C.1
attcggctcgaggtaaggtctcgagttttttacgccaaaacaaaggaaatgaggaacagaagcggttcatctaccatcttagctgactctttgcacgggcacccccatagtcctcttcactgcgtcgaaggcgcactctagtctaactcaccacaacaaccctaccagatcactgggctacgccgccactcatgatgcctatcctaccgaacggtctgtctgagccaccgacggatagctgaacaaccctactctagagcatcaggcaccctgaatttgctagacgccacaaccagcagcgcatgaatatctatggctcagggcgacactggacaagtaacagcacaacgagtactggcccgagccagcctacgaggacatcagtagtaccgacg

SEQ ID NO: 11690 - DNA, 1550 bp, Zea mays
  Clone ID: MRT4577_110660C.1
gactaaacaaactaaacgatatttctcaaaccctagattcggatccgccatcaacaggctccgccatcaacaggctcgaacgccctctcctcaaaccctaccagatcttgtcgttcggcgcctcaaaccccagattcggatccgccatcaccatagaggtgggggcagacggcatagcgctcatcaccatcgccaacctgcccgtggtggatgcgccatcgcctgaggcgagccgcggggaaatgagggatccttggaggcagagctggcgtcgcgtcgccggtggacgctggtgctggtgaacatggcgtcgatgctggaaaagatagacgagatgttgctgctcgccgtgtacaagaaggtgtgcacgtcgctgggcgcttctcgacggcgctgggctcccaaaccctttgtcgcgcgctcgttcaagccgcctactacctactcaaagcctacgcctccgcgcgtcatgatcgggcccgtgtcgtcgctgtcggagccttcacctgggccaccatcgccttcctcgtcgccatctccggcagcttcctctaggaaggccatctggtatttcgaaggaatctatgcgtactcccctcagataccaggtgttcgtttcccaggattaacccatcctggtatagtgggaactgcaccgtcagccaaacttcttaatgtatggaatgagagggagaaaagattggccgagacaagcccacagacccttaaactgtttgaagtgctacaccagaggccccttgccaatttaccgacccctgagaactgcttacttggaaagattcaggaggggactgctggatggcacaaagtggcgaatgaagcagccaagactattccgggaagggagaatggtggtaattgtgacataaaaaacctaagcagaggttccaaagtttatctgccagtatttgtcgaaggagcgaatcttagcaccggtgatatgcacttctctcagggcgatggtgaagtttcgttttgtggagcaattgaaatgagtggattccttgagctcaacttcttccagggattcatacctttgatccatccatcaaaaacaaagttcagtgcagcggtggttttgttgtaatgggtcagaggtggcagtaggaccattggcaccttcatcaatttaagttcagtgcagcggtgaggttcgacatgccccgtgcctactatcactctcgatttgaagaagagtctcaagattctgcaggtgttgtgttactcctaattcagttaccttactggcaataggatgccattgcaacatctgaaagtgcaaccatctgattgaagcggatttaattatacaagatagatctagaattgctttacttgagattcaagcaatgttggatgcttttgtgactgatcatctcttgagcttttgtgaatgatctagctagctatctgtaaatgatcttgttgtgaatgatattataattgtgatgttttttgtgaatatataattgtggtgcttttgtgtttatgtgatggatctatgactgtggtatactgattaattgtgt

SEQ ID NO: 11691 - DNA, 1811 bp, Zea mays
  unsure (1)..(1811): unsure at all n locations
  Clone ID: MRT4577_110661C.1
acacactcagcagcagcagcagcagcctcctggaaaagagaaggccgtctccctcactccctctctctagggcatgttgcagtggggcnatttcgtttgcaaaaaggatcgtctttctgatgtcttgtagctttcattccacttttgggaatgatagtttcagggcttgatataagtggccaagtagtcatcctctcatggttcttgaaacctggtgcagctgtctcaacaagtcaccaagtcacaggattgtggtccaggtcatccccccatccgctggcttcaacagcagtattcttgcttcaacaagtgacctttctacagttttagctcaaagattatgatacaagcatgactggttcttgaacactatacaaggctttggagagatgggatgtgctgcttccaggttagaagatgaggaggctgtcaagatgtgccgggacagaagggacttgatcaagcaggcactggagcagcgcaaccgatttgcatcttcccacattgcttacattgagtccctgaagcgtgtttcggtggctctccaacggtttgttgccggagatgatcaccatgagctaatcttcgatacattcatctcccctatcaagcaacagaagccagagatgcttggtctgccttatggttcatatgagaagagaactattcatgtttcaagatacctgaggtcagggcctaacccatcagtgtccattgaggagcacccacgtccggtggaaacagtccgtgtcgagtcaaattaccctatggacaacgacagtggcatggtggatagattcctaccaacaccctcttcaccagtgagatcgtcttcatactacccgccaccttataacaggccaagctacccacctccattggaccaggaaacagttagaaattcttcctattgcatgccttatgacaggccaagctatgcacctccatcaacccaggagacaatgaggacttcttattatgcatcttatgacaggccaagctacccaccaccatcaccccaggagccactgagaaattcatatcacgtgccatatgacacaagctacccacctccgtcaccccaggagcaggaagcatcaccgtgggacttcttctggaacccattctcatcactggacagctttacatatccccgccctcggagtagctatgacaatgtggtcactgatgatgaactcgcgaggttacaacgggtacgagaggaggaaggaatcccagaacttgaagaggaagatgatgagtgtcaagagcatgtacagatggacagaaaagaggaaaaagaagagcacgacaatgcagatgatgatgaagacgatgatgaagacgatggcgaggaatgtgagcattcagatgagtgtatggtttctaatgtgaatttcgatgccaatatgaagcaagaaacaaagggatttgaatccaaaggtattcagtgtactgaagcaccagaaccttgcaagacagtagaacttgagataaaggcacacaggaaagagttgatgagaaacagagtagcaaatgcagaagaaactcctggtttcacagtatatctgaatcgaaggccagcaagcttggttgaggccatgaaggacatcgactgtcagttctcggggatatgtgacgctgctcgggaaatctcagtaatgttggaggcaagtagagctcagtactcaacctcaaacgatctttctgcgaagatgctgaacccagttgcacttttgcgttctgcgtcatcccgttcatcattatctcgttttccttttgcttcctctagcttaatagatgatctcttt

SEQ ID NO: 11692 - DNA, 1857 bp, Zea mays
  Clone ID: MRT4577_110662C.1
gacccaacccagcagcagcaggcgcagccaggagcggaggagccagcacttgctttccagcggcgatccccacctaccacccccaccttcccgcttaccaagcggagcagtataacgcaggggcttggtccagcggcttctgagaaacgcgccaccagccaacgagcaagggccgcagccggagctccaatggcctccttctcctccctctctgcctcctcctccacctccaccccgtccttcaacctccccgcaaaaacctccgctggcacaggctccctgtcattccacagggcgagggagtcgcagaagtccagggccaggatggtgacggtgcgggcggaggcggttgacacgaccatcagcccgcgggtgaatgcgctcaggccgtccaagaccatggccatcaccgaccaggccacggcgctgcgacaggccggcgtgccagtcatcggactcgccgctggggagcccgacttcgacacgccagccgtgatcgccgaggctgggataaatgccatcagagatggggccacaagatacacgcctaatgctggaactctggagctgaggaaggctatctgcaaaaagcttgaggaggagaatggtctatcatactccgccgatcaggtgctagtaagcaatggagccaagcagtgcattacacaagcagtactcgctgtctgctcacctggcgatgaagttttgatacctgcaccatattgggtcagctaccctgagatggctagactggctggtgcaacgccagttattctccctacaagcatatcagacaattacctgctaaggccagagtcacttgcctcagtgatcaatgaaaattcaaggatcttgattctctgctctccatctaatccaacagggtctgtgtatcctaaggagttgcttgaggagattgctgctatagtcagaaagcaccctagactcctagttttatccgatgagatctatgagcatattatctatcaacctgctaaacacacaagctttgcttcattgcctggaatgtgggaaagaacgttaactgtgaatggattttctaaggcttttgctatgactggttggagacttggatacttagctgcccctaaacattttgtcgcggcctgtggaaagatccaaagccagtatacctctggagccagtagtatatcacagaaggcagggcttgcagctttgaacctaggttatgctggtggtgaagcagtatcaaccatggtgaaagcattccaggagcgtcgtgattaccttgtaagaagctttagggagctgccaggtgtcaagatatcggaacctcagggagccttctatttattcatcgacttcagctcgtactatgggtctgaggtggaaggttttggtaccatcaaggactctgagtccctctgtctgttcctgttggagaaggcacaggttgcgcttgtccctggggatgcatttggcgatgacaagggtgttcgcatttcatatgctgcagctatgtcgacactgcaaactgcaatgggaaagataaaagaagcgatggctctgctcaggccccctgttgccgtttaacaaaaccaacgtatcgctaatcagttgtggaccaaaggcttctgcaatgcactatcatattaaatacattcagttgacatgatctatcttcttccctttatggaaaaaaatgttgctgctgtcatttggctttggtttgtatctgaagatttatatgtacttgctataatatagatgaactgtgcaacgctttttttacctgcaagaatagaaatggtaaacatgactttattttgacaaaaaaaaaaaaaaaaaaaaaagcggaaaaaaaaaaaaaaaaaa

SEQ ID NO: 11693 - DNA, 1032 bp, Zea mays
  Clone ID: MRT4577_110663C.1
cccacgcgtccgcatttattgatctacttacagatcttgtgaaatggctcagttgcatgtgttggcccatgcttcctcttttacatacatattattatgcgaagaatacaaaattgctctggccaatcctttaaactttgtattttatatatatgcaggcggaagcgcttgttaaagcccaagatgatcttagagaaactacaggtcacttgggaatgacattgattaagctggcaaaatttgaaagagagcaggcaacatgtaattccctaagaagacgtgctggtgaaatccataattttgcaaattctgttttaaagatgagcaggtcacagataaaattaaactctgaaatggtgaaacacctgggcagtatccatgaatacttggagatgatgatatcagttcatcatgcattcacagatcgctctaatgctttatattacgtgcaaagtctgtcagcagatttgttttccttgcacaccagggcagggggacttgaatcttcatcagcaagagatatggggcatgagtggtcaacatatcagaaggtagaggggttgaaagaagcaataagatctgcggaagcagccaaaagtgatgccgttagagaatatgaaagcattaaggaaaacaacatgattgaaataaaaagatttgacaaggaaagacgtcatgatttcattgagatgctgaaaggttttgtggtaactcaggtgtcttattcagaccattttgctaatatgtggacaaaggtaacagaggaaacagaagtatatgccaacaggagcaactgatgtacgtataaagagtgtagagttgttggttttgatcgatttaaattgctgcaacatcgagcgacaacacccattcttatccttctccagttttttcacttttgggttggttgtaatgcatgagttatgtgcagttgtgaaattgggtcccggcagatgagcaaattggctccacgagaactggcatatgtgagaaccatacgcaagatttttctcggtgataactactactaac

SEQ ID NO: 11694 - DNA, 421 bp, Zea mays
  Clone ID: MRT4577_110664C.1
gcaagcttttttttttttttctggttcttttttcttcctaaaaactcaattattgatttacaacttataagcaatttaaaggagggcctcgccaattatttgtagtgggaaaaaggctgctgtgtttgcacaaagcatgtggggggggggggggggttttttcaacaacaaaaagggggggagggcctgtcttaaattgctggttaaacggaagccaataatgaagtgttttggggggggcgggacctgcccgggcggacgatcctagggctaattctggagaactctataggctagttggcacgatactggatgcctttacaggtgcgattctagcttataccaagcttggtacaattaaggggatagctgtttactacgtgaaaactgggaaaactctaatttcacccaacttaatagc

SEQ ID NO: 11695 - DNA, 427 bp, Zea mays
  Clone ID: MRT4577_110665C.1
cttgttctgaggccactgacaaaggcgcgtgcgggagttcagaaggtcagtgggggtccacaagaatctggaaatggctcacctcgctctacccatatgagccctagctcaaatcatgcctcttccgatgatgaaatatacatggctcccctattcttgaggataaagctgccacagatggaaaaccaacatgttacaattcccatctcgagatcacagtcatacccatattccacaggttcttgagaagagttttttgaaagaactaaagatgctgttacacacctccgtccaaaaccagtgaaaatcccgctaccttctagtgccactaggcatattgagcgacagctcacttctgggcatcgatttgcaagggaggacaatgtgccgcttgcattttatggaatcacaggtactaacctctact

SEQ ID NO: 11696 - DNA, 2150 bp, Zea mays
  Clone ID: MRT4577_110666C.1
tcccacgcgcgcgccatccactgatcctgatccacctcgccttctccttccttccgcggttccgcccatcgactcgacagatccattgttcacgacctcaccctattcagatcccaagcggccacgcccaagcccaaaccctacccacccatctcaagttctcaaccagcgatgatggcagcggagccctcgccgtcggttccctccaccgccgctgaagacatggaaaccctcgccctcgactcatcctcgtcgtccgccgccgctacggcctccgcctccgaccccctccttcggccacctacctccccgaccgccgccgcgagcgacgaccccttcgtcatcgacgacttcctcgacgaggacgacttcaccgccccgccgcccagcgtcgccggcccgccgcccgccgggcttggcgatgcggcgtccccagtgttccccaagatcaccgtatccgatcccaagaagcacgccgagcctagcggcgggggtgctgccggtgtgatcccggggtccggcagctacttttcttacctcatcaccacacgttttgcgggcggcggtggggaagtccgcgtgcggcggcgcttccgcgacgtggtggccctcgcggacggccttgccgcagctcaccgcggcctatttgtcccggcccggcccgacaaaagcgtcctcgaggggcaggtcttgcaacgccacaacttcgtgagccagcggtgcgctgcgctccagcgttacctctgccgccttgccgcgcaccccatcgtcggccagagccctggtctccgcacgttcctcacggagcctggtgccatccccgccttccagagtgaggcaccgcggtactggacaaccacggtgaatgctgctgctccgatggttcagatgaaagctgggagggacttgtttgggatgtttaagggtctcaagcagacgatggtgaatgggatggttgcaacaaagcctccacctgtggagcaggagacagatacagagttcctggcgcacaaggccaggttcgaggacttacaacagcagcttaccacaacatcacagcaggctgaagcgctcgttaaagcccaagatggttatagagaaactacaggtcacttgggaatgacattgattaagctggcaaaatttgaaagagagcaggcaacatgtaactccctaagaagacggtctggtgaaatccataactttgcaaattctgttttgaagatgagcaggtcacagataaaattgaactctgaaattgtgaaacacctgggtagtatccatgaatatttggagatgatgatatcagttcatcatgcatttacagatcgctctaatgctttacattacgtgcaaattctgtcagcagatttgttttccttgcatatcagggcaaggagacttgaatcgtcgtcagcaagagatatggggcacgagtggtcaacatatcagaaagtagaggggttgaaagaaacaataagatcagcggaagcagccaaaagtgatgcagttagagaatatgaaagtattaaggaaaacaacaagattgaaataaaaagatttgacaaggaaagacgccacgatttcatcgagatgctgaaaggttttgtgataactcaggtgtcttattcagaccattttgctaacatgtggacaaaggtaacggaggaaacagaagtatatgcaaacaggagcagctgatgtacgtatagggagtgtagaatagttggttttgatctatttaatttgctccaacatccaacgacaacaatcattcttattgttccccagttttgtcaccttgagttggttgtaaacttgtaatgccacatgagtcatgtgcagtcgtgaaattgggtcccggcagatgagctaatttgctccacgagaactggcatatgtgagaaccatacgcaagatttttctcggtgataactactactaacaactgtctctgttccaattacaaatcttaagaaattataagatgttttggtttttctagagacattataaatttatttagatatagtgtatatctaagtgcttaagttagctttaatgatgacttatgggttacattaaagtatattattttatattttaatagaggagagagaagctagctcttaatcaagagctaagtttat

SEQ ID NO: 11697 - DNA, 497 bp, Zea mays
  Clone ID: MRT4577_110667C.1
ggccgggagataagagagcatagccgataatgaagggtggcaagaaggaagcggccggctgcggcgctggccatactgctggtcttgcagctcagggcagctcccaccgacggacatggacgcccgttccgcgcgcccagccgcgccggacggctccctcgccaccactcccatgcgtcgctcctgtcgcccacgctgtcctacccgcgcgatacatgccaccaaatcccctgcctcactccctgcttgctcctgctactctagcgaccccctcctcctcatcatatttacccccgttcgcctgaggcccattccgccactccacacctccccacactcccatgcgccctccgatcacgaccccgccctgcctctcgcgagcttctgccccagcccccccatcgtccccaggccatccctcccccgcctttatccataccccgcctccaattaccccctgtcaccgccacccacaccccaccccccgcggccccccc

SEQ ID NO: 11698 - DNA, 422 bp, Zea mays
  Clone ID: MRT4577_110668C.1
tgcccgcctgttctgtacaggagccagcctgtcctcattattcgtttgatgctggacctcatgagcctgccgtccgacctgtctacgtttgccgtggaagcggcggactcatcaatctcctaaggcatatgctgtggctagatgcaagtggcgccaagggacctctccgactagctactaggcaagttcgagtgacactagcgagttcggctttgagtacagactgagctgcctttgttcgccgctggtcctacggcccgaggttctcgctaccacagtgcgggacctacgcaggcgcagccgccggagtctgaggaggaaggttcgaatggttctctgaagctgctgacatccggtttatataattgggcacaagctctcgactatactaaaaactcctgcgcaacttcccatgtaaaaac

SEQ ID NO: 11699 - DNA, 242 bp, Zea mays
  Clone ID: MRT4577_110669C.1
cacacgtattgctactatcgtctactttctacatctttagcttaccacttatgacatagtcacatttatagacttgtcatcggttacaattcacatactagaatcatgttagctctactacctattcttgttaaataattctgacccctttctacacataatcatcacttctgagttctatactgttacaatgttcgtatacgctaaattcactttattcacatataatttccctaaacttt

SEQ ID NO: 11700 - DNA, 584 bp, Zea mays
  Clone ID: MRT4577_11066C.1
ccttctcttcccatcttgcctgcctcccgtagtgccgtgcctcaccttctcctctatagcttcttcctttctcttctctccttccctaccctgctcataggtcacagctctgttggtgttccttctcttctccacgcaagcaagcattcactcctttcggtttttaatttcttctctggtggcttctttctgcatccataaggttttaaaaacaggcagaatcataaacaatccccttctttaaaaaccattgcttccttttccaacacttccttttaacctaaaaacaaagcaccactctgttgcaattggagttttctttctctttttttcgctgcttttctagttttaaatttttttgcttgctagctacatcagtacatgagctagcagaaaagcatggccggcctcgacctcggcaccgctgcgacgcgctacgttcatcagctccaccacctccaccctgaccttcagctacagcacaactacgccaagcagccggaaccctccgaggatgaccctaatggcagcgggggcgggaacagcaacaacggcgggccggatggtgatcacgacggcgggtc

SEQ ID NO: 11701 - DNA, 214 bp, Zea mays
  Clone ID: MRT4577_110670C.1
cttagcagtggtaacaacgcagagtactttttttttttttttttttttttttttggctccagatctaggagatgatggcggtgaaaggaatgtagtcgaggatccagcacggactgctgagtacacaacagagagcaccgtagtgagcatcccgagtataagagcactcattgaaacctgcttagcccgcgtactctgcgttgttaccactgct

SEQ ID NO: 11702 - DNA, 542 bp, Zea mays
  Clone ID: MRT4577_110671C.1
gggtttttttgttttttttttttttttttttttttttttttttttttttttttttttttttttttttttttttttttttttttttttttttttttaacccgcggggaaacaaaaacccccccttttgcccaaacctgggtcattttaggggggggcgcggggggtcatttccccttgcctttgccatgcaacggggaacaaaagacacacatccctttcgccggtttaatcaatccacgtccgtcccccctttccgatcccaaagacaatgaagttgccttgcttagcccttgggcttatttgccggggcccaatttgggggcgttggcccctcccttgtttttgcctgggtcagctctgtggtccgcggcgtttttgggcgggcccttgccggggaccttggcctggcccaagaagccccccttgggaaaacatggggagggggccgtttttgagctccttccccttgggcttggggtcggcccctgggttgctcggtccctcccgggggggttcttatcctccccccgggtacaactact

SEQ ID NO: 11703 - DNA, 258 bp, Zea mays
  Clone ID: MRT4577_110672C.1
ctagatcgcgagcggcgcccttttttttttttttgggcagctaaaatttcccaaataaattggctccatggcacaaaatagtaccagcaacaggaagaagaaaacgggggctctttgcaaatggggatatgcatattcaactttcaacaccgaagaagggccgacgatttcatatttgggaaggccaaactattggcagctgcagcatgacctggcatcacgtagtattgcagacaagtttggtttccccaatgccct

SEQ ID NO: 11704 - DNA, 474 bp, Zea mays
  Clone ID: MRT4577_110673C.1
tttttttttaagaacaaatgcatcctggtagattcttctattccagtctatttttttttaagaacaaatgcatcctggtagattcttctattccagtctaggaagaaaatcaatctggatttgcctgctttctacaagctgtcgagttgcttcagttgttcgatctgactcttgcccgggctgaacttgtcagctttcatcctctctctgaacccatagggtgtaacctgggcactggcataagctgcaagtaacaaattatagggcagagttcttgcagggaagctggtctgctttaccctatcaaatatcttctccgcgttatggatatcgcccttttctgcgtatgcctttagtaagattacatatgagctgaaaaggggatgtctgtcaggattatcttctgtgacattcatcaaaaacgagtcggcctttgacaactcgcctaaattcacataaagcttgacaactgca

SEQ ID NO: 11705 - DNA, 572 bp, Zea mays
  Clone ID: MRT4577_110674C.1
gcccgcgtccgccccgcgtccgcccgcgatcgccaccggtcgtcgtcggcccaccgccgagttcaggccgtcgtggaggacaacccgtgacgacggtgggatcgaggcgctccgggccaagctcatgggccacctgcgcgaacgcggcggaccgggtccgcgtcccccagcctctctggagcctcaccgcctcgcgcccgccttatcctcgccctccgccgcccaaggctgctaccgcgagctcgccgccgccgcccggtacggactccgagcccgagctcagggcgccgcctccgcttcggcctcctcctacacctgcgcccccgcaagcggaagctgccgccgcgactgcgaccgcgagaccgtggaacctgcgggagcgcacgcggcggcgccccgcctccgccaggtcgtgggtcgcgtcgccgtccccgccgccgccgccgcctccgtcgtcgtcgtccgcggaggcggcgcaagcgcgccccgttctccgtgtccctgaaggcggaggagatcgaggaggacatctacgcgctcaccggctcccggccgcggcggcggcctcggaa

SEQ ID NO: 11706 - DNA, 382 bp, Zea mays
  Clone ID: MRT4577_110675C.1
ccggaatggacgcatgcatccacgcgtccagaactacaccaatcgaaagtacctaactgcgacttaactgcaatgcctaccgtgatgtcagcttatgctggcgcgttcttgctctatgtgctagcgcaacaaatgcgttcattatttgacaatgctcacttgctcctagtgtcattataccacacttcttacgaccagttacttcaatgtgctaaaaacacctagttgagcaagcctacatgctacaacaagcgcttgcggcgagcgtcttacatcaaccaagtaactaattgcatcatcaatcctagtaacatctaaccatacagaccatctgttcacaccagccacaacagtacctaccataactgagccaactatatgt

SEQ ID NO: 11707 - DNA, 243 bp, Zea mays
  Clone ID: MRT4577_110676C.1
acttaattgcccttttttctttcctgacctgtgaagatgatgactgtattacttcccgacacgtgcatgaactggacccttggacagcatgctatctaccgattacacattcgcttgagagcttagctgtgtaactgtacaggtgctattcgggttctctaatcttgctacggtcctgggatggagtaccaaagggaccatgttatctgacctaaaagtctgcaacttgtgtctgactgtgca

SEQ ID NO: 11708 - DNA, 238 bp, Zea mays
  Clone ID: MRT4577_110677C.1
cagagctctagcaaagacggtgttccagctttaagcacttacagctaaatttgggaaactggggccgttaaagggctaacgtcacaagcactgacaattaatgttgatgagcacagacagggtggaacgaaaactgctatagactctctgaatgtaagtcggattcatcgatatgcaatcagatatctaactgtgtaaaactactggacttctggataaaagagcgtactatttcaaa

SEQ ID NO: 11709 - DNA, 513 bp, Zea mays
  Clone ID: MRT4577_110678C.1
cggggccccaaaaggttttaaaaccttttttaggggccaagggaaaaatccccccctttttttctttttaaggggggaaagaaagggccagaaaaaaccccccccgttcaaccacacccccttggggcccccccccccggggggaaaaagccgaaaaccccaccccagcccaattggcccccaacccccgggtatatatttccggcccttttgaaacccccccgttttttaccccccttaaaccccccggttccattgaaaaaacaaaccgcccccccaaaatttcgttttttttgcaaaaaaatctccgaaaatttgggggaaaaaaatttaagaacccccccaaacaaaaaatattttcctttttttgccccccccccccaaccgggttgggggaaaaaaaaaggaaacctgcctgggggcccaaagaattttttttgggcctcgggcccccttttgttggggggcccggccctttgcccaccccataaacaggccccatttttgtttttt

SEQ ID NO: 11710 - DNA, 1212 bp, Zea mays
  unsure (1)..(1212): unsure at all n locations
  Clone ID: MRT4577_110679C.1
ccggccgggatatttttcacatggctcgacgagcgaatgcagatgcaaaagactaatatgagggaagattggtccgggaaaacctcaatcacagagcggctgagcagtgagattgagggttttctccatcatgctaaaaggccaggtaattccaagaatgataacttagacaacggtaacgaaaagcgtgatgcgagtctgtgccggcagtcccttgagtcagtccatctgaatggagccactagtgtccctcggctagctgaagacgacgacgatggcagttctattgccagtgacctgcattgctttgaactgaacacgcatggaggcgccattaggaatcatgagcttgcaggagctcgaaggagggttacaggctgcatgcattcaccaatgcgaaggctggaatattccaacggcgtatctgtggaaggttcgccgatgtcaaatgtgccaccttgcccgaagaaagaaaagacgaggtctggcgtcagcagacagcacttcatcacctcagcaccagaaactagctcacgcaatgacgctagccttgctcctgctgcagatgagcagaacgagactgtcatgacccaggtctctaggcgactacgtgatgacctgctgaagatcaaatcagaggctcctcagcatgcatatctaggacagaaatcaaaccagccccggacaaatgagtttcatgaatacagtccagcaccagcaccagcacgtcgtcatctgaataacccagcccagtccttggactgcgagatctctgaacccccagctcatcagctcacaggcacaaaggagaacagtcttaaggtgaaactgctgcaagcaaggctagaggggcagcacgctcggctgagcgcgtcagtgttccccctgatcagcacaagaaggaagtgatgccactcgtgagcttccatgatttcgatccgcaacacagagttgcaattgtaagatagctgaatattgttagctcgaggcaattggactcggtgtgaatcctagatccagccgcgtatgttgtagatttgatctgctaactgccagactagaatccaatcaagatggacacggcaatcagatcttgtaacttctgtacagtaatgatttgctgttggtagtttccaatctgtctgtaatgatgcctgactgactttctaaaaaactaaaaagacagttctttgtgaccaaaanaaaanaaaa

SEQ ID NO: 11711 - DNA, 287 bp, Zea mays
  Clone ID: MRT4577_11067C.1
attcggctcgagagctcaagcatcacttgttggagctctgggcactgtgcgcacgtggggggcctagctcggtgtgatcgcctaccatggctgatcaccaccggcgtgcgaccggaggtggaggaggctacggtcacctccaacgcgcacgcggcaggcacggcgaggcagcatgattaagctatgcaaggcgccatgatcgctcgagctcaaggccccgacggacaagaccttatgcgggtccatactggtgctggcccagctgatcctggactgtaccgagatcg

SEQ ID NO: 11712 - DNA, 1470 bp, Zea mays
  Clone ID: MRT4577_110680C.1
agatttcctgttacagaagatctgtgagaacacttcagcgagcaagttgaccaaaacaaatgggaaacgaccagattctgcggatacaggttcaaaaaatgagtggcgtggaattccaacgaggttgaataacattccacattctagggaaattagggaatacttctacaacgacgtgttaaaagctacaaaacttgctattgaagataaaaagactcggttgcagatagatatcaatattcctgaacttaaccctgaaatggatgtttaccgcataggaaccctcatggaacttgtaagagaactttctctatcctttgcagatgatgggaaacgtgtcaaggtctgtgttcaaggctccatggggcaaggtgcatttgctggcatcccacttcaactggcaggaaccagaaaaattttggaattcatggactggggtgactatggggcgaagggcaccttcattaatattggagcagtaggtgctagagatgttgacaaagaagatgatatgtttgtcctcattgctccacaaaatgctgttggaaactgcataattgatgatatgagagctatgactgatgctgctggtgatagacctgtgattcttgtaaatcctcgcctaaaggatatgcctgcatcaagtggtgttatgcaaacaatgggaagggatattaggctgaagtatgctgcatcatttgagacatgctattcattccgtcttctctactacactggttcattctatcctattatgggagctttaaggatggcttatccaaataaatatgagatttatcgaagggttgacactctcaatggaaaagagaactatattcttatagctgaattcacgaacaagccaactcctgatgagatcaccagtgctttcaaaggacaaaaaagggaagaaaaggcatcttctggattctggggtttcttaagtggtttattttaagtcaagcgatctgctgtacggcgatgcaatcctccttgtatatttttatctgataagggatgtaatatggttcagaaaatatccgttcggatccggattcgaagatggtgaacactggttcagatggaattttcggatatccggacttttttcggataacggatacgaatacggatattttgttcggatatcgaattcgaatacaatatgtctgatattcgtcggatatcgaatatccggatattttatcggataaatcttctcggatatccagatatcttatctggatagctgtgtgcattttgttgattgtttgtagaaagaaattaataatacacaaatagcctcaaaaattcatgaaaatttatggaggcataccatatgtccacatataatcctccaaaatatttggaccataaaatccacaatattgtagtgtttctttcatttcactttcacttgtgtgaattacacgggaaatcactctaattatccaagttcactttatcatt

SEQ ID NO: 11713 - DNA, 1187 bp, Zea mays
  Clone ID: MRT4577_110681C.1
attcggctcgagggatgcctatctactggactgggacacgcggtaccggatcgctctgggtgctgccgaaggcctgcggtatcttcacagcgactgcaagccgcaggtcattcaccgcgatatcaaatcgaacaacatactgcttgatgagatgatggaggctcatgtgggggacttcggtttggccaaacttattgacatttccaactctagatcgatgtctgctgttgctggttcctatggctacattgctccagagtacgccttcaccatgaaggtcactgagaagtgtgatgtctacagtttcggggtagttttgttggaactgctgacggggcaatctccaatccagcctcttgagaaaggaggagaccttgtgaatctggtgaggcggatgatgaacaaaatgatgccgaacacagaagtgttcgacagcaggctggacctgagctcgaggagagtcgtggaagagatgtccctggtgctaaaaatcgcgctgttctgcaccaacgagtcaccgttcgataggcctagcatgagagaagtcatttccatgctgatcgacgctagagcgtcctcctacgactcattctcttcgccagcatctgaggcacctatagaatatgattcgtccccaaaaaattagaggccagtgtcgtcaatctattttaccagtcatgcatcgagggagcatccatagatcaacttcgctcgtagctgaagaccatcctagtctgaaatattgtgttccaagaagttgttggctatagcctgactccaaatggaaaagagacccgtctttctgaccaagactaaccaccagttgaaggctagaagcatgtgaagtgaagttattcactcctactacacctcagctagctagtgctctttcaatggaggcagacacctttgagtgttccttttctgaaacactcagctaggcaaggctgatacgttcacttcagcagaacatacagattcaactatcgctagctttaacactgtacatactacatagaccatagtgcggctactattaaataatgatgatgacagattattaatctctggattgattttgtgcttctttttaacttgttactaactgtaatgacatggtaaaaaaagtgaataattaccgtgttcgtcggagtcgaacaaaaaaaaaaaaaaaaaactcgagaaga

SEQ ID NO: 11714 - DNA, 2854 bp, Zea mays
  unsure (1)..(2854): unsure at all n locations
  Clone ID: MRT4577_110682C.1
cattgggtacctcgaggccggccgggaagtcttccactcccattttcctttcagataccccagttcgtttttacagccatgtctgagacctcagtaaagctatcgactccccagacgggtgagtacgaacagcccaccggcctcttcatcaacaacgagttcgtcaagggcgtcgacggcaagactttcgaggtcatcaacccatccaccgaggaagtcatctgcagtgtcgcagaggccactgagaaggatgttgacattgctgtcgctgccgcacgcaaggccttcaacggcccatggaggaaggagacaccagagaaccgcggaaagctcctcgtcaagcttgccgagctctttgagaagaatgccgaccttctcgctgccgtcgaggcactcgacaacggaaaggccttcaacatggccaggaacgtcgatcttcccgctgcagctggatgtctgcgatactacggagggtgggccgacaagatcgaaggcaaggtcgtcgacaccacacccgacaccttcaactacatgtcccaatcccaaccctactcccttgcctccccctaatgacatcgcctggcggcgtcttctccgccgcgctcgtcgccgaggacttcccttgggtggacatggaggaggagatggggatggccccggacatgtaccgcgaggtgttcgacctcgcgcagcgcgggacacgagcctttcgcgaccgcctcttcgacgaggcaatatcctgttacactaaagctcaaaatttgagaccagatccaattatccttggcaatcgaagtttgactttctgccggttaagtcaactgttgagggagagatcagcagctgactctgaatatcagcccttgaatggccttgatcctacaactcatgcagagttagctctgaaggatgcagagaagatattatctatcaacagtaattctcctagaccatatattctcaaggcatatgcgctatttctgatggagcattaccatgaggcacgtgagacccttcttgctggtcttcaagttgatcccctcagtcatgtcttgcaaacctgtctgaatgatctggataggaatacaaatattgcagctggggcaaggcgtgcaaggttagctaggattgatgattttgagtgcacattatgctttaagctattgtatgaacctgtcactacaccatgtggccattcattttgtcgctcttgtctacatcagtcaatggatcatggtaataagtgccccatgtgtcggacagtattatttatcggtccaagaacatgccctataagtgtaacattaagcaacataattcaaaaggcttcttctggattctggggtttcttaagtggtttattttaagtcaagcgatctgctgtacggcgatgcaatcctccttgtatatttttatctgataatggatgtaatatggttcggaaaatatccgttcggatccggattcgaagatggtgaacgctggttcagatggaattttcggatatccgaatggttgctatagattcggcaacgggtactgtagcagattgtggctgtgaggtggaaatttcagagtgtgaaccacttccagatgggcgcttttatttagaggtggaaggcacacgtcggtttcgtatcgtgcgatcatgggatcaagatggatatagagttgctgaagttgaatggttgaaagatatacctctgccagaaggttcacaagggagaagagaactaatggaactggccaatggagcttcagagctggccagggcatatatcagacatgctagagataccgtacggactgcaaggcgaacaagacatctggatcttgagggcatgcctgggccacaggacccggaaaaatttagtttctggctagccaacttgataagtttgaggccctcggatagattagatacgttacgccttcgcgacactagggagagaatttctagtagcatcagtttgctccgtgattccgaacaaggctgccgtgtacaatgacggaaacagtacaagaatcgtttccacagaccaattcgttcgtctaggagtatatcgatttggagctactccgtgattccgaacaaggctgccgtgtacaatgacggaaacagtacaagaatcgtttccacgtaccaattcgttcgtctaggagtatatcgatttggagctactccgtgattccgaacaaggctgccgtatacaatgacggaaacagtacaagaatcgtttccacagaccaattcgttcgtctaggagtatatcgatttggagctagggatgtaatatgatttagaaaatatccgtccagatccagactcgaagatggtgaatactggttcggatggaattttcggatatccggacttttttcggataacggatacaaatacggatattttattcggatatcgaattcgaatacaatatgtctgatatctgtcggatatcgaatatccggatattttctcggataaatcttctcggatatccggatagctgtgtgtattttgttgatctttttgtagaaagaaattaataatacacaaatattctcaaaaattcatgaaaatttatggaggcataccatatgtccacatataatcctccaaaatatttggaccataaaatccacaatattgtagtgtttctttcatttcactttcacttgtgtgaattacacgggaaatcactctaattatccaagttcactttatcatttttatgaaaccaatacgaacggtctaacctcaattaattcggctaccgctctataagatcctagcttacgtatctggaggcaaaaaaaaaaaaaaaagggcggcgcacgcgtcnagaaaaccggg

SEQ ID NO: 11715 - DNA, 975 bp, Zea mays
  Clone ID: MRT4577_110683C.1
atgggatctgttgcctccgccgctgtgccaccacctcctcctcaatcagcgctgcctcaggcgggcgcgccgccctacgggcccgggctcgccgggatcctcccgcagatgtcgaagggggaggagaagaaggatgagaaggtggactacctcaacctcccctgccccgtgcccttcgaggagatccagcgcgaggctctcatgtctttgaagcctgaactttttgaaggattgaggtttgacttcacaaaaggattgaatcagaagttttctcttagccacagccctaacaacatcttccacagcatttttatgggctccttagaagttccagcccaggcatctgaaactattaaagttccaactgcacattatgaatttggcgccaattttttagatccaaagttaatgctcattggaagggtgatgacagatggaaggcttaatgctcgtgtgaaatgtgatttgacagacaatctgacgttgaaagtaaatgcacagggaagtgactatcgagcacaattccaaattgggaacaatgcattctatggtgcaaattatattcagagtgttactccgaacctatcaatgggaactgaaatgttctggcttggtcaccaaaggaagtctggaattggttttgcctctcgctataacacagacaaaatggtgggcactctacaggtcgcaagcactggaatagttgccttaagttatgtccagaagatttccgagaaggtttcccttgcgtctgacttcatgtataaccatatgtcaagagatgtaactgccagctttggttatgattacttgcttaggcagtgccgcctaagaggcaaaatagactcgaatggtgttgttgccgcatacttggaagagaggttgaacatgggtgtcaacttccttctatctgctgagattgaccattgtaagaagaactacaagtttggttttggaatgaccgtaggagagtaa

SEQ ID NO: 11716 - DNA, 649 bp, Zea mays
  Clone ID: MRT4577_110684C.1
aattcggcacgaggtctgcagaacggtgattctgaggagttccatgcaaaactttgtcaaactaagatggatcttgtcttggctttgtcaaacactagcaaggagagcacgaaatacatccactctaccatccttaaattacagattctagatcatgctactatggtttgggacctgcgttggaaccttaatcccaatcaaacttcaaaatctcctgtaaccaaggaattttctcacatatctactgtccctaaagggatacagttggagttgttggataaagagtggaacttaattatgttccaagcagaacggaatcttgatctatttgaaccttttctggcatttaggcgtgccctccttaagattttaggttgtgaagaacatcttgtaaaacatttatttcaatctgcttctgcgctccggaagggattaaggttttctttggcagcggcagctttatatgaactcaaagaactttgttttcacagagatgagagcactatgacaaatacctatttgcttgcacggcttgaagacgctaaattgctcagagctcaagggcagcttgatatggctattagtcttggaaaatacatactacagaagctttctgacaagaaaaacctgtcagatgtctatcgattag

SEQ ID NO: 11717 - DNA, 1795 bp, Zea mays
  Clone ID: MRT4577_110685C.1
aacccgcggcctcacatcagtcacctgtggaagcgctagggtttggtgaactactgcgtcccgttgagcgtcgcgaggggggagacgagccgaacgcagagcgccctgagggacgagcacgaagccagagcgccccaaaaccaaaaacccccagaaccccgacatagggttacgccatcgccatgggatctgttgcctccgccgctgtgccaccacctcctcctcactcagcgctgcctcaggcgggcgcgccgccctacgggcccgggctcgccgggatcctcccgcagatgtcgaagggggaggagaagaaggatgagaaggtggactacctcaacctcccctgccccgtgcccttcgaggagatccagcgcgaggctctcatgtctttgaagcctgaactttttgaaggattgagatttgacttcacaaaaggattgaatcagaagttttctcttagccacagcatttttatgggctccttagaagttccagcccaggcatctgaaactattaaagttccaactgcacattatgaatttggcgccaattttttagatccaaagttaatgctcattggaagggtgatgacagatggaaggcttaatgctcgtgtgaaatgtgatttgacagacaatctgacgttgaaagtaaatgcacagcttacccaagaggcacattactcacaagggatgtttaacttcgactacaagggaagtgactatcgagcacaattccaaattgggaacaatgcattctatggtgcaaattatattcagagtgttactccgaacctatcaatgggaactgaaatgttctggcttggtcaccaaaggaagtctggaattggttttgcctctcgctataacacggacaaaatggtgggcactctacaggtcgcaagcactggaatagttgccttaagttatgtccagaagatttctgagaaggtttcccttgcgtctgatttcatgtataaccatatgtcaagagatgtaactgccagctttggttatgattacttgcttaggcagtgccgcctaagaggcaaaatagactcgaatggtgttgttgcggcatatttggaagagaggttgaacatgggtgtcaactttcttctatctgctgagattgaccattgtaagaagaactacaagtttggtttcggaatgaccgtaggagagtaattctgctaaaacaattgctgagaagagcacatgaggactttcgcagtctgctttgcattgtatgttaagatacttcaggtctcagttttgattgatcaggttctgccccgtcgaaaaaaatactagctgttgctgctttacagggttttgtctcagtgtattggtggttgtttattttcagctacttgagcatgggggccatgattctttgttcatcttggatgtaactagctgattggtgttccaatgatgttgtatttgcagaacgattttttccttttaaatcaccaacaaccaccacactaggctttttctgtaccatcatggacgggccacaagattttacagttcaaagctttggcacttgccatatttgatatccatgtaagtcttaaatctcagttcatatcagtgcttttgctcatccatgtaagtcagaaatctctgttcatatcagtttttttattaaaaaaagtttccgctgcataaaaaaaaaaaaaaaatgtggaatcattgtaccagatggatcgataatgtcttgactgctgaagcgcctatttttcatgataggtaatagattatcagcatgtttggtttcccataacccc

SEQ ID NO: 11718 - DNA, 472 bp, Zea mays
  unsure (1)..(472): unsure at all n locations
  Clone ID: MRT4577_110686C.1
taattcggcacgagggcagagaactagactcgagcttttttttttttttttttttttttgtttttgttttttcttttgttgctcttgacccacgctggagcccgtcctggccttaggagcgccactacaggacccgccgctgagagtggcgcacggggccacctgccggcttcttctccacagaggggggagcgaaggtgtaaccttagctttactacacgagctgcaagagtaggcagccaaggtggaggccaaatgttgagcccctcggaaatcccacagagggactggttcccctctgacttcaccttcggtgccgccacttcagcgtaccaaattgaaggcgcttggaatgaagatggaaagggggaaagcagctgggatcacttctgccgcantcatccggaaaggatactgggcgggagcaattgagaccttggggcgggtgggggccctgtgggcggggcgggcg

SEQ ID NO: 11719 - DNA, 1628 bp, Zea mays
  Clone ID: MRT4577_110687C.1
cattgggtacgtcgaggtcggccgggcccgcgcgctgcagtgtgcagggcctgccgtctgccgcaaaagagagcactaggaaaagaagtgctgcggcgttgcgaggtgggggacgaggacgaggccagaacgccccaaaaccaaaaacccccagaaccccgacctagggttacgccatcgccatgggatctgttgcctccgccgctgtgccaccacctcctcctcaatcagcgctgcctcaggcgggcgcgccgccctacgggcccgggctcgccgggatcctcccgcagatgtcgaagggggaggagaagaaggatgagaaggtggactacctcaacctcccctgccccgtgcccttcgaggagatccagcgcgaggctctcatgtctttgaagcctgaactttttgaaggattgaggtttgacttcacaaaaggattgaatcagaagttttctcttagccacagcatttttatgggctccttagaagttccagcccaggcatctgaaactattaaagttccaactgcacattatgaatttggcgccaattttttagatccaaagttaatgctcattggaagggtgatgacagatggaaggcttaatgctcgtgtgaaatgtgatttgacagacaatctgacgttgaaagtaaatgcacagcttacccaagaggcacattactcacaagggatgtttaacttcgactacaagggaagtgactatcgagcacaattccaaattgggaacaatgcattctatggtgcaaattatattcagagtgttactccgaacctatcaatgggaactgaaatgttctggcttggtcaccaaaggaagtctggaattggttttgcctctcgctacaacacagacaaaatggtgggcactctacaggtcgcaagcactggaatagttgccttaagttatgtccagaagatttccgagaaggtttcccttgcgtctgacttcatgtataaccatatgtcaagagatgtaactgccagctttggttatgattacttgcttaggcagtgccgcctaagaggcaaaatagactcgaatggtgttgttgccgcatacttggaagagaggttgaacatgggtgtcaacttccttctatctgctgagattgaccattgtaagaagaactacaagtttggttttggaatgaccgtaggagagtaattctgccaaaacaattgctgtgagcgcacatgagatacttatgcagtcggcttcgcgcgtatgttgacttgttaaagatatttcaggtctcagttttgactgatcaggttttgccattgcgccgtggaaaaacacaggccgttgctgctttacagggttttgtatttcagtgttttttcagctacttgagcatgggggccatgattctttgttcatcttggatgtaactagctgattggtgttccaacaatgttgtattggcggaacaatttttacctttttaaatcactaccaatccacctcactaggccttttctgtaacatcatacacgagccgtacgatttcaaagcatatcaccatttagcacttgacatatttgatgctgtcatgtgcttttgttcatccattgcaagtaagaaagttcaaatcgttttttaaca

SEQ ID NO: 11720 - DNA, 354 bp, Zea mays
  Clone ID: MRT4577_110688C.1
ttatataattctcggacagatatttattccaatataaacctgaccttagcgttcaataatcattatagcagccatgtcagagtctagcgagaacttattgcatatgctaagccccttgtgtggctttatgttactttgtctcagagtctttcggcatctatagtaggatgacacagtgccatgcctgaccatgtactacgcaacttctttttagattgtacccggcaatcctcaacctgctatggtacacttggcgtatccttcttattcccgcgccaacataaaaaaaaattgctgatcctgcggaccaatctaccatttgcaaaacagacgacttcatcacggcatttcaag

SEQ ID NO: 11721 - DNA, 320 bp, Zea mays
  Clone ID: MRT4577_110689C.1
attttgagcattcagaaacacaccaagctttatttctattatcatcatcctaacatcaatgggtgccaagatattatccctccttgcgcttcttgcgctttttgtgagcgcaacatatgcgttcattattttcacattgctcactttgctccaagtttcattattacacagacttcttctaccagttacttcaatgggcttcgaacacccagctttgcttgcctatatgcttcaacaagcaattgtggcgtgctgtttacaacaaccaatttcccatttgcaactaacattccttggcacatcttacatatcaaaccatc

SEQ ID NO: 11722 - DNA, 498 bp, Zea mays
  Clone ID: MRT4577_11068C.1
gccaagcagggcacctgacaggaccggtggctggtcatcttctaacaacacgcgcacaatgcaactcctggctggctcgctgtggaacaaaatcgaacccttggacgcggcatacttgtcacggaggggcaaagcaccaacttgacggacaggatagacctgccggtcaacatcatctgcggacccaagctagatgcagcgcagttcgacctgtcgtgaacactggtcatgttttggcagtgactccctggctcaaaactcaagttattgtacaccacaacatatttcttcgattattacaactcgctatgatgtcacgaactatgatccgttcccaccgcaccattaccatcttacatgattctaaaatgctatctttcctttcatgttcgcacttgcagcttgcgccatactactctgatgaataatattgaatctttatactccccgtgacatataagtaaatggtcgcgacggccagctcaggatgtgagctcc

SEQ ID NO: 11723 - DNA, 669 bp, Zea mays
  Clone ID: MRT4577_110690C.1
aattcggcacgaggtataggtcgtggcggagacgaagaagagaaccgaagaaggttccctcacttcccttgcctcgacgcgcccaaccacgccacgaagccacgcgcccgccggcggctcacctttcccgtcccttcaccttccccttccccttctccgttcggtgaaactgcgggagaccctcgcggcttccccacctcgacctccaaactctaaccacagacgcatcgaaaaccctcggtgcccggccgatggggaggaggaaggagcgccgcctggctgccagggccgcggcgggccgcagggtcaagctggacctcttcctcgatctcccccccggggaggcatcacataatgatggaataggaggtgaaaaccgtgaccaacagactgtggttcccacttcatcttcaggtgggtttcatcaatttccttccaagggatatgtaaagaagacatacctatggattattgaacataaatatggtggaaatttggatttgtgtacaagcttgtattcctccgcaaatctggttctgagatacatgtagggttgctggcctgcaaggaacattgagtaaattctactgagctgccactgtcaaaactgagtgaatgcctatgggcaatttctcatttggcagcatctaagcatggggatttctggat

SEQ ID NO: 11724 - DNA, 419 bp, Zea mays
  Clone ID: MRT4577_110691C.1
ttttttttttttttttttttttttttttctttttttttttttttttttttttttttttttttttttttttttttttttttttttttttttattttttttttttttttattgtttaaagaaaacgccccaagaaaaaaagtatgttcacccacacaacaaaggaaaaaaaaatttaaaggtccatcacaacccgcgaaccgcgctgttctcgaacccatcaaaaaaagccccaaccaagagcgcccctgggaacccgcccccttaaaaacgcataaaacagagctggttatctgtgccccggaagagaccacctcggccacaaaaactttgggggcgaggtctggagataaacaaggggggggcttaaaaaaaaacccgcaggtatagggggccctaaaaaagaaagccaaccttttggc

SEQ ID NO: 11725 - DNA, 750 bp, Zea mays
  Clone ID: MRT4577_110692C.1
aatccagtgaaagggtcacacaacaaaccgtgtccggtccgccaggagccaatggcagtgcaaccagctccccccagaaagcagatggaaatgttgatgcgcccgaaaacatggccgtcgatcacaaggtgacatcctctcccgtcaagaaccacattgacctgaacattcaacctgaacgggacgacgagcagtcaccaaaatctggtgcggctggtttgttgagccgagaccatccaacttagacattgtttggttatttatatcccatataaattggatagaattgtaaaacattacgaaagattttgatttatttggaatttaaacccactcaattccacccaatccgcatggattacaagcaaaacgaacaagcagcccttagagagtggatcgcgtggattgcttgatcataccgttgagtggacatagaaaccgattgaacacttccgaatgtctatacccccttttttttaaagatagatgtggcgtgaggcgtggggccttgtagtgtagctgttaccttcccataccatagagccggtttccttttaccctgagactccagtggtaatgttatcgtgtataccatagggcaggacacccgtaggtgttgcgtggggacttgcataaccatgtatattgcaagaccagctcgtttcggctgaatgtgaaccgtaagttgctactgtacccctgcacatatttcccccgagttggcaggaattgttacattacattcgtagg

SEQ ID NO: 11726 - DNA, 223 bp, Zea mays
  Clone ID: MRT4577_110693C.1
cggcccggacttcctggcttgacccacgcacgcgttcggtacagcctctcaagcaaggccacaggggaggggcactttggagcaccagcggggtgcgctcttccgcaccgacggcacggcgaggaacaagaaatccgattccagggacggagggacggagctctgcggcctaattggccatggcacccgggcctgacaacggactgaacaacaaccaccccgt

SEQ ID NO: 11727 - DNA, 216 bp, Zea mays
  Clone ID: MRT4577_110694C.1
tttaaacccaggtagccctcttgacaaatcttttaccatttctgactatgataaacatccgacctgccacaacattatctcatctatgaacactcaaacctctcttcaataaatactgaatcacaactccctacaattctatccttcctaccaattttccttcatcatttctacttatcacacccattttccattccataaattcctacccatttc

SEQ ID NO: 11728 - DNA, 437 bp, Zea mays
  unsure (1)..(437): unsure at all n locations
  Clone ID: MRT4577_110695C.1
cgtaagnncttggnatnncctctagnaggcggccgcnnccttttttttttatttatatttttttatttttttattttttttttttttattttttttttttttttttttttttggggaaaaaaaacgggtttttggataaaggaaaaaaaacaaaggctggcaaattttacattaaaacaagctttttttttcctctccccctcccgaagcaaagacgggggcaaaaaccagaaaaaactgggctcactttccggaaacaaaggggggggggaaggcccccgcgtgggtgttaacgggaccggccaaaggggcaacaggggtctttatgggccccttaccagggacaagggcttgacccaaaaacccacccctagagaacaaagccaatcttccgttttggggccccttccccttaaactaaagaaaggccccggggg

SEQ ID NO: 11729 - DNA, 269 bp, Zea mays
  Clone ID: MRT4577_110696C.1
cagagtagaagttttctctcagaacctctagtatctgttttcaagtttagctctgaatggatgataagcatgtcgttcagtttgttcttaaaaaaaaaaaaaaaaaaaaaaaaaaaaaaaaaaaaaaaaaaaaaaaaaaaaaaaaaaaaaaaaaaaaaaaaaaaaaaaaaaaaaaaaaaaaaaaaaaaatatgtgtaacataaataaaaacaaatgaaacaaaaataaaaaaaaatcaagactgggggttctctttagggtacccaact

SEQ ID NO: 11730 - DNA, 739 bp, Zea mays
  Clone ID: MRT4577_110697C.1
tacactctgatatgtttttatgtgttcagaaaactggttcggtcctactgttgctgtcccacgcacctcctctgtcaaaacaattgaaacctttgtcacggaagcgcagaagcatctttttgcccctattcctacccgacggagacagacaaccttgcttctttgctcaagcgctctcgtgcttctcagtcccacctctccttcccagatccccacttctcgttcgcgtcctacttccgtcggccatcgccactactcctcgccgtcccaccgccccgcaccacccaaacccaccactcacttgtcagttgtcgcttccattccatcccacctccgcgctcccgcaatttgcgtcgccgacaccccgcccccgctcggcgccggagaacaaagagcgcgccgagcgcgcggcggcgggcgtagccatgctccacaagttcgcgctcgcggtcaagaccaagaccatcgagttcttcgccgaggaggaggaggacgaggacgaggacgccgaccggtccgcgcgctctccgttgccgggggcggacggggtacttgccgggcagcgggttgtcgtgctgaagcccgacccggcgaaccctaaccctagcgcggatggggacgggaaggcggcgtccgggcaggaggccgccgtcgccgcggcgctcgcgacggcctcgtcgttccaggcggcgtacctgcacctgcaggccgcccacgcgccgttcctgccggacgcggc

SEQ ID NO: 11731 - DNA, 1197 bp, Zea mays
  Clone ID: MRT4577_110698C.1
tcgaccggcgcgtgcggaccgaataaccacccgtctgccgctgtgccgcacggcccgcaccccgcacgagacccgtccttgaggggcacgtcctagatcggtggcgcctgcctctcgccgccgatacggtgcctctcgcggtctcgctccccctcgcagacatgcagagccagatagtgtgccacgggtgcaggacccttctgttctacccaagaggtgctccgagcgtgtgttgtgcggtatgccatgtggtcaccaatgtgccgcctccagcaatggagatggctcgacttatatgtggtggctgccagacattattgatgtatgctcgcagtgcaacaactgtaagatgctcatgttgtgacacagtcaatcttgtcagaccagtgagtagcatagctcatgtgaactgtggccagtgccaaacagtgttgatgtatccatacggagcaccgtctgtcaaatgtgctgtttgcaacttcattacaaatgttggcggggtgactcccatgatacctttgccaccaccagcactacctgcatcaagtggaacttcatatatcatcccgtcaatttccgtgccgacgaatcaaccgcggaatgtaactgttgtcgttgaaaacccaatgacagtagatgacaagggaaaattggtgagcaatgttgtagtaggggttacgagcggcgggaaaaagtgacggcatatcacaacccgtatagctttgtccaaactatctaaaaagggtttaagaatacataccttgtatcatactgctgtttggcgatcggctgctcgacggaggaatccccctccctggagagcgtagtggcaaggcagcgctgctttcgccactgcgatcgtgctagaacgagccaaaaaaaaaacgaagtgcgggtgtgcatactcagagtatatctgtagcttgttaccccttgattcttttgtatgtaatatgggctctgcctgactttcactgtgtgatcaaatttccaagcccgtgggcgctgttgctgcgtgccttgttattagtgaataacaaacattgcaaatggctcttgaaatacagtgtgtgtgtgttttaatctctctgcatttatgttaatcagcaggtgccaccatttgctgttccagactgataatgcagagtttgtatccacgttctttggagaaaacatttgaggctcatacgctgtttc

SEQ ID NO: 11732 - DNA, 989 bp, Zea mays
  unsure (1)..(989): unsure at all n locations
  Clone ID: MRT4577_110699C.1
gccggccgtttccgggacgaatgaccgaataaccacccgtctgccgctgtgccgcaccccgcacgagacccgtccttgaggggcacgtcctagatcggtggcgcctgcctctcgccgccgatacggtgcctctcgcggtctcgctccccctcgcaggtcttttggtttttttagttcctccctttgcttcttggaggtgtttgttgccgtctcacccgcagttcttgagcaatggagatggctcgacttatatgtggtggctgccagacattattgatgtatgctcgcagtgcaacaactgtaagatgctcatgttgtgacacagtcaatcttgtcagaccagtgagtagcatagctcatgtgaactgtggccagtgccaaacagtgttgatgtatccatacggagcaccgtctgtcaaatgtgctgtttgcaacttcattacaaatgttggcggggtgactcccatgatacctttgccaccaccagcactaactgcatcaagtggaacttcatatatcatcccgtcaatttccgtgccgacgaatcaaccgcggaatgtaactgttgtcgttgaaaacccaatgacagtagatgacaagggaaaattggtgagcaatgttgtagtaggggttacgagcggcgggaaaaagtgacggcatatcacaacccgtatagctttgtccaaactatctaaaaagggtttaagaatacataccttgtatcatactgctgtttggcgatcggctgctcgacggaggaatccccctccctggagagcgtagtggcaaggcagcgctgctttcgccactgcgatcgtgctagaacgagccaaaaaaaaaaacgaagtgcgggtgtgcatactcagagtatatctgtagcttgttaccccttgattcttttgtatgtaatatgggctctgcctgactttcactgtgtgatcaaatttccaagccccgtgggcgctgttgctgcngtgcttgntattagc

SEQ ID NO: 11733 - DNA, 521 bp, Zea mays
  Clone ID: MRT4577_11069C.1
gcccagcaaaaaagtttgttcacctatttataggcacaggacgcagcctgtaagaaatacaatcatgccccttacagaaaatcacaatcataacttaaactcttatggactgaaaagtaattccatctttaagtcggttcgatccttcgtctttggatactctatagcgtcgaagctttgtgagtggtagcttcggtatctcatataaacagatttgctgaaggtgttttcttcctgcaggacctttggcgacgaagcatgaacccaacagtagccccttcggggcgccagatcgtttttcgtaaagagcttgacccgtgaaaaatcttttacgctttgggtagccgaaggtccgaaaaacaccttccctgagctcgttgcggaaaaacgatacaacttccgagcgtggagtagtcccatcatgcatatttaccttctcgggttttgtggcccaccgttcagtgggtccgggcgagtgttcgtccggtgtaggagacttgacaattcacctttttacctgc

SEQ ID NO: 11734 - DNA, 675 bp, Zea mays
  Clone ID: MRT4577_1106C.1
cacgcacgctctatcctacggacacactatgtagcacacgtctggatgacgagcgcatgaggcacggttcgtgccatagacaattgtcttcaccctgctaaccaagcatactgtgctcgacgttcgccttcgaaggatataacatctacgtgcacacagaacaccgtctgtcgttgtggattgtagcttacttgtgacttgaatgtatgtagcatgtcaaggatcgttggtgcgtgtgctgcctgtcaaaacacatggctcgataggtttcgccaatgctaaacgcgatgatacttagatcgcaatcctgccagtagtagatccatgaatcacatggttaacggggatgggatactactccagcagatccagttccacttgctattggttttggtgaagatgtctactgctaggacctctgttgacatctcttccaagctgactgaagaacaagcattaggggcaaaatccttcagccgtgatcagactttgccacttagcgatcaatcaccagagaacaggagtcccagctgaaatcttgtcgctgttgtatgatgaggacattaaacagctgtcaaaagacggcttgaggcttgctgcatctagcaaccttatgatgctgatgaatggagactttagctagctcctgtaagctaccgtgtcaaccattattct

SEQ ID NO: 11735 - DNA, 1023 bp, Zea mays
  Clone ID: MRT4577_110700C.1
aaggcgaagccctagccccctccctgccgcggacgccgatggacccacctcgcgccgtcgcctttcttctcatactcctgcccgtgctcgccccggtggcctccggtgtacctttcgtcgtcctacacgggattggcgacgagtgcgggaacgatgggctgtcatccttcaccaagatgcttggggagtggtcaggctccaagggttactgcattgaaattggaagaggagcatgggactcttggttaatgccacttcaagagcaggcaaatacggtttgtaagaaggtcaagaaaatgaaagagctcagtgaaggttacaatatagttggcctgtctcaggggaacttaattggcagggctgtaatcgagtactgtgattgtggacctccggtcaagaatttcatatcaattgggggtcttcatgctggtacagcttcagtgccactttgtggtgatatggaagattatttgaagggttgcaaatttcttccaaaacttaacaatgagatcccaagtgcaagaaatactacctataaagaaagattcagcagcttggaaaacttggtactgatcatgacgaagctgtatacagaagattggattggcttgaagaccctggacgaggctgggcgtgttaaattcgtgtctgtgccaggaggtcacctgcgtatcaccagaagcgacatgaagaagtacattgtgccttacttgacgccggaggcgtcatccaagaagaacatacacatacaccggatgctgtcgctttgagcgagtatctaacaaggtttgtatcggtggccattgtgccctgacacgtgggccatgtgttgacgccttgtaaatacgctgaacacgaagggaggaaatgatagctccttggaagagtggatccgaacttgtgaagtgaagcgtgtttggtcctttccgtttcctatctgacaaacaaatatgtccatgccgtggccacaacacgcataaatcattatgcacatttcctattgagtaaaatacaattccggtc

SEQ ID NO: 11736 - DNA, 956 bp, Zea mays
  unsure (1)..(956): unsure at all n locations
  Clone ID: MRT4577_110701C.1
gccggccggggaaaaaaaaaaaaaaaaaaaaaaaaaaaaaaaaaccgtcgggaataaccacccgtctgccgctgtgccgcaccccgcacgagacccgtccttgaggggcacgtcctagatcggtggcgcctgcctctcgccgccgatacggtgcctctcgcggtctcgctccccctcgcaggtcttttggtttttttagttcctccctttgcttcttggaggtgtttgttgccgtctcacccgcagttcttgagacatgcagagccagatagtgtgccacgggtgcaggacccttctgttctacccaagaggtgctccgagcgtgtgttgtgcggtatgccatgtggtcaccaatgtgccgcctccagcaatggagatggctcgacttatatgtggtggctgccagacattattgatgtatgctcgcagtgcaacaactgtaagatgctcatgttgtgacacagtcaatcttgtcagaccagtgagtagcatagctcatgtgaactgtggccagtgccaaacagtgttgatgtatccatacggagcaccgtctgtcaaatgtgctgtttgcaacttcattacaaatgttggcggggtgactcccatgatacctttgccaccaccagcactaactgcatcaagtggaacttcatatatcatcccgtcaatttccgtgccgacgaatcaaccgcggaatgtaactgttgtcgttgaaaacccaatgacagtagatgacaagggaaaataatacataccttgtatcatactgctgtttggcaatcggctgctcgacagaggaggaattcccctcnctgggagagtgtagtggcaaagcagcgcggctttcgccactgcgatcgtgctagaagagcaaacaaaaaccgaagtgcgggtgtgcatactcagagtatatctgtaccttggtaccctngatcttttgtatgtatatgggctct

SEQ ID NO: 11737 - DNA, 1423 bp, Zea mays
  Clone ID: MRT4577_110702C.1
ctcgaggccggccggggtagcaatctcgctctcgctcgatgtctgacgccttctgattctcgcgctctgctcttctcgatttttgtcatcgattcagagctcacgagtcacgatccaaatcccttttccactccgccggacgtcgagagaggcggtgggtgcgggacgcgaaggcgaagccctagccccctccctgccgcggacgccgatggacccacctcgcgccgtcgcctttcttctcatactcctgcccgtgctcgccccggtggcctccggtgtacctttcgtcgtcctacacgggattggcgacgagtgcgggaacgatgggctgtcatccttcaccaagatgcttggggagtggtcaggctccaagggttactgcattgaaattggaagaggagcatgggactcttggttaatgccacttcaagagcaggcaaatacggtttgtaagaaggtcaagaaaatgaaagagctcagtgaaggttacaatatagttggcctgtctcagggaaacttaattggcagggctgtaatcgagtactgtgattgtggacctccggtcaagaatttcatatcaattgggggtcctcatgctggtacagcttcagtgccactttgtggttctgggtttctttgtattcttattgatgatctgattaaatcagagatatattcagactatgtgcaggatatggaagattatttgaagggttgcaaatttcttccaaaacttaacaatgagatcccaagtgcaagaaatactacctataaagaaagattcagcagcttggaaaacttggtactgatcatgtttgagggcgatgcagtattaatacctcgggaaacagcgtggtttggttattaccctgatggagcctttagcccagtgctgccccctcaagagacgaagctgtatacagaagattggattggcttgaagaccctggacgaggctgggcgtgttaaattcgtgtctgtgccaggaggtcacctgcgtatcaccagaagcgacatgaagaagtacattgtgccttacttgacgccggaggcgtcatccaagaagaacatacacatacaccggatgctgtcgctttgagcgagtatctaacaaggtttgtatcggtggccattgtgccctgacacgtgggccatgtgttgacgccttgtaaatacgctgaacacgaagggaggaaatgatagctccttggaagagtggatccgaacttgtgaagtgaagcgtgtttggtcctttccgtttcctatctgacaaacaaatatgtccatgccgtggccacaacacgcataaatcattatgcacatttcctattgagtaaaatacaattccggtctgtaaacttgtcgaaccatgtcatgccggttcataaacctttaaaatatgtttcttaaatgcttaatcgtt

SEQ ID NO: 11738 - DNA, 606 bp, Zea mays
  unsure (1)..(606): unsure at all n locations
  Clone ID: MRT4577_110703C.1
caccccntatgccccttactataacatagccttttttctaatggtctctttccaataagaggaggggggcgcgtacatctttgcaataacatagcatccttacaaatggttcttacaaatatcacaagatactagtttccattgtagttctgatggcctgtccccatctggcctgaaattccttgccttacatcccgctctcagcatgctcactggcttggccacctaaagatgtaccatggctgggactaggccgattagaatcttgtctaataaacttatcactcccatcttgcgtgacccacttctgaatgatgcgcccggcaacacccttatgcatttgcgttggaaaatggaagaaaggagacgcgtcctttaaaatctggactcttctctcttttgacccgaatgcaccctcaactgtgacgccaagagatgagtgccttagattaaacaactctttctctttctgtccggcattattacccccttcgttgaaatggtctctgcctccgcggcaaggtggcacgaatcccagttttgctccctatcccgcatgagctacgtcgaatttaccgttcgtggaggaacttgtgcgctctgcac

SEQ ID NO: 11739 - DNA, 1360 bp, Zea mays
  Clone ID: MRT4577_110704C.1
gccggggcgcttcctcggggcggtcgggaacctctcgtccggccgtgttgacctgaccgaataaccacccgtctgccgctgtgccgcaccccgcacgagacccgtccttgaggggcacgtcctagatcggtggcgcctgcctctcgccgccgatacggtgcctctcgcggtctcgctccccctcgcaggtcttttggtttttttagttcctccctttgcttcttggaggtgtttgttgccgtctcacccgcagttcttgagacatgcagagccagatagtgtgccacgggtgcaggacccttctgttctacccaagaggtgctccgagcgtgtgttgtgcggtatgccatgtggtcaccaatgtgccgcctccagcaatggagatggctcgacttatatgtggtggctgccagacattattgatgtatgctcgcagtgcaacaactgtaagatgctcatgttgtgacacagtcaatcttgtcagaccagtgagtagcatagctcatgtgaactgtggccagtgccaaacagtgttgatgtatccatacggagcaccgtctgtcaaatgtgctgtttgcaacttcattacaaatgttggcggggtgactccccatgatacctttgccaccaccagcactaactgcatcaagtggaacttcatatatcatcccgtcaatttccgtgccgacgaatcaaccgcggaatgtaactgttgtcgttgaaaacccaatgacagtagatgacaagggaaaattggtgagcatgttatgctaataacggtgcctctgctatgcccgacaaagtagtgaaggctgctgattttagttttcctctgtattgcaggtgagcaatgttgtagtaggggttacgagcggcgggaaggggtgacggcatatcacaacccgtgtagctttgtccaaactatctaaaaagggtttaagaatacataccttgtatcatactgctgtttggcaatcggctgctcgacagaggaggaattcccctccctggagagtgtagtggcaaagcagcgcggctttcgccactgcgatcgtgctagaacgagcaaaaaaaaacgaagtgcgggtgtgcatactcagagtatatctgtagcttgttaccccttgattcttttgtatgtaatatgggctctgcctgactttcactgtgtgatcaaatttccaagcccgtgggcgctgttgctgcgtgccttgttattagtgaataacaaacattgcaaatggctcttgaaatacagtgtgtgtgtgttttaatctctctgcatttatgttaatcagcaggtgccaccatttgctgttccagactgataatgcagagtttgtatccacgttctttggag

SEQ ID NO: 11740 - DNA, 804 bp, Zea mays
  unsure (1)..(804): unsure at all n locations
  Clone ID: MRT4577_110705C.1
gttcccgattcagagctcacgagtcacgatgccggtcccttttccactccgccggacgtcgagagaggcggtgggtgcgggacgcgaaggcgaagccctagccccctccctgccgcggacgccgatggacccacctcgcgccgtcgcctttcttctcatactcctgcccgtgctcgccccggtggcctccggtgtacctttcgtcgtcctacacgggattggcgacgagtgcgggaacgatgggctgtcatccttcaccaagatgcttggggagtggtcaggctccaagggttactgcattgaaattggaagaggagcatgggactcttggttaatgccacttcaagagcaggcaaatacggtttgtaagaaggtcaagaaaatgaaagagctcagtgaaggttacaatatagttggcctgtctcaggggaacttaattggcagggctgtaatcgagtactgtgattgtggacctccggtcaagaatttcatatcaattgggggtcttcatgctggtacagcttcagtgccactttgtggtgatatggaagattatttgaagggttgcaaatttcttccaaaacttaacaatgagatcccaagtgcaagaaatactacctataaagaaagattcagcagcttggaaaacttggtactgatcatgtttgagcacgatgcagtattaatacctcggnaaacaggcgtgggnttggttattaccctgatggagcctttagcccagtgctgccccctcaagagacgaagctgtatacagaaagattgggattggcttgaagaccctgg

SEQ ID NO: 11741 - DNA, 150 bp, Zea mays
  unsure (1)..(150): unsure at all n locations
  Clone ID: MRT4577_110706C.1
tttntttntttttttttttttttttnntttaacaatgaaagatagcactggcgcttttattagggaggcacgcatatgtacaccgaaggttngagcaaaagaagtacgaactaggcacactagtgatcgggttgatgcccgctgaaccct

SEQ ID NO: 11742 - DNA, 1240 bp, Zea mays
  unsure (1)..(1240): unsure at all n locations
  Clone ID: MRT4577_110707C.1
gcgtttctgngctcacgagtcacgatccaaatcccttttccactccgccggacgtcgagagaggcggggggtgcgggacgcgaaggcgaagccctagccccctccctgccgcggacgccgatggacccacctcgcgccgtcgcctttcttctcatactcctgcccgtgctcgccccggtggcctccggtgtacctttcgtcgtcctacacgggattggcgacgagtgcgggaacgatgggctgtcatccttcaccaagatgcttggggagtggtcaggctccaagggttactgcattgaaattggaagaggagcatgggactcttggttaatgccacttcaagagcaggcaaatacggtttgtaagaaggtcaagaaaatgaaagagctcagtgaaggttacaatatagttggcctgtctcaggggaacttaattggcagggctgtaatcgagtactgtgattgtggacctccgtctgggtttctttgtattcttattgatgatctgattaaatcagagatatattcagactatgtgcaggcgcatcttgcccctagtggttacctaaagatacccactgatatggaagattatttgaagggttgcaaatttcttccaaaacttaacaatgagatcccaagtgcaagaaatactacctataaagaaagattcagcagcttggaaaacttggtactgatcatgtttgaggacgatgcagtattaatacctcgggaaacagcgtggtttggttattaccctgatggagcctttagcccagtgctgccccctcaagagacgaagctgtatacagaagattggattggcttgaagaccctggacgaggctgggcgtgttaaattcgtgtctgtgccaggaggtcacctgcgtatcaccagaagcgacatgaagaagtacattgtgccttacttgacgccggaggcgtcatccaagaagaacatacacatacaccggatgctgtcgctttgagcgagtatctaacaaggtttgtatcggtggccattgtgccctgacacgtgggccatgtgttgacgccttgtaaatacgctgaacacgaagggaggaaatgatagctccttggaagagtggatccgaacttgtgaagtgaagcgtgtttggtcctttccgtttcctatctgacaaacaaatatgtccatgccgtggccacaacacgcataaatcattatgcacatttcctattgagtaaaatacaattccggtc

SEQ ID NO: 11743 - DNA, 445 bp, Zea mays
  Clone ID: MRT4577_110708C.1
gacaagacacaaaatcttataccaacattttgtgcttgcaatacctatataccataggtggctttaaaacacactccagggtaaggggggctggccacacaaaaaaatactctaatgtgcgtcacaacctactgcaagaaggacgcatacacacacgtcttacttccattcagtaaagcttacaaaagctcagcattcacccaatcaagcacagggagctaatgtggggcatgcattatgtcaaaagatggaaaacctgtgttttcaaattacggtcaggccaaactatattattaccacttctagaactccataccatactggccacacttgtgaatcaaccaacctaatttctgacctgtgcctctaaacaaaccagctcaacctataaccagtcatgttaatagtctgtacaagaataggcatagcatctttctgtgtgaaa

SEQ ID NO: 11744 - DNA, 1485 bp, Zea mays
  Clone ID: MRT4577_110709C.1
ctcgaggccggccggggtagcaatctcgctctcgctcgacgtatcaccccttctgattctcgcgctctgctcttctcgatttttgtcatcgattcagagctcacgagctcacgagtcacgacccaaatcccttttccactccgccggacgtcgagagaggcggtgggtgcgggacgcgaaggcgaagccctagccccctccctgccgcggacgccgatggacccacctcgcgccgtcgccgttcttctcatactcctgcccgtgctcgccccggtggcctccggtgtacctttcgtcgtcctacacgggattggcgacgagtgcgggaacgatgggctgtcatccttcaccaagatgcttggggagtggtcaggctccaagggttactgcattgaaattggaagaggagcatgggactcttggttaatgccacttcaagagcaggcaaatacggtttgtaagaaggtcaagaaaatgaaagagctcagtgaaggttacaatatagttggcctgtctcaggggaacttaattggcagggctgtaatcgagtactgtgattgtggacctccggtcaagaatttcatatcaattgggggtcctcatgctggtacagcttcagtgccactttgtggttctgggtttctttgtattcttattgatgatctgattaaatcagagatatattcagactatgtgcaggcgcatcttgcccctagtggttacctaaagatacccactgatatggaagattatttgaagggttgcaaatttcttccaaaacttaacaatgagatcccaagtgcaagaaatactacctataaagaaagattcagcagcttggaaaacttggtactgatcatgtttgaggacgatgcagtattaatacctcgggaaacagcgtggtttggttattaccctgatggagcctttagcccagtgctgccccctcaagagacgaagctgtatacagaagattggattggcttgaagaccctggacgaggctgggcgtgttaaattcgtgtctgtgccaggaggtcacctgcgtatcaccagaagcgacatgaagaagtacattgtgccttacttgacgccggaggcgtcatccaagaagaacatacacatacaccggatgctgtcgctttgagcgagtatctaacaaggtttgtatcggtggccattgtgccctgacacgtgggccatgtgttgacgccttgtaaatacgctgaacacgaagggaggaaatgatagctccttggaagagtggatccgaacttgtgaagtgaagcgtgtttggtcctttccgtttcctgtctgacaaacaaatatgtccatgccgttgccacaacacgcataaatcattatgcacatttcctattgagtaaaatacaattccggtctgtaaacttgtcgaaaaaaaaaaaaaaaaagcggccatgtcatgccggttcataaacctttaaaatatgtttcttaaatgcttaag

SEQ ID NO: 11745 - DNA, 360 bp, Zea mays
  Clone ID: MRT4577_11070C.1
gggaccagtgtgctgtattgaatgaacaggacgggaatgcccccgaattttgagctgtagcatatgctgacgatgcgtgaggacataggacatgttcgagagcatttgacccggcttcacaccagctgtatgaggctcccgctcagcatggagaagctcgcgaacacggtgggcatgaacccgagcctggaccagtactacctgaacaacacggtggacgtggtcaagatgctgtacggcctgcccagcccgccattgccgacgcgaaagcccgggacgctggtggtggtgcagctcatgttcttgttcaaaggctgcatgtgagggcggtaagggaagtaaaacacacatggctagcgg

SEQ ID NO: 11746 - DNA, 389 bp, Zea mays
  Clone ID: MRT4577_110710C.1
tttttaagcaaaagcaatcctgttgcttttggaagcaagtcctatgcatctgaacctttttagccagatattcttggaaattttaaataatgacacttatgttttgcaagtcaaggattctgattccaacaatttgtgggctcaagaagatggagctataccttctgttgcctgccgctttatcatgcttgaaatttcacagcaatgacaataggcagtgtgctgaattccttgaagcagttccaatcttttattctgaactactattatgcgataaagggttttcaagttggaaaaagtttgttaccaggagcatttttgaggaagattttagcgagtttatacccacatagttgaagattaatggttatttcagtagcactttttgg

SEQ ID NO: 11747 - DNA, 410 bp, Zea mays
  Clone ID: MRT4577_110711C.1
gaccgactcgtccgcccacgcgtcctatcacttgccctcccttctcacgctcagtaacgccagtccatacctagtctagctcgaatcattatccatggctgacgagaaccaccaccaccaccacctgttccaccacatcaagcacgaatagcacaccctgcactgcctttactgcaagtccagcaaatacacgcacgccactgtgaacccagtcacatcaccgtccagaaccagttcaacaagtacaagaacgaggacaagcaaccccagcacaagcatcacctctgcaaggccatctccatcgtcgacagcgccttcgcactctactagaatcacgaggcgaagaatgacacctatcacgcccaccgtcacaagatcaaggatgatcgtccctcatctgacatcctcat

SEQ ID NO: 11748 - DNA, 641 bp, Zea mays
  unsure (1)..(641): unsure at all n locations
  Clone ID: MRT4577_110712C.1
cggccaagtcacatgtcctttgaagtggtagtagcagtacaccaaaaaagccgcggcgctttccttactcacgcacagagagacaaaagaatttctagcaggcagcagtacaactacacaagcacgcttcagctttcgtatggttccctaacccccgacccgcccgacgcaagccgccaaaacctcacctgcgcagccgcacgcacgggcacgggcacgggcacgcaccgcccccggccggtcgccacacctccggtccggggccggccgcaggggatccgcggccaagcctcgatgcccgcggcggcatctgcgggcggggacgcaaccaatccgcgccgcacgtaccaccagccacagccagagagccaacaggaccaacacacccgcctcgagattcccgcgaaagcaacatcccttccgcgtctcctcctcgctctccggcgcggcttccgaggcgggccggcgtggccccggacgaaagtagggagcgccccccccgccaattacatatataattcccacgctgcccatcacgtgacgcgccgccgaccgcggagtagagagccgagaggggagggccagcgcgccgccgctttatactgatctgtgtaattccgtggcatctcaggnggtagttt

SEQ ID NO: 11749 - DNA, 757 bp, Zea mays
  unsure (1)..(757): unsure at all n locations
  Clone ID: MRT4577_110713C.1
gccggccggtccgggggaaaatatacataatttataggctagcatggttgctttgaatttgcccgctgacgttttggccactgctgatggtacccgcaaacttttcaacaagtggagttatgaagatgtcgaagtaaaggacatttctcttcaagattacattcaaatccgtcaacaagtttacttgcctcacactgctggtcgtttcgctgtcaagcgtttccgtaaggcccagtgccccattgtcgaacgtttgaccaacgctttgatgatgaccggtcgtaacaacggtaagaagcttatggctgctcgtatcgttcaacatgcttttgaaatcatcaacttgttgactgacgctaaccctcttcaaatccttgttgatgccatcatcaactgtggtcctcgtgaagactccacccgtatcggttctcaaggtaccgttcgtcgtcaagctgttgatgtttctcctctccgtcgtgtcaaccaagctatctctttgttgaccgtcggtactcgtgaatctgctttccgtaacgtcaagaccgttgctgaatgtcttgctgatgaattgatcaacgccgccaagggttctgctaactcttatgctatcaagaagaaggacgaacttgagcgtgttgccaaatccaaccgataaattgtttgtcattggatgtactttgttacaatgtgttttttattcttttcttaaataaaaacttcttgcaacacgaaaaaaaaaaaaaaanaaggcccccta

SEQ ID NO: 11750 - DNA, 203 bp, Zea mays
  unsure (1)..(203): unsure at all n locations
  Clone ID: MRT4577_110714C.1
ccgccgcgcaccgcaatctcgccacacantcctatatcagcgcggggcgaacgggaggatacagagcatgcaattgccttattcgcccggcccgccgccccgtggccacaatcgcaagcagtgaacacggcgcctcctagctagcgcggacacgccccagtagatgataaataaaagaaagaaataaaaaaaaatgggggggg

SEQ ID NO: 11751 - DNA, 192 bp, Zea mays
  Clone ID: MRT4577_110715C.1
tctcaagtgctaggagaagacaagtggctcaggaggagccacacaacgaggagtttgattcgatctaggtggcgtctcccagttgactttctggcgccaacgatggattttagatcctgttatatttatcatttatttttgtaagtcttccactatgtaataaatactatgattattgtgacatttatctcg

SEQ ID NO: 11752 - DNA, 368 bp, Zea mays
  Clone ID: MRT4577_110716C.1
ctaaaaaaaacccatttaaggggggaacctgctttttggtctaaaaggaatggccctttgatttgcccagttgggggctttaatttacaaagggcattcctaaaaaaaacttttaaccttggggggccaaacatcggtataatcagtttgctcctggagtaaaaaaaaaaacaggctgtttgttgctcccccgaaaaggttgttaaaccggaacccttttttttttgtagcggtcaaggaacaatttcaaaaatggttgtgggaaaacccacccgatgataggaatcctttgcaaaaacaaaaaaagggttggcccaacccccctgaaagagccaataaagcctttttcctttaaaagcctgccaaaa

SEQ ID NO: 11753 - DNA, 159 bp, Zea mays
  unsure (1)..(159): unsure at all n locations
  Clone ID: MRT4577_110717C.1
gcccgccggcacgctgtccacgcgcctgcctcactcaccccgcgggctcgtttaagggagacgncgccaccgaggcgacccagangcaagcgcccgcgaccgccatacccttcattatttgcggaaccaaacgcagcgctttttgtggctgtttgaacc

SEQ ID NO: 11754 - DNA, 348 bp, Zea mays
  unsure (1)..(348): unsure at all n locations
  Clone ID: MRT4577_110718C.1
aaacaatcccagcaaatatattataatagaagggctgacggttagcaaaggcacagttgacacaaaaaaacacctacgcgggggtaaagcctgaaacagggcatcgttggttttcccataataagcgaatcttttgcacaaaaaattttgatacaacaggatttggatggtttattattagccaggtcccagattccgcaggtcctttttttgggcaggggggcctttttttttgatcctagagggnttgagaatagggnggaggatccggtatttgagagccctttgggggtggaggggttttagtttaaaggggggttgtgggtttttttggagggaggggggtgg

SEQ ID NO: 11755 - DNA, 218 bp, Zea mays
  Clone ID: MRT4577_110719C.1
cctcaacataagcacccaagaaatttgctattgcataatgccctgtctaaaccggcgaataaaaccagaaagctgtatttactgtcgattctgccttgtatgagtacctatattggggcttgaaagaaagatgaaaacgtgaactgaatcttaacgtccctgtatcctcctccttctgctatagagcccatctcgtcatgctgtcaaagggcaactac

SEQ ID NO: 11756 - DNA, 741 bp, Zea mays
  unsure (1)..(741): unsure at all n locations
  Clone ID: MRT4577_11071C.1
aattcggcacgaggcccctccctagggtttgcccctcggcacgcgggagatccaaaccccaatggacgagacgctcgcctcccttcgccgcccgaagcgcggccgcccgccgcggccgcgggaggactacaccgcgtactttgaggatgtggctgaggcgggagggctcgcgccgccccagtccaagcggaagcgcgcggcctccgccgctgccgccgcgtccctggaggacctgccactcatcgatataatcaaacataatggtaggctgatcagccatgctgtcaaaaggctggttgaggattacgaatcaaagaaaaattcagtgacgtttcagattttaacaatgatatttgaggcttgcggcgccaagcatgagatttatcctgactaccttcgcgagtctgatgtggatgacgttgtggtctctcttgtcgacctagctaagaaaggtctggtggaagataattacaactcaaagcataaggatctcaaaaacttcaaagaaaacatggtttctttttgggacagcttagttattgaatgtcagaatggcccactgtttgatgacctcttgttccaaaaaatcaaagactatgtggttgctctgtcatgtgctcctccaagggtatatcgccaagtagcttcaatgattgggctccaacttgtaacatncattcatttctgttgctaagactctcagtggacaacgtgaaaccactcaaaggcagctgaatgcgg

SEQ ID NO: 11757 - DNA, 213 bp, Zea mays
  Clone ID: MRT4577_110720C.1
gttacccggatgatcacctttttttcttaaagagaatcaatatttgggggggagtcattaagatcggggggtgatcacaattcaatcaccgggtattttaaatataattcacaatgacatacttgatcattacatgaatggtcttttttgaattaactagccttttgagcacttaccatttccactagcattaatttttccacattgcagata

SEQ ID NO: 11758 - DNA, 467 bp, Zea mays
  Clone ID: MRT4577_110721C.1
ttggccgggatgcaacagctcacagcaatacacacaatcacttagaccacactcaaaccactgaccacacaacactcaaagtgccgagcacaatgtctctctaccaccaggtaacctgctgctgtgggagggatggctgcgagcctgcccgcatgatggccgccaaggcgcgcgccgcccatgaggtggtgaaggccaagacgagggcggacgtgacgttcttggccgccgacggcaactactgcaagggcgtggtgaccctggccaacggcctgcgcaaggtcggctcggcctatcccctgatggcgtcccttctggccgacgtgccggagaccaaccgacggatacttgtctcgcaagggttaattctgcgcgagatcgagcccgattacccccctgagaacgcatacgcagcgtgccatatgtgtactacgtgatcaactactccaagctccgcatctggcagt

SEQ ID NO: 11759 - DNA, 374 bp, Zea mays
  unsure (1)..(374): unsure at all n locations
  Clone ID: MRT4577_110722C.1
cattgggtacctcgaggccggccgggtaccaccagaagtatggctactggccatatctcgtgccattctacccagggaggatgtggtgacattgtcgaatggtgtagtgncactgtgctacatccatgggaagaggtcgttggtctatcacaccactcgtgttggattaagaaaggaacttttcaagaccttacagcaagattgttgggacaagcccgactcatgtgtaaggagattgcctatcacatccctttggtaaagatgtattatgggccactctacatagatttgttgaaanagctatgatgagttggtctggccagtcattgagggagacagctctggagacagccatgcaacatggtcaccatgag

SEQ ID NO: 11760 - DNA, 387 bp, Zea mays
  unsure (1)..(387): unsure at all n locations
  Clone ID: MRT4577_110723C.1
gtaccctncgnagncttcggccgggaaaaccatacgctatatctgactgacggctcagctgtagcctccactctagggcacacggtagccgagaagacccgctacagcgatagaagcccaaggacctcaacctcttcgccgcggggctgctcctgctcctcctgccctccgggtacagcgccaccgacgaggagtactggaaaaggggggggactacccagcgaaggacagcagagaaggggctgggctccatcccgaagccaggggacaaccaggcaccttcaatacatccggctatacagataaaaacatgactaaaggggaaccaacgatagatgctgcatacttgatgttgcacgcacacacggaaacagattacccctggga

SEQ ID NO: 11761 - DNA, 400 bp, Zea mays
  Clone ID: MRT4577_110724C.1
ctactcctgggcagcgctatgatttaattagaaacttttactcacaacaagttattaattaaatcttgtctagctcatcttttaactcacatcatgtcatatcatacacttccctataataacctattaataatacgttaatctgtctctctcatgatatacgttcatacattattttccacttccctcatttatgcaattattcatactagatacttccaaaaaataataaaaaggtctacctctctatacgatccaatcttacatacactttcatacaacataatctctcttatataatgtcacctaacttcaattcactaacctccaagttacaacgctcttacttgcaaaacccttacttttccatacttaatcccctttcaacacatcccccttt

SEQ ID NO: 11762 - DNA, 667 bp, Zea mays
  Clone ID: MRT4577_110725C.1
acgacggacccgcacatgaaggacctcttcgtcccgttccgatgcttctgcacccgcaaagacatcaattgcaaggacgtggtgctggacgagcacgacgtggccaagtccatcatcgagttctcggcgcaggcggccgtggagaagctcgtcctcggcgccacgacgaggggcggcttcgtccggttcaaggcggacatcccgaccaccatctccaagggcgccccagacttctgctcggtgtacatcgtcaacaaggggaaggtctcgtcgcagcgcaactccacccgcgccgcgccgcgggtgtcgccgctccggtcgcagatccagtcgtcgcagattgccgcaacgctcaagcccgagccgccgcagtcgcaccggtggtcctcgtcgtcgagaggccacgagcacggcgagacgccgcgggtggacaacttccgctcgccgttcgcgcgcgggggccccgcgaacacgcgcaagtcgtacgccgacctcagccacatgtccatgccggactcggccgacatctcgtttgtcagcagcaccggccgccggagcgtcgaccaccacccggcgatcccgccgcggatgtccaacggctccgtggacagctacgaccacagcttcgagatgtcacgcacgcccagcaagtggggcggcgactcct

SEQ ID NO: 11763 - DNA, 705 bp, Zea mays
  Clone ID: MRT4577_110726C.1
ccggccgggtttttgcctacctgttgatcgagccgagcgagcagggagagacacggcaccgagtgaggccgccgcatcctcctcctctccgatcctccgcctgctgcctgcctcaacggatcgacgcgacaggagggagggaggaaggagacggtcgatcagagtctgagacggaggccgatccaccaccgcagcgacgagcgggaggagatgaagatcatcattgacacggatcccggcatcgatgacagcgtggccatcctgatggcattccagatgccgggcgtccaggtcctagggctcaccaccatcttcggaaactgcaccacagagcatgccacacgcaacgccttgatcctgtgcgagaaggcaagccatctagaggtcccagtagctgagggcagccatgagcctctcaagggaggaaagccgcacgttgctgacttcgttcatggacctgatggcctcgggaacgtagatcttcctgatcccactatcaagaaagtggaggaaagtgctaccgacttcttggttgataaggtctcgcgatttcctggagaggtctctgtgctcgccttgggtcctctgacaaacatagcattggccatcaagaaggatccctcattcgtgaaaaacgttaagaagatcgttgtgctgggtggagcgttctttgcggctggaaatgccactccttccgctgaagca

SEQ ID NO: 11764 - DNA, 836 bp, Zea mays
  unsure (1)..(836): unsure at all n locations
  Clone ID: MRT4577_110727C.1
gggtaccctccgggctggccgggagccgcaaccaccgccctctcctctcgtcctacgcctgcaatctatcgtcatcgctctcccggccctcatcaagcatcactccccaggttcaactcgactcttttataatatgctcgtcttcacaaatcacttctcactacgagcatcaacttcaacctctcccgcatcaagtagctcatcagtaaactcaaagatgccttccccagctctctccggattcttcttctgcttcgcggcaatggtcctcttgatcttcgtctcggtctcaacccccgtatggcgtaacatctacttcctcaaagctaccgtcacggaagagattcgatatggaatctggggctactgcgtgcaaggaggagactgctcgaatgccatgctcggatatgcgcctagtatcgaacaggtcggcggaaactacaccgagggttcttcggtcctccagaacttcaccaaggtcatgatcctgcaccccatcgctggcgccctcgccctctttgccgtcctctggggtcttgccggagtcgccctcgcctcgaggacctgcaccatcctcatgtccctcaccgctttcctcgctctcctcgcttctttggttgctttcgccatcgacctcgctctctggatcatcatcaggaacaggatcagggaccgtggattcgaggccgagctcggtaacgctaactggctcacggtcggtgccgtcgccgccctcattcttggaacctgcaccgncgnctgtggatcgtgcggacgattcgctaccggccgaatgggtggtgaggagtactagacgctacgattctctccttccg

SEQ ID NO: 11765 - DNA, 1747 bp, Zea mays
  unsure (1)..(1747): unsure at all n locations
  Clone ID: MRT4577_110728C.1
cggccgggataacctcaatgcccagccgtatataggaggcttgcgggcggccgggccggggtgcttggccagttggccacatgccttgccttgcctttgcctacctgttgatcgagccgagcgagcagggagagacacggcaccgagtgaggccgccgcatcctcctcctctccgatccgtacgtttcctcctccctagcaatcgcaacccgttcagccaatcattgccgtctccaccaactccgttcccctattacctagttagtccagtccgcctgctgcctgcctcaacggatcgacgcgacaggagggagggaggaaggagacggtcgatcagagtctgagacggaggccgatccaccaccgcagcgacgagcgggaggagatgaagatcatcattgacacggatcccggcatcgatgacagcgtggccatcctgatggcattccagatgccgggcgtccaggtcctagggctcaccaccatcttcggaaactgcaccacagagcatgccacacgcaacgccttgatcctgtgcgagaaggcaagccatctagaggtcccagtagctgagggcagccatgagcctctcaagggaggaaagccgcacgttgctgacttcgttcatggacctgatggcctcgggaacgtagatcttcctgatcccactatcaagaaagtggaggaaagtgctaccgacttcttggttgataaggtctcgcgatttcctggagaggtctctgtgctcgccttgggtcctctgacaaacatagcattggccatcaagaaggatccctcattcgtgaaaaacgttaagaagatcgttgtgctgggtggagcgttctttgcggctggaaatgccactccttccgctgaagcaaatatccacagtgatccggaggcagccgacatggttttcacttctggggcggacatctacgtcgttggcctcaacatcacaacgcaagtcagcttcacagataaggatctcctggagctaagaaactcgcaagggaagtacgcacagttcctatgtgatgtatgcaagttctacttggactggcacaccgagtcttatggtgctcctgtgattttcctccacgatccggtcagctttgccgcgctagttcgtccggagctgttcacgttcaagaagggcgtggtgagggtggagacgcagggcatctgcgtcgggcatacttccatggacatgttgctgaagaagtggaactcagagaacccgtggactggctactcaccgatttcggtcgcatggacggtcgatgtgcccaaggtggtcgcgtttgtgaaggagctcgtcaccaagccgtgaaccaagttaactaacgtgttgtggtctcgcgcaccagatgtgcagcaaatttgagatgtcgatatatttactcacattcgaagcactgcaaacactattatctcaatagttggttcctgtggaggattgcaaatcaatttgagatgttttaaattgcagcatgtgccttcggccattgaatggtatgatgttttttttttcttcataaaaaaaaaaaaactcgagaagggnnnnnnnnnnnnnnnnnnnnnnnnnnnnnnnnnnnnnnnnnnnnnnnnnnnnnnnnnnnnnnnnnnnnnnnnnnnnnnnnnnnnnnnnnnnnnnnnnnnnnnnnnnnnnnnnnnnnnnnnnnnnnnnnnnnnnnnnnnnnnnnnnnnnnnnnnnnnnnnnnnnnnnnnnnnnnnnnnnnnnnnn

SEQ ID NO: 11766 - DNA, 1213 bp, Zea mays
  unsure (1)..(1213): unsure at all n locations
  Clone ID: MRT4577_110729C.1
cattgggtacctcgaggccggccggggcttggtagttggcccatgccttgccttgcctttgcctacctgttgatcgagccgagcgagcagggagagacacggcaccgagtgaggccgccgcatcctcctcctctccgatccgtacgtttcctcctccctagcaatcgcaacccgttcagccaatcattgccgtctccaccaactccgttcccctattacctagttagtccagtccgcctgctgcctgcctcaacggatcgacgcgacaggagggagggaggaaggagacggtcgatcagagtctgagacggaggccgatccaccaccgcagcgacgagcgggaggagatgaagatcatcattgacacggatcccggcatcgatgacagcgtggccatcctgatggcattccagatgccgggcgtccaggtcctagggctcaccaccatcttcggaaactgcaccacagagcatgccacacgcaacgccttgatcctgtgcgagaaggcaagccatctagaggtcccagtagctgagggcagccatgagcctctcaagctatgtggcatcgaatgtttcacatctttatgttgtgagcagggaggaaagccgcacgttgctgacttcgttcatggacctgatggcctcgggaacgtagatcttcctgatcccactatcaagaaagtggaggaaagtgctaccgacttcttggttgataaggtctcgcgatttcctggagaggtctctgtgctcgccttgggtcctctgacaaacatagcattggccatcaagaaggatccctcattcgtgaaaaacgttaagaagatcgttgtgctgggtggagcgttctttgcggctggaaatgccactccttccgctgaagcaaatatccacagtgatccggaggcagccgacatggttttcacttctggggcggacatctacgtcgttggcctcaacatcacaacgcaagtcagcttcacagataaggatctcctggagctaagaaactcgcaagggaagtacgcacagttcctatgtgatgtatgcaagttctacttggactggcacaccgagtcttatggtgctcctgctttgccgcgctagttcgtccggagctgttcacgttcaagaagggcgtggtgagggtggagacgcatggcatctgcgtcgggcatacttncatggacatgttgctgaagaagtggaactca

SEQ ID NO: 11767 - DNA, 313 bp, Zea mays
  Clone ID: MRT4577_11072C.1
gggacgcgtgcggtggcaggagcatgagggcttcggttagaggcagactcacgagcgcagggtgcttatgctagagatgcactccaaagtctgactgcgcgagttctggctgtgccgtaccatgaggcatgaaaacatccattcgagcattgccaccgcctatttgtgcatggcttttatggcaccattttagttaacgtctattactgctccgtcatggatgtctatcgtaccacctgctgctgttacctactggtaaggcaacttttaattcatgttcaacttggagcaaaaaaaagacagaatgtttttt

SEQ ID NO: 11768 - DNA, 1003 bp, Zea mays
  Clone ID: MRT4577_110730C.1
cctcgagggccggccgggatattacaatccaaacacgcacacacaccccacctacctacctagcaagctggagtaggaagccggccagcaaggaaggaatacctcgtggcaatttcgtcccctcctctctttggattcttccatggaggagcaaggtgagcgacacatccagcttcagctactgctcctccctgcgcctgcaggtcatcatcaagtcctgcgtgacgtaccggcggcggtgccagccagcgccgtggagcccccccagctggacctcgatctgaccatgagcatcgggccgaggcggcatccagcggcccaaacaccggcgccttcgccgccgccgccgcgcgcgcggtcgccacccacgaacgagaacaggagggcgtcggcaatgatgatgagcacggtgctggcgccggtaccggccagcgcgaggcagcatcagaagcaccagcagtatgcgggcgctgatgtgcgcgccgtgaagcagcaggccgcggaccaggcccgcatggcgtctgccgagcgcgcctacgcggagcgcgtccgggagctggcgcggcgggagctggagctcgcggagcgggagttcgcgcgcgccagggccatctgggagcgcgcccgcgaggaggtggagcgcgtggagcgcatgaagcagatcgcggcgaggcgcctcgtcggctcggccgcttcgtccgccgcggtgctggagatcacctgccacgcctgcatgcagcgcttccacccctagctagctagctagcccctgctgctctactccgggccagatcctagctagtactagactactagctcctacacttcttgatgacgaagtgtaagggccgggtgcccgggtgccctctctctccgcgacgccggcagttcgaccgtggatatggccaccattgctgaaactctctttcttcgtcatagcttttgtgcacctcttgtgaattaatgccgtacgtacgtgttcagcttgagttccagcgtcttc

SEQ ID NO: 11769 - DNA, 220 bp, Zea mays
  Clone ID: MRT4577_110731C.1
cttcgagccccgcctccacacgaacaccccttcggccgttgttgaccaacctcacgcgtcctcctccggtacgtggccaccagttacaatatgctcaactgttgcgagtggaagcaacccgactgttgctgatcaaactgagggcgtcagccattatgttgcttcaaagggtttcatggtttgcgtacgcacaggttgaagtactttgcttgccgctcgc

SEQ ID NO: 11770 - DNA, 180 bp, Zea mays
  Clone ID: MRT4577_110732C.1
catgtcgtcgataactaccgctcggccgataatggcgctggataagactgccatccgcatagcgctgtggcgtggaccatggatcagaaggctaatactgcatctctcacatctagcctagttgcctagcggtaagtgttctctgatattaacccattgtcctacgagaggtgttgccag

SEQ ID NO: 11771 - DNA, 641 bp, Zea mays
  Clone ID: MRT4577_110733C.1
attgggaccctcgaggccggccgggagcagcagtaccacaggcatcatcactaacgaataaactcttgctccgatcacgagctatctgaggtcgactatggagcgcatgtgctgaacaggaggaagacgacgaaggtggtgaccgtgctggaggtggtgctgctgctgaatatcgtgcgcgtcggcggcgatcacctgcggccacgtggagacgtccatgacatcgtgcatcacttacgcaacggggacggccagcgcgctcccctcgtcgtgctgcagaggggtcaagagcctcaacaccgcagcgagcagcagcgcgcaccagcaggcggcgcgacgatgcctcaaaagcctcttcaacagcgctaagatgatctacatggacaccgacgccaccatccccgtgaagtgcttggtctccgacggattacccatcagcatgtccaccgactgcaacaagatcatgtaactaacgactgccaaactaataagcctaccgaacatacacgtacgtgccgctgcgctgcacgagtgatgaagccagtgaataaataacatagagctagctgtatcggcaggagcagcatgtgctatcgatctatatatatactggactgtaaaacccgattatatatgcatgc

SEQ ID NO: 11772 - DNA, 1129 bp, Zea mays
  Clone ID: MRT4577_110734C.1
atcctcgccgtcaataacgctcggcccaaggacatggctcttgtttacctcaagggaatcgcgatcgggagcgccaggctggagttcgcggcggagcagagcgcgctgtacgagtacctgtggcagcacgcgttcctgtcggacacggcgcacacgctcatcggccagcgctgcaagaacgccgaggacaactcgccgctctgctcggggaccaaggacgccgcctacaaccagatcggcaacatcgacgcgtacaacatctacgcgacgacctgccatgacaagaaagtcaagcccagaggatccaactgcatggacttggctgatccttgcgctcaatactacgtggaggcgtacctgaaccagccagaggtgatgaagaccatccgtgccaacacagggctcaagtacagatggactagatgcaggggcacgttctacaacctgctcaagttcggtgactcgccgtcgaaatcgatgctgccctacgtcaaggccgtcgccgccgccggcgtccgcgtgtgggtcttcagtggcgacctggacgccatggttcccgtgatcgcgacgaagcggtccatggagaagctcggcctcggcgtcgtggaggactggcgcccctggtccatcgacgccaaggaccaggaggtcgccgggtacgtgatcgagtacaagggcgtggtgttcgcgacggtgcgcgggtccgggcacatggtaccgatcgaccagccgggccgcggcttcgctctcttctcgtccttcatcaaggggcagccgctccccaaggccgcgccgatggtcgacggatgaagagccacggtcgttgggattccggagtttcacccttgtctcgtcaagtcaccatgcatattgtctccatttccacgttaactaccagaccgtgtacatactgactaaacgctcgatctgtgacctcaactgttgtatgaatgtttcgctgcagtaaacttactaatgaagggtgtgtttggttctgattaaaaaaaaaaaaaataaagctcaaccaaagggattcagcttttttgttgctactttgaaaaagctgcttttatgtattacaaatttaaaagtagtttggaccaaaaaaaaaaaaaaaaaaaaaaaaaat

SEQ ID NO: 11773 - DNA, 637 bp, Zea mays
  Clone ID: MRT4577_110735C.1
aattcggcacgaggcgctcaccgtacctcctccgaatccgccgaccgccggcgagcccctcctcctccacgacacgcgcttccccgccccctgcgcccacatcgcgcgagatgcaatctgccgccaggctcttcgctgcggccgcgccgggaagcccgcgttctctcctattcctgcgcggcctctgctctgcctcgccggctggacagccggatccgcggccctatccggccccggaccccgaccccgaccccgacccgcggctcgttggcgctctctgccgtgtgctcagcgacttccgcgggccgcggcacgacctccgcgccgcgctcagcggattcgcgccccgcctcacgcccgcggcggcggctgccgtcctgcgccgctgccgtaaccttcccgtgccctccctccggttcttcctcttcgcggctgcgatgccggggttcacacaccttccggactcgctcctcatcctcgccggctcgcttgcgggggcgcggctcttcccgcttctgcgctctctgctctccgatctcccgcgggctgcgctctcgcgggacctggttccgctgctggtccgcgcgtacgcccgcgccgggtctacccgaggatgccatccgagctttctcctcat

SEQ ID NO: 11774 - DNA, 196 bp, Zea mays
  Clone ID: MRT4577_110736C.1
ccctcgagggcgggatctgccagcccagggtgcctgccagactcgtgaagggcctcgcgacgccagagcctgccagagaccacctttattgcagacccagacctctgatcacatcgccggccggcccccacaaaaaaaaaaccaacaaaaacgggagccggcccccgcggcctagcccgccccgccgcgcgacgcc

SEQ ID NO: 11775 - DNA, 326 bp, Zea mays
  Clone ID: MRT4577_110737C.1
cggccgggccaggctctcctccacttcctgattccgcgcgcgagattgccgccccgggtgggctctagatcccgatggcctcgcgccgccgcaccctgctcaaggtcatcatcctcggcgacagcggggtcgggaagacgcctttgatgaaccaatatgtgaacaagaagttcagcaaccagtacaaggctacgattggggcggatttcctcaccaaggaggtgaagttcaaggacaggctcttctctctgcaaatatgtgacactgctggatcggaaaggtttccgagtctcggcgatgccaactaccggagagcacattgatgc

SEQ ID NO: 11776 - DNA, 680 bp, Zea mays
  Clone ID: MRT4577_110738C.1
ggccggccgggcaaaaaaaaaaaaaaaaaaaaaaaaaaaaaaactcccttcctcttcctgtttccgcgcgcgagatcgccgccccgggtgggctctagatcccgatggcctcgcgccgccgcaccctgctcaaggtcatcatcctcggcgacagcggggttgggaagacgtctttgatgaaccagtatcctgcgattcagatcgattcttgacaagctgacttgatttcgtttcgttgaattttttattcttctggttggttggttggtttgggttgtgttgtgttttctttgagctgtgatgtaattcagatatgtgaacaagaagttcagcaaccagtacaaggctacgattggggcggatttcctcaccaaggaggtgcagttcgaggacaggctcttcactctgcaagtaagattggttaccctagccgtatgccgtgccgtgatctgggagtagttatgtttctttacgccaacttcagccccgattagtactttcttaattagttcgcgaactcattcatcagctgggatatttagaaagtataggagagggtgtttgccgctcaacatttgttaggtcatagcgtcgtgcttgtcgcgtctgattcagtatcctcaatatgctgtttcgtttaggcaggttgcttacacttgaaatgtctagctccagtacta

SEQ ID NO: 11777 - DNA, 223 bp, Zea mays
  Clone ID: MRT4577_110739C.1
cgggtgagaattaagttatgtgcttaatttgaagattataagttatgtgattaattcgaagatatcccttcgtgtgagccttatagttcacctgcagtgatttcattagccttgaaacctacaaacccagtcttctggaggtgtttatggaggtcaaatatgtgagtgtgtcgatagaggcggccaggcgggtatgcttgtaggtaggtagacatcaatgtct

SEQ ID NO: 11778 - DNA, 540 bp, Zea mays
  unsure (1)..(540): unsure at all n locations
  Clone ID: MRT4577_11073C.1
annnanttttttttttttaanancnccacnaacaacagggggccggttaatttaaaaaaaccgaccggaccccccccaacaaaaaacccaaaaccaaaaaaaaagggggggccaaacaaacaaaaacaagggaaggacccccgcggggggaaggccccaaccaagaaaaaaaaaaacggcaaaaacccaaacaagcccccagggggcaggccccaacactcatcttcttacaaaaccccagggggctttcaacaaaaacaacttcttattttttctggggcaagggggggggaaaaccccaaaaaaaaaaaaaacccccaatttgcctatttaaaacacacaccaatttggaaaaggcaaacccccgaagtttcaaacaaacaaaaactcggtcccaaaaaaaaaaatcagcccccattctttttatcaaaaaaccccccccccaacaaagcccattttttcccggcctgtccagggacccatttccacaaaaaacccccccccccctttaaaattaaggggccaaaaagaagaaggggg

SEQ ID NO: 11779 - DNA, 336 bp, Zea mays
  Clone ID: MRT4577_110740C.1
atggtcaaggtcgtcctgatcaacccagtccttgacagtcagcttgtctatgtgatgcagctgccaccagcggtcgacacagcaaactggcaggttgcgcagggcatttctttgagcagggcaacgatagaactcagtgaagtccaaactgaccattttgaccagagtaccagacagtgctcaataatgacgatgaggatgatagacgaccgtctccctctcatcggtggaccgggcagactgcactcagcggctatttattacacaagcttctcaaggcaagtttctttggagaaacgctactcagggtgcaggtgcagctcgctctttacgtag

SEQ ID NO: 11780 - DNA, 366 bp, Zea mays
  Clone ID: MRT4577_110741C.1
gagacgcacaagcaaaatcgtacgtgcaatcctcttacaacgacataactgcattgtctacccagaggtgctgactccgtatgaagcttgctctcactgcgtgcgatgctaaccccacaatttagactgactgctaacaagctactattgctatggttgctactgcataccgatgatcaatgatagctgacgtatgtggatacccaactttttactcctatacgctccaacaagcagtggcatcatgcaacatacgtttgtcacgcctgggagattcaacaattgccagacctatatttggtgcacgcattggtccaaaccatcacggctcatcaggtgccacaactcttgctaaatgagatcaac

SEQ ID NO: 11781 - DNA, 260 bp, Zea mays
  Clone ID: MRT4577_110742C.1
gggggaagaaaatagctctcagggcaacattccaaattttttcttacaaatataccactggcgtttgggggccccttttccaaaaaaagaaaaaggaaatcccccctgccctaattaatttgcctgggcgtgcctggcaacctttgaaatgtttgggtctacttgcctggggggggctccccacacatgcagttttgcccatgggtgcctatatttatttaatttccccccgagggggaaccaaaactcaaatttgccaa

SEQ ID NO: 11782 - DNA, 130 bp, Zea mays
  unsure (1)..(130): unsure at all n locations
  Clone ID: MRT4577_110743C.1
gggacgaccacgcgtccggcaactgttcatanaaagtatccactctcacattataatgaaaagggtcatcctactgggggtgggcgatcctattgtagctgccaatgccaataccatgcagatggcatgc

SEQ ID NO: 11783 - DNA, 352 bp, Zea mays
  unsure (1)..(352): unsure at all n locations
  Clone ID: MRT4577_110744C.1
anaaaaagaaccccaggctttttttccggttttaagattaaccaaaattttcaccgtcggcatttttggccaagggttttatttaaaaagccctaaaacaaaggttttaaaagaaaaaaaaactttttttttaaaaaatccccccggattttggcctttccccccacaaaaaaatttttttttttaccccaaaaaaacagtttttagaggggcaacccccttctcccacccttgggcagtcgggggggggttttttttgccccaccctggggggccacccagggggggtccggtgcccccccccaaaggggcgggggccccagtttgtccccaccctttcccggagggaacc

SEQ ID NO: 11784 - DNA, 301 bp, Zea mays
  Clone ID: MRT4577_110745C.1
gaagaccgagcgagcgacgcgtccgcagaatagtctctgatcggtttgttgctagcacatctgagaaatccatgggaagcttgccggtctaagtatctgatgcggctaacttgcttatcacggatcggtctggggggcaccgaacatcacaaactgtcttaagatctgactgatcctacaaacaagagcagctcttctctgctgtcccattgctctggcacaagctcataggtcgtccccagatgcatatagctgcagacagctcatcaggtcaccaatgatggaggaacggcgccgatgc

SEQ ID NO: 11785 - DNA, 241 bp, Zea mays
  unsure (1)..(241): unsure at all n locations
  Clone ID: MRT4577_110746C.1
cannannnngcggncgncgggacagggaaattacatagaatgggatggaaacgaagatacattacatacgtcaaacaaaagaaccacgaaagcaagttcgggccacgcgaatcaagcaatagatccacctgaatcatggcccagcgggccgtgcggccgccggcagctttttttttcagcnaggggtganngcagcacggagcagaacagnggacacnnncacagaccccgnngcggcggg

SEQ ID NO: 11786 - DNA, 277 bp, Zea mays
  Clone ID: MRT4577_110747C.1
attcctcggatcatttcgaatatgatgtaaaaaatccaatcacaagtgctggtctttgttgataaaaaaaaaagaaaaaaaaaaaaaaacaaaaaaaaaaaaaaaaaaaaaaaaaaaaaagggggcgcccccgacagagcgccccccccccgggggttattatcccggccggtacccaggcggcgaaacgccccccccaaagggcgccgttataaacggtgcggaaaaagaccgtaatacttatccccgggaaaaattgtagcccgccccaaacccc

SEQ ID NO: 11787 - DNA, 856 bp, Zea mays
  Clone ID: MRT4577_110748C.1
cctcgaggccgagggggcccctagaacgcctcggggctcttgggcaaaaaccaaaagcagaggggaaagtgccgtcagctctgactcttggtcttgggcgcttggctgacccgttctctctctgcaactgcaacgcaccaagaaactgccggcgatcgatcggagaaggagataaacatggtgcacgggaagctggaggtcctcctcgtctctgccaagggactcgaggacaccgatttcctcaataacatggaccccttcgtgatccttacctgccgcacccaagagcagaaaagcagcgtcgcaaatggagcaggaagcgagcccgagtggaacgagaccttcgtcttcaccgtctccgacgacaccccgcagctccacctcaagatcatggacagcgacctcaccaacgacgatttcgtcggcgaagcaaccatccccctggaggccgtgtttcaggaaggcagccttcccccggcggttcaccccgtcgtcaaggaggagaagtactgcggagaggtcaagctcgcgctcaccttcactccagcagcggaaactcgccaccgccctgatgacaacgaggaggggccgccttacagcagctggagttgattctatctgccatgggatgggatgcatgctgcatcatatccaccaagagaagagaggataattaattaatctactcaagagaagaatcagtgttgctgttatgcgaccctctacctctatctatctatatatatgcttaatttgtcatgaacgactgccaatataaactaaactattcagagttgtttgcacgtaactccgactggatggattttgcaccaaaaaaaaaaaaaaaaaagcggcc

SEQ ID NO: 11788 - DNA, 394 bp, Zea mays
  Clone ID: MRT4577_110749C.1
ggggtcttaccccctcgcccctcatcacatccggcggtcagcgagcgcctatcttatctctctaacacgctccgtgccataggaagagagatagagagcgccgatcctctgctatgggctggctggagctgctgaccggcctgctgtagcgagatctccgtagactcctcctgattggtacagatctatgagcgaagatggggacgacatgctgcatagctgcttgttatggggccggcccaaccatgggcggcataggcctgaagcgcccagacattgacgttggggctgcggacatgctgcaaacgccccatagagggctggaacatcgacaccctaccaatctacgagcccgggcctgatgatggggggaaacaccgcacgagcacgaacc

SEQ ID NO: 11789 - DNA, 464 bp, Zea mays
  Clone ID: MRT4577_11074C.1
cttgaactatgtcagtgtgaatagcaaagagctacagatcgcattcgtgagccttaattcagcatgtcagagaactgtgaaagacctgaacactaaccacaatacgggctatacaatcaaacacgaccacgaaagcgccaagtgggggagtttaatagtagataaaaaaccagtaccaggagggaacaaatctacaacaagcactaaggattttctatatacaccacacctaatgaatatgaccacaagaaaacttaaatagcttaaaaaatcccaactcattttggaaaataacggacccattcgatggtcagatgccaacttgccttgggatcataggacagacttctgcggcacgggtgaaccggactgcaaaacaggttcttctttgtaccatcactgggaggggagcaaaacgatacacgctgccaagtacaacctgacttgttttttattctggacac

SEQ ID NO: 11790 - DNA, 278 bp, Zea mays
  Clone ID: MRT4577_110750C.1
aactaatacaccttctctaccacaaatctctcaaagacactctcaactaatccctccaccgacacctcttctaccaatactcttaatatcttcaacacaaaatcaaatccaacctacacatctataaccttcaccttatctatatactcatctacaatactcaacctcaatacattaacttccacaacccacatccctacattattccattatcaccaaaactacactaaattcacaataaatcccccttcacctaaaattatccaaatcattttcaa

SEQ ID NO: 11791 - DNA, 866 bp, Zea mays
  Clone ID: MRT4577_110751C.1
cgggaaaaaaaaaaaaaaaaaaacattgggtacctcgaggccggcgccgggggccaaaaccaaaagcagaggggaaagtgccgtcggctctgactcttgggcacttggctgacgacccgttctctctctgcaactgcaactgcaacgcaccaagaaactgccggcgatcgatcggggaaggagataaacatggtgcacgggaagctggaggtcctcctcgtctccgccaagggactcgaggacaccgatttcctcaataacatggaccccttcgtgatccttacctgccgcacccaagagcagaaaagcagcgtcgcaaatggagcaggaagcgagcccgaatggaacgagaccttcgtcttcaccgtctccgacgacaccccgcagctgcacctcaagatcatggacagcgacctcaccaacgacgatttcgtcggcgaagcaaccatccccctggaggccgtgtttcaggaaggcagccttcccccggcggttcacccggtcgtcaaggaggagaagtactgcggagaggtcaagctcgcgctcaccttcactccagcagcggaaactcgccgccctgatgacaacgaggaggggccgccttacagcagctggagttgatctatctgccatgggatgcatgcatcatatatatccaccaagagaagagaggataattaattaatctactcaagagaagaatcagtgttgctgttatgcgaccctctatctatctatatatatgtgcttaatttgtcatgaacgactgccaatataaactaaactattcagagttgtttgcacgaaaaaaaaaaaaaaaaaaaaaaaaaaaaaaaaaaaaaaaaaaagcggccgaagagtgggga

SEQ ID NO: 11792 - DNA, 326 bp, Zea mays
  Clone ID: MRT4577_110752C.1
cccacgggtccgggatccgcatgcgcaccgacaacaccatcaggtacaacgccaagcgcaggcactggcgccgcaccaagctcggcttctgagcggtcggagagatgctagccaacgatgcttggggaggattagggctctgcaagctaggaagctcttgtttaagattttgcttgtgttattaaagggatcttatcagttgtgcttgtagtagcattctgagaatatcatgtttgtctgatggttaaagaacagcctttatgttatgctgaatttatttaacctgcagtgccttaattaattgatctcgagccaattatttcgcc

SEQ ID NO: 11793 - DNA, 574 bp, Zea mays
  unsure (1)..(574): unsure at all n locations
  Clone ID: MRT4577_110753C.1
gttacaattcacccataaccataatcggactggattcatccaacgcttgaagcatccgtgtataaatgcacgtgtcaagctgtatacgcatttgcaggccagcgactgtgcagaacactggagaccgttacatttcaacagtcaacgaaaaagacagctttcacatgtcagcagccagaacaatacatacacatgaataatagcaagtggcaacatctcatgctaagttaccaaagcatgtgcgaagaatatgtcaatcacagaccaaaccactcatggtgtgtttggtttgataaatcaaaacatccaaactacatccaaatgaggtggtgagattaactcatattagtactaactaactaactgaggaataaggtggtgatggattaactaggtggtgatggattaacttatttcattccacaaaccaaacaaaaaaagtgaggagcgagaagatgatggattaacttatttatcaaaccaaacagtccattaactttagcataacaggtaagttgaactctcaatcacaacagaagcaacaaaagttctanacactgtctacatgttttac

SEQ ID NO: 11794 - DNA, 454 bp, Zea mays
  Clone ID: MRT4577_110754C.1
attctcatacagtaaccaaaaccaaatccacatgcgggagggagcaagaacaccacggacacaggtacaggcagaaccataacaatataactggaggtgccagagccatacatagccatagcagcaacaggcagcgagaaaaagaaaacatttactttaattgtcatatccaccgacacggaggcgtcgaccttaaccgttttctgttattggattccgataaagcgaaaccgacctgcttgtcctagccctaccataacgataaggagggggggagtagccaccgccactcttgttttagtactaatgctcactgtccctaggagaaggagagttgtccctgctgtacgtagggggagggcagttgcgcttgtactagggagagggataataattctgactgtacgtggaggacatagtaaggcggagacctgcacctgccatagccataccc

SEQ ID NO: 11795 - DNA, 348 bp, Zea mays
  Clone ID: MRT4577_110755C.1
attcaagcagtttgatttgatgtgcggtctgatcagccagatgcatgagattggggggttgatgtcgctagcgaccatgacgaaggtgatgaggaggctatgtggagccaaccgatggagtgacgccattgatgctttccataaaatggaccgctttggggtggcgaaggacacaaaggccatgaatgtgctcttggacacattgtgcaaggagaggagtgtgaagcgtgcaataggcgccttccaagctttgaaggggacaattcatcctgatgagagtagctttaacacattggttcatggctggtgcaaagcaaggatgctttaagaggcttcgggaatatacca

SEQ ID NO: 11796 - DNA, 261 bp, Zea mays
  unsure (1)..(261): unsure at all n locations
  Clone ID: MRT4577_110756C.1
ttccccgagtcgccgtcgtgtcgtccggcatgctgctctgcagctccaaaggttttggcctgtgttcgaagatttaagcttaacctccaaccatggctaccgacaactcccacatccacatcgcggttattgcncatgtcgactctggnaacgtcaaccaccaccggncacctgatctacaagnttggaggcattgacaagcgtgtgattgagaggttcgagaaggaagncgntgaaatgaacaaacggtccttcaagtac

SEQ ID NO: 11797 - DNA, 287 bp, Zea mays
  Clone ID: MRT4577_110757C.1
cggctaaaaacaagaagcaggtaaaatggctggaccataggccgccctaaattccaggattttccaggtaaagggggggaggttggtttccgggagggctccatttgcataatcagggccggaccgggggcggttgggcttcgttcggggactacaacacaagggggggggtcgtttaaggtggtccttgggaagggtttccaggagcagcagggcattttttcagctttaaacctgggggggagatgttaaacctcagaaggggggcagggcttctattttggggg

SEQ ID NO: 11798 - DNA, 335 bp, Zea mays
  unsure (1)..(335): unsure at all n locations
  Clone ID: MRT4577_110758C.1
ccccacccccaggcgcgcaccgacaaaaaggagagaaaaccaccgnggaggggagaacgggcagagacagcaaaaaagaacgcgggaacanaagagcaggcagaccccacaacaacgggaaccaagccaaaccaagganagagaacgaacaacacaccgacccggggaccgagaaaagggcgcaccgccaccacacacagggaaaggccgaagcgcaacacgagcggcaccaccacgcgggcacacaaccaaacggggcgagacccaaccaccaagacaaccagcaacggagcgcgcagggccagacnagacgaaggaacgccaagaaggcacca

SEQ ID NO: 11799 - DNA, 1070 bp, Zea mays
  Clone ID: MRT4577_110759C.1
ccgagctatgaacgacacggccgtgcgcgccatgatcggcgaccggttcgagaggcgggacgagttcctggagaacgtcgcggagggagtgaggatcagcaccgggttcagcctcggcgatctgttcccgtcgtcgaggctggcgagcctcgtcggcggcacggctcgccgggcggcggtaaaccaccgcaagatgttcaagctgatggactacgccatcgagaagcacgaggagcggagggcagccatgaccacagatgcagagggcgtcgtgaaggaggatctggtggatgtgcttcttaggatacagaaggaaggaggcctggaggtgccactcaccatgggaatgatcaaggccgtcattctcgaccttttcggtgccggcagcgagacgtctgcaagtacactccaatgggccatgtcggagctcgtaagcaacccaagagtgatggaaagggcacaggccgaggtacgtgagaagctccaagggaagccaacggtgaccgaagatgacttggtcgacatgaggtacatgaagctcatcatcaaagagaccctaaggatgcatccggtggtgccattgcttctcccaagggagtgccgagagccatgcagggtgatggggtacgacgtgcccaagggaactaccgtgttcgtgaatgtctgggcgatcagcagggatcccaagcactgggaggacgctgcgacgtttagaccggaacgattcgaggccgcgggtacggttgattttaagggcacggactttgaatacacgccgtttggggcgggccggaggatgtgccccggcatggcgtttgcgcaggcaagcatggagctcgtgcttgcagcgctcctgtaccatttcgactggaagctgcctggtgggatgctgccgagtgaattggacatggcggaggagatgggcatcactgcccgaaggaagcgcgacctttacctgcatccagtcgttgtcagtgtgccaccacatgtctcataaaccatagctgttctacttgctattttaccgtagctatatgctttattgatgcagcaaagttcactagtccatg

SEQ ID NO: 11800 - DNA, 586 bp, Zea mays
  Clone ID: MRT4577_11075C.1
tactcctaaaacaaaagtaagtcgttgctattattggagagtttagaggcagctaaaaattggatgtttaaccatttaccattgttctggatgaccactctctgtaggtggtatgtaggagctcattatacttctggcgggtgttagaggacactaagcccaaagtcacatatctcgacattgtcgtgcttaaacataagcaatttcttcacttgaggttccagttggtgaaagtacattttgttgacatcctccttgaacaggttctagtggactggctaatttaagtgccattgatcttacttcaacgatgacaacgacaagattacaaaggaaaacataatcattctcttgtaacacatgttagaactctagttctttacaaattatcctagtccacgagtccattttttatctaattgatttgctaaactaaaattgtggcaccggaacaataccaagatagtaaagaagacaacttggtgaatgtctatttgttaagaatcaacatttatataatgaatctaatattcatgggacaactaacaaatttttaaagaaatgaaaacttttaactagccttgag

SEQ ID NO: 11801 - DNA, 1310 bp, Zea mays
  unsure (1)..(1310): unsure at all n locations
  Clone ID: MRT4577_110760C.1
cagcaaagcaagttcttgagcatccctggcttcaaaatgctaagaaagctccaaacgttcctcttggagacattgtaaagtcaaggctgaaacagttttcaaggatgaacagattcaaaagaagagctctaagggttattgctgatcacttgtcggctgaagaggttcaggacataaaggagatgttcaaggtgatggatactgataatgatggtatagtttcttatgaagagttaaagagtgggatcgcaaattttggctctcatcttgcagaatcagaagtgcaaatgcttatcgaagctgtggatacaaatggtagaggagcactagattacggtgaatttttggctgtctcgctccatttacaaaggatggcaaatgacgagcaccttcggcgggccttcctatttttcgacaaggatggcaacggtttcatcgagcccgaggagcttcaggaagccctgatggaggacgggggagctgataccatggacgtggtcaatgacatattgcaagaagttgacacagacaaggatgggaaaattagctacgacgaatttgtagcgatgatgaaaactggcacggactggaggaaggcatcgcggcactattcgagagggcgcttcaatagccttagcataaagctgataaaagacgggtctgtaaagctgggtagcgagtgaggttgcacctctgcagccgatgttcttctcttctgatcttcttttatcttctccaggcattgcccctcgggcccactaagggcttgttcggttctaccccaatccatatggattgagggggattgagagggtttcaatccctagcaagtcaaaatccctcccaatccgtatcaatccccttcaatccatatggattgaaaataaccgaacaagcctttnaaagggtggatgacacaaggggatgatcgtggaagcacatacgtgccaagtcaccatttgtacactaacgcactctacactggcagaacagattctctaaaaacatgcaggttcaggaacaacaggcaatggcattttttatcacatgatggagcttcctagacaccatctgtgatgattaaaagaacaatttatttgataaatataagatgaggcacactttgggtgcctccaccgcccaccccacaaaaaaacatctatttaaatagtatatttgtcggtgttaaccaagatacaacgtaattgtcatgccgcagatcagatcaacaggagtcccatgacattcaaaatgacataagaagcgacacgacaatagattttggtgacctaacataaaaacccggccgg

SEQ ID NO: 11802 - DNA, 379 bp, Zea mays
  Clone ID: MRT4577_110761C.1
ctctccttcccggtctcctccgcccggggccttcgtaccctccatatccggctgcgacggcggcgagcccgacaccgagaatcggatccgccgacaaggcgagagggaagagatggggctcacgttcaccaaactgtgcagcccgctgttccccaagaaagacatgcggatcctgatggtgggactccacgccgtcggaaagaccaccatcctctacacgctgaagctccgagagatcgtaagcaccatacccaccatccgattcaatgttgaaactgcggagtacaagaacatcatgttcactctctgagatgacgcgggccaggacaagatcaggccactgtggaggcgtgactaccagaacacccactgtctcatc

SEQ ID NO: 11803 - DNA, 455 bp, Zea mays
  Clone ID: MRT4577_110762C.1
gcgtgggtttttttttttttttttttttttttttttttttttttttttttttttttttttttttttttttttttttttttttttttttttttttaagggcaaggaacacaatttttccttggggggggaacaatagtttacataatgggacaaaccggaaaccagggggcccccacatgcctccggacccctaaaggggaccgggggggccccccttacttgccggggaccaaattgggggggtaggcccaaacgttttttttgacgggggccgcaatgggggcaaggagggttttaagcgggcccttcccggggacaaggggctggacaaaaaatcccaacatggaaaacatgggggggggggcgtttttgagccccttcaccttgagcccaaaaaaggcctcgggggcctcggggaggcccaacggggcaaaactcccccccggataaaacgg

SEQ ID NO: 11804 - DNA, 1397 bp, Zea mays
  Clone ID: MRT4577_110763C.1
cactttggtctctccatcttcttcaagcccggtgaaaagttttcggaaattgtgggaagtccatactacatggctcctgaagtcttgaagaggaactatggacctgaaatagacatatggagcgctggtgttatcttgtatattttgttatgtggcgttcctccgttttgggctgagactgaacaaggagttgcacaagctattctccggggaaatatagattttaagcgagaaccctggcccaatgtttctgacaatgctaaagatcttgttcggcagatgcttcaacctgatccaaaactcaggctaacagcaaagcaagttcttgagcatccctggcttcaaaatgctaagaaagctccaaatgttcctcttggagacattgtaaagtcaaggctgaaacagttttcaaggatgaacagattcaaaagaaaagctctaagggttattgctgatcacttgtcagctgaagaggttgaggacataaaggatatgttcaaggtgatggatactgataatgatggcatagtttcttatgaagagttaaagagtgggattgcaaaatttggttctcatcttgcagaatcagaagtgcaaatgcttattgaagctgtggatacaaatggtagaggagcactagattatggtgaatttttggccgtctcacttcatttacaaaggatggcaaacgatgagcaccttcggcgggccttcctatttttcgacaaggatggcaatggtttcattgagcccgaggagcttcaggaagccctgatggaggacgggggagctgataccatggacgtggtcaatgacatattgcaagaagttgacacagataaggatggtaaaattagctacgaagaatttgtagcgatgatgaagactggaacagattggaggaaggcgtcgcggcattattcaagagggcgcttcaatagccttagcataaagcttataaaagatgggtctgtaaaactgggtagcgagtgaggttgtagcttgctgccgatgctcttctcctccacgcattgtagtctgcctctcgggcccgctaagcagaaacccccttccgtttgctaatgattattttgtctgggatttaggtagttggagcctccctgattggtttactcgtgtaattagtatcccttttcagtatcgctgaggagcatctgctgtaggatgcacgcctgcctccgtctgtctgctcatctcctccggtgtacccgtcgctcaaatggaagtgttgtaaaatgttttggtgttgacctcaaatgcaatttgctggtttcgtgtactgacacccaagattcatttgcgcctataaggctaactgtgaaaatttacgtcatttgatgaggaaatgatgaagcgctagctgatttgtcttgggt

SEQ ID NO: 11805 - DNA, 580 bp, Zea mays
  Clone ID: MRT4577_110764C.1
aaaaaaaaaaaaaaaaaaaaaaaaaaaaaaaaaaaaaaaaaaaaaaaaaaaaaaaaaaaaagaaaaaaaaaaaaccgtcccgcccctccgctctccactttcctctgcaaccgcgcctcccctgctactactacccaagcgaagccaaaggtagccttcacctgtacggcggcgccaaatctagtccaacccctccgccggcgccagatcgtggaggaccctgccgtctcccgcccattctccgcaaaggtctgcatggtcatgagatgcaagcacatttgattttgtataagttcaacgagcactaatgttaactgaagtattttcctcgatggaggctgaagctgattttgatgttgaagattccagatcaaacaatgaactgcaggagttgtggccagttggtgagatagacccaaagagagggcgattcccttgttgcattgtctggactcctcttcctgaagtttcatggcttgctccttacatagggcatgttggaatctgtcaggaggatggatctgccctggattttgctggttcaaatttagtgagcatggataattttgcatatggttct

SEQ ID NO: 11806 - DNA, 586 bp, Zea mays
  Clone ID: MRT4577_110765C.1
gttcccaacaccctgaacgaggcctcacttttctcgagcgtctctcctcttcatcgcctcggtgcgggaagagagagagatcatggctcccctctatccggtgggtggagccggtgccctccttcctcaaggctagatgtgagtgctgacatatctatctgacgaaagtcgttgatctgctggatcggtgatggttatgcgggtggaccaaccatgcccgacattgtccatgagtggctagaccttagggcgcgatagttgacatctccaagccccgtattgccgagctgtaacagcgacaccctgccaatctacgatcctggtatcgatgatgttgggaagaagcgatgtcgcaggaacctcttcttcgtactgatggtgagaagacgttcctgaggatgacattatctttgtctcggtgaacaaccccaccaagacccgtgggcttggagctggctaggctgccgacctcacctactgggagagttgtgcccgcatgattgcgcatgtctccaagtctgacaagattgctgtgtgaaaccccactgttgctgataagaccgctgaggttattgaaaacatcttg

SEQ ID NO: 11807 - DNA, 245 bp, Zea mays
  Clone ID: MRT4577_110766C.1
gttccagctgatgttttgtgtgtttttttttcctccttcatttaaaaatacactttgtagaatgttttctttttcacggctccctaaatattctgttttgaaacatttaattacccaggttatttatatggaaaggtttgataatgtttctatgggagtctgttatttatatcttttgctaaatcttatcttatattaggggaatggctgaggttggatactatggcaacattctcattactgca

SEQ ID NO: 11808 - DNA, 354 bp, Zea mays
  Clone ID: MRT4577_110767C.1
gccggatctacagcatccatctgagcgtctgcgcgcggcggctctcacactgaacacacgcatggtgcgcataggcgaggccaaggccaccgcgagggatcgtgtggtcagctgggatggcaatgcgatgcacctccgccgcgctgctcgtgctggcgctcgtcgccaccgtagtgcgcgcggaggacccctaccacttcttcgagtggaacgtgacgtatgggacgaacagcatcatggggactccgcagaaccgtgattctcatcaatgatctgttcctcggacgtaacatcaactgcacattcaataacaagatcgtcatcaatgtcttcaatatgctcgagcaactgctc

SEQ ID NO: 11809 - DNA, 308 bp, Zea mays
  Clone ID: MRT4577_110768C.1
atcactcgaatcgacgaggatgtcaacaaccaatccaaaccgccgaacatacactgtgacctgcacaatgcttaactgctaactgaagctcggggatctccatgcattctgcgagattctcctccaatggtctgacactacaccgccaacctggcaaggctctctacacggagggagcacgcttacattcctgttgctgacctacagctagcaggaggccgatatgcaaaaatgcacttgcactgcgatcctgacaacacgtatgtcaagatggaatataagatcctgtaggagaagatcaacgagtt

SEQ ID NO: 11810 - DNA, 289 bp, Zea mays
  Clone ID: MRT4577_110769C.1
aagcctccgacccccttctctctccctccgccgccgatggcacgctaggaaagagcgacatgggcgtctacacctttgtgtgccacaacaactgcagcgagtggaccgccaagcagcactccggcgagatcgaggcttccgccgctaccccatacgagctgcatcgccacctcgtcattgccgcctccgccaccgactctgactacggcgtccaggcctccttcttcatggtcacccccatctccgacgagttccaagtgatcgtctgtgctgtcggtggtggcgcatt

SEQ ID NO: 11811 - DNA, 204 bp, Zea mays
  unsure (1)..(204): unsure at all n locations
  Clone ID: MRT4577_11076C.1
agaggggcgaagagtaaggggaaacaaatccttggaggggagacgtagagttctttcgtggaggaagcgggcgcaactggagagagggtagaggtanctcaataaatctactggtgtcgggggagttaatgccaagttgagttgctgcacgttggatttattcagagatgggttcatctggtgtagcccccttctgggcaccaa

SEQ ID NO: 11812 - DNA, 289 bp, Zea mays
  Clone ID: MRT4577_110770C.1
aaaaaaccataactttggtccaaacagcccactaaccaaactgaaaccacaaatcggaccccaaaacgctaaaaaaaggccatacacaaacacaacccaaaaaatctcaaaacaaacacgtccccgaccaaaaaaaaccaccggcaggccccggcaagcgaccactaaccaaacacggcccgaaacgggaacaactctacaaaccccctacctgcccccaaactcaagcagctcccaaggaaacagaaacacaaaatttcacccctgggcccccagctcacaaaacccc

SEQ ID NO: 11813 - DNA, 441 bp, Zea mays
  unsure (1)..(441): unsure at all n locations
  Clone ID: MRT4577_110771C.1
cgtccacnnggcttcacnncgtcaagggaccgcaagnncggcganagaaccgtgcccacctgnagncnnaccttcaagggggcaaggggttctcnnnctcatcgnntcaacgtcgctatcatcatgttgtggnncctgaccccaactccaacttactaggggagcggtggcgccagnnctacacgnagnnatgtaccaagggacccaggnatnnttcgagaatcgcgttgnncgttcnnccgtgccaacccccagttcnnggcgnnggcaggaagcnnnccggcanccgagcgaggnagnnatcgcnnccagctnncgtctgcgcttcgcttttcaaggcccaagtacccccgatnntcttcnnacaaggtcgnnnatgtgaaccggnncgaggacccgctgcgcccnnnatctacaanngtttctnngaagtccaagcaa

SEQ ID NO: 11814 - DNA, 263 bp, Zea mays
  Clone ID: MRT4577_110772C.1
gccgaggcattcgtacgatcgggtggctcgtggtcagagtccatctgctgatcgaggatgccgagctctgatccgtcaaggaccacttggtcaccactgattacatgacctacatgttcaagtacatctccgtgcacggacaatggtagcacagcgacatatccctaacggtctccaatactcttctattctgcgagatgccagtcaactactttaggatcaggaactccgaagagatcccgtggcgtgaggctggtgctgag

SEQ ID NO: 11815 - DNA, 682 bp, Zea mays
  Clone ID: MRT4577_110773C.1
aattcggcacgaggcccgatagcacaacatgcttatcctcttcttctacttctacggtgcagatttcaattctaaaatgttttggcaccatcttttttgatccgcttttagcccgtgcgatcaacttgattcggttcgccgcgctagccctcggaagaaaagtccgccacactgagttttcgttacatgccggattggacttgagaaaaagggtaggcgcatgcatgcggactttagtgcgcaaaaagttacagtaaatcaagtgggctggtttcgtgggtaacctgcgctttatcgtttcttgaaattttggcgtgttcacgatagagatccttgttttgttctcagcgcagattaagacagtcagaaatggccacttttaggagtagttattaaatacatgatgatcgcatcgcccgtatctgtcaatatgtgtcaggatatgccgggttgggatatataggatccgaggaagattgtagaaagtgcttacagctttgttggtcttgttgtgttgaggaccgatggccgtaccgttgggaaagtttctacggtagcttggccgaccaaactataatagggtttgctactttgctgtatgctaccaatactctgtagccaagcatattcttaggagttaggaacattacgaagcttccacgggctctagcttctctattat

SEQ ID NO: 11816 - DNA, 132 bp, Zea mays
  Clone ID: MRT4577_110774C.1
ccgaaaacgatgggtaacatccgaaacatgaccatgatcgactcacggaccagcaccagcgcgagctcgcaggtcaaggagcaccaagagcctagcgagaatcaccatgcttggctgggacgtcagcagtag

SEQ ID NO: 11817 - DNA, 164 bp, Zea mays
  Clone ID: MRT4577_110775C.1
aaggttggcgcctggaagcgcttgaaagtggtctcggcgctactctggtcagtcggcctgaccttgcggtacacaagcgggaacttgatctacgagttgtcgaacttgttggtgttgaccctctctggcagcttgaacatgaccggcggtgccttgatgatctg

SEQ ID NO: 11818 - DNA, 847 bp, Zea mays
  Clone ID: MRT4577_110776C.1
ttttgcttgacgacgccgatatataccatggaggtgaagaacaagaaccattattactacagcccccaaaaattgcacttgacttgcatgttgattttacttacaagttattataaaaggcacaattatatctattactatctaattacaagtgttaaatgaagacatcacattcgtgcagagttcttagaaatttccacataaccaaaaatagaaggacctacaccgtctgattttataacgatctaataacatatattaaagcaacgaggccatgtctaatacaattgataaatagcaaatttagaacaatatatttaggaaaatttgcaatttgatttccatatgagttcgaaagataaaaatacctaaattaagagttcatataaagtgcatccaatgaagccaaaatttgaataaaactactacaagctaataattgatcccaaactatttggaaagaaaaatccaaataaatggtatatataaacttcaattataagatagttatattcaaatttcaaaagagtagttttttttatattgaagaaccgtgcaattaagacaacgagatataaccgtggaggggagatttgaataggagcaaataatatttttttgtttacaataatcttggcttcgatcccaactattctaagaaacctttaagaacacacacataagaacacacacatgaggatcacacatgttaattgctactagtcagtttctcgtgcattgtcacgatttttatatatcatataagtagaccttgttttcataagacacaaaaatatgtgttccattggttatgtggacgtgaatatacagctcacaaccagggttc

SEQ ID NO: 11819 - DNA, 1473 bp, Zea mays
  unsure (1)..(1473): unsure at all n locations
  Clone ID: MRT4577_110777C.1
ccgggagatctcttccttgttctcgcctcgtcgtccccaatcgtcgccgagctcaccaccgaacaggttctgaagcgagatattccatgggagcattacatgtcaactaagcttatctccggaacgtgccttcagcttttacggcgatatgaccacaaaccggagagccagcgagctcctttgcttgaggaggatgggccagcatatatccgagttttcctgaatatcctgcggagcatctccaaggaagagactgtggaatacgtgcttgcactcattgatgaaatgcttgcaacaaatcctaagcgtgcagcactgttttatgatcgatctttgtcgggtgaagatatttatgaaccgttcttaaggttgttatggaaaggcaactggtttgtacaagaaaaaagttgtaagatattgactgttataattagtgcacgaccaaagcttcagaatggcacacttccaaatggagatgcttcgaattcgaagagcaagcttacttcaacacacgatgtattgagaggtttggttgattggctctgttcacagctgaggaatcctacacacccgagctgctctattcctacttctatccattgcctctccactttgctaagagaaccatatgttaggacattatttgttcaagctgatggcatcaagctgctcattcccttaatttccccagcttccacacaacagtcaattcagctcctttatgaaacttgcctctgcatctggctttcgtatccttttatgatgctgcagttgattatttgtccaccacaagggttatgccaagacttgtagaggttgtcaagggctctactaaagagaaggtggtcagagttgttgtgttgtccttccgcaatttgctggcaaagggtgcatttgctgcccagatgatcgatcttggattgccacaaatggtacaaaacttgaaagctcaagcatggactgatgaggatctgttagatgctctgaatcaactagaggtgggactcaaagaaaacctcaagaagttgagttcctttgataagtacaaacagcaagttcttcttggtcatctggactggtctccaatgcacaaagatccaagtttctggcgtgagaacattaacaattttgaagaaaatgatttccaggctcataagcattcagctctgtggttgtgatgaaattgcacctataacttggcagattctgcgagttctcatgacaatcattgacacatcaagtgacaccaccgctcttgccgtggcctgctacgacctctcacaattccttcagtaccatccatctggccgaatcgtggtggcagacctcaaggctaaggaccgagtcatgaaactcatgaatcatgagaacactgaagtgaggaaaaatgcattgatctgtgtgcagaggctcttccttggcgcanagtatgccagtttcctgcaggcttgagaaaagctgagtcttgtattt

SEQ ID NO: 11820 - DNA, 297 bp, Zea mays
  Clone ID: MRT4577_110778C.1
cggactgcaacgcgcttcacccatgggtatcaggcaaccacgtttgtaaagtgttaatcgggacttcgacagcataagcagtatggatagccaaaatacagcagtactttccaatgtctgtagggcatgatggatgattcaatcttctctaaatctaattgcggaatcattgcaaccatataatgcccatacccatgaactccaatctaagaaaaaaatggaaccgccttgctgtatacaaacataaacttggtagcatgaggacatacgccatattttctccccacgtggataaaa

SEQ ID NO: 11821 - DNA, 1470 bp, Zea mays
  Clone ID: MRT4577_110779C.1
ttgggaccctcgaggccggccggggcggagggactcggccacgggccgatcgtctcgcgctcatctctaatccgccccctgtccctctcctctcagatcgcttccttgttctcgcctcgtcttccccgatcgtcgccgggagcctcccgatccttcttccaccttgcacggtcgtgccagggccggcacgcggacggtgcttggactgcccttgtcatggatcgcgccgagctcaccacggagcaggttctcaagcgagatattccatgggagcattacatgtcaactaagcttatctccggaacgtgccttcagcttttacggcgatatgaccacaaaccggagagccagcgagctcctttacttgaggaggatggaccagcatatgtccgagttttcctgaatatcctgtggagcatctccaaggaagagactgttgaatacgtgcttgccctcattgatgaaatgcttgcgacaaatcctaaacgtgcagcactgttttacgatcaatctctgtctggtgaagatatttatgagcctttcttaaggttgttatggaaaggcaactggtttgtacaagaaaaaagttgtaagatattgactgctataatcagtgcacgaccaaagcttcggaatggcacacttccaaatggagatgcttcgaattcgaagagcaagcttacttcaacacatgatgtattggagaggtttggtcaattggctctgttcacagctgaggaatcctacacacccgagctgctctattcctacttccatccattgcctctccacttcgctaagagaaccatatgttaggacattatttgttcaagctgatggcatcaagctgctcattccattaatttcccagctgccacacaacagtcaattcagctcctttatgaaacttgcctctgcatctggcttttatccttttatgatgctgcagttgattatttgtccaccacaagggttatgccaagacttgtagaggttgtcaagggctctactaaagagaaggtggtcagagttgttgtgttgtccttccgcaatttgctggcaaagggtgcatttgctgcccagatgatcgatcttggattgccacaaatggtacaaaacttgaaagctcaagcatggactgatgaggatctgttagatgctctgaatcaactagaagtgggactcaaagaaaacctcaagaagttgagttcctttgataagtacaaacagcaagttcttcttggtcatctggactggtctccaatgcacaaagatccaagtttctggcgtgagaacattaacaattttgaagaaaatgatttccagattctgagagttctcatgaaactcatgaatcatgagaacactgaagtgaggaaaaatgcattgatctgtgtgcagaggctcttccttggcgcaaagtatgccagtttcctgcaggcttgagaaaagctgagtcttgtatttaga

SEQ ID NO: 11822 - DNA, 314 bp, Zea mays
  Clone ID: MRT4577_11077C.1
gctaccatcgtcgtcgtctcactcaccccgccttcacgcctccctcaccaaataaggtcccgcccttttccgacattcacaggggggactatgaaatcagcgggcatggcctcgattcccatcatgacaccacccactcactacgcgcgtgcaccctcatagaaccacgacaggtccgccatacacaaagtgccacacacaccccacaagtacacctcggggtactccaccgccgctgctacaacactcgccgcgctccacttccccgaccatccaccccgcacgcaacatctccactgtccccgaatactccg

SEQ ID NO: 11823 - DNA, 1223 bp, Zea mays
  Clone ID: MRT4577_110780C.1
gcgctggtgcgggtgcaggcgcgcatccgggcgcgccgcgtgcgcatgtccaccgagggccaggccgtgcagaagctgctcgaggcgcgccgcacccagatggatatcctcagggaagccgaggaaggatggtgtgacagccagggaacacttgaacaagtgagggtcaagctgcagaagcggcaggagggcgcaatcaagcgtgagcgggctatcgcctatgcatattcgcagcaggccgacggtgctgccaaatgcaatccaccgaagcttacttccaatggactggtgaaccactccggcatgctgctcaagcaccagaacttagacaagggcaacggcaactggagctggctggagaggtggatggcagcgcggccatgggagaacaggctgatggaggagcacaactccagctccccggacttccggtcctccagaactgcgaggactcctttggtgtgctcggcgacttctctgaaccgaactcagtgaaggtgcgcaagaacaatgtcagcaagcgggtctgcgcaaaacctccagggccaacacacgcccacggacatcatcagcgcctcaaggcccagtcgatctcgtctctgagcactgagctgcacaacgacgagagctccgcgtcctcctcgtcttgctttgcgtctacccctatatcattcacacttgtggcttcggagaagacagaggacagcgtcaggacgagacccaactacatgagcatgacggagtcgatcaaggctaagcagaaggcatgcagcgcccagaggacggtggcgctgaagcaatgtgatgataggaaagccatgagcgccgagctgaaggtcgctcaggtgtgactgtttcgtggaactccatgcagagatgatggagccgacttcgacatcctctctatgccctaggatgtgttgcttggtgtcttgccacattcttgagtggctcggtgctgcattcctgagttgtcctcctgttgctgggtgtctgattattcaacttcttgttgtcagattgcatctttgttcagtcattgtggctgcatctttgttcagccgttgtggctttgtcagtggtagagtctctgtaagatagttctttgagtagacagcattgtggatttctttcctgggtgttgatttcaggtcaaaaaagacaggataatttacaacgtcctgtttcccaaaaaaaaaaaaaaaaaaaaaaaaaaaaaacaa

SEQ ID NO: 11824 - DNA, 2657 bp, Zea mays
  Clone ID: MRT4577_110781C.1
ccgggacggggccccctgtccctctcctctcgcgcccgcccgcgcgcccccgctcccctcacatcgcttccttgttctcgcctcgtcttacccaatcgtcgcaccggtgcggacggtggagggactcggccacggaccacccgtctcgccctcatctaattacgccccgctcgctgtccctctcagatctcttccttgttctcgcctcgtcgtccccaatcgtcgccgggagtctcccgatccttcttccaccacctctaccggtggtgccagggccggctcgcggacggtgcttggactgcccccgtcccgtcatggatcgcgccgagctcaccaccgaacaggttctgaagcgagatattccatgggagcattacatgtcaactaagcttatctccggaacgtgccttcagcttttacggcgatatgaccacaaaccggagagccagcgagctcctttgcttgaggaggatgggccagcatatatccgagttttcctgaatatcctgcggagcatctccaaggaagagactgtggaatacgtgcttgcactcattgatgaaatgcttgcaacaaatcctaagcgtgcagcactgttttatgatcaatctttgtcgggtgaagatatttatgaaccgttcttaaggttgttatggaaaggcaactggtttgtacaagaaaaaagttgtaagatattgactgttataattagtgcacgaccaaagcttcagaatggcacacttccaaatggagatgcttcgaattcgaagagcaagcttacttcaacacacgatgtattgagaggtttggttgattggctctgttcacagctgaggaatcctacacacccgagctgctctattcctacttctatccattgcctctccactttgctaagagaaccatatgttaggacattatttgttcaagctgatggcatcaagctgctcattcccttaatttccccagcttccacacaacagtcaattcagctcctttatgaaacttgcctctgcatctggcttttatccttttatgatgctgcagttgattatttgtccaccacaagggttatgccaagacttgtagaggttgtcaagggctctactaaagagaaggtggtcagagttgttgtgttgtccttctgcaatttgctggcaaagggtgcatttgctgcccagatgatcgatcttggattgccacaaatggtacaaaacttgaaagctcaagcatggactgatgaggatctgttagatgctttgaatcaactagaggtgggactcaaagaaaaccttaagaagttgagttcctttgataagtacaaacagcaagttcttcttggtcatcttgactggtctccaatgcacaaagatccaagtttctggcgtgagaacattaacaattttgaagaaaatgatttccagattctgcgagttctcatgacaatcattgacacatcaagtgacaccaccgctcttgccgtggcctgctacgacctctcacaattccttcagtaccatccatctggccgaatcgtggtggcagacctcaaggctaaggaccgagtcatgaaactcatgaatcatgagaacactgaagtgaggaaaaatgcattgatctgtgtgcagaggctcttccttggcgcaaagtatgccagtttcctgcaggcttgagaaaagctgagtcttgtatttagatccagagaacccctggtcatttttcagaatggctgttgagaaagaaaaaccttgaaaattcttgttcagtgtatcctattgttatttgatttctgaagccgatgtataataaataatcagagtcatagaatgctcgatgtaataaagtgtccatgggcttgttgattcatttatgtaaattttgacttgtaacattagcaaacctcttttttgttattcttctgcctgacaacattgcctgattctaaaaaaaaaaaaccaaaaaaaaaaaaaaaaaaaaaaaaaaaaaaaaaaaaaaaaaaaaaaaaaaaaaaaaagccttaggggcacaaagttgcagaatgattttgaaggcagcaaataccaaagatgcaccgcctctgccgcgcgccccgacccttgcaacaacctatgttttccagggttaaataaacgcacaacgtccgagggacttaaggaagcattttctaaatttggtcaggttattgaagcaagagtgatcactgataggatatctggatactccagaggatttggctttgtcaaatatgcaactgtacaagaagctggtgaggccatagaaggcatggatggaaagttccttgacggttgggttattttcgctgagtatgccaagcaaagagaagccacacaaccatcacaaacaaggagcaccagcttatgattgaaagttgccatacacggtcgatgacatacactgtatttctttttttctttttttttctgccgagtgtaatagtggatgttgcttgccggccaaacatttgcagagagaatgtagcttgatgtgctccttgaacttcctttgttgtggttaacattggacttactgcaacttcatgcgtggcccataactttcgtctttgaagatatagagaaagaagatacacagggtgctgatgtgaataagagaaagctccaaatggcggtccaccgttt

SEQ ID NO: 11825 - DNA, 183 bp, Zea mays
  Clone ID: MRT4577_110782C.1
aagaaccatttcttgtttttcctagataattctctaaaaatatgattcttccatatagaatgctaagcttatttttacatgcagtttctagctccttcaacccagctgaggtcgtgccagggagacagagtctggagaagggcagaggaattttggaaggatccctggctcatagtagggaag

SEQ ID NO: 11826 - DNA, 349 bp, Zea mays
  Clone ID: MRT4577_110783C.1
tttttctcttttttttttgcccgaccttttacaaccgaggtttggggttttatttaatttttttttttatcccaaaaaaataaatttaaaatcccggccgttggcgcttgaaaaacatcctatttttttcttgaggtggaaaaaattaccaaacagatacaggggggggttgcctccccggaaccagattcttttttccaccccggggaaaaaaaaattggtctcatttttagacccgtgacccataaaattcatgcataccatcttggattttttccccgaaatgccaaccccttttgaacgcgacaaacatctttgcttaagaatccgaaacggggccccctttttt

SEQ ID NO: 11827 - DNA, 272 bp, Zea mays
  Clone ID: MRT4577_110784C.1
ggtgttagggcagtcatcgtactgatgctttgcgaaagcggaaaaggagaaagggaccccttttacccctgctagctccaacagtggtgaatttgaataggacagcatcggtgtttgatctggataaggacaagggcacgagttgttataggcctgcaaggtttgttgatactacctctcactgtgctcaaatggtggtggcaagatgatataacggtgcgactgcttgcggcgtgcccaattactgtgactggttggtagggcttggatta

SEQ ID NO: 11828 - DNA, 295 bp, Zea mays
  Clone ID: MRT4577_110785C.1
catcatttgtgatcggcgggaaccagggaggggggggctttttgaaccggaggggcttattagacctgaccatcggtcggtgagcgggcaccgtaatggaagctcattccttgctgggtctgcgctccctggaggagatccggttggacagagccgtcgtgaggatggagtacgcccttctgatctggggagttttcacagttacttttacgggaaccaaatagtcggaggtgtgcttgttgctcgagttctagaactttgaaaatgggaatcctggattggtgcgggaaaacaa

SEQ ID NO: 11829 - DNA, 157 bp, Zea mays
  Clone ID: MRT4577_110786C.1
cccacgcctacactgaggctatgactgtggatatgaatgtgactatgaaggaaacagtgaaggggggagacaggaatgtggacgggattatgaaggagatgattgagcgtttggaatcgcgtgtgaagacggacgaggaaaccggggacgaaaagga

SEQ ID NO: 11830 - DNA, 286 bp, Zea mays
  Clone ID: MRT4577_110787C.1
agactagaaccaccccgactcagttcaggaaccggaaatacatatttaggtgagtgttaaccctcctgctcaactaagaactgccacactcacatcccaacatataacatacttgccacccaattcacctgatatctattactgaggctacacttcacagaagcaatctatcactgggcgggtgatccttaacagacccaaataacatggtgtatttgatgatatgagagatgcttgaccgcatgcctccgtccgaaaaaatgtttcactcatacacacatatcat

SEQ ID NO: 11831 - DNA, 448 bp, Zea mays
  Clone ID: MRT4577_110788C.1
tataaaaaaaaaaaaaaaaaaaaaaaaaaaaaaaaaaataaaaaaaaaaaaaaaaaaaaaaaaaaaaaaaaaaggggcggccgttcgcgatctagaactagccaaaacagaggagcccgtcggccgtcgcaaaaaaaaaaaaaaaccaaaccaggccccccgccccatggaatcgttgacgtttcgggcttcgacggccgcctcgccgttgaagcaaccccggttgttccccggacggaagcgcgcgacttacgtccgccccacggcctccgccggggagccggacctttccgtgcgcgtgaacgggctgaaaatgcccaacccgttcgtgatcgggtcggggccaccgggcaccaactacaccgtcttgaagcgcgccttctacgagggctggggccgccttaattgccaaaactgtggtattggatgctgaaaaagtttcaacgtt

SEQ ID NO: 11832 - DNA, 197 bp, Zea mays
  Clone ID: MRT4577_110789C.1
cggaaaaccaggctcgacccacgcattcggcgacgaattctctaactaaattgacctcattacagatcgcagcccttctcggtgcccgtaggacataccctaggtactatccaggcacttacgagccagccttgccaccgtctgtggtcccccgcgtccttaaccaaaacctaacctgactatgcaaatccccattt

SEQ ID NO: 11833 - DNA, 145 bp, Zea mays
  Clone ID: MRT4577_11078C.1
gggttacccttccttttttcttggttggttttggagctattactggatgcattttctttgaccatagctgggaagagggaggattatggtcgggggttggcttgggaataaactactatgggggaacttggctcggcattttctt

SEQ ID NO: 11834 - DNA, 306 bp, Zea mays
  Clone ID: MRT4577_110790C.1
tgttgtttcctgtacaagtacaacaacagtttgaaggacctctactatagttttgcaaccccttgttaacttgtcatgtttattagtataagttgttggaactgtatctgactgtaacaactttcacttgcttcactaacatatgatggctgcccaacctcattgaccaataggtgcagtatccaattctcttttctttagagcatttatttaggtatcctgcaagtagtagtagtgttatgcgtgttctaatattctatgtcacaaatgtaaaacactttattaattgggcacaaaattatttaa

SEQ ID NO: 11835 - DNA, 384 bp, Zea mays
  Clone ID: MRT4577_110791C.1
ccgcccttttttttttttgttggggttttttaaagattgaggccgttattcctccgattaacttagaacatagccagacaggtgccacaacttacacaaagccacagggcacgctggttgacgcaagggcctgatggagccgtggaaccaccaaagcctaacacatgacgacaaacgaccttgaaaacaaatacacagacgggctgcagcactccagaggtaggaggaaataccctccggactggggggcgcatcaaggtagctcacacgtgaacaagtgcccgcgggtgccaccgccaacatcctcgagttgagccacagaactgcctgagatgccggaacgtttgcaacacccgtaggcagaacgagctccgcaataggcac

SEQ ID NO: 11836 - DNA, 381 bp, Zea mays
  Clone ID: MRT4577_110792C.1
ccctcatccgccgccgccgacagagggccaccgggcccagggggaccttgccgcaaagcccaccgattatagagcacatgttaaagatgcgcgatcctcccgaacgcgaatcacaccctctggatctgctccttgaacatacccaccgagagcatcaacgtctgggaggggctgccctcgaccaccatactttttgaccacgacacaggcggcctcttcctctccgggggccactaactccccgaagttgcctgcgctccggcgcagagccaacgaccgcaacacaccgaacaaaacctatccgggagaagaagcaccttgaataggctggatcagaagaaagaggaaccgtcgtctcaactggatgacgaggacgcgcat

SEQ ID NO: 11837 - DNA, 136 bp, Zea mays
  Clone ID: MRT4577_110793C.1
gtgcttactcacacggaaagtgcagagcaccggtttcaaaagaaaaaggagggcgccatggaatttcttcggggcgcaccatacaaagtgcagggggaagtgccaattcccccctaacaacgaaaccagaacattt

SEQ ID NO: 11838 - DNA, 431 bp, Zea mays
  Clone ID: MRT4577_110794C.1
cccacgcgtccgcccacgcgtccgcccacgcgtccgcttgtaattacccgccttggggattgcctttgggaagagaaaaatgaggttgcatctgcccactcgtgctatttagttgctgaactaaatattgattcgtactctggaagtgcaaggatgtgccttattggtgcggaccacttgagatgtccgcgcacatttaccagccctgaagcaatccagagaacagaggtttatgagtatgcaaaggttcttggtaattctcagtatatcctcttgccatttcaaccatacaagctgatatatgcatattatgcttgcggaggttgggaagatttctgattcactaaagtactgtcaagcatctctgaaggtgctcaagtcctctggtcgtgcacctgaactagaagcatggaagcaactggttattaccc

SEQ ID NO: 11839 - DNA, 420 bp, Zea mays
  unsure (1)..(420): unsure at all n locations
  Clone ID: MRT4577_110795C.1
agccccctttttccatttttcctttttcttctcctcttcttccagacctcctcccctgctttccccgcttctcccctttttgttccccgcctcttacatttctgtccccacttccgccgcggggaaggagggnncccaggaacaaaccccgaggaaaaccaccggggggccgcacccaaccccgctccaacagggagatccccacccggcaccagggggggggcaaaaaaaacccccccaaaccccccccggccccccccaaaaaccggggaaaaccgggggtaaaaaaaggctcccggcccgggtaggggggaaacccccccctgggggggccccgggacccccccccaaaggggaccccgcaaggtagagggggccaaaaaccccccccccggcccccaaaggggaaaccaccggggc

SEQ ID NO: 11840 - DNA, 252 bp, Zea mays
  unsure (1)..(252): unsure at all n locations
  Clone ID: MRT4577_110796C.1
ggccggcttttttttttttttttttctaaaatgatcttataagcaaaagtaactttcctagttacaggacctncgagttaagagtctgacagagaaacaggaaataaataatcaactcaaaattactaggtacagtttttctaacagatgctcactttcgtgggatggtcatgggtgtggtcaggaaatgtaaaatctaaagtcnctcgctcaggtcaaacaaacaagagtnnctccaggcaaaaaccacca

SEQ ID NO: 11841 - DNA, 292 bp, Zea mays
  Clone ID: MRT4577_110797C.1
cagtttaatttatttcacgtggcaccacaatgggggggtccaatggtgatcttggtgcatacacctcactcattccaacacaatacgtgctcgacaatttcgcgctcgctataaacgcagctaggcgtccattttctcttctacatttaagctgctggctacggcattgtttattaatggcaaaaacttcccgacgggcaaaggaactaagcacatagtgccatactaccaggctcacagggcattggcattaattctctacactcctggaaggggagctcttatacacact

SEQ ID NO: 11842 - DNA, 301 bp, Zea mays
  Clone ID: MRT4577_110798C.1
gcttgaatacatctcgttctggttttagcgaagacatccacatacctggtgttgcaaaaatagacatctgggaagcatctcatctccacctaatccctgaaaatcatgtccaacaaattgtcactcatcaaagccagatttccatacctttttactgctatcgaaaccccacaatacagcacacaccaaacaagacattccgcacaatgtatctaaacttatcaaaagatactagggataccacaacacttaacccacctacctcaaattactcaaatgatccatacaattacacgacata

SEQ ID NO: 11843 - DNA, 532 bp, Zea mays
  Clone ID: MRT4577_110799C.1
gttgcgtgtgttgctgctgccgcgcgtgcgtgtcccccgacggccccggaccacgactccctcctcccgccgccgccttctccttcgtcggggaccgaatgcagcgggtcgtcgtcatgcgccacggcgatcgcctcgaccattccgagcccatgtggcccgccaacaagccgcgcccctgggatccgcctctcgacgacgccggcctcctccgcgcctggaccgtcggcaagtgcatcagggccgccgccgccaagcagggatgggccctccaccgggtcctcgtctccccgttcctgcgatgccgacagaccgccgcgcgcgccgtcgccgcgctatgtgccgtccccgacgacgacgcgctgctcgcggtcggcgacccggccaatgtgtctatcgagtatggattgtctgagatgatgaacacccaagcaatgggcattactgttagcaagctggctcccaacgtcagcaagtggtttcctgacttgccagagcttgaagccgacttcccggctggaaccatcgacca

SEQ ID NO: 11844 - DNA, 341 bp, Zea mays
  Clone ID: MRT4577_11079C.1
cgacccacgcgtacgttatgtcaccacatacagaaactaaaccaattcctgtatttaaacctgctgtcaatgattagaaacggactatactacaccccggagtacgaaaccaaggatactgatatcttcacagcattcccattaactactcatatccaaactcctcctgaagaatcatgagctgcagtagactgccaatcttctactagcacatgtacaactgtatgcactgatacacttaccagacttgatcgatacaaacgaccatgctatcacatcgagcccgtttctagggacccatatcaatatatctgttatgtagcttattcattatacctatt

SEQ ID NO: 11845 - DNA, 1451 bp, Zea mays
  Clone ID: MRT4577_1107C.1
cgggtccggaatcaagtcaccctcccctccggcttccgcggaactaggagcagccatgcagcccgacgccaacgctccctcgcaccgcctcgcccgcgtcgccgcgcacctaaacccccagcggccgcagatggaggaaggcgcgtccgcactgaggcccgtggtgtgccgcgccaagggcggcgcgccggggttcaaggtcgcgatcctgggcgccgcgggcgggatcggacagccgctgtcactgctcatgaagatgaatcctctcgtgtccgtgctgcacctctacgatgtcgtcaacacgcccggggtcacggccgatgtcagccacatggacaccagcgctgtggtccgtggcttccttggggcacagcagcttgatgccgcacttacaggaatggaccttgtaatcatacccgctggactccctaggaaaccaggaatgacaagagatgatttattcaacaaaaatgctgggattgttcgtacactatgtgaaggcgttgcaagatgctgtcctaatgcaattgtgaatctgatcagcaacccagtgaactcaactgtcccgattgctgctgaggttttcaagaaagctggaacttatgatcccaagcggcttcttggagtgacaacactcgatgttgcgagggctaacacctttgtggccgaagtgcttggagttgatccaagagatgtcagtgttcctgttgttggagggcatgctgggataactatattgcccctcctctcccaggttacacctccgagctcattcactcaggatgaaaccagatatttgacagaccgcatacagaatggtggcacagaagttgtggaggcaaaggctggatcagggctccgcgactctgtcaatggcttttgctgcttctaaattcgctgacgcatgcttgcgagctatgcggggcgaagctggaatcgtggaatgctcatatgttgcatccgaggtgacagaactgccgttctttgcaacgaaagtgaggcttggccgtggtggagccgaggagatcctcccgcttggccctttgaatgatttcgagagagctggtctggaagcggcaaagaaggaactgggcgagagcattcagaagggcatcgctttcatgagcaagtgaaagcggagtggtacggagggagatcgtccctgagtcagatccggaccatacgtagtaacgtagatgtagggtgttgtgatatagtgctcctacctatacttgtaaggccacggtaaaaagaaggctaattaccctttagcaactgtgaccatctacttggcataatggcatggaataaatctttcgtcttcggtggcggacaagggccgtgcctgctctgtgctttgctggacggtgggtgagccacagcggggccgcaggaacaacagaatagcattggtttggagaccggtgttacatgagcgcgacttttttttc

SEQ ID NO: 11846 - DNA, 201 bp, Zea mays
  Clone ID: MRT4577_110800C.1
acaatagtatcggactttcttttatgaaatgggcggaaaggcccctatattttttaatccgacatttcttggcaggaaccacagaccggaaatgttcgacaaaaaaactcggctgctgcacagacaacttccggaatgcggcggaatcgagaattaataagaactagtgtgcaagaacatcatgcatgatgaaatgacatc

SEQ ID NO: 11847 - DNA, 1291 bp, Zea mays
  Clone ID: MRT4577_110801C.1
ctcgaattccgtcgtttttttttttttttttaaagcaaaccagatagaaatgagcataaaaagttgaaagtacttaaaaagacagtccaggtacttcacgccttataaaaaatcttgctcaaccaagaaaccagccctctcacaccggggcgtatcgtatgcccgtgctaccactcttggtcaatgaccttgaagctatccgcggtaaaggtaaagcccccatgctcatcaccaggctctgcagtcacctgcctctccaagaacagagtacgcacagtactccacgtcgtagatctctagtcccatctcaaagtaggaaatggatgcaccaacgccctcaccgtgtgttactaatagcaggttttcatgaggatatttgtcagcaagaagctttgattatgcttgcgtatctgcttcttgcctccatgatggattcctcccactttggtagctccgggtagattggttctgcagaatggtcgatggttccagccgggaagtcggcttcaagctctggcaagtcaggaaaccacttgctgacgttgggagccagcttgctaacagtaatgcccatgcttggggtgttcatcatctcagacaatccatactcgatagacacctggtacatggaaatggaagattcagtaaccaattttcagtaacaaggaatcaatagccggacgatactcctaggcagggatagcaataacatatttctgtgaatagcaatcagtaacgaagcctactgtatttggtttgagtgttttgtgggaaataaagcaaataaatttatcagcaatcaagactaaaacactcaagaaaacaagccttgacgcgtgaggtgtcgaggggcacattggccgggtcgccgaccgcgagcagcgcgtcgtcgtcggggacggcacatagcgcggcgacggcgcgcgcggcggtctgtcggcatcgcaggaacggggagacgaggacccggtggagggcccatccctgcttggcggcggcggccctgatgcacttgccgacggtccaggcgcggaggaggccggcgtcgtcgagaggcggatcccaggggcgcggcttgttggcgggccacatgggctcggaatggtcgaggcgatcgccgtggcgcatgacgacgacccgctgcattcggtccccgacgaaggagaaggcggcggcgggaggagggagtcgtggtccggggccgtcgggggacacgcacgcgcggcagcagcaacacacgcaactcatcctcgtgccgaatttgcgtcgacttcccacctgcttctctgtc

SEQ ID NO: 11848 - DNA, 529 bp, Zea mays
  unsure (1)..(529): unsure at all n locations
  Clone ID: MRT4577_110802C.1
ctttgtgtgtctcaagaggggggggtgcctgcataagttgacaagggcaccattgagttgtggcactgataagagccaccacccaagcctgacaccttggcaagctgcgccaagactacgaggcagtgcccgctttgccaatggccctggggggggggggctaagaccatacagcttgcctcgacctgaacgctcaggtctggctcctatgccatcatctgccagagaatggtctgggccaattgtgacctgagatccttgtgatggcctagaattgatcgtggcttactactgagacgccttgctgctgctcaaggcgctaacagaccatgtcctcctggaggtaccctctgaacccaacatgggatccaggctccgactccaaaagggacccctgagtgattgctgatacaccgccgnccctccagagaccgtcctgctgctgtgcctgctgttgtcttcctctctggtggacagagcgaggagggagccacccgcaacctcaatgccatgaacaagctcagcacca

SEQ ID NO: 11849 - DNA, 601 bp, Zea mays
  Clone ID: MRT4577_110803C.1
ctcgaggcttgccgggagccgcatcccttctttacttcgccgccgacgccttctctctgctgccgccgccgtggggagagggcctgcgagatgctatcgccagatcaagaacaagccataccccaagaccagggactgccgtggagcccctgaccccaagatcaggatctacgatggtgccatgaacagaaagggcgttgatgttttcccctactggagcaccttgggggtggggagaaggattacgtaattttgaggctctcgaggctgcccggatggcctgcaacaagtacatgaccaagcctgcaggaaaggatgccttccaccttcgggcaccgggatcaccccttccatgtgcttcaaatcaacaagatgctaccgtgagctggggctgatagggtccatactggaacgaggggtgcctttggcaagcctcagggcacctgggctatggtggacattggacaggaactcctttctggtctacgcaaggacaacaatgctgcacatgccagggaagctctgcgccgctccaagtccaagttcctctgggcgcgcaaaagattatagagagcacagaaggggggtgcaccacgatcac

SEQ ID NO: 11850 - DNA, 418 bp, Zea mays
  Clone ID: MRT4577_110804C.1
caaattaaattaatcaaccaacccccgaccaaaggaaaataaaggggccagccaatttgggggaaccaaacgggggaggatttcgccccaaaaacaaaaccccaacccaatctagtatcaacccctaaaaaaagccaaaaaaacccttttttaacaagcactatatcggggggagctggggtctaaaaaaaaaaaggaaaaaaaaaagcacccataaggggtcaaaacatcctctcgctaggaccccggccaaaaagcttaaaaacttgctggaaatgttgctgaaaagccaataaagcccctaaaacaacccttaacaaaatgaagaaaaagggctttggatgacccagggccgctgtccaaggaaatgcaaaccaaccttgccagtaattccagcagctttcaaagcatggggaaa

SEQ ID NO: 11851 - DNA, 654 bp, Zea mays
  Clone ID: MRT4577_110805C.1
cattgggtacctcgaggccggccggaccccccacagcccccaaatgctcctccacgcctccgcttcccgtcgccggctcccaaaaccctagcgcccacgccgcctcgatgtcgcctccgccggcggtggcgacgggcggttccggagaacccacggtgccggcgtggctccgcggcctcccgcgcgccccggagtaccgccccacggagtcggagttcgccgaccccatcgccttcctctcccgcgtggagcgcgaggccgccgcctacggcatctgcaaggtcatcccgccctacccgcgcccctcccgccgcttcgtcttcgcgcacctcaatcgctccctcgtctcctcctctgaagccgccaaccccaccactgcctccggctcctccgccactgccccctcgctgccggaatccgccgctgtgttcacgacccgtcaccaggagcttggcacgccgcggcgtgggcgaccgcctccgcaggtgctcaagcaggtgtggcagagcggcgagcggtacacgctcgaccagtttgaggccaagtcccgcgccttctccaagatccacctcgctgggcttcgcgagcctactccactagaggtggaatccctttttctggaaggcgtccgctgacaggcctatctatatcgag

SEQ ID NO: 11852 - DNA, 282 bp, Zea mays
  Clone ID: MRT4577_110806C.1
gtacatgacctgaataggctgaatctcatgaagacaactcaatgctaccacaaaccaagaatactaaagcacataagatgtttaattttactgattttcatttttgaatttactataccaaatatagactctttagtatgacaaccttgcattggtttctttgataacatactagacatggatgactgttgaatatgttattatagtctggagaatctaattgtatgatcattatgaaacctatgagtgatcatcttactaagaacaagatatttaagcatc

SEQ ID NO: 11853 - DNA, 454 bp, Zea mays
  unsure (1)..(454): unsure at all n locations
  Clone ID: MRT4577_110807C.1
atccacccagccgtttcggtnctagtacccatcacccctcaccagcaaccgcacagctagtgtagaataatacacaacccggccgcacatggcctcgcaccacaacatggcaaagcggatggcgtgctagccgcatgactagtactcgcagccgccgggaccacctcacaggcacccattacctacgggcatgccaacttcggcatcgggcgatgcctattacacgcctcgcggacggggacctggcctctacgcttccttatctacccggggtatgctactaaagagccccggcaggaccggccaccacagggctgaaggatgcaattgtctcaagaacgcacgaccacttgtcagtggcctgaacggtgcgaaccgccgcagcatacggtggacagggcgcctcaccatcccttataaattacaaccattaccgactgctcatgggggaact

SEQ ID NO: 11854 - DNA, 258 bp, Zea mays
  Clone ID: MRT4577_110808C.1
gtcaaacatatgtctgaatttcctgtgaagatttcagcattttgttctgtttgtctagaaattagaacaaatcaggatgccagagagactgtgctttgatgttgatgccaattacatggaattgcatatttgcattgtgtactttgtattgattgtgatttgatgggcttttctgaccaatgtgcctgtttctgttatcaagtggctatgatgcatgattatcatcccagttcataacacgaacaggtaaaatgcacc

SEQ ID NO: 11855 - DNA, 757 bp, Zea mays
  unsure (1)..(757): unsure at all n locations
  Clone ID: MRT4577_110809C.1
ntagggcccttttttttttttttttcccgggtttaattaagagtcttaatataaagatagtcccaatatgatagcttaacagataactactactctcaatgattttcgcactgctttatgcacacgaagtacatattatatatataagaggatgttacatcaacttcacatgtgcacatgatgttccgtttgaagacatggtgatcttattactaaggagaccatggcttcgcagtcaagtgcaaggtcgtcttgagccgcaccgaaagacccttgagctcgtccatctctaccttggacggcccgccggccggcagctcccagtcaaagtggtacagtaggctcgccagcgccagctccatggccggcgcggcgaacccgacaccagggcaccctctcctccccgcgccgaacggcacgaacctgaagtgatggccgagcaggtagtccgtcgccttcatgtcgtcgtccgcgaagcgctccggcaagaactcgtccgcgcgctcccacgccgcagggtcccgcgcgatggcccaggcgttgacaaggacgcgggtgcgcgccgggacgcggtagccaaggagctccgtgtcctccgtcgtctcgcggggcagcaggagcggcaccggcgcgtgcagccggagcgtctccttgttggaaccggacccctagcaagacacaagaagatacggcgccgaacgccaccagcgcgcacacactggacccttgtatccccttaccgtcggaaccggccggc

SEQ ID NO: 11856 - DNA, 1056 bp, Zea mays
  Clone ID: MRT4577_11080C.1
ggtaccctccgagctcgccgggtatctatttgtgtatattggtcatttatacactggaactagtttttcttctgatatctgtgctaagaagtgaaatgctaatggaccaatgccaatgcagtttgcagtttcttcttattgtttatttatgggattttatgaattatgaagtattattcaattgccaaacctatttcttgctgatgtttaaccattatgttatttcaattaaagatgaaaaacgggtgttcgtcaaagtaagcatccatgacaagcccctctgcttggaatacttttggtcttgaattaagtaacgtcattaattgctatcctcatactagaccatgtttttatcattcatgccttggtattcaactttggacttttgttgtaaaaaatatgatttatttgagaaccaatgttctattggtctggcaatttcattgctttctataacaggagagggtacaagattgtgatgacaaccagcctttcttcagacgtaccagttggctacttttcatgggctgaatatgatatcatggcacctgtgcctccaaagactgaagaagctcttgctgcagcctttatttctaactgtggtgcacgaaactttcgtttgcaagcccttgagatgcttgaaaacttggatgtcaaaatagattcatatggtagttgtcatcgtaaccgtgacggcaaagtggacaaagtggacactttgaagcgctacagattcagcttggcatttgagaattctaatgaggaggattatgtaactgaaaagttttttcagtcactagtagcaggttctattccggttgttgttggtgctccaaatattcaagagttttctccgggagaaggcgcaatattacatattaaggagcttgatgatgttgcttcagttgctaagacaatgaaaaatattgcttcaaaccctgatgccttcaatcaatctttgaggtaattgcgctgcaaatcattttaatgtcaatgatatttggacgattggtatattgatttaacatgatctggaatgaatctgatgtcatgtgt

SEQ ID NO: 11857 - DNA, 277 bp, Zea mays
  Clone ID: MRT4577_110810C.1
gtagataaaacattaacgccgaggggaattctgtgcattgtgtagtggctttagtgatccacaatcgcgaggctaataaattatgagtgacacaagctcaagcactatgctacatcaaataatctatgaaatgacacccacagatttaagcttgcggtccctactctgatgataaatcatttctcccaactcgatggggggctgaaacactctttcttgggtggaatctagttattagatacacgccaaggttaggcgatgaccgatgatagtgttt

SEQ ID NO: 11858 - DNA, 233 bp, Zea mays
  Clone ID: MRT4577_110811C.1
cggacagtgaaccggggcgaccgaccgcggccggttgataatcccagacgacgcccgagaggaagaggggatgttttgaaaggcagatgccgtttacaacagaacagcaggaggagaggagaaaaaacaggaagagacgagtaaaaggccacaaacaagaagacaacgagtgcaacgacgaagggacgacggctgctgaggagaacaagcagacacaaccaagaggcaacaca

SEQ ID NO: 11859 - DNA, 201 bp, Zea mays
  Clone ID: MRT4577_110812C.1
cgtacgtccacgcgtctcatccacgggttcgtcctcgcggtcaatttttcggtttaagtgccacttctagccaccaaagggcttgtgtttggcgggaagaatacaaaccccggtacgctgcacgcagacacgatggcgatctgcaagtttgcaccactaccaccttcctgagctgcacacgcacaatctgtcttgaacgca

SEQ ID NO: 11860 - DNA, 794 bp, Zea mays
  unsure (1)..(794): unsure at all n locations
  Clone ID: MRT4577_110813C.1
cccggggtatatatttccgnaactatcagtatcctcctggcactctggnagtatcaccaggaatggcagaaagtccatcaattggtgcaattggcacggctgtttctggtgcaccagttggtattaaacgtggtgccttcatggggagctgcaagcatcgcgtgtgggaagccataagagcatcgtctgcagcaccatattatctggatgatttctctgtagatgccaatcgttggcaagatggagctattgtagccaacaatcctacaatctttgccattagagaagcacaacttttgtggccagatgcacgaatagattgtctagtctcgataggatgtggctcagttccaactaagagtcgccgaggtggatggcgctacttggacacagggcaagtgttaatagaaagtgcatgctcagtggagagagttgaagaaactttggatacactgataccaatgcttcctgaaatgcaatatttccgctttaatccagtggatgaacgatgtggtatggaattagatgaaactgatcctgctatctggcttaagttggaagctgcaactgatgagtacattcagaagaattttctggctttcaagaatctttgtgagcttctggtcccaaggtaccaagaggaagaaaagtcatctgatatttacaaatccctttcattttcaaggctgacatcattaaatcaagggttcagcgaaagtaatcctaccttaggatggaggcgtgtggttttacttgtcgaggcttcctttagttctgaatttgggaagaaaata

SEQ ID NO: 11861 - DNA, 3529 bp, Zea mays
  Clone ID: MRT4577_110814C.1
aattcggcacgagggttccttccagaaattttgccattgcataacctcaggcatgtcacacttgcaaatattagaattgaagcagtggaaagtcttaaatctgtcactgtacagatagagactgagaatagttcctacttcaattcggcacgaggcacaaacttggtgcctttttctctcttgttttccgtttctcttcctgtcaccatcctttgctagcttctgctttggtcaaaataatggaagatcgtagcaaccacattgcaattagcaaagaagagaatgctgtcaggcagcttataagcatgataagcagtgataatcgtcatgtggttgagcaagcatgtcttgctatttcatcactggcatctgatatttcctcagcaatgcagctgattaagtgtgacattatgaagcctattgaagctgtactaaagtcatctgacgaagaagaactagtatcagtattgcaagtggtagtcaccttaactttcgtttctgatcatgttgctcaaaagatgttgacgaaagatgtgttgaagtcactgaaagcactttgcggacacaagaactctgaggtgcaacgtctatctctgtttgcagttggcaatttggctttctgcttggagactcgtcgcaccctcatgcattctgaaagtttgcgtgaccttttaatccgtttaactatttcacaagaacgtcgtgtcagcgcagctgcacgtgctttggcaatcctaggggagaatgagaacttacgtcgagcaataagaggaaggccagttgcaaagaagggtctacgcatcctatcaatggatggtggtggcatgaaaggccttgcaactgttcaaatgcttaaacagatagagcaaggaactgggaaacgcatacatgaaatgtttgatctcatatgtggtacatccactggtggcatgcttgcaatggctcttgggatcaagcagatgactttggatcagtgtgaagaaatatacacaaaacttggaaaacttgtatttgctgaacctatcccaaaggatgaagctgctacgtggaaggagaagcttgatcaacttttcaaaagttcgtcacaaagttttagagtggttgtacatgggtccaagcacagcgcagatcaattcgagaggttactaaaggaaatgtgtgccgatgaagatggtgaccttctaattgaatctgctgtaaaaggcattccaaaggtttttgctgtatccactttagtcagtgtcatgcctgctcaaccgtatatattccgaaactatcagtatcctcctggcactctggaggtatcaccaggaatggcagaaagtccatcaattagtgcaattggtactgctgtttctggtgcgccagttggtattaaacgtggtgccttcatggggagctgcaagcatcgtgtgtgggaagcgataagagcatcatctgcagcaccatattatttggatgatttctctgttgatgccaatcgttggcaagatggagctattgtagccaacaatcctacgatctttgccattagagaagcacaacttttgtggccagatacacgaatagattgtctagtttcgataggatgtggctcagttccaactaagagtcgtagaggtggatggcgctacttggacacagggcagtgttgagagtcattgttgtgtatgtaaaaccaaacacttgagcttgtagtaccttattccatttcttatttaaaaaaaaaaaactagtctttaatcgcgaggatgaacgatgtggtatggaattagatgaaactgatcctgctatctggcttaagttggaagctgcaactgatgagtacattcagaagaactttctggctgtcaagaatctttgtgagcttctggtcccaaggtaccaagaggaagaaaagccgtctgatatttacaaatccctttcattttcaaggctgacatcgttaaatcaaggtttcagcgaaagtaatcctatcttaggatggaggcgtgtggttttacttgtagaggcttcatttagtcctgattttggaaagaaaataaatcatgcacgttcccttgaatccttctgctcccagaatggtattaggttagctctaatgaatagcacttctgggtttgggaagccagccactgcacttcctaccccaataacttctcccttgtttactggaagtttcccatctagtccacttctatatagtccagagggcactcaacggatcagtcgaattgacctagttcctccacttagtttggatggccacccaactacaaagtcctcacctccaacatcaccattgaagtcaagacagccatctgcacatgttcggtcattgtatgataaactgcagaatatgcctcaagttggtgtgatacacttggctcttcaaaatgattcaactggttcagtattgagttggcagaatgatgtatttgtggtcgctgaacccggggaacttgcagacaggtttctgcaatctgtcaaaactatcttgtcaaccttgttgcgtgggtgtaatagaaagggtgcatattccctgtccaagatttcatgtttatctgagttggttgctgaatggccatcttttgaaatcggtgggatacaccaccgctatataggtcgacaaacacaagtaatggaagatatttctgacttggcgcatatatgtttaggaggacagtgcctgctgttcacatggcacctgaagatgttcgatggatggttggagcatggagggagagaatcattgtatgcagcggtaagtatggcctcgctcatggcctggtgaaggcattcatggattgtggcgccaaagcagtcatctcatcgtccatcgagcctccggattcccagacaatagtctatcatgggatggatgtcaatggaagcctagagaatgggaagtttgtcatcggggatgaagaagccgatgaatcggaacctgaacctgttagccctgtaagtgactgggaggacagcgacgtggagaaaggtggcaaccatgacatggatgatgaggagtacctggctcagttcatgtgcctgatgtacgataaattgttccgtgagggtgtgactgtggatacagctctgcagcaagctctccgctcgcatcccaagttaaagtacagctgccacttacctcacgttttgtagttagggacattgacaaaccatacaggagtatagcaaaacgggcatggacaacaggaaatgaataaggattgggtggattcatagtggggttatagaggtttatatcgtgttcgttgtgcaggcgtagtgacaaagggtacccccttactgaatctttgggcgagaaagcctatgtaaacctgtgtgctcatgagcagagtagttaagctgacgaataaaagcatgatgaagggcattgtaatctggatgtgcatttttgtttcagctaggagaatggcccttccccaaaaaaaaaaaaaaaaaaaaaaaaaaaaaaaaaaaaaaaaaaaaaaaaaaaaaaaaaaaaaaaaaaaaactcgaggagggc

SEQ ID NO: 11862 - DNA, 282 bp, Zea mays
  Clone ID: MRT4577_110815C.1
agaaggctgagataccccatttttagggggtggaagagaggttttttataatgcaactaaacaaaggagttcatttagggtgtctgttgaacggttagccttaaatttaagtatagtagtttggataggtgtacagggtaatcttggagatgctcttagtcagggtattctgatatttttttttattggatacataacttaagctcaattaacatctttatatgtgatttatttgatgcatcaatactactttttcgttagaacatacaatgatacaaaagc

SEQ ID NO: 11863 - DNA, 183 bp, Zea mays
  Clone ID: MRT4577_110816C.1
atccgttcgtttgtttgcccttttttgccggcctcctcgtctcttccggttccggctacaagtgaagtgagctcggccgtctgttgcctagcgtgctgcttcgttcgtcgttggcttgcagcagcttgccgaagagaagaaagcagcaggcccggagctttctgtttgtttggatccgagtga

SEQ ID NO: 11864 - DNA, 861 bp, Zea mays
  Clone ID: MRT4577_110817C.1
ttgggtacctcgccgggcgcaaaaaaaccaaaccaaaccaaaccgaaagctgtcgccaccgctcgccggagaaggagcaaacgttccccaacccaccggagctccctccaaaacccaccacaaggcttgcccaaggcttcccctcgcccatgccacgctcgcgcctccccccgactccacacccgcgggcatgatccgcggcgatggaggactcggcgccatcgtccgccgcacctgaccctcccctttcccctccaccttccacgcccccgcacccgcacccgcacccgcccgaggaggaggggggctgctgggtgctcgttccggccagcgaggtcgagggggcccacgcgcccaaggtcatccactgggacgacctgcagcaggagctcgcgcgcctctggagcctctccgccgcgctccagcccgccgaggaccgcaaggcgcacctcaccgcgcgcctcgagtccgctctacaggttaggcaggcgtttctcgagcaggacaatgagttggctgaaatgaggcagagactgcaagagcgtactgaccgtctgggggatctgaagacgcgcgccaagaagctgtcagaggatgttgtggttcggagggaacagctttgtgtcaagatcagaacgttgtcaggggcaagcaaggctctcgaggctgcacgcagcaatctgaaggaagctaatgaattgctgtcaggggaaaatggttgtgggcgccttaaagatctggaacagcagttacggatgagacagcaatatatggtagcgcaagttgctcagatatatcctgtgaggcctttggatgaacaaatctcagatcacaaaacctggatttacttcccacataacg

SEQ ID NO: 11865 - DNA, 462 bp, Zea mays
  Clone ID: MRT4577_110818C.1
gcccgcccagcgatcaccgccgctgcagggaacctggggcgaccccgactggccgggcgagttcctggcataggcagccgcggcgacgccctatgtcgctaggcgcgtgggagaggttgcgagtagcaggggagccgaacgaccaggcatctggttggcctcagcatctagacagcgaagcggcggcggggctgtgggggcaatggacactgcgggatggcgctgagagcgctcatgcctacctgtgcgggggtcccccatgagaactatggtgagatagccgtgctactgctgttgagtatttagcgggatgattgagtaatatggtacgcataccatgggtggcagtgtagtggagcaatgaccgaagaacaatgaagaaaagaaaaaagtctcatctgtccaagaaaaaaaaaaaaaaggccctcggctccagttttgtcccttaggagggtattgcgc

SEQ ID NO: 11866 - DNA, 637 bp, Zea mays
  Clone ID: MRT4577_110819C.1
gcggtggtgcgcctgccgccgccgccacgcttggactggcagcgcgctgtgctcgccaccagggacgatggtcgtctgggactcgccacggcagctttgtggatggcgtcggtgtcgtgtttgtgcggacgggcgatgggctattcaccattgatctgatgtctcgccgggtcacaaaggtattcaaggacactttcttctccggcattttcccctacatgagcttccacactccagcactggaagttgcctcaactggtgaggggccaagttcaggtacttaaggtgcttatgtgcaggtttctcagtcaaggggaaacttagttgcctctcggtgggttcttgcttttaattcaagggctctaagttttctctaaaggattctatcttgtaaatttgttagtttgatcactgccttgtgtagttgtgtgtgaactggtaaatgtgtgtgtgttctcctgaactgtagcttgcaaagaaatcctagaatgaatgtgatttcccttctgtgtacatatgtatgctcaagaaaacaagcatttgaagtgaatgttctgcactttcgtatgtgctgcgtaacttttacttaattttagtttgatttcatgtcttatggcctgaaacatgagagctgagg

SEQ ID NO: 11867 - DNA, 756 bp, Zea mays
  Clone ID: MRT4577_11081C.1
atggccgccgggagggagagggaccgggagctgctcctcccggtggtgggcggggagcatgtcgccggcaacgaggacgactcggatccgaccacccctgtcatcgccgggccgccgccgccaacgacgtccgcgcgcgtgctccacctccaccaccatcccacgggcatcgaggcattttcacgagtgatacggagctgggcgtggaagaagttcatgtctggatggtgcgcaactctcgtacatatgaatactggcctcgggtttgtcacctccatcaccttcatcttcctcgtcggcgtgttcatgtcgtcgtggctgggcgcctcgctcctcggcctcggcgagttcttcatcaagaggatgccgctcgtgcgccacatctactcggcttccaagcagatcagcgccgcgatatcgccagaccagagctcaagagccttcaaggaggtggtgatcatccggcaccccaggatcggcgagtacgcgctgggcttcatcacgtcgacggtggcgctgcgaggcgccggcgtccgcggcgaccaggacctcgcctgcgtctacgtgcccaccaacaacctctacctcggcgacatcttcctcatgagccgcgccgacgtcatcgtcccggacctctccgtccgggaggccatcgaaatcatcctctcgggcggcatgtcggtgccaaagatcatatcggcggtggagggggctgtcggcctcggcgactatgaccgggcagtgaaggactcctag

SEQ ID NO: 11868 - DNA, 304 bp, Zea mays
  Clone ID: MRT4577_110820C.1
gtcagcaggagcagcagcggcggcggcggttagaaggctgctaactggtggccgggcggtcgcctcgagctccggggcgcctccggtccggcggacggcagcagcagcatgtcttcggccgccccgctgctaggcgacgaggccggcggtggcgagcccgctctttggacgccgccgccgccgtactcgtgggtggggcgcgtggtggacgcggccgatgctcgcgcgcagtatgggatcgcggcgccgttggtgctgaccagcatggtctactactgcatcctgctattgtcggtgttgttct

SEQ ID NO: 11869 - DNA, 292 bp, Zea mays
  Clone ID: MRT4577_110821C.1
gatcagactgttgatcgaatgcttgggttggactgtataggagaagctctgacagagatccaagagagatattttagactttgctcttggcttacttttctaagacaccacctacggacacctccgtcaggagagaacctagttacagacgtggctaggagcgctaacgggtatattatccacaacagcctcccaagttctctggggcaatcggtgaatagggatgtggaagatcacacttggctgaacattagatcgaaaaccgaatggatgattatggcgacgtgggagt

SEQ ID NO: 11870 - DNA, 753 bp, Zea mays
  unsure (1)..(753): unsure at all n locations
  Clone ID: MRT4577_110822C.1
agcttgctcgcctctcttcttcttctctactagctcgttctgtctgccctgtccgtgctgacccagatggagaaggcgaggaggcctcaggtgccggcgttcggggagtggaactactactaccactacgacgagccggaggcggcgtggtacgccacgccggagccgcaggcctgcagcgacgtgtggttcaagtactcgccgcccccgcgcaagcccacgcccacgcccaagaagcagcaggcgaggaggaggcggccggcgggctgcgacaacgtgtccggggagcgtcagcacgcgaggccgtccttggacgctgctgccgcggccaaaggcggcgcctccaggcgggtggtgcggccggtcgacgcggacctgtaccaggtgccaccgccggagttcacccccaaccggcggccaacaaagcagagcaggagcctgtggatgatgggctgcctgggctgcgtcgcctgaagccctcaacctctcccgtgctgaccagacgggatgctgcgttagcccggttcaaaaaaaaaaagtcgggatgctgcgtgtttataccggagtagtagtatttatatcggaattttcactctctcttgttgnggttagttctgtctctgcgatgttcgtgctgccctcttggcttgtggcaagatagttattactgctactcttttcgagctggagatctactctcttttttgtgtaatgtaatggtgggtgcggtttctgaatgcaacatctcttcct

SEQ ID NO: 11871 - DNA, 306 bp, Zea mays
  Clone ID: MRT4577_110823C.1
gcccgggaacgcttcatcaggccgagccagggcaagctgcgatacgtggagatccaaggcgcccccagccgtatgcgtactagcaactaccaccccccgtcgaacccccaggtccgcatgttcacgctcgtcagccaagagggccagcatcactgggtacacgagtacacggcgaccttcctcgacatttggagccaccgcagctacgccgaggccggtctgccccagggcgtggtgccttggctcgccctcatcgaccccaacaacgccaacactctctagttcttccggggcacgacgctcttc

SEQ ID NO: 11872 - DNA, 476 bp, Zea mays
  Clone ID: MRT4577_110824C.1
acccctggccctggacctttggtctgatttatgtgcttgtttgctcctctcttgtatctgacatttcacttccgatcagtcttgactcggcatgagacggttggtaagacgaaggagccagatggtgttagtttcgttaagactcctaccggtgggtctcttaaggacataagtacgagcatacctaaagaataccccgggaagcacggggacacaaccgacgtcgctacaacgaaggattgtcatatataaaagtttagaggtcccggtcccaccatccccgtcgactttatcgccgccgatagagcgaccgatgacgaatacgccactaacggaaaattggccgaaaccaagagaatgactttcaagggagtcgtcttcccgaaagaccctaagatgaagaagacccccgccggcggaccatttctagtctcaaaaggagacgaacctaaggaaactcccctaagcccgggaag

SEQ ID NO: 11873 - DNA, 122 bp, Zea mays
  Clone ID: MRT4577_110825C.1
cggacaccagttattgtttagggcagaaggaaactgcgacgtgggatatttgcctaaggctggcgggggcagaacattactcaagggctcaggaaacacccgtgaccattattcagacgcga

SEQ ID NO: 11874 - DNA, 372 bp, Zea mays
  unsure (1)..(372): unsure at all n locations
  Clone ID: MRT4577_110826C.1
ctacccaccncaattcccaaaccaaaggggttttcttttaggcaaggaaggtttaaaaaaacaccccatctttcccaataaacaaacaaagttttttcaacaccccaccctgctcgacagccaaacatattaatgcccgcatatcactttccctctcctcgtaaacatcatcactgncggcctctacgacgacctccatagaatccttctccagggcagacaagtcctcccctgcctcaaagaacttccccttctccattccctcgccaacgtaccagtgcactaacgcgcacttgtcgttcatgaggtcaaactttctgttgatgcagaaaaacaccttgtccacgcttgtggacttttaaatcatgcaca

SEQ ID NO: 11875 - DNA, 208 bp, Zea mays
  Clone ID: MRT4577_110827C.1
ttggaacccggaagcggcctaacaaccttgaccagccagatcttgccaattgcttttgggggagtttccccaactggtaacattccaaaacaggaagggtaaaatggtgaacttttttttcccaagaaagtgttgggccacaaccaggatcttaattgccaaggacaatccttttgccaaaatcaacattggcaatttgaatccaaat

SEQ ID NO: 11876 - DNA, 264 bp, Zea mays
  Clone ID: MRT4577_110828C.1
ccaacgcactcttgcaggggcagagggcgaccgcaggcggcgatcggtcacatcatggacgtcgcagagactctgatcctccgtctgctagaggacgcggacaagcgcgaccaggttcagcgggagcatatctaccagatcaacgagctgtgcgagcgcactatggccgcgtgaagcctccctctgcgcgccgacggctactacaccttcgaccgcctcaactcgcagctctcctaggatccgcagatcagccaggccgccggc

SEQ ID NO: 11877 - DNA, 550 bp, Zea mays
  Clone ID: MRT4577_110829C.1
aagatccaagagatttctctgtgttttcacgcacaaggatcgtgccccggccagccccagctggtagcgttgcttctcgatcttgcgattgttagctagcttgcaaggtcaaggacgggccggcgatggtgaacctggtggaggcgcagaaaccgctgctgcacttcctggtcaggagggccgggctgcggcagcacgttgtcgacgtcgatggcgccggcacggtgatgaccttctgggtgcccaaggacaaggttcccaaggagaagggcaccgtgcaggacatcacgggcgccggtccagctacggccgaggccgccgccagcaaggtaccggccgctccggcggcggcgaaggagggcagcagcagcagcagcaggcccgccgtggtgctcgtgcatggcttcgccgccgagggcatcgtaacctggcagttccaggtcggcgtgctggcgaagcagtacgacgtgtacgtgccggacctgctcttcttcgggggctcgacgacgccgtcgacggaccggtccccggggttccaggcggagtgcct

SEQ ID NO: 11878 - DNA, 336 bp, Zea mays
  Clone ID: MRT4577_11082C.1
gttttattatatctctaacaacacctcttatgtagcccaccctacttcaacgcacgggggacatgatctctttcgtatgggcctacctaaagaaactgcacttgccttagattctcaacctctgaactatcctaatcacaccgatacccaactgaatttactcgtaacacatgcacattatgacaattaccatcatgccattgcagcactgatccatgcgtcttacgctcatccaaccaaccttgaagttctttttgctcttcccgttaaccacacaaattaatcggagcatggtgaagcattaagacatctttataggtcgcttgacaatcaacc

SEQ ID NO: 11879 - DNA, 176 bp, Zea mays
  Clone ID: MRT4577_110830C.1
cccacactttcaccactaccaacctagcgtctccaggctcctgctcaagaaggttagaagaggggagccttccttgtgaagtcgctggttgtttataatgtgcacatagatggctccctggaagatcgatatcaagcggatcgagaacttcaccaaccgccaggtgacctttttca

SEQ ID NO: 11880 - DNA, 361 bp, Zea mays
  Clone ID: MRT4577_110831C.1
ggggtcccctcgggccggccgggagcaacccagccgcccatggccggcattgttcgcagggctagcttcttgcgctgataagcgtctccaaccaaaattagcaaggacggcatggctctcgaagcatggaacaactacctgaacgtggcggtcgtcaagggcacgcccacacaagcggcagcggccctcggggtcttcctcctcttggcattccgcctagcccggcggccagggggctgcacggcaacgtcccccaggtggaatcgaaagaggttgccggagaccttccgagaaagctccccatcttgggccacccccacctatatcattcacgcccgcacgtcttcttccgagatctcca

SEQ ID NO: 11881 - DNA, 794 bp, Zea mays
  Clone ID: MRT4577_110832C.1
gaagaagggaaaaaggcactttctgctgcagctaagaaatttaaggttccttcctctgaaaatcttggggagattgctgaacactgtaatgaaagaaagtgggctggtcgccgtgcagaagaagctggacagaagctctacatgtgggctctgataaagaacaaagagactgtggtatgcaatgctagagttctgggacttggtcccaggttcatgtcagtttatgtgcccaagcttgcgatggaacgaaggatatattatgctgaagttgagggattatcagttgaatggttagaagtcactggaacgttagtgcttgatacatgcaggaacaagcctgctcaaaggagaggaactcagatgaagcgcaggccgattgaggaagtcgcggtggtggtgaacccttcagagttgtctgaagaagacgaggaatcaggagcaacagaagctggcggctgcactgccaagtctgttttgttgagtggcgacgcagtgaaagctcagaccgccccagccgttctccccttggtgatacattaccttagtgacatccctgtggttcttcatgcaattggtggtgaggattgtgcggtggacattggcgtaagactgtacatggcgtcatacttcaagttataggaaacctcctgtcatgacaggaaatagttggtcgatttcaacagtttttcagtcgaacgaaagtaaataaaatgatggtgggcaaattccaacttagtgctgtagatatttcattcatgtatagcaaattaggtacccttccagcgcagaaaaag

SEQ ID NO: 11882 - DNA, 476 bp, Zea mays
  Clone ID: MRT4577_110833C.1
gccaaccacgttttccagctcttgttctttcgattctcagagaagacttttcagaacatgcgtccaactttctcagataagcaacaatggtgaaaggtcccggtctctacaccgaaatcggcaaaaaggccagagatcttctgtacaaagaccacaacagtgaccagaaattcagtatcaccactttctctcctgccggtgttgccatcacctcaaccggaactaagaaaggtgacttattgttgggagatgtcgcttttcagtcgaggcgaaagaacattactactgatttgaaagtttgcactgattctacttttctgatcaccgctaccgttgatgaggctgcacccggactgaggtcaatcttcagcttcaaggttcctgaccaaaattctggcaaggttgagctgcaatacttgcatgagtacgccggtatcagcacaagcatgggattgactcagaacccaactgtcaac

SEQ ID NO: 11883 - DNA, 446 bp, Zea mays
  unsure (1)..(446): unsure at all n locations
  Clone ID: MRT4577_110834C.1
tcgcggacgcgtgggcgtcggtgcgctcaacgggggtcgcgctcctgccgggcgggcctaggggcaggatactcttgatgcctgagccatgttgaggatggccgtgcgtttccattctctacggccggcgtcatctacacctgggtcaccggcgtgagcttgattgtggcggcaatatgctacgcgtggatgctaccaagcaagggggatggccaggctgcagtgctggtggtgaacatgcgccggaacangatngcttnnntcnnncaggcggcttggctcctgtatcacgttggggtcgatgcatcggcgctgctcttcaccgatgaggttgacatggatgggctaataatggaccagcgagttagcttgcttgtggtggggcaagatgttttgaaatcaaaagcttgaggggcttcagtttgtacaaccctgacccataccta

SEQ ID NO: 11884 - DNA, 302 bp, Zea mays
  Clone ID: MRT4577_110835C.1
agttcttcccaaagctttagaaacatactaaagcacaacgattgctcctaagaacaccttaaatttagggctagtttgggaactttattttctcaagggaatctcatttttctcttggaaaataaaataatttctcttgaaaaaataaaaacttctaaatctgagaacctatgattctttttaagtttagtttggagtgtttgagggctttgaccctgcggtatccgtcaattagcttcttgatgcctgcctcgtactatattctaactataaaatatccttgacttgttacaaagagcatg

SEQ ID NO: 11885 - DNA, 484 bp, Zea mays
  Clone ID: MRT4577_110836C.1
aaaaaaaccgaaattggggggggttttgaaaaacaagtttttaaccctggggccagttgggaagttttacttggggggggaaaaaagggacgggggattgggttttttttgacccctgttcctagtaaggttcaaaagggagggtttttttttattccggggggccaccccatcccccccaagggggaattccggtggccaaggggggggccgctttaaaaagcccccggggctggggttggcctaaaaacggaacccctgaagggggggcaagaaacgtttccccccccacccttcggaaaaaagcccacaagggagggttttccacggggttttccaaaaagcccccccttaaagttaggcctagttttggggcccttttttgtggaaaatttaaccgggtcgcccactcccttttggcccaggaccctagaggggttatgttgggggacgccctggccaaaaaagacgggaatgaatttcc

SEQ ID NO: 11886 - DNA, 1303 bp, Zea mays
  Clone ID: MRT4577_110837C.1
ctcctcattctagccaggcgagagcaaaaggtagggtttccagttgcaagccgcgccgccgccgccgccgccatgggacactcgaacgtctggaactcgcaccccaagaactacggccccggatccagggtttgccgtgtctgcggcaactcgcatggcctgatccgcaagtacgggctgatgtgctgcaggcagtgcttccgcagcaacgccaaggacattggcttcatcaagtaccgttaagaatggaaacctcaaaggaagcaaggactaggaaattatcaacgaactgtggtgcttcatcgaggctgatctttatcctataagctatgtaatgaactactattatgtttgaatcctggtgacaaagccgtgaaaccatgttagcgactgctgtttgagcatgtgaaaccgataattctgttactgcgtgccattatggttagaaggttgctctgcatccttatatttttaaaaaaaaaaaaaaaaaagcctccagctctctctccctctctctcgcgcctcctccctccccctgcaggaagctcgtcgagatgtcgtccgaggcggcgaaggtggtggtgccggagtcggtgctcctcaagaggaagcgggaggagctctgggccgccgagaagaagaccaaggccgtcgaggagaagaagaaatccagcgagaacgtcaaggtcatctacgcccgcgccaagcagtacgccgaggagtacgatgcccaggacaaggagttggttcagcttaagcgtgaggcccggatgaagggtgggttctatgtcagtcctgaggctaagctgctgtttgttgtcagaatcagaggtatcaatgccatgcacccaaagaccaagaagatcttgcagctgttgcgtttgagacagatattcaatggagtgttcctgaaggttaacaaggccaccatcaacatgctccgcagggtcgagccatatgttgcatatgggtacccgaacctgaagagtgtgagggagttgatctacaaaagaggttatggcaagctcaacaagcaaaggattcctctgaccaacaacaaggtcatcgaggagggtcttggaaagcacaacatcatctgcattgaggaccttgtgcacgagatcttgaccgttggccctcacttcaaggaggccaacaacttcctgtggcccttcaagctgaaggcgccgctgggaggcctcaagaagaagaggaacactacgtcgagggtggtgatgccggcaaccgtgagaatacatcaccagctcgtcaggaggatgaactaggggtatcatcgatgatc

SEQ ID NO: 11887 - DNA, 678 bp, Zea mays
  Clone ID: MRT4577_110838C.1
ttccagatgatcatatctcatccatagctcttgcatgggattgtccttcccattgctgtgcgaccgagtcgatgagtgaagaaaataatcccaccaaactacctgctgccaatctgtctactactgtacggtagcgcatctcctgtccatcgcacggtgctatctccattactactcaacagctctctctcgtgcctcacgattgtgacccactcagaagtcccaccgcttgacatcgccttcacccaatggacatagtggactgtgatgtgttatgggatccattctcctggtactttctatactaatagttgtccccgctgagcatgcactacaactccttggtgtgctttactcgtttagaatagatgtgcgatcgaactagactatcattctctgtgctcagcctctgatatttggacgcatacgcaatgaagcaccggacccgagcaccagacgcggtctactactagcggagcacccaacatgttcgaaatccaaagcaaggttatccatcttccctagaattcggacttcaacgagaatcaatattttccataagaagtctccatgactctcctcctatgggccttatctcttatggcgatattctgttgaaggcacagaagctacacttgttagctggcatgcacaatatcatgcttataatgactggcg

SEQ ID NO: 11888 - DNA, 346 bp, Zea mays
  Clone ID: MRT4577_110839C.1
tacacgcgccaatgatgcaatgatagatcatgaggctcacaaatgcacaacccaggttctgggtacatagatcaacgtgacggctgacgcatgtgtctactgagagggctatgactgaacattatatacagaaatccacgagtatgaagcagatgaatgatgcattctgattaacttacaaacatactacctcaatactatagaaggctcttattagaaaaatccatataattctggtgaatcatactattatacaaactagtagactattaactatgtctcaccaaattactctgaactaagattagaccgtaactcatatgatccaataattgtctatggcgct

SEQ ID NO: 11889 - DNA, 1073 bp, Zea mays
  Clone ID: MRT4577_11083C.1
gcaacgctatggccgccgggagggagagggaccgggagatgctcctcccggtggtgggcggggagcatgtcgccggcgatgaggacgactcggatccgaccacccccgtcatcgctgggccgctgccgccaacgacgtccgcgcgcgtgctccacctccaccaccatcccaccggcatcgaggcattctcacgagtgataaggagctgggcgtggaagaagttcatgtctggatggtgcgcaactctcgtacatatgaatactgcgtcatcctgctcccgatcgccatcaccttctacacgacatggtggttcatccgcttcgtcgacggcttcttctcgcccatctacgtccatctcgggatacacctcttcggcctcgggtttgtcacctccatcaccttcatcttcctcgtcggcgtgttcatgtcgtcgtggctgggcgcctcgctcctcggcctcggcgagttcttcatcaagaggatgccgctcgtgcgccacatctactcggcttccaagcagatcagcgccgcgatatcgccagaccagagctcaagagccttcaaagaggtggtgatcatccggcaccccaggatcggcgagtacgcgctgggcttcatcacgtcgacggtggcgctgcgaggcgccggcgtccgcggcgaccaggacctcgcctgcgtctacgtgcccaccaacaacctctacctcggcgacatcttcctcatgagccgcgccgacgtcatcgtcccggacctctccgtccgggaggccatcgaaatcatcctctcaggcggcatgtcggtgccaaagatcatatcggcggtggagggggccgtcggcctcggcgaccatggccgggcagtgaaggactcctagctcacgcttcttccaactcctgacggttgacgcttccttctctatcacaatcttgggttgcttttcgaggttctgaatgttctagactgcaggttttaggcaacgtgctccagttttcatccgtcatagaaaaatatattttggtatctagcaaacttctgctgtataaattctttcatgcgagttttggtttggactg

SEQ ID NO: 11890 - DNA, 485 bp, Zea mays
  Clone ID: MRT4577_110840C.1
catcccaaagcatcgtttattcatgagaatgataatatcaacatatgtacaagcacaacgattgctacggacatattctcaaaagtgttccacaagcacaaactggagagcataaaagctaccaccttattgaacagaaaataactagggaggcaggcaactggatcagaagaaagtctaattcaatggttccagggaggaacagccgctggactttaggtactatgcttgggatttgaggaaatctggctgatttgtaactgatctaacccacgcccatttgtgatcattcacatcgacagggttctttgccacagcgacatcttccagtggtatgtaactgtaggtcccatttactggaccaggtacaaagccagtaaacccagccatgaccccatggatggcagaatgtgccagcaaagtgcaatacaaattgtcggtggcatttgcaggaaccgctcgaatcatgtatgtagggtcaatgt

SEQ ID NO: 11891 - DNA, 395 bp, Zea mays
  unsure (1)..(395): unsure at all n locations
  Clone ID: MRT4577_110841C.1
tatggaaggggggtcgaggtgcaattgcaccccctccaccaacgaggagaactcgatcccaatttacagcagccgttcgaattaagtcccgtcggtaatctcgagcggggnagtagataatnggcgtcacctcgtcgnacgagggatctcccgngggagggttttttttttttttgtacttacaccnnntctgccagccccccgggtgcggcggcgggtgcgcgccaccggcccaccggtccatcggtcccaccgtcccttcgggccttcgggccctcggtccctcttccgatcggccgggcggtacgtctggccgggtggtacaagcggccgaagagcgcgcggcatggaaagagggatcggcgaggccgatcgacagccggacgttcggaagg

SEQ ID NO: 11892 - DNA, 334 bp, Zea mays
  unsure (1)..(334): unsure at all n locations
  Clone ID: MRT4577_110842C.1
cataaaagggtttattttcccaacaaaattgggggttgaacagctcgaaaacttattttaaaacctaaaattttggaccaccttggttttcattctttttttttccaagaccggggtgcccgtggaccccccccggggggggctttgactttgggtgggttttgacagccgccttaatacctgggggggggttttggtctttcgtcccggggcttgttcccttggcgggggccaccctgggctggtttgctcgctttttattgcccgttggggttgcccttcctcctcgtggcgcccggggctttttttgggttcctnttgggggtgggggggg

SEQ ID NO: 11893 - DNA, 738 bp, Zea mays
  unsure (1)..(738): unsure at all n locations
  Clone ID: MRT4577_110843C.1
gcgttcgcggnaaaaactgatgtttatgggtttggcattctcctgttggaactgattactggtcctaaaaccttgagcaatggacatggccagtctcagaaaggcatgattctagactgggttagagagctaaaggaggacaagagaccggataagctggtcgacagggatctcagagattcatttgatattcttgagctggagtgttcagttgacgtgatcatccaatgcacgcagacgaaccctatgctgcggcctaagatgtccgaaattctgcacgctcttgaagccaatgtcacgctggcggaaaccagcgtcgagttgaacagggaacctcttccttatggtgtgcctcgcagtttctctgtgaggcatgaggacccccacgattcgtcgtccttcataatagagccaattgagctatctggtcccagatgacagctgttgtcagtgtggttgaggcgaaaagaaaagaaagcatggaaacaatacaattgtacaaaacatgtatatcgtggatgtagttcaacttagcaagagtttgctgggcgtgttgccataccttacataatattttgaacgtggagctggagcgaaccttgttggctatttttgttgcttacgttttcatctgccatccatgaggcactgaggcggtcatgcatttttgccgaaaattttccgccagaaaattgtttggaaaatgttgcctccgtacaaaaaaaaaaaaaaaaaaaa

SEQ ID NO: 11894 - DNA, 656 bp, Zea mays
  Clone ID: MRT4577_110844C.1
caagtatattcattattccaaaagctatcaaaaattacagtcaacaaggagatacctgttgatcgtgctctccgttttcctcagctgcatcttgaggttcctcatgctcaacaacctgcgtccttttcaaagcttccttccacaaggctcatgtctgagcatgattcaagtactggtcagcaggaggataattaatgtacgacgtgtttgatgctggcctgtgccaggggaaggatgcacggtgaaggtggggcaaatgggtgaggcaactagactcattcaagctgattgatggggtgacacaagaacagatcaaggtgtggctgggttctaacaaaagtatccaacagaaggtggtcagtgccttacatgatagggcacttggatgtcaaatctatcggcgtgtcaaatctactttcagctggcctggaagggaagaacagatcaaagcatatgtgcagtcttgctaccatactgtattgggcaaatctccatttgaagtgctagatgttgcagatgttgcagcaagtcaaaatgcactcgcagcatgctcaaactccgatgaaacaccagctgatagacaaaagggcgcgcagatgtgggtgatcgggtgtgtacttgaaacttcaccctttactgtcagtcctcagtggctg

SEQ ID NO: 11895 - DNA, 489 bp, Zea mays
  Clone ID: MRT4577_110845C.1
agtgcggcctcggtcacactgctataaaaatcccatcgttcccacccacaaaccaacccggtccactatccagattcagattctctatcctgaccctgctcctgcctgcgatccccaaccccaatccaaggaccagaccaagagcaacagggaaatcatgagcgccatggtcgcgtcgtcgcttaacccggaggccccgctcttcatcccggcagcgttacagcaggtggaggacttctcaccgctgtggtgggacctcgtcaagtccaccgcctggtttcgcgaccactggtaccaccagcaccagcagctcgacgatatggccgactccctcatcgccttcgaggccgaggacgccatcgctgtcgaggcttcgcagccgcagccgcagccgccagcggcactcaatattgacggggtgctcaaggcgctgagcctggcgtccccaagcccaaagggcggcgacgccctgcgtggcttctcggagaa

SEQ ID NO: 11896 - DNA, 226 bp, Zea mays
  Clone ID: MRT4577_110846C.1
gcgcaaagcaaatgaatcagcaggaagatcaagacaatcaatgagtccatagaacagttatgagggtcaagaaggtccaagcgatgtcgtcaaggatcagtctgaatgtggggtacatctgtttcagttgatattcgatacaagtttcttcctcttgagaacttatttgagtctgtgccttgtagttggctatggattcttgccttacttaatcactgtggattat

SEQ ID NO: 11897 - DNA, 344 bp, Zea mays
  unsure (1)..(344): unsure at all n locations
  Clone ID: MRT4577_110847C.1
acgcgtncggggctgcgcactcacccgtctgacgcgccaactccggagccaatggatagaggttgatgtcggcgaattaacgtaagattgtaatgcatgtggcgtgcaacctccatgtgattgcatcattctacaacctcatgaccctgtctagcgcggtcgttgtcactgcaccaggtgatccagcgccgatcgtatgggtgaccgatcttcgatacaagagtctgctcaaatgtctgctcagaacgaggcagacttctgcttagttaatacatcaaggaggtctgtgatgcacttatctaatacaagactcatagtggtcgacatttgatagcccagagtac

SEQ ID NO: 11898 - DNA, 324 bp, Zea mays
  Clone ID: MRT4577_110848C.1
aaatctctctattctaaccctccaacaggaatatacaatagggggaattttaaaaaaaagtcccggtttagtccctatatagcataaaattaaattatcggggcccaataaatatatgggtacaggaaaagcatatggactaaccaacatgcagggaggcaaacgtacgttcatgagcccaaagactgctcccaaaaaagcagagggggattgtaaaccgaaaaacactgtttttttcttttttacaaacaccacataaaacctatgtatggcatacacgcatcggcccattgttattatggggtcaacccaccaccaccaagc

SEQ ID NO: 11899 - DNA, 277 bp, Zea mays
  Clone ID: MRT4577_110849C.1
cccacgcatgcggccactcgtgcgtctatatcgcgagctggcataaatacctatctgagtgttctggacaactgtctacttgttaagcactaaaacggcacgcatggtgcattgatgatatcagtatcaggcatacgaatcagactccacatatctagtggcgggttgtccctacttgagtaccgactcgagagcctcgtgcactgggtcggcctatatggtactctttgatctgatgttataaacctatgtggctattgctaggtaatgctaaaga

SEQ ID NO: 11900 - DNA, 537 bp, Zea mays
  Clone ID: MRT4577_11084C.1
gccgtgtccgggaatacttgaagaggcaatgttgttattccagcgaatgccgaataaggatatggtttcctggaacaccatgattgctggctatgctcaggatggccaaatgcacaaggcaatcggtattttcaggaggatgaacaggagaaatacggtatcttggaactcagttatctctggatttgttcagaatgatcgctttgttgatgcactccatcatttcatgcttatgagaaggggcacaaatagggctgactggtctacctatgcaagctgtctcagagcatgtgcaaacctggctgttttgcatgttgggaggcaactccacaatcttcttgttaggagtggccatatcaacgattcatttgctggaaatgccttgatttccacatatgcgaagtgtggaaggatattggaagcaaagcaaatctttgatgagatggtatacaaggatattgtttcatggaatgcgctgattgatggctatgcttctaacggtcaaaggactgaagcaatcgcagtcttcagggaaat

SEQ ID NO: 11901 - DNA, 1015 bp, Zea mays
  Clone ID: MRT4577_110850C.1
gctcaacttaaatagaatatgaacacaggcaagtgtttagaggatggcaaaaggaagggttctggagaggacagttcatcactacgttctctaggtgaaaccagtgcattgcagcgagaagtcagcatggagtgtgctgatgagaaggcgggtgatgctagagccaagagagaggactacgtgcatgtccgggcaaagcgcggccaagccaccaacagccacagccttgcagaaagagtagtttctacctcttaagcaacatttttctttgagcgacatagttaacgctccgattgaaatgcctcaattctgttgcttacggtagcatgcctgtccgaactgcagtttcgaagggaaaagataaatgaaaggatgaagcttcttcaagaccttgtcccaggttgcaacaagattacaggcaaggccatgatgcttgatgagatcataaactatgtgcaatctctgcagcgacagattgagttcctttcgatgaagctctcagcgatcggccctgggctcaactgtgacctcgacctacaagatatcctctgcacacaagatgctagctctgcttttccaggatacaacctgcaaacgagcaatgtgcatattaatctgtacagagcatctgaagaaggtttctcacacaggaacaggatcatccctagtccagcaaatgttcacgtgacaagaaacgcccagctatctgcatttcctcagagaggagttatctggaacgaggagctttgcagcatcgcttcagatagaaatgctgattcaatgaaagtggagtgacattgtggcaactgacaagccggcagtttaatggtgatcaactctgaaagtcttgacaagttgggttgctactgaggtgcctttcaagttgcagtggtagcacgacttctcttgggatgagctagttaacttttggtatttgagaggaattctggtgtgtccacccatcctgtacagttattagaataactaatcaaaggagtactgtgaaattcttgcg

SEQ ID NO: 11902 - DNA, 266 bp, Zea mays
  Clone ID: MRT4577_110851C.1
gccacacgtccgcagcagcttgatccctagctgcgaccgatccccagagaggggtctcaacttcggtgacggggggaggaacacgcagacccagcgctcaccaccccagaggggccacctttatctaaagctgctcgtgaagctctaccacctgttgggccggatgcccaacagcatcttcactagtgcgatcttaaacaggaccctgatgaccaaaaccaactgcccaacaatgttgatgcgcaccctttgccagatcttggcaa

SEQ ID NO: 11903 - DNA, 1560 bp, Zea mays
  Clone ID: MRT4577_110852C.1
aattgactgtgcccagctctcgatctactccaccctttaagtaaggcaacttcagttggcagacctggcaatgacaagctagaaggttaccaggcattccccctcccccaaaatgattgcaacgacatcgcactgagtccaagtatcagagtaggatgatgtattcccctccgcgcaccgatcccgacagagaggaagagcagtgcttctcaatcggaagtaatctgcttgcttcactagaccattaccataccatggattttgatgagcctgtcgtctccccaatgaccaatgcaggcatgcaagagggggttcagctctacagttctactggagatgctcaactaaatagaaatatgaacacaggcaagtgtttagaggatggcaaaaggaagggttctggagaggacagttcatcactacgttctctaggcaaaaggaagggttctggagaggacagttcatcactacgttctctaggtgaaaccagtgcattgcagcgagaagtcagcatggagtgtgctgatgagaaggcgggtgatgctagagccaagagagaggactacgtgcatgtccgggcaaagcgcggccaagccaccaacagccacagccttgcagaaagatttcgaagggaaaagataaatgaaaggatgaagcttcttcaagaccttgtcccaggttgcaacaagattacaggcaaggccatgatgcttgatgagatcataaactatgtgcaatctctgcagcgacagattgagttcctttcgatgaagctctcagcgatcggccctgggctcaactgtgacctcgacctacaagatatcctctgcacacaagatgctagctctgcttttccaggatacaacctgcaaacgagcaatgtgcatattaatctgtacagagcatctgaagaaggtttctcacacaggaacaggatcatccctagtccagcaaatgttcacgtgacaagaaacgcccagctatctgcatatcctcaggttttcattcgacgcccttgaacagcttcaagtgctttcctatgtcgattatactagtttctgccatggcagagaggagttatctggaacgaggagctttgcagcatcgcttcagatagaaatgctggtagccattcaatgcaagtggagtgacattgtggcaactgacaagccggcagtttaatggtgatcaactctgaaagtcttgacaagttgggttgctactgaggtgccttttcaagttgcagtggtagcacgacttctcttgggatgagctagttaacttttggtatttgagaggaattctggtgtgtccacccatcctgtacagttattagaataactaatcaaaggagtactgtgaaattcttgcgatctggtggagaaaatagcggacaattttcgtctggaatttctgacacaactgagttagtgctttggtggggtgtggctccacctaattatttagttgtaatagctggcagagctctatgactataactgcttgagattcgtgacaacgaatttaaattggccaaataaaacaccgttcttcggtatt

SEQ ID NO: 11904 - DNA, 376 bp, Zea mays
  Clone ID: MRT4577_110853C.1
ttatattttttttttttttttttttttttttttgggggggaaagtaggatggccgcttccattcataaaacacactaatttgaagcaggtagggggggtccaaaccccattattggggtggcatgtttggctactacgggaaggaaaaaagcttcggacgccgggcacctaacttgctggcaccagccttaccggaccggtaaaacaaaagcggtactccgacacacagcgagaggggggtgttttttaagcgagatctaaaagggggcgagcccttcataccagttggtgggggagagacccgctctgaaccggctggacggacaaacgcggacacactttacgtggggatatcgggggcgatggggccggcctt

SEQ ID NO: 11905 - DNA, 273 bp, Zea mays
  Clone ID: MRT4577_110854C.1
aagaaaacgatttcactgaacagtagagctcttttgactagatcatgccaattgtccctctaattctttttgttgggtttttgaatatagcaattgatcttgttttattgtgtgggtcttataccacctatgtttatatttacttgttgtatcggatataaatatgatctctggtcaaagtatgtgctagcgaaattcaataattttattacgataaagaagtaacttcgatggtggtctatttgtatcaattttacgctttacggataatgg

SEQ ID NO: 11906 - DNA, 507 bp, Zea mays
  Clone ID: MRT4577_110855C.1
aattcggcacgaggccgaactccacaacctcccccgtcctcttcttggcttctccttgccgacgcgagcattagcaaaccttggggaagggaagccgaagcagcagcatgaactgcgcgtctgccatcccgcagctactccaaacagcaacgtcctagccgacgagagcctccctccgccacctacccacccaccaactcccgcccgtcgcctccgcttggcttttcgtcgagcagttggttggcacctaacccccagggccgcgggccagtaaggcgggagagtgaggcagagccactgagccaaagccgggagatgaagaagctgtgccaaggcggcaagaaaggggcggcgggtgcacccggcgccggcggacgcggccgtggccgtggcgctgccggccgccgcgctggccctggcgtccgcgctgacggccgaggagcaggaggtgctggcctacctcctgtcctgcggcggcgcggcggccgtgggcggccggccgcgccg

SEQ ID NO: 11907 - DNA, 375 bp, Zea mays
  Clone ID: MRT4577_110856C.1
tccaaacgtgtagcaatgtgaaagtcaaagagaaggccgtcgtggagcgcacagcactacaagtccaggataaggctggttaacctagacaaaaccaagaccaacacacccaaatacagattacaggtgcgatttaccaacaaggacataactgtgcaaattatatctgataatatacagtgtgatatggctaaagcttatgcctactcttatgagttgccacgatatgcacttgaagatgggctgaccaactatccatctatctactggactggacttttgttatatcgccgcgtgctaaagatccgccttttatattacgagtatgagggcattgttgacgtcactgccgaggactcatctggggagccagct

SEQ ID NO: 11908 - DNA, 398 bp, Zea mays
  Clone ID: MRT4577_110857C.1
gaacgaaacgcaggtgttgttccatcactaagccttataaccacaccgctcttgagcaccaacgacttcattgaaaacgcggcttaaaaagaacaacatatgcctttccaaaaacacgatactggccgcgccccaaggcccttctgacccgggccaccaggaacaccatatgaccccaaaaaagggaaagcattcgaccaagcgtgccaccattttatagatcccctgaggcgaaatctacggaaggctaacttaattaacccaaacaaaccacctcatcgtaggggccacagaccggaccctaagactatacctacctaaggaaccaaaaccgaggacatcctccacgagcaactgtgcgaggggttgacattgacaaacaggaacggaggggagtg

SEQ ID NO: 11909 - DNA, 711 bp, Zea mays
  unsure (1)..(711): unsure at all n locations
  Clone ID: MRT4577_110858C.1
tgggtacctcgaggccggccgggagatctcttctcgncatctcgcatctcggcgtgccaccaccactccactccaccgctacactgaaaccaaccaccacgccacggcaccacccaaacccatccctaaatcccgagccccaaaacccccgtacgcgctcgccgcgccgcaatggcacaccaccgccgcgccccgctcctccccatcatcctcctcctcctgctcgccaccaccacggaacccgcggcgcccggcgccgcatcgcactcggagccgacgctgccagtgccgccggtccaagccgccgcggcggtgcccccctccgcggcgctggcgtcgacgcctccgccggtctcgccctcggccgcggcgctcgcggcgagctacagcctggagcagctcatgcgcgcgtcggcagaggtgctcggccgcgggagcgtggggaccacatataaggcggtgctcgacggccggctcgtggtcattgtcaagaggctggacgccgccaagattggcccagcggcactggaagcagaggcgttcgagcagaacatggatgctgttggccgactgcgccatccgaaccttgtaccactccgagcattcttccaggcgaaggaggagcggctgcttgtgtacgactaccaggccaatggcagcctctactctctcatccatggntcaaggtcatcccgggcaaaaccacttcac

SEQ ID NO: 11910 - DNA, 326 bp, Zea mays
  Clone ID: MRT4577_110859C.1
gttgactgaacgggacctttagggaatttccctttactgggatgcgcagagaaaaaaaacctgacctttttctggctgacactaagggactatacccttttggcccacccacaatgggccaacgagaactaagttctaccgctggctgaggatcctggaccaaccctgtgaaagcaaatatcctccgtgaacccgatgaagggacacaagttcctgattgtgcactctgaaatattgaaagctcttaaaataggcgggccccacaaacattccaacacatgaaagaaacgagtttatggctccctttggggcctcgcgcaggggcc

SEQ ID NO: 11911 - DNA, 140 bp, Zea mays
  Clone ID: MRT4577_11085C.1
ttgccgtgccgaatccgagactgctaacctgtcggaggctctggctgctgtatgggggcattggctcggtagtgagttgtgtttattatagtgatagttgttttctgtgtgaaattttatccattcgtgggggggggggg

SEQ ID NO: 11912 - DNA, 220 bp, Zea mays
  Clone ID: MRT4577_110860C.1
cggacttgttcgaatactgtgtcttgatgcttgtgtccgaacagtagtgcattggcaacaggacaaattgactggttcggtcccagtcatctagcacattgtgaatgatgttccaaacatcgtgctgaagcacatcattcttgtgatcaatgatagccagccagtgacggtcagctgcgatctcattacgtgtatcttgaacatggccttcaagtgctta

SEQ ID NO: 11913 - DNA, 2710 bp, Zea mays
  Clone ID: MRT4577_110861C.1
ctcgaggccggccgggatctacacaaaaacgtcccagagcgaccaccctctgaccctcgtccccgtcgttccccagatctcctctcgcatctcgcatctcggcgtgccaccaccactccgctccaccgctacactgaaaccaaccaccacgccacggcacgggcaccacccaaacccatccctaaatcccgagccccaaaacccccgtacgcgctcgccgcgccgcaatggcacaccaccgccgcgccccgctcctccccatcctcctcctcctcctcctgctcgccaccaccacggaacccgcggcgcccggcgccgcatcgcactcggagccgacgctgccagtgccgccggtccaagccgccgcggtgccccccgccgcggcgctggcgtcgacgcctccgccggtctcgccctcggccgcggcgctcgcggcattcctcgccaaggccgacccggcctcccgcctgcgcctccccagccccgccgcctcgccctgctcccgcccgggggtcacatgcacggccaccgcccatatcatccgcctcgtcctcgagtcggcggggctcaacgggacgttcccgccgggcacgctctcgcgcctcgccgagctccgcgtgctcagcctcaagtccaacgcgctccacgggcccgtcccggacctctccccgctcgccaacctcaaggcgctcttcctcgcggggaaccgcttctcggggcccttcccgccctcgctcgcctccctgcgccgcctccgctccatcgacctctccggtaacaggctctccggcgcgctcccgcccggcatcgaggccgccttcccgcacctcaccctcttccgcctcgacgccaaccacttcagcggcaccctcccgccctggaaccagtcgtcgctcaaggtgctcaacgtctcctacaacaacttctcggggcccgtgcccgtcacgcccgtcatctcgcaggtcggcgccgccgcgttcgcgggcaaccccgagctctgcggcgaggtggtccgccgcgagtgccgcggctcccacctcctcttcttccacgggggcggcgcgaacggtaccgccgctccccctgtgcagagcgctgctgctagcgacagcgggccgcagcgggagaacctgagcgtgccggattcgtccgtgccaaatgcgaagagagcgagacggaggatgaccaaattggccgtcgcggtcgctgccgggtctgtcctcgccgcgcttcttgtcttcgccatgattgcgatgaagaggagcaacaagcggaggcgcccgagcaccgcgtcgtacgagagccccaaccccaagaagagcgcgcccgcgtccgaggtgagcagggacaatgctgacatgggctacgtcgagtgcgtccccgacgaggagacggcggccattatggtgccggaggagaaggcacggcgcctggagcggagcgggtgcctgacattctgcgcgggcgaggcggcgagctacagcctcgagcagctcatgcgcgcgtcggcagaggtgctcggccgcgggagcgtggggaccacatataaggcggtgctcgacggccggctcgtggtcattgtcaagaggctggacgccgccaagattggcccagcggcactggaagcagaggcgttcgagcagaacatggatgctgttggccgattgcgccatccgaaccttgtaccactccgagcattcttccaggcgaaggaggagcggctgcttgtgtacgactaccagcccaatggcagcctctactctctcatccatggttcaaggtcatcccgggcaaaaccacttcactggacatcatgcctgaagatagcagaagatgttgcacagggtcttgcttacattcaccaagcttctcggcttgtccacgggaacatcaagtcttccaacgttctgcttggttcagactttgaggcttgccttacagacaattgcttgtcgttcctcctggaatcatcagaagtcaaagacgatgctgcttacagagcaccagaaaacatgaaatccaacagaatgctaacgcccaaatcagacatatatgcttttggtgtcctccttcttgagctccttagcggaaagccaccgcttgagcactcagtcttggtcgcaagcaatcttcaaacctatgtccagtcagcgagagaggatgaaggagtggacagtgatcgcatcacaatgatcgtggacatagccacgagctgcgttcggtcctcaccagaaagtcgacccgccgcctggcaagtacttaagatgattcaagaagtgaaggaagccgatgcaactggtgataatgacagtgatcttaccagcaactcctagttgcctgtgtgggtccatctctggtggatgaatcattcctgctgaacggatgtagactgtataatttgaagtgagggtgaaccctagataggaccgtaggagagtactgcaatagcataaggatctctatgttcggtgtggtttgagctagggatgctgtaacatattataggatttcttattgtcagcaactcagcatgttctggtctggttctactagtggcagttttagcaccagtctgttgtgtgaaagtttattagattgatagtagtgaagccacaaaagctgtgtgaagactgaagatctggttttaaattctattaccagcaagtattgtgagattttcatgaaatgattagttggggatggaacggtg

SEQ ID NO: 11914 - DNA, 376 bp, Zea mays
  Clone ID: MRT4577_110862C.1
gggataggggaaaaacccgcaggcaccggaccggaaaacccgggacgacaccacgcgaccgggggttataagcaaaaagccccagggaagcacaaagggggagccacacggacaaaaaggggaaccgacgaggaaacaacgaagaaaacggggcccccacaaccgcaggggacaccgcccaccaagaaaaacaaaccaagggggaacacgcagaacgcggccagcaaaggccagaaacaaacacccaccaccaccaaaagaaggaagaaaacccaccaaaacggaccacaagaaccaaggaaagcacaaaaaaggcagaaaccaaaagccccgaaaggaaacagaaaagagcgcacagaacgaacgggcaaaagag

SEQ ID NO: 11915 - DNA, 405 bp, Zea mays
  Clone ID: MRT4577_110863C.1
gcctgcaggccgactctagaggatcctctcagggaattccaattccacattggcaagatatagagacgcaaaaatgctcatctttgaagagcaattatgcgttctcatattaggcctatgctgaagccaaaggaaatgagatcggaattcctcggggaattccagatccacgttttcaagaaatagagacgcaaaaatgctcatatatgaatgaggaattattgtgtcctcttattaggcctatcctgaagccaaaagaaatgagagcagaattcctcggggaattccaattccacgttttcacgaaataaagaggcaaaaatgtccatatatgaatgggaattattggcttccttattaggcctatcctgaaaccaaaagaaatgagatcggaactcctcgggg

SEQ ID NO: 11916 - DNA, 414 bp, Zea mays
  Clone ID: MRT4577_110864C.1
ggccgcttttttttttttttttttgtatcactgcgcatgcaatgaccatagcggtgtcttccacagacagcagcttctgtaaagggaataagcaccgaccacataggggattatcagtgaccacagcatacacaggccaaagcaaaaaatggaaaaaagtatatagctttatgcacttagagtggatgctgctacatacagcttaatacatgggtattgcagtaaaccgtatagtggaactagactcacgcttggatcacactgatgatccatgcgatagagatgctatgaactttactacatgtgtattgactgacattgcttggctaaatatggtaaataacacctcatatcctctctgtatacatggagtggagacgacaactaccctattcaaaccattcactaacttga

SEQ ID NO: 11917 - DNA, 1089 bp, Zea mays
  Clone ID: MRT4577_110865C.1
aattcggcacgaggcacacccacccacctccgcggctcccaagccctagatgtccccttcccactcctcctgcctccgcagcgccgccgctgccgcctgcgccccgagccgatcaccccagatctcgcgcgaatcagaggtcccgcgcctccccgtggcccgattcgccgtccgtgcgcccgggaacggcgccgatttgagacggttttggaggtgaggcggggtgcgatttatgtggtcctgggccttgcgggcccggtggatggatgcagtggaactgccgttaccagccaaggtggagttcgggaaaatcctggcgcaggcagccgcggtggagggggtggacggaggcatccccggaggcgggggcggggaggtgctcaggcgctgcgccgacgcggaccggcggcacggtggtgatgtgaagcagcacaaccagaatgcagaaggctttccgtctcatagaagtaaaaggatgtctttggaagtctctatgcagaaatctcttggttttggcttgaagtctgataatggcaaacatgattatgttgcaaatgatacggttcaatccctgcataagcaagatagtaagatagtgataaaaaagaccataaaattgttggacggtccaccttatccaaaaaggccaaagcttgagccagcacaaactggtagagatgctgaggctaagggacatgaattcatatcacagaagaatgtgcctgatttggcaccatgtgcaacatctgaaaaatctcggttgctcaagcagaagcgcatttctgatggaaagagaattgataagaagaatattaggtctggtgtcagatcgaaacatgattgtttctcatcaaaggctggtttagcaaattttgattctggtttctcaggaaacagcgtgcttggagcacatggccttaaatctgatattcgtgacatcacacatcacattgagaacctgtcattgatcgaacttcttgatggcacttacaagtattccagtttaggaagagataaaggaaagaaggtattgcacacgaaggaggaactcctagtctctgtcagaaaaactttttctatgctttctga

SEQ ID NO: 11918 - DNA, 715 bp, Zea mays
  unsure (1)..(715): unsure at all n locations
  Clone ID: MRT4577_110866C.1
ccggccggngaccctgggccttcacatcccgtactcgtcgccagcaagcaagcgctccccgcgtgttcacacctcgacctgcgacgtgaggccggcgtggaccagccgccgaccacacgccttggagtctgccagccgccgaccgtggcggcggcgtcgggcgccgagctcctcgcctgcgactgcgacgcctccgctccgtcgccggcccctgccgcgaccgtcggcaggtgcgacgggctggtgctctcccggcagcaccacgacgacgaggtccctgagggatcctcgtcggcgtcgagggacaacagccatagcggcggtcgccgcgggcagcggttcgcgccgcgattcgatggcctgcgcttcatcgagacgctcgtcacggcgcaccgctgaagcgacggacccgcgatccgcctggctgcctatgctccggtggtaatctccccgccgccatgattcggcgattcgttgttgctggtggcgcttaggccaccgagttttgttagaacaacaatttcaggcttcccctttcatttggtgctgtgctgttcgtcctcttgttgatgtcggtggtccgtgaccattcattctccttttttagcttgtttgccgttgtgcgagagggaaggattaagattataccccgccatgtcgatttgagcagaccctactctatttctttatttataatggcacacctttcttcccc

SEQ ID NO: 11919 - DNA, 1130 bp, Zea mays
  Clone ID: MRT4577_110867C.1
cacgtccttgattagcatgtccttgcaccagtacatgttcatgtggaagaactgggagttgagcagcgtgaccccgaccacctccccgttgttcacgaagtccatcaccagcgagttgggaagaatcttgcagtcgtacttcttggtgcaggagttcttgctacacacggctgggccctgcccgtcaaggtttcccttgccggtgatgaccaggttatccacgcgtagaatctcgatccaattaccatggtccttgtactggcttaggtcagtggtcggccgcgggttttttttttttttttttgggacgaagaaatgtgtgacattataaataaagaaatagagtagcgtttgctcaaatcgacatgccgggtataatcttaatccttccctctcgcacaaacacaaacaagctaaaaaaggagaatgaatggtcacggaccaccgacatcaacaagaggacgaacagcacagcaccaaatgaaaaggggaagcctgaaattgttgttctaacaaaactcggtggcctaagcgccaccagcaacaacgaatcgccgaatcatggcggcggggagattaccaccggagcataggcagccaggcggatcgcgggtccgtcgcttcagcggtgcgccgtgacgagcgtctcgatgaagcgcaggccatcgaatcgcggcgcgaaccgctgcccgcggcgaccgccgctatggctgttgtccctcgacgccgacgaggatccctcagggacctcgtcgtcgtggtgctgccgggagagcaccagcccgtcgcacctgccgacggtcgcggcaggggccggcgacggagcggaggcgtcgcagtcgcaggcgaggagctcggcgcccgacgccgccgccacggtcgccgcggaagccacggcggctgccagcccccacttcatctctcctcccccttgcggcggtcggcggcggcgcttgtggtcggcggctggcagactccaaggcgtgtggtcggcggctggtccacgccggcctcacgtcgcaggtcgaggtgtgaacacgcggggagcgcttgcttgctggcgacgagtacgggatgtgaaggccagggttcccggccggcctcgaggtacccaatcgcccataggagtg

SEQ ID NO: 11920 - DNA, 226 bp, Zea mays
  Clone ID: MRT4577_110868C.1
aagcagtatctaagtcatattaaaaggactatttctctaaaactcaaataggattcaatatcgcgaaacgctaaacgccctcaggggcagagccggaagtaatgcccttcgggctgagctactaaaaaacggcagttgctccaaaagcgttattggatgggctctaacgtaggtaatggggacctttagaaaactgtgcgggcaaggtctaatttgggaaatgacc

SEQ ID NO: 11921 - DNA, 924 bp, Zea mays
  Clone ID: MRT4577_110869C.1
gacgaagaaatgtgtgacattataaataaagaaatagagtagtgtttgctcaaatcgacatgccgggtataatcttaatccttccctctcgcacaaacacaaacaagctaaaaggagaatgaatggtcacggaccaccgacatcaacaagaggacgaacagcacagcaccaattgaaaaggggaagcctgaaattgttgttctaacaaaactcggtggcctaagcgccaccagcaacaacgaatcgccgaatcatggcggcggggagattaccaccggagcataggcagccaggcggatcgcgggtccgtcgcttcagcggtgcgccgtgacgagcgtctcgatgaagcgcaggccatcgaatcgcggcgcgaaccgctgcccgcggcgaccgccgctatggctgttgtccctcgacgccgacgaggatccctgtggtgaaaaacaggcgcgaacggtaccaattagccaaccctgcttctatttccccccgatctttacttggaatgtaaatcgaggcggaatcgttatccctcctaaaaagaaaaaaaaaaaaaaaaagacaggggaggccggagggggacccaggaatcctcgatccgtgggagacgcacctcagggacctcgtcgtcgtggtgctgccgggagagcaccagcccgtcgcacctgccgacggtcgcggcaggggccggcgacggagcagaggcgtcgcagtcgcaggcgaggagctcggcgcccgacgccgccgccacggtcgccgcggaagccacggcggctgccagcccccacttcatctctcctcccccttgcggcggtcggcggcggctggcagactcccaggcgtgtggtcggcggctggtccacgccggcctcacgtcgcaggtcgaggtgtgaacacgcggggagcgcttgcttgctggcgacc

SEQ ID NO: 11922 - DNA, 219 bp, Zea mays
  Clone ID: MRT4577_11086C.1
ctcgcagacatctcacatgatggacatgtgcgtcctactccattgtaagaccatgagctgctgccatatgtaccgagtgtgaaagcccgctaaggactcgcatgctgctgagaatcagctgagccaccaactggaaattcgattcggtggatttcgctgcgccgggttgacggagcggatccagtacatggactctcacgttgtgcttgtgggccacct

SEQ ID NO: 11923 - DNA, 766 bp, Zea mays
  unsure (1)..(766): unsure at all n locations
  Clone ID: MRT4577_110870C.1
gnccgcttttttttttttttttctagaaatagagtagcgtttgctcaaatcgacatgccgggtataatcttaatccttccctctcgcacaaacacaaacaagctaaaaaaggagaatgaatggtcacggaccaccgacatcaacaagaggacgaacagcacagcaccaaatgaaaaggggaagcctgaaattgttgttctaacaaaactcggtggcctaagcgccaccagcaacaacgaatcgccgaatcatggcggcggggagattaccaccggagcataggcagccaggcggatcgcgggtccgtcgcttcagcggtgcgccgtgacgagcgtctcgatgaagcgcaggccatcgaatcgcggcgcgaaccgctccccgcggcgaccgccgctatggctgttgtctctcgacgccgacgaggatccctcagggacctcgtcgtcgtggtgctgccgggagagcaccagcccgtcgcacctgccgacggtcgcggcaggggccggcgacggagcagaggcgtcgcagtcgcaggcgaggagctcggcgcccgacgccgccgccacggtcgccgcggaagccacggcggctgccagcccccacttcatctctcctcccccttgcggcggtcggcggcggctggcagactcccaggcgtgtggtcggcggctggtccacgccggcctcacgtcgcaggtcgaggtgtgaacacgcggggagcgcttgcttgctggcgacgggtacgggatgtaaagggttcccggcc

SEQ ID NO: 11924 - DNA, 162 bp, Zea mays
  Clone ID: MRT4577_110871C.1
gcgcccccaccattatttgggggcgtttaaaacaccatgcgtgcttaccccacacggggaagaacaacacacaaaccgacacgttttaacaagaacatactgctcaagcggacagcaggactttcccggatgagagcgccctaatgaagaaaatgaagccca

SEQ ID NO: 11925 - DNA, 728 bp, Zea mays
  unsure (1)..(728): unsure at all n locations
  Clone ID: MRT4577_110872C.1
aggccggccgggaacctggtcttccatcccgtactcgtcgccagcaagcaagcgctccccgcgtgttcacacctcgacctgcgacgtgaggccggcgtggaccagccgccgaccacacgccttggagtctgccagccgccgaccacaagcgccgccgccgaccgccgcaagggggaggagagatgaagtgggggctggcagccgccgtggcttccgcggcgaccgtggcggcggcgtcgggcgccgagctcctcgcctgcgactgcgacgcctccgctccgtcgccggcccctgccgcgaccgtcggcaggtgcgacgggctggtgctctcccggcagcaccacgacgacgttgtccctgaggtgcgtctcccgcggatcgaggattcctgggtccccctcccggcctcccctgtcttgtatggcgcgatatataatataggagggataacgattccgcctcgatttacattccaagtaaagatcggggggaaatagaagcagggttggctaattggtaccgttcgcgcctgtttttcaccacagggatcctcgtcggcgtcgagggacaacagccatagcggcggtcgccgcgggcagcggttcgcgccgcgattcgatggcctgcgcttcatcgagacgctcgtcacggcgcaccgctgaagcgacggacccgcgatccgcctggctgnctatgctccggtggtaatctccccgccgccatgattc

SEQ ID NO: 11926 - DNA, 829 bp, Zea mays
  unsure (1)..(829): unsure at all n locations
  Clone ID: MRT4577_110873C.1
aattcggcacgaggcaactgtcaataaacaatgaacctagggaggacacaattaccctgcagtgctaagggacagtgcatgggaacattctctgatatatgagaaagaaaacggacactggaagtgcaagtggtgcagtattgagggtgatcatggtttaactagattgatgtggcatcttgttggacggcagaatcgacctcagtgcccaaatataccaaaggatgttgctgaaaagatgaaggatcaaatgatgtcaaagaaggagcagaaagcgagatcaggtttgtttgacggcaatggctgttgtgaggtgttgtgctcttctaatagttcacaacttgatcagaaccatctcactgcaagaatacatgacagatgttcttcccaggcttttgaccatgctaacagtgaattaaaaggatgcaacatgttatccaatactattctttcacaacagagttccaatcctcaggtgcatcatgaggatcctcaggtgtgtcatgagcaagagaggaaggaggttgccacctcttcagaacctggctgtgagcaaggtcagaggatgcagtggcagtcgcaaaataagccaatgatggaaggacctcatgacaatggattatgtggtgacacaaaccagttggaggaacaaaaaagtggctttggaattagtgactgctggaggtatgttttggatggacaaatgcacttgcctgatgtacaggagtgtgctggaattgggacatgcatccgtgatgctcttctctatggttgtgctgaatttggcacagtacctgancaaaatggaaatggattgtgataaaacagt

SEQ ID NO: 11927 - DNA, 572 bp, Zea mays
  Clone ID: MRT4577_110874C.1
ccggccgggaaaatgtgttcatattaggaaacgtggataggaaatatggctcattaccctggtactcggaaaagtaaggaaaaactattaacctttttgtttaggttttgattcgtggacaagatctataaattcactgaaaagacgcatacgatttcttgtacaggtgatatcatgccatgtggaaagtaaatgaaatcatacaaggctgatttttgcttttgttcccatcagatctgtgatttagttttgttttcccaaacaggttatgtttggtcatgtactcatgtgaatgatatagatctgttgctctaattagttagaaacatttattttgggcatatatctttaatggcataactgtggtacgttgtgatggtttattttagctgtcgtgcctggatcatcaacatcttgttttatcttttatgagaagaatttttgttcgatttgatggatgtgttcaatattttggtcttccatgcaggaatctgatgtactaatggagtctaagggtggcaaacagtctagcagcagccgctctatgatggatgaagctccccttggctaca

SEQ ID NO: 11928 - DNA, 303 bp, Zea mays
  Clone ID: MRT4577_110875C.1
aaacaaaattccccccaaaacggggtttcgaattaaaacaaattaactttggtactggtacattcgactcgaattggatccaaaaattctcacgggatttttactggccacacaaagcaaacattgagctttggataaattagggtggggcattgcccaaccaccaccatttccagcaccccaggggaaggacttttcgaaagtcaccccttaattttgttgaaggcaactttttcgcaactttttacctactcgttaactgggttaacgcacaaattgtccttaattaaagtgtccacaaaa

SEQ ID NO: 11929 - DNA, 642 bp, Zea mays
  Clone ID: MRT4577_110876C.1
tatattcaaaatggtcgctaccagagatcgtatctccttccgtcacttatctcgaagctgtcgaacgtttccagactgccgaaaggctcaagacggagatcgagttccacctaccaagcgcgcggtacgcggcaagggcgaaggacccgacgaaccactgtgtcgaacaccctgcaagagctgctcttgcatctccccgagctgtctcatcaccgcggcatcctcgagaccgttgaagatgctatatggtcatcaagcaccgaattcccttcgtaccactccgccgctctcgagatctcaccgcccgagcgatctcatctgcactgcgaaggctgctcgcgactacactgaataaatcgtatcggtgcccgctcctgcatttcatgctgagagaatggctgaacagacaacggcatgatgagcaaacgtgttggatgactgacaaccatctatggtccgcacatcgatgccaaacatgcctcaaaccctactggccgcaactactgggctcacggacgactcatctctacctgccctcacctcgactcttagagctgatcttgaatgaggagaaagaccctgcctgtatctatgttgaccacattgtcgcgtttcagatctgctgaagttgccagaatgctg

SEQ ID NO: 11930 - DNA, 231 bp, Zea mays
  Clone ID: MRT4577_110877C.1
gggcgacccacgcgtacggtaaaccaactctccacactcatccattttcatcataacacaataactatgagcgtgggaatctaagtttattttgctctcataacagccaacgactctactatctagatgtccctgctacaccacagccaccaatcactcatacatcgaaagcaccttcaagacgacaaaaattcaccccactgtgattgaccacaacatgaagaaccttat

SEQ ID NO: 11931 - DNA, 146 bp, Zea mays
  Clone ID: MRT4577_110878C.1
cttttagaattgctaaaagccactcatatcatacacttgcactcttgggatattgagaggcccaagagtgcaagtgtatggagtcagtgcttttagaagttgctaaagctcaagcattactacgccatggtcacgtgagtgggtga

SEQ ID NO: 11932 - DNA, 499 bp, Zea mays
  Clone ID: MRT4577_110879C.1
taaaaaaaaaaaaaaaaaaaaaaaaaaaaaaaaaaaaaaaaaaaaaaaaaaaaaaaaaaaaaaaaaaaaaaaaaaaaaaaaaaaaaaaaaaaaaaaaaaaaaaaaaaaaaaaaaaaaaaaaaaaaaagggggcggcgcctttttgaggggaacccaatctttcctttcccgcgtgcttgcaaaggtaaatagtttttttttttgggggccccctaaaataaaatccccgggccgtggttttaacaacgctgggaacgggaaaaacccctggggttccccaattaaatccctttgaaaaaaatccccttttccccagttgggtaaaaacaaaaagggccccccccgatcccctttccaaaaatttccccaccctaaatggaaaatggacccccccttttaccggcccttaaagcccggggggggggggggttccccccagggggcccgttacatttgccaggcccttagcgcccggtcttttcgtttttttcccttcttt

SEQ ID NO: 11933 - DNA, 358 bp, Zea mays
  Clone ID: MRT4577_11087C.1
ggtcaacaacacaggggggaatcttatggaaaagggtgtttggttcagggggcccgggcgccagggctgccccccccgagtcacggttgggcggacagcgggggggggcccaaaaacccttcccacccttcaaaaccgaaaaaacacccggagggctcgctgggtgcggttcttccaggccccgcttccaaatcaaaaaagggggcgggggggggaatacccgggctgccccccccgtagggggcgggggccccctttcatcattggggttactgtaccaaaatgccccgttcctcttaaaggaaccaccagggtgttcctttttcccccgacttatttttgaacgaaaaaagcccac

SEQ ID NO: 11934 - DNA, 561 bp, Zea mays
  Clone ID: MRT4577_110880C.1
ccggccggggtagcaatctcaatctcaaagcacccgttgccgacgtccaagtccatcaaaccgaacctacctcccgcgatacccacgaaatccgtcatcatgtcttggctcggtgttcaacccctcaagaagttcaacgctcccttcttgaagccatactggcctttcttcgccgccggtacgtctaattgcgcagctcgctcgacgaatccgctctcccctcgagctttcccccgtgctcccgacttcgattgatgcatcgatgagatttggacagcaattaacccggatgcaggtgttgtcattgcctacggtgtcaactccgcccagaacgccatgatgaactccgccgagttcaagaacgacccccgcaaccctaacgccaaaaccggtggccactaagatattggaaatgggaaaagggatttcgtccaagccggcaagcataatcgatccgctcgaacgcgaggttagggcccacgagatggaactgtatcatagaatcgcaaaaggggcttaattgacctatacaggaaaaaaaaaaaaaaaaaacccgcggcc

SEQ ID NO: 11935 - DNA, 1036 bp, Zea mays
  Clone ID: MRT4577_110881C.1
attatcttccatcaatgaaagccatatgtgataaacttgaagaagcaagtggaaaggctcttgttgtgtcagatataaaagttgatctcgactacaggatggcatatgggcacagagcatggagaaatgtattgcatagattaagagatgcacggcttgtggagatatttgatgccgaagttgatgataaggttgtccgttgtttgcgtctactgaaaaattttgatccaaatgagtttcagccaaaaagtatagcttcaaattttaaatttgttaaaaaaggtcaggcaactgatcaaattttggaacttccattagagaactgtatatatgatatgatcagtagccaagggacaaaaggtattacacttgttgagccacagcccaaccaaacagaccctgagatggccaggtggtacggtgttcaatggggatccaacgctgacttcttgtgccagatatgcaggggcttagtggttggtagtatggtgattctggatcatggccacatagctcaggcccaaattttctgtaaaacaacactgcacaatagtaagctctgatatacactttccagcacattgggcatgcagagtttcccaagtcaaattaagtagaaatagacggcactttccagccagcccactcaacatgcaagatttctaaagtaccgccaagtggaaagaccacggcagacaagtgttgctgaataacaaatcatgatgtgaagggtcattttgaagttcctagtggaaaacagacccatgagcaaaagctccttgccttgaacgttgaaccccagaattcattgatgatcaatatatggagaagcttgaatacatatcattatgtgatagagattttgtttgcttatgtcatctgattgggatgataatttgtttttgtttatcttaaaattagtaactaatgtctaatacaacttctgattagattggcaaacatcttggactcaacaattcaaaaaacttcataaacgagtatcatccatgctaaaaaaattcaacctaacatggga

SEQ ID NO: 11936 - DNA, 821 bp, Zea mays
  Clone ID: MRT4577_110882C.1
atctacgccctccgctgctgggttcatccgctgtataaaaccctccccgcggtgtccatccatccatccatccaccctctctgcccagcagatttcatcacctctctctgccccctgctctccaccaatctgctctgcttgctcatcgtctgcaagcaaattcttcctgagagatcatacatccgccgtcggctctcgactgagtaggatgccaacagctgttcgccgagtggtggcgttcttcctgtgatcgtcatgagaagtggcgcctcgcgtattactacagattgttgatgcaagtttgccaagtgaggacagatcctcgcgcaccacaaaactagcggaatacttcagtcgaaatcaacaccatttttctcgaattccccacaaaaccaataaacatctctaggagttgagcagctcgcagcagtgaagtgatgcagggaggtccaggctacgggtacggcggctacggctacggtgccggctatgacatgaccgggtacggcaacggcggagcgtactacaccaacgaccggtaccccacgccggcaccggcgccggctgcctatgaggacccgctcgccggtcggaggcagcacgacttcccggcgccgctcaccgggctcgagttccagccgtcggatgcctgccccaagaactacgtcatctttgatcagacctacgaccggagcagggtcatgtacaacccgtcgctgcccaacaacttcggttcctccgggggctatgaccagcacggcaacaacggcggctatgatcacaactacagcggcggccacgacggcggtaaatgctcgact

SEQ ID NO: 11937 - DNA, 328 bp, Zea mays
  Clone ID: MRT4577_110883C.1
agcagtggtaacaacgcagagtacttttttttttttttttttttttttttttttgattttttttttttgcatcagaatagctattgtttataaatatagtgcgtagaccaggtcataaagaactacaatctgaaaacaaaaggttcttaaagaaagaataatatggcttataagaagatcctggaatagatagaaaatgtccatgacaaaaggcatctacacctcaaagcttcttccagctccaggaattatggaaaggctactatcataatcctgcattccagttttttagaatgtgcccgcgtactctgcgttgttaccactgctt

SEQ ID NO: 11938 - DNA, 261 bp, Zea mays
  Clone ID: MRT4577_110885C.1
cggacgcgtgggcggacgcgtgggcggacgcgtgggcgcgccaacggcgacggcggggtgaggtcatttgaccctccgctccaggtccccaacggagaaaccaatattgtccgctacctgtgttgtaaggcccacacccatcaaaagaacaatccttcaaggagagccacctctaagcgcaaccagaccctattcctcttgcgctacagctgatgaactaagcaagtgataggatactgcaactgatcgatcattcccaat

SEQ ID NO: 11939 - DNA, 613 bp, Zea mays
  Clone ID: MRT4577_110886C.1
acctaccgggacggcggtttcatggaaacctcctccgacgagggatctttctccgacccgagcgacggcgaagcccgcggcgggcgccgcggcggtgacggcagcaagagcgcgtggccgcagagttacaggcagtctatcgacatgctgagcgtggtgccgtcgccgacggtgagcatgctgatggcagcgaccccgaacctcaccagatttggcagctccttcctcaaggccgggagctccttcttcctccggaagggcgacgactcggtgctgccgctcgccaggccgctgctgccgccttcgctgtcgcagctgtcgcagtcgccgctgcggccgcagccagccatgaggcagcagtacacgggcatcctcgcccagccgccgcggcctccgggtgggcacgaggcccagttgcccgacaggccgtccagtgcgtgcctgagaccagattatatcgagcttcctccgcctgctagcaagtgcagcaggaaccaatcaatcatcaatgggttcaacgtgctgtgcggcgttgggatactcagcacatcttatggaatcaaggaagggggatggtcaagcctccttctgctccccttgttggggtggcagc

SEQ ID NO: 11940 - DNA, 466 bp, Zea mays
  Clone ID: MRT4577_110887C.1
gtccgctatcgtcgcaatttttgggttttaaagtacaatagcacagctaattttctattgagtctcacaaaccccacattggcaatggcctaacactacggccttttatagcattttaacagatagttattttaacgaattttaccaaacatgtagtatgcaaatccaccaggtacaatgtggttattgtcggtcttcaacaagcattaaggcctgcaatcgcatttgcataaaacctggaaacaacctttcaaccgcgggccttaaactctggcgaggtggcgagaaaaggtcattcttgtcgactttctccttattcttggcggcaaggattgcgtgggcggttgccttcggcagaccgacgggataccttgagcccgtagtcgtccgcgacctgctgcatgtaggctgttgacctcggtctctctgcgtgctatagggaaggtggagccgtccatgtgcgccc

SEQ ID NO: 11941 - DNA, 339 bp, Zea mays
  Clone ID: MRT4577_110888C.1
aaatattattttttctggtgatgcctttccatggcttgttttttaaagggtgacaccgctaaacccccatacactaaatcagggggcggaaagaaccactttcatttcacatgccaagttaatgtcacagacttatcttacaaataccagaaaaaaccttaaacccttacttatttgttttacccacccacgaacctgtccatctaacacactggatctaataaatgaccaaaagcggattcaacacctatttaaaaaattgtttgcacaatgaatgccacactttctctaatgataacagagagcgcctccttaaaatgggaaacgcccattgcaaac

SEQ ID NO: 11942 - DNA, 179 bp, Zea mays
  Clone ID: MRT4577_110889C.1
gcctgacatgttgacagcctcactacttcaagccttcaattggctcgacgtcggccagacgccagatgcctaggaccgacggggcgaaagatgggaggcggcaaccgaagaggcgtggtcgagctcagccagtcgggtgaggcacaatcacggcgaggcgcggtccaacgagctccggt

SEQ ID NO: 11943 - DNA, 555 bp, Zea mays
  Clone ID: MRT4577_11088C.1
aaggtagaaatatatagggagttgagcttatgtacaacaatacagcatttcacagcattgacagtgtgggtgatcacgggctatatatatgtatggagctgaaagctgaatactaacatgcatcatgtgactgtatatatatagatccacgaaagctgcttattgatccatgtgatgaactcccctgacaccaagtagtatgggacgtcgaccagattgaccgtgctgttgaccaccccatccttgacaaaagggtaggtcttgaagttctgcagggacaatgtaacggacctacttctctataatagagcactgctcatcaaaaggcaccgatgcttaaaattttttgaccttaatcttggaacggaagcctatcttaacccagttatcaactaagtggaatgtgtaaggagcaccatcctggatgtagaggagctcactaatgccaccgcatgagtgtatggccaatgaccacgatgacctgcaccttgagcgcgcacacggattactcgatggcactacccgatacctgtgtacttggtacttagcctatgc

SEQ ID NO: 11944 - DNA, 189 bp, Zea mays
  Clone ID: MRT4577_110890C.1
aggcggctcgcgagcgagctcgcacgccttgttattaattactgaccggttcctgcacgggtccgaacgatggctatagcgaggcttatcagcgagggaaatgagtacatgcataggttctccctgcgtgcaatgaggatccactcactagtcgacaccacatacaaggctgccgcatctggtgactac

SEQ ID NO: 11945 - DNA, 265 bp, Zea mays
  Clone ID: MRT4577_110891C.1
ctcacacattctcccacacttgctttagattaactacatggagacctccaaccgggagaggatgacttttgctattggggcgctcctaaaggttcttaaaaatctctggcatgaacatcaagtgctgctaagataacatatgaaggatggaactgcggacactcgatgaggctatgattcatgaatatcttgctgaaattcaggcacaccttgatgcccttgagtctttatataaatgtaactctagggacacctattcattgta

SEQ ID NO: 11946 - DNA, 1503 bp, Zea mays
  unsure (1)..(1503): unsure at all n locations
  Clone ID: MRT4577_110892C.1
cttcttgcatatatgtacacaggggcaagcctagtgcagtggtgagagctgtctcacttagtcaccagtttgcggctcgaagtagcctctctgtatttgcggagagaaggcttgcttcagtttattctttccttagaccccactcatgtgagagcctctggcactgagtcaatccctttactttctgatgcttcctcaatttttaaagaccactttctatgtacgatgtgtattccaatgattgactatcatattgttgttgatgttggtttctcattcttgtgcgtttgatgtaatacagaatgatctgttaccttctatagaattggttacaaaaatgatagaggatgttgagcttctagaagaaaaggctaaagtggccaaacatgaattgtccgttgctgggacaggcattctggcaaaagttgaggagctcagagaaatgataacttatgcgaaggaagcaaatgatatgcatgctggtgaggttttaggcgagaaagctattttaaccacagaggcacgtgagcttctatcacgacatcagaggctttcggatgagaggaataaatatctggtgataattgaagagatacaccaaattcttgctgaaagattggttgctgcacaacaagaaattgcggcagctgagaaagaaaatgctgaaaaggaggctgctgctcaggcagtactcgatgaacaggaaaaaatgatgaattctatcgtagaagaatcaagaaagctgcagaaagaagctgaggagaacctgaagctgaaggaattcttggttgagcgcggtcaaattgttgatatgctgcaaggtgagatggctgtgacatgtgaggacgtttcgttgctcaagcgagtggtggatgagcgcctaccgttgagcaagttgcagcgctcagctatgtcgagcctctcttcttcactgcattcttctcatcacaagagctggacttcctcggataaagccattggatctccagataagcacacccttgctgaacctgcaagcccagtggggaaagatctggatggcaacgagtgcaccgtggaagtgtcagatggcaacgacagtggtgaaggcattttgaagcgcgtggattccaaggaggatggcgatggatgggagctttgctgaagatgttcaggaatagcggcgttgccagaggatgctgaagcataaactaacaataagtcaataatggtgtataaacgcatactagcacggtgctaatctaatcgttttcacatgaatagggaagtctcgctggctcaccacagttgtacgtgagatgagtccaactggcaactgcagcttgatgtggtatatataaaagtgaaggtttcagctccnaaaaagaaaaaaaagatcaaaaaaaaaaaaaaaaggaaagggcggccgccctttttttttttttttttttttaaaaggataataaaggggaagaaattcaccatactttttatgggttccggggtaaccgtttaaaaatacaa

SEQ ID NO: 11947 - DNA, 441 bp, Zea mays
  Clone ID: MRT4577_110893C.1
gaaactgaaaccccgacagggaaaaacttaaaaaaaaactatatcttgggaaaaggaaacaaaggacaaaagaaacggaaaaaaactaaattccactcaacccaggggtagaagaacccacacaggatcaggaaccccgcattggcggaagaaaaaggggctttaccaaaacacgagcaaaaacacgagatttggtggtggaaaaaaacgaaaccaagggacgggtaaaaactccaaaaagggggggggtaaattcgaggcctttttttggaaataaaatcgaattctttactttaaaaaaaagggtgaaaggaagcttttctgaaaaaaccgctccaactaaaaaaaaaccccctttaattaaagccaaatttgaaccggggggtggaaagaaactcgctgctaaatttgcccaagcttggaaacatttgaaactctgcc

SEQ ID NO: 11948 - DNA, 573 bp, Zea mays
  Clone ID: MRT4577_110894C.1
gtgtaccttacattctgggagtgtagtggtcagggaagacaaaagactgctgaccgtcctttttccagatggccgtgatggtcgcacctttaccttgaaggcagaaagttctaaagacttgttcgagtggaaaacatcactggaagaagctcttgcacaagctccaaatgcagctcttgtgatggggcataatggaatatttcgcaatgacacaacagatgtgtatgaagaggctattccaaattgttggttcccttacagtttacactatcatcatgttgcagtgagtcaattggaagaatattctgaaacgagcgggcacttagtgcacaccaagcacttatggatgctaaggtggtacattcttccgttcctctggtgttaataaggtacagacaaagaaggcgcctgctcccaagattgctaaacaagagtccagtgatgatgacaccagcgacgagacatctgaatctgatgaggaacctgcaaagaagcctgctgctaaaccctaggttgcagttgcgacaaatggttcgaagaccgtcaatcaagagagcagcggcgatgaggaca

SEQ ID NO: 11949 - DNA, 459 bp, Zea mays
  Clone ID: MRT4577_110895C.1
aacgggaaaaaaaaaaagattacctgggtaaaaggtttgcataaaaaaaaaatttggggggcccatttattgaatatccccattggtgtgtgaaaggagctgctgcatctggcaaacaaatgtttaaagtctcaactaaagtattggcaaaggccttccgctgctggcggttttggaactaaactacacttcttcggggaccacgggatcttccggaagaacaaaaaaggccttcccctttcctgaaaaaggggcaacccattttttttaagcaagcaattcagattggctttttttaaacccgtcccaaaaaaaattgtccttcaacacatcaatagcttgttggaaatcaccataaccctttcatttgcatggcaaggtaaacaccaaatcctctgctatcccaaaaggatttccagctgtataaacccctggaaaaaaccaggcaccttctggggt

SEQ ID NO: 11950 - DNA, 543 bp, Zea mays
  Clone ID: MRT4577_110896C.1
atggcgggcgtcggtggcttagcgtgggggatggagctactggaagcttcccgacgtgttgctgaatggagaggctgcttgggctgtttcgcgggaccgttcaagcgcaatccgactgctagaaacttaaatgatgacgtggataccgtgagagcagctattttggactgcgttttgtcgatttttgctgcaaggactggtgctgtagacggagccaaagctagtgtggatgccggtggcgaggtagcgctggcgtttgctagagagcgtgtcgtggactcgccgcagaagagcgccatattctcaatgcaggagacgaagggttgccacgatgctgctcagacgggcggacaacgaaacgaatggatgtgggggatggagctggaggctctgcggcaccacgaagatatggggggtaggcgaggtgtggggcacaggagggcgcccacgcgcaaggaagcttcgcggcactgcgacgatggcgggcgtcggtggcttagcgtgggggatggagctactagaagcttcccgacgtgttgctga

SEQ ID NO: 11951 - DNA, 140 bp, Zea mays
  unsure (1)..(140): unsure at all n locations
  Clone ID: MRT4577_110897C.1
gcccatttgttcttgctagtggacgcattgtggtcgcagatagtagcgtttcaaacaagantgtgttcttcttggtgctggaagtcctgtctggatctgatgctcacacctgatgaagtggcattggttagggacatgcg

SEQ ID NO: 11952 - DNA, 331 bp, Zea mays
  unsure (1)..(331): unsure at all n locations
  Clone ID: MRT4577_110898C.1
gcaggnaaggaanaataatcagaccagtgtgaagccaagccagcgcgtctctctctctctctctctggtcgcttggtcggtccatcggaggatcagctcggcggtggccatggcaatggcgcagcaagcgagcctcccctgctcgactgccacaacatggagagagctcacgaacacgagctggagggacgacgactacaggcggatggtgatggcgtacctgatcgaggcggtgtacctgctggagctggagcggcaggagcgccgggacgcggcggcggtggcgcaacagtggtggaagccgttccacttccgcctggcgcacgagctg

SEQ ID NO: 11953 - DNA, 798 bp, Zea mays
  unsure (1)..(798): unsure at all n locations
  Clone ID: MRT4577_110899C.1
aacttcttcgagaaaaaccaggagcaggggcgcgtacggcagcgccgccgccgccgccatatccttctcgtcctcatccggcctccagagacccggagcccgcagatccggcaacctcgcgcctggatcttgcagctcgggccgtgctcctccctctcctccccggcatagggcgcctggtgctcgtcatccacgacgcaccggtcactcgtcttccacgccgcacggcgttaaccccgggtcaaagagacgcttcgcggctgcccccaaatcccccaccatgccccgtgctcgcaagcctcgccgtgagtggtcggacggcgtcccgcccgagcttcttggcgtcatcttcctcgacctggcctgcctcgccgaccgtgtctgcttcgctgccgtctgccgctcgtggcgctctgtggcgcgggctgttggcaccccgccggcgccgcgccagctcccgtggctccttctcccgtcccccgacaagccctccttcttcagcctccactcgggggccaaacgccgcctacgcctcccggagagcatccgcggcgcgcgcttatgtggctcccatgatggcggttgggtcgctctagcattcgagcagtggcgagggtatgcggccgtcaacctcctctctggcgcgacggttcctctccccgacaggctcaggactgcgcacccgctcgctccccaggcgaacaccgcctgcgagcaccacatggtcatccgcaccatcanccttctcgnggtcaccctcagcagagaactgccttgccgccgcgcatgtctccagcg

SEQ ID NO: 11954 - DNA, 711 bp, Zea mays
  unsure (1)..(711): unsure at all n locations
  Clone ID: MRT4577_11089C.1
aaatcaactgctgcgacggcgtgtaccgggctcntggacatctacctcgagtcgcacccagcactgtccctagaggagcgcacgacgctgtgccggtgcctcaactacgagaagctgacgctggaggcgtgcaaggacctggccaagaaccggcggatcccgccgggcgtggcggtgcaggcgctggcgtcgcagcagtgcaagctccacatcagcgagccgggccccggcgggagcgcgacggcggcagcggggaaggagcgccggcccgacccgtcctcctgctcccagtcccagacgccgaggaggagggtcgcccgccgcgccacccgcagcgtggacctcggcagaaggagcggcggcgacgacgacgagaaggagctgctgcggctgaacctgcagagaatgcagagccgggtggtggagctggagcgggcgtgcaaggagatgaagggccagatgtccaggatggccaagggcaagtccttgtccttgtccttcggctccggcgccgcctcctgccaccagaccggcggcaggggcttgcctaggctctgctgacgtgaggcatgtgcctgtaactttttgatcctttttagtttttcctccccctctctctctctctttttcatggcttgcgattttcctcttgatccctttgtaaagctaattacttggttggtggagtggagcattgcttggtcgtccttt

SEQ ID NO: 11955 - DNA, 359 bp, Zea mays
  unsure (1)..(359): unsure at all n locations
  Clone ID: MRT4577_1108C.1
gccccgaagaaggaaaggccccggcgccgncgcccaagccggccaagnccggaggcgggaagcacaagaagaagaagnggagcacgggncagcaaaaggagaagggaacaccgcggcgcncnncgaccaggccaccnacgacaggggggggggggaggngcccaagnccaagcagancaccccanccgnccnccccgagcgncgcaggagnaacggancannggcacggcgggcaaccaaggaccccgcggcanggggnaccacaaggangancncngggcacnccagccagcaggcgnacaccagggcanccaacacacgagggcngnnccgcacccggccggcgggnccccagacgg

SEQ ID NO: 11956 - DNA, 693 bp, Zea mays
  Clone ID: MRT4577_110900C.1
attcggctcgagggagagcacgggattcgtgacaagggaggccttcattgatttctgggtgaataacaatctgatgagtatggatagtgcaacccaagtgttcacaattctgaagcaacagaatcacaattacctcacaaaggaggattttaaaccgattctgaaagaccttttggacaaccatcctggtctggagtttttaaagagcacacctgaatttcaagaaagatatgctgagactgtcatatatagaatattctattgcttgaatcgaattgggagtggacatctaacacttagggagctgaagcgtggaaatctactcaacgcactcaggcatgctgatgatgaagaggacatcaataaagttttaagatacttctcatatgagcatttctatgtgatatattgcaagttctgggaactggacacagaccacgacttctttattgacaaagaaaatcttattaagtatggaaaccatgcattgacatataggattgtagatagaatcttttcagaggttcctagaaaatttaccagtaaggttgaagggaaaatgggctatgaagatttcgtccattttgtattgtctgaagaggacaaatcatcagcgccaagccaagaatattggttcacatgtatagatttggatggcaatggcatacttacacacattgaaatacaattctt

SEQ ID NO: 11957 - DNA, 507 bp, Zea mays
  Clone ID: MRT4577_110901C.1
ggagcaggggcgcgtacggcagcgccgccgccgccgccatatccttctcgtcctcatccggcctccagagacccggagcccgcagatccggcaacctcgcgcctggatcttgcagctcgggccgtgctcctccctctcctccccggcatagggcgcctggtgctcgtcatccacgacgcaccggtcactcgtcttccacgccgcacgggtaggggcgcatctagcctggtcataggggtcaaccctacctagcacccggtgcttgaacaagagtctgactccagatttatttttccggcgtgttgcagcgttaaccccgggtcaaagagacgcttcgcggctgcccccaaatcccccaccatgccccgtgctcgcaagcctcgccgtgagtggtcggacggcgtcccgcccgagcttcttggcgtcatcttcctcgacctggcctgcctcgccgaccgtgtctgcttcgctgccgtctgccgctcgtggcgctctgtggcgcgggct

SEQ ID NO: 11958 - DNA, 304 bp, Zea mays
  Clone ID: MRT4577_110902C.1
gcgacatataaagggcaattgtggtccttctatgggggcccaaatattttgcccccttttgccccccgggatttccgcgagagctgctacagggaccattttcccgcaaaggtcacaaaatgctattaatttcccttttcccccggtcccctcaccaacggggggtttggggtgggaaaaacccattctttaacccctctagatcccacaagggatcgcaaatgggatttttcccttttcacccccgtttctcccacaatttttaaacccttttccacaatttcccttgggggctttgttggga

SEQ ID NO: 11959 - DNA, 437 bp, Zea mays
  Clone ID: MRT4577_110903C.1
catccaatatcaattttttccaactatcaaactcatacgcgcagcgcagggaagggtgcagggaaggggtggaacagtgcccctcaatctggcgcagtgcgctgctttgcccttgttctgtgtatgggagctagtagagtgatgcgatgcaatgttttgtcgctactatagccactaaagccgacggaggggcgcgccgcgggcagcctaagcagtgctccatcggtgtgcagcattgttggcacgagaaacccaccaggtgtgcagagtagtagccgattgttggaattccctgtagccttcctccaagaacttgccatgcttgatcaggccacgggaagcgaaccccatgagctcagaagggtccgcatggcgctgggaccagtgtggaacagcacatcgatgaggtcgctgcactggggctggagacacgcttt

SEQ ID NO: 11960 - DNA, 431 bp, Zea mays
  unsure (1)..(431): unsure at all n locations
  Clone ID: MRT4577_110904C.1
ggaactttgggctgatttatgtgcttggaggaacggaagtaattggtgtagttctgcagtttctggtgttgtagataatctatttggtggcggtgttgtcggttccttcgtcggggaagcggtgtggtgaacgtgagggtagtccttttattacacttcgtccttggcatggtgaggagtcttcaccgctgtactactttcttaagttagcgactctgcatatgtagaagatgcggaagatggtgctcggtgagttgacgtatgttgagagtgggcatcggtggtttcgtttcgatggtcttgcagatgcggctactgtctagagtatcggttctgttgaggcttagaaggggctacccgacgtcgaaaagaaaatagcgatatcttaaagtgaatctgcanggaacgtactaaaggcgaagtagactatg

SEQ ID NO: 11961 - DNA, 315 bp, Zea mays
  Clone ID: MRT4577_110905C.1
gtaagcgctgtttggacttcactacgctttttcggaccgaggaaaatataatgtaataaaaacccctgtgcgccttgctttggtccacccaaacctattctcttttttttttgcgcaaactggaaatcacgcatcggtggcctacttgttggcaagtccacttggtgcggcacgagacgctttgttctggctcgcgcacgccaaatgaaaaaaccaatccgggttctattaaacttttttttgcccggtccgtccgggcgtattgcacgtggaaacaacccttacaggaccttcttgagggggcgtggggccgaa

SEQ ID NO: 11962 - DNA, 326 bp, Zea mays
  Clone ID: MRT4577_110906C.1
cgtctcttcttcacttatacaccagcccctgtgtgtatctaagtttctatgtcgctctctcggatccagaacaatatcgcaacagccagcaagctcgaccaaatggctcctctaggagactgcggagctgatgactacacggactctaacaacctgccggtgatctacgccgagatgctgatcgacttgttccccgacctggccgggatgtccctggccaagtccaccctgttgttcaaggaaatcagcggggccaccgccaacggggactgccacatcaccaacctctgcggatcctgcgcctacgtaggcaagttcggcgacga

SEQ ID NO: 11963 - DNA, 646 bp, Zea mays
  Clone ID: MRT4577_110907C.1
ctccgccctcaaaggagaacagaaagaagcttgtcgtgatggtaactccattctaccccgacatgctcttcatcggagggagagtggaatcgtaccccatctccgacgacgaaccaaccgtgcttggggaagagcctcctcagcgggaagctcaccgataaaggaaccgacgccgtaatgctcggcgacatcataaagccggagaacgagacccggcgcagcgtgtatcacgagatgagatctcggaggtgggagaaaccctagatgagcgagtcttcagggaaaggaggaactcccaccaacgtgatcgtcggcaggctcaagagcaagctgagcaggaggcgagacagctcccctaggatggtgcctcccctaggaaggtgcctgacatgagcaagctcatgttccacaccgctgtcatgcccgatggaatggcccttgcatgtgcggtatctcattaattatttaatatcattgcagtcactaccaactgcttcaagctcctgctgttgcaacgcgcgtggaaataataagagggcacagtaaataataattgtaataaaattaataattattacaatgataataattatctatctatctctatttaataatagagcaaattgcctttctcgatccgtcatga

SEQ ID NO: 11964 - DNA, 1263 bp, Zea mays
  Clone ID: MRT4577_110908C.1
aattcggcacgaggtactcaagtatccatccttattgagtacagtgttgatccatggactcggaaggagttgtagcagcaaaggtggcagatgagactactaaaccggcaatccaagaagacggcgccgagagcaaggccgggatgactgatctgctgatgctgaccgacaagtcgcagctgcaggcgctggcgatgctgctgcggaacaacgaggagctcatgatgagccaggcgatcaagtcggagacggagcgactgctacacgcggacgatgaagctcctcgacgattccatggcggccaggaccacgtacgagcgttcgggcggaacgaggagcctcgtcgcccgggacatggacgactacgtcgtctacggcctcaacgcgtgcttgcagaacgtccgcaactgctgcgtgcgcctggacgccatcgacaagctgcgggcgcactacgacgccctcgccgacgccgtcgccgacccggccgccaacgtcgagggcctcgccgcggaggcgtccgagtacaaggccgccatgtggcagtactgctacaaccagcggagcgcctccgcgcgggcgcactcccgcgcctactcccaggcgctcaagctggagggcatcgacttcgccgagctgggtgcggaggcaccagctccggctcgggtacggcagcaagggccgcgggcgaggagttcgattgacctggacggcgggcgcaggcggctggaggtcatcatcgcggcatcatcgttggcgtgggacgtgttgcgggctaccacggagcacgaggtggaggccatcctcaagggcagcctcaacctcctggcggggctagggggcttcgccgtggaggccgtcgtcggcgcggctgtcaccaaggcggtcgcaaacgtcggcgccggcgtctttgcttgctctctcgcgggcttcgtcgtgggcgccatagccgggctgatcttcatcggcgtcagcggcctcctcattaacctcatcatcggctcccctaggaaggtgcctgacatgagcaagctcatgttccacaccgccgtcatgcccgatggaatggcccttgcgtatgcggtatctcattaattacttattatcatcgcagtgactaccgatgcaactgcttcagatcctactgttggaacgcgtgtggaaataataaaggaataataataattattattgtaataacaataattatcatatattgataatgattatatatcaaaaaaaaaaaaaaaaaaaaactcgaggagg

SEQ ID NO: 11965 - DNA, 2145 bp, Zea mays
  Clone ID: MRT4577_110909C.1
tgaagaggtattatctagaatattccctctcttcagcggcgccgccgaggaacaacctcctcccttttaggatatcatattgtttcttgtctttattttttttttattctaccctttacatgctcttcatcggagggagagcggaatcgggccccatctccgacgacgaaccaaccgtgcttggggaagagcctcctcagcgggaagctcaccgataaaggaaccgacgccgtaatgctcggagacatcatatagccagagatcgagacccggcgcagcgtgtatcacgagatgagatctcatggtgcgcgataaaccctagatcatccattcttcagggaaaggaggaactcccaccaactatatcgttattaggctctccaccaagctgagcaggaggcgagacagcctcccctaagatggtgtcttcctgccttcctcctccacccgcgccaccctgccgcggggtgcataacttctaccgcaactatgggaagactttcagaagccaaggcggccgtaaaggagcgctcggctgagcgccggcccaacatagctacctactactcaagtatccatccttattgtaagtgctcttataagctactactagttacaagctggtttatatttaactacaagtagcaacgatttgtcttagtatatatggttcataatacatatatattggaactgagataatatatgcaggagtacagtgttgatccatggactcggaaggagttgtagcagcaaaggtggcagatgagactactaaaccggcaatccaagaagacggcgccgagagcaaggccgggatgactgatctgctgatgctgaccgacaagtcgcagctgcaggcgctggcgatgctgctgcggaacaacgaggagctcatgatgagccaggcgatcaagtcggagacggagcgcattgagtacctcaagacggtgagcgactgctacacgcggacgatgaagctcctcgacgattccatggcggccaggaccacgtacgagcgttcgggcggaatgaggagcctcgtcgcccgggacatggacgactacgtcgtctacggcctcaacgcgtgcttgcagaacgtccgcaactgctgcgtgcgcctggacgccatcgacaagctgcgggcgcactacgacgccctcgccgacgccgtcgccgacccggccgccaacgtcgagggcctcgccgcggaggcgtccgagtacaaggccgccatgtggcagtactgctacaaccagcggagcgcctccgcgcgggcgcactcccgcgcctactcccaggcgctcaagctggagggcatcgacttcgccgagctggtgcggaggcaccagctccggctcgggtacggcagcaagggcgaggagttcgaggacctggacgacacccagaagctggaggtgtacaacagcatcatcgtcgagtcggggcgggcggggctaccggtgcggatgttctcgtcgggccgctctgccggtggccctaagattgcagccacgacgtgggcggaggcagtgagcgtcttcatcatggcggcgggcaacctggcgtgggacgtgttcaccacggagcacgaggtggaggccatcctcaagggcagcctcaacctcctggcggggctaggcggctttgccgtggaggccgtcgtcggcgcggctgtcaccaaggcggtcgcaaacgtcggcgccggcgtctttgcttgctctctcgccggcttcgtcgtgggcgccatagccgggctgattttcgtcggcgtcagcggcctcctcattaacctcatcatcggctcccctaggaaggtgcctgacatgagcaagctcatgttccacaccgccgtcatgcccgatggaatggcccttgcgtatgcggtatctcattaattacttattatcatcgcagtgactaccaactgcttcagatcctactgttggaacgcgcgtggaaataagaagagagggcacaataaataataattgtaataaaattaataattattacaatgataataattatctatctatctctatttaataatagagcaaaaaaaaaaaaaaaaaaaaaaaaaaaaaaaaaaaaaaaaaaaaaaaaaaaaaaaaaaaaaaaaaaaaaaaaaaggcccctagggcc

SEQ ID NO: 11966 - DNA, 755 bp, Zea mays
  Clone ID: MRT4577_11090C.1
attatttcaatcaattcagctcatttgttttttaaaaagatatacaattcagttcatgtcgtcagttaaattcatttgttcataaagatatctaattctttgtttttagcttttgttttagtatccacatcagcccacttcttcaacgatgatgagtcaccaaacaatgccccaccattgcgatttttttaaaagcaattgattactaagatttgctatttgattgctgcttcatttgctatttgcttgtttaaaaaaaagaaacatagagttggagattttatggatatgccattttgctgatatgaacacatgtcattttgtagattattccctactggctagaattggagaagacgagctaccaccatccatgggattttcccttaaataaatgagcacactttactatttgaaatctgaatgtatattttcatgttgcatatctaataggagtgtctgccctacatttggttgcagggtctaatatgcattttgggcttcttgtgactttgtgagtcatgttggaaccgtggaagtaggatgtggactacaaggatggctagtttactggcattggcagtttagttgtcgtccttcagtcatttggtggcatgtatcatcaggctcctatcatttcttgtatatgtgcaaagacattgttatgaacgttgataatgccttttattttgaatgcttatgcaatctacaagtttctataaaaaaaaaaaaaaaaaaaattaataaaatataaa

SEQ ID NO: 11967 - DNA, 2821 bp, Zea mays
  Clone ID: MRT4577_110910C.1
attgggtccctcgaggccggccgggacgctcaacacgtggcggcagcgaagagaatggtgcgaccatttctcttctcttctcttctcttcccgggagtggtctctctctttattcctccctcacttccggccttccccttttcctccggtcgacgcgagggagcgggaggttggcctctaggcagggtggcgggcgaagatgttggacatacagaagcggcgcgtgcggctgctgctcttcatcacggccgtcctcgcgctcagcatcaccgctgagaagttcagggaacttgttggaaaggaggctgcatcaaagagtggtcaattcacattcatgaactgctttgacatgggctctggcagccttgcgtgcactgcaaaggagggtgtcaagttgtacgtcaacaacatccgaagtgcacacttggaaatggtgcggcaacgagccatggagaaagctttagctgatgctgtgacggaaggcctaacacctagtgaagcagccaaacaagctcagaagattagtgcaaaagcgactaaacttgctgctcgtcaagccaaaaggatattgggaccaataatttcttgtggttgggacttcttcgaagcaatgtactttggtggaagcatgacggaaggttttctccggggcactggcaccttgtttggaacttatatgggtggtttccatggtgaggagcgctttgggaagctgggatatcttgcaggaagccatctaggaagctggggtggaggaagaattggattgatgatttatgatatcataagcggcctgaaatttatgttccagtctatccaacctgagtatgaatcatcttcatatgctgaagatggtccagaatacgccggacatagctactcctactactcaaatccatccttattgagcttagtgtttgatccatggactcggaaggagtagcagcaaaggtggcagatgagagctagcgccttatacgaaacatagctacctactactcaagtatccatccttattgagtacagtgttgatccatggactcggaaggagttgtagcagcaaaggtggcagatgagactactaaaccggcaatccaagaagacggcgccgagagcaaggccgggatgactgatctgctgatgctgaccgacaagtcgcagctgcaggcgctggcgatgctgctgcggaacaacgaggagctcatgatgagccaggcgatcaagtcggagacggagcgcattgagtacctcaagacggtgagcgactgctacacgcggacgatgaagctcctcgacgattccatggcggccaggaccacgtacgagcgttcgggcggaatgaggagcctcgtcgcccgggacatggacgactacgtcgtctacggcctcaacgcgtgcttgcagaacgtccgcaactgctgcgtgcgcctggacgccatcgacaagctgcgggcgcactacgacgccctcgccgacgccgtcgccgacccggccgccaacgtcgagggcctcgccgcggaggcgtccgagtacaaggccgccatgtggcagtactgctacaaccagcggagcgcctccgcgcgggcgcactcccgcgcctactcccaggcgctcaagctggagggcatcgacttcgccgagctggtgcggaggcaccagctccggctcgggtacggcagcaagggcgaggagttcgaggacctggacgacacccagaagctggaggtgtacaacagcatcatcgtcgagtcggggcgggcggggctaccggtgcggatgttctcgtcgggccgctctgccggtggccctaagattgcagccacgacgtgggcggaggcggtgagcgtcttcatcatggcggcgggcaacctggcgtgggacgtgttcaccacggagcacgaggtggaggccatcctcaagggcagcctcaacctcctggcggggctagggggcttcgccgtggaggccgtcgtcggcgcggctgtcaccaaggcggtcgcaaacgtcggcgccggcgtctttgcttgctctctcgccggcttcgtcgtgggcgccatagccgggctgatcttcgtcggcgtcagcggcctcctcattaacctcatcatcggctcccctaggaaggtgcctgacatgagcaagctcatgttccacaccgccgtcatgcccgatggaatggcccttgcgtatgcggtatctcattaattacttattatcatcgcagtgactaccaactgcttcagatcctactgttggaacgcgcgtggaaataagaagggaataataataataattattattgtaataaaaaataattatcatatattgataatgattatatatcaaatatcttttctcgattcgtcgtgacaaagttacacaaaccaagaggactcaacatactatgaaacatcagaggaaaagcaggaagaatcaaaatggtttggtttgttctgaaactgcgaaccgaattgttctgtcttgtacttaggggcgaagctaggtagtagctggagtgttgcaccccctgaaaatgtgaaaacagtgctttcccctgaaatttccccatatatgtatccacaaggcaagtgtactcactaatttgctctagcttcgccacagttatactggagcaggggaacagttagctgttttattatacctttctgaatgtttagcttcattttgtatgcttacataggttaggtatgattcttctctgtaattcttgttttggctactgtgtacataaaacatatggatcaactctggagattgggcaggcagaatgcaccataaataacagcaacagtgaacgctt

SEQ ID NO: 11968 - DNA, 397 bp, Zea mays
  Clone ID: MRT4577_110911C.1
cgctctctaccgcacgagaccccaagcaccaacgcggaggcggaggcggcggcagaccatggctgtagggaagacaagagacctccacgggaaagagggtggcaagcaaaaagacggcaaccctttctctaaaatagattggtatcacatcaaggcaccgaacgagttcagtgtgcgcaacatctgcaagactctattatccatgacacaggctaccaggattgctcctgcgggcctgaagcacacgtctttaacgttcgtctagctgatcttaacggccacgaggatcaagcttacatgaaactcaggcttcgagccgaagagaagcgggcaggactgtgctgacaacacttttagggcatgaaccttaccactgatgaacgaacatccctacaga

SEQ ID NO: 11969 - DNA, 1509 bp, Zea mays
  unsure (1)..(1509): unsure at all n locations
  Clone ID: MRT4577_110912C.1
tttgatgtctcagagattgcaaacaaaacaggcactggtgagttacagagaaaggaaaatggaactgcaggaagcagaacaaaacggtggtttgtatcctctctgaatcctccacccaagaggagggaagtctcagccgtacgtagatttccacctggctgtgggaggactgctgttaccaccacagacagcggtgttttggaggtctcacctataagcacatttgctcctggtcatgggagatctggtgttaataccacaggcatacgaaatgaggggttaccggcagaagccacccctgtcaacaataatgatgccttggtggcaagttcggttttaggagagttggcttctccaacttcagcactagaggcctccaataagaaattggaaagcaagagaatagtgggtgaaggacatagcaaggctcacaataaggtccaagttcaagatgattttgccggtaccaaacaagatggtggccagcgaaatgttgttccaaaagctacgccgaggagtgtttctgatgggaagatgaaggggaaactcccagcacataaagcgaatcaggtagcacaagaagtgatggttggtaagatgaaaaataaacttgatggaagctttcaaagaagtaatcttaggacgcctttgagcaatcccattgatgcaaagacaaaagtaaagaggtcggatagtgacaagatgaatgctggagtgcatggtaatgcaggggcctctgcaggtgggaagatggaaaataagactttgagtgctaaaaaggaagtggggttcccaaatatgaacacaaagcaaaagaaggttgctcctaagttgaagggtgatgtcataggcaaggataatatgcatttgtccgccagggagctcaagcttggaaaatatgttgcaactgatcatactgaagagcctaagaagcaaataattgttcaagcattgatggctcctgacaattgcccttgggcacgaggaagaaagtcaattgctagtgctttcaagtctcttggtcctatgaacaaggcaaaggggaaggatgctagtgcttccaaacaatgttcaagaaaatgttaggcgctagccaggtgttaggctactgaccagcgtctaggaagtttaaacgtagattaagcatgcttaatcattcttttgtagattttgtgctgctgagagcaaggtcagtagtaagtactaagtaataataacacaactcttgctgttgctgcacacttgtttttgacataagttgctttcctccttggcttcttgcatccaacagcagctgatcatctatgagggatatctcaatattgtacatgcacagcgaagcttccaaacaacagggcagcatcacaaggcaaaggatcacaagaaaatatacacaaaaaaacactcacagttcatcacatgccttaatggtttaagttattccaaagaataggtctatagatcctngtcccttgtatgggagaagagttctttgatgattggtgggag

SEQ ID NO: 11970 - DNA, 1607 bp, Zea mays
  unsure (1)..(1607): unsure at all n locations
  Clone ID: MRT4577_110913C.1
ccgactctcggcaacggatatctcggctctcgcatcgatgaagaacgtagcaaaatgcgatacctggtgtgaattgcagaatcccgcgaaccatcgagtttttgaacgcaagttgcgcccgaagccttctggcggagggcacgtctgcctgggcgtcacgcaaatctatgtgtgatgggaataacgccttatacgaaacatagctacctactactcaagtatccatccttattgagtacagtgttgatccatggactcggaaggagttgtagcagcaaaggtggcagatgagactactaaaccggcaatccaagaagacggcgccgagagcaaggccgggatgactgatctgctgatgctgaccgacaagtcgcagctgcaggcgctggcgatgctgctgcggaacaacgaggagctcatgatgagccaggcgatcaagtcggagacggagcgcattgagtacctcaagacggtgagcgactgctacacgcggacgatgaagctcctcgacgattccatggcggccaggaccacgtacgagcgttcgggcggaatgaggagcctcgtcgcccgggacatggacgactacgtcgtctacggcctcaacgcgtgcttgcagaacgtccgcaactgctgcgtgcgcctggacgccatcgacaagctgcgggcgcactacgacgccctcgccgacgccgtcgccgacccggccgccaacgtcgagggcctcgccgcggaggcgtccgagtacaaggccgccatgtggcagtactgctacaaccagcggagcgcctccgcgcgggcgcactcccgcgcctactcccaggcgctcaagctggagggcatcgacttcgccgagctggtgcggaggcaccagctccggctcgggtacggcagcaagggcgaggagttcgaggacctggacgacacccagaagctggaggtgtacaacagcatcatcgtcgagtcggggcgggcggggctaccggtgcggatgttctcgtcggnccgctctgccggtggccctaagattgcagccacgacgtgggcgcaggcggtgagcgtcttcatcatggcggcgggcaacctggcgtgggacgtgttcaccacggagcacgaggtggaggccatcctcaagggcagcctcaacctcctggcggggctagggggcttcgccgtggaggccgtcgtcggcgcggctgtcaccaaggcggtcgcaaacgtcggtgccggcgtctttgcttgctctctcgcgggcttcgtcgtgggcgccatagccgggctgatcttcatcggcgtcagcggcctcctcattaacctcttcatcggctcccctaggaaggtgcctgacatgagcaagctcatgttccacaccgccgtcatgcccgatggaatggcccttgcgtatgcggtatctcattaattacttattatcatcgcagtgactaccgatgcaactgcttcagatcctactgttggaacgcgtgtggaaataataaaggaataataataattattattgtagtaaaaaaaaaaaaaaaaaaggcccctagggcctaccaaaaaaaaaaaaaaaaaaagggcggccctcgcgtagttctagatcgcga

SEQ ID NO: 11971 - DNA, 199 bp, Zea mays
  Clone ID: MRT4577_110914C.1
tttctacgggctcaatcaacaggaagcacctggatgggcttgggcgatcgggggcaggatttacggctgatcttatgtgagcaaaagaccgacaggacggatctgctaagatcatgtcttactttcatcacggtacacgtacggtctgcatggttaaaggaaacagcgtcatataacatgcgacagtagcagcatctgc

SEQ ID NO: 11972 - DNA, 216 bp, Zea mays
  Clone ID: MRT4577_110915C.1
ggcatcgtggctcgtcaagctcctcctctccaccggccgctacaccgtccggggcaccgtgcgtcatctcggtatgtccgtatgtgtgatgtatcgcggcaccgccaggcgccggtccctttttctaagagcttctcatcacgtcacagcaataaacttctctgtatctcaagtgatggcaagaatgcccatcttaagacactggaagatgccggg

SEQ ID NO: 11973 - DNA, 745 bp, Zea mays
  Clone ID: MRT4577_110916C.1
cattgggtggcataacatcaagagttgctgctcttggtttcatctattttgttgcttcagaagctcttgaacttgttgaaaatctgggaaatatcaatgacttctctggaaagacaaggctattcctagtgttgcctgtcgctgtacttgatgctacctttatcatctggatattttcatccctctctagaactttggagaagctgcaggtaaccactttctggccttactagtcccagaatatgttttctttgatggttagctaggttatggaccatgcagactgttactatgtgtagaaatgtagctagaatagtattgattgatgaataccagggtagaggggttacacatatataggcaaggatcacagggtttatagaaacacccaatcacggattgatccttgcctaatcaactcatatacccctattctggctagagtacatgggaaaggtaatcatatgtctagccctgattctagcttatcaaaactgactaacactatgtagtatggtcatgtatgattgattctaacgctggcttcatagtccattcacttacatgtttacaatccttagctagttacacattgtattactttcccagtactaaattatgactgcctgtcatgtgttttacatgttcactgctacaaagtagccttgcttttgtgcctatatcttaacgaaataactttcccccctgtcacatacccagtgctcatttttttttttgcagctgc

SEQ ID NO: 11974 - DNA, 1212 bp, Zea mays
  Clone ID: MRT4577_110917C.1
acggccgggccggcctcgcgtccaccactccacctccatccatcactggagctccccagaaaaaaaggcaccaggcaattcccgattagcatctcgaattcgcgatatgacctgcggcggcgtcagaccggatgcgggaagctagtgttccattccatctgggctttgaagtagataaggagctgactgtttatatgagttccagtgttgaaagtggcaactattaacgtgtgcataagcaaaatggatagggaacttgctagcgacatggagcttgattctgttgtcttccaagtatcctcgcctgacaacaggtatgaagcaattgcttgcagtaagggaaaaacagaactgatagcttctggtccttttgaccagttagttctgcacctggaagatgccaaaacattccaatcttgttcatcaagtggtacttttaaactgttattggctggggatggaaaagactcttcctggtttaccaaatccaccttgcagagatttttgcatatcataagttcatttgatacatcaaaatcggtcaatggagttttagacgagatgtcacagctggaggaaacaagaaagtttcatcaatcactttatgttaaggagcaacagaatgttattagtggcgctttaacaggaggtttatttggtactggtgccatagcacagcagggaaatgatgggccaaattcatcggatacgacaaagaatgaattgcttcgagcactggatttgagattaactgcactgaaggaagagatcttggtcgtattgaaccgagcagttggatccaatttatcggcaagagaaatatctgatttatctgcttttgttcagcgatttggaacatcagagtcttgttggttgatgcggtgtacgttgttgatatcggattgtaagccctctgagctcccactacagcagaattctacaactgagaaagttgacaaggatgagaatgcacataaaccttgcatcagtcctcagactaatcttcagatgcccattgccaataatgtatctccagcaaagcttgcacaaattgagcgtgagagctcaacagaaagtgatgattcctctgaatccagtgatgaaggtgaggccattgttgaaaggagccgtcctctgtaagatctgcttcacctagaagatctgcttctccaatgcggagggttcaaattgggagatcaggatcacgtcgtt

SEQ ID NO: 11975 - DNA, 378 bp, Zea mays
  unsure (1)..(378): unsure at all n locations
  Clone ID: MRT4577_110918C.1
gcagttcaccacagataacggctttgaggacgctaacattccctttggtcctgtggaagcaaatggtagaacgatactgagcattgatgatcgtttggaggatgacaggcatcagcttcccttgacggctgctgatgcagttgcaaccaatggtgtgaacccgtggaattggagagacacctctactgatggtattaatctgcacatgtcacaacacacaagttaaatcaatacctctgaatgggtggcctttaacttctcagtgcttaaaattggtataatttgaattgttgctatctcactgtgttgtgtactccctccgtttcgttttagttgtcgctggatagtgcaaaattaaaccatncagcgacaactaaa

SEQ ID NO: 11976 - DNA, 277 bp, Zea mays
  Clone ID: MRT4577_110919C.1
cggcaccgacccgtacttacttcctcgacccacccacgcgtttgttttctactcgttgagcacctaccaaggcctggtttcattcaattctggcggcatcaacaccaggaaaaacaagcctagctttcattgggatgtacacacaaaatgcaaaatatcctctgcaacacgcacgctgcatactccactgaagggaaataatagtcaatatgattggcaggagctcaatactattacaactgtatagttcatggcctccagtgctgctattcacttg

SEQ ID NO: 11977 - DNA, 947 bp, Zea mays
  unsure (1)..(947): unsure at all n locations
  Clone ID: MRT4577_11091C.1
ataccagttcctcacgctaccgccgtgaccgatcatctcccactctctcgcctgcctctccgtcgacgactggtcgtgccccgtctgcccgctcgccgccgcatcctcccctcgccagatgaaggcgctggcggttacgctggcgtacatggtgtacgacgcggcgtgctgccacctcaacggcgacacgcggctggacaacgccgtgcaccacctggtcagcatcgtcggcatcggcgcggggctcgcctaccagaggtgcgggacggagatggtggccagcatgctcgtgacggagatgtccagcccgctgctgcacctgcgggagatgctcaaggagctgggcgtgcgggacacggagctgaacctcctcgtcgacgtgctcttcgccgccaccttctccgccgcccggatgggcgtcgggccgtacctcacctacgtcaccgtgacggccgacaaccccatcctcatcaaggcgatggcgacggggctgcagctggtgagcgcctactggttcctgcggatcctcaggatggtcaggtacaagctcgccgtcgccggcaagaagaagccgctgccaccaccaacaacgccgcccaagctcgccgccgccaacaacaactgacgtaataagcgccggcgacgaacttcacgagctacgcacatttatttatgatatcgggagttggattcgatagaggccgtgctgtacatatagtacaaatacacacaccccgcctctgaagcaaatgcaatgcaattgcaatgcaagcaatttctctccactgccaaggatgtgtctgtcatctctcatcaaccaagtgtcggtgcgcgcgcgtagtagtactgtaccaaccgtacgatgctagcgcaaaaaaagaaaaggaaaaagaaaaaaaccgttcaatgaatactgttgaatgtggcagcccggccggncgcactgc

SEQ ID NO: 11978 - DNA, 526 bp, Zea mays
  Clone ID: MRT4577_110920C.1
atatatatagcatcaaatcatatcatcgtggaccaagtcatatatggtcacagcagatgcaatcggttcaagcaacatgcaggtagacacacgtacgtacatgagcacaaagactgtcgcgcgacatgcagagagagatagcctactgcagaactctggctctctgtctctgacgcacaccacacatttcctatgtgtggccgtcagctcggcctcgcttattgttggtcacccaccaccacaagctagataggtcagaatcatatgcatggtcgtcgatcgatgtgatcaggggctgcgaggggtagtacttgcaggtgccaccgatgctgcacgcgtgggcggcctagcgggactccgccgtggcctggacaaactcaggcgccgcctttttctgcggggccacgccgaagacgacggtggcctgcgcggcggtgctcctctcctgcaaggcagggtacttgttgcctcacttgcagcttgagccgcatccgcttcttgatccgcaattgcaagacatccttga

SEQ ID NO: 11979 - DNA, 287 bp, Zea mays
  Clone ID: MRT4577_110921C.1
taatcactttgcgtgcagcatcaattgggtcggaaatcgagggtttggtgaagggagatcaccctcagttacatcttacagggacgagatggacaccgccggaggcagagtattgttcgccgaactattcattcttatggtcttaaccatcttacccattctactttggcccccactgtcccataccgacacctcctataaccaccctgtcccgacccttaccctacacgagtatcagtgttctacaccatcaagcgtctggctgactcaccctttactgtgctggg

SEQ ID NO: 11980 - DNA, 830 bp, Zea mays
  unsure (1)..(830): unsure at all n locations
  Clone ID: MRT4577_110922C.1
cggccgcgtgggcggccgcgtggggcggcggcggcggcgngagagggcacaaccagaagcacggcgcgtccaagcagcagcagcatcgcaagctggagagcaacggcagcagcgtcagcgacgtgtcgctggaggaggagaacaacttcctcggcatctgcagccaggagcttctcgctcgcggcaccgagctcctcaaacgcacacggaaaggcgctctgcactggaaggtcgtatcggtgtacatcaaccggatgggcctggtgatgttgaagatgaagagccggcatgtggcggggacgatcacgaagaagaagaaaagcgtggtgatcgacgtgtgcagggacgtgccggcgtgggccgggcggcacctgctggaggacggcgagcaccggcggtacttcggcctgcggaccgcggagcaccgggtgatcgagttcgagtgcggcagccagcgggagcacgagatgtggaccaagggcgtggcgcggctgctgagcatcgccggcgagcggaggcgcctggtggcgtgacctggccctggtcctggactggacattgccctgcgtgctcgttgttcggtcgcctcgtgccgtcaccgttcgttcgtcggcgacccgcccgaccgctggggcctggggcctccatccaccgtaccgtccgtccctgtgctaggctggagcacatgcgagaggtcgaaggcaacaaagcagagcggcatgggcatttggcgggaggagagggggtatgtagctataggaggtagggttggcaggatcctggtgctgctagggcacgaggtttgaatccgtgtcggtgtgttttctttt

SEQ ID NO: 11981 - DNA, 1921 bp, Zea mays
  unsure (1)..(1921): unsure at all n locations
  Clone ID: MRT4577_110923C.1
gtttagtactcctttctgacaaggaatgccggcaggcttcggctttcattttgtcccaggctacgggttttacactaacattgtgcaagtattggctgatgagctgcacctttcttcaataatccactactacttaagaaccctttactgcagagcggccagcacgccgaaggcgcaggcataccgggcgggcaacaagacggtggggcggtggctcaaggaccggagggagaagaggaaagaggagacgcgggcgcacaacgcgcaggtccacgcggcggtgtccgtgngcggcagtggcggcggcggtggccgccgtggccgcggccacggccacggcctcggcgtccggtggcaaggacgagcgcgccgcgcgcacggacatggccgtggcgtcggccgcgacgctggtggccgcgcagtgcgtggaggcggccgaggccatgggcgccgagcgggagcacctggaggccgccgtcgggtcggccgtgagcgtccggacgccggatcagactcacatcactagtaacgccgccgccaccgcgttgagaggcgccgcgacgctgaaggcgagggctctcaaggaggtgtggaacatcgcggcggttatcccggtggagaagggcccgggcccggtcggcggaggaggccaccaacgccagaagcacggcgcgcccaagcagcagcagcagctgcaccgcaagatggatagcgacggcagcagcgtcagcgacctctcgctggaggaggagaacagcttcctcggcatctgcagccaggagctgcttgctcgcggcaccgagctcctcaaacgcgcttctaaaggcgctctgcactggaaggtcgtatcggtgtacatcaaccggatgggcctggtaaaacgaatcccttccgcttccgcatgctagctcaacttgggttatagaactttagcgtgacggtcgtgacggtgtttcgcaggtgatgctgaagatgaagagccggcatgtggcggggacgatcacgaagaagaagaaaagcgtggtgatcgacgtgtgcagggacgtgccggcgtgggccgggcggcacctgctggaggacggcgagcaccggcggtacttcggcctgcggaccgcggagcaccgggtgatcgagttcgagtgcggcagccagcgggagcacgagatgtggatcaagggcgtggcgcggctgctgagcatcgccggcgagcggaggcgcctggtggcgtgacctggccctggtcctggactggacattggcggcctgcgtgctcgttgttcggtcgcctcgtgccgtcaccgttcgttcgtcggcgacccgcccgagctgggccctggggcctccatccaccgtaccgtccgtcgctgtgctaggctggagcacatgcgagaggtggaaggcaacagagcagagcggcatgggcatttggcgggaggagaggggtatgtagctataggaggtagggttggcaggatcctggtgctgctagggcacgaggtttgaatccgtgtcggtgtgttttcttttttttttatggggggatgcgacgccggtgcatggggcgccatgccttggggtagagatgagctctctgccctattgttctctcttctctttcactctcttgtaagttttgcttctactctttttccctttttcttccatctcgttcggggtgtggccatactgggactgtagctggtgaaagataaatgctttgttctggtagtagcagtcacgaagaagaagaaaactctgtagtgaccgtagtaaattagcaagtctgttctgttccggccggcgtggcccgggcggtgcctgcggaaggacggcgcgcaccggcggtacttctgcttgcgcacggccgagcggcgggtggtcgaatgcgagtgctccagtgtgagcacgagtcgtggaccaa

SEQ ID NO: 11982 - DNA, 479 bp, Zea mays
  unsure (1)..(479): unsure at all n locations
  Clone ID: MRT4577_110924C.1
ttttttttttttttttttttttttttttttttttttttttttttttttttttttttttttttttttttaaaaaaccgncaattttatttgggacttgaaaaaaaaaaataaaaaattggggagggaagttaaaattaaataaaaaaggaaaagtaaaaaacaaattcgtttttttttgttaccaaaggctaataataataaaagggcattaaaatgaaaattccaagttttttccaaaaaaaagggaaataaaaagtttaacatttattatatttctggtaaaagcttttcaatttattaatttcaaaaaaaaacctaatggcttaatttcaaaaaaaaaaaaaataaacgaaagattaagcaacttatggggggccaaataaagtcaatttattttttaacattaagagaaaaccattttgcttgtaaaaaaaggcattttttggacaaaagattattttgaactcggttagggactt

SEQ ID NO: 11983 - DNA, 149 bp, Zea mays
  Clone ID: MRT4577_110925C.1
tgtagcatgcatcggtcagaccgagaacaaaaatggacacagtctgcctaggtcacctcaccttgcctgtatgtctgaccgtctccagagctgttcttgcccggacacggagtcgactgaagatggcacgtatatccggccgactcctc

SEQ ID NO: 11984 - DNA, 255 bp, Zea mays
  unsure (1)..(255): unsure at all n locations
  Clone ID: MRT4577_110926C.1
ttttcaaaagacgcttgacggggtcaatggttttcggagtatantttggacagcaacttcacaccaatttatatggggctagatgcagctgcttctatatatttaatgtggcacaaaataaattaattttctatatctacaatgctttgttattatggtatgattttttcctttttcatttctatttctatatgtgatatatttatgttgtagatgtagtcaaatacaatttactctccacatatacattttttt

SEQ ID NO: 11985 - DNA, 331 bp, Zea mays
  Clone ID: MRT4577_110927C.1
atgctacatatacagaggcacacagttttttagcactggaaccatcgtaaccacgatgttttccatgattatgctccttgttgtgcttgtaggcgttgctgagagcgcaacatatgctcaaagtttacaagagcgcatagttgctcttagtgccatattcctacaattaatgatagctgttgcttgaaggggctcagctcatccagcctatcgggtctaccaggtacaactagcgcgtgacatacgtgtattacaacagccaaaacaataatcggcactacatttggtggcacatttgaacctacacatcatggcaccgcaactgcaacaa

SEQ ID NO: 11986 - DNA, 1175 bp, Zea mays
  Clone ID: MRT4577_110928C.1
aagcatcaagcaaggcaatcagtagcaggcttgcagctacctcctcttcttgcttcccgtcgacttcctcttcctcccccgtcgccgatcgaggacgaagatggggaggagcctgctcccgctggcgctgctcgtcgtcctctccgccgccgcggccgccccccagctcgtcggagcagcagggcgagaccattccctaggaatcatccagaaagacatcatacagacggtcaacaaccaccccaacgccggatggacggctggatacaacccctacctcgcgaattacactattgagcaatttaagcatatgctgggagtgaagccaacgcctccaggtttacgggctcgtgttcgcaccaaaactcattcaagatccgagcagctcccaaaggtgttcgatgccaggtcgaaatggtccggctgcagcacaattgggaaaatacttgatcaaggtcactgtggttcctgctgggcttttggtgccgtggagtgtctgcaagatcgtttctgcatccatcacaacatgaacattacgctttctgccaatgacctagtggcttgctgtgggtttatgtgcggcgatggttgtgatggaggatatcctatcagcgcatggcaatacttcgtccagaacggtgttgttactgacgagtgcgatccatactttgatcaggtcggctgcaagcatcctggatgcgaacctgcttatcctacacctgtgtgtgaaaagaaatgcaaggagcagaaccaagtttggcaggaaaagaagcatttcagcattgatgcgtacagaataaattctgatccaaatgaatagagcaatttgccgatggtctaccaaaaaaaaaaaaaaaaaaaaaaaaaaaaaaaaaaaaaaaaaaaaaaaaaaaaaaaaaaaaaaaaaaaaaaaaaaaaaaaaaaaaaaaaaaaaaaaaaaaaaaaaaaaaaaaaaaggggggggccgttttaaaggacccaagtttacatccgggggcttgcaacgtaatagtttttttttggggcccccaaaattaatttcctgggccggggtttaaaaagggggggaggggaaaaaccttggggttcccaaatttaatggctttgaaaaaaatccccttttccccagttggggaaaaacaaaaaaggccccacccgatcccctttccaaaaag

SEQ ID NO: 11987 - DNA, 167 bp, Zea mays
  unsure (1)..(167): unsure at all n locations
  Clone ID: MRT4577_110929C.1
tccgataccttttccatgtgtatgcactccctcttcagagaataatttccaatcntcctctgggcgtttggtntgcccgtccgtnttgtgtgttttttcgttgctgttgccgcgcgttttctccgtctgcgctggggttgccctggcgcttccctcctgtggtcgcc

SEQ ID NO: 11988 - DNA, 1321 bp, Zea mays
  Clone ID: MRT4577_11092C.1
acccgaggcctcggccctatattaactccacagcatccatgggtccgtcagccggtcggtgtctgtatacctgtcactcacgctaccgccgtgaccgatcatctctcactctctcgtcagatcctctcggctagctagctagctaggacagaggagggaggggaaggcgctggctatggcgactgcggcggcggcggcggccatggaggagccggacgtcgtcaacggccgcgacgtggtgagctgggtggcgtccggggtggtgctgtggtcgaccgccttcttgctggtgcgggcgctgttccccaagcgctcctacgacttctgcaaccgcgccgtctccaccatgcacgccgtcgccgccgtgtgcctcgcctgcctctccgtcgacgactggtcgtgccccgtctgcccgctcgccgccgcatcctcccctcgccagatgaaggcgctggcggttacgctggcgtacatggtgtacgacgcggcgtgctgccacctcaacggcgacacgcggctggacaacgccgtgcaccacctggtcagcatcgtcggcatcggcgcggggctcgcctaccagaggtgcgggacggagatggtggccagcatgctcgtgacggagatgtccagcccgctgctgcacctgcgggagatgctcaaggagctgggcgtgcgggacacggagctgaacctcctcgtcgacgtgctcttcgccgccaccttctccgccgcccggatgggcgtcgggccgtacctcacctacgtcaccgtgacggccgacaaccccatcctcatcaaggcgatggcgacggggctgcagctggtgagcgcctactggttcctgcggatcctccggatggtcaggtacaagctcgccggcaagaagaagccgacgccggccaagctcgccgccgccgccgccaactgacgtaataagcgccggcgacgaccttcacgagctacgcacatttatgataccgggagttggattcgacagaggccgtgctgtacatatagtacaaatacacacacacgccccgcctctgaagcaatgcaatgcaatgcaatgcaatttctccactgccaaggatgtgtctgtcatctctcatcaaccaagtgtcggtgcgtaccaactgtacgcgcgttgctagcgcaaaaagaaaagaaaaaaaagaaagaaaaaaatcgttcaaaaagtcctgttgaatgtggcggcactttaactgcaaactgctgtgagtgcgccaaaacgattgatggtgatgaatgatgatgatgatgtgcagcactgtgaccacgtcaacctttcacccgttcaatt

SEQ ID NO: 11989 - DNA, 668 bp, Zea mays
  Clone ID: MRT4577_110930C.1
gtccggaacgcattgctccgatctcgatggcaattctctgcgaactgtctccggctccctgcttcgcatcgtcgccgatgtcaagagctggaaacccaaaagcggacgctccgtctatggccgctcgcgcattctaccccgcacccgcgatctcatcgaggtatgttaatcgcgcagccctccctcagtgatatactatgaacctcagcgctgatttgcagactggaatgacgagcactgcggcctaccgtgctagcacacaacggcgccgccgccggagctcctctcagcacataaagggcttgctagtagatgagggattggaagaggtgcacgttaatatgatccaaagaaacgctgcgcctggggcatgaagctgtactcccgcaccgctgatatcaactgcgattaacggcgtgatggcctgcctttgctccctgcatatggaagaagatcggtagctatagcttgacgttgccatacgacgcattcactggacatatacgctacgacagatgatacatgctcatagcatctggattccatctgtatggtgcaagtaaatatcaagagagtgttaacggtcactacagagaatgcatcctgtatgcgggctgatgtgacatcccacgacctagtgcttcgagctagctccatcgatctgatat

SEQ ID NO: 11990 - DNA, 399 bp, Zea mays
  Clone ID: MRT4577_110931C.1
tttgtttttttttcccttggtttttgcttttttttcactcccaccgcttgagggcgggggcataccttaacagcctcggccggcttccaacaaaaccccctgggcgacccaggccggcccgagacccgcacgcaacgggccaaacagagagccagaaagggtgccaggcccaaggaagggacaacccgggcgaccttgacggcccccagctcgccctatagagggacgtacaaagggcgccacccggccggcgttccacaaagccctgacggggggaacccaggcggcacccaacggaaccgccgggggcaccggggccaccaccacgggacccgttcagcgagaggcccgcgaccagcggccggacaaacagtggcccaaccaggaggggcaaccggg

SEQ ID NO: 11991 - DNA, 299 bp, Zea mays
  Clone ID: MRT4577_110932C.1
agcattcactatattgaccataatgcagccgtcgaacggcctaaaccgacggctctgggaagacgtcaggagcgacttatggctacatcgtatgtaagtgcctactgaactatgcacttgaacttgactgctcacaccttacatgcttcatagaggcatgtaccattttgttgtgatgagtattgcttctatcaatgatagcgctaatatgcaagccctcaactctgcatccatatatgctcttactggctattgtggttagctgcatactgagatgactatagatggcataacagtca

SEQ ID NO: 11992 - DNA, 309 bp, Zea mays
  unsure (1)..(309): unsure at all n locations
  Clone ID: MRT4577_110933C.1
ctcagccttgctggctattagctgcaaaagcttaggaattaacctgccataatatatatacatatatcgatcgagcaacgcagccaaattgagttctctcatcatcaaaatcatcattttctttcttctttcatgttttccacaattccactctatttcatgttattttgtcaattgttattaggctgttctgcatgataattaatgaaaaaaacactatgtatgtatgtacttatccgagaaganaaagcgaggctgagattcagttatgttgatacaagattgagacaatacattggcttctctttc

SEQ ID NO: 11993 - DNA, 2024 bp, Zea mays
  Clone ID: MRT4577_110934C.1
gcgactactagaaacgtcagacagtccaccatacgcccgccgcgcaccagatccagcggacgaccaaacaccaacataagctaacctacgcttatcgaggcacgccgtacgacgatccacgcccccagcgcgataacacagacgctccccgcgtacgctcccgctcgacgtgcccacgaccgtcgtcctcaggcaccgctttgccgtccgccatatggcacctgctcccggcacacctgccgaagcggcttcaacacactccacaaacccagctcagccagcgcgcatgacgcaacgcacacaacaccgtctcccagtatgacgtccttcagcgacaacgtcacgtgcgatcctcactctcgaaaaatcgcgatcaacgcgtagacaccccccacgcacacacagccaccgagatgagtaacccctgcggtgaccaccaattcttgatgaacatccgtacaaaccacacccggtcgacacataatcgctaccattctaacttagctaccacctgccgcacacgtaacaatctctcgggatctgctgaccgacataactccctcaactccctcctcacagcccccatctatcattggacacaactaaaatcaccacacgtgggtccacacatcgctcgccacgcccacacctacccaccactcgatcctaccggctcccacgttccggtctcgccccaatcggccgggccgctacgctccatggcgctcgacctcctccggccaggcgtccccggcatgcagccggtcggcgacctccgcactgccaagtccgcgatcctgttcggggtggtcaacggcctcttcttgccgccgttgctggagccctgcctctgcaccgccagcgccctgtgcgacggcggcggcggcggcggcggcggcgaccacgcggagcagaggtactaccagctcgcgaactgcgtgctcaccatgctcggcgtcgccctcctgttcgtggacatggcgctgtcgcgggcggtccatcaggcctcgccgctgtggccgcccacgctcagagcgacggtgtggctcaccaagaccttgacctgcggcacgctccaattcggcgtcaacctcgtgtacttctgcctcaagatgctgtgcgctaggctcttgctcgttttcgcctgacttcgttcgccattgttttcactaggaagggacctagatccaccttatacgattctttttttttcttttcgcctaaattgaacctgtgctgtgtgtactcgttatggagttctgaaatcgggtgctcaaataaatctatctatgataacgaagcgcactgtgtgagccttctcgttcctaacgatagtatagtgtgagtactcgagaatcacgagcactgataaaatacagtttttttttctcttcttgtgcagtaaagaaatggcaaaagcgagaggaatcaactgtggcattgagcaccgcaggtaacggaattgacatggttaacgagatagtgccagccaggtatgtccaaatgcactcccatagtcccatgacaattcacaacaagtgatcagactcgctagaaaattgagcgtgcgccgattttgggggcaatcaccgggaaataaaccgtctgacagtgctatctacgaaggtcatcttcacctcacacgacgacggtggctccctgaggctgcgccgcagctacggccacctgaggcatgcatggtggcgacgtgcatccaaggcgtgtgcgggggttctctcacggagcgcgacgacaatggatttgagaggtgcgcacacgacggtggatcctagaaacgtgcgcgcgaggttggctctttgaaggcgcgcgccctgaagtggcacacgttggcatctcacctcccgcgacgacgccgacttttcctatgcgcgggctacgacgacagccttctctaggcgcaagcgatggcggatcaacaaccctgtttttatgatattttgtatacatattgatgtcaacttcaatagatttttatgatataatgtcagttcatagtcttttcc

SEQ ID NO: 11994 - DNA, 392 bp, Zea mays
  Clone ID: MRT4577_110935C.1
cgcgctgttgttagcccgctaaccgcgacggttaaaaacgcgtacgggatggtcgtgttccctcctcccaccgcgcccatggctgtgcatggccccgcgcgatttcgcgtatgaccaagcatcgtttagactatacggctgctgcccgattaggttaaaccctgttggtcaccgccgggggcgatccgacccggcagtagccgcagcatcctacgaggcgcgtggtggagtcgcagttatcgtcgtgtgagggctgggccaattggatgctccacggagcggtcgaggggacctagttgtgttgaatacggaccctacgggaggacgtgatgccgggggtggcgagagcatcggtatcggtgttctggcctcgcctgctgcactagagcgcg

SEQ ID NO: 11995 - DNA, 242 bp, Zea mays
  Clone ID: MRT4577_110936C.1
atcaaatacaaagcatggaaatgccaacagagtccggtgaatgatataagcctctgattgtactaacatactagtgccaactcaactagaagaattgggagtacgactggggacctatgatcttcctggattgggggaaagtgatccacacatatgccggaatctcaatgcttctgcactggacaagctatatctggctaatgctttcaatagtgcagagaagtgatgggtggggggctatt

SEQ ID NO: 11996 - DNA, 465 bp, Zea mays
  Clone ID: MRT4577_110937C.1
atgtcggaaggatccgctaagagggagatcgaaacgggcacaagccacgggaaggctccatcaaaggagtccagcgccaaaggaagggaggaatcacctcccctcatcaagccgcatcggagtggcgacaagaagaaaaagatgaagaaagtggtctactacgagaccgactcttcgtcgccctccacctctggctccgatgtcgcgtccgtcacttctaagcgccatgagtgcaagaagtttagtaagatccccttacgctatccacgcatttctaaacgcgctcctttactttctgtcccattaggcaaaccaccggttttttatggtgaagattattgtacgtggagtgataaaatgaggcatcacctaatgtcacacccggttttggaaggtccttacggagaggcactcaggaaacagcctgagccccctaaagtaatcataagaacctcatcgggataa

SEQ ID NO: 11997 - DNA, 385 bp, Zea mays
  unsure (1)..(385): unsure at all n locations
  Clone ID: MRT4577_110938C.1
tagnacgcgagcggtcgccctttttttttttttttctaacaaaactgagttctattttacaaaaattcatcaaaattataggactctgtcagatattgttaacattttatttcctaaataatatgatataggactcagttttgttagaaaaaaaaaaaaaaaaaaaaaaaaaaaggagagagggagaaaaaaaaaaaaaaaaaaaaaaaaaaaaaaaaaaaaaggaaaaaaaaaaacaaacaaaaaaaatcctaaagtgaaaaagttataaaaaatagaaggggggtttttttaaaaatggccaggtgttttaaaacctcaggcagtggggaaaaccctgttttttggggcgcctccattcctttttgcggcggtggcccccttt

SEQ ID NO: 11998 - DNA, 2401 bp, Zea mays
  unsure (1)..(2401): unsure at all n locations
  Clone ID: MRT4577_110939C.1
ggttcatgttgatgtcactgagacaagcgaggtacgacggagtccagtgatttgaaaaaaggtttggttaatgctattcaagacctatatgatgttgttcatcatgaagcgttttcagttgatatgagtggccacattgaagactgggatcaaattaatttagcaagggctgaaggtcacctcttcaataaactcaagtggccaaatgatcccaaattgaaagacttgatcaagagattgtattcacttctgacaattaaagaatcttctgcaactatccctaaaaatttagaagcaaggcgaagtcttcagttcttttacgacctcactgttcatggaaatgcctgttgcacggcctgtttcggaaatggtctcctttagtgtgtttactccatattactctgagattgtactctacaacatggctgaacttcagaagaaaaacgaagatggtacaactacactgttttatctccagaagatttacccagttaccagtggtagatggttatttctgcagttgcagtacatcttgatcatgtaacttaagatctagcgctacagcctacaggtccttgctactagagttacaacatggctgttagacagagctggacgacgcatccttctcagttctcattgtatgttcaagtttctttatctaggattcgagtgagaagatgataaaactttattggataacatttcataggattctaactcgtactacatcttaacaatgatctccctttgttggtattgtgtctttcgtcattaccttctcgtttggtatgggtgccattccatggctcatgatgtctgaggaggatgttcgtggccgcacaacggcaagagacaggtacacaggacgcctaggcggcggtgacgcggggaggccgcgaaggacgccacacgggggctgcggcacgagctcgacgccgagcgggcctccgtggagacagtagccagatctggccattgagtgccccgacgccgctgcttactcatccatcgccgcggaaggagagaaagggagaatcggttagaagaaagaagagtccgaaagctaattttgttttaccagtggagacacggagattggaggacagaagggcgcagcacaggactacagcgaggtgggaaggccagatcaagcaggagacaacaagaggatgtgataaatggtgatctctgcgagcagtatccctccctcccagctgatatgtagaggaagattgctgatcatctggatagaacttcgacgcctgcagcactgcttggtgaggattgccaaggaggaagactagaacagacaagagcagcgctaatcagtgacagagcatgatgccatccagatgggacaagataaggcatgttatggtgttctctggtttctcatcgagaatagctctttctctttcgtcaagggtttcaccaatggcttgtaacaactggatgtaaaacattttttgttttttaatcgatgtagtgtgtttttgcattacagtccattgtggctatgggggcggcacatgtagtgtgtagtcatcgtgaatttaatagtaactagctctgcagttgtgattggtttatgaatgtgtttggttggacctatcaattggatgtttgttggctacatcacatattcttttaagtttactttgtgtggtcgttgatgttgtatttatgccaaaaaaaaaaaaaaaaaaaaaaaaaaaaaaaaaaaaaaaaaaaaaaaaactcgaggagagggacccttctcgtttggtatgggtgccattccatggctcatgatgtctgagatcctncccggttagcatcaagagccttggcggaagcatcgcaacactggccaactggctgacatccttcgccataacaatgacgacgaacttgatgctcacgtggagtgttggaggcacttttctctcgtacatggttgtgagcgccttcaccatcgtttttgttgtcctttgggtgccggagacgaaggggagaactctagaggagatacaattttcgtttcgctgagcattcagcgtcagctgcaatggttgcccgagtgtttatcttagggcatgtttagatcccatgagctaaagcaaaaaggagctaaaatttagtcactttataaactaaagtttcaatcaggaggagctaaaagtgaataaaatagcaaaagaatattcttttagtcacttttatcttctaaagaggagctagaatttagtcccttgttttagcttatactccttccatcctaaaaatataggtctttctaacttttcttttttctgttcatattcattcgaatgatgatgcatacaaactattaattaatgaatgtatcaaacaaattatggacctgtttagttcaaaaaaaaaaaaaaaaaaagcggcc

SEQ ID NO: 11999 - DNA, 169 bp, Zea mays
  Clone ID: MRT4577_11093C.1
tactacacccttacgtgagtcgtattaaacgtcggcgcctgcgtgagcggcgtgatcagccatgttctgagggctcgtgtagtgggtggctcagctgcgggggtccaccgtggggtgcctcgtgctccgcttctcgacgggcgggcaggctacgggcacctgctggctg

SEQ ID NO: 12000 - DNA, 287 bp, Zea mays
  Clone ID: MRT4577_110940C.1
caattcccgtttcgaccgactcgtactttcaattctcaccatccatatccctttatatcgcatcatccatctaatacaatatcaaacgtgcagtgcactattgaagctgtgttaataatacactcttctcacatcctaaacctcacccctaaccatttctcattaccaatcactactaaatatcactatctgataaagacttataatcacattattatacaaacatttcattcttctcttcttaacatgcatgcatacatgccactactctatactaccatttatat

SEQ ID NO: 12001 - DNA, 840 bp, Zea mays
  unsure (1)..(840): unsure at all n locations
  Clone ID: MRT4577_110941C.1
acttttaaggaagggtatcttaacacatatatatgcgcccatgtccttcttgcttactttacattagttatgggagctctaatgttcatgttgatgtcactgagacaagcgaggtacgacggagtccagtgatttgaaaaaaggtttggttaatgctattcaagacctatatgatgttgttcatcatgaagcgttttcagttgatatgagtggccacattgaagactgggatcaaattaatttagcaagggctgaaggtcacctcttcaataaactcaagtggccaaatgatcccaaattgaaagacttgatcaagagattgtattcacttctgacaattaaagaatcttctgcaactatccctaaaaatttagaagcaaggcgaagtcttcagttcttttacgacctcactgttcatggaaatgcctgttgcacggcctgtttcggaaatggtctcctttagtgtgtttactccatattactctgagattgtactctacaacatggctgaacttcagaagaaaaacgaagatggtacaactacactgttttatctccagaagatttacccaggtctgggctttacttctttccgttttccatgagcgctgaaaggaatacctggattctctatagtgtaaccttctcttgtgatccttcagttatatttgttttcctgttgtgatgtgtatgtctaacaaacttgngaagtaaaatttcttccaaaacggtcgtgtttctcccccaatacttgtgcatgtctncgccatanatttagggcattgncattgctagatggttatttctgcagtgctacactgacaanacaacaacatacct

SEQ ID NO: 12002 - DNA, 540 bp, Zea mays
  unsure (1)..(540): unsure at all n locations
  Clone ID: MRT4577_110942C.1
gggtntaagatctattgatgatcgtcccacttactcctaggatgcacagacttaatggatcctggactaacatatttatcacgggttttgggttgtcttccttcccagttttgttttaccagtggagacacggagattggaggacagaagggcgcagcacaggactacagcgaggtgggaaggccagatcaagcaggagacaacaagaggatgtgataaatggtgatctctgcgagcagtatccctccctcccagctgatatgtagaggaagattgctgatcatctggatagaacttcgacgcctgcagcactgcttggtgaggattgccaaggaggaagactagaacagacaagagcagcgctaatcagtgacagagcatgatgccatccagatgggacaagataaggcatgttatggtgttctctggtttctcatcgagaatagctctttctctttcgtcaagggtttcaccaatggcttgtaacaactggatgtaaaacttttttgttttttaatcgatgtagtgtgtttttgcatt

SEQ ID NO: 12003 - DNA, 258 bp, Zea mays
  Clone ID: MRT4577_110943C.1
gggccgggccacgcgtccaaagcaaatctagccaccaaggcaccaaccaagagccatggcatccccgttctgcgccgctgccgccgcttgccgcctcgccgtccccgccccgtctcctcccgccgcacgggcgcctaagccccgacgcgggctgctggcggtgcgcgcggaagccggcggtgggataaaaccggccatccggaaggacggggggaaagtggttgacaacgttctcaacggcggagctcgccaagccgc

SEQ ID NO: 12004 - DNA, 165 bp, Zea mays
  Clone ID: MRT4577_110944C.1
atggtccagatcgtcgagcaccgcgccatgacttctgaagacttcctgggctgctgctgtgcacgctgcacggcagcacacgcctacgcagacgtcccaaactccgccaagagcagctcctggggcgttgtctgcggccagggagttgctacgccaccctcctag

SEQ ID NO: 12005 - DNA, 981 bp, Zea mays
  Clone ID: MRT4577_110945C.1
tctttaaaaactaatatggtacaactacagtggtttatctccagaagagggaggcagataccagtggtagatggttatttctgcagttgcagtacatcttgatcatgtaacttaagatctagcgctacagcctacatgtaagtgtactatcttgctgatcgatcagacaacagcatcacctaacattcctgtgatttttattcagttaccagtgctgatttcaaaagtcaacaatgtcatatacccgaggtcgggtctaagaatggaggtagtacaatgtatttgtaatttttattgagccgatcactgcatttcgtcaggtccttgctactagagttacaacatggctgttagacagagctggacgacgcatccttctcagttctcattgtaactgtcgcttccctgtgaaataactagcttgcatgctttctttgtaactattgacttaacactgtcttcaaatgacatatttctacctctggcatgactctatgccttcttgccgtttctgtggtatttttctcaaggtatgttcaagtttctttatctaggattcgagtgagaagatgataaaactttattggataacatttcataggattctaactcgtactacatcttaacaatgatctccctttgttggtattgtgctcattgtctgcctgaactccccactgcccccatttcttctccgccatgatgcgtgggcataggaggatgttcgtggccgcacaacggcaagagacaggtacacaggacgcctaggcggcggtgacgcggggaggccgcgaaggacgccacacgggggctgcggcacgagctcgacgccgagcgggcctccgtggagacagtagccagatctggccattgagtgccccgacgccgctgcttactcatccatcgccgcggaaggagagaaagggagaatcggttagaagaaagaagagtccgaaagctaaatttgttttaccagtggag

SEQ ID NO: 12006 - DNA, 681 bp, Zea mays
  Clone ID: MRT4577_110946C.1
aacaagtgaccgattgcacttccgccgttcacgtctcacggccgatcgacgcgactcccgtctgctcaccgccagagatttcggcgatcggcgatgtctgcttcgtagacgcggcggcggccggtcgtgccctcctcctgccaactgaccgcggatgcgctgtataaggtgctcctccgcctctaggacaaggaccgctgccggttccgcagcatctgccccgactggtgcgccctcgcctcctacccgatcttcggcatgggggacaagatccgccaccagaccttgcccccgtgtcttcgtcacggtctacggggacgactgatgaactgcattgtttatatggatgtcaaattagtcacgaaaccgcttgaaaaggattccaagttgcgcatacatgtgagttatgaaaatctgctggagatgacattcggcgaatcacaagccaggaaaactcgatcattgctatttacgcgcctgtagacctctctgtgttgtacagatgctaacattactctgacgccatgtggctgctgatacagaccactcgcagccactatatgattgcctacggcgcagcgtccaagagcgattcttcgtgcattatgagcatgatctactacgatatagaatcggtgactgctgacagccgcatgtatgtgagagaatcagctttgatga

SEQ ID NO: 12007 - DNA, 186 bp, Zea mays
  Clone ID: MRT4577_110947C.1
tcgagtttttttattttttttttttttgaatcatcaagcgccccggtttcgctccattcatatacagccgcatccgaattcccaacccataaaaacaactaagacctaagaagtgctacttagaccacatgcacctaacaacttagctagagatcctttcgcacaagatttgaataaatgatgatg

SEQ ID NO: 12008 - DNA, 762 bp, Zea mays
  Clone ID: MRT4577_110948C.1
ttgggtacctcgaggccggccgggagcactgctgcatttgtttcggtgcactctgtttctctgcagtctgtacggcccagctgctgccgttgctcaggtcctgccttcctgctgcatcacttggtcctcttcttcctttcgctcccccctggctagcttggttgtgtcaactgtctgcaagcttccttctcccctgctctgctctttgattgcttccactgtttcagctgttcttggcaggtttctctgctcccgccggtggcagactgcctgttgctgctacttcctaaccgttcttggttggtaggattcatctcccctgctctgtcactgtgtcaatccctgagccaaacaagcacctcctagttctgttcccccaatggtggatccaagctagttttcctttttctctggggaaaagtagagagcccaaagatgagagctttaagcagggtcggagtggggctcgccgtggtgtccgcgctgctccttctagcgctcaccgcggagctctattacatcttcgtgcacaagcgccggctgcggcgacgcgcagccgccatctccgacgcgtcgtcgtccccgtcctcgtcctcccgcgagctgctccagctcttctgcttcaagaagccgccggcgctcgcgtccacctacgccgtcccggaggccggcgacgacgccgacgccgacgacgagacggtggaggcgcagctcatgcggctgggcggcgtcgtcggtcccacgcgcctgctattcccatca

SEQ ID NO: 12009 - DNA, 283 bp, Zea mays
  Clone ID: MRT4577_110949C.1
gcgaccacggtccgggacgcgtggcgaccgtggcgtgcccctccttctcccctccccttgtccacagcccccgtagaccatggaagatgactggcttgagcatctgcatggttcttgagagttaaagctgcacgacgatggatagtggaaacagagcttctcaagaagcattcgttttcgtggtgcctttcctgacctccttggtggtcagctgaggcggaagctagaagacaaataacctaagtattcatgtgtgatggattatacgtatacattggtgaga

SEQ ID NO: 12010 - DNA, 317 bp, Zea mays
  Clone ID: MRT4577_11094C.1
cctcgaggccggccgggacgcccagagctgagcagtgagcaggcgtttcttcctcactgccgcacgcgcgcgccatggcggcgctctgctccgcctccccggccatctccgcggcgccgtccctcgggtcgcccgcgcgcgtggtcgcgtccttcctccgcctgcgcctgcgcctgcgctccgccaagcgctcctgctcccacgcgccggcgccggtgccgtcgtggcgcgcgcgaaggcgctttgcgctgcccgcgtcgaaagccgaggagtgcaccagactggagacgctgatcccggccgacaaacgaatcccc

SEQ ID NO: 12011 - DNA, 455 bp, Zea mays
  Clone ID: MRT4577_110950C.1
cgcaacaattcatttatagcagtttgtttctggagactggagtacacatgagacaaacattgtctcaccaatgtatacgtataatccatcacacatgaatacttaggttatttgtcttctagcttccgcctgacacaatcacagaactagaatgtaaaaaggggtaaagaaataaaaaggacgaggattcctaatggaatccgccattgccgtattgtgacttgccggtttgtgcgcacctcagctgaccaccaaggaggtcaggaaaggcaccacgaaaacgaatgcttcttgagaagctctgtttccactatccatcgtcgtgcagctttaactctcaagaaccatgcagatgctcaagccatgcatcttccatggtctacgggggctgtggtctgtggacaaggggaggggaggaggggcacgtctgtaccctggtgaggacggtgatgtct

SEQ ID NO: 12012 - DNA, 288 bp, Zea mays
  Clone ID: MRT4577_110951C.1
ggtaaaccacgggctggccccgggggggttcgccggaaacccctgttttggcccacctccccgggggggggggggggccaaaccccacgtcccttcccccggggggggggggtggaagggttttttggggggacccccaagaaaacgtgccctcccccaaaagggtttgggcccaacttgggttaaaaaactcgaggggtcgggggattttgcaattcacaccaggtatcgaattttgctacgttttttatcgaggcgaaagccgaaatatcccccttgggccaaatt

SEQ ID NO: 12013 - DNA, 610 bp, Zea mays
  Clone ID: MRT4577_110952C.1
ctcgaggccggccgggccgggagactcatcgtcctcaccagggtacagacgtgctcctccttctcccctccccttgtccacagcccccgtagaccatggaagatgcatggcttgagcatctgcatggttcttgagagttaaagctgcacgacgatggatagtggaaacagagcttctcaagaagcattcgttttcgtggtgcctttcctgacctccttggtggtcagctgaggtgcgcacaaaccggcaagtcacaatacggcaatggcggattccattaggagtcgtccttttttatttctttacccctttttacattctagttctgtgattgtgtcaggcggaagctagaagacaaataacctaagtattcatgtgtgatggattatatacgtatacattggtgagacaatgtttgtctcatgtgtactccagtctccagaaacaagctgctataaatgaattgttgcttatcatctgcttgtctttgcccccgctagtgtctacagattgttttctcatgcatgctaggagtaaaaaaatgagcttgtattgttgatggcatatttgtacccatgtcccttcaaattcttttaatatttgaagttgc

SEQ ID NO: 12014 - DNA, 139 bp, Zea mays
  unsure (1)..(139): unsure at all n locations
  Clone ID: MRT4577_110953C.1
atntcggcttcgagccttccttttgtatagctccttggttttcattaaggtataagnttttatcgttggtggtttggttncgccaaacttcgtaataactattagttatcatatcnnaatgatgcgaagcgatancccg

SEQ ID NO: 12015 - DNA, 355 bp, Zea mays
  Clone ID: MRT4577_110954C.1
tcggccggggcaatatgggaaagagaagaagagcttcgcatagatttttcccattttttcccaagatcttcttaaatctcgaggacaagattatttttaagggggtaggatttttaatacccactttgtaatttgttagaaataatatcaatagagagagaatttctccttatgtgagtttaacctttatgcatcatcacatgtgtacaccctaggtaaaaaaataaataataacataaaaaccactaaaatatgcatcatgctggtgtttattggtttgtgcatttgtctacattggaaatgataataaggatacatgaaataagagaattattcctaacccaatttgcactcc

SEQ ID NO: 12016 - DNA, 308 bp, Zea mays
  Clone ID: MRT4577_110955C.1
gggggtctaccccacttggtgaaaacgccttacaacaccagttttacatttaaaaatttggtccaaggggcgaatctcaagttttttaggaaaaccttttaatatattagatgagccctcccaacagcacttaagtttttccaagaattttatgccctgcaaaaaaaaccccttaattagaaaaggggattattaacccccgtttagaattttccattattattaatccatttggaaacagcaaacttaatgattcagccgccctcacattggttatttttgagggccccccaaagagcccttttccc

SEQ ID NO: 12017 - DNA, 319 bp, Zea mays
  Clone ID: MRT4577_110956C.1
cacaaccatcatcgcttgaacagcacaagaagacaccaactaaccagttccggtgtttagagctgcttggcatccgtgaaagcgatgacgaggggtgcaatggttgccgccgtcgccttggtcgccctcctcctcttccccgtcaccttcgcatttcctcgggctggccagcagcagctggagccccacttctacgaccactcgtgccctcaggcgcagaagatcgcggcgcccatcgtcggaaaggtgcacgctccaggacccccgcatggaggtctccctcctccgcctccatttccacgactgcttcgtcagggga

SEQ ID NO: 12018 - DNA, 226 bp, Zea mays
  unsure (1)..(226): unsure at all n locations
  Clone ID: MRT4577_110957C.1
gcacatgtttggggttnttagagtctttgagttggcaccagaaatggttttgcatttgggggcaggtgaaggggccgcagtagcttatactccccaagcacttcctggtgctttgcaaaggcagttgatgccatgtgacaagctcaatgagccaaaagagtacatgcctactgaccaaactgcttgggggggggggggacntgggttgcttttgtgctgcccttgc

SEQ ID NO: 12019 - DNA, 291 bp, Zea mays
  Clone ID: MRT4577_110958C.1
cttttgtgcgctgcaaataccaccggacgcgagacagcgaggcgcgagaagccaggcgcaagctccgcgccctcatcgccgagaagagctgcgcgcccatgatgctccgcctggcgtggcactccgcggggacgttcgacgtgtcgtcgaggaccggcggtcccttcggtactatgaagtgcccggcggaactggctcacggacgccaacgcggggcctggaacatcgcggagcggttgctcgagcccatcaaggaggagttccccaccctattctatgccgatttctacc

SEQ ID NO: 12020 - DNA, 815 bp, Zea mays
  unsure (1)..(815): unsure at all n locations
  Clone ID: MRT4577_110959C.1
gtacgcctgcaggtatcggtccggaattcccgggtcgacccacgcgtccggaagatggtagctgtatccacggcagcaggcaatgcaatggcatccgagactgtgttgatggctctgatgaagtcaactgcaaaaacgtcaatcagtgcctgggccctggaaagttcaagtgcagaagcggggaatgcatagacatgagcaaagtatgtgaccaggaacaagactgcagagactggagtgacgagcccctgaaggaatgccatatcaacgaatgcctggtcaataatggtggctgttcccatatctgcaaagacctagttataggttatgagtgtgattgtgcagctgggtttgaactgatagataggaaaacctgtggagatattgatgaatgccaaaacccggggatctgcagtcaaatttgtatcaacttaaaaggcggttacaagtgtgaatgtagtcgtggctatcaaatggatcttgccactggcgtgtgcaaggcagtaggcaaagagccgagtctgatcttcactaatcgaagagacatcaggaagattggcctagagagaaaggaatacatccaacttgtagagcaactaaggaacacggtggctctcgatgcggacattgcagctcagaagctgttttgggctgatctcagccagaaggccatcttcagtgcctcaattgatgacaaggtttggtagacattntaaaatgatcgancatgtctataatcctgcagccattgctgntgatttgggtgtccaagaccatctactggactgatgcggcttctagactatttcagtagc

SEQ ID NO: 12021 - DNA, 664 bp, Zea mays
  unsure (1)..(664): unsure at all n locations
  Clone ID: MRT4577_11095C.1
ccggtgctcgnacgcctcgtcctcgcctcgccgcgccgccgtggcggtgcaatgggcatcgacactgcacagacactgatacgtgcaacgtcagcataccatctatctgtcttctctcgctcatgtgcaccagacagaggcaacgaactgggcctcacgaacgccacgccgccatttcccgcaagcaaagccatccaaaccgttcgctactgcctactactagtagctcgatcgtcgtcgtcatcttcgtcgtttcgctctcagttggcggttagctagcttgcatactagcatcaggtgccccttgccgagccgtacgtgtcgtcgtcgacgacgatggtggcggcgcccagcaagtgccggccgtcggcggcagcgctggtggtggcaccgccgggggccccgcggcggcggctgcggtgccggtgctgcgaggacacgctgggcgtcccgcgctgccggctgcagccgcagctgcacctgaagcagcaggcacctgcggcgacgaccgcccccgccgcggcgccgccgccgaggccccggcggatcgtgctggtgcggcacggcgagagcgagggcaacgtggacgaggccgcctacacgcgcgtcccggaccccaggatcgggctcaccgccaagggctggcgcgaggccgacgactccc

SEQ ID NO: 12022 - DNA, 430 bp, Zea mays
  unsure (1)..(430): unsure at all n locations
  Clone ID: MRT4577_110960C.1
aattctnctctatcacaactcactattatcacaacttctctctttctacacaaatgactttttctcaaagtgagcagcgccataacanacatcatcatcaactttaatgaatctaccatcttgcatccgtctgaggaggtggcgcgccacatgttctttaactccaacttgtacctgatcgtccccaatttccacacgcccatcgtctatttctatatgtccaatggcgcccccaactttttcaacggcaatgttattaaggaggcactgaccaacgcgctgatgcccttctacccaatggctgacctgctcctgctacatgacgacgctcgcctctacattgactgctacggtcacggcgtgcttttcattaatgccaacactggcgccgtcatcgacgatttctaggattttgctcccaccctttatc

SEQ ID NO: 12023 - DNA, 821 bp, Zea mays
  unsure (1)..(821): unsure at all n locations
  Clone ID: MRT4577_110961C.1
ngaaatacagaaacgggcaatcagaaagccttctcttccaagaagtgacgcgggagaggggcagagcggcgcaagccatggccatggcggagcagcagcagcagatcgagcacagccacctcgccatcagaggcctcaacctccacgtagcccaagcaggcacaggcgagctcgggacggtgctgttcctgcacggcttcccggagatatggtactcgtggcgccaccagatgctggccgtggccgccgccgggtaccgcgccatcgcgccggactggcgggggtatggcctctccgaccagccaccggagccagaggcggcggtgtaccgcgacctggaagaggatctccttgccgtcctggatgcactatccgttcccaaggcttaccttgtggcaaaggatttcggagccatgccagcttatgattttgctcttcgtcaccccaaccgcacatgcggtgttatgtgtttgggtatcccttttcttcacggtggctcctccttcactgccatgcccgaaggcttctatatactgcgttggcgggaaccaggaagagcagaggcagactttggcaggtatgacgtcaagcgagtcgtgcgcaccatctacattctcttctctagaagcgaaatcccgacagcgaaggaagatcaagaaatcatggatctcgcggacctgtcgactccccttccagagtggttcaccgaggaggatcttgcagtctacacgtccctctatgagaaatcaggtttcgtgtatccactgcagatgccatacaggtctctccataagaggcatccaatcgaagacccaaatttg

SEQ ID NO: 12024 - DNA, 320 bp, Zea mays
  Clone ID: MRT4577_110962C.1
aataattttttttttttgttaataaacattgtgtgttttttaaaatactaccaccatttttaataattatcggcagcttgtttatcacacgcaataacagcacactgggtaaaaactcacaccaccgaggaaaaaatgcatatttccgtactaaaaaaggaaaaaggcgaaataccccctcggaatgccatttcgaaagaataaatatcaaaaactaataaaattccaaggatttacaggagagaacaaaaaccttcctttaataatgtcaaccatccttttctaggtgacgttaacgggtactttggtaaccataaata

SEQ ID NO: 12025 - DNA, 518 bp, Zea mays
  Clone ID: MRT4577_110963C.1
ggtcccgggaaatttcccgggggtcgacgccacggcgttccggcccacgccgtccagccaacgcggtccgtccactcttccgacacgcttgcggcaacgcgtacgcttttgttcaggtgaagctggagccggtcaccctgtagtaccaagacgattcggggctgtggacggagagcagcctcttgggcaagggcttccgttgcatccgcatggggaacaacatccgactaaacttggacgccttccacggtgacaagggccactgggggcgtgcacaacggcaccaccgggtggctgtggaagtgggccaagggcgacaaccacagctggaagatcctgccctggggcgactaggcctacgccgagggaggcagaaatgccgtcaacgcgccctgcttcggcggcgggggcgagccctccgtccgcatctactggaaggtcgtcgaggggttcagcgccacagtccgcaacgacgccgagtgcctcgcgcccaccatcccgtgcgaggagtaccagca

SEQ ID NO: 12026 - DNA, 456 bp, Zea mays
  Clone ID: MRT4577_110964C.1
gtggctgttgccgagcgcttcctcccgtctcctcgcgattttttataaaaaggagagaagcgcaatcgtatccccagccagattcacatcgtatcgcatcgccacccacctttccctgccggattcttctcaggtagcagcagcagcttgaattcttgcggatctgcggctgcgaatcccagtctcgtatcaactcgaccaggcggaggagaagcagggggaagatgtccaaggcggcgctgacactggaggaggtgtccaagcacaacaccaaggacgactgctggctcatcatcgccggcaaggtatatgatgtgaccaagtttttggaggatcaccctgcaggtgatgatgtactgttgtcctcgactgccaaggacgcaactgatgactttgaggatgtcgggcacagcaccaccgcccgtgcgatgctggacgagtactatgtcggcgacg

SEQ ID NO: 12027 - DNA, 315 bp, Zea mays
  Clone ID: MRT4577_110965C.1
gagctctcttgtcggcggccgcccttcctttttttttgtgggttttttcaagttcttttgcgtttttatcattaaacattgctacatgtgtgatgaaattgcgggagaccacttgctatagccccttatcaagtgaaaccccacttcagtacttacctctagcgggagacattcccatccccttgtggcaacagcgggtagccaaaattttttcaagggctcaggcccaccggcggtacattaacccattgaaaaaaaaagaacctttggccggctatgtggtcaacaccaaacggcttcattgaatgggataca

SEQ ID NO: 12028 - DNA, 107 bp, Zea mays
  Clone ID: MRT4577_110966C.1
ggcggaggtcgataagctggaactgatgttccagaaagctgagtctgatctggattacattcaatacaggctggaatatgaaatcaagacttatcatcctgattcag

SEQ ID NO: 12029 - DNA, 265 bp, Zea mays
  unsure (1)..(265): unsure at all n locations
  Clone ID: MRT4577_110967C.1
ccttcgtggaaaaagcacataagtcgtatatgtgatcttttttctatgatgaaaaaagtacggcagaccagttccattaattgccaaatatagggaagttttgtagtactagtgcacttaagtttgaggtttagtcactctcataccttgtagctgctagttggcatactaacttggagacccataaacagatgatttntttttctcgaactaggcaggagagctgcattctcatttcattaagaggagaaaaaaacaagggaga

SEQ ID NO: 12030 - DNA, 2163 bp, Zea mays
  Clone ID: MRT4577_110968C.1
gaccctcgagatcgccggggcgctcgcactgcccctcgtgctgtgggtcctgttagagctagaccagctgctcgaagccggccgggctcccataccgcgtcgcagcccccatcgctctctctcgctggcgcagtgacgtgcccgtgagcttctcgtcgatccaggaaagacgtgctcctcgctctccttgtcctcggcggcaagatgggccgggggcgcggcggcgccttctcttgctcaatgctggacttgctggtcttgtcggcgctgctaccgttcgccgcctcgcagtcgccgtcctcgcttctgtcgccggctcagagcgcgtcgcggcctccgacggcgccgtccgcgagaccgtcgttcccatcgcctgcggcgccagcgccgaggctgtcacggcctccagccccgccagccgcgaaaccgtcgtctccaccgcccgcggcgccagctgggaagccgtcgccatctcccaggccggctccaacgaggtctccggcagtggcgacacccgcgccaagagcgtcgcctccaccgcctgcagcctcgccagctccaaagccaccctctcctccacctaaaacggcgccggctccaaaaccatccccgtccgtggcgccggcgccaaggccatctcctccacctgtcacaccggtaccaccagctccaaagccgccgccaccgccgccgccgccaccggctccgctgcagcctccgtcgaactccacgccgacgacgtcctccgcattgggccagctctcgcccagcttctacgcgcagtcctgcccggacgttgagctggcagtgagggacgtcgttaggtcggcctccaccctggacccctccatccccggcaagcttcttaggctggtcttccatgactgcttcgtcgagggatgcgatgcatcggtgctgatacaaggtaacggtaccgagaggacggatcctgcaaacctctcgcttggtgggttcaatgtcatcgatgcagcaaagaggttgcttgaagctgtgtgccctgcgactgtttcttgcagcgacattgtcgtcctcgccgcaagagatgctgttgtgtttactggaggaccggctgtgcctgtcgcgctgggaagacgagacggcctcgtctcgttggcatccaacgtccgaagaaacatcatcgacacgggcttctccgtggacgccatggcggccagcttcaccgccaaggggctcaccttggacgacctcgtcactctctcaggggggcacaccatcgggtcggcgcactgcaacacgttccgggagcggttccagcaggtggcgaacgggagcatgacgcccgtcgacgggtcgatgaacgccgactacgcgaacgagctgatccaggcgtgctcggcgaacggcaccgtgccggcgggcacggccgccgtgggctgcgactccggctcggcgtccgtcttcgacaacacctacttcgcgaacctgctgggcgggcggggcctgctgcgcacggacgccgcgctggtgcagaacgcgacgacgagggccaaggtggcggagttcgcgcagagccaggacggcttcttcgcgagctgggccagctcgtacgccaggctcaccagcctcggcgtgaaggtcggcgccgacggcgaggtccggcggacctgctccagcgtcaacggctgacgagggggcgggggaggctgcagaaacttatgttgtagttgtagagcaaggaaaggtgaggtgaggtgtggtgtcggctagttcttgttcttggcccggcgatgcttcggtgggtgagcgaggtgttgccgtgtagccggcgtcaccgtttttagtgaaaggagcgaaaagaaaatgcagaaacctgtgtagatgacgtgcctgatctgcgtctgcaaccaagggcatagttcactcatgacgatggacactgtactttgacctgataaatgacatagcaagcgaggcgaacgtgcttacgcggttcaaaaaaaaaaaaaaaaaactcgtgtctgccatacattccgctgaatgaaagtgagctggctgtggaggagcttagtgtttctgagtacttgacattcaaggaccagctggtgtgttgacaattcaacagcaatctttgtgcttgagcctgacattgagctcttcaatgcctccttggcttgtccttcc

SEQ ID NO: 12031 - DNA, 380 bp, Zea mays
  Clone ID: MRT4577_110969C.1
gcgagcggctcgcccttttgtcgaatacttttattcccaatctccttcagccattcccgtggtgcgtgtctctcttgcctatgtttctctctcttgaagaaaccccaataaggcccactaccaatgcgtacgatgacaggtctacgacgcgaacctgcgcccaacggaccccgctccggccaaccgtaccaacactgcccaagccgccaaggcagctcatccgcccggaaaaatgtgcaaccactacttctgaaaccccgagaacaatgttacgcatcaccgaccacgacctcgaggtccttcccaactgcgagaccaagccccatgccaacttcacgcccgacgagaggcccagaagcagcacatctactcagcagaac

SEQ ID NO: 12032 - DNA, 1313 bp, Zea mays
  Clone ID: MRT4577_11096C.1
ttgacgcgtgggggcgggcgtggccatgtgcctgcagaagcggcggcggcggcgcgcggaggcctccgcggggaagctgttcgccaagaagggctcgtgggacctcaagtcgttccggatcctggcgttcgacgagcgggagatcatcgagggcgtccgcgacgagaacctggtcggcagcggcgggtctgggaacgtgtaccgcgtgaagctcggcaacggcgcggtggtggccgtgaagcacgtcacgcggggggtggcgacgagcacggcgccgtccgccgccatgctgcggccggcggcgtcggtgcggtgccgcgagttcgactcggaggtggggacgctgagcgccatccggcacgtgaacgtggtgaagctgctgtgcagcatcaccagcgcggacggcgcggcgagcctgctggtgtacgagcacctccccaacggcagcctgtacgagcggctgcacggggcggcggggcggaagctgggcgcgctcgggtgggtggagcggcacgacgtggcggtgggcgcggcgaggggcctcgagtacctccaccacggctgcgaccgccccatcctccaccgcgacgtcaagtccagcaacatcctcctggacgagtcgttcaagccccggctcgccgacttcgggctcgccaagatcctcagctcggcaggcggcggcggcggccactcgtccgccggcgtcgtggccggcacgctggggtacatggcgccggagtacgcgtacacgtgcaaggtgacggagaagagcgacgtgtacagcttcggcgtggtgctgctggagctggtgacggggcggccggcggtggtggagagccgggacctggtggactgggtgtcgcggcggctggagagccgggagaaggtgatgtccctggtggacccgggcatcgtggaagggtgggccagggaggaggcagtccgcgtgctgcgcgtcgccgtgctgtgcaccagccgcacgccgtcgatgcggccgtccatgcgctccgtcgtgcagatgctggaggacgcggccgccgcgcgccaggacgacgacgggaaggtcctggaggtgaaggtggtctgagaccgaatggcggcgccttaggctttggccgtgcccggcgggcgccggcggtgacaggaggacggaaaggtcaccacggccagtggcagtgtcgcacgtgtaacagtaagattagtagattgttattttgcctgaataaccggccaagaaatcttcttcaccttctacagaaaggcatttttgtaagcacatgtcagtcaatggaggagtaggttgtttggcgtct

SEQ ID NO: 12033 - DNA, 436 bp, Zea mays
  unsure (1)..(436): unsure at all n locations
  Clone ID: MRT4577_110970C.1
aangctttctttttttttatttttttttttttttttttcttatattttttttttttttttttttttttttttttttttttttttttattttttttttttttttttttttttttttacccgcccgggcggccgtttaaaagggggggttggagcacactgggggccgtttttaggggatcccagctcgggaccaagtttggggtaatcatgggcaaaactttttcctgggggaaattgttttcccctcacaattccccccaaaatacgagccggggggataaagtggaaaacctggggggccttgggggggggcttactcacattaattttgtggggctctccggcccttttcccgtcgggaaacccgttgggccggtttttttttttgtttcgcccccccccccggggggggggggtttgggttttgggggttttt

SEQ ID NO: 12034 - DNA, 360 bp, Zea mays
  Clone ID: MRT4577_110971C.1
aacacaacaagcccgtattttttttattttccggggcagaaaaaaaatggtttttatactaaggcaaaagcctgcataaaaaaaagggggacagcaactgggtactatttttggaggaatattctgctctccagtatggggcgcacacacactttactttgtttttttccagaggcccagttgggaggtggggttgctatcatcaggaagcgggggtcctgtttttaagaccattctactggttgggattaaaatctaaaccctttgttggggaccgatctgagaaggaaggaacattgcccacccccctgggaccccaaaagaaaagaaaagggggcagagagatcttattggtggccc

SEQ ID NO: 12035 - DNA, 395 bp, Zea mays
  Clone ID: MRT4577_110972C.1
ctttcttttttttttttttttttacaaattttgggtttttttttattttatctttttatttttttttaacaagccaaccccaacacttaatggggatttttttttttacaggtttttccaaatttagaaaaaccccccgggccttaaaaaagctttcaacgtcatggggttaaatccatgggcctccatgaataccggagggccccccaccctctttatttatgacattattacccccaggcacgcgagggccccacacacatacatttatgtttgtaaatttttttgtttaggccaagggccatttctcgggtagactttgaaggggacactagctccaaattcttttaagattttttttttttggaaccccctttttgggaaaagagcccccc

SEQ ID NO: 12036 - DNA, 424 bp, Zea mays
  Clone ID: MRT4577_110973C.1
ggagtatgcaacactgaggtacatattgacttcaagatgggctggtgctaatgatgatgatgatgatggggcagctccagtgaagaagaaaagtctgtctcctgcagactcctctgtggcagggcagtggaaaagagcaagtccagaacctggtgaagtatctggaggaaggacaatgtctaggtcatctgactctgggaaaatgagtaatgatgagaaagaagactttgaagcaaatgaagatgactatatggatgtcgacaagggacatgctagtgacagtgatacagaaaaccgtatgtcagatactgactcagacaatgaaatacacagacctgagacccctgaaagagagaaggcaccacacaggtgtattaatatgcttcaagattgcataaatgttgatgagtttgagaggcttaac

SEQ ID NO: 12037 - DNA, 439 bp, Zea mays
  Clone ID: MRT4577_110974C.1
ggtccacccacgaatccggatcgccgtagctactctattagttgtggcgacttgcaaacctgaagaagagattacttgcgaagagaacgttcgattcacatgtagccaaacagatcgtttcagcagacaagatttcgatagcgacttcatcttcggtgttgcatcttctgcttaccagatcgaaggcggcagaggtcgtggacttaacgtttgggatggcttcagtcaccgatacccagagaaaggtggagccgatttgggcaatggagagactacttgtgactcataccggacttggcagaaagatctagacgtgatggaagagcttggagttaaaggctacagattctcctttgcgtggtcaagaatccttccaagatgaaagaggagtaggggaatcaacgaagatggtattaagtactacagcgggctcatagat

SEQ ID NO: 12038 - DNA, 284 bp, Zea mays
  Clone ID: MRT4577_110975C.1
gggttggggtttaaatgaaactggcaacctattatcgtgcttaaaaaatcaagatcacattgatcaacgcggttccagttcccaatggtgcgaggagggacatcctactttattgcccctgggctactgttttaacaccgttttcacaatcacgaacgggcgaaccgttctggctttggtagggcattatatgcatattggtggcacacacaggtttgggtgacatgaatcaaggacgggctccggcttaacttatttgcataacgttccgacgggttgggggg

SEQ ID NO: 12039 - DNA, 437 bp, Zea mays
  Clone ID: MRT4577_110976C.1
ctagataccaaaactgcctaactcctctcccttaatccggagtctggctcctcggttctgcccatataacgtggaagtggtcgacccccgtgaggccttcggtcatgttctccctcccacttccgtggaccccaaggtcggatcggtcggctcttcccatctcaacgatccgacaggacatcgacaacgagaggggcgttgactggagctccctccgcagatgcgtacagctcacctgccaaaaccgaaaggctaatagtatcagtgtgcaccctccgcgccacgttctctctcaaggcgttcactgacaccgatactgatcccaataacaggcactaacatcctgccctgtcgctgcgtcactattcctcacttcatcgagagccgcactgccataaggaactcgaccatgtgctcggggttagccggaaccacaa

SEQ ID NO: 12040 - DNA, 664 bp, Zea mays
  unsure (1)..(664): unsure at all n locations
  Clone ID: MRT4577_110977C.1
cccacgcgtccggccgctcgggacgatcgggaacctcacggcgctgcggacgctgtccctccgcctcaacgcgctgtccggcggcatcccggccgacatcgggagctgcacggagctgcggcatctgtacctccaaggcaaccagctggatggacaggtaccggaggggttcttcgacctcgggctgctgcagcggctcgacctctcgaacaaccgcatcgccggcggggtctcgccggaattcaacaggctccagaggctcgctactctgtacctggagaacaacagcctgaatggcacgctgccgtccaaccttgacctcccgaagcttcagcttttcaacgtgtccagaaacaacctcaccggccctgttccaaagtcgctcgcccggatgcccgccagcgcctttgatgggacagggctctgtggtgaccctctagccccgtgcccaacccctccgccgccgccgcagccgcctgttccggccgctgctaatggtagcatcagcgcgaagctctctactggtgcgattgccggcattgctgcnggtgctgccgtggcgttcttggttctgatcgccgttatcttgttcctctgctttcggtgtcagaggacaatgggcgaaaaaatccgccgagacggcgggcgacgcggacctggacgg

SEQ ID NO: 12041 - DNA, 218 bp, Zea mays
  Clone ID: MRT4577_110978C.1
atatttctcctcttatcttattccattggtggtttaaaataaaaatggggggttcaactccaacatccaaacaacccaatccccaacatatccaacgctttctcactttttacaaaatatatacattcacaaaactaaccatcggattccgatacatgcaaaacgtgactgccttccaacagctccttactaccctggtagatccctcctccttccta

SEQ ID NO: 12042 - DNA, 392 bp, Zea mays
  Clone ID: MRT4577_110979C.1
aagcttattttttttcagttacttacttcaacaagagggcttaattaattgattattgcttatatacaaaataaacaattgctacaatacagatggctctctgggataaaccttgtcttgtcgtgaaagcaagccatctgaataggagccattgtttaaattacataagagagccaatctataatgcagccctcataccgaactgtgacaactataaataatcaataaatggattgacatttatataaaataaatggctgaatggtggtagttgtttcgtgcatatataagcacgacaaggcaaaattgcaacacactggaatgcaatacttgggtatccgaactcagtacctagcttactgaatgatagtcatagctgaaatctgcgtgaa

SEQ ID NO: 12043 - DNA, 723 bp, Zea mays
  unsure (1)..(723): unsure at all n locations
  Clone ID: MRT4577_11097C.1
cacaaaaccacgcgctactacaccagcctagctagccctttcgccgtcgctgcggctcctgcccactgactcgtaggtttcgttgtttcgacaatgtgcggcggagccatcatcgccgacttcgtccccgccggcgcccggcgcccggcaacagacgacaccatgtccgcctccatcctctccggtagcgaggaccatccggagctgccgctgccgctgccggcgccggcgccggggcgcaagacggcgtaccgcgggatccggcgccgcccgtggggccggtgggcggcggagatccgcgacccgcggaagggcgcccgcgtgtggctcggcacctacgccaccccggaggacgcggcgcgcgcctacgacgtggcggcgcgcgagatccgcgggcccaaggccaagctcgaggcgttcctggggctgcaggacaccgacgagggtggcggcgtcgaggcgtgggatgccgtggacctcatgttggcgtaggccgtacgccngtagcaggggggcccagccccagccccagcgcgcgcgtgccgtcgctgtgaacggccgccgcagctgttttggatcgagtaataatgctattagtagtataatgtttctccaagcagctaagataattgcaagccttgctgggtggtattactagcactactatctaggaggagtatgtactagcaggatgggtttatctagcttgttgctaaaacagat

SEQ ID NO: 12044 - DNA, 265 bp, Zea mays
  Clone ID: MRT4577_110980C.1
ggttaatttggtaagttttgttagctctagctagacttgtgtatttgaagaacgtaacaatgcattcttggcgggcaaggccaaggaccattcactgtatctcgtcaagggctacagagcgtcagatcatcatctcgcagcttcagatcacgtaggataaggactactatgagccgtctatctgaaccatgtcttagatctcgcagagctgaaatgacaggttcttttaacgagccggactcgccgattttggcgatatcatcct

SEQ ID NO: 12045 - DNA, 245 bp, Zea mays
  Clone ID: MRT4577_110981C.1
tcgtccacacagacaaacacgcgttcgctagttctagatcataaggggcgctctttttttggtttttgggacatccgggcgcgagcctaaaaacatataggctgaacgcaaggcacacgcccgcacaaagaaatggtagtcatggaacatcaagggcgcgctgatattaccaaacggccacctcgggcgctaaatcataaaaaaaaagggcgcgcaaagcgtgtgctccgtcacaaaagcttata

SEQ ID NO: 12046 - DNA, 863 bp, Zea mays
  Clone ID: MRT4577_110982C.1
cattgggtacctcgaggccggccggggtgatcatcgatacgttcacttcaccgttgttcacactgttcgtgtatgcccaccgaaccatcaagccatcgagccatcaaaccatcgtttttctcatccatcgtcgattctggaaatgaactataccggctacaccatcgggtccaattcagactactctcctgcgcaggagatgctgtcttatcccgaccaacttgggggcacgtacatccctgataactacacaacgtctcctggattctcgctcgaatcttttttcgaccaggctgcatttccatcagctgatgtgtcaacaatctttcccaaggaacagggccaatacgccacattcccttcaagtggtgcttccacaacaaatgacatggcgggcaacagaataagctcccactcgacttcgcgacacccatcggatgccgccccgcttggtaagctcgaacagttctcgttcggcttttccttcgacgcgctatcaaccgagccgtttgaaagagcctgcttctccccaaatacccacatatcctccaggactccttccctctgcggcgacgcatcggaaaagacctcatcaccctcatcacttactctttcgccatgcagtctcaagcgcgaatccccttcgtcccctgactcggcctcagaagaacaacctactcctccccggcctcaacggaagcgaggccgaccacgactcgaccgcaacgaaacgatatcaagcacttcctcgcctaagggcccgaagactggacgactgccgcacaatcaagttgaacgaaaatatcgcgagggtctcaatgcagagttggagagactacgcaaggcagtgccgacattgaccc

SEQ ID NO: 12047 - DNA, 1601 bp, Zea mays
  Clone ID: MRT4577_110983C.1
ccggccgggccgggtaacagcgtgatctaaaaaattccacactcctccctgtctcggcttcgattccgcacttcccagttcccttcccacattcccacacccgcctgccttccttcccgtcgccttcttccccgctcctccgtgtcccactcccgtacgtgatacgccctcgggctcggagaaggaaaagcccgctctggcaccagctcctcgcatcgcatctcccctgccagggaccaggcatccctcgtcccggtctggagcagatatgggtgtcatcggaggaacacctcctgcaagctgcccagcaacccggcactgcgcagaatgggcccgaatctacttgaagtactgcttgtgcagccagaaggaaggcgctgctctggcacttggactaatcagtgtcgtaagctggggcctcgccgaggtgccacagataatgacaaattacagacacaagtcaacagaggggctctctgtcgccttccttatgacctggattgttggagatttgtttaaccttgccggttgcttcctcgaacctgcaactctgccaactcagttctacatggcactgctatataccatcacaactctgattcttactggacagacgatctactatagccacatctaccatcatcttaaactaaaaaactccagggcagctagcaagcctcaaaagcatcaacaccgggatgcttcattacgcgaaaagcttttgggtgccaagggtggtgcagcatcaagaaacaatgaatcagatactacagttcttacgcaagctcacctatccttgggagtatgaaattgggggaccaataccatggaagcagctcatggcctgactactggtggtggtgagggatggccggctggtggtggtgaggataacctggagctgataccaggtgtcatggaccttcggtccatggggatagttgtcttctccggcgaggttatacccctctgctataggcttggttctagggtagcagccctaggcgcttgagagggtcattgcaagggagagagagattggtttgataatgatcttgtttgatttattccctgctgccatgcggcttataaatagccctatggctaaccaacttctcctacaaactctcaactaactcctactttcttggacttatctgatgctaaccaactctccacaattctctcatcccaatcttattctctagccttatcccagctcatctcaatcttattctctagccttatcccagcctggctgttgcgtctcgctccctatgatgcccatgacagtacggtaaaggttgctacagttatagtctacatgactgcaatgactttggccaggatgggctaagtcagtggtcactggtcagcacatacaatctaaggcaaacaaaacaaaaatatgattcttccgccaagcttagtactaggtaaagcagcatctatcatgtgattaaataccgtacatataccagacattcaaagcataaccttgattacaccacggcaaaatagcatctcaacaacttccttcacaatagggagaagcccagcgtggtgtactccaattcctcttcgcagaaggctttgtattc

SEQ ID NO: 12048 - DNA, 466 bp, Zea mays
  Clone ID: MRT4577_110984C.1
cctcgagccggccgggaggacacttacctgcagtctccactacctagtcagtacccactgtcctacgatcatatgcacgtcgagcgttcagagacagagaccggctgatgtgggtcgcacgcgatctgccgtattgtgcgccggggaggccgcggggctgctgatggcaccggtggcgactaccacggacggcgaaatcacctgcacagagatgagatcccccatctggcacatgcctatcgtaaactagaggtacgagttgcaggccttccccctgctgatgcagccctatcaccatactcgtaagcactgccagaacacgtgcagacaggcgcccccaccgcacatgtctagaaaacgccatcagacccgctacgaccctcacctccattgacatagccgaagtactctctgagagccccgttaccatcccctgaaacaccaggaaagtgatcgaatgctccac

SEQ ID NO: 12049 - DNA, 668 bp, Zea mays
  Clone ID: MRT4577_110985C.1
aaaccaagccaacagattgtattgctgcccacagattgtattgctcttttagggtaggagtagaagaagacaaaaagacaagatgattcggatgatgtgacagaacctggttacccaaccacactgtcagaatttgcataaacagattcacccaaacttacatatctgcacagattttgtcacgtacctcgtgccgcccttgggctgagaaggagttcatgtttccgagacacggtcaacttaaacacctcggccatgtcaaccgtatctacacccctaggaagctcccagtcaaagtggaagacaaggtttgccagcaagatctccgtggaggccagcgcaaaatttacccctgggcacatcctacgcccagacccgaacggcaggaactcgaagtccatccctctgaagtcaacgccgccgccgcgcggacgaacctctccggcacgaactcctccgcggcgtcccacagcctggggtcccgaccgatcgcccaggcgttgacgagcagcggcatgccggacgggatcgtgtagccgtcgacgtcgcagtcctcctgcgagaggtgcgggacgaggagcggcaccggcgggtgtagacgcagcgtctcctttatgacggctttcaggtatgtcgtcgttccgccgagagcgtcgtcttcgccgatg

SEQ ID NO: 12050 - DNA, 287 bp, Zea mays
  Clone ID: MRT4577_110986C.1
ggtaacccccggagtcggccgggccgggtcataccgacgtgtgtttcctagaaaaatcaaatattgattgagatttatctcgaaaaaaaaaaaaaaaaaaaaaaaaaaaaaaaaaaaaaagaaaaaaaaaaaaaaaaaggcccggccggccctggccctcaaccctatgttcccttcagtgaggggaaattagaacgctgggcttaaccaaggcaataccatagatcctgtgcgaagtggaaatgcgatcccatcaccacacaacataccataccgagacccaaagc

SEQ ID NO: 12051 - DNA, 668 bp, Zea mays
  unsure (1)..(668): unsure at all n locations
  Clone ID: MRT4577_110987C.1
aaaaaaaagaaaaaatttctttcttttggagtgcaacaagtatttgggcacagatttccctatatataccataacatcctcaccactttttctcgccccgccgcgccggcttcatcactctttcttcctcttcttcttcttcttcacacaagcgtgctccttctgctcttgtgctaagtagctagctcacaacagaagaggacgagagaaagcaaggcggcggcggcggcggctgcggcagcaacaacatacaccgccggccgcgtggcgccatgggcatcctggaccacatgtcgcatgtgtgcagcatcacggagacgaaggaggcgctcaagctcaggaagaagcgaccgctgcagacggtgaacatcaaggtgaagatggactgcgaaggttgcgagcgtcgcgtgaagagcgcggtgaagtcgatgcgcggcgtgacgagcgtgacggtgaacgcgaagcaaagcaggggcacggtgaccgggtacgtggagcccgccaaggtgctggagccgcgtaaggccaccggcaagaacgccgagatgtggccctacgtgccctacacgctcaccacctacccctacgtnggcggcgcctacgacaagaaggctcccgcgggcttcgtccgcagcgcgccgcaggccatggcagaccccagcgctccg

SEQ ID NO: 12052 - DNA, 2184 bp, Zea mays
  Clone ID: MRT4577_110988C.1
ccggccgggccggggattcttcttcttattcagacattatcaagaagttggcagtagccatgggcatcctggaccacctgtcgcatctgtgcagcatcacggagacgaaggaggcgctcaagctcaggaagaagcggccgctgcagactgtgaacatcaaggtgaagatggactgcgaagggtgcgagcgccgcgtgaagagcgcggtgaagtcgatgcgcggcgtgacgagcgtggcggtgaacgccaagcagagcaagtgcacggtgaccggcaacgtggagcccgccaaggtgctggaacgcgtcaaggccaccggcaagaacgccgagatgtggccctacgtgccctacgcgctcaccacctacccctacgtcggcggcgcctacgacaagaaggcgcccgcgggattcgtccgcagcgcgccgcaggccatggcggcccccggggccggcttcatccctctttcttcttcttcttcttcttcacacaagcgtgctccttctgctcttgtgctaagtagctagctcacaacagaagaggacgagaggaagcaaggcggcggcggcggcggcagcaacaacatacaccgctggccgtggcgccatgggcatcctggaccacatgtcgcatgtgtgcagcatcacggagacgaaggaggcgctcaagctcaggaagaagcgaccgctgcaggtaatgcttgcctttaatcattatatatttaatttcctcccatgcatctgcatgcatgcctgatgagttttgatgcatgggcggtggttgcagacggtgaacatcaaggtgaagatggactgcgaaggttgcgagcgtcgcgtgaagagcgcggtgaagtcgatgcgcggcgtgacgagcgtgacggtgaacgcgaagcagagcaagtgcacggtgaccgggtacgtggagcccgccaaggtgctggagcgcgtcaaggccaccggcaagaacgccgagatgtggccctacgtgccctacacgctcaccacctacccctacgtcggcggcgcctacgacaagaaggctcccgcgggcttcgtccgcagcgcgccgcaggccatggcagaccccagcgctccggaggtcaagtacatgtccatgttcagcgacgagaacgtcaacgcctgcaccatcatgtgatgcatgcatatgtatagtctctcgatcgtatcatgtgtagtagtacgagctagctagtgcatatcgatcttcgtactgtatcatatcgatcgaaagaaccttaatagccaatacaagaggaatgtgaattaagctaccacatgtcgcatgtgtgcagcatcacggagacgaaggaggcgctcaagctcaggaagaagcgaccgctgcagacggtgaacatcaaggtgaagatggactgcgaaggttgcgagcgtcgcgtgaagagcgcggtgaagtcgatgcgcggcgtgacgagcgtgacggtgaacgcgaagcagagcaagtgcacggtgaccgggtacgtggagcccgccaaggtgctggagcgcgtcaaggccaccggcaagaacgccgagatgtggccctacgtgccctacacgctcaccacctacccctacgtcggcggcgcctacgacaagaaggctcccgcgggcttcgtccgcagcgcgccgcaggccatggcagaccccagcgctccggaggtcaagtacatgtccatgttcagcgacgagtaacgtcaacggcctgcaccatcatgtgatgcatgcatatgtatagtctctcgatcgtatcatgtgtagtagtacgagctagctagtgcatatcgatcttcgtactgtatcatatcgatcgaaagaaccttaatagccaatacaagaggaatgtgaattaagcaatctaaaaaaaaaaatacaaactaaaacttctaatggggggcccggcccccaattccccctataggagggcgcctacgacaagaaggctcccgcgggcttcgtccgcagcgcgccgcaggccatggcagaccccagcgctccggaggtcaagtacatgtccatgttcagcgacgagaacgtcaacgcctgcccagtcatgtgatgcatgcatatgtatagtctctcgatcgtcgtatcatgtgtagtatcttctcttcttctctttccgtggatcgatcggatatccctgtcactgtcatcaccggccggccgg

SEQ ID NO: 12053 - DNA, 272 bp, Zea mays
  unsure (1)..(272): unsure at all n locations
  Clone ID: MRT4577_110989C.1
ccctcgagccgccggnattctgcctctgtcgctgcatgtcgcgttgccgttactccatcggctattaatggctcgtgtacttccagcgatcggcttagacaagcctctccatcatgaagctcctgggtgggatgcgccgaaaataacaatcgaactcgaatggtgtggtgcgagatatcacgacagctggaggagcgacctgcaactaggtcgtcgagctgatcgggtctgacctggcctctttcctcggcggcggcaacgcgtacttcgcc

SEQ ID NO: 12054 - DNA, 1082 bp, Zea mays
  Clone ID: MRT4577_11098C.1
caaaaccacgcgctactacaccagcctagctagccctttcgccgtcgctgcggctcctgtctagtgactcgtagatttcgttgtttccgacaatgtgcggcggagccatcatcgccgacttcgtccccgccggcgcccggcgcccggcaacagacgacaccatgtccgcctccatcctctccggtactacgttgcgaggaccatccggagctgccgctgccggccccggggcgcaagacggcgtaccgcgggatccggcgccgcccctggggccggtgggcggcggagatccgcgacccgcggaagggcgcccgcgtgtggctcggcacctacgccaccccggaggacgcggcgcgcgcctacgacgtggcggcgcgcgagatccgcgggcccaaggccaagctcaacttcccgcccgccgtgggcggcggcggcggcggcgcgcgcgcgccggcgccggctgctgccaagaggcgccgcaagtccgcggcggccgaggcacgagggagagctcggcctcgtctcctccggcggcggcggcggcggccgtcgtggcgggcggcggggaggaggcgctgcgcgactgcatgtccgggctcgaggcgttcctggggctgcaggacgccgacgagggtggcggcgtcgaggcgtgggacgccgtggacctcatgttggcgtaggccgtacgccgtagcaggggggctctgggccccagccccagccccagcgcgcgcgtgccgtcgctgtgaacggccgccgcagctgttttggatcgagtaataatattattagtagtataatgtttctccaagcagctaagataattgcaagccttgctgggtggtattactagcactgctatctaggagtatgtactagcaggatgggtttatctagcttgttgctaaacagaaaattaatctaagaaaacagagatatggtctgttaattgccgggtctaactaatggctggcgataatctgttaggctacctcagattgaccatctctatttcttattataaactcattttcctcgtttattattttgaactccattatataaatgcagtcacatattgt

SEQ ID NO: 12055 - DNA, 555 bp, Zea mays
  Clone ID: MRT4577_110990C.1
tttgcctttgactcctggggagctcgtatcgctcgatttgctctccggcggctcgccctctacccctcatcgagccgatctgccagaaaaaactccatgagataagaggttcctcctcgaccgaaagatccagagtgcgccctcgccgcagactccgacgatgaatgctgatatgacggaggtggcgcgctggttcgaccgcttgtaggcggtctgcgcccgcaatgatgtcaacgcctgcgagcacccatcctctctgcttcctcccaggtccttctcgcccagttcgcctgactgcctacctgtgtttcggcgaactgcgatacttgtgcttggtattatcaaacattgcaaggatgcatatctacttgatgcatcgtctgtggaacctgagcgtagtaaattggtgaccgagatgatgtctgaactcttagtttctgccggatgaaaccttattacctgcgatacatgtggcatagttatcgcctgttcagatgagcactctcactttttgggactaaatcttctgaggctgctgaggtcaccaataaaatt

SEQ ID NO: 12056 - DNA, 280 bp, Zea mays
  Clone ID: MRT4577_110991C.1
tcgtaaacgccagatcaagcttgggtcagggggggtagcctataatgggctctgtgacacacaccagcgctgtaacgagggatcacgctgtacgtgctcaaacgtgtgcacatgccaaccctcgacatgggcaagatttgactacctcgcctacatagaaacacgcggcagagcctgatgctgttgcataaacgacactatagctgacaccaggcgatcactatgggccccagcaaaggcctggagaaccacttgtgctgtgcaaaccccaaggcactat

SEQ ID NO: 12057 - DNA, 342 bp, Zea mays
  unsure (1)..(342): unsure at all n locations
  Clone ID: MRT4577_110992C.1
gcgaacgggacgtgnagctcggcggctgcgtggtgccgncgggcnngagatcatgatccccatcatggcggtgcaccacgacgccggcgtgtgnggcnacgacnccacgggattcgaccccgcgcgctttcgcaatcgacgntggcccgccggcgacagcaggcagtatgtncgttcttcccgttcggcggcgncgcgcgggttgtncatcggccagtaccttnccnctnatggaggccaagatcnccttggnctacggtncctacancnntnacaagttccgcctttcnccggncgtaacgtntcaacgcaccaanggtgccttaatgatncnncaaaccc

SEQ ID NO: 12058 - DNA, 323 bp, Zea mays
  Clone ID: MRT4577_110993C.1
acacttataagagcatgactgtcggtgcacgcgtgcttgagctcggaattcggctcgagcggcgttcgcggagctggtgaacacgtgcgacgcggtggtgggcgtgcacggagcggggctgaccaacatggtgttcctgcccccgggcggggtggtcatccaggtgctgccgctgggcccgctggagttcgtggccagctacttccggggcccggccagggacatggggctcagctacctcgagtaccgcatctcgccggaggagagcacgctgctggaccagtacccgcgggaccaccccgtgctcacggatcccatgagcg

SEQ ID NO: 12059 - DNA, 373 bp, Zea mays
  Clone ID: MRT4577_110994C.1
aacagttcaccggcacagtcccggcggggggcgtgggcttgtgagggtggggtgctcgacatgtccataaccagctgtccggtgatctcagacgctgtccgcgctccagaacctcgtggccctcaacgtatccttcaacggcttcaccggtcggctgccggagacggcgttcttcgcaaagcttcccacgagcgacgtcgagggcaatccggcgctgtgcctctcccggtgcgcgggcgacgctggcgaccgcgagagcgacgcgcgccacgcggcgcgcgtggcgatggccgtgctgctgtctgccctcgtcgtgctcctcgtgtccgcggcgctcattctcgtcgggcggcactggcgcgccgcgcgcgcc

SEQ ID NO: 12060 - DNA, 176 bp, Zea mays
  unsure (1)..(176): unsure at all n locations
  Clone ID: MRT4577_110995C.1
atgcgcgcaaagagcacgctctcctactcatgcagcgtgccgtgctgncactgacggcgatggttacggagcgtgcagtttgcgcgtgcacgtgtgcgtctcagggctgctacctgctactgtgtgcctctgagtgtcttagctgtggagtaagatatcggctgcgcctgacagtt

SEQ ID NO: 12061 - DNA, 734 bp, Zea mays
  Clone ID: MRT4577_110996C.1
ctggacgcctgccatggtacggtcggcgctgatgacgacgggccgtacggtcgacaaccgaggcggatatatcctcgacaacggtcatagcgtcatcgtgggccgcagaatcgacaacttcagggtcgcgacgccgctggtggccggggccgggcacgtccagccggacctcgcgctggacccgggcctcgtctacgacgccggcgagcacgactacgtccacttcctgtgcgccctgaactacaccgctgagcagatgcggcggttcgttccggacttcgtcaactgcacaggaacgctcgccggcggccccgccagcctcaactacccgtcgttcgtcgtggccttcgagaactgcaccgacgtacgcacgctgacgcggacgctgaccaaagtgtccgaggaggcggagacgtacagtgtcaccgtcgtggcgccggggcacgtgaaggtgaccgtcacgccgacgaccttggagttcaaggagcagatggagacgaggagctactcggtggagttcagaaatgaagccggagggaacccggaggcaggcgggtgggacttcgggcagatcagctgggagaacgggaagcataaagtcaggagcccggtggcgttccactggaagaactgacgacttattacttaagtattgcacagaaataagctatatcttgagctatcatggttaaaggacttatttcccatgaaaaaaaaaaaaaaaaaaagcggcc

SEQ ID NO: 12062 - DNA, 247 bp, Zea mays
  Clone ID: MRT4577_110997C.1
ccacgcattcaactcaaccaccaacaaacaacattttcttcttcccctccactctctccttcctctcggacggatctctttcaaacctacctattctcttcaacatattaactcctaactaccatataaccctacaaccccccttcaccatctacctccatacctacatcaccatcacatacaatacttatcctcctcactctcttcctatcctcatatacctcatcctctctactctcaccatctc

SEQ ID NO: 12063 - DNA, 483 bp, Zea mays
  Clone ID: MRT4577_110998C.1
accccaaaaaaattttccttaaaccttttttttttagcagaggacaccggtaaaaagggttagggacacccccccccggaggctaaaaaaaacgggtccccttttttttaaaaaaaaaaaactggggcccggaaggggggggcggttaaaccctcgggccctttttttttttttttcttccgggggggggggaagctacccttccaaaagaaggggggaagggagcctgaccccgaagactttttcgatttctaactttggggaagaggccccggggggtctttttttttttttaggggaagaaaggggctactttccaaaacattggtaggaagggggacgctggaaaccccggggaaaaaaggggggcccccctgaaaaaacccgggggggctttgtttttttttaaccaaaaaaggacccgacctggttgccaaaatccgcccacttggggggggaaaactcgggagaacgggggggccg

SEQ ID NO: 12064 - DNA, 428 bp, Zea mays
  unsure (1)..(428): unsure at all n locations
  Clone ID: MRT4577_110999C.1
atcaaagcaagcatgtggaggagggctttagcgatggtcctgttcatgggtggcgccgcgctgctcgccggggccgccggcgccggcgcgcagcagggcgtgtggagcatcatcacccggcccatgttccagagcatgctgagccaccgcggcgacagcggctgccagggagccttctacacatacgacgccttcatccattccgggggggggggacacctcttcgacaccacccgtgaagagcattctccaagaggggagatcttcgccgatctctttgtggccgacgagcaccagccaggaagaaaagatgatgaaccatggggaagagaaaatgagatgctaatccacctncaacgaagcggaggggcaaaatagacactgaattttattgtccatactgcaaccatgggagcattgtggagagc

SEQ ID NO: 12065 - DNA, 1111 bp, Zea mays
  Clone ID: MRT4577_11099C.1
aattcggcacgggccggcaccaaaaccacgcgctactacaccagcctagctagccctttcgccgtcgctgcggctcctgcccactgactcgtaggtttcgttgtttcgacaatgtgcggcggagccatcatcgccgacttcgtccccgccggcgcccggcgcccggcaacagacgacaccatgtccgcctccatcctctccggcgaggaccatccggagctgccgctgccgctgccggcgccggcgccggggcgcaagacggcgtaccgcgggatccggcgccgcccgtggggccggtgggcggcggagatccgcgacccgcggaagggcgcccgcgtgtggctcggcacctacgccaccccggaggacgcggcgcgcgcctacgacgtggcggcgcgcgagatccgcgggcccaaggccaagctcaacttcccgcccgccgtgggcggcggcggcggcgcgcgcgcgccggcgccggctgcggccaagaggcgccgcaagtccgcggcggccgaggagagctcggcctcgtctcctccggcggccgtcgtcgtggcgggcggcggggaggaggcgctgcgcgactgcatgtccgggctcgaggcgttcctggggctgcaggacgccgatgagggtggcggcgtcgaggcgtgggacgccgtgaggctcatgttggcgtaggccggagtacgccgtagcagggctgcaggggggcccagccccagccccagcgcgcgcgtgccgtcgctgtgaacggccgccgcagctgttttggatcgagtaataatattattagtagtataatgtttctccaagcagctaagataattgcaagccttgctgggtggtattactagcactgctatctaggagtatgtactagcaggatgggtttatctagcttgttgctaaacagaaaattaatctaagaaaacagagatatggtctgttaattgccggctctaactaatgcccggcgataatctgttaggctacctcagattgaccatctccatttcttattttaaactcattttcctcgtttattattttgaactccattatataaatgcagtctacatattgtacaaaaaaaaaaaaaaaaaaaaaa

SEQ ID NO: 12066 - DNA, 517 bp, Zea mays
  Clone ID: MRT4577_1109C.1
accgaaaagaaaaaaccgtatcacttaaggtttgccatgagccgcgataacattgaaccgaccgactattcacgaggctctctaaaataatacaccaaccacgaaagagtgaccagaccagaccaacaaatataaggttaagtgggacacaccgcaccaactgacgataactctgggcagcaactgggccagccagcaactgtagcacactcaaaactgacaacaaaccgcttaatccacctcctcgatcttggggccagggccgccgttgccggcaggggcgtcctcgtccatgccgccagcgccgcccatgttttcacccgcgccctggtacatcttggggatgatggggttgaaaaggctctacagctccttcatcttggcctaaaactcctccgcctcggaaagctggttggcgtccaaccagctgatggccgcgtcgatggcgtcctcgaactttttcttgtcatcggccggtaccttggaagcaatcttctcgcccttgaacgtgttgcgc

SEQ ID NO: 12067 - DNA, 297 bp, Zea mays
  Clone ID: MRT4577_110C.1
cccacgcgtccgtccactcgtccgcacacacagagagagacaagtggtgggcactccagagtgctactagcagtctagcaaccagctaactcgggctggattacgcagccatcatctgatacgactggcaccaccacttattcaaccatcacacctaggtcgaggtgcacaacgtctacaagtactggttctccatgactgaggaggtcacatggaacatgcagggcgagtacgagaggtacaagaaggatgagatggaacacaggcacaaacagctcctaaagaaggcatgctcaa

SEQ ID NO: 12068 - DNA, 331 bp, Zea mays
  Clone ID: MRT4577_111000C.1
ttctcacactccttccgggcttgtttttaagtccaaacatcaaacttcataaggattcaagccctactgcctcaaaagagtgtctggtacaccacagaggacacaactggcccctttaaccaacgaagccccaaccaccattcatgagacacaaaccacagatgttcattagacgaccacctccatttggaggcacaccaaagggcgccacacaactcacatccccaagttccagaaggagttaaatgtaccattggttattggcctccacggaggcgggccacccgggggagagagcctctctgttagagtatcaccctgctaggggggg

SEQ ID NO: 12069 - DNA, 294 bp, Zea mays
  Clone ID: MRT4577_111001C.1
cccactcgtccgcacacacctcctcagatgtgtcttctataccatttaaaccttttacctagacgactatcaatcttaatcaggcaaatacaaatacttaaactagcactttcaccaacaatattctctataaatctcaatattctcaagcccattctttaacatattatatactttcgaatcttactctacaaacctgctattattgaaaactcatttattccattactttatacacttaacttatattataatataaagtatttgttctacattaaatcccaatatgctttt

SEQ ID NO: 12070 - DNA, 302 bp, Zea mays
  Clone ID: MRT4577_111002C.1
agtatttgagaattatgttttctatctaatacaaacatggctgtacatgcacttgccatcggggaacgtcctcttaattttctagaccgggcaaatgtgtgctgacaccgatatcctactgctggagcactgaggcgctcttgactggacaggctcgacgggaactgagatataccctagactccattgcaggaaaacaattcatggtcgcgcgcctggccacactcaatggcgcatggtgctcgatccatcaccgatttcgcccttcattttacctgcactacctatggttcacctccaaa

SEQ ID NO: 12071 - DNA, 444 bp, Zea mays
  unsure (1)..(444): unsure at all n locations
  Clone ID: MRT4577_111003C.1
ccgcggcgtatgacggcccctctgagcgggccgcttttttttttttttttttaattcataagtatgtttatttttttttgccctaaagttggcatgaccttattcatcatcatatgttcagtagtatgcatatgcaagcaaacaagatggcatcaccgattcaccgcactatatacacagcacacatatatacgtgagtcccatttctcccacagatactataactaggcgtgcttgccacacatgaggccatcaggccgggcagcgatgttgcggccggggcagtcctcgaacgcgcacgtcccggaggcctgcagcgtctcgcccacgtcctccgccttgaggtggtacggcgtccacgacggcgtcccgtcctcgaaggagttgtgcgtgagccgngttgtgccggtccgaggcgaacgcgatccactcgccgtgggggac

SEQ ID NO: 12072 - DNA, 171 bp, Zea mays
  Clone ID: MRT4577_111004C.1
ctcacgcgtacgcctacacctatctttcttttccatactacagcctctcttctctgcaactcgtactactacaacttccttatctttcaacacatcttccatcccatccacatttcccacatcatactaatttaccacctcaacatcccctacaatccctccttttacacc

SEQ ID NO: 12073 - DNA, 987 bp, Zea mays
  Clone ID: MRT4577_111005C.1
cgccgaggccatggcactgttcaagtgcatgtgcatcttcttagtctcgcttctactcgccctcaccttcaccaatgcccaggaagaatcttcacatcggactctcccaccgttcccctgcatcccaggccagccacggcccccgcggttgccaccttgcccgccggcaccaaccgagtgctacacgtcgctgtcgggaatgatgccgtgcgcggacttcctcacccacaacgaggtgccaccgatgccacccacggtcgcctgttgtgatggtctcaggtcactcgtcaccaacgcgtccatctgtctatgccatatcgtcaacggtaacatcaacaagctcctaccggcgcccatgatacccgtgcgcatggtggcgctcccccgcttttgtgttgtccgcttcccacgagccatacttcgccggtgtatcagagggcatttgccaccgatgaaccctccgcctccaccagaggcatcaccgtcgaaaccaccatctacatcgccagcagcatcaccatcggaatcaccaccagcagcatcgccaccagaatcgccgtcgacaccaccaccagagtccgtcgactacaccgccgacaccagcagcagcaccaccgaaatcaccgtctgatccaccaccagctacgccaccaaaatcatcatctgatccaccgtcgacaccagcagctacaccaccggcgactccatccccatcatcttaatcacgaaggatatttcaaaagcagtagtagtttagtcaaattagatatgcgttttaggattctagttgatatgcgtccattattttgttcacatcgaatgcagcagtgtgttagctatgtagttgcatacctatcataactaagtctattagaagtatttctaataatatttaggatctgtcatcaataaaatgtatgcaacaatacgactattgtattattttgtctactcaacatgcatgttattacacgtcgacgcggccgc

SEQ ID NO: 12074 - DNA, 1394 bp, Zea mays
  Clone ID: MRT4577_111006C.1
tgacgcggtggagctcatgttcgagcccgacgccttgcggtggctcgccagggccggcgtgtcacgggcaaccgctgtgctccaggtttgctcctctattgcgttcgacaaaggagtcgaatcatgtttgaagtacatcgaggcagttccatggagcgagagcgaggaagagaagctgaaacacgtttttgccagatgcactttcggcgaatcagttagtaaagatgtgctggcaagattgcagcagcagtgcgcgagcggctcggaggacctggcggtgcagctcgtggaatctatcacgagcggagccaacaacggcgcgaggaaagaaatgcagtctttggtgagcggtctcctaagcagaagctcagtctaccataaggacctgtccggggtgaacaaggggggcctttaccgaatctgccgttcctgcttgagctcacttgtggaacttttcatggaggactcagatggcggccaagctatggcaccttcaggcagaaggcctatggttgaaaggatcagtcagcaaactgagaatctcaactggctcttggacatccttctgaacaacgacatggcagaagaatacgttgagctgtggggtacgcaggaggagctcatcagaatgcacgagcgagcatcgccgatgttcaggtacgagctcagccgggtatcggcgagcgtgttcatggctctggggagagggagaatccagtgccccagcgacacgaggagccagctgttccgtggatggttcaggcccatgcttgtggacttcggctggctgcagaggtgctccaaggggctggatgtgagagtcctggaggagaacctggggcaggccctgctcacccttccgctccacctacaacagagcttgttcgtagaatggtttcagtgctttgcgtctagaggcacaggaggatgccctaatctcagcagagctttccaggtatggtggaggaggtcatttgttaattagatcagctggttcttcttcccattctgtgccctagatgcttgctatacaaacatgagccagtataaatgtaaagcgtcatcataagtatgtttatttttttgccctaaagttggcatgaccttattcatcatcgtatgttcagtagtatgcatatgcaagcaaacaagatggcatcaccgcactatatacacacacacatatatacgtgagtcccatttcttccacagatactataactaggcgtgcttgccacacatgaggccatcaggccgggcagcgatgttgagccagtggcagtcctcgcccgcgcacgtcccggaggcctgcagcgtctcgcccacgtcgtccgccttgaggtgatacggcgtccacgacggcgtccggtcctcgaaggagttgtgcgtgaccc

SEQ ID NO: 12075 - DNA, 211 bp, Zea mays
  unsure (1)..(211): unsure at all n locations
  Clone ID: MRT4577_111007C.1
gccggccgggttcggtcgtatctgaggccatcacagccatccgaactgtttcatctttggctattgaagagtctgttctgnataaatatgnnaaggaaaggtacgcattttttaacagtgtacaagggaaacgacattcccaatttattatatatacttttttttttttacctttctccccctccccccccccccccccctctcaccccta

SEQ ID NO: 12076 - DNA, 157 bp, Zea mays
  unsure (1)..(157): unsure at all n locations
  Clone ID: MRT4577_111008C.1
attacatactagcccatgctacgtgaganttcatgtaacatgttaactaaattctactcactactcaatacattacaactaccttactattaaaacaattgagttacccaacttattcaacttccagaacataatccttttgacaacaagcatctta

SEQ ID NO: 12077 - DNA, 1269 bp, Zea mays
  Clone ID: MRT4577_111009C.1
ggtcgctgtacgcgtagagtccccctacgcaggggagagggcgccgtgttgtgaaccgctgcgctgagtctcacaggccaaggacccctcttcctcttccctttgacccaccaccgcccccctcttcccttcttcccccactgtcgccgctcctcgtcttccactctctccactttgctgcttcttctcccttattagtgctcgtgggctcctatgatccgccctccgccgcgggtttcttgatccatccccggcccaaggaagcggacccccggcgaacactcctgacagattcgcccgtccgccgctccctcgattcggtcctccccgtcagcggcaggtgtttaggacctctgcagcatagcatctggtccgtccctggagatgtccggcgtacaggagcagttcgagatcaagttccggctgccggacggcaccgacatcggacccaggcggttcccgccggcgtccaccgtcgccacgctcaaggagaccatcatcgcccagtggcccaaagataaggaaaaaggtcctaggactgtgaatgatcttaagcttattaatgctgggaagatactggagaacaacaaaaccctatcagaatgcaaaagcccgatttgcgacttctctgcgatgacaacaatgcatgtcgtcatccgcgcaccgacttcaagcaaacagtctgataaaagagcagaaaagaaagcgaaaaatttcaggtgcggttgtgccattatgtgacagcattgtgaatagtagcagagagaacgtggccatttcagttttctcccttttttttcctgctctcgctggagtgttgtattatgttcgaggcgctttctcctttcattttgttttgaagtaccgcgtgcaagcttcaacagctgtcaagtgccctttaatcgtgagtgtgcatcaagcacagaattagaaggcggttggctgctaattacccttaatcttgagtttgtcaagcacacaatttgaaggcagtcattagcgtcgaaactacgatgtccaccctatccaatcttccatggtttcacgcttctcttctatatttatgctaccctgggtgacaaatgtttaatgtatgccttccatgctagatgaactttttggaacgccattctaactcatcaatttctattctgtaaaactaaaaccagttgtaatctgccatagatcagtatgcttgctatatgggagtcacattgatatgttttgcaacaaaaaaaaaaaactcgtgctttcattatatttaagggc

SEQ ID NO: 12078 - DNA, 526 bp, Zea mays
  Clone ID: MRT4577_11100C.1
ctcatatacgcaggcatctaactcaaaaagctcgaggctgcacctatttgatactttggctggactgtgaccgagaaggagaaaacatatgctatgaagttatcgattgcactgggattcctgaaaatgaggctggcagaagaatttttcgtgctagattttcatctgttactgagaaggacatatcgagcgccatggataatcttgttctgccaaacaaagatgaatcactatctgtggatgctcgccaagaaattgacttaaaggttggagtagcatttactcgatttcagacccgatatttccaaggaaaatatggaaaccttgattcaagagtgatttcgtatggtccatgccaaacacctacacttggattctgtgtacaacgccatcagcaaatcaccacatttaaaccagagaaattctggtccttgaaaacgtatattatcaaagatagtgatgaaatacagctagaatgggaccggaagaaactttttgattttgatgttactgtaatgtttcagaa

SEQ ID NO: 12079 - DNA, 245 bp, Zea mays
  Clone ID: MRT4577_111010C.1
ggagtgttaaaaatacattacagtccacttcaaacaaggtgaatttaaaacaaaccggcatggagaccatttgatcgcgctaacaggacgatacatgttaacagtggacgggaagacaaacaagccccatggattcaggaacttgctatgtaagtaaattaccacaacaactgaaacttgtcttttaaggtagaatacgcgccatgcatggatgcaaactgtcagtgctgccatcattactggac

SEQ ID NO: 12080 - DNA, 1364 bp, Zea mays
  Clone ID: MRT4577_111011C.1
gatccacacaaatccataggctattttgccagagaatgttatcctttatccctatgaacgacaagacgagggtacaacagaaatggacccctgaaagaggtcagaatgagttacaggtaaagtcaatagaaaattgattattctacccctgaaattctccagtagctagtgttttttcttcattctaaacctacggaaactcgcaaacccaatcgcagctcactgatcaatttggactgtatcatcacgagatcattccactagcgaaacggaacaccggaagccgcaagcgcccagcttcattgacgcatctggagacagtagacgctggtcaattcgcatgaaacaaaatataacctcaggaatattggcactttaaatttacaagaacccgttagcgctttaaacatcacgggtacacaagttacaagaatttccaagcactttacccgccacttgttccatgaatgctttcagcactacataaaactagtaattaactgctgcctaacaagggtggtcagttagactggacacactagccaatttgcatcccatcctaaaggaaccaaagaacccagagaaaggctcacattattatctccactctagcctgccaacactccatcatcagggatttcttagagactgacaaatagcgaagaaactcgctagatgtactaagctagtatgcatcgacttctctaaaaaaatctgaagttaattactcttcatcagagaaaaatgatgggagatccacagttttttccttgactttccacaatatacatggacctatacttgatataagggacaacaaccacagccagcacagacttgatcggctggaacacgtcccctggcctgccctcatcgtggtattgtgacgcttccggttctctagttacctcttgataatatgactcttctgtttggccatgctttgcatggataaggagcactgggaatcacggggcgcaacctgagatcatccgagtggctagagagtaattgaagatcattccactagagtgacaaacagtgcactccttcaggaagatttccagggactgcaaaagacatgacatgtctttcaggaaaaattctccggggagtcatttctgaagcagatgaaccctcaactgctgctgcatggttccggccatgaaatcttcccaaacgatttacgatagaaattctctccagatcttggcactccagttgcacatccaacatcgaggccctcttgttcaaacttataaagtcattttccatcttccggattcttccaacaaagacttccacgaccttagacactttgtcttccattttcttagcacttcttgtttcggacgcgtggttat

SEQ ID NO: 12081 - DNA, 220 bp, Zea mays
  Clone ID: MRT4577_111012C.1
aggctgccactgagggaaataatgatatgccgctcagtgtcaaaattcttcctgcagctgctctcaacaccttcgttcctccaggtcctctccagctcccatccaccccttcagctcctgggcctccgcaaccgtcaccacaccccttctcacacctatcttcccctgttcgaccccgtcaccaaatcatggatccacttcccccttgacttttctccct

SEQ ID NO: 12082 - DNA, 498 bp, Zea mays
  unsure (1)..(498): unsure at all n locations
  Clone ID: MRT4577_111013C.1
ccgcccgctaaagggggggggccggcgcgcgcaaaacagcggcgcgaggggacgcacgaggccangcaggnggngcgcaaccncgaccnggagcggnacgcggggcggngggacgagaacgcgngcnncccgncccggnnccagcccaagacgggcaccaacgggcncgcacgggacacncngaacccggacggcactgngaaggnggngaacgagacgagggccgacgggcgccgcggccacaacgaaggcacggcccggcgcgccgacccngccagcgacgaggccaagcncaaagggcgcnncaacgngccgcccnnccncccccncaaccccgncaccggcgacaacngggngcnccacaacgacgccgacnaccagnacgcgcncgncgggcagcccnccaggaaccaccncngganccnnngcaggcagccccacanggacgagnccgngnacaaggagcnggnggagcgngccaaggaggaagggnacgac

SEQ ID NO: 12083 - DNA, 416 bp, Zea mays
  Clone ID: MRT4577_111014C.1
atatctccagaactagcccttagctaatgctgcccccatatacaaacgtgttttctagaaataatcaatatattttctgaactatgttcatctttttttaacatattacattcaaaaaaaacaaaaacaaaaaaaaaatacaaaaataaaaaacaacaacatttcctggtggttcaaggagacggaacgcatattatgcatcatttgctttcttggcagctttagcaacctcaattgccttatgtgaaaaatggaatctgagggaatttgtctttgctcctccacccttgttacatgaaaattcttgaagagtgttgaaagcatgttccagtgcctttgcacatttagcgaaagactgaccgatttatatttctctgccttctaagaagcatctgattcatacacaacctttggtg

SEQ ID NO: 12084 - DNA, 418 bp, Zea mays
  Clone ID: MRT4577_111015C.1
tttaattccgggtcggccaggccacctttctgggggcgccccctgcctgtttagttccgtgcctgctcttttttcaggcagtacagtttcccgtccaagggccgcagagggcaccctcatcctaagaacggagagaccatgaaatgccgcgcacaagagactgcccctttcagtccctggaatgtccttgacatgcccgaacctcctggcccagctacaacactttgatctgttatctgcccctccccccagtgggtccgccaccaccgggaagggcctaatcatctgcgacaaaacccacctgtccccccacctcctgttggtagttttcgggggatgaaacacagttacggtcgttgggggcgggttgcggttcaaccacagggcccgccccaagagggttttcccacaaacggcc

SEQ ID NO: 12085 - DNA, 307 bp, Zea mays
  unsure (1)..(307): unsure at all n locations
  Clone ID: MRT4577_111016C.1
attgctttcatnactcacgcagtggccatttaaaggattgttgtataatacaaatntcaaaaaacacaatattcaaaaaaaattcccactacacttaaaccttaaatgagaaaacacccattcatccaaatcacaattgcttttcttatactgcagactaaataataattatttaatccttaacgcatgttatatcccatattatgcctcaaactctagttctctatccaatcccttaaaaacttttacttaacttaaacatactatttcattcatccaaattaaattaattaattcttaaaaattt

SEQ ID NO: 12086 - DNA, 815 bp, Zea mays
  Clone ID: MRT4577_111017C.1
ggccggccgggattgcgtctgaggctcgtcagcagatgtctttccgtcagatgctgggtctgcaccctatgcctgtgtggtttgagactggtattccgcagtcgtgggcgtggacttacctcgccccctacatcagctcgtgccctgccaacacaactcgcctcgcctgggccaatttccctgcgctgcacgtcgtcaaccaagcgaatcctaaccgcttctccgccaacgacaccaagccctatgaggtagccggaaaccgcactggtgacccatccgattccaccatccctgcagacgagtcctgcgtcaacgtcaatgccaccgagttcccaggatacggctgcgggcctgccatcgctcacaaccgctccgagccgctctccttccccggcaagctcgtcaacctcacctgggacatgcccggtcaagccgtggggccgaacaactcgtacttcacatccacacaggctggcacgcccacattcgccgcttgggtcagccagctgaacctcacgtacacccccctgaccatcactggtaacaacacgggctacacataccagcctgacagcgaggtgtaccagggcgaccctgcctccaacggtaccatgttcttggctatcaccgatagcggcatgttccttacgccgttcaacctgagcatgatcaacccgcacgttgtcgcgcttggtctgtaccaggctggctaagcaaatggagcgtgtatcgtagaggaaaaggaacgcattgacatgatatagtaatgacgtcgagtagcataaccatcggtacttataataataatatcaacc

SEQ ID NO: 12087 - DNA, 338 bp, Zea mays
  unsure (1)..(338): unsure at all n locations
  Clone ID: MRT4577_111018C.1
cgtcccgtcgaccaccgnatgggaacccagcgacggcgctcggcgggggacatactaccgcggcgctctgcgcgcggcgctgcacgcccgggcgccgtcagcgctgctttgcactggagcggcaagggggaagcccgtgggggccgcgctggtactctcggnaagggcgcgtgcccgctttcgacgccgtgctgggggccatagtacgacnnctgcgtccggccgggccgcgcgactatcgagnacccctcgtgaacacatacgagcgggcgtgtcgatccgaccgcgtcgtgttcactttttttgtgtcgggtttagaaagcgaccgtgcgtcttcg

SEQ ID NO: 12088 - DNA, 2440 bp, Zea mays
  Clone ID: MRT4577_111019C.1
attgggtacctcgaggcccgggcaagcattactatggtagaatctcatctgacgggtacgaggagatgctaggctcacggctagccacagttgtgcattgctcgagtgcatgaccactgaattgctcgagtgcatatatgatcggatcctccagtgatctgattgatgctcaaagaatccatgcactatgcaggtaggtggatcgatagctgggaggcattaaagcggacgatgacgccttggcctcgctgcaatcttgcagattgctgctgcagcgcttctttaagagccaaccatccacatataccttgcttgacgccaagccaccggcattgtcggcaccgtgccctccgctccgctccccttcctcttggttttcggttccttcctccctcaaccagtcatctgctgctatttatgccacagccactcccagcagcggtgggaacaaagagtgccagcgtctcacccctgaggccgcgcagagccactgcttgcgtctctgtctctctgtctgctcgtttttctccttctgcgactcgtaggagggtgaggtcttgcttgcctcgcggaatggcggcggccggggcatggctggcccgtgcgacggcgacggcggtgctgggtttcgtcctggcggtggcgtcagctgaggcggcatcgggggacgtggagatggtgttcctcaaggccgcggtggccaaaggcgcagtgtgcttggacggcagcccaccggtgtaccatttctctcccggctccggttctggcgccaataactgggtcgtccacatggagggcaggagggtggtgcaggaatcctgatgagtgtgctgtccgcaagggcaacttcaggggctcctccaaattcatgaagccactctcgttttcagggatattaggcggcaaccaaaaaatcaatcctgatttctacaactggaatagagtaaagatcagatactgtgatggttcatcatttactggtgacgttgaggctgtggacactgcgaaagatctccgttacagagggttcagagtctggcgtgccgtcatcgatgatctacttactgtgaggggaatgagcaaggcgcaaaatgctcttctttctggatgctcagccggaggtctagcagcaatactacactgtgacagattccatgatctgtttccagcgaaaacaaaggtcaagtgtttttctgatgctggatattttttcgatgggaaggatatctccgggaacttttacgctaggtcaatctataagagcgttgtgaatctacatggatcagccaaaaatttaccagcttcatgtacctcaaagccaaagcaatcacctgagctgtgtatgttcccacagtatgttgtcccgacaatgcgcacaccattgttcatacttaatgcagcctacgattcgtggcaggtcaagaacgtcctagcacctagtccagctgatccgaagaagacttgggcccaatgcaagcttgacatcaagagctgctccgccagccaactcacaaccttgcaaaatttcaggacagattttctggcagcactccctaaaacgcagtctgtaggcatgttcatcgactcatgcaatgctcactgccaatcaggatctcaagacacgtggctagccgatggttctcccacggttaacaagacgcaaattggcaaggcggtgggggactggtactacgatagggaggtccctcggcagattgattgcccgtatccctgcaacccaacttgcaagaaccgtgatgatgattgagcaattgtataagtagttcatgttatcgaaatgaaaacaataaaggatcacaacgcgcgcccgtagttgtagatgatgaattataaacacatatgactgagctcaaagttgtttaatcatcatctgttgcgaaatgaggaagacaattggtgtcttgaagctgtgttttcgactgtgtctaaagcgtaaatgtaacgtatattgtgtcttcgcctatgcttaagacattggactagttgattggtcaatttaatttattaaatgttttgattggtgtaatgaatataataagtcgtgcatgccgcatgactaggcttccagtcttccactctgccagaaaatctgtcctgaaattttgcaaggttgtgagttggctgacggagcagctcttgatgtcaagcttgcattgggcccaagtcttcttcggatcagctggactaggtgatagaacgttcttgacctgccacgaatcgtaggatgcattaagtataaacaatggtgcgtcggacgttgaggcaacatgttggtgatgaactcgcggttctcccagtccgcctgcaccgcgatgcccacgtaggctgggttccccatcccgccgccgcgacccatccctgcctcctgttgcgtgaactcaccttcctgttcccgaagatcacgagccgaatccgagct

SEQ ID NO: 12089 - DNA, 274 bp, Zea mays
  Clone ID: MRT4577_11101C.1
cggatttcctcaccaaggaggtgcagttctaggacaggctcttcactctgcaaatatggggcactgctggccaggaaaggtttcagagtctcggcgttgcattctaccggtgagcagattgctgtgtcctagtctatgatgttcattctatgaaatcatttgacaacctgaataactggcgagaagagtctctaattcacgctagcccatcagatcctgacaatttacctgttgttctcgtgggtaacaaagttcatgtagatcgtggcaacag

SEQ ID NO: 12090 - DNA, 380 bp, Zea mays
  Clone ID: MRT4577_111020C.1
gtatgaaaattggcaaaattaacagggactaataacaagcaaatataatgacaccgttttcccaaaaattagcctaaagaagatacaatgaactaaaaacaacaacatttatgaacactgtttcaacaaaaaaaaatccattacaagccagaacaagcaaaaacactatcaaataagtaactggcagaacaaggaaaatgggttgcaaaaagcttgattgcttcagtgaatatccaagaaaatggaatggatcactgtatatcatgaggatatattgcaaatgtcctcgtattagacaaccataaaaaccttcccataatagataactttgtcaacctgcacttttgcacaaaaattttaaaggtccaaaaaaagcaacc

SEQ ID NO: 12091 - DNA, 372 bp, Zea mays
  unsure (1)..(372): unsure at all n locations
  Clone ID: MRT4577_111021C.1
tgtgcggcgctcgaggccggcggtctggactanngagcgagggnaggctttggcgaccgggtccggcggcagctgcagtcggtggggcggctggcagcgtatctcggcggcggtttcctcctcctctctgccacctcttccgtcgccgtcagcgcactaagtgataactacgaggacaaacataaaaatgacattacgtgtggattctgcaagcgcgggagaagacagttagtgcagaaagaatatgaagagtctgattggccaacgatctggcacaataagtcgcgaaaaaagcagcacaactcgtaatgcactcaataaaactatggagatatataaggaaaggaacttttttttttttcaccccccccc

SEQ ID NO: 12092 - DNA, 214 bp, Zea mays
  Clone ID: MRT4577_111022C.1
tgccaactcctgtgacatcgcaggaaagggagtgctcgacgccgagcgaacctgcgaccgccgctaccttagccatcactcatagtgccgatcagggagctctaccgccgagatgctgtgaacacagcaaaagcattagccgacaggaaccaccattgggccatgcgtgatcgtagcctgtcgggtgaagaagaccaaccaggggtcctcacgg

SEQ ID NO: 12093 - DNA, 225 bp, Zea mays
  unsure (1)..(225): unsure at all n locations
  Clone ID: MRT4577_111023C.1
gtcgtcgcgcgtcaggaagaagaggttctgggacgttctcgagagctgcaagcagaaggtcgaggccatggaggccatggagtcgccgctggtggcgttccaggaagccgaggacggaggcgccgtantaggggatggcggcggcggcggccgagggagcgggggcggcgcggacgggatgcggctcgtgcagctgctggtcgcgtgcgccgaggccgtggcgtg

SEQ ID NO: 12094 - DNA, 259 bp, Zea mays
  Clone ID: MRT4577_111024C.1
ataaaaaaaaccctttggtggacgggcagagatccaggaggggttgggttcctgcagatacaaattcacctgagatcggagacaaacaaaaggaatactactggttagctgggtgcaacttttgcccggggggggcattcattccctacacacggctgggggatggcccacatgctaacaacgggccttttttcctaccggtcgacccggccccccccacctaattgacatgccccaccccctggggcatgcctgccca

SEQ ID NO: 12095 - DNA, 232 bp, Zea mays
  Clone ID: MRT4577_111025C.1
cattccggcaacacccccaataagctactagtgctatggatggtatgacagttacaagcgacgaaaaacatctgctcgctgaagaacaaacttaacattgaaacaaaatacaactaatcgactagtataacacatcatctgggacatttggtgtaagaaacttctgtggatccttgaacaactctacgtaaatgtacttaggcaacaccctctccggaacaggctcaaatgg

SEQ ID NO: 12096 - DNA, 382 bp, Zea mays
  Clone ID: MRT4577_111026C.1
tgttgtagacgggctgacctgggccacggaccaccactctcttcttttctccttcagcacctaccgcgaggggctcgaggccaagatcatcctcgattgggagccgcacaggtctccgaggcttcggcttcctgaccttctccacggaggaggcgatgccgcacgccatccagggcatgaaccgaaaggagctggacagccgtaacataaccgcctactaggccccgtcccgacccggacagccaggccctgggatgagagcttaaccgtggacgccgtggacgcggcaggctactgcggacgccgacgccaggatggcgcatgacattacagcagggtctggccgctactgtggcggcgaccaccgctacggtggtcgtct

SEQ ID NO: 12097 - DNA, 238 bp, Zea mays
  Clone ID: MRT4577_111027C.1
ttgttcgcgtgggcggacgcgcgggccgacggaggggttaggatagtacacctacctagattaccagatgcaaaacattggtgggtaagctgtcatatatatatatccacacttttgacctgaggcactgagctgtgtgtcacgtgtcaagagtaaaacgtgagcttggaggggtttccatgtaggaccattgacatttaaactgtatttatgtggcctataaactgtaactggagat

SEQ ID NO: 12098 - DNA, 296 bp, Zea mays
  Clone ID: MRT4577_111028C.1
gaacaattgtaagaaaacatccaggatcccagcatttgcatttcaagttacagaacataaatcaggatcccagggcaatgcacaaccactaatgccgtttgtaatattaccgtacaacctgaagggggcccgcctcaaaatgtatggagccaactgtgattattggtcaggcttaggcttgcttccattggactatccatcgcctgacatgtttttttgcaaggacgcctggggtttctggtattggtggtgacccgggcctgccccgggttcaaggcggaagtcgataagggact

SEQ ID NO: 12099 - DNA, 518 bp, Zea mays
  Clone ID: MRT4577_111029C.1
cgttctttaaaaaaaaaaaaaaaaaaaaaaaaaaaaaaaaaaaaaaaaaaaaaaaaaaaaaaaaaaaaaaaaaaaaaaaaaaaaaaaaaaaaaaaaaaaaaaaaaaaaggaaaaaaaaaaaaaaaaaaaaaaaaaaaaaaaaaaaaaaaaaaaaaaaaaaggggggttttttttttagggaaccaaaaaataaattggggggggggggggttttaaaaactttttgaacggggaaaacccttggggtaaccaaaataaatccttttaaagaaaatgccccttaaaaccagtggggggaaaacaaaaaaggcccgtccggactgccctttctaaagggtgggcgattttaatggaaaaggggaccccccttgtttttccaaataaagcccgcccgttgaggggttaacgcaacacccttccgttactttttcaagccccttagggccggttttttccccttgtttccctttttttttggccagggtcgcggggtttccccgtaaggttttaaatcgggg

SEQ ID NO: 12100 - DNA, 366 bp, Zea mays
  Clone ID: MRT4577_11102C.1
cgctatcaggtttggccggctgacaaggatatacctgcgcgttgccaccgaggctgtgacaggggttaccgtcaatgtcacaccggactaggctgcctgctataacctaattgacatgctttggacttctgcttgtgcattcctactcatggctgttctgggctacatggaccagaatctggcttccaccggcttatccttgaccattgcgcctatcatatcagtctcctacgtccttattaccgttaccgactagtctatcaacctcatctacaatatgtacaacgcgcagagttactgcaccctctttgtcgacctaatcctctacatgtttgagaccgactgggctactagaggcatcgattt

SEQ ID NO: 12101 - DNA, 384 bp, Zea mays
  Clone ID: MRT4577_111030C.1
ggccaaccagaaataagaagttacatttccaaaaaaaaaaaaaaaaaaaaaaaaaaaaaaaaaaaaaaaaaaaaaaaaaaaattataaataaaaaaaaagaaacaatagaaagggtaaatttttgaaaatattaataaaacttgtcggaaaggtggagaatgaatataaaaggttccctttttcccttttgggggggtcaaattgaaaatgtcttgtttttttttttttcacctggggtggctgtgaaaatcctttttttttcccaacttcctctctttgctgaaggtgctcttttttcaaggtggggcctttcaattatgccggctgggatagcctttcccttccgtttctaatcttgtttggttaatggaccctcccttttt

SEQ ID NO: 12102 - DNA, 447 bp, Zea mays
  Clone ID: MRT4577_111031C.1
cgcaagcgaggtctctcccgctggctcccttctctagctccggcgcccggccggatctcgcggcgtcgcgcccagctctgctgcctttcccatggcggactcccttaccctccagctccctcctgcaaccgagcggctccctggcgcacgcttgcttactgcgcgtgctcgacggacggagctctctagcgcgctcgcccatgccgcgcgcagccaagctagacctgcacgtacatctgactgctctagctatgacgccacgctagctcgccctggctgagatacggcgcttggcgcctgattctctgactctgtacctgctgccaaaggtttttcagtccgggccctgcttgatggaactcgacccgggccccttatgcatgcacggcttaacactgtgcccggtactaagcagtgcttcgtgaagcgctgaacttaactcggtct

SEQ ID NO: 12103 - DNA, 962 bp, Zea mays
  unsure (1)..(962): unsure at all n locations
  Clone ID: MRT4577_111032C.1
gtactccgtcggccggttggaggagaacaggnagaggagctctgagatggagacggccgcctcggcagcgcgcctggtgaactacccgctcgtcgcggcgcttctcgcgttcgccgtcgcgcagtcctccaagttcttcaccacctggtgagtcaaacccgccgactgtacgtcttccgccccgtcccgccgctgcatttccgtgcggtgatttgggtcctccggtgggcgcgtcgctgctgcttaccctttcggtgctcccgtgcgggcgtgcgagcaatgcttagcccaagtgaatcgtatggaattttcgtggttttgggatacgtagatcgtccaccgagtacatacgtgtttcctggctgtgtttagtgatttttggttatttttgttgggtcactcagtttgccagctaggctgcagttcctatggtagctgtagttcccttcccccccgcgtaactgattcagtgtttagactgcagatcgtatggcagctgtagctcccttcccttcactgcatcagtgttttaagttaaagggcatgtttgaatgcactagagctaatagttagttgactaaaaatctctatatttaaacttcactctgtcaacaacatagtttacaatgcacaaagcataaaaacatgatctccccatggttctggctgtccaagtgttcgatagtacaaagttctaaccgaatttagatctggactgtaggtttcaggttgtagctcgagttggttgctgtaaatctgaaagggccactttcaattccaaccacggtgtaatgtaagctttgttatacaatcagcagcggtaagatcattttgcagatcagtatggtcgataccatgccgtcgcatttgcttttaaatacgtagcaaaaacaatgtatttgaatatacattatatctagataaaaaaaaaaaagaaagggcggccgccgacaagaaagctc

SEQ ID NO: 12104 - DNA, 308 bp, Zea mays
  Clone ID: MRT4577_111033C.1
catctgcatagtcttctcatacagaaactatatcatcacatccgggtccacaacaatcacatatatctaatacatctatagacgggtcggctgatacctctcaagcaagtgtagcttcagatagcacagatggcaggccagtgaagtacaagctggtagccgatttgctatggcggttgagcaaaaaaatttatacagatgaagaagcacttctcacagagatagaagaaccaacaagctaccgttaagcctcaatactatcggaagaacatttaagctgatatccttatcaaagtcattaccagcag

SEQ ID NO: 12105 - DNA, 299 bp, Zea mays
  Clone ID: MRT4577_111034C.1
ataataggtgcagacttatcttaagaacattggttgttacagaatataccagaccacactttacaaattttcatgatatactggtttactggaatgccttataccactgctaattcagcatagcacaccatttgcacgattattcctaatttattggtaattcagccatcaagcatatatgcaatcatttacctttgcactaattggcaggttgacatcaaagttgctccaggatctcttgcttatgaagaatcagttaacaagccactgaacgtcatggagagggttgcagcagcctt

SEQ ID NO: 12106 - DNA, 503 bp, Zea mays
  Clone ID: MRT4577_111035C.1
cgttgctgtcggcatcgctctcttctcggccatactcctcagcatgttccagtggtacagcaaagtggccggacaaacagataaaaaacctgatgacgcaacgccgccggcggatgacgtcctcggcggcatgatgaactatcagagaatatcgtacgccgggctggacagagctacaaacggcttcgcggacaccaacctgatcggcgtaggcaagttcgggtccgtgtacctgggtgccctgcccctggtgcccaagggcgctccggactcggcgcccgagaaggtcgccgtggccgtcaaggtgttcgatctctgccaggtcggtgcctccaagacgttcgtgtcggagtgcgaggcgctacggaacgtccggcaccggaacctcgtcaggatactcacctgctgcgtcggcgcggacgcgaggggcgacgacttcagagcgctggtgttcgagttcatgcccaactacagcctggacaggtggctgggcgtcaacccca

SEQ ID NO: 12107 - DNA, 1977 bp, Zea mays
  unsure (1)..(1977): unsure at all n locations
  Clone ID: MRT4577_111036C.1
ctttccgctgctgtaaacagagtcgagcaacagagctgtgaccattgagaggcgagtggttaggacctaggcctctgatccatgcaggtccctgtgggtttcctcggcaagctctggagcttcgtttccttcgtgcccttcttcgtcctcctcctgcttctgggatccatcaaagctgccatagtcggcccggtcacggcttccatcgtgttcttcgggagctctgcagttattattggcctctggcctgctcatttcatctggacatactactgcgttcttaaaacagaaaggatcgggctgcagttgaagattcttactggactactgctgccattgccactgcttctcttgccagtacttgctagcatcgggagtctcctgggtggtaccggatacggagttttcgtacctctcatggcgaccttcgaggctgttggcgagggtgtgactgacaagctgacccattgtttcacggatggaaccgtaagcgcgatggctggagcttgcacggttgtccgtgatgtcaccgatttctgcttccactcgtacttctctttcatggatgatcttattgacaaaatgggggacaatgaagaagcccctctcgacatcaagttgtcttatctaccacggagcatggtcgttgcctttatcgccgttccagtggatgtgctgctgataagcgcagtggctttgtggaaaagcccctgcatgttgttcaaaggatggcagaggttatgtgaggatctagttggaagggaagggccgttcttagaaactgtctgcgtgccttttgctggtttggccattgtgttatggccacttgcggtgattggggggttacttgcttcattcttcagcagcttcttcttcggttttcgcgcaggactggttgcttatcaggaggcttctttccaaatgggacttgcatacatgatttcagcagtagcaattttcgatgaatacaccaatgacttgctttacctaagagaaggatcatgccttccaaggcccaagtatcggagagcagatatcatgagggagtgtgaaactgagcctgcagagaggcagcaaactggccatcacaagcatagaaggacgttacctcgatcaaagacgttcatgcaaaccgtccagcgactacgaccgattcaaatatgggattggttcttccggtcctgtgagctcaatggaaggatactagtgagcgagggcctgatcactgcccaagacatggagcaatacatcaccaataatggaaaatgcaagaagctgggcactaaattaccttgctggtgtatcttccagtgcctattacgatctgcaaactctgattcagacggtttggtcatatctgatcatgtccaagtgacgaccctcaactggcccaaagacagagtccttgactggctgctcggaccactcctgctcatcaaggatcaaatgaagaaactggaggtcaccgaagacgaggagatgtgcttgaggaagctgatcatgacaagcaagaacgagaagccatctgactgggacgattcgggtttcccgtcagacgacaacataaagagaggccagctgcagtcgataatcagaaggttgcaagggattgtggcctacatgtcccgagtgccgagcttcaggaggcgcttcatcaacctggtcaaggccatgtatctagaggccatcgaagcaggggctatcgacggatcgcgcaaagttaaggcggatgttgctgacaggtgtgcggaagatattgccggttcatgttcatcaaccgacacgcgagcgaacattcacatggtctgatgatgtttcaccagcatagcagagctcgacgagctgtgctgaattgtgctgaactgtgccaaggctgcaaacaaatacaatcgagcgaccatatcttctcattagcaatatggcacataattttgtcnnnccccnnnncnnaaagggcggccgccgaatagtgagctc

SEQ ID NO: 12108 - DNA, 279 bp, Zea mays
  Clone ID: MRT4577_111037C.1
cttaggaagccccttcgcttcagttgctcgcttctgggtgtgctcccttcgaaggcccagataagacagggaacacttgtgagcacacagagcagcatctgatgccctgtggtgtttggcatgtgccccctgtctactgaccaatcagtgtggcatgaggcccacgccacccaaacctttcactttccaaagagctagccgtcctccacccagtaccatgtcctagcctgtctgcatttgttagtggtaatattctctatgtataataaatttttatac

SEQ ID NO: 12109 - DNA, 554 bp, Zea mays
  Clone ID: MRT4577_111038C.1
aggaaattataagtttgtagtttattgtagaattcacaagatctttttgaacgaatccagtgtcaactgctggtacatggctgggtagtaatcatccatcattcaggactccatacacaaatgatgaaagcgggtcctgaattggtgaaatcgcgccaggcaccatcgacttgttattttgaaaagcatcacctacatgcctcctctgcacactggtactttaactttgcacataatttacgatgaagatgtagctcttcccatagtgacatacgcagacgtgggagtcgcaggccacgctggaggcccgcatctccgcagagaggcagaatgcgtcgtgctgtcggccggccctcgccagcgaatcgacgagcatggtctacgagaactcggtcctgcggggcgtttcgtcgagcacctgcagcaccagctcgacgcggtcggccttggcttaggcattcgagagcgccatggagacaaacacggaccaacgttggaggaggacgccaccacaggaagatgcgaagggtttggctgagttttgagtctgggct

SEQ ID NO: 12110 - DNA, 267 bp, Zea mays
  Clone ID: MRT4577_111039C.1
gtcttctcccgcattgaccacaagttcgacctcatgtacgccaagcgcgccttcttgcactggtacgtcggtttgggtatggacgagggcgagttctccgaggctcgtgaggctctggctgcgctcgagtaggactacgaggaggtcggtgctgagttcttccagggtgaggacggcgacgagggtgccgagtactagacgctctactggcgcggcgtcgtcgggcttgtgtgccaccttaatcctgtgatctgccctgagtggctc

SEQ ID NO: 12111 - DNA, 369 bp, Zea mays
  Clone ID: MRT4577_11103C.1
cgggggggggggggtgatcgattaaaaaatgaaggggaaagggcattgataggggggggggtggactgatgacaataaatgggtttggggttaggttaaattgacgggttaaagggggggggcattggaattggttggtggggaaaaaaattggttatggggatacggggggggggggaaatattaaaaggctacgatttgaaaaagggggggacagggaagaccaaattggttattttacggacgggcgggcggacggaaaaatgggtgggtttgaggggaggaaaaatgtgcgggggtgttaaataagttagttgggggggacaaagtttggggggtttgcccaggggtttttggggacggggttgg

SEQ ID NO: 12112 - DNA, 476 bp, Zea mays
  Clone ID: MRT4577_111040C.1
caactaaatacagcctacgctctaaatccatatagtctctatatatataacaagatctaaaaccaggccatgcatggcatggatctccaaaacacaaaggactcgccggggttgctcctgaaccggaggggggggggggggctttttgagaggaaatttaattgcacaacaaaatacataacactatccaacaggctttttttactccacttactgcggcttaaggcaaaagcgccttgcaaaacactataaaacaggctggagctaaacctgtttctaaagaaaggggtggccgacctaaaaaaaaaaggcaaacggcttctgcaaaatcaaatccatgccgtgctgttcctgatggtatccttacctgcagctccctccaacctccgctgagattaacagtcttaaagtgcatcctaaaagtcaacatcttctgttcgttctacaccatgacaccattccacttgtgcacactg

SEQ ID NO: 12113 - DNA, 982 bp, Zea mays
  Clone ID: MRT4577_111041C.1
cctcgaggccggccgggccgggtcttcggcgtcgtcctaatcagcgcgagccgcagcccccgctgacgcgaatcgcgacctccgcgcgaccctccgctgacccggtctccctgccgcctggagcgatgaaaccgcaccctcgcgcccaagcccagactcaaaactcagccaaacccttcgcatcttcctgtggtggcgtcctcctccaacgttggtccgtgtttgtctccatggcgctctcgaatgcctaagccaaggccgaccgcgtcgagctggtgctgcaggtgctcgacgaaacgccccgcaggaccgagttctcgtagaccatgctcgtcgattcgctggcgagggccggccgacagcacgacgcattctgcctctctgcggagatgcgggcctccagcgtggcctgcgactcccacgtctgcgtatgtcactatgggaagagctacatcttcatcgtaaattatgtgcaaaggttagtctgttaatcatcttgcagatatctgcaaggattctatatgattcagaagtagatgtaataggtattcaggttaatacaaatgaagtgatagtgcaaagaaaaaaaaaaaaaattaaagtaccagtgtgcagagaaggcatttaggtgatgcttttcaaaataacaagtcgatggtgcctggcgcgatttcaccaattcaggacccgctttcatcatttgtgaatggagtcctgaatgatggatgattactacccagccatgtaccagcaggtgacactggattcgttcaaaaagatcatgtgaattctacaatcagctacaaacttataatttcctaaacgataataaaactaaaaaaaatgaaaaaggctattctgctatgagggtaaagttagggtgccgaatagttgatgcacctgcttcatcatctagaaaaaagaaataaaggagatttttacgagtttcttttttaggaaccttaaaaaaaaaaaaaaaaaa

SEQ ID NO: 12114 - DNA, 319 bp, Zea mays
  Clone ID: MRT4577_111042C.1
tttttaacacaaacggaaacaatagggcagacgaaagatttatactgatcatacacccactttcaacactgttacgcgtatgccaaatcattttaataaccacaaatacaaccagcacactattatataaaaagattgtcgacagaagacatcaaaaattgtattagagctacaggttgacacgcaataatagcaacgcatttattgaaaactgtaacctaccactgcacaaagtaaacaaaaagaagcatgccgtggcccaatcatttacaccgttaaagtgtttccaagggaagggagtacccatgaaaaatattta

SEQ ID NO: 12115 - DNA, 469 bp, Zea mays
  Clone ID: MRT4577_111043C.1
gggggtttttttttttttttttttttttttttttttttttttttaaacaagcgaaaatgctcgccttttacctaccgatcattacgacactgcacgtaatatagttcaagattaatgggcagcatgtttttggagctagttcacgggggggggggggaacatgcatatgccatacagttttttttgctggatctcatatctttctgaagtaattctgggggagcacattgatgcatgagaaacgtctctatacaacatttaaaacgttaatggtccttcctttcccttctgcctcctcgctctaaaaaagaaattggcgcctaaattgcccagattacatgccgccgggctggcgactttaccccttttcagggggcaaccaagggcacacttttcaggcccgggcggatacaaactttttggcgggcttcatgccgccggcggggttccttttttcctgccgcccccg

SEQ ID NO: 12116 - DNA, 592 bp, Zea mays
  Clone ID: MRT4577_111044C.1
gataaaagagattgtttgataataaacattattgttactcataataatcatcaacattgaaacatacatagagcaaataaaggaagataatcattttactctttgtagatcacacatataacactcttaccaaacagtaagatctctttcttagggatcaattgatcttcttccaccttcccagcttctctttgcccttacgagttggaatggcgtgaggattctcctcgacagacactgccttaaatcctataggcaccaacacctcttcgaaggtagagacatctactttgtagggaggtccaccaacgtggtcggtaatcggatacatgagagttatgagttcgccgtcaggttttaagagttcatacatagatttagcccatgcaggtctcatctccggttcaatggcacagaagaacacataatcgaagatgaggtcgaataattcagtaggacgccacgtgaaaacatcttccttcacgaacgaaaagtactctgcctttggtgaggagccgtaagtctcattagctttcgcgagtgcgctttcggaaatatccaatccaacacgaaaacgttcaggacttgccat

SEQ ID NO: 12117 - DNA, 190 bp, Zea mays
  Clone ID: MRT4577_111045C.1
tcggtcacaagccaaccatagtctcgtttctagccaagctaatcaagttaggggtagagactcattccagggctggttggctcctactaatgcagctgactacacatcaggctacattcctagttcggagcactcatccatgtccattgccggcactctcctacacattctcagactactctctcgatag

SEQ ID NO: 12118 - DNA, 275 bp, Zea mays
  Clone ID: MRT4577_111046C.1
gccacgcgtacgtgcacacgtccggttacacggacacaccacagggacggggagtagatgtagctgaacatgttgtggcatgtgcccaaagacgtgatggtgggcgcgttcgacgcggtcacgctcatcggtctcatggagttgttctacgaccaaacgctcaacgcgaatctgagcctctgatgcgagatgttcatgacgtactacacactcacgatctacctaagctacgcgctaattaccgtggtgtctcgcgccagcaatcgccgtgggca

SEQ ID NO: 12119 - DNA, 240 bp, Zea mays
  Clone ID: MRT4577_111047C.1
acgccctcagccaattccttctccccgccttggccacgtgtagccccagctgtctgcaggcaccaggctgggatgagctgtgtgcttgcgggtgcgtgtgtgtgtacgtgtctccaggtggccgctggtctcccgctgtgttcaggaggccacatatacagcccctcccagccacacctgcccctgctctggggcctgctgagccggctgccctgggcacccggttccaggcagcacaga

SEQ ID NO: 12120 - DNA, 765 bp, Zea mays
  Clone ID: MRT4577_111048C.1
cacgactatagggcgattgcgctggacgcgccggccgggggcccgcacacacacgcatccatcaaagaaacaagagcacacaaacaatacctctctagctcgccaccaacaatggcctctaggttctccatcatgctcgccacgacggcactggctacgttttttgtgattggttcgtgcaccaccccgctcaccttcaaggtcggcaaaggctccaagcctggccacctggtcctcacccccaacattgccaccatctccgaagtggagatcaaggagcacggtggcgatgacttctcctttgagctcaaggagggcccggccggcacctggacgcttgacacaaaggccccactcaagtaccccctctgcatccgctttgccatcaagtctggcggctaccgcatcgccgatgatgtcatccctgaaaattttaaggccgacaccacctacaagaccaccctcagcatctgatcatcctcttatgaggaataatattttgaaagagctcatctgatccatgtgccagcgagctaatatttaatttttgttctatggttattttatggcaccacaccacccaagaaataagttatgttacatgtcccttcgtgcaccttgttgtgttgggttaatacggttatataaattgaaatacaatatgtatttaatatttttagagagaaatatattgatttggtccattgaaagaaaaaaaaaaaataaacaaaaaaaagatcaaaaacaatgcaacacaattagacc

SEQ ID NO: 12121 - DNA, 551 bp, Zea mays
  unsure (1)..(551): unsure at all n locations
  Clone ID: MRT4577_111049C.1
gtttttagttgcctagaacctctgtgtttggtttttgtcatttgtttcttcagtccaaataaatacagataaaatgacactggcagcttcagagctgtgtgttccatggtttcttcagctgtttagttttttttcccatggttgcagagaagttaaaagaaaagaaaaaaaaatccgccccttgagttatgcaaggcgattttctctgtattctctccttttccgggcggtgaactgctctgctcggcaggcgaattccctgatgcagtgcagtagctttattgtggacggctctcctttttttccacctttatggttcttgtcttcttgagcaatcgaaaaggctattccggctggctctgctagcgcaagcaggcagttaagatgggacaatggcaactctttttaacctaattgagctttaccgttcacctttacaaattaatattgctattattggccagatagttcatgagttaggccagacttaaccaaatgtactctgaaactgcctgtgccatttntatccgtatttaataatccaagtaata

SEQ ID NO: 12122 - DNA, 175 bp, Zea mays
  unsure (1)..(175): unsure at all n locations
  Clone ID: MRT4577_11104C.1
gctcgcgtgctctcgttcgtatgctgtatactgtagacgtccgcccttnnttttttttttttttttttcaaaaaatcaaaatttaataaatttgacaacctgtttgagaaaaatatttttgcttattgcacacatgatctgtgtttagcccattcaaatttgacacggaagcttt

SEQ ID NO: 12123 - DNA, 527 bp, Zea mays
  Clone ID: MRT4577_111050C.1
attacccgtggtctttgcaatctctcgcagtgttgttcgcctgtcccacggtcgcctctgcgattgtttcgtggtcgtgatcatcgttaccgtgttgctgtggcgcttcgccctctacggtctcgtggtttgcattatactcgacgctcgtggccgtcatctactcgcagactatgggcgcgttgatcatgtcgaacgccgtccccagtgagctgactgggccggactgggtcctgctctatatctttgagaccataatgttgacctctttcttagggttccttttcatctacctgagtatccatcttctggtcggtggaaagacctagaaaatctacgccatcatcgaatgcgttttcatcgtgttcgactcctattactgtaagtacgtcgtctaggtctgcaacagatacttatttgtgctctgtcttttgattcgaccgcacctttctcttggtctacccacgttgctgtgatgcgaagataatcggaggtatggaagcccgctgcaacttcctaaagtttta

SEQ ID NO: 12124 - DNA, 215 bp, Zea mays
  Clone ID: MRT4577_111051C.1
gcagcactgctaaagggcacactgggtacttaacctttgcaaggctttgcgtgtgataggcaaacataatcatagaatagctgagtgtaaggattagctgatgacagatgttgataggaaattacactccattttttagcgcagttgtagactgtatgctttgatacgcctactgaagatccaggtatggtcgaatgctgttgtttcatctgcgc

SEQ ID NO: 12125 - DNA, 227 bp, Zea mays
  Clone ID: MRT4577_111052C.1
ggccgggctacctcgtttctcagggtcgccggtcggacccacccctccgctggtcgccgccaccgctccaccggtcgtcgcgcacccctccgccggagattttatcaggagtgctaattggaagcaacacatgaagctgacatggagaaagaaaatagaacgacagtccacatcgaagcttgtaaaaaaggagttaaactcataattattcctagtgtccaagttca

SEQ ID NO: 12126 - DNA, 159 bp, Zea mays
  Clone ID: MRT4577_111053C.1
gtccgacccggcgcttgcgcgactggcgggctactgctcgcccaaggggcgcctcatggccagcatgattgtatggcacggggctgccccgtcagcggcttttttcatcctgctcaaaaaggacatcgccgcgcccccgacgcgtgggtcgacccggga

SEQ ID NO: 12127 - DNA, 402 bp, Zea mays
  unsure (1)..(402): unsure at all n locations
  Clone ID: MRT4577_111054C.1
tttttttatgtatgaaaatatctttatttgttggcgaaatattaaggtataataatagatattaattaatgaagatgaaatattaaataagtcaatttgctattttgcatattattatacatccaaaaaaaaaaataatatattttatatgctaatagtgaagtaatatgacgtaactactataataatattatcttatagaatattgatttaatcataataattaataaacattataatatgtatgaaaataaaagtacgaataataaaacaatatattatgtagcgagtactcgtatanttgaaattagttacactttttcgttcaaactacatacttaattaaatttacaacagcatttgcttggcaattagggctaacgatgaaacttgaacgagcag

SEQ ID NO: 12128 - DNA, 276 bp, Zea mays
  Clone ID: MRT4577_111055C.1
gcaggaccggcccggaactaaaacccggggcttcgagcctcctagccggcggccgcccccaggggaccgggaaagtttgaagggggtggcgccactgcccagcagaaccaaaggaaagcaacccaagggcaacgcacggacgcgagaaaaaccataaccagagagacgggacaaccgacggaggagccaaaaacaacgcacgctccatgaggcaaccaccggagccacccaagaccgccgcagcaaaaagccacggacccggcgcaggcgcccata

SEQ ID NO: 12129 - DNA, 224 bp, Zea mays
  Clone ID: MRT4577_111056C.1
attaaatatcatttgatttaaatttttatcccaggcttgtaaggggggggatctaacacagaaaaaaacataatgagcggaccccgaagttcaaatatgaaacttaataaggaatcaagccatactgctgcagtaagaggttagagttcaacacattaggacacaacagggccattaaaccaacgaagccacaaggactactcatgacaggacaaaccacagat

SEQ ID NO: 12130 - DNA, 1176 bp, Zea mays
  unsure (1)..(1176): unsure at all n locations
  Clone ID: MRT4577_111057C.1
gccctgcctccgtctctctcgggcggctcacatgcgtcatgtcaatgtgtgcatgcgccacgaaacaaaaacctaaagctaccaccaaagccccgagagacgagacgaggcgagatgcgatgagatctatcttttatatatagcctttagcgcccttcaaacacttcatcccgaagtcaccgagctgagctccaaagaatctagcagctaggagcaggccgtgtatacgccatccaccacggcaacatgtgctccggctcctggtcctggagcagcagcagcagcaagaagcgcccgtctcttgttgtcgtcaacctcaagcggcagcagctgccattgacgccctcggggccggccgggatctccaattaagtcgccgagctctgaagaatctagctaggagcaggccgcctacgccatcggccgtccacagcaacatgtgctccggctcctggttctggagcagcagcggcagcggcaaggagcacccgtctcttgtcgtcgtcaacctcgagcggcagctaaagaagacgctggccgtcaggagaaggaggaggtaactagcgtgctctgttcgagtttctcaagattcctctgcccagcagcaacagtttcctgcaaccacacacgcgccacacgtacgtacgcatgcatgcaggttgaggctgaggaggttgcgagccggaggagcagaggccatggagatggtgaacctgaagctgtatctggagaaccggtgcatcatcgcagagaacgagaggctccgggagagggccagcgcgctccgccgcgagaacctcgcgctgctccagaacctgtcgtccaggacggcggccgtgccagagccaggagcgggagctgcgtgaggttgctgcttcgatcctctgcctgcctgcctgctgaacatgaagtagcgagctcgcgtcaccctcgtcgttggtgcttgtgctacttgtgtggacaggagacaggccagtgaactcgtagccctaggaggccatctgcttggctgctccgccatgtctgtgtggctctgtgctcaactgctcatacataaaccgccaggttcctggagctctcttggggtgctctgcgccatggtgtctgtacattataagtgcgcggattaactagattttgntggcaagaactanaaaaaaaaaaaaaaaagcggcc

SEQ ID NO: 12131 - DNA, 418 bp, Zea mays
  Clone ID: MRT4577_111058C.1
cggacgcgtgggtctagatcgcgagcggcctcccttactttccttttgtcttttctcagctgcgtccagtctactcttgggcctgttgaataaatttctcatcgccaagaaagtgctttatttttatttttaatttctagcattccttacactctaaccctttcctctgcgccctgttcctcacagccggcctgcagcatccctggcaccaccctacccccaggtacctgaagtttagcatccagcatgggccacatgaccccatcatgtcggtgtgcctgcccagcaacccctgggtcacagacgacgatgcctactgggccatgaacgctcccaggtgagcaggtcggccaagggtgcacgagtgcccaccccattcctgacactcttgacccgtccgtcctttaccaactcggtc

SEQ ID NO: 12132 - DNA, 409 bp, Zea mays
  unsure (1)..(409): unsure at all n locations
  Clone ID: MRT4577_111059C.1
acggtctgctctcctttcacntatgagctgcctcttttttgtatcgggatgactacactacggggtgagcatatatggcgggtcgccctctcttctagggatgcagtagagtctgtctctactcaacactctatctctagcatttcaaggtagagcaagcccatattgtctctacgaatgtatgctcaatcaagaaataggtttaggccctcaatggctaacacttgccatggagattcatattaccacacccatattaactgcaaacaacataccagggtcgaaagatgtatcttctatcgaagctgcaaacgactagcgcatgtatgaagctaccatggaaatgcacccgcaacttgaaccactacacatcatcatgccgccaaagaacaactatatgcttgcatag

SEQ ID NO: 12133 - DNA, 950 bp, Zea mays
  Clone ID: MRT4577_11105C.1
ggaccaacaacacgccatgcattcagctacgctactacgacccatgcatgcatgcatgcatgtggctgcttgcttgcttgcttgcattctgtacaagaagaacttcatcgatcgatcgatcgatcctcgagtccaggactgaaccgaaccgatctgatctgatctacgcgtacgcaccacgccaacaagcagatcgttacagacaattaagaaggaacctagctagcttgcggcatctaccggcagacggtggctttcttcttccccttcccggcggcgttcttgcgctggaggcggcgcaggaggtcctccaggtcctcctcggcgcacggcacgcgcaggccgcccgcctgcgcgaagccgaactcgtcggcggcgcgctccatgaggtcccggaacgccggctcccggaggtacccggtgggcacgacgaaccggcgccgcgactcctccccggcgtacaccgcgaagtagcccttgggcacgccgccctcctcctccgccgccgccggctggtccagcagcgcctcccggaggcccagctcctcgcgcgtcgtcctcgccttctgcttggccgccgccgtcgcggacttggtcgtcgacgagcggaagtagcccatcaccatcatcgtgtcactcgtgcgtcgtcggtcggtcggtcgtactcgtacgtatacgtagcgtggccgccgggcgagtgcagccgtgaacacgtacgtacgcaacaactaacgccgggcgagtgcgcagagggcttagctagtagtaggtaaccacagcagaagctggaattgggtgggtgtggggcatcgccatggctgcgggttctggcgaggtcgaccgctgtcttgttggagttggtggcgggcgaccaagcactccgcggaggacgtggtctcctctcctctcctcttgtttcgtatgattaggaggaccgcggccccggccgg

SEQ ID NO: 12134 - DNA, 704 bp, Zea mays
  Clone ID: MRT4577_111060C.1
attggggcctcgagcgggccgggatcccgaagtcaccgagctgagctccaaagaatctagcagctaggagcaggccgtgtatacgccatccaccacggcaacatgtgctccggctcctggtcctggagcagcagcaagaagcgcaagcgcccgtctcttgttgtcgtcaacctcaagcggcgccagctgcagaagacgccgccgccgacgccacctcgttcctcagttgctatcaggaggaagaggctgaggctgaggaggttgcgagccggagcagaggccatggagatggtgaacctgaagctctacctggagaaccggtgcatcatcgcggagaacgagaggctgcgggagagggccagcgcgctccgccgcgagaacctcgctctgctccaggacctgtccaagacgccgcccgtgccagaggcaggagcgggagctgcgtgagattgcttcctcttgctgagtgctgagcatggagtagctagcttagcttgcggttccctcgctggcgcttgtgctagctgcgtgggcaggacagcggactcctaggtatctatctgcttggctgctccgccatgtctgtgctctgctgtctgctcatacatcaccaggctcctggagctctcttgggtgctctgtgccatggtgtttgtacattatatataagtgcgcggattaactagatttccaaagccaacacg

SEQ ID NO: 12135 - DNA, 935 bp, Zea mays
  Clone ID: MRT4577_111061C.1
cggccgggccgggtcccgaagcaccgagctgagctccaaagaatctagcagctaggagcaggccgtgtatacgccatccaccacggcaacatgtgctccggctcctggtcctggagcagcagcaagaagcgcaagcgcccgtctcttgttgtcgtcaacctcaagcggcgccagctgcagaagacgccgccgccgacgccacctcgttcctcagttgctatcaggaggaagaggtacccagctatcccgccctgctcgagtttcccaagcttcctctgctcaagtttcagcagcatcagcgacagtttcctgcaatcacacaagtacactgtacacgtacgtacgcaggctgaggctgaggaggttgcgagccggagcgtaggccatggagatggcgaacctgaagctctacctggagaaccggtgcatcatcgcggagaacgagaagctgcgggagagggccagcgcgctccgccgcgagaacctcgcgctgctccaggacctgtccaagacgccggccgtgccagaggcaggagcgggagcgggagctggagctgcgtgagattattgcttcctcttgctgcctgctgagcatggagtagctagcttagcttgcgttccctcgctggcgcttgtgctagttgcgtgggcaggacagcggactcctaggtatctatctgcttggctgctccgccatgtctgtgctctgctgtctgctcatacatcaccaggctcctggagctctcttgggtgctctgtgccatggtgtttgtacattatatataagtgcgcggattaactagatttccaaagcctgcaccaaactggacaacaaagatcaacagcaagttatgctaaaacataaacctcgactacgacgaatcgatccatttgaacttctagtacaatgattaatgaataagaatattttgtgc

SEQ ID NO: 12136 - DNA, 257 bp, Zea mays
  Clone ID: MRT4577_111063C.1
tctgggggccgcccgggccggtccaaacattgtagcaaagggcagcagcggagctaccatagctccacaagaaacatcctgatcctctgcctttcttagtagggctccactggtgccctgaacttaggaccgacactgaccgggggattaccatagctctacctcgatcctgagcagctggttgtataagcgtcaggcgctcagaccgttgaggagctaccgtcttgactcggcccgtggaccggccagcagatagg

SEQ ID NO: 12137 - DNA, 281 bp, Zea mays
  Clone ID: MRT4577_111064C.1
gaggcggaatgggccatcggtaactcatcaacattcccttttcggggtgggcttcgattgggcccttcctctctcttctctatacaatggccgctcctgtgttgcagttcagtttgcattctgagctttctcctggaccaaccgcaatttattgctcttggcatctcttattcatattcgtcgagaggaggtggtcctcttttttgccgactcgaattccggactggacggctttctggtaccctcgtgccctgagggttcttgagaggggtaaaatccaa

SEQ ID NO: 12138 - DNA, 272 bp, Zea mays
  unsure (1)..(272): unsure at all n locations
  Clone ID: MRT4577_111065C.1
cgagtgtcgtgttttttgtgctacannttacctttcctcatctncattcangttttaccttttccccctttttttttgnttcttgtcctttttttggggggtggntttgtttgctttttgcgctcgcttgtcatttgttgctggttgcgttctgtcatttttctcccttctttttttttncncacttnaactccttttttttcgtcgctttgttttntttgntcgttcntnctcccttctctttgccggttccttctttttctttttcgtgt

SEQ ID NO: 12139 - DNA, 742 bp, Zea mays
  Clone ID: MRT4577_111066C.1
atttcggttcagggtcggccactgcatcgccggcgcgcgccgcgtgctcgtctaccagttcgtgcccaacaagaccctcgagttccacctccacggaaaagggcagccggtgatggagtggtcgacaaggctgcgcattgcgctcggatcagccaagggcctcgcctacctgcacgaagactgccatccccggatcattcaccgcgacatcaagtcggccaacattcttctcgacaacaacttccaagccaaggtcgccgacttcgggctggccaagctgacgtcggacagcaacacgcacgtgtcgacccgtgtgatggggacgttcgggtacctggcgccggagtacgcgtcgagcgggaagctgacggacaagtcggacgtcttctcctacggcgtggtgctgctggagctcctgacggggcggcgccccatcgacgccggcgacgcgcgcccgttcctcgacgacagcctcgtggattgggcgaggccggcgctgtcgcgcgcgctggccgacggcgactacgacggcgtcgcggacccgaggctgcggggcaactacgaccccgtggagatggcgcgcatggccgccagcgccgcggcagccgtgcgccactgggccaagaagcgccccaagatgagccagatcgtgagggcactcgagggggacatctcgctggaggacctcaacgacaacgagggggtgcggcctgggcagagcatggcgttcggcacggcggac

SEQ ID NO: 12140 - DNA, 478 bp, Zea mays
  unsure (1)..(478): unsure at all n locations
  Clone ID: MRT4577_111067C.1
gtccgccgtgcctgacgccatgctctgcccaggccgcaccccctcgttgtcgttgaggtcctccagcgagatgtccccctcgagtgccctcacgatctgcacccaaaacgccatcgccattcattgccagccgtcgcttcggggctgcagcacccaccgatggtgcggtggaaaggaaacaaggcgtgagcatttgccgtcgaataccacctacctggctcatcttggggcgcttcttggcccagtggcgcacggctgccgcggcgctggcggccatgcgcgccatctccacggggtcgtagttgccccgcagcctcgggtccgcgacgccgtcgtagtcgccgtcggccagcgcgcgcgacagcgccggcctcgcccaatccacgaggctgtcgncgaggaacgggcgcgcgtcgccggcgtccatggggcgccgccccgtcaggagctccagcagcaccacgccgnaggagaagac

SEQ ID NO: 12141 - DNA, 375 bp, Zea mays
  Clone ID: MRT4577_111068C.1
cgcacgcgtgcgcaaaagccctcggaccgtctaacgctctacatcgtatacatgcgcccgagagcctccggaactgtgaccgcggctgcacatactatgcagctcctgcactacactcctatagcgcggcgcggagcacgctgacatgaaatcagagccgaagcaggacactgggctgtatgtggttgccagagtggctgtcgcgacgatgaggacacctgtgcacatacttaatgcagcgtaggagtcaccgcaggctaagaacgcggtagcagctaattcagttgatacgaacaacaccttggcccagtgcgagctagtcatcgggagcatgctacgcagtcaactcacaaccttgaataatgacgtgacaga

SEQ ID NO: 12142 - DNA, 318 bp, Zea mays
  Clone ID: MRT4577_111069C.1
cgtaagagtcagagagtgtcggaaactcaaggtctcgaatgtcctaggagctgaacagaaagatgtccagggactggaacaattgctcgccgcgaatacgcctgaggccaaggcggcggaggaagacaaggggacgaaggagcccatctcacggtcctctagcccaggactccaggtaccagttggagcaatccaccatcagacgaagcgaatgactaagcggagtggccgagtaggtgcaactgcagccgtttgggggtgaggccagcatgcagtacctgcatgacggggttctggagctcgctcggagaactacga

SEQ ID NO: 12143 - DNA, 514 bp, Zea mays
  unsure (1)..(514): unsure at all n locations
  Clone ID: MRT4577_11106C.1
cgccacacgggaagcgcaanagcacagaccgacccgcacggggggggggagaggggaaacctagcccacaaaccacgaccgccaaccagccgcgcaagcgccgctgcaagggcgaccccgacaccaccgccagctcgccctcccccaaggcgccgggccccggaccgcggcccacacagaggcgacaaccccaccggcgcgcgggggagaacatcgacatgccgaagagccggccggacctgcaccgcggccaccgggacgcgcgcctgcccaagaccaagcccggccgcacgctcgggcccgcctcccgccccgcgcccatgcccgagaaggtgctccgccgccgcacgaagcgcgagcgcgccaacttgcnccgaggcacccaccagtaccaccagcagacgcacgacaggcaacggcaggccacgcacagcaccggcccccgccgcgccgacaggcgcgacaccacggggcgtcgacatgcccacggggaaaccgaaaggttggccaacca

SEQ ID NO: 12144 - DNA, 1218 bp, Zea mays
  Clone ID: MRT4577_111070C.1
atggatgatgctgcagcagctgctgctatcaccgtgctggctttcatcgtcggctctgatgctgctgcaggtgcttggaaccaggagacagtggcgggagatagggaggtgcacaggacagggaaaaaggtgaagaactgtagctgctgcggtttgaaggggcacctgggtgctgagtgctctaccaagttgtattgtgtcatttgtgatggccatgatcatgtcaaccacgttgccatttgctcaagcaacctcgacccgtggcacatgttgtcggatatgcggtgtctggcttgggtttctatcatatacctcatccgccactctccaggaaaaaggattccaaaacagcccttgttacgattattggtagtactctttcgggtgatcagttggtggcgcaattgcaacgtgttgtttcaaaactctttcattgtcacgtttccatctaagaatgagctacagggggccattgcctttgggggtgcggatgtccgggaaaaaaatgtgcccatggggacaaggatgcaatttgaggaatggcatgaggaggaggaaggttttctgttacctaaggtttggattcgggtcactggaatcaggaagaaattgagagaatttttgaatctctgggccattgggtctatgcttaggtctacacaaacggttgatatggaaactactcgcaagaacaattttggccgggtgttggttgctgtgttggatcccaagttgttgccgacaaagttggatgctgttatcggcgaccactactttgaattaagattcgaggtcgaatcagtgggtttttatgaaaacggtgatgaagtaaaccagaattttggggatggaaatgatggcgacaatgaggacatggatgaagatgatcccaatgatagcagtagcttggacagagaggggaagcgctctaagaaggacctctctcgctgccaaaatggaagtgacacttctatgggaatgggtggggctgcccctggtggcacctctgcagcccctgttttggcacttgagcatggagttgtgaatggtggctcactagatggtgtgctggtggacaaattgcctgctgcgttttctgtggttggaggggtatctgatgatggtgtgtgcggtggtggatctccttctgaggccatgttgatggctgatactgaggccacaatggtggctgctgatctggtgcaggaatcgctcctg

SEQ ID NO: 12145 - DNA, 479 bp, Zea mays
  Clone ID: MRT4577_111071C.1
catacgcgtgcgctgccagggcgctcgtcgccatcgtctttgaccagctgtttaccgcgtcgatggcatcgcctgggatccggggcctgcccctggaagcatctgggggcacgacacccgcagtcgttggcgtcgtgcgcctcctcacatggaccgcgcgctggactgtaagaaatgcatgagcaaggacttgaggagggccccgtggccgagctgtgtaggccaatagacggctcaacgcaaaagcggtggttgtggaggctgcgacagcgcacaaggccatcactgggttgtggcggggcaagagagatgagtgggggagactgggagagtgatgagccttttctgtaattgagacggactccacccatatttgggtccagagtttgtcttcacaatcaaacggtaccctcatgtatgtgcatcaggaggaggatccctagaactcgattctttcctatgcgaccactaatggcatc

SEQ ID NO: 12146 - DNA, 737 bp, Zea mays
  Clone ID: MRT4577_111072C.1
cccatgacaagtttctatgcagtgattcaggtccactgaatttcccagtatagtgatatcttttggtttggtaagtgggattgtacggcaaacaccagctggtactacattttcagacaaagaattggtaatctcaacagtccgggatatagcttcagcttgttgataaaccaactgttgatcatctctatcacggtggtcacgaccttcctgagtggcttgctggaatgtctgtacagattgtggttgcttggtattatctgcagatagatgtgcggtccttccaaatatgtcagtgccatcagaaaaggtaacatgctttgatttgcagcaagaatttaatttacacctcatatctgttgtattcggtgctgtgctagaacctgcttttgactgatccttacaaatgctttgagtttgaacactgtttgccatatcctttttgtgtatttccaaaactgactttctgtttcccttcttacttttcttatccagtaagactgagacctcttgtttttcctttttcttgcaagaactcttgggttccctattttttataggatgctgaaatgacttagaaatgctaactgagttcacctttacccccctgtttttctcctgaaatgaggaaaaaaacaccaaagtgtatcacatctcttgaggtatttttgctacaaattgtatttgaaggtattatttgaccccatcaacaaagtgggaggtgagagccctctatt

SEQ ID NO: 12147 - DNA, 346 bp, Zea mays
  Clone ID: MRT4577_111073C.1
attcggttcgagacggatcgttcagctttttttacgaagcacgccgtgttgggttcagtgattgttggaattatgacggattctagcgcgccggaccttctaaataagatgcgcagcgcccttgatgctgtccggggatccatggggcaagactatggggcagcaacaaacaattatcgggtgatggctggctggcaagttgataagatcataaagtttgatactgcctgtgttggtgcatagagcgtggataagaacgtgaggatagagactctacttatctgtaatctttgcaggggtcctttgttatgaactttacatatagttggctacattgatggggaag

SEQ ID NO: 12148 - DNA, 331 bp, Zea mays
  Clone ID: MRT4577_111074C.1
caactttcgatggtacgataggggcctaccatggtggtgacgaccgacggagaatgtgtgtctcttgtcaaggtggaatcgactctagcaacaagtcgatatgcggagagcatcatggactactccgatccattccatatctactgtgctgccctagtcgctccagcacgccaggccctggagaaatgggctcaaactcctaggatatactgaaacggctctgaaaagctctgcccatatggcccgacgactaaggaggttccacactcactatcaaaggcctcgaaaccaacgaggctgaacagattcaacgtgccgcgcaaaatcaagc

SEQ ID NO: 12149 - DNA, 668 bp, Zea mays
  Clone ID: MRT4577_111075C.1
cctcgaggccggccgggttggatcttgtcaagatctgtgacaatgatatgagctgatgactgcgaataagttctcttttgcttaaaaaaaaaaaaaaaaaaaaaaaaaaaaaaaaaaaaaaaaaaaaaaaaaaaaaaaaaaaaaaaaaaaaaaaaaaaaaaaaaaaaaaaaaaaaaaaaaaaaaaaaaaaaaaaaaaaaaaaaagggggggggggggggcctttccttccccaattccccggggtttttttttcccccccccccccccccaagggcaaaataaaaagaaaagggccggaaccctttaacccccccaaaggtttggattgggccccaaaagggggaaaattaaacccccctttcccattcccaaaaaggaaaacccccccggggggcccagggggggccccccgggggccccccgaaaaaaaaaccccttcccccccgggggggcccccttgggggggcccggaaacaacgggggccgggaaagggcccccaccccccccggagggaacccccccccccaaattttcccccgggggggggggattggaaaggcccccccgggggcccaccaacaaagggacccccaaattggttacaaaggggaaaaggggctttcttttttcaaaaccccccccgcatttaaaggagggggccccccc

SEQ ID NO: 12150 - DNA, 595 bp, Zea mays
  Clone ID: MRT4577_111076C.1
ctaaaaccaaacccgctttaaataactaatttataacatagggcgacacaacagttcggccggcaagggggcctttatacagacaacatgcttcttgggacgaacagcagatataaactaacaataacatagttatccagtttttacatcggacaattttgcccagggacaagggttgaaaaactgctttactcgaaaacaaaataaccctacacaattgccaaagcccccaattttaaaaattaaatgcagttgccactttgtactggaaaacttggagccctttcaaccggaaacatactcgaggccgaatgcaaaaacaaaaataagggtttgtttgtcacgggccccaaagtttgatgttaaaaaaaataatgggccatatatatgtttgggaaccggggcgccaaaaccttaaactacatccatccatgggttttttactattaaaattgaactggccagtaggggcccaacaaaaagcactggttttttaaacgcaaaaaaacttaagttattccttttctctgggtgaaactcttcatcaggggccttacgtttcggccttgctttttaaatttttttgggggccgac

SEQ ID NO: 12151 - DNA, 265 bp, Zea mays
  Clone ID: MRT4577_111077C.1
cttactggaagaagttgaatcagttgcatactacacccgatcgagcctcgctaaatcatggccagattggtttaaacaggaacaaggcataaacagagcatcaccacattttatagtaacaggttatgcaaattgtggagtcgatggctggattcataaggtgacctcctttcttggcaaccttatacggatcaacatggagaaccttcctatgtgcgactgcctaccaccacttggtcagttgccaatgctgcaggaactgcga

SEQ ID NO: 12152 - DNA, 287 bp, Zea mays
  Clone ID: MRT4577_111078C.1
gggactgttattatgccctggggccccgaaacaaaaccaaaaacaaaggaaacctagcacccaacaaacttttgtgcagcaaaacacacaagccaaaaaagggaaaaaagccccaggactaaacacgaaagattcccgggaaaacaaaaacagaaccggtgaaagcacgaaaaaacaattccacgggtagggcgggactatgcgacccgtcgtgcaagggaaaccaggcgcccggccagggaaacccgaaacgggcccccatggcccaccagcttcccaaataggaa

SEQ ID NO: 12153 - DNA, 2943 bp, Zea mays
  Clone ID: MRT4577_111079C.1
ccggccggggatcgatgattgaaacgctcagtgacacattgggtcgtcacaacatgtcatcttcccagcattgggtacctcgaggccggccgggacgaccgcttggcgcttcatcactcgtttcctttcgaaagcccgcgcacgcacgtcggtcgtcccgagcaggacctcgatcggccgaggatggcgacgccgaacgggcttgcgcggatcgagacgaccgggaagaagaagcaggacaacggcgtgtggtacgacgacagctcggcgccggtgcgcgcgcagaccatcgacgagctgcactcgctgcagcggaagcggtcggcgcccagcacgcccaagcggtcggcgcccaccacgcccatcaagggcggcgcccactcgcccttcgccgtcgcgatctccgaggaggagcgccacacgcagcagatgcagtccatcagtgcgtcgttggcgtctctgacgcgtgaaaccgggccgaaagtggtcaagggcgacccggccgcgaagggagaggccgccgcgcagggcgcgccatcgacgccgagggcgcaccagcagcaccgccaccccgccgcccccgccatcgccgtcagcgacagctccctcaagttcactcatgtgctcaacaacctctcgcctgctgagctgtacgagcaggccatcaagtacgagaaggggtcgttcatcacgtccaccggcgcgctggcgacgctgtctggtgccaagaccgggcggtctcccagggacaagcgcgtcgtcaaggacgaggtcaccgcgcaggacctgtggtggggcaagggctcgcccaacatcgagatggacgagaagacgttcctgatcaacagggagagggccgtcgactacctcaactccctggagaaggtgttcgtcaacgaccagtacctcaactgggaccccgagaaccggatcaaggtccgcatcatctccgccagggcgtaccactccctcttcatgcacaacatgtgcatccgccccacggacgaggagctggaggacttcggcacgccggacttcaccatctacaacgcagggcagttcccctgcaaccgctacacccactacatgacgtcgtccacgagcatagacctcaacctcgccaggagggagatggtcatcatgggcacgcagtacgccggcgagatgaagaaggggctcttcggcgtcatgcactacctcatgcccaagcgcggcatcctctcgctgcactccggctgcaatatgggcaaggacggcgacgtcgccctcttctttggcctctcaggtaccgggaagacgacgctgtcgacggatcacaacaggcttctgatcggcgacgacgagcactgctggagcgacaatggcgtgtccaacatcgagggaggctgctacgccaagtgcatcgacctggcgcaggagaaagagcctgatatttggaacgccatcaagtttggaactgtgctggagaacgtggtctttgatgagcatactcgtgaagtcgactacgccgacaactctgtcaccgagaacactcgggctgcctacccgatcgagtacatccccaacgccaagataccatgcgtcggcccgcaccccaagaacgtgatcctcctggcgtgcgacgccttcggcgtgctcccgccggtgagcaagctgaacctggcgcagaccatgtaccacttcatcagcggctacaccgctctggtcgccggcacggaggacggcatcaaggagccgcaggccaccttctccgcctgcttcggcgcggccttcatcatgctccacccgaccaagtacgccgccatgctcgccgagaagatgcagaagtacggcgccaccgggtggctcgtcaacaccggctggtctggtggcaggtacggcgtgggcaagaggatcaggcttccctacaccagaaagatcatcgacgccatccactccggcgagctcctcaccgccaactaccagaagaccgaggtgtttggcctggagatccccactgagatcaacggcgtgccgtcggaaatcctcgacccgatcaacacctggacggacaaggccgcgtacaaggagaatctcctgaggctcggcgggctcttcaagaagaacttcgaggtgttcgccagctacaagatcggggacgacagcagcctgactgacgagatcctcgccgcaggccccaacttctgaactaaagcaatggatccggatgaataaaacgatggtgtgtgtgcgtgcgtgcgtgtgaagatgattacgacgacgacgacgaaaaaaaggtgttggatcgatgagccaacatagtaatagattagctgggtattgtcatgggtgcgtctggtgttgttatctataaggctgtctgcctgtcccaagcagctatcatattctatttcaaattctattctgtaagcgtgtagttcaaaacaatgctttacacaaccatatgcacagtctatctaaggttggtctgttctatcagcttgttgggaaaagtttgcgtgtgcttgtatctcgccccctgtactctctctggtttctgaatttgaatatgaaacagcttgatcgctgccgggctcttcaagaagaacttcgaggtgttcgccagctacaagatcggggacgacagcaacctgaccgacgagatcctcgccgcaggccccaacttctgaactaaagcagtgggtccgtccggatgaataaaacggtggtatgcgtgtgaagaagaagatgatgacgacgaaaaaagtgtgttggatcgatgggccagcacagtgtagactagcttttgtatattatctcgggttggaaatctggtgttgttacctaaaatgttggtctgttctatcggcttgttgaaaacagtttgcgcgtgcttgcatcttggcccccctgtattctctgtggtttcagaatttgaacacgaaacagcttggtctcgggatc

SEQ ID NO: 12154 - DNA, 708 bp, Zea mays
  Clone ID: MRT4577_11107C.1
acacagtacagcctcatcgccacttaccaccgtctaacgataaagcactcgacgagcgaagcgaaccagctgctccgatctctgcggccaacgatcctgctggccgcggcggcggcgacgacggcggtgctgctgctgtggccggccgcctgcgtcgcggacgacgacggcacgacgttcccgccgtcggcgttccccttctgcccgacgcggccggccggggtctccacggggccgttcccctggtcgccgccgccgccgtcgtcggtggcggtgttcccgcaggatccggggttcttgacgtcggacgcttgcgcggtgccacggctgccgctgctcgctgtgttctctgttctcttggtgtttttgcagtgactcgctcgcggttgctgccctggactggatgcatatctatccgtagctgcccagttcagaaaattaaggtttgctccaacgacaggcctttgtttcatacagctctgtggaaaagaaaagaaaaaaaatctactagctttcccctgcagcagctctgtttttgagaacgtagctctgctttgtttcttcacaggcgaaggaatatcttcgtgtataacccgtagctagcttcattcacgtaattcaggctttagcttggataatagtaaaactagtgtcactggcgttgaaggttctgaaatcccagtagctttccttcagacttaataaaaa

SEQ ID NO: 12155 - DNA, 440 bp, Zea mays
  Clone ID: MRT4577_111080C.1
tgggaccctcgaggccggccgggccgggaaaacaagccaagccatggcagccaaccccaaccactgcctccgccgcctcgcctcagctctctcccacggtccccggcctccgactcctcccctatccctcctcttcccccgcgggggcccgagcccacgaggtacggcgactgggagcgcgccggccgctgctccgatttctgaaccgccgctggccgcgaggtgaggccgtcagcgtcagcacggaacctgtggatgtggttccgtatcgtactgttggatctgtctgtcgtgtgctagtagtgtgcctgttgtcacctgtgcaaagggcggcgttaaatttgcgttttgcttcgtcttctggggaataaacagagttgacagtactcggctcaaaaagttcagatcgaaaaaaaaaaaaaaaaaaggcccctagggcc

SEQ ID NO: 12156 - DNA, 686 bp, Zea mays
  Clone ID: MRT4577_111081C.1
aattcggcacgaggcacgacgcgagagccgtgccggggaagagaacgcgccgcaccgggcagcgaacgaaaccaagccaagccatggcagccaaccccaaccactgcctccgccgcctcgcctcagctctctcccacggtccccggcggaagctagggccgccgaagccgacgccgaagcggggaaggaggaggagcatgaggccgacggcggtgcgcacgtgaacaaggccaccggcgaggtcggcggcccgcgggggcccgagcccacgaggtacggcgactgggagcgcgccggccgctgctccgatttctgaaccgccgctggccgcgaggtgaggccgtcagcgtcagcacggaacctgtggatgtggttccgtatcgtactgttggatctgtctgtcgtgtgctagtagtgtgcctgttgtcacctgtgcaaagggcggcgttaaatttgcgttttgcttcgtcttctggggaataaacagagttgacagtactcggctcaaaaagttcagatcgactcagttgttgttgttttttttttttgccttgatttttcatctcgctcagctcgagtgagcaggttctgttgttaggttgcctgatcttggttatcaccggacgtaatgaaacaatgaacgcagtcccaaaaaaaaaaaaaaaaaaaaaaactcgagggagggc

SEQ ID NO: 12157 - DNA, 1065 bp, Zea mays
  Clone ID: MRT4577_111082C.1
cgcaggctgcactcgagagcgggcggcgcacgcggccccctctggggtcgcgcactcggacgcgtgggcgacgcgagagccgtgccggggaagagaacgcgccgcaccgggcagcgaacgaaaccaagccaagccatggcagccaaccccaaccactgcctccgccgcctcgcctcagctctctcccacggtccccggcctccgactcctcccctatccctcctcttcccccgcctcgcgctctccagctccggcccctccacgggcccgccgccgccgccgccggatgccgtaaggaagggggagggagaggaagcggcggaagctagggccgccgaagccgacgccgaagcggggaaggaggaggagcatgaggccgacggcggtgcgcacgtgaacaaggccaccggcgaggtcggcggcccgcgggggcccgagcccacgaggtacggcgactgggagcgcgccggccgctgctccgatttctgaaccgccgctggccgcgaggtgaggccgtcagcgtcagcacggaacctgtggatgtggttccgtatcgtactgttggatctgtctgtcgtgtgctagtagtgtgcctgttgtcacctgtgcaaagggcggcgttaaatttgcgttttgcttcgtcttctggggaataaacagagttgacagtactcggctcaaaaagttcagatcgactcagttgttgttgtttttttttttttgccttgatttttcatctcgctcagctcgagtgagcaggttctgttgttaggttgcctgatcttggttatcaccggacgtaatgaaacaatggaacgcagtgcacacatcattgtgacttcttagaattccgcacaagcaaaggatgaaagttccttcttccctggttcccggtttggagttgcgaattgggattactgtttgtagcgttgtttcagatcgaggctatttgtagcgctgtttcagattggggaaccgaaggctgttgatagtagatgcgatagaggaccagatgctgtatgtagtgttctttaatttggatgattcatcagatgttatttagct

SEQ ID NO: 12158 - DNA, 293 bp, Zea mays
  Clone ID: MRT4577_111083C.1
tgtggtcgtctctgctgtttatgaaggaggagctgcagagcggcatggtggcgttgtgaaaggggatgagatcatggccatcaacggcaagatcgtgacggactacaccctggctgaggctgaggctgccctgcagaaggcctggaatcagggcggggactggatagaccttgtggttgccgtctgtccccccaaggaatacgatgatgaactaaccttcttttaaagtccagagacagaagccagccagacccatcctggaagctggcaagctcggcacccagcccctgaag

SEQ ID NO: 12159 - DNA, 418 bp, Zea mays
  Clone ID: MRT4577_111084C.1
tcgtagctcggaattcggctcgagatacttgccttgtcctgttgttggatcgtcacggatcggccctctagctcctactgcacacgctagggatagatggaacctgcaccactggtgtgtcagacggaactacttgggcctctcaatgcgccgaggctgccgacagtgaactgcctgcgtatatgcatgctatgtgatacaatactgaacctgttctgtgcgtgctcgagctgctactgtacacttagattgttaccagagaccggcgtatcccactggcccatgtacatgcgaactgtgccatgagaggccctcatattctgacacctgtggggaacaagcagaccaacatggcccgacagcctgcttgcagcaatgatggacatgccatggtacatctggtgctttgagatagact

SEQ ID NO: 12160 - DNA, 231 bp, Zea mays
  Clone ID: MRT4577_111085C.1
taaaagtgacgcccaattactgccctcaatgttttgttagacttaatggctcactacgctaacggtcggtgtaattatatacatacatctacaataacatctgtttaagttacacaagctcaaaacaaatggcctcctagctccatcgttttgttgtcgcgtgttcatgatattccatcggcgaacattgacaactctgccacgcacatgactatttgtgttcaaccttta

SEQ ID NO: 12161 - DNA, 136 bp, Zea mays
  Clone ID: MRT4577_111086C.1
gggtcgccccgcgaaatcccgtcgcgcaccacagaaaatcctccagccacctccaccgtcggcgctacgctctctctccgctcgccggactttggccggttgcgctcgcggggggggtcaagggactggcccggct

SEQ ID NO: 12162 - DNA, 279 bp, Zea mays
  Clone ID: MRT4577_111087C.1
gcgatttctacagatacctcgctgagaacaagactggggctgagagaaaggaggcgggctgagaacacgatggaggcatacaaggctggccaggacattgctctggctgagctagctccaactcaccctattaggcttggactggcactgaacttctcagggggctactacgagagtccgaactcacctgatcgcgcctgcaggctcggaaagcaggcttttgacgaggccatctcggaactggacaccccgagcgagggaggccgacaaggacaggac

SEQ ID NO: 12163 - DNA, 1042 bp, Zea mays
  Clone ID: MRT4577_111088C.1
ccggccgggccgggtgtcttccttcccctgaaaacccacacgctcgcgcctccgcgaagaaaaacaccgaggcccatggcgccgagaacgtcagagagagcgatgacatcggcggccgcggggctcgcgcgtggcgccggcccgcactacagaggcgtcaggaagcggccgtggggccggtacgccgcggagatccgcgacccggccaagaagagccgcgtgtggctcggcacgttcgacacgcccgaggacgccgcgcgggcctacgacgccgccgcgcgcgagtaccgcggcgccaaggccaagaccaacttctccttccctgcgtgcctgccgctcgccgccgcggacgtggccggcgcctgccggagcggcaacagcagcagcaccaccaccaccaccaccgtcgactccttcggcggcgacgtgcaggcgccgcccatgcaggccatgccgctcccaccgtccttctgcgccagcggcgccgtacgcttccctttcagcagctaccccgtgacgcacccgtattacttcttcgggcaggccgcagcagggtgccatatgctgaagctgccaccgacgacggtgactgtggctcagagcgactcacactcctcgtcggtcgcctctctgtcggcgtcgccgtcgccgtcgccgccggccggcgtgtcagcgacgagatccgccgcgtttgatctcgacctaaactgcccaccgccggccgaggcggaggcatagtcgccggagttttgctgaatgactgcctgtagtttctttcgtcttttacccgtagagagaaaatcggtaggcttagggcccctttgtattcacacggtgtcacgggcacacccacctccgaactctggtactctgatctttagagtgaaactacgaacatgtggtttaaatagttcaaagttaactctatgatttatggttcaaagttaactctatgatttatagccgtttctcgctgttgcagatgttcgtacttgtacaactataatctataaatacaaaatactatagaagcattagttgg

SEQ ID NO: 12164 - DNA, 311 bp, Zea mays
  unsure (1)..(311): unsure at all n locations
  Clone ID: MRT4577_111089C.1
tttttcttttttttttttactccaaagtatggacctttatcaaatggaataagggactccaagcaaatgggacatgatagtacctacacattaaaagaagcagaacacatcacgtcaataatagtaacacccccccatattaattaggactatatgctatgctgagggatggatcagaatggagaatgctagctggtggattgccccgtcccaggggacttttttttttngggaaaaggggcttggagcaagctctgtacgggcaacgatccccgggcgccccgccgcgggtttctttgagggtccagggt

SEQ ID NO: 12165 - DNA, 543 bp, Zea mays
  unsure (1)..(543): unsure at all n locations
  Clone ID: MRT4577_11108C.1
cttctcttccatttttaaaggggcataactagtgccagaagctcccacatgagtggggtctgaggaagggataaactgaggcaagcctttctcctgcaaatgaggagaggctgctttgaacccgcgacctggtgactcagtgagacagctctcatcactgcaccgggtccgcccttctcttctctttcatttttttaattggaaaaatctactttgctgtgggcaaacactgccgtttccctttggcatatatataaacatagaagtgcaagttggcactgttaggttctagcattacatatttttgttctaagttacttgtcatatgtacaacaaggttactttcagaaaaatcggttcacttaatccaactcgatattgtaaagtagggcggaaggttcactggtttacgataaattacttggtaaagcaatattattttcatttataccttaaacctttcataggaggttgtgataatgcattgtgcatgtgagaagataacagcatcaacaacttttncagatacaggccttcttgatg

SEQ ID NO: 12166 - DNA, 341 bp, Zea mays
  Clone ID: MRT4577_111090C.1
acatgactctctcaacggatcacgtgctctcagacgaatgacccccacacgagcttccttcggcctcaaaaggctgagagtctacttgcacttcatcataactgtgctcatcgggacgatgattggtaggctatcgcacatcgtagggaccttgatgacataatcattgcgctactgggacgaggtgctagacacttttctggctgctaccacgatcatagtttcacggcatattcatggcccaaaaggaggggtaggggccaatctctttacaatactagtgttatgttcaacttccattacgggtctgcatgagatttgtttcacaaacagtgttaacc

SEQ ID NO: 12167 - DNA, 563 bp, Zea mays
  unsure (1)..(563): unsure at all n locations
  Clone ID: MRT4577_111091C.1
anaaatggtagtgttcagtttaaaaggcaagattcaattgaaatgcatacatgttgatcaccatcccagaccagagagcaaacaaccaaagacattgagaagataatgacaacccttagagaggagagcaggctgagagaaatcaactgtcctgtcagaggtggtgtaaagccgaattctggccacagcaacaataatcaagtagagcaaccattacaggtttcaaggacaaacagtgatatgccatgcagcttaaaatctggcaacattctatcccatgatgaacatgtaaatgaagttgaagcatcaccacccttgaagaaactgtcacctattgttgaacatagcccaaagatgaaaaccgctgggccatcaactcctgaacctgccaaacaaatcacagaaaatggggctgcagcttcaggaagaactaagaacaagtcaccacttcctgctagacgacctagccctcagaggcaagctggagcagggacttcaagtttcccagtcacaatgacaagacgtactcataccaagttcataacagagagagagaaaactct

SEQ ID NO: 12168 - DNA, 726 bp, Zea mays
  Clone ID: MRT4577_111092C.1
ccggccgggcgccatcgacatgatgttcagagatattctacccaagctgaaacacggcaacgacggacttattttcacctgtcgcaccacgccctacaaacatggcaccgacactcacatcttgaagtggaagcccccggaggagaacaccattgactgccgtctgcgtctgaccttccagcaggttgaccctacagagtcggagcgtcgagagggcatcacggagccattcatcgactatgacagtatcccaaaagctgaactctacgtgtatagaggggatagcggcccggataaatatgagttcttcaatgatgtacatatcaatgaggaggagtgggagacactcaaatctcttaacgacccattggactggcgcatcgtcgaatgtaatatcgacgaacagggaagatggcgtattgttcgtttccgtgacgacaagaacgaggcaaaccataccaccaccaccaaaagtgtgcttcagagtattgaggaccgggtctcggagaaggacctgtatagagcagcaggtgatatcaagaacgcgtggaaggctcgggccagcaggggccccaagtagaacagttgttccacagacatggcgtctggaagaatgttggttctgtatcgatcaggcgaggcgttagaaaaggcatcaggactagtatatgtatgtttcagtgctgcaaaaaaaaaaaaaaaaaacccgcggccctcgagctccag

SEQ ID NO: 12169 - DNA, 262 bp, Zea mays
  Clone ID: MRT4577_111093C.1
tcggtagttacatttggagcagtaattgggacaaaacatgaaggcacaagggctacaacaacaaagctagaaagaacgtgctacttagaacaaaatcgtcgagatgtggggcagaaataaggaacacgcaacacgggctgaaactgtggtattagaaacagtatgcataacaactgtgatgacttgtgtattgagaaaaactctcatcagcagtgtgtgctacccgaatgttcacaacaatgggatgaattagctatgacaa

SEQ ID NO: 12170 - DNA, 314 bp, Zea mays
  Clone ID: MRT4577_111094C.1
gggaacaaaaccagaatcccggggttaaaaaacgccccaaatcaaatatatattttttaaattcaacccgggggctaatttgccccccccccccccgtggctttggacactatattcaagaccctaatctaaaattgcctcaggaaccagctttttccttatcccctgttcccaaaacaacccagggaaagcaatttgatcaaaaccccaattgggggaacccttccccattgaggctcaaaaaaacctcactcgatgattcaacccccgcaaactggtttgttttgcaggcccctaacttattggagagcctt

SEQ ID NO: 12171 - DNA, 423 bp, Zea mays
  Clone ID: MRT4577_111095C.1
ctcacgcagtccggccacgcgtgcgatgaagtctgtgaaaacccagatcttcaggcgtaggggctccaacacgcaatccgaacaggcaccatacctttatcacccttgctgttcgaacaatcgtcagccctatctctggtgcattgattggcacacaccatcagggcacagtagttgtagaaactgatgctacctgtgatcaaccaagcaactgtgccaaacctttctccctactgttagctacaacaataccttgcattcaaccaactgtatacactgaaccctgctgcttatgtgcagcagcaactattaccattcagtcagctagctactgcctactctcagcaacatcaacttatgacatttaaccaatgggaccgactgaacgccgctgcctatttgcagcagcatatactactacca

SEQ ID NO: 12172 - DNA, 487 bp, Zea mays
  Clone ID: MRT4577_111096C.1
aaaaaaaaaccgtatagcaaaaacgactccacacggtccacggcgtcttctccggcgaaccttcgcgagccctcggctcccctctaccaccgctgccgcgaccccgcctccggagcatcctcgggtagcgctctggcttcccgtgccgccggacgtcctgcaggaggcggcggcctccgtggcatgttgatgagggccgccgctgccctccctcgccgatcgtcgcggccctcggagccggggtcctcctcctcccgggctcccgcccctggggcctcctccagccgggctcctgcccctggggcctccttcgaccccttcgatgtcgataccgacccgccatcacggcctgagctgacgcccgagcagatcgggctttgcgtcgacgcgctcgcgcatttcgagtacaaggggaagcgccgggatgacttgtccgacgagttcaaaagcctctcggtatcgggtattagacatatgaaaacgatca

SEQ ID NO: 12173 - DNA, 614 bp, Zea mays
  Clone ID: MRT4577_111097C.1
ctctgctggtcgcaatcccctcgctgttccaatgccttactactcgcctcggccagtcgcctccgccaccaaaaccctaaccctagccccggagctcaggcgacgctcgcgcctccaaatggacgggggaggcacgcatcgcacgccggaggacgtgttcagggatttccgcgcgcggcgggccggcatgattaaggcgctcaccaccgatgtggagaagttctatcagcagtgcgacccagagaaagagaatctatgtctgtatggtcttcccaatgaaacatgggaagtgaacttgcctgcagaggaggttcccccagaacttccagagccggcactgggaattaattttgctcgggatgggatggatgagaaagattggttgtcacttgttgcggtgcacagtgatgcctggttgctagcagtagccttctactttggagcaagattcgggtttgacaaagaatccaggaagcggctttttagcatgataaacaacctccccaccatatatgaggttgtcaccggaactgcgaagaagcaggtcaaagaaaaacaccccaaaagcagcagcaagataaataaatctggcactaagccatctcgccagccag

SEQ ID NO: 12174 - DNA, 1021 bp, Zea mays
  unsure (1)..(1021): unsure at all n locations
  Clone ID: MRT4577_111098C.1
cggacggccgacactgcagtatttggagccgctccgcttccgccagcgcccagcagagcaggctgagccagcagcccgagttcgattacctcttcaagctgctgcttatcggcgactccggcgtcggcaagagcagcctcctcctccgtttcaccgccgactcctttgaggacctttcccccaccataggtgttgacttcaaggtgaagatggttaccggggtgggcgaaaaactcaagcttgccatctgggacagccggggtttccggcctatttagtagcaaacgaatgagtaactacagacagcaggactcgaaggatgcttagatctaaatccattaaatgacactcaaaagaacaccagaacttagttctcaattcttctcctatgtctcaactgaaacccaacgactcagcacgtttcaagcagcatatacaggatgaggacttaggattttcagcaaacaaagcacgacaccggttgcacatgtaggaggagagcacagcggcgcgtaggaggagagcaccacaagtgaaccgaaacatcatgagcatgaaactatggcgccagcaccacggcgacctccttggtgaacttggtgccgaggcattagatagcaacctgagacctcatgaagtccaggggtttcaccgtcatctctcaagtcatcatcctatataatgaatagaagtgttgtagtgcagcagcgagagtccttaaacttagcagctcatgcagtgtgaagtcattggagatgtcgaaggcaccattgttgtagaagaacagtcgccgcaccgcggcaagtcgatgtcgaatttaagaatgtgaatggcatgccgttagtgctcatggttgcctgccaacgacgccgagacgtcccacattggcgctggatgtgatggcatcccccanatgcctatgacagcgcggaagtgaactaacaccggcgacgatatttcttcctccattgcagcatgactccttttcctcttgggtggctgtgtgtgacacacaggcgag

SEQ ID NO: 12175 - DNA, 229 bp, Zea mays
  Clone ID: MRT4577_111099C.1
gaattttcggtttgacccacgcgggtgaccacgcgaccgatttgcaacaaccagcggctactattaagccaggtgggctgctgtctacccccagcaatttttttcattcaaccaaatggaagtagtcaatgtatacgtttatccaaactctaacactcctctaccaccccactaacagcctgcaatcaatctagttatcttgaaaaatcaaaacaaactttatatccac

SEQ ID NO: 12176 - DNA, 495 bp, Zea mays
  Clone ID: MRT4577_11109C.1
ccggccggaggtacatacctgaagatactccgacaggccgttgagcggtggtggcagtcgcaaggatctgtgccgtgatgccgacgccgaacacagaactcatggacgacgcacgactaatggctgagaagctgcatcatgaaggggaatatcatctacgctcgttatctcgactccaagaagacggtcgccgaggaccgccgaatcgtcgttgcaaaagtgtgaccggagctcacctgaatcgagatagctgactgctgttcgcaccatgtgatcccccacgtgatcgtccaggataaagggtaccctcgccatctcttccaggcggggtggatcaggcagcagattatcaaatatgactgatactacgtctatcttgctattaaacaccacatatgatctgatgatcctagcaccacagatagctccccagcatcacatatgtacccttaatgatcatccagcgtcctaccactatgtgagtgcaaagaacac

SEQ ID NO: 12177 - DNA, 283 bp, Zea mays
  Clone ID: MRT4577_1110C.1
cccacgcgtccgggcccgggtggttgctgccgaaatgggcaagttcatgaaacctgggaaggtggtgcttgtcctggctggacgctactccggacgcaaagctgtcatcgtgaagaacattgatgatggcacctcagatcgcccctacagccatgctctggtggctggaattgaccgctacccccgcaaagtgacagctgccatgggcaagaagaagatcgccaagagatcaaagataaaatcttttgtgaaagtgtataactacaatcacctaatgcccaca

SEQ ID NO: 12178 - DNA, 532 bp, Zea mays
  Clone ID: MRT4577_111100C.1
actaggtctagatcgggcaggaagctgggcgggcaggcggtcaccctgggcctgatgcccttcatgcacatgtacggtatgaccggcatatgctgaaccacgctgcagaacaaaggcacggtgatggtgatggaccacttcgacactgagcgcgtacctgggcgcgctgttgacgcaccgagtgaagcaagcgccactcgtgccggccacacatgctgaccatggagaaaaggaccgaagacgacgagttcaaactgtccggcctgaccctgaagtccgtcatgacagtcgccatgccgctcgggccttacctactgtccgtgttttaacccaagttgcctggcggacaagaggaggaggagaactgtctcacagatcacatatgcattaacctgacgaacgctatctttggacgctaagacgtggggtacctggggcaggtcgtcaagaagaacacggacaggttcatcctgcccaaacagaaagagaaactcgtggaccccagaaatgcgagcttagctgcccaagaaca

SEQ ID NO: 12179 - DNA, 196 bp, Zea mays
  Clone ID: MRT4577_111101C.1
tgagccagacacgatacagatgcccagacttgagataccagatataaacccgtgcagcaggcagcattgaccagggtgccacctaaggtgatgctagctaacacaggctcgatgcacagctatttcttgacacgcagctcggtttcgagggccctgacacgattgtgaatgatcctgcggctggagattgccttgc

SEQ ID NO: 12180 - DNA, 1347 bp, Zea mays
  Clone ID: MRT4577_111102C.1
ttaattttgttccgccaggtgcttttcttctagtactcaaggctctttattttggcggcgtatatgatacctgggcccccggggagggggatgtaagaaaaattaccaatttgacccttagccccggtgttatatttggttatttactaaaatccccttttgggggagaaggatggattgttagtgtggaaagaatacccaaggctcacccggatttgctccgggatcttcttcctcccacacctcacctacaaactgctctatctcttgtgttgtgcatcgacaccattattcagggttagaagatggcaatactggtcattaccatggtgaacgtgcagtgctgccactgcagagccagcatcaccaagatcctggaaagccacaaagaggagttttgcatcgagaagattgaattcgaggagaagctcaacaaggtgattgtacgcgggaagttcgacggcgagaagctcaagaaggcgatactagacaaggccggcgagaccgtgaagatcaaggagatagccctcgtcgacaagtggccacccccacccccaccttcgcctcccccgcccaaaccggaatgcaaggtggtgccgtacccttacccgtacccgtatccgtacccgtggtcgtgcccaccacctcgcccgccgtgccactgctgcaagccgccgacaccgccgccgccgaagccgccgccgccacagccgacgccgtgccagtgccactgctgcaagccgccgacaccgtcgccgccgaagccgccgccacagccgacgccgtgccagtgccactgctgtaagcctccggcaccatcgccgccgaagccgacgccgtgccagtgccactgctgtaagcctccggcaccgtcgccgccgaagccgccgccacagccgacgccgtgctgcaagcagtgcgaggactcgcacgacaaggataaatgcaagcgttgcccaccatgcccgccgtgcccaccgtgcccgccgtgtccaccgtgcccgcccaactactggccgccacacccgtggccctgccagtgcccaccacaggacagccagtgcaccatcgtgtgatccacgtacgcttcctttcttgcaatctgccgcctgctgcgatcgtcgtgtgatctgtcccagtaatctcgccctagtcatgtctcatgtacttggttcgcgcgttcgttgtgtcgtttgggttgtgtggcgtgtgtcctgtcttgtcttgtataaccattctctctttcagaacatgtgtaacactgattgatgatgtgtttattcatttcatgttactttcttaatagcatcttcgagagcattgctaaaaatataaaaaaaagcggcc

SEQ ID NO: 12181 - DNA, 2170 bp, Zea mays
  Clone ID: MRT4577_111103C.1
taaggacataaaaagtgcagtttggaataacaaagatcagaacaaagccaaaccttacagatcagcagcaggcgtctgtaggacaacagttgaatttgtccttggtgccaatacagacaaacatttgtttgtggataatttatcaactgtagccatgcattcccctgagtgctcttggcatggtgacaatgttgatgacaatcatgtgcttactactgtaccatccaaaacactgacaagcccaagggagaaaatggacacaccctgcaatgttaaactgccagagtccacctattcatatcaggaagacatggagcttaattcaaggctaacagtatatatggaagaaggaattgttcctgagtctccagtggttgaagttagccacctacgtctagagatggatgaagctgcagactttggagctgtgccaaagcgtggttctccaaagtcacgtgatgagagggctcatgccaatgtagctagaagtcacaaaggacctttgaactttgagaaaaacgatcaattgctttgtggggaaaacgagtttgatggatcatcaaggttgtatatgctagatcagactcgagccaaaacagaagagccaatgcatccttcaaatgtgaagatggctactactacaagacatactcctgggaatatgctgtgtgatagtttctcaggtgattatcagcttaggtcagggggggatgcatcgggatcagtccagcaagcacctaagtacagaagactatgcaaatatggtgacaagatcaaaagagtctcttccatatctttggatggctgtgatgataggtttgaagaatgcaatattgctaataaagataggccaaaccaaataaaacatgctatggggacaaaaaggaagaccaagaggcgtctagatgcctatattgacgaggaagtcggggtgtctgaagatgcatatgtttcagaggatgaggatgataatcagagtgaagataaatacgaagatagcttcattgatgatcaggcaactccaactgaatttacacaaactgaacaaggtgatcgacacaatggtgacatgatgggtttctacaggcaatcgttgtttactcagtccccagtagttctaccctcaaggtaccttgatgtttcttacaattctgcttctcggaccggaaattcaagctattcttcagaggctaggcacaattacactgagactcccaaagagattcaaacacaacatcataccataaacccaagcccatcgtacagttttgtacaggatcgatgtgaaagagggatcgccaattgtgaatcatcgactaagctggattgcagaaagagaaggctaagcttccagcaacctctggcgatccctgttataaaccttgaaccagaaccagcaccagaaccatctccacacgtcgccagcagagtcgctgatcacctatattttgatgatggtttctttgagaaccttgatcttgatgcaattgaagctcaagcaaccgaacagtggagacagaagaccacacaatcgacgcagaaaccagtggaaattaagaatgcatcagacatgagttttgcacctccgtcattcgatttaggtctctgatagtggtggtaaagttagcatccattcatgatgtcatctagctgcagtacctagccatctcagagcatgctgagaactgcacaagcaatgaggttttctgcagaaggcccgaacctgcatcacatgacaatgccgcaggatctggcatgtctgccgctgtgatatttatcggcgccctggagctggaagatgcgctggcggcagattttgtagagtatttatctcagtacaggctcaatacaccatgtatattctcctgtaaatactgttcgatgtataagggtcttattgtatgcagacatttcagagacttgatgtgttaaacccagtggcaaaggtgacgtcagtgtcggtttttgttgcgcaggattatcctcgctctcgatgctgaaccgactggttttgcatagacgaggcatccgtgcagcatgatggcaacgtggagtttggtcaataggacgagtggttggtacatgatgcctggttgctttccgaaaacaggcaatgttttgtgcagtcttgtcgatttctgtacatctcaattaacgtacgcgttttcgt

SEQ ID NO: 12182 - DNA, 851 bp, Zea mays
  unsure (1)..(851): unsure at all n locations
  Clone ID: MRT4577_111104C.1
ccggccggccggccgggaaacgtgactgcccacacttcagtcttgtccggttgtcccatcacagctaaagcaaaaccaccacccatcgagctgatcctgatcatcactcttttcccgacacaaagagggcaccaagaatcccctccatcgacgacgaaggcgatggcgccgctgccgcaggccgtccacctcctcctcgccttcgccctcgcgcttggctgcctggcgggcggcgccaccgcgacggtggtgacgacgtgcagggcggcggcggacagcgacgcgcgcgtggactacgcgttctgcgtcgccgagctgggcatgcaccgcgagagccccgacgccgacacctggggcctcgccaaggtggccgcgctgacgggcgtcaacaacgccgacaacgccgtgtacgacatcaaggccctgctcgccaacaagaggcccgacggcccgacgcgcgcggcgctggagaagtgcgggaggctgtacggctccgtcgggttcgcgttcgccgaggcggacgacgagatcaacaaccgccgctacgccgccgggaaggccaaggtcgcggaggcggtgtccctcgcgcgccaacgacgcgctggcgcagcacagctcctacaacgtgcggatcgctgatatctgcatcgccatcactaacctcatcaagtgaatactatatatggtactgtacatttacggaaacacatgagtaccaataccatggtgtgcgtccagtacgtggtcgatcgagttgacaggtgtgacacgacacgacttcaaagtttgtacctttagagaactttgtatacaaataatattaaaggggntatgttattctgatgtgccgc

SEQ ID NO: 12183 - DNA, 893 bp, Zea mays
  Clone ID: MRT4577_111105C.1
ccggccgggaaacgtgactgcccacacttcagtcttgtccggttgtcccatcacagctaaagcaaaaccaccacccatcgagctgatcctgatcatcactcttttcccgacacaaagagggcaccaagaatcccctccatcgacgacgaaggcgatggcgccgctgccgcaggccgtccacctcctcctcgccttcgccctcgcgcttggctgcctggcgggcggcgccaccgcgacggtggtgacgacgtgcagggcggcggcggacagcgacgcgcgcgtggactacgcgttctgcgtcgccgagctgggcatgcaccgcgagagccccgacgccgacacctggggcctcgccaaggtggccgcgctgacgggcgtcaacaacgccgacaacgccgtgtacgacatcaaggccctgctcgccaacaagaggcccgacggcccgacgcgcgcggcgctggagaagtgcgggaggctgtacggctccgtcgggttcgcgttcgccgaggcggacgacgagatcaacaaccgccgctacgccgccgggaaggccaaggtcgcggaggcggtgtccctcgcgcgccagtgcgacgacgccctcgccgtggccgccgccgtcccgtcgccgctggcgcagcacagctcctacaacgtgcggatcgctgatatctgcatcgccatcactaacctcatcaagtgaatactatatatggtactgtacatttacggaaacacatgagtaccaataccatggtgtgcgtccagtacgtggtcgatcgagttgacaggtgtgacacgacacgacttcaaagtttgtacctttagagaactttgtatacaaataataataaaggagttatgttattctgaaaaaaaaaaaaaaaaaagcggcc

SEQ ID NO: 12184 - DNA, 916 bp, Zea mays
  Clone ID: MRT4577_111106C.1
tggggtaccctcggagccttccgggcttgttgttcatctctctcacctcagctcaccttgccggcagtcaggctcattagccgagaccctccacccagtgctcgaccaacgacgtcgtttccccgtcgtccgagctccaccacaccgatgcgtccgccctgctcctccacattgaggtctgctcggagcagtagtggcaacagtgcttcttccattttctcgtgtcgagcttcctccccatcacactcagccgcgactccctggtgcataccattcgcggttggcctctccctcgccaatgctgttgtcctgcagctcctccaccggtctgttggtgcctaggccacggtctgttggtgtgcctccctgaccacgcgctcagcttcccggaccaacgcccgctcagcctcgatgcttgttgtgccaagcgcatgccgaccgacggtgctccctcagctcgtccatctccatgctcgatctctgcctttgtattatcgatgctgcgctgagtcgtctcttcgccctgcgtcctcgacatgtccacgatgccacagtctgcaagtcatggtggtcgttgtcgtcttgcccatgccatggccgcaacttcctgtgttgctccctagtccacgtcatccagtccggattttttgtgtggaagaaggtggaactggagatgaaggagaaagcgaaatctagtgtgttgctcactaggcgttcgacaaaaggctcaaaccagatattgttgccgttttgtgaatattgagcctgatttagtgatggtgagtaattttgcaattcaggttaattaattggtgggcatatgtgatgatgaaatgtcaaaatcgcttgcaatgatgtgttcgcatgtgcgattgaaaagaaaaaaccaaaaaaaaaaaaaaaaaaaaaacgcctg

SEQ ID NO: 12185 - DNA, 389 bp, Zea mays
  Clone ID: MRT4577_111107C.1
cggacgcgtgggtaaagggaacggtattttcaatttgttggcaggtggcatggaagacatcgtttttttttgtgcggggaagtaatatgcacctttttacaacatattggttcagtgatgccggcccagttctagccatgtactcatgcgtaagtttgcctaggccttgaggtattagctggaacaacattaaatcaatgatcctctagggaagatgtagctgtgaatcgcaaagattcgagtatgtgaattggaacagccagcttggcgttatattttctaggtttatatggtcagtcgcttaccaacaattctgtgacaaccgcacacctgctttgtgaagcagcaattccgacggcggcgtgctttctaactgggcatagcctcgt

SEQ ID NO: 12186 - DNA, 129 bp, Zea mays
  unsure (1)..(129): unsure at all n locations
  Clone ID: MRT4577_111108C.1
acccctactncaggtcttttttaggggcgctctctgtagaggaccccagtgggcagaaacacacataaggggggactttgtgaaagcatcgccgagatgagtttaaacagattattgttaaagcgcagg

SEQ ID NO: 12187 - DNA, 309 bp, Zea mays
  Clone ID: MRT4577_111109C.1
cccacgcgttcgccgacgcattaaacggtctcgtgttcatgacatgtcatatacaaactgggccagggcagcctcgcttttgccttcgctttcatgcataggagatgtagagaatcaccaccggaccggcctgactctataccgtgtggcgctattggccacactgatatgctcaaggttggaatgtcctgtaagggctgagatagagctctaaagactgtcctgagcaatatgcaacgcgctgcgtcctacctcgtaaacattatggaatactacgtaacggtgaatggcattgtgatacactaagct

SEQ ID NO: 12188 - DNA, 554 bp, Zea mays
  Clone ID: MRT4577_11110C.1
gacaaaaacgctggaccatcagatgtttcgctttctttcttttttttctgtagattcaacacatgaatgacaacacctgtaaagcagttgggtcgccttgcacaccccacccgctgcccaaacattaacaacatggtgtggagacgactgctaaataatctgtcctgtggacgtgtacgcatgcatggtgtgtttgcatcggtcttgatcggttgcttggttggtgcctcacctcaggaaccgagacgagatgcggacgcgagcgccaccgcctgcgcccacaccttgagccgcgccttcacgtccttgggatcgtccccggggctggagatgcgccagctgccggaggccggcgagttgccgccgctgctggcggtgtcgacgccggagacggagagcgcgcaggatgggatctccacggtccagtcacagggaaggtcgaggcccaggtcccggcacgcgcggacctcctccatgtccatcgccacgccgcggctcgccggtgagtcgcccccgccgccgccgaggaccaccacgggcacgggaacctcctc

SEQ ID NO: 12189 - DNA, 312 bp, Zea mays
  Clone ID: MRT4577_111110C.1
gttctagatcgcgagcgggcgcccttttttgttttttttttttctgggcaaaacagggattacttttagcgcaccttaaaagggggggtttccaggaacacaccagggaaacttccaaggttttgaccatattaaggttgggcttagtttggccaccatataaaggcataacttggttaatggaaatggttaaaattaccaaggggggaaccaggtacttgcattcaatttgggggggaacaatgactttcacaaaaaattttaagattcccttaaaaaaacttttggttaaaaaaaagttggaaagcctgg

SEQ ID NO: 12190 - DNA, 376 bp, Zea mays
  Clone ID: MRT4577_111111C.1
gacaaaacttagtgacccttataagggtcaccagagggcccagaataaagttcaaaaacccctttgggtttaacgggagttacccttattggattgcccggccaaacatgccaagataagtcaaaacattgcccttattcctacaaagggtgtcccttgccaagtagggttccctaagggaaaccagaaccagccccacacaataggtcttttttaggggcaactctgggatcctgggctcgggaggataccctatagcccgacaatggggaacacctgcagccccgggtggctgatggtaacgacaggcaggccgcctataggggggaattcggaaaagggcttcacttacaaagggttaaaggggaacatcttt

SEQ ID NO: 12191 - DNA, 161 bp, Zea mays
  Clone ID: MRT4577_111112C.1
tcgggtatatatgtcacaaatgtcgtggtatgatatgaattatactcatgtacttgtacataatcgtgtatttttgcaaacaaatagggtggctgtagaatagtaggtgggatgagcaggtctgaatttgagagcctgtatatatgtttttttttcctttt

SEQ ID NO: 12192 - DNA, 315 bp, Zea mays
  Clone ID: MRT4577_111113C.1
ggcacctccactgtaccgtcacctggtgctgctccttcttctactccctctgggccttctcgggggcacgaggggtcagcgccgatgaccttgtatctgaacttcaatctctccgcgcgcgggccccgtccggcgtgatccaccttaccgacacctccgtcacccggtttctgttcggcccctccgggcgccggccctacttcgtgctgggattcttcgacgccgcttcgcttcacttaaaggctgaccttcacctggcccaacttcgcaccgaggtcgggctccttttcgcctccttgctcggtcacaaccccg

SEQ ID NO: 12193 - DNA, 228 bp, Zea mays
  Clone ID: MRT4577_111114C.1
tgactattttcttagatcgcgagccgccgcccttgtttttttctcgaggaggagggacgggaatttcctccccttgattatgcctcgagagaaaagaggccattttataaccatcacaagaaggctgttgccatgaaagcactgatacatatctcctctgtcttatcaaatgctccatacctattgaacttatactgtgatcactacattaacaatttcaagtccata

SEQ ID NO: 12194 - DNA, 2328 bp, Zea mays
  Clone ID: MRT4577_111115C.1
tggggcgcgcgcgtgtagggtcgcaagccgagccaaagcagctgcagaccgaccaccacgcgacgctcctgctggctgctgccgcggaacccgggacaagcgacctcctccacctccccagctagctatagcttcctgcttgcagctgcaggtgccagccgagccgcctaccggtaccgggtacagccgcacaggcaggcggcggcatgcgctccagcctccagcagtgagggagggaggccctctgcccgcgcgtgctgtcccgctcccgccccttctacttctacccctccccccaccgcgggccgagagggagtccgcccgccggcgccgcgcgactcaccgatgcccagccatgaggcctgctgcggcaccatgttctgggtgtacctcatgtcctgcgtcggcctcgtcgtcttcgccggcctcatgtcgggcctcaccctcggcctcatgtccctcagcctcgtcgacctcgaggtgctcgccaaggccggcacgcccaaggacaagctcaacgccgccaggatcctccccgtcatgaagaaccagcacctgctcctctgcacgctcctcatcggaaactcgctcgccatggaggcgctgcccatattcctcgacacgctcgtgccgccctacgtcgccatcctcatctccgtcacgctcatcctcgcgttcggggagatcatgccgcaagccatctgcacgcgctacgggctcagcgtgggggccaaggcggcgcccgtcgtccgcctactgctcatcctcttcttccccgtcgcctacccgatcagtaagttgttggactgcctactgggaaagggacattttgcactaatgagaagagctgagctgaagacgttagttgatatgcacggcaatgaggctggaaaaggtggagagctcactcgtgatgaaacaactatcattacaggagctttggagctgactcaaaagattgcaaaagatgccatgactcctatatctgaaaccttctcacttgacataaatgctaagctggacttacacacaatgggtatgataatgactagagggcatagtcgtgttcctatatactctgggattccaagcaatattattggccttatattggtaaaaaacttgattacttgccgagctgaagatgaagtgcccattcgtaatgttactatcagaaaaattccaagggtggctgatgatcttcctctctatgacattctaaatgagttccagaaaggtcacagccacatggctgtggtagttaaacgaacaaaggaagcaggagtatccactgaaaaccaaaagagcacaactgcagattataaaataaaccccaaagatgctcatgctgatggctcatccccttcttatgctagcaacactgctggaagtcgtagaattaacatagagaagcatggagatgggcgcccatacaataagaaatcagaaaagaagcgggaaaatattcttgattttaacacagatccacttccaagctattcaatggatgaggcggcagtcggaataatcacaatggaagatgtcatggaagaacttctacaggaagaaatctatgatgaaacagatgagtatgttgatgtacataacaagatcaggataaacatgttacctccaggcaaatcactgtcacctaccatatctcctggtggtggacccttatctcaggggctccgaaagactcctatggcatctccgttctcaccatactaccattgtaattcagtgttacgttccccagcttccaaccattgtcagtcacctgggactctaccgacaatactttcccctggaagatcacctactgcacaaacacctgggcaaagttcaccaaatggaagtcaggtttcaataaattccaacggtcaacataaaaaggacggtgagaactaacataccagaagattgttttccagacggtctcgtctcaagacgggatgcatgattaaaatcatgaaattgctagcgtaggattaagctgcgaatataagtagcacagctctcttgaatggttagtggcccatgtatttattgattgtttgcttgtacatatatgctccggcatccggaccttagtatggcctaatcctcactatgtatcatacataggaagtgaatggaagccaatataattttgctctagacaattttagcttgctttctgaacccttatgtaagccttcaagatagtgaaaatgttaagtgagtagctcacgagctaaataatggctagatattctctgtaaaaaaaaaaaaaaaaaaaaaaactaaaacaaaaaaaaaaataaagaaaaaaaaaaaatgacattt

SEQ ID NO: 12195 - DNA, 2124 bp, Zea mays
  Clone ID: MRT4577_111116C.1
ctcgaggccggccggaactgacgggcctcaagccgagccaatcagaccacgcgaccccagctagctactccagttaccaggcgcagcacaggcgcccacgcgctccagcagtgagggagggaggccctgccacccgtgcgtgccgtcctggtcccgcccctcccctgcggccgagagagagagagagcgccgcgcgattcgccgatggccagccatgaggcctgctgcggcaccatgttctgggtgtacctcatgtcctgcgtcgccctcgtcatgttcgccggcctcatgtcggggctcaccctcggcctcatgtccctcagcctcgtcgacctcgaggtgctcgccaaggccggcacgcccaaggacaagctcaacgccgccaggatcctcccggtcgtcaagaaccagcacctgctcctctgcacgctcctcatcggcaactcgctcgccatggaggcgctgcccatattcctcgacacgctcgtgccgccctacgtcgccatcctcatctccgtcacgctcatcctcgcgttcggggagatcatgccgcaagccatctgcacgcgctacgggcttagcgtgggggccaaggcggcgcccgtcgtccgcctactgctcatcctcttcttccccgtcgcctacccgatcagtaagttgttggaccgcctactgggaaagggacattttgcactaatgagaagagctgagctgaagacgttagttgatatgcacggcaatgaggctggaaaaggtggagagctcactcgtgatgaaacaactatcattacaggagctttggagctgactcaaaagattgcaaaagatgccatgactcctatatctgaaaccttctcacttgacataaatgctaagctggacttacacacaatgggtatgataatgactagagggcatagtcgtgttcctatatactctgggattccaagcaatattattggccttatattggtaaaaaacttgattacttgccgagctgaggatgaagtgcccattcgtaatgttactatcagaaaaattccaagggtggctgatgatcttcctctctatgacattctaaatgagttccagaaaggtcacagccacatggctgtggtagttaaacgaacaaaggaagcaggagtatccactgaaaaccaaaagagcacaactgcagattataaaataaaccccaaagatgctcatgctgatggctcatccccttcttatgctaacaacactgctggaagtcgtagatttaacatagagaagcatggagacgggcgctcatgtaataagaaatcagaaaagaagcgggaaaatattcttgattttaacacagatccacttccaagctattcaatggatgaggcggcagtcggaataatcacgatggaagatgtaatggaagaacttctacaggttgcacatatttgtaatcaagttcccatggtttggaacaagtatttacattgctcacagcataaaatgtctaccatgctttcaaaatatgcactaagatcaccagctaatgatgctgaagaaatctatgatgaaacagatgagtatgttgatgtacataacaagatcaggataaacatgttacctccaggcaaagcactgtcacctaccatatctcctggtggtggacccttacctcaggggctccgaaagactcctatgacatctccgttctcaccatactaccattgtaattcagtgttacgttccccagcttccaaccattgtcagtcacctgggactctaccgacaatactttcccctggaagatcacctactgcacaaacacctgggcaaagttcaccaaatggaagtcaggaagtgaatggaagccaatataattttgctctagacaattttagcttgctttctggacccttatgtgtagtcgatggttggtgtgtcgtcggcatcaatagaatgatcgaagtgtcgcattctgcagctcctggtcctccgctccctgccttgctagctgttgtgtttgtgtccaggtattacaaggagcaacgcagtgtcaccaagtacccctgtggtattgtcaatgatgtgagttttggggtgtctagtggtattgtcaatgatgtgaggcactgcgactaa

SEQ ID NO: 12196 - DNA, 253 bp, Zea mays
  Clone ID: MRT4577_111117C.1
aaaaaaacaaaaagcttttccagccccgcccaaaaaaccaattaagtttgacaacccatttcacgaaccaggggtcacgacagacacagggggctcgcccatggattggggccccaacatacaaaggggggggcctatccccaaaaaaacttcagggccgggggaaacaaacaaacgtttcatgcaaatctgccacacatattttgagaaatgggggggacataatttgagacttggtaacccccaggaactt

SEQ ID NO: 12197 - DNA, 878 bp, Zea mays
  unsure (1)..(878): unsure at all n locations
  Clone ID: MRT4577_111118C.1
cctcgaggtccggcaaactgacgggcctcaggccgagccaagcagaccacgcgaccccagctagctactccagttaccaggcacagcacaggcgcccacgcgctccagcagtgagggagggaggccctgccacccgtgcgtgccgtgccgtcctggtcccgcccctcccctgcggccaagagagagagagagagcgccgagcccgccccgccagcgccgcgcgattcgccgatggccagccatgaggcgtgctgcggcaccatgttctgggtgtacctcatgtcctgcgtcggcctcgtcatgttcgccggcctcatgtcggggctcaccctcggcctcatgtccctcagcctcgtcgacctcgaggtgctcgccaaggccggcacgcccaaggacaagctcaacgccgccaggatcctcccggtcgtcaagaaccagcacctgctcctctgcacgctcctcatcggcaactcgctcgccatggaggcgctgcccatattcctcgacacgctcgtgccgccctacgtcgccgtcctcatctccgtcacgctcatcctcgccttcggggagatcatgccgcaagccatctgcacgcgctacgggctcagcgtgggggccaaggcggcgcccgtggtccggctgctgctcatcctcttcttccccgtcgcctacccgatcagcaagttattggactggctcctggggaaagggacattttgcactaatgagaagagctgagctanagacgttagttgatatgcatggcaaatgagctgnnaaagtggagagctgactcagggatgaacactatcattacaggagctctggagctgactcaaaagatgcaaaagatgcatgactgctatatctgaaacatt

SEQ ID NO: 12198 - DNA, 307 bp, Zea mays
  Clone ID: MRT4577_111119C.1
acaacacctactacgaatatcaagaacccttcggataaatgagcgctgcgccggggggagtgttactcctacttgcgactgctgctacaacctaagcccctgatgtgcaatcgtccatcttaagccactcgctgaaccctacgttgaggcgcgcgttgaccaatctacttctgaagaagatggtaggcaaccatgtgtcgcaatgctaccactaccacatcatgcgcgacgacccgctcatcattgcccgcgaatagaaggagcgtccagctaaactggaaatgctgaatcgacttgacaagggccc

SEQ ID NO: 12199 - DNA, 233 bp, Zea mays
  Clone ID: MRT4577_11111C.1
ttttcgacccacgcgtgccggttttatatactccagagcgtataagaacccgatccacaccatgagggcgttgttcaatgccctcgctgtcctgtctcttgctccaagcgccacctccacgcatacaaccggcggatgggggtgccagccacccgcgtttgttcatctaccgtcggcggtggatttcgccacgtcaggtttacctgccatctcgggaggcatttcccaccgcc

SEQ ID NO: 12200 - DNA, 482 bp, Zea mays
  unsure (1)..(482): unsure at all n locations
  Clone ID: MRT4577_111120C.1
ggacctttgggctgatttatgtgcttggtaaaactcgtatgagagatagatgatgagcacggctgagtggaggatgttgttgttgtgtgttgatgggttgttacaattgatcattgtaagaagtcgtctaatcgtagggagtctgagctgtgtgctggtattgcgagagaaagttccaaaaacgtaaagagggaccccattaagatcgaagatgatccgaaactctcgtagagtgcggggtaaacaaccggagaggcctcttgattctccgacaacgaatgtcccaccgcgaaggttagtagcggcttttgacacgcggctggccgttgaagcaaagcagataaggagaagccgatactcggaatctgcgccgcatccgatacgatgattccgataacaacgtgtatctccntatgggaggcggacttagcggcacacaatacgtactacgaagacttaggaaacgctagccatctcgtcgc

SEQ ID NO: 12201 - DNA, 292 bp, Zea mays
  Clone ID: MRT4577_111121C.1
ttttttttggggttctttggttttcaaatttgtcacaaattatggcccaaccaataagctcacatgtttttatgcaagtaacgactcaataaattctatgtggcgagcgacatcatgcgtgggacattaattccattctccacagattggggaaaacctgaactgaaaaaacgtggttgttcatacacataagaatacgtgtcctgtgacctaacagccctgctggtgctccaaaaacctgacaaaaacttagatccaacaatgcacacagggtttgtgaaaaatcccgagg

SEQ ID NO: 12202 - DNA, 126 bp, Zea mays
  unsure (1)..(126): unsure at all n locations
  Clone ID: MRT4577_111122C.1
cccacgcgtccgcccacgcgnacgaacaagccnacccacagggcggccaggagcaacagcaaagcagccgcagaacaagagcgcactcgcctttcagaggagggcgccagctcaactatgagcagg

SEQ ID NO: 12203 - DNA, 719 bp, Zea mays
  Clone ID: MRT4577_111123C.1
cgggcgcgagcccacggggcacgagggcggtgtggacctggaggcctgggtgcgccgcgcgttcaaggaggagcggccgctgtcggaggtggtcgaccccacgctgctcggcgaggtgcacgccaagaagcaggtcctggccgtcttccacgtcgcgctcgggtgcacggagcccgaccccgagatgcgcccgcgcatgcgcgccgtcgccgagagcctcgaccggatcggctgacttccagcgcgacggcgtccggccggccgccggttactgatcatcaactacgtaggtgcaatccaacgcataaaagagactcgcagtcctgttcatgtagattagcgcagttaagcagtgtggatttcagagacggtaaacgcaggcaaaaacaatcatcatccgctccatctgtgaatgacgaaggtgaatcagtcgacgtagcaggctacaggctagcagcctttgcagccgtgctaatattttgtggcaccccttgatccattccaaagcgaactctgttgggagttttctatcaaaaaaaaaaaaaatctcgagagtcattctagcgacctttatgactttggattattattcttattaatatatttgggctgccgtttctatgattatccattcttatcttactctttcatgctacctcttaggtggtggtgtagtgtcttctaaattttatttttctgtcccggtttttttataactt

SEQ ID NO: 12204 - DNA, 275 bp, Zea mays
  Clone ID: MRT4577_111124C.1
cgatttactcgaaatgagtttaatctggaaagcaagagcaccattggagtagagtttgcaacaagaagcatccaggttgatggaaaaacaataaaggcacagatatgggacacagcagggcaagagcgatatcgagctatactatcagcatattatcgtggagctgtaggtgccttattggtttatgacattgctaaacatctcacatatgaacatgtagagcgatggctgaaagaactgagagatcatgctgatagtaacttgtaatcatgcct

SEQ ID NO: 12205 - DNA, 573 bp, Zea mays
  Clone ID: MRT4577_111125C.1
cgggtgcagaaaggaagtgctgcgatagagttcattaacctagtagcgtcgatcatgttttgttaccttgctatctatcttggcgtaatataggccttgaaatccgaagttaccctgaaaaaaaaaaaaaaaaaaaaaaaaaaaaatttttttgtggattgccgatgggttggtttaccggtttattagagcgcatcatctggccgtcggattggactggggacggccgggtgcataaaggaagtgctgcgatagagttcattaacctaagtagcgtcgatcatgttttgttaccttgctatctatcttggcgtcaatataggccttgaaatccgaagttaccctgaaaaaaaaaaaaaaaaaaacaaaaaaatttttttgtggattgccgacgggttggtttaccggtttattaaagcgcatcatttggccgccggattggactgcggacggccgggtgcagaaaggaagtgctgcgatagagttcattaacctcattagcgcctatcatgttttggtaccttgctatctatcttggcgccaatataggccttgaaatccgaagttaccctg

SEQ ID NO: 12206 - DNA, 260 bp, Zea mays
  Clone ID: MRT4577_111126C.1
gcatcgcaacaaaaacacctacgcgaacccagctaatatgactgctttccaagttatattgccaaaaccagcccattaaacaactgcctagtgtaccgcaataaaaaagattgccagctaggtgtatacataactgttgcctataagctctgtttagagaggccaagaataatccgaactaaacaaattgttaacatataccaagggggcgagcatgtaaatttcaactgctggaccgagcttttggtgggttgcatcca

SEQ ID NO: 12207 - DNA, 285 bp, Zea mays
  Clone ID: MRT4577_111127C.1
attcggctcgtgtgctgctgcactatattaccagcatgcctgtcctgtctttcggcgacttttcttaaaccgagactagatcgccgacaaggcctagggccctacgcgcttactcgggctacgaggcaactactctggcctccttcttcgagcgcgtgcatgacatcggtaggctataagctctgatggctggggcgctgacctgagtttatagatagaggatgcatgagctgtatagaggactcggcaaacatgcctaacgtctaagaagcttgaagatctgca

SEQ ID NO: 12208 - DNA, 229 bp, Zea mays
  Clone ID: MRT4577_111128C.1
cctcaatatgtggctcgacacaacaaaaaacgcgaggaaggcgctggacgccttaggagccaggacagcacacaagccccaccaccgaagaacacagcggcccaccagagacagcgcacggggggggaacagcgcccacagacaggggccaggggaacaacccgagaccaagggcgccaagcaaccgatggaagacggagaccaaagaaacagacaggaacagaggccc

SEQ ID NO: 12209 - DNA, 269 bp, Zea mays
  Clone ID: MRT4577_111129C.1
gcctgcaatgtccacagtcagttttggtttctagccatgcttctgtgacagtgaggtgtaatgataacagtgggtgacctgcccgtgttctgttatttgataggtgaggggaactcacaacacacgtggctttaatcgattaggggagtgcatgcatgtctacattctattaagtattaaacttagataatttagaacaaaaagctcctattatgtaataaaagatgagatgctgttttataaaaaaaaaaaaaaaagtatactgttct

SEQ ID NO: 12210 - DNA, 185 bp, Zea mays
  Clone ID: MRT4577_11112C.1
cagagatcaagaaaacattacccccaaatttaataacccagtaccaaagggggggaataaagttttacaacgtaggttgtaaaccacacaccgccagttagttaaaacccgacagaaacataacacgttgggagccattcagggcaaatcacaggatagcaggggcacaaaagcccgacaacccc

SEQ ID NO: 12211 - DNA, 542 bp, Zea mays
  unsure (1)..(542): unsure at all n locations
  Clone ID: MRT4577_111130C.1
gttttcacanagnaaccactgcatatgaccatgaggcgcgtcgtgcgatggctcaagtggatactgacgggcaggaaggaggagcacaaccacgtccgtggtgcggagaagaggcggaggacgaccggaggccaggacgcgggagctcgacaacgccgtgccgcgatcgtcatccagaaaacgttcagaggctacctggctaggagagcgcttcgagcgctccggtcactcgtcaagatccaggcgttggtgcggggctacctggtcaggaagcaggcagccatcacactgcacaggttgcagacgctcatgcgcctgcaagccgactccatcgccgtcaagaatgctcccttccggaaatccatggaacaagaagagaggatctttgctcgggaccttcagacgaagccgccggcgcaccgccggaggctgtccgacagcacggactccaactacgagcgcagcccgcggatcgtggagatggacgacacgggctacctncgctcccggtcctcacggatcaccaccagcagctacatgta

SEQ ID NO: 12212 - DNA, 310 bp, Zea mays
  Clone ID: MRT4577_111131C.1
ttgggggttttttaaaatttttttggggttttaccccttttttttttttttttcttcgaaaaaaccaacatttattttctctacctcaatttatcaaaaccatttgcccaaatgaatgcccccccaagttttggccaacaaatcaccccctataattcaccggattttttcccctccctatttgcccaatgtaatacaacaataatttaggcttgatattgcaaaacaccttttccaccttttttatggcccatttgatccatcaaatggccccctctatccaaaaagctccatggtttttaccccaaac

SEQ ID NO: 12213 - DNA, 635 bp, Zea mays
  Clone ID: MRT4577_111132C.1
gccggccgggtcgggataatttccatttaaatattttcgaaaacagccagaaccaaaaccggaataaaaagaaaaatgatgaccgagctagcacccaatactatacaaactgatgaaaacataccctgcttcataagaaaaacttacaagattttagaagatggtaactactcaaatatcatctgttggaacaatgaagggacggctgtagtgatcaggaacccagctgattttgcccaaaatgtgctgcctatctatttcaagcacaataacttaaattcgtttattagacagctcaacatgtacgatttccacaagaagaaaaccccagatggagagcatgtatacttccatgagctattccaaagagacaaaaaacatctattaagaaacatcaaaaggaaaagcacagaatattctggaggaaacacagagaaaaacaaattaggtcaagaactaagccgcacaaaacaagatattgctaccataatcaatgaaaactttcttctaaagcaaataaatcgcgagcatctagcaacaatcaccaacttagaagctcaagctaacgagatcagtctaaagaaccaagctatattaagccaattaatgaaaaaaaaaaaaaaaaaaggccccta

SEQ ID NO: 12214 - DNA, 880 bp, Zea mays
  Clone ID: MRT4577_111133C.1
gtggtagggaatgccgatggcgggctcgccgccggtggtcgcggggtccttggttgtcgccatgaggtctcagctcgccgaagcgtccaacggcgcggccggaaccgctcagggacgacgaccaggcggtgggaccaaagcaggctgccattgctgtcgggagacaagcgagccgtctgagcaggaccacacggcggtggtggtcgacataccggcaccatccgctgagcgtcctggtgttgtggcgccgaccgccgccaccggatgttgcagcagctccgcccgcgaagcttgtgctactccaaccaccgtgactactgtgaactctgcgccacgaggttgctgtggcggcattggcgaaggagacacccgcgagaatgcaaggacaagctgctgcaccgatgcccgtgactctcctaagaaggcagggcaacaatgcaacgcaaggtgttgttcttggggcaaacaaaatactctcaagtgtcaagcgcaggatacaatctcaaatctcaagtgaaatactgactgttctgttcatgcaacaagaccaaaagctttccgagtgttcagatcgactgggttgctcgtgaagttttcaacattgagagtgatcaaatccttagctgcttgcttttgtctctctattttctccttgtgtatttttaagcgtttatccatgaacaaagtatcggtactagggtactactaaaccaaggtatttaggctgtttggctcaggtttaaaaatgcttccactgtcaaaaggtagaacgtcaattaattgcgtgtttggtagaaataagctagtccatcatatttctactcctcactttcatgtttggtttgtggaatagaatagagtactatcccgtctacaaaaa

SEQ ID NO: 12215 - DNA, 494 bp, Zea mays
  Clone ID: MRT4577_111134C.1
actccaaaaggcatttagcaacttcttaaatctacgatttagagagctaaaatttacacaactattgggggtgctcttactggtttgctgagttacttgaaataacaggggaagggtatgtgatcttatttgcactggctgatcaccgggaaaccaccggcatgcatgtgcctagctaggggcttgggaatttatttgcaggcggggtgaccagcttgagcttgagcttgccaccataaatctccggcagctgggagtcgtcgatggcctcgcggagcgtcctgtccaggtccttggccggcacgaaaacaaacttttttttggggttgtcgtccatgaaggggtaaaccatcttccaggcggccatgaaaacctagggcacgtggaccaagaaaacccgggcgaggcgctccgggtagtaactctgcatgatgtccagcgcccccaggtaacctcggatgtcgcaattggcgtaaccccaaccggcgagggcg

SEQ ID NO: 12216 - DNA, 632 bp, Zea mays
  Clone ID: MRT4577_111135C.1
cctcgaggccggccgggccgggcccgatccagacgtcctgttatggacgccccctccgatctcgttatcccttcccgtgacttcccccccgccgacgggacctgacagcgaccctgtactggcgccaggctctctgtggacgcatcacctccctcgccgtgggcgaagacttccgcaactatgttcccatacgatacgcagtccagcgagtctcgatgacgcccgtatcgcccagtacgcagcaaccccatgtacgatcgtcctcggaaaaactcatggcaagaggatgctgaaaagcatcatccaagtcagcatgaaggcgaaaaccgctaggtttaacccacccactgttaactccctcgttggggacaggcatgccacatggaaaaactttactcagatcatgaggactctgatacacaaaagacgtgcatctcgcaacgacgctgatgaacacacttgacctcaacgacactccagatctcactgcaagtgtctaccttattgaacacgccgctaacatctctcatagattgcatctacgctgaactagcgatgagctcctgtactaggactagtaggatgcgtttcgaatggatacactggatgagcccgttatgacctccatctcc

SEQ ID NO: 12217 - DNA, 310 bp, Zea mays
  unsure (1)..(310): unsure at all n locations
  Clone ID: MRT4577_111136C.1
gaaaagtaattctgaactacaatggcggnaacgagataccccactgtattgctgggtgcagtagtgggtgccagaccaactttaattcatgatcnaagccgnaagnggttgatttgagaagccgttgtcttatgtgcattaccgtgcttattactcanataaccatgtnctncaatctaatttactanataaattagataatatctttgaaaggtcnagtatggtctgtacattcatttattgcaccttcccttatgaagattaaaaatgttcatcacggaatatatgaatttatgatgtgttttataca

SEQ ID NO: 12218 - DNA, 429 bp, Zea mays
  Clone ID: MRT4577_111137C.1
atgaccaacctccaccacgccaccagcgtcaccgacacggacacgctggccgcgtcgctcaagagaaactggaagttggtgtccaccgaccgcgccaagtacgtgttggcattcttcgcaccgaacccgaatgacatgggatgcacgtaccttgagatatggttcaacaacattcccgtgcgtaccgtcgggtgggtgaccaacagtcagagacccacaccgaccacgatcaatagccccctagcgttgtggtttgcgcaccgcccccggcggccacaaccacagccaacagcaacggctgcaacgccactcgcaaccgcgcagcccctagagaatgacaacctcgtgttgcgggtccctggcgctggcatggtgtggcagagctttgaccactccatggacacgcatcgacgctggcgaaggcggtga

SEQ ID NO: 12219 - DNA, 1239 bp, Zea mays
  Clone ID: MRT4577_111138C.1
gtcgaccattggccgccttcggcggttgcagtatctggtttttactggaaactcacttcatggcgaatcactgatggattaagtaactgcactggtcttttaatcatctttcttggcaacaaccatcttaccggggaaatcccctcttggcttggtggttttccaaagcttgcggctttggacttgtcaaaaaacaatttgaccggcagcatcccgccatccctgggcaatctcacgaacctgcaggagctgtatcttcagattaaccagcttgagggttccatcccaaaagagcttggaaggctcaagaacgtccaatggtttgcgttgtttgcgaaccacctctcgggtgaggtcccgaaagctgtgttcaacctatcatcagtggttgggttcggtgtggatcaaaatgatctgcacggtacactgccgtccaactggggaaacaaccaaccagaccttgagttcatctacctcgcaaagaatcacttcacagggaatgtcccggcctcccttgccaatgcaaccatgatggacaccatagacctgggtgtcaacaatttcactggaaggatgccaccggagataggaactctttgcccaataatattttcctttgactcaaaccagattgaggcaagcgccactgagggctgggagttcgtcacgctcttgaccaactgcaccaggctacgcgtgcttagcttccgcaacaatatgcttgcaggtgagttgccaccctctgtcggaaacttatcatcaacacatctgcaggtgctttacactggatggaacgagatctatgggcgcataccacctggcattagtaatcttgtaaacttgcagaagctttccctcagccagaaccatttcaccggtgctctgccaaacacaattggtcggctgaaaatgatgcgggatttgggaatcgatggcaacctgctgtcggggacaattccaccctcaatcggtaacctaacactgcttgagttaatcactatggacaacaacaatcttgagggatctcttccttctaggggatgaaagtggtaatcccaactgttagaataaatttaatattttaaaatagatatgtataaaatttgatgttgatattttcttatgttatcaagcacattagtacaaatataaataaaatattacataaattgttttatgtattatttgctccctacaacacaaaaggttgaaaaaattaccgcatttgttaccgaatcc

SEQ ID NO: 12220 - DNA, 775 bp, Zea mays
  Clone ID: MRT4577_111139C.1
tatgaattgtcatatgaattttacatatcacagtgatgtttcttgttttatatctatgttttataccaatttttaactctcgtaacaacgtacgggtacatacctagtacccttttaaggatttaagaaacaaaagttgattctaaatcatcaaaactttcagttgtccccatgcacttatccactttgtcatctccttcgtccccctcgcgtcatcgctgcttctctccaccatcgccttcgccagcgtcggtgcgtgtcaatggagtggtcgaagctctgcaacaccatgccagcgtcagggacccgcaacacgaggttgtcattctctaggggctgcgcggtggcgttgctgtcggccatggctgtggccgccaccggcggtgcccaaaccacgtcgccagggggcttgttggtcaaaggggcggtgtgggtctcgttcacgacgatggcctggttctcgttggcaaggaccaacatccacgccgcccaggatggggctctgacggttggtcacccacccgacggtaccgcacgggaatgttgttgaaccatatctcgaggtacgtgcatcccatgtcattcgtatccagtgcgaagaatgcaaacacgtacttggcacggtcggtggacaccaacttccagtttctcttgagcgacgcggccagcgtgtccgtgtcggtgacgatggtgggcgtggtggtgatggagggagaacaagatggcggcgaggagcagacaacatcgttgcatagtggcgaaccgcctggtacgt

SEQ ID NO: 12221 - DNA, 154 bp, Zea mays
  Clone ID: MRT4577_11113C.1
ctatacgtaagacgggggctaaagcagaatgataagagcgtctggacgaacccagattcgggggaagtgcttctagcccaagctatccgaagcgctaggacgagtacgtgtgcgacatcgaatgctgctccatgagtgttggcacagagaaggc

SEQ ID NO: 12222 - DNA, 396 bp, Zea mays
  Clone ID: MRT4577_111140C.1
cggacgcgtgggcggacacgtgggcggacgcgtgggcggactcttggtcgacatgtggacttacagtgtttgtataacggtattgagactgaatggagtgtactttgaggtagtttctgaaaaacaaagaaatgaatgcaataagagaaaagacagagtaaaaaaacggacaacgagtaaagcggatgacgagacttgacatgataacacaaccgttggattactgcactggctacagttgcgcaattagtggccgatgtggcggttctagctcgccaccgacgacgcgcagtactaatgctggatagccgggacgactgactgtgcgtgaaccggtgaaacaggcagtgactgcatgctctcatggtatggcactatcgatagtgtagtatgtat

SEQ ID NO: 12223 - DNA, 340 bp, Zea mays
  Clone ID: MRT4577_111141C.1
gaactgtgacccgggccgcacgcctacgcgagcgctatattcgtctcgaggtgatccatattttataagtgatttactgtaatacggacctttactatgggtactgctatcaaaaaataaaatgcactaaaatataaatgcttgtgtggcttgatttgataatgttgcacaaaaatatgttcttctttacttcaccgcataaacagccagaaagcgacctatttcttcttcaaatccattgtaccctatggattaaaacgataattgcacgaactacattaaatagtccttacttgttctaaatatcaccacatacaccctatctgacatgtggcctggc

SEQ ID NO: 12224 - DNA, 355 bp, Zea mays
  Clone ID: MRT4577_111142C.1
cgatctgaatgtcaactgttctgtcagtcctgaacatgatctttttaatgaatcggaggagggcagcatctggatgtttcttgacgtcccacatacatgatgatatagacaaggagattagtggacaccaagacataagtctcaaccaaatgacggggacccctacaaagcatatgctactgagggcaaggctctcttcaaggataagaatccagccaagggcaggcaagaagaactcggctgcaaaaaccaagacgctcgatgagctggtttacattgacttccctggagccaacgcggtgagagtggcggtggacaagtacggcacctggcccgtgctgtcggtgatcacttt

SEQ ID NO: 12225 - DNA, 322 bp, Zea mays
  Clone ID: MRT4577_111143C.1
cggacgcgtgggtcccaggactccggacttcatctgaacgccgacacagagctgatcaacctttgcatggtcgaggtcaacaagaagcgcatcatgcacgccgagggcgccggtctcagcctggcgtgcgtgcatacctaccggcgccgtctcggtcggaacctatgcatcgtggggaagctggtgcatctgggccgcaccggcccgacaaggaccaagaaagacgcgttggccgcgctgctgtcgcttgccggccagagggagaacgtcagaaagctcgtgagcgccggcctcgcgcaggtagccctgttcgcgatcagcg

SEQ ID NO: 12226 - DNA, 340 bp, Zea mays
  Clone ID: MRT4577_111144C.1
aggtgaaccgggaaaaaacctgttttgggaccggacctgtccctggatctttaaaggccccaggggccctgaaaaaaattccccacaggatttaaggggggttcaatgggggatccaaatgccgacgggcccattgtacattgggcgcaacccgttatcctttattggcccgggagggaaccctgacccctttggaaccaattgttcccccccattgggcgtcccccaacagggcctgggaatacgggcttcacgaccatgcccaatttccacggccggccccgtggcccggaacctgggaaggcccccccccgtttttgggaaaaccaattgggggggg

SEQ ID NO: 12227 - DNA, 380 bp, Zea mays
  unsure (1)..(380): unsure at all n locations
  Clone ID: MRT4577_111145C.1
gcgggaggagaagaaacttacgaggattcccctagtaacggcgagcgaaccgggagcagcccagcttgagaatcgggcggcctcgccgcccgaattgcagtctggagaggcgggctctgggacggaccgggcccacggtctttgttgcgggggggctgttagggtgtgagtcccggtctttccggcccctgtcgtacccccacgggttgtcctcgactccggacggggggacggcaggcttagaaaggagatgtgcccttgcccttcttgtccccgccnttctcanagtgcttgcntctcttgctggcgtgctgtgagtngtgcttgctgctctggccctgcggcttccgaacattcttcttggtggccttggccttctt

SEQ ID NO: 12228 - DNA, 757 bp, Zea mays
  Clone ID: MRT4577_111146C.1
ccggccgggaaaacacgtcattagtttccagatcggaccaactccatctccaccgtgcacgcgctggcagctgcggcggtggtcgcttgcctgcctggccacggccatggcggcgcccgctcgcccgcacggccttggtgctggcgcggtggcatccgctcgcacgccctcctgaccatggccgcctggccgtggtgccgacgtggcggcggctgcgctcgctcgcgtatagtggatgggcagcctccctgctttggtgcctcatcgttcaacatcttctctctcttctattactgatcgaagcagcgtgccagcgtccacgcagggcttgaaggctgtgctcgcacgcgcttgttcggcgacggcgcccaccctcgcgtgctgggctgcggtggtgcttgcccgtgcgcgttgtggtcgcgcgcgcacgtccgcgcgccctcagccgcgtggcggcggctggtgctgcacgctcgcgtgcccacggagtggtggcagcagcggtcgacctgcgcgctcgcctgcgaggcggcggcttgggtcggtgctttcctgtgataaggcaacagcggggacagggcccacgcattcgctcatacctgctcgcagcgacgacctacgtcccgtcgagctgtggctgctagattgcgcaacacatggtggcttgtgcgagcaaagttctcacaagctcatgagcttggctgggcttaccgccatgtaaggatgaacacatgtccctattcctttctatctaaaa

SEQ ID NO: 12229 - DNA, 596 bp, Zea mays
  unsure (1)..(596): unsure at all n locations
  Clone ID: MRT4577_111147C.1
aattcggcacgaggccaattcacgtcgtttcttcatctccaatcccatcttcatcttcctcctagcgccgggccctctccatcttccgctcccccctactcgcgctcggcacgcaggcggcagcggcggcgctcaggttcggtctctcagcgacggcgtcagcggcttcccctcccgcccctcgatagttgcctcgcgccctcgactccggccctccgcacacctgccggtgaccctgcgtgcccccctctctctcctcccgcctccggtggatcgtcaacggcgcccgcccctgcggctgcgccgcgcctggcctgagggcagcgggagccagcagccgctgttccaccaaggcggtcgcgcctctttgggagcgcttatgccagccgtcctctcagcacttcagcgcgctgaagcgtgcgactgatttcaaccctggatctcgaggatgcgactctagtcactctacactgcaacaggtacggngcggtgagagctttctcgctcagtcactaagtcctggttctaagccgccttccgcatttgtgggaaggcttgccctcggttatcccttcacgagacccactcatgtggct

SEQ ID NO: 12230 - DNA, 220 bp, Zea mays
  Clone ID: MRT4577_111148C.1
ggttacatgaacacggcctatatgatagggataactaggggggcaccaacggattaccgctctccaatgtattacgtgcacaccaatatcaactacggctacacgggcagggcaacaaaaccaccgactctttcacatacgcctgctgactgcttgcaatatattatgtcgcactagggctacagggcactggcactcgtgcgaagcgagactgaccgtg

SEQ ID NO: 12231 - DNA, 598 bp, Zea mays
  Clone ID: MRT4577_111149C.1
gggcccccgggaaaaattttttttttggggcccgaaaggcgggggaccaaaaaaaagggcttccaaacccagggaaaagggttttcccctttttttttattaaaccagggaaaaagggggcctttttttttccgggcccaaacccctttttttttaaaaaaatggggggggggggcaaaatcaaggggggaccccttttttgggaaaattggcccaacccaaaaaaagccttttttgggaaagggggggaaacccccccaaaaaaacccttttccaaatttttttttttggcccaattttcttttgtttttggggggaaaaaggttttgaaaaaccccggggtccaaaacccccctggttaaggcttcccaaaattataggcttttttggggttccccccttcgggcccacttttataaccggcccctttttattggcaaacccccttgggggggtttaaaaattttgggccggaaaatttaccttttggcccccccgggccaaattagaaatttccccctaaaaaaaaacgggggggaaacttttagggggcccctaaacagggtttttaaaagggagtttaagaaagtcctttttt

SEQ ID NO: 12232 - DNA, 252 bp, Zea mays
  Clone ID: MRT4577_11114C.1
aaaaaaacgacgtctgtgcgtcaggcgttcggcgccgtatttgcttgtgtcgtggtagctacttttctttctggtgtgagttctagtcttgagtgctttggagttccaacaagggaaggagcagggagcgcaacaggtggagggagaggccggcggccggccatcacgccattgattgccactgcattgtggagggtgagtggaggggaaggaaaaggaaaagggtgggttttactcgcatggggaggcgaa

SEQ ID NO: 12233 - DNA, 369 bp, Zea mays
  Clone ID: MRT4577_111150C.1
cttcgttaggtttttataacaccacttttatgtcttataatatggacgattgacgagcgtctcgcaagctcggacaataaaaaagagtaggaaccgatcatagggttacactccttcacagggtccaacagagagccccaacaaaaggggggtgtttagggccgtggtgaaaaaaagggacagaaagggacatacccttgcaaaaaacatcacattacttgttcctgaactctttgccagcacaaacacacgaaagtgtattggacctgttctcaaaatagggggggcgcaccccgtgtttaaggctgaacaacaggaaccttgaaaaattgtggtttttaaacctgttttgcccccaagacaagctcc

SEQ ID NO: 12234 - DNA, 411 bp, Zea mays
  Clone ID: MRT4577_111151C.1
aaacaattgtggacaatttaattactaattttaaccggacgcaaagaatatccaagaatttatcaatagagacactacatgtgggccctccatgtgaggcgcttgcaccctatagactcttacgatatgggtcagaacaaactcacacagggacagggacggcggggggtccacttctcggagcgtgagatgacagatacaatttcaatggggggcaaacttatggccaggaaatttctttttctaaaaaaaaaaataagatgaatcttttcctggtaccacaactagtggggagaatcttccaattttacaactctggaagaacttaatcctttgtgccgttgaggaaattacttattcgacataagtttggcgaaccaaatacaacagagttgtgaccatcatctggga

SEQ ID NO: 12235 - DNA, 2218 bp, Zea mays
  Clone ID: MRT4577_111152C.1
ttgcgtccccgcttccgttactccctccgttccccgctcctcccgcctgtcctccacgcgacgcgcttggctcgaggccggccggggtatccccgtcgccttccttgggcagttgggctgagtcctcccgtctctcgccccagatatagttgcggcggggtttccttcttcgagaaagttctgaaccagggggagccgcgccgaaagccggagacgacccttgctgctggcaggtggtaattttgtagtcttgctaacttcagctgatggttaatatgagggacaatgactcatcaagcgacgcacaattggacgagcccttaggacgggtatcgatactctcttacggatctgggcatatgctcaacgacatcacatcgtcttgttggtttacctatttgcttgtgttcttgacagatctgggacttagtccaggtgatgccgctattgtgatgctttctggacaattggcggatggcttcacaacaatctttgttggggaattgatggatcgctttggacatttcaaactgtggcatgcaggaggatctattttagtggcaatttccttctcttctgtttttggtagctgtgttccttgcaaacttatgggaattaatacatctactttggagactgttgggtacagcacatttgctgctatttttaatgttggttgggcagttactcaagtcgctcacatgtctatggtaaactgcattacatcaaatccaactagccgggtttcacttgtaagctgtcgtaatgccttcacgatggttgcgaatcttagcctgtatggcgttgctttggtgatatttactctatcgcagtcagtgaacgtactagttcagtatcggtggattgcttatgtgtccatttccctcggatcttgctttgttgtcatcttcttgattggaaccaaagagccaggatcaattcggcactgtttggataagagtctttccagaatttcatggacctactggttcaagagagtattgtactaccaagttgctctagtctatactctgactagattggtgaccaatgtttcacaggcatttcttgctttctatgtaataaatgatttagaaatgaatcaatcctccaaagcattggtacctgctattatctacatctgcagtttgatagtatctgtaatattacaggagactagatggtcaagttggcgtcttaagctttacttttcagctggagcagtgctttggatattgtcaggtcttggaattgtttttctaccgagcagaatgcacaacctcatgtatgctatttcaatcataataggagctgcgaatgcacttatgacagtgacaagtattagcatggaaggtgttttagtaggagaagatctaaatggttgtgcttttgtgtatggctcattaagttttgttgacaaagtttcatgtggaatagctctctatgttctcgagtcctatcaaggaagtacaaagatcagatcaaatttaggaacggcatttggctattcagttacaagacttggcttgggcttagttccagctgcttgttcgctgctttcagctatagcagcttataccatggagctccctgatactcagaaaggacctttggtggaaccccttctagcataacttcactggtggcagtgttacagtttcaccgtgagccttcacagtaattgctcgatggaatgacactgctgctcgagcctgaagatgttagcgacctgatcaattcgttttgacttcgtatatatagtctgaataaattatgacggaggggatatactgagacacgtttgaatagggattagaagtgacataggggggctaatggcaagaagatctgtgttgatcatactgagctttacaagtcattctgcaatccaatgtaaatataacttagcttcatttcgaaagcgtcaaaactgccaactaggcacatgtagcgacgatgggcaaggaaaagaatatctctggtccttgttctacgctctaatttcattgtatatgtagcatcatgattgaaaagaaatatcttatatttatattgatgggtgaaatagtgtcgcctatgctcatgtaaattgtttctgacatttagaaattaaatatgcttgagaagagagcactaatctgtctgttcggtgcaacgcattgcctgtatggtaccccctctattctcgaaaatttgacgccggttagttcattctttt

SEQ ID NO: 12236 - DNA, 290 bp, Zea mays
  Clone ID: MRT4577_111153C.1
gtggggtagtataattttaataattttttttctttctttccttattttttttttttttaatttaaataacttcttttgagtatttttttacattcagtataacattgcgggcccaacatatatctacaggtgttaaagggggggcatcaaaccaattaatgttgacaaccaataaaacgaaccaagcggcaatgattatacagcgggctggtaaatggattggagccacaacatacaaagggggtcgccaaatccctaaaagggctcaggggcggtggaaacaaaacaaa

SEQ ID NO: 12237 - DNA, 749 bp, Zea mays
  Clone ID: MRT4577_111154C.1
gcttggtaaagcaggtagtaccaacaacttcgatatatacttttgaaagttcaattctgatcttagaccacttgatttttttttgttgattctgattgatagattcactgctcagtaggtttactagctgtttgctgctggtgtttgctctgaatgataggttttgtcgaatgagcattttggatttcatttcaaatctgttgttagccattgtccttgactcgtggtagcaaggacaccggcatagtgacatctctaccgagtccgaaatgatggtaacatcataaaatggccatattcctgctgcacgcttgttcccggtgcaagtttctgatcgatagctgactgagctcgtggtactctcatgcatgcagtcatgcttcattcaattcattatagagcactgataaggtcaatcatttgcttgttttttggtcgcactctcactccgttgttgcatgattgttgatcgactgtttgttagcagacgctctactagctttgctgctttggcatgtgactgcatattgtcgttgctatccactctacatgttccgtgagagcaagagcagatgattccttattagtagagcccgcacatcactactttaatttgttttatataaataaaccctgcactaaattcacagaatgcctatctcggataaaactagcactagcaaatggaaatccactatatgccagtaatagtgaaatcatcttgacctaatagtacgttgagaaaagaa

SEQ ID NO: 12238 - DNA, 462 bp, Zea mays
  Clone ID: MRT4577_111155C.1
ttcatcaagatacccacctgcctatctatttagcgaccatacagacaggaaaggtaactaggtaccatggagggaggcaaaaagaatgcagcaggaggcgtggtgtacctgctgcttctccaggtgtggttagctccaacaacggtaactgcccatctcctgcagcatgatacctccaccggggctggcctgcatctcatccggaggcacctagatcatcctcagagagcgatcctctgtgacgaaacctgcgcctacctaccatgctatacgtcagtcatgggtggacgatgaattggccaaatctgcatgatgtgatatcagtactatggctatttgtaatttgtgtggagataaacacaaggacgatacggtggtgatcaacttattgcatgagtatggtgatctaataagtaaagaataataaaaagggatatgatgtatgatcaaaaaaaaaaagag

SEQ ID NO: 12239 - DNA, 672 bp, Zea mays
  Clone ID: MRT4577_111156C.1
ctcgaggccggccgggccgggatacaaagatacgcacctgactatttatctacccatacatacacacgatgggttactagctacaatggaatgaggaacagacaatgaacaacagtgggtgcctggggctgctgtctttcttgctgtggttatcttgtatgatggcaacgggcatgcttgtgaacgcaaatgcctctgccgagtctgccctgcacctcctctcgaggcaactcggtcatccaacgagaaggatcctctggcggataaacctgtgtcttcctaccagtgctataccaacatgcataggtctgccacatggattggcctacactctgcatgatgagatgatcgtgcactagctgctatgttgtagttggacgctcgacagaaacattatgactctgcaccggcagttaggcttattgcatgctgtatgcagatctactagccacttatactaaatatgtactcatgatgaatgcgtcaggatttgcccagaggacttcacttgccccaactaagcttgggatccgcttgtatgctccatctcgtcaatctattgactactatgtcgagctcttgttatattattgaataaatctggcgcataaaattctttcgctggaccatggactactgtatctgtgcggagttatatttgaaattttaatg

SEQ ID NO: 12240 - DNA, 139 bp, Zea mays
  Clone ID: MRT4577_111157C.1
tccgcctacgctccgctcctcccctcttcctcccgtcccgccatgagcagcgcagcacgcgccctcatatccgcacgcccgggacggctgctgctcccgtctcggcgcctcccgtcctcctctaccatccgtcccgcgc

SEQ ID NO: 12241 - DNA, 138 bp, Zea mays
  Clone ID: MRT4577_111158C.1
gccggccgggcttccgatcatccttattatctgataccaacaagcaacattgaaagtgaatctagtagaacaatacagctgcaataggcgactaagatatcttccctgcttagtgctccgtgctctgttctacatgtg

SEQ ID NO: 12242 - DNA, 471 bp, Zea mays
  Clone ID: MRT4577_111159C.1
atgggggcccaggcccacacgtcatgtaaccgatgcgccggttactacgtgcgagaagctgcaccaccacttgcgccagtacctcgccttctcgactgcggaaccagagccgtgactcgaggcgaccctacgcatggcccaacagtgccaaccgagcacatcgatcatgggtcagtcagccgcgggagaaggcgcgacggtcgatacggccagaagtgggccgacagtaatggcggcagcaggcgagcggaagcggcgatcaaattgactgcaggctcacgtcccctcctggagcagcaggagagccctctcccatggcgtgaagacgacgcgcccgtgttccgttcctcgaacggctcgcgcacgcacaacgtctgcctcgccaactactcgtcccgtcgcattaacactgcggcaggacaggtgacacctttggcaggcgaagcgggcgatgcttcacctccgccataa

SEQ ID NO: 12243 - DNA, 527 bp, Zea mays
  Clone ID: MRT4577_11115C.1
cccaaaaaaaaaaacacgaatttttcttatgggccattaaaatttcaaatataaccccacacaaatccaatcgtcaaggggccagggggggaattggaaaggccaaacttattcgctaatttgggagggggccgccaggcccgaaaatggaaccgggggggggggcccccaggggatcccaagcttagtgggggcaagggaagccctcggggcaaatcttgccgcagttgttggggatgagggtggggctaaggggcccgttgggggggatgccgaggacctttgccttgaggggggggcaaaggcacaagggggggtaaagggccaccagcccctccagcaaggggcagaattgctcgtattgggggaggccgaccttgacgaggcccaacacattggcgcacaccttgagcttgagcgcgtcaatcgggcagcgcccggggctatgcaaccacggagtcggcacaactgggggtgttgggacaactgggccggaacatagggttcgcacccatgcgcgggggcag

SEQ ID NO: 12244 - DNA, 414 bp, Zea mays
  unsure (1)..(414): unsure at all n locations
  Clone ID: MRT4577_111160C.1
cgggctcgggatacaatgataccggttcctccatcgtccaccgcaaatgcttctaggcggactgttagctgcgttacaccctttttcttgacanaacctaacttgcgcagaaaacgagatgagattggcatggctttatttgtttttttttttgtcttttttgattttttttttttttggcgcttgactcaggatttaaaaactggaacggtgaaggtgacagcagtcggttggatcgagcattcccaaagttctacagtgtggccgaggacttgattgtacatggttttgttttttttttaatagtcattccaaatatcgcgaaatgcattgttacaggaagtcctttgccttcccaaaagccaccccgcttctctctaaggagaaggggccagtcctcgcccgagtccacac

SEQ ID NO: 12245 - DNA, 125 bp, Zea mays
  Clone ID: MRT4577_111161C.1
tgtgtttggtggaatggattctagtcactacaagggtgatcacacctaatgtccaagtcacttcaaaagggttaattgccagtttattatgggtgatgtcctggttaatggaagtccattgggtt

SEQ ID NO: 12246 - DNA, 362 bp, Zea mays
  Clone ID: MRT4577_111162C.1
ggggggaaaacaaaagggggagggggaggataaacatactccagagaaattagcaaacccttagtttttttggggggggtgccccccggcccccaaaataacagctccaactttaaaaaaaagtggctggattttccaaaaacccaggttacaggcaaaaatatatcttattggctccttgacctacggcaagcaaaagaaaacccccttttttgtaaagcttgttggggtttcctggaaaaattgggacctttgctcaaaacctttctaaacggacaccgggcctttttttttgggaaaaaccaaccctttttgcattagaggaaaattcggggctttaaaaccccagggatccggaaaag

SEQ ID NO: 12247 - DNA, 964 bp, Zea mays
  unsure (1)..(964): unsure at all n locations
  Clone ID: MRT4577_111163C.1
gccggccgggctgcgaaaaaaagcactcaccgctatcttgatgattgtgtctgtctcgctctcgctgctccgttcctgttcttccgctccttctccccacctcgttttggctgatcaaagttcttgttcgcgaacactttcctctgcctgacactctgagttcttggttaacgagcctgtagacccatcggccatcaccagttcactactcgccaatcgacatgtcaggacagagctcaagctcctatggtgacactgatcctggcacagacagggcatacagcaccacctccagcagcatccggtggggtccgcacggccgcggcatgacggcctgcctcgtcgtcgtcaatgtcgtgctcgtcgccctcgtctacctctacttctggagggtgttctcccgcagaagcgccgcgtccccctcagcagctaaccccacggaccacgacgacgatgcgtcttccacatcgacgccgccgtcgccgctatcgtcccaggaccagcacggtcgcatcgtggcgtcgctgccgacgttcgtcgtgcgctccgggtccggcgctggcgccgagtgtgcggtgtgcatcgcggagctgcgggacggcgacgaagggcgcgcgctgccgcggtgcgggcaccggttccacgcggcgtgcgtcgacgcttggctgcggcggcggcacaccacatgcccgctctgccgggccagcgtcgtcgtcgccgcggaggaggtggggcccaccaagggcagtggcgtaacggacacgacgacgacgaccgtggctctcgaggatatggacgcaccggtctagtcattattactgattgattgcattagttttggtttgtgtacttgtatgggaaacgacgacgtcaggtagtagtcttgggtcaatggagtatagtaaaggaagcattatcttgnntcgatgactccaaaccagcaaactggttntgcaagcaaaaa

SEQ ID NO: 12248 - DNA, 367 bp, Zea mays
  unsure (1)..(367): unsure at all n locations
  Clone ID: MRT4577_111164C.1
ctcccgattgaggaccacactagcaacataggaaagcgcaataggtgtagccaacatatggcagcgcaaaatatnntttgcgtcctctaatgctgccttggtgccntttctgcaagtggcgtgctaccggcgacgccacttttcccgcaatggctcgcgaaggcgtcctatagcgtnntcccttcttcccccgtgacccctctcaccagcgggtgtgcttcgggtgtgtggaaaacccaanttcttcaacccctacaggggtccaacagggcaatcgcagcggggcattcttaccctttatgcacccttgtgtcctccaacaatcatcagtccctattacaacagtgtccctttggtgcgttgtttg

SEQ ID NO: 12249 - DNA, 822 bp, Zea mays
  Clone ID: MRT4577_111165C.1
ttgggtacctcgaggccggccgggtgagatcatctgtgcatgtctttattaactagataatgcttagttcatttgacattccaccaatgatttcaagtcgtctgactaatcatccggtcgtccgactaatcgtcgactaagcgcgattagtcgtctaatttgggtggggatgactaggatctgtttttgcggtggactcctggttgggcccaatttgggtgggaacgactaatgggctggtaatagggcccattagtgttagggttatagtaaaactggctgctaccctctgcccctctccctgtcctaccagcgactgtttgattccagcagctgccctcttcttgttcctcaacggcggctgccctctccttgttcctcaatggttgctgcctccttggcggtggcggtggccagcagcctgcacagcggcaagatgagtacatcgtctgaagggtgaacatttctgaagaggatgttttatattggaattccaaaggttttcttccatcactaaccatagatcaaatccgcgatgtagcacgtgtatttgtaaatgggaagcttgcaggtagtaaagttggtcattgggtctcactgaatcaaccgcttcaattagttcaaggacttaatgagttgacattgttatcggagattgttggcttgcagaactatggtgctttcttggagaaggatggtgctggatttagaggtcaagtaaaactcactggcttgtcgaatggggatatcgaccttactaattctctttggacatatcagattggttttgaaaggtgagtttttcaggatctattctcctga

SEQ ID NO: 12250 - DNA, 150 bp, Zea mays
  Clone ID: MRT4577_111166C.1
ttctggttcccgtggcctcagaagaccatatcgtcccagttaatattgctgccagcaatttatgaagcgcatccgatggcacttgtattcattttatgtacagtttaatggaatacttgttcctctatgtattctctgtactaagtacac

SEQ ID NO: 12251 - DNA, 372 bp, Zea mays
  Clone ID: MRT4577_111167C.1
agcctccgatatttgggaaacctaatccgggctctggaaacgaataaagatgaggtccttccactagccaggtacatgcagcaagagcgcagcttcgaggacctggtggtaaagtaagatggcaagagccgagctgaagcaccaggtccaagtctggtggctcaagccgaggtgtggatgatcgtaacatatggacgtacgatacagtgcacatatgcaaagcccaaatgtgccagagcctgccaggctgggaatcaccaccatggatagcgctgtaactccttgctggagcagttgaaccccatttgagaagaatctcttggtgctcacacgcgttaaacacaaaaatacatggaaatagtccgtctaggc

SEQ ID NO: 12252 - DNA, 254 bp, Zea mays
  Clone ID: MRT4577_111168C.1
ctgcacgcaccgggacggaattgccgggaccgacccactccggcgggccctttactggctccgatgctacacgcaataagcgctggggctcaagttcgggagacagcgcttctcgttggagacgcttgccagagtggactaatgagatctaggctagtccatgcccctaatagacctggggaaactcggaggtagagaccttcaccagaatccaagattgataagacccaaagcggctaggaggcgaaggaaga

SEQ ID NO: 12253 - DNA, 289 bp, Zea mays
  Clone ID: MRT4577_111169C.1
ccaactgcccatcttgttcatcctgtccggtagtaaagaaaaatttagagggttggggatgtgagtggataggacctatccacatgttagtcctttcccgaatacccatcattttcctctcttgccttgccttccccattgccattgtgtaatcaccatcctccgtcgagatctaggaagaaagaaacaaagatagccaccatgcaaggaaacaacaatgtgcccctcctccctcccacgcaataactcgctacatccatgctcgtagctcctgagttgctgattcctt

SEQ ID NO: 12254 - DNA, 303 bp, Zea mays
  Clone ID: MRT4577_11116C.1
aagaggggtttgtgtaattagggggaaccaaataacacaatcaatgtatctttgtggcctcaacatgatcacaaatttttttgccttactcagattaaacttaaatattggggagcatgaatatcttcagcgaggtaggtgtcaccaaatatttccaactccaaattgtaatctagtaagccacaagtgaaggtaaataaataagaaaaacaactatgtaaatattatggtttactactcagacgaaattctggaatgtgaaatccaaagaaaaagagaaggggaagtttactgatcactaag

SEQ ID NO: 12255 - DNA, 267 bp, Zea mays
  Clone ID: MRT4577_111170C.1
attatttttttttttttataaatacaatttgtgtcttttttaattctggtagggtttaaacaccttttcttatatatccaatttgtctcttcccagttcactaggttctaaaaaccccacccaataaattaaaaaccccccctacaaacccccaggctgggcccaaaaccttatacctacataaaaaaggacccatccctgaccatttcttcaaaacctctaaccccaacaaaaggggttttaaattaccaaaaatgcccccccccc

SEQ ID NO: 12256 - DNA, 1307 bp, Zea mays
  unsure (1)..(1307): unsure at all n locations
  Clone ID: MRT4577_111171C.1
gagaaagtgcgcaagtttgaggagtctctaaaagagaagaggcctggagagggtcgagtttctgctggtaaaaaaggggcgaagttttcgaagccatccacacaagaagttggcaatacaacatcagtttcgactccgactgaagcagtggcttcggtcacagtggtgtcatctcctccaatggcggcagccccaacaatgatggctatggcgccaccttcagcagctgtggccggaggaatgtttttagcaccaatgcacccgcatcccttggtgttcccacctttcccccctgcagccccaccagcggtagctcctgtagcaccacctgctgcaccagcacccaatgttgtctccaacacctcaaagaagcgaaagaaaagaaagnnnnnnngaggaacttctgatgctgatgaaatgatgaatctaaaacaagatcagatcggcgaagtagaaaatgagtttgatctcacactacgcatcaggcctcgacatgagagtgagctatcgatttatctcttctgcgcgggttggtctttcgagaaaaatctcttctgctggctgtgttacctatgagactacctactgcagtctgcatattcctggggtgttggcttcactgcttcagctagatgctctgctgtggctgacgcagttcagtctaaggagagatgcattttgggctcagcacactgatcttgattactgtagattactagattagattgcctgtagtgtacattatcgtcctcagtgccggaagtaatctaacatgtagtccagcttatgaatgtaaagatctgtttctgattatggattgcatttatggggaaggatctggatcttattaagaaattatgatttacaagcatttgccgtcattcgagattggccgcagcgcccgatttatcccttctgcgcggcctgctcttgcgtgtaaagtcccgtctccgcgggtgggtcgctcgtgtggggtcgcttctgctgcctgtgctgctgctacctttgacacgcccttcccctctctgcatattcctggggtgttggcttcactgcttcagctagatgctctgctgtggctgacgcagttcagtctaaggagagatgcattttgggctcagcacactgatcttgattactgtagattactagattagattgcctgtagtgtacattatcgtcctcagtgccggaagtaatctaacatgtagtccagcttatgaatgtaaagatctgtttctgattatggattgcatttatggggaaggatctggatcttattaagaaaaaaaaaaaaaaaaaaaaaa

SEQ ID NO: 12257 - DNA, 125 bp, Zea mays
  Clone ID: MRT4577_111172C.1
acaataaagccattgctataatatataatacaggaccccaatacaaggagaaaaattgctgccgatagctaagggtcaatactatgcacatactaaatgttgtgggaataatggagaaaagacac

SEQ ID NO: 12258 - DNA, 256 bp, Zea mays
  Clone ID: MRT4577_111173C.1
ctagggttttttttttttttttagagcaagcaaagcacttttagagcaaatgggtaacttcattgcacaacagttctgaaggatcatagacataagatacaatgcggtgtctctgggttccctgagactaaccacaataagttaggagttttttttttgaaggcatggtttaagagtgggtcaccaacaaaccttcgtttacttgtgcacatgactgcttaagttgggggaggccataaaggaatgatgtccaaag

SEQ ID NO: 12259 - DNA, 179 bp, Zea mays
  Clone ID: MRT4577_111174C.1
gtgcgtgagaatgggaaccatctccttgcggcagtggcttccgcgtgccccgtgtgctggtgcggttcacatcacgcagacaggaagggtgtttgcgcactctgatcaactggaacctctgtatcatgcggctgaattccctttttcctttactcaataaaagctacatcagactgaac

SEQ ID NO: 12260 - DNA, 3222 bp, Zea mays
  unsure (1)..(3222): unsure at all n locations
  Clone ID: MRT4577_111175C.1
ctcagcggtcgcgcctggggtctccggctctccgctcgccacgcccacncccagggccactgccacgcttacgcgttctagggacgccgccgacggttccgcccctgcgtactctaggtatcccgtgtccaacggtccacccccaccgcaaccgccgtccgtccgtccgcccgccgccgcaccctgctagggtttcggccaggccggatccgccgccgcctgtagattctcctatccgaccgcggcgcctcgagccgcaccggcaacctcggacctgaatacctgatacactgcacttcttcagtccgcaggaccacagcacgcacaattgttcttcaatctgcaggactgcagccgcgcacaagccgtagctgttcgtctccctcctcgcgttcctcgggcgaccccgccgccgccgccgcatccgtcacacactcggggccctccctccctccctgtctgcgacgactgggtggtctaccgacgacctcgctttcgcgggcgaagagcgctcaccatcgagggcggccgggccgggtctcgtgcctctctctccgctccctctgacttgttcgcttgccgtcctcgctcgcggcaaagctgcagcgtgtctcggctccggcgcgccaccgctcgggacgcccgacggatccgctcccgcgtgcgctcgatatcccttgcttcaacggtccaagtcaacccccccaccaaatcgccgtccgtccggccgctgccgcaccctagcaggatcgcagcgtgcacagctcttcttcaatctgcaggattgcagccacgcacaagtcgtagctgtttccttggaactttgagctttggaagatgccaaggagaacaggaaatgctgcttcgaccaaatcagttgaattggtcaaacaagaccaaatggagtttgatcatcctgatgaggtagatgaagaggaagaagttgagtatgaagaaattgaggaggaggttgagtatgaagaggtagaggtagaggaggaggaggaggaggaggaggaggaggatgacaaaattgaaggtgtgcgtgaagttgatgctaatcatgacagtaaaatagtggatgatgatcccaaggatgggaatgaaaaagaaaagcatgctgagcttcttgctcttcctcctcatggagctgaagtttatgttggggggctttcctctgatgtatcttctgaagatctcaaacaactatttgaatctgttggagaagttgcagaagtgcgaatgcgaggaaagggggataacaagacatatgcttttattaatttcagaactaaagagatggctttaaaggccatccaaaagttgagcaataaagacctaaagggaaaaaagataaaagtttcttcctctcaggctaagaataggctttttattgggaatgtaccccatgattggacacctgatgatttcaaaaccgcagtggaagaagttggtcctggagttttaaaagttgatctcatgaaggcaccaggctcaggtcgcaataagggttatggctttattgaatactacaaccaggcatgtgcagagtatgctaagcagaagatgtctactccagaattcaaactagatacaaatgctcctactgtcagctgggcagatcataagaatgctagtgaagctacatctacttcacaggttaaatctctatatgtcaaaaacctccccaagactgttactcaagagcagctgaaaaagctgtttgagcatgttggagaaatcacaaaagttgttattccacctgcaaaatctgggcatgaaaatcggtacggttttgttcattttaaggaacggtccatggttatgaaggctctgaagaacactgagagatatgaacttgatggtcagctgctggattgttcacctgcgaaacctcctgctgataagaaggatgatactggatcatctcctactgcaaaaggacgtccattacccccaagttatgccccacttggatatggactagcgggagcttataatccacttggaaaaggactggcaggtgcttacaattcccctggaaacggactggcaggtgcttatggcgtgctttctgctcatgccgcacagccaatgttgtatgctccaggtgcttctccaggttcaacaatgatcccaatggtcctaccagacggccgtcttgtatacgtaccacagactgcagggcagcagcctgtgcatgtgacttcgcctctgccacagcaaggcggtcgtcgattcggcggcggtggcggatccagctccggcggaaagcgacagaggggagatgatcgtggcagtagccgcaggggctggcaccgtccgtattgatgtttgccatgccgctgatttgcaattagaagttagaacccagcaattagcatatttatcgcagtaccatgctggaaactgtactttgaattatttgtttttcctgtgtgcttcgtaacaggcctgccctaaaaagaatgatagtaccgcaaggggcaaatgtagtggtaatataatctatacatttgtaaccatcttcatcctgcgttgaccgtcttaggttattaaaataaatatatttcccccgttaatttttcaaaggggagatgaccgtggtagtaacagcaacaacagccgcaggggccggcaccgtccgtattgatgattgcaatgccgctgattagcagttagaagttagaaccgagcagttagcacattcgtcgcagtaccatgctggaaacggtggtttgaattatttatttaccatgctggaaacggtggtttgaattgaataagacaaagtttttgaaaaaaagtcaacgggtgtcgaatattcgtgaactgaggtattaccttagtcaagcttgaagaataaaaactatgctgtgctcttggctggactccaaaaaagtttttctgtgtgcctaacttcagccgcagtacaaccatgatgcagacgccaactgatgctggaaactgtactttacagtggttagttttttcgctgtgcgtctcgtgtctgtaacacaggcttaataacagtgcaaagtggcagatgtggtttgggatgcagtggtaaaatgaatctatgctcgtcttgtatacgtgtaagatggcagatgtggcttgggatgcaggcttaataacagcgcaaagtggcagatgtggcagaacaactatgctactgcagcacactttcgcttgtgctttctagtgccatgtctctttgct

SEQ ID NO: 12261 - DNA, 670 bp, Zea mays
  unsure (1)..(670): unsure at all n locations
  Clone ID: MRT4577_111176C.1
cnnnnnnnnnnnnnnnnnnnnnnnnnnnnnnnaacggtcaacggcaggatggagatggttacaaatgtatagagtatattaccactacatttgccccttgcggtactatcattcaattcagggcaggcctgttannnntccagcatggtaaataaataattcaaaccacagtttccagcatggtactgcgataaatatgctaattgctgggttctaacttctaattgcaaatcagcggcatggcaaacatcaatacggacggtgccagcccctgcggctactgttgctgttactccacggtcatctcccctctgtcgctttccgccggagctggatccgccaccgccgccgaatcgacgaccgccttgctgtggcagaggcgaagtcacatgcacaggctgctgccctgcagtctgtggtacgtatacaagacggccgtctggtaggaccattgggatcattgttgaacctggagaagcacctggagcatacaacattggctgtgcggcatgagcagaaagcacgccataagcacctgccagtccgtttccaggggaattgtaagcacctgccagtccctttccacgtggattataagctcccaccagtccatatccaagtggggcataacttgggagtaacgggcctccttttgcagtaggtgttgata

SEQ ID NO: 12262 - DNA, 604 bp, Zea mays
  Clone ID: MRT4577_111177C.1
gaccctcgggttcggccggggagctttagctcagtgtttgaactaaccatgacatgagttgatgttacgctagtttctttttaactaaaacaagacaaataaaaaagaacggtggaaatatatttattttaataacctaagacggtcaacgcaggatgaagatggttacaaatgtatagattatattaccactacatttgccccttgcggtactatcattctttttagggcaggcctgttacgaagcacacaggaaaaacaaataattcaaagtacagtttccagcatggtactgcgataaatatgctaattgctgggttctaacttctaattgcaaatcagcggcatggcaaacatcaatacggacggtgccagcccctgcggctactgccacgatcatctcccctctgtcgctttccgccggagctggatccgccaccgccgccgaatcgacgaccgccttgctgtggcagaggcgaagtcacatgcacaggctgctgccctgcagtctgtggtctgcaaaacaccaatgaaagtatgagttgacaaggaagcatcactgcaacaattcagaggactgcccgtcgggtctaagatatataag

SEQ ID NO: 12263 - DNA, 721 bp, Zea mays
  unsure (1)..(721): unsure at all n locations
  Clone ID: MRT4577_111178C.1
gttcacctgcgaaacttcctgtgataagaaggatgatnctggattcttctcctactgcaaagggacgtccattaccnccaagttatgccccacttggatatggactagcgggagcttataatccacttggaaaaggactggcaggtgcttacaattcccctggaaacggactggcaggtgcttatggcgtgctttctgctcatgccgcacagccaatgttgtatgctccaggtgcttctccaggttcaacaatgatcccaatggtcctaccagacggccgtcttgtatacgtaccacagactgcagggcagcagcctctgcatgtgacttcgcctctgcctcagcaaggcggtcgtcgattcggcggcggtggcggatccagctccggcggaaagcgacagaggggagatgaccgtggcagtaacagcaacagtagccgcaggggctggcaccgtccgtattgatgtttgcaatgccgctgatttgcaattagaagttagaacccagcaattagcatatttatcgcagtaccatgctggaaactgtactttgaattatttgtttttcctgtgtgcttcgtagcaggcctgccctaaaaagaacgatagtaccggaaggggcaaatgtagtggtaatatactctatacatttgtaaccatctccatcctgccgttgaccgtcttaggttattaaaataaatatatttcttccgttccgtttt

SEQ ID NO: 12264 - DNA, 205 bp, Zea mays
  Clone ID: MRT4577_111179C.1
ggcttctcgtgctgtcacacgaacaggcgactcatctccatgggccccttccctcaccgccccgagcgagtgaacccacgaagctagaggccacggacaaggacagaggagaccaacggagaccagaggagaggcaaccacgctagcagtcgggaagccgaccacgtacgcccggccagagcacggacaccgagctaaaacgcca

SEQ ID NO: 12265 - DNA, 520 bp, Zea mays
  Clone ID: MRT4577_11117C.1
ggcacgaggcctcttcgcacgagcgcaacaccatccacccaccagttcgaagcggaggcgaccggcaacctgcggcggagatgtcaggcaggggcaagggcggcaaggggctcgggaagggcggcgcgaagcgtcaccggaaggtgctgcgcgacaacatccaggggatcacgaagccggcgatccggaggctggcgaggaggggtggcgtgaagcgcatctccgggctgatctacgaggagacccgcggcgtgctcaagatctttctctatggcttcggcgaataggttaggtgtgggtaattgcctgtccaggtgtctcggatctgtggtactagtttggctgccttcctgtgttcgtattgtagtagttgtggtagctggttgctttgtcgtcctgtagtcgtgcttctttgggtctgtaagaaccgctggttcgatgggattggattggacggtgaagtaggaatgttggcatgttagacttttctccaaaaaaaaaaaaaaaaaaaacctcgtgc

SEQ ID NO: 12266 - DNA, 223 bp, Zea mays
  Clone ID: MRT4577_111180C.1
tccctacgccccgcgtcgtgctgcctgacagttctacaccattttcggtttttcatgttgaatttccggattgattgtttgctcgaaatgaaagaaggtagctattcaccatggccgattgtagcccgggcgggacaggatgagcgatcattatcaggccagcacggtggtctagattgtcgcggatgtgtcgaccatttacatggggaaggtgcacccggac

SEQ ID NO: 12267 - DNA, 1082 bp, Zea mays
  unsure (1)..(1082): unsure at all n locations
  Clone ID: MRT4577_111181C.1
agcattttcatctcctcatcttagatctaaagagcagtcctctgaacaaaactgtgncagtggtattnccntgttgatttccttcatatattcccttggttttggcagaccgcagcctgcagggcagcagcctgtgcccatgacttcgcctccaccgccacagaaaactaacctcagccgcagtacaaccatgatgcagacgccaactgatgctggaaactgtactttacagtggttagttttttcgctgtgcgtctcgtgtctgtaacacaggcttaataacagtgcaaagtggcagatgtggtttgggatgcagtggtaaaatgaatctatgctcgtcttgtatacgtgtaagatggcagatgtggcttgggatgcaggcttaataacagcgcaaagtggcagatgtggcagaaaaactatgctactgcagcacactttggcttgtgctttctagtgccatgtctctttgcttcaagcagaaaaactatgctactgcagcacactttggctatggatgcttcttgagaacagccctcaagaggctcaaacaaggaaggctcgacaggtgttaaggctcgacaggaaggttggacgggtgctaaggttaatctcatagatattattgttagttgtggaggtcagttgtcaggtgctacgcttaatcatagaaatgtgttcagtttattacaattttaaccgtttctctgttttttctaccccaaaaaaagaattttaaagagtgaaagagacatctcatacatcaatttccagcatagcttccaaagttgatcagaagtctaaaccatacggcaggtgatgacagcaccctctaggcaaacaaaaattatggtaacagaacacgaaaaaagaaaaaaaaaacttgataaaaacatgtataatacttattccttacaatcactaaactccctggtaaaatatatgattaagtcttggaacttaagacactagaaagaatataggggggctctaactaccatggcttatctcgattgtgtaggagagcagaggagacctgaagcatctgccccaaccgcaccaagctcacatatggtacaaag

SEQ ID NO: 12268 - DNA, 1358 bp, Zea mays
  Clone ID: MRT4577_111182C.1
ggccgccatttttttttttttttcaaaaactttgtcttattcaattcaaaccaccgtttccagcatggtaaataaataattcaaaccaccgtttccagcatggtactgcgacgaatgtgctaactgctcggttctaacttctaactgctaatcagcggcattgcaatcatcaatacggacggtgccggcccctgcggctgttgttgctgttactaccatggtcatctcccctctgccgctttccgccggaagagctggatccgccaccaccgctgccactaccaccgaatcgacgaccaccttgctgtggcagaggtgaagtcgcatgcacaggctgctgccccgcggcctgtggtacgtatacaagacggccatctggtaggaccattgggatcattgttgagccgggaggagcacctggagcatacaccattggctgtgcagcacgagcggaaagcacaccataagcacctgccagtccatttccaagggggttattataagcatctgccaatccctttccacgtggattataagctcccaccagtccatatccaagtggggcataacttgggagtaacgggcctccttttgcagtaggtgttgatacagtactatccttcttatcagcaggaggtttcgcaagtgaacaatccagcagctgaccatcgagttcatatctctcagtgttcttcagagccttcatagccatgtaccgctccttaaaatgaacaaaaccgtaccgattttcatgcccagattttgcaggtggaacaacaacttttgtaatttctccaacatgctcaaacagctttttcagctgctcttgagtaacagtcttggggaggtttttgacatatagagatttaacctgtgcagtagatgtagcttcattggcattcttaggatctgcccagctgacagtaggagcattcgtatctagtttgaattctggggtagacatcttctgcttagcatactctgcacatgcctggttgtagtattcaataaagccataacccttattgcgatctaagcctggcgccttcatgagttcaacttttaaaactccaggaccaacttcttccactgcagttttgaaatcatcatgtgtccagtcatggggtacattcccaataaatagcctgttcttagcctgggagggagaaacttttatcttctttccctgtgaaaagaacaaaaacaatagcgtctagttagtattgaagtgcaaagatatacaaattaatcaggtgtcacaaagaaccaggaagtactacaatgtactcatgttcttgggtagcaaaactaggtctggacaatatagacaccaccaccaaagattttcggacgcgtgg

SEQ ID NO: 12269 - DNA, 2632 bp, Zea mays
  unsure (1)..(2632): unsure at all n locations
  Clone ID: MRT4577_111183C.1
tgcggcgctcgagccggccgggccgggctccgctccctctgacttgttcgcttgccgtcctcgctcgcggcaaagctgcagcgtgtctcggctccggcgcgccaccgctcgggacgcccgacggatccgctcccgcgtgcgctcgatatcccttgcttcaacggtccaagtcaacccccccaccaaatcgccgtccgtccggccgctgccgcaccctagcaggatcgcagcgtgcacagctcttcttcaatctgcaggattgcagccacgcacaagtcgtagctgctcgctcaattgtacttcagatagcatcttctttgattgtcctcttctgcatactcttgttgatggtgctatcatattcttgaaaaccttccgtgctgtctatctggaattcttctgtctctgtacttgtcctttaacagtcacttgcttcgaggttccattttccatgtggatacccatggctgaatccactttgagattattacataccctcgcttctgttcgtctccctcctcgcgttcctctcttccgctcgccgccgccgccgcatccgtcaccttcacactgcgctccctccctccctccctgtctgcgacgactgggtggtctaccgccgccctcgctttcgcgggcgaagagcgcccaccagtttccttggatctttgagctttggaagatgccgaggtggacagagaattctgcttccaccaaatcagctgaattggtgaaacaacaagaccgtttggagtttgacgatcctgatgaggtagacgaagaggaagaagttgagtatgaggaagttgaggaggaggtcgagtatgaagagacagaggacgagtatggacagactgaagctgtacgccaagttgatgctaaacatgacagtaaaatggtggatgctgatacggatgagggtggaaaagggagtcatgatgaacttcttgctcttcctcctcatggatccgaagtctatgttgggggcatcgcctctgatgtctcttctgatgatctcaaaaaactctgcgagtctgttggggaagtagtcgaagtgcgaatgccaggaaagagtggtaggctgtatgcctttgtcaatttcagaactaaagagctggcttcaaaggccatccagaagttgaacaataaagatctaaagggaaagaagataagagtttcttcctcacaggctaaaaacaggctatttatcgggaacataccctataactggacagagaatgaatttaaaaaagcagcagaggaagttggccctggagttttaaaagttaatctcgtgaaggcaccacattcagatacaaacaagggttatggatttattgaatactacaaccaggcttgcgcagagtatgctaagaagatgatgtctaccccagaattcaaactagataaaaatgcccctaatgtcagttgggcagatactaagaatggtggtgaatctgcctctactgcacaggttaaatcactatatgtaaaaaacctgcccaaggctgttactcaagaacaactgaaaaaactatttgagcaccttggagaagttacaaaggttgttattcctcctgcaaaagctggtcatgaaaatcgatatggttttgttcacttcaaagaacgatccatggctatgaaggctctggaagacactgagagattcgaacttgacggtcagctgctggattgttcacttgcaaagcctcttgctgataagaaggacgatacatcagcacctaaaggaggtccattgctcccaagttataccccagttggatatggactgatgggagcctataacccactcggaaatggcctggcagtggcaggcgcttacaatccgtatggaaatggactggcaggtgcttatggtgtgcttggtgctcatgctgcacagccaatgttgtatgttccaggtgctcctccaggttcgacaatgatcccaatggttctaccagatggtcgtcttgtatacgtaccgcagcctgcggggcagcagcctgtgcccatgacttcgcctccgccgccacagaaaggtgatcgtcattatggtggcagcggtggatcgagctccggtggaaggcgacaacagaggagagatgacagtggtggtagtaacaccaacagccgcaggggtcggcgccgtccctattgatgcttgtcgctgttagcgcttagaagttagaacctagtaggcatattcagagtatctctgctgcagtacaaccatgatgcagacgccaactgatgctggaaaccgtactttctagtggttagttttttcgctgtgcgtctcgtgtctgtaacacaggctgctgttgtgataagagtaataacagttccaagtggcagatgtggtttgggatgcagtggtaaaatgaatctgttccccagcttcatgaataactatgctgttagtgtctgaggtttacattgtgtcagtttggtcacttttggtgtgatgagttttagtagtggtgtggccggtggatatgcagtgaaattgtatcgcttgaacagtgatcagatacctctatggaagggtgaaaacccacaaatgcttcggcccnnaaaaaaaaaaaaaaaaaaaaaaaaaaaaaaaaaaaaaaaaaaaaaaaaaanaaaa

SEQ ID NO: 12270 - DNA, 557 bp, Zea mays
  Clone ID: MRT4577_111184C.1
ccggtcgtaccggggacctggcactataactaccgtaaacgaaccattctcccaccaccttcccctccccctaggcccacagttaaactacggaagacatgcatacagaagcgcgatcaccccgcgtccttcgtcgagacttcacaagttgggtccactgaggggggggggatctggaggaaacccacaccaggtacatcagtaagagttgcgttaactactcttcactaagtccctccggcatcaggacgacttgctaatcttcgttataatcgactctaccatcggcgtcatcaccgtccttctcctaaaaagaacataagaggtagtcgagaagtaagacaacctgacctggaagtgagcctgagcgtcggagtggtccgatattccggaggagaggactgaccaggttcccaaccctagaactaagagtgctcgggtgaggtcttagatcgtatagagaggctgtagagttgtccgaagaactccttgaacgagaatggggagtcggactcctaaagcttgttctccaaggaggactcggaagagttccagtt

SEQ ID NO: 12271 - DNA, 323 bp, Zea mays
  Clone ID: MRT4577_111185C.1
ggacgccgccgctgtgtcgcacctccggaggctgtcggagctcaagcggatcgcgaggagcgggccggtgggcccgcccgtgacggacggtggcggggccctcacggcgcacctcgaggcccaggtgcgcgagaaccaggcactgctgcggtcgttcgacgccgcggtgaaccgcctacaggccgcgctcgacgccaaggacgccgcggccgccgcgctgcggctggaccttgaggcgctcgacgacgccaacgcgcggctcgcgggccgcctcgaccgcgcgctcgcgcctccgtcgggcggtgacgccgtcggcgcgatgc

SEQ ID NO: 12272 - DNA, 519 bp, Zea mays
  Clone ID: MRT4577_111186C.1
gatgctctcaagaatgtggactagagaacagggtgctggagatgggaaactgtgactgttacaaatgaaacattcacggacctgtgcctgggcattgatcataatagttcactcaccaactgtctaaaaaactataacacaacataaacttttgatgcggatgacaagtgattctgctacaaatgctgcagattgtacgaagcacaaaataagatgacctataaaaaaatccacctaaacattctaataatatatttcaagcggctgaagtatatcgagcacttgcagcgctacaaaaaactatcatacaaagggacattcccactgtgtagcttaaacttcataatacaggtgataatgtcagacttggaatactcccttatacttgtggtaaataatgttagaagtgggccaaaccattgccactatatgatgtggactaagagccacaatcattggatatatgtttgatgaccagaactatgagatgactgatgagtacatggtacaggcattatc

SEQ ID NO: 12273 - DNA, 292 bp, Zea mays
  Clone ID: MRT4577_111187C.1
gcgcgtgtgcgaggtggctcagaattcggctcaagcgcattccacccatcacccaagacctcctcagacccgagagacgactgcggccatggacgccaccggcactggagctggagggacggcgaagaagggaacggccggtcgcaaagccggcgggccggggaagaagtcggtgacgaggtccgtgaaggccgagcgccaattccccgtcggacacatacgggcgctacctcaagaaaggccgctacgcgcacgcgtacagcagcggtgcccccgtctacctcgcggccgt

SEQ ID NO: 12274 - DNA, 1615 bp, Zea mays
  Clone ID: MRT4577_111188C.1
aggcaccttcgctccgcccccggcgccacacatgtccgcgacagcgctcctgcagaaggcaacagaggctggagcgacgcaatcgagctcatcgttcttgaaggagtttgggctcgcttcttcgtcatcatcacctcgaccaaagcagcagcaaccccatggaagggttgctgaaaccagcacggacccatggcagtacaggaacagtaatcagcaaatggagatggagcgccaccagagccatcaacggagggagatggagtccagttcgcaaccgtggcagcacccccgcattacccagcagatggagatggagcgccaccaccagcggagtcatcaacagagggagatggagtccagttcgcaaccgtggcagcacccccgcagtacccagcagatggagatggagcgccaccaccagcggagtcatcaacagagggagatggagtccagtttgcaaccgtggcagcacccccgcagtacccagcagatggagatggagcgccagcaccagcggaaccatcggcaaagggagacggagtccagctcgcaacaatggcaccaccaccaccaccacccgaatgaccagatgatggggctggagagctaccggagtaatcagcaaaggcagacggagtccagttcgcagcggtggccgccgcacaggagctaccagcaaatggagatggatcccagttcgcagcaacggtgggcgcagcaccagaggagcaaccagcagcagcagcagatggagatgatggagcggcaccacctgagtaaccagcaaatccggagtacccagcaaatggagaggagggcgatggtatccgggggtggtctgggacttggcctcgcatacgaaagtggaaacccaggcttgcccttgcccgacctgatgacgggaccatcgccactgttgggtcctaagcctgcgacgctggacttccttgggctcggcatcggagggaccatgggcggctccacggccagccgcggcctcccggcattgatggttggaagagagctggacatggggccttcggcacaggtgcctcctgctgctgctgcggcgccgtgggaggacgcaaagaggaagaccaacggccgcacgatcctgtgactgtgaggttttctcctccctttctttcttttttctctctctgtaatgcctcggcttgcctgcccattctttcagtcgcagctgtgcttttggtggagctagtagaagaagctcggtcggtaacatgcggacctgtacatagctagctcgatgcttctcatcccggttctggggaaaaaaaaactaaactccgcccccgaattgaagctgttattattatagccacaattcgatcccggcaggatggaacctgacctccgatgccccgtcgctttcagatccggtgaggcaacagggttagtagccgtcgtcgtgtgcggtggtaactcggtactgctttcggaaagatccgagattaggacagcgatggaaaggcgttttcactgttactgtcgatgccgctgctgctgctgctgctaggtcggcacgggttactttactttacctaacctgccgccggtctgcaagcttcctcgggagtactttggagaagct

SEQ ID NO: 12275 - DNA, 373 bp, Zea mays
  Clone ID: MRT4577_111189C.1
aaaacaaatggatcgaagatatcacgcctgaataccaaaagcaaggctaagtacaaagtgtcaccatttccctggaagccttgattccagataatacactataacacacgggcattcgattgactaagtagccacgccagtccaaaacaacagactgggcaatttaattcaggtgaggcccaacccagcatttggtttcataacaaaaaggaaaggagcagaattcatagggggggagcagagcttaacatcaaacctaaaccacgatgtgcgataggacgaaaataatatcagccataagaaatacctgaagtatgtgaggtccaaccccctgaccaaatggaaattctgaatgtgaaactggtccaacatg

SEQ ID NO: 12276 - DNA, 389 bp, Zea mays
  unsure (1)..(389): unsure at all n locations
  Clone ID: MRT4577_11118C.1
ccgcgtacgttactggtccttgagcggccgttttttttttttttttttagcgttcattctctcttctctctttgnttgcattacatcttcgtgctttttggtcccatggcttgttttaaacaacaggtgctcggctttgttgtgaacacttgatttggcccatattcaaatgcctaggagacgctacttgaactcccgtttggggggcggggcagtaaacccctgacaatgtgcttgcgccgtcctncgaagactacatggtgcgggtgncactgggtttcagtggtgccgtgagggtgggtaatatacaactaactgctaggtgcatgcacctatccgggctgtgcgtgggaggtaactgtggggttgctctgttcccgcggaagggc

SEQ ID NO: 12277 - DNA, 1681 bp, Zea mays
  Clone ID: MRT4577_111190C.1
agccagaggtggctgctgtaggaactgtggctgccaaattagaggatgaaaccgatcaagatgagaatgcctgtttccaggaagctgatcaattcaaggatgccgagctcgaggtctccaatctgctggacaaggacaccccgatgcttccttgcttcctcccctcgccctcagaagccattggcaccgatggaagcagcacaacctgcggcgcgggcggcagcgtttccaattccatcgtgccatctacaaccaccaacaccttcgccggtctgttcgcgtccgccacaacgagcaccacttcccagagcagatctctgcgcgacctcatcggtgtggatcccaccttcctttgccttgcgatcggggcgccctctctgttcccgcagacaagcgcaagcaactcaggcaccttcgctccgcccccggcgccacacatgtccgcgacagcgctcctgcagaaggcaacagaggctggagcgacgcaatcgagctcatcgttcttgaaggagtttgggctcgcttcttcgtcatcatcgcctcgaccaaagcagcagcaaccccatggaagggttgctgaaatcagcacggacccatggcagtaccggagcagtaatcagcaaatggagatggagcgccaccagagccatcaacggagggagatggagtccagttcgcaaccatggcagcacccccgtagtacccagcagatggagatggagcgccaccaccagcggagtcatcaacagagggagatggagtccagtttgcaaccgtggcagcacccccgcagtacccagcagatggagatgatggagcgccagcaccagcggaaccatcggcaaagggagacggagtccagctcgcaacaatggcaccaccaccaccaccaccaccaccacccgaatgaccagatgatggggctggagagctaccggagtaatcagcaaaggcagacggagtccagttcgcagcggtggccgcagcacaggagctaccagcaaatggagattgatccgagttcgcagcaacggtgggcgcagcaccagaggagcaaccagcagcagcagcagatggagatgatggagcggcaccacctgagtaaccagcaaatccggagtacccagcaaatggagaggagggcgatggtatccgggggtggtctgggacttggcctcgcatacgaaagtggaaacccaggcttgcccttgcccgacctgatgacgggaccatcgccactgttgggtcctaagcctgcgacgctggacttccttgggctcggcatcggaggagaccatgggcggctccacggccagccgcggcctcccggcattgatggttggaagagagctggacatggggccttcggcacaggtgcctcctgctgctgctgcggcgccgtgggaggacgcaaagaggaagaccaacggccgcacgatcctgtgactgtgaggttttctccccccctttcttctctctctgtaatgcctcggcttgcctgcccattctttcagtcgcagctgtgcttttggtggagctagtagaagaagctcggtcggtaacatgcggacctgtacatagctagctcgatgcatctcatcccggttctggaaaaaaaaaactccgcccccgaattgaagctgttattattatagccccaattcgatcccggcaggatggg

SEQ ID NO: 12278 - DNA, 2855 bp, Zea mays
  Clone ID: MRT4577_111191C.1
aacctctgttgcccctggcccctgccgccgctggagtggacggacggaccaccctctccattttctcctcgcttcgcccaaacacaaccggccgctttcttctcaacccaccacctcccttcttccttccccaatcacctcgcaacacaacccctgtcaaatcgcccactgatcaccaggccgtgcaaaagtccaagctttttcgacaggaatcctcctccgcttctgcttggcttgcgatgcttgtttgaatgcgcgggcctgcggtgaggcgacagcggcgccggacggttgcatgctgattgatggtagccgatggagagtagacgaggagggtcggcggcagaagatgcgagcggggcgatgacgagctttgggccacctcagcacggcatcaacacagatgtgaacagcatgcaaccttctcgagttactgactttggggcacttgcacagtctgctggattccgaatagaagatcttgttaaccttaatgcaaatgctttgttcaatctgaagtcgaatactcatacaattaacaacattcctcttcagtttggaagctacggaaagtcttcgtccttccccaatcacctcgaaacactacccctgtcaaatcgcccactggtcaccaggccgtgcaaaagtccaagtgaacaaggacggaatgctcctcccacagcttctgattctagtgacaaatctgaatacaaactagatcagaagacactccggcgtcccggacggaagcatgctgcttgatggaaaacgatggaacgtaggcgagcatacacggtggcagaagagaggagcagggcgaaacttacctttgggcagcaagagcttcaccagacgcgtcaacagggtatttttatttcgacatcaggcttttatgttcatgttgtctgatctgtaggagctttggcatttgacatggagtatgcacgctggttggaagagcacaacaaacatgtaaatgagttgaggcttgcagtcaatgcacatgccggtgataatgatctccgtggtattgttggtagtgttatggcacactacgatgaatttttcaggctcaagggtgtggcagctagatcagatgtttttcatgtgctgtctgggatgtggaagacccctgctgagagatgtttcatgtggttaggtggcttccgatcatctgaggttcttaagttactggcaggtcacctagagcctcttactgatcagcagcttgttggtatatccaacctgcagcagtcctcccaacaagctgaagatgctctttctcaagggatggaagcattacaacagtcgcttgcagaaactctagcatctggatccctgggccctgctggaccttctggcaatgttgcaaattacatgggacaaatggcgatggctatgggaaaacttggcaccctagagaactttctacgacaggctgataatctacggctgcaaacacttcaacaaatgcaacgcatcttaaccacccgacaatccgcacgagccctacttgcaataagcgactacttctctcggctgcgtgctttgagttctctttggcttgcccgtccaagggaataaattcaattaactcataaataggattttttttgtactgtctctagtatgtcaattagtttcttcacattgctcatgtgttgatgggatatttggatctaagatcttatgaatggatgacatgtatgtgttcaagtgatattgtaggccatcatggtttactggacaagtttgtaacaattttggaggaaaaaaactgagttgtaaatacatctggaataatctaagatcttatgaagggatgatatgggaggatatgatggacgaacaaaccagtgcaacatcactcgggtgatgcggcgtgattatatccaaactaaacagttgaatatctgtttgcagagttacgttcttccaaaggaatcacagtactgcgtaggtcatccttcatgaacaatcaggaatcatgctcctcgagcatgtattggggataactcatgatgaatatgaaggatttaacaatacattgcaattgataaatgtgatagtatgatttattggaatagcaatttgctagttgcacaaagtggccagtaaattttctgactcacaaatgtgtttgatgtacataggcaaaatttgaagtggccagtaaattttctgactcacaaatgcatttgcctattctgaatctgatcttaaataaagtgttctgtataggcaatacaaataatcagacgagggactactgccaggtcaatatcatcggagggaagctctgtaggaggcatcgaacttctcaatctcatcaaaacatgccggaaggtggcagcatgacgtatcttcctgcaccaagagcaatgttcagaacgccatcctcccatactactcggccccttgagatcgtgatctccaccattccctgcacgaacgaaatgaacattagtacatgatgcaccgagaagttgcaagttccacattaagggcatatttagtttgttgctaactatgtcacattttgcttaaggttagtcgttcgaattgaagaactaaatttagtcacaaaagtgtggtaaattagccagcgaaccaaatatgctctaaatactgctgattcatatgtgcaaaaaagaaccgacctttcctctccggccctcgtactccctccatctacatgatttagttgttttagatttgtcctaagtcaacctctatcagagggagtacacattagtgttggacggtgtgtgtgagctgagaagggttaagtatttgtatcattgttgtttgccaattgaacaatgcattttgatacgacaaactgctgctaaact

SEQ ID NO: 12279 - DNA, 750 bp, Zea mays
  unsure (1)..(750): unsure at all n locations
  Clone ID: MRT4577_111192C.1
ccggccgggacgaataaatatcgatcaccaaagatgccttgcccaaacaatgcgaggagagacttgttcctcctgcaccacttctgcatcgcgcatgaagagaatgaagagtataagggcatcgatgcgaaagcgtccagtgctggtgggcccttccacatcaccaagctgcgcgcctacggaatatgatgacacagacagcacgaacgctgtgcaggagccatgtggcatcgacgcgcgtaggaactgtaaaccagacaatcctcctacccaaggctgacttccttgtccgacaactcaacttcacaggccctagcatggtacacacgaccatacattggtatgacaatctagctgccgaccacggaccctaactcagtacaatgaccatgctaattggaacgagattctacgtgaggataacctgctcatcaccgtccatataaagcttgacgacacaggaatccactcgagtggagcaagaactcctgcaccaagaagtacgactgcaatatccttcccatctcgctgctgatggacttcaagnaacaacagcggaggtgtcacgtgtcacgctgctcaactccaagatcttccacatgaacatgtaccggagcatggacatgctgatcaacgacgtgaccgtgacgatcccgccgacagcccaacactgatggctccacatgagcgactcatccgtgatcacgatcacgaacacgtcattgacgtcgatgacgactgcatctccat

SEQ ID NO: 12280 - DNA, 1939 bp, Zea mays
  Clone ID: MRT4577_111193C.1
ggctttgcttttaccccccaaccttttcgacaggaccctgcttgctctacagggttctcccggaggcagaaactctttgcttccgcctggctcgcgatgcttgtttgggtgcgcgggctgcggcgaggtgaggcgacggcggcgccgggcggttgcatggtggccgatggagagtagacggggagggtcgtcggcggcggcggcggaagatgcgggcggggcgatgccgagctttgggccaacgcagcacgccattcgcgcagatgtgaacagcatgcaaccttctcgagttactgactttggggcactggcacagtctgctggattccgaatagaagatcttgctaaccttaatgcaaatgctttgttcaatctgaagccaaattctcatacgattgacaacagtcctctccagtttggaaattacggaaagtctatttcttctcatataaatactacagaagcaacaacagctgcaacaagaattgaccctcagctgtcagcacagcaaacaggagcacaaccaattctggtggcgttaccaactggtaacatggagaattggggagagtcagctatggctgatagccctatgactgacacatctacagatccagacactgatgagaggaaccagatgtttgaacaaggacttgttgctgtccccacagcatctgattctagtgacaaatcaagggacaaactagatcagaagacacttcggcgtcttgcccaaaatcgtgaagctgccaggaaaagccgtttacgaaagaaggcatacatccaaaaccttgagagtagcagactgaaacttactcagttagagcaagagcttcagcgggctcgtcaacagggtatttttatttcgacatcaggagatcaacctcaatcaacaagtggaaatggagctttggcatttgacatggagtatgcacgctggttggaggagcacaataaacatgtaaatgagttgagggctgcagtcaatgcacatgctggtgataatgatcttcgttgtattgttgatagcattatggtacattacgacgaaattttcaagctcaagggtgtggcagctaaagcagatgtttttcatgtgctgtctgggatgtggaagacccctgctgagagatgtttcatgtggttaggtggcttccggtcatctgagcttcttaagttactggcaggtcacctagagcctcttactgatcagcagcttgttggtatatccaacctgcagcagtcctcccaacaagctgaagatgctctttctcaagggatggaagcattgcaacagtcgcttgcagaaactctagcatctggatccttgggccctgctggaccttctggcaatgttgcaaattacatgggacaaatggcgatggctatgggaaaacttggcactcttgagaactttctacgacaggctgataatctacggctgcaaacacttcaacaaatgcaacgcatcttaactacccgacaatcagcacgagccctactcgcaataagtgactacttctctcggctgcgtgctttgagttctctttggcttgcccgtccaagggaataaattcaattaattcataactaggataatttttttgtactgtttctagtatggccattagtttcttcagaacgctcatgtgtcagtgagatatttggatcatattgtaggccatcatggtttactggacaactttgtaacaattttggagagaaaaaactgagttgtaaatacatctggaataatctaagatcttatgaaggggaaaagtatgtgttcaagtgaacgctcagttcatattttaggccctcatgggttaattttggagaaaaaacgagttgtaaatacatctggaataatctaagatcttatgaagggatgatattggaggataagatcgatgaacaaataatgcaacatcactggggg

SEQ ID NO: 12281 - DNA, 1502 bp, Zea mays
  Clone ID: MRT4577_111194C.1
caaaagtccaagctttttcgacaggaatcctcctccgcttctgcttggcttgcgatgcttgtttgaatgcgcgggcctgcggtgaggcgacagcggcgccggacggttgcatgctgattgatggtagccgatggagagtagacgaggagggtcggtggcagaagatgcgagcggggcgatgacgagctttgggccacctcagcacggcatcaacacagatgtgaacagcatgcaaccttctcgagttactgactttggggcacttgcacagtctgctggattccgaatagaagatcttgttaaccttaatgcaaatgctttgttcaatctgaagtcgaatactcatacaattaacaacattcctcttcagtttggaagctacggaaagtttgaacaaggacttgttgctgtccccacagcttctgattctagtgacaaatcaagggacaaactagatcagaagacacttcggcgtcttgcccaaaatcgtgaagctgcccggaaaagccgtttacgaaagaaggcatacatccaaaaccttgagagtagcagattgaaacttactcagttagagcaagagcttcaccagactcgtcaacagggtatttttatttctacatcaggagatcaacctcaatcaacaagcggaaatggagctttggcatttgacatggagtatgcacgctggttggaagagcacaacaaacatgtaaatgagttgaggcttgcagtcaatgcacatgccggtgataatgatctccgtggtattgttggtagtgttatggcacactacgatgaatttttcaggctcaagggtgtggcagctagatcagatgtttttcatgtgctgtctgggatgtggaagacccctgctgagagatgtttcatgtggttaggtggcttccgatcatctgaggttcttaagcagtcctcccaacaagctgaagatgctctttctcaagggatggaagcattacaacagtcgcttgcagaaactctagcatctggatccctgggccctgctggaccttctggcaatgttgcaaattacatgggacaaatggcgatggctatgggaaaacttggcaccctagagaactttctacgacaggctgataatctacggctgcaaacacttcaacaaatgcaacgcatcttaaccacccgacaatcagcacgagccctacttgcaataagcgactacttctctcggctgcgtgctttgagttctctttggcttgcccgtccaagggaataaattcaattaactcataaataggattttttttgtactgtctctagtatgccaattagtttcttcacattactcatgtgttgatgggatatttggatctaagatcttatgaaggggtgacatgtctgtgtccaagtgaacgctcagttcatattttaggccatcatgggttaattttggagaaaaaacgagttgtaaatacatctggaataatctaagatcttatgaagagatgatattggaggat

SEQ ID NO: 12282 - DNA, 1705 bp, Zea mays
  Clone ID: MRT4577_111195C.1
gaccacgcgtccgcttcgtccttcccaatcacctcgaaacacaacccctgtcatttcttccactgatcaccaggccgtgcaaaaggccgagctttttcgacaggaatcctcctccgcttctgcttggcttgcgatgcttgtttgaatgcgcgggcctgcggtgaggcgacagcggcgccggacggttgcatgctgattgatggtagccgatggagagtagacgaggagggtcggtggcagaagatgcgagcggggcgatgacgagctttgggccacctcagcacggcatcaacacagatgtgaacagcatgcaaccttctcgagttactgactttggggcacttgcacagtctgctggattccgaatagaagatcttgttaaccttaatgcaacaacacagatgtgaacagcatgcaaccttctcgagttactgactttggggcacttgcacagtctgctggattccgaatagaagatcttgttaaccttaatgcaaggcctaaagtatcccagcttactaattatatgcctatcagctttggagaactggggagagtcagctatggctggtagccctatgactgacacatctacagatccagacactgatgagaggaaccagatgtttgaacaaggacttgttgctgtccccacagcttctgattctagtgacaaatcaagggacaaactagatcagaagacacttcggcgtcttgcccaaaatcgtgaagctgcccggaaaagccgtttacgaaagaaggcatacatccaaaaccttgagagtagcagattgaaacttactcagttagagcaagagcttcaccagactcgtcaacagggtatttttatttctacatcaggagatcaacctcaatcaacaagcggaaatggagctttggcatttgacatggagtatgcacgctggttggaagagcacaacaaacatgtaaatgagttgaggcttgcagtcaatgcacatgccggtgataatgatctccgtggtattgttggtagtgttatggcacactacgatgaatttttcaggctcaagggtgtggcagctagatcagatgtttttcatgtgctgtctgggatgtggaagacccctgctgagagatgtttcatgtggttaggtggcttccgatcatctgaggttcttaagttactggcaggtcacctagagcctcttactgatcagcagcttgttggtatatccaacctgcagcagtcctcccaacaagctgaagatgctctttctcaagggatggaagcattacaacagtcgcttgcagaaactctagcatctggatccctgggccctgctggaccttctggcaatgttgcaaattacatgggacaaatggcgatggctatgggaaaacttggcaccctagagaactttctacgacaggctgataatctacggctgcaaacacttcaacaaatgcaacgcatcttaaccacccgacaatccgcacgagccctacttgcaataagcgactacttctctcggctgcgtgctttgagttctctttggcttgcccgtccaagggaataaattcaattaactcataaataggattttttttgtactgtctctagtatgtcaattagtttcttcacattgctcatgtgttgatgggatatttggatctaagatcttatgaatggatgacatgtatgtgttcaagtgaaaaaaaaaaa

SEQ ID NO: 12283 - DNA, 395 bp, Zea mays
  Clone ID: MRT4577_111196C.1
cgtaagctcggaattcggctcgagaaattttctgactcacaaatgcattcgcctatgctggatctgatcttaaataaagtgttctgtataggcaatacaaataatcagacgagggactactgccaggtcaatatcatcaacaggcgtgatggatatgcaacaactttagtactttaccacgctgtacaggagctcggagggaagctctgtaggaggcatcgaacttctcaatctcatcaaaacatgccggaaggtggcagcatgacgtatcttcctgcaccaagagcaatgttcagaacgccatcctcccatactactcggccccttgagatcgtgatctccaccattccctgcacgaacgaaatgaacattagtacatgatgcaccgagaagtt

SEQ ID NO: 12284 - DNA, 306 bp, Zea mays
  Clone ID: MRT4577_111197C.1
tccttccctggcccgcccgcccggagcccgacaaccacgttcgttcttgcccggccgcgcctcaccttcaggcctatcctcctacagggggatcagatacgccacaggctgcccgatggtgctgcgggtcttctgctaccgctccctcatctggaaccccggcttcgacttcgacgacaaaatcctcagcttcatcaagggctacaagcgcacctttaatctcgcttgcattgaccacagaggcacaccggagcatcccgcgaggacctgcacgcttgaaaccgaccaccagggcatatgctgggg

SEQ ID NO: 12285 - DNA, 406 bp, Zea mays
  unsure (1)..(406): unsure at all n locations
  Clone ID: MRT4577_111198C.1
ctccccacccnncgcanncaaggaaggcgttacaattttggacagagaacgcccagacacgncgcagnaagagctaggggtagtgtctgctgctacccctagacgtggagagagaacgcctattctacgccgcggaagaagagcacccaagagatcctcagcaaatacgaattcaaagggggtcgctttcttttcttcaccaaatacgatggtttaccggactccgcgttcctccgccgtcgcgcgtgcaggacgccgcggctcacgcgaaacaaaaactcgtggagtggccacccgcgccccttggtttctctccctgcacaatcgaatacaatagcagagcatctgcgaacattgagcacgtcgtgtgagttgaaccacctacgtggagtggtagccgatgtgg

SEQ ID NO: 12286 - DNA, 272 bp, Zea mays
  Clone ID: MRT4577_111199C.1
atctcaagtagggcaacgatggaccactgagagcgcacctgaactgaacctttgcgcaaccatatatctatccggccgccctgaggtttgttggcggccatcatggagcagcagcggaagaagcagcaccagcagcagcagagagggaagttgcagagggtgctaagacagcagaaggctaggctctacatcatccgccgatgcgtcgtcatgctcctctgctggagtgactgatctcaagcatgatatggcacagcaccgatcctgctgtg

SEQ ID NO: 12287 - DNA, 177 bp, Zea mays
  Clone ID: MRT4577_1111C.1
tttccgttcacgcgtgctatcactcacctgggggactgtgaatactacgcgcgggctcgcagagctcgaaaagcgtgcgacagtagctgtcatgacatcagtatgcagtgtgggaatggatgactcatgcacatctgccacgatttatttctgagttcacgcaactgttcatggacc

SEQ ID NO: 12288 - DNA, 295 bp, Zea mays
  unsure (1)..(295): unsure at all n locations
  Clone ID: MRT4577_111200C.1
ggccggacggacagcccggagcgacccacgcgnccgcccacgcgaacgcccacgcgtacggccacgcggacgcccacgcgaacgctagnggnnncgnnaattgggggatgggggggaagaatccaatccggggagggggggcaaaactttgacaggcgggggaaccctacaattgggggagaagtggtttggtcagaaggaaactttggaagggcagctgtttccagtggagcattaaatggtggatatgaagctctggagttgagggatggtggctctgactatttggggaagg

SEQ ID NO: 12289 - DNA, 309 bp, Zea mays
  Clone ID: MRT4577_111201C.1
ggggcaacgattttaattacccactttttaccctaccatgcatgcatacacttttttctttaaaaacgggataaccattggtggaaattcaccatttcagggttacaggagcgttgcgaaaaaaaaaaacacgggacgatttttttttttttttggtgacacaggatttaaaaacgggcgatcgatcggggggggaaaaacaaacgtttagttccaaatccaccagctgatttgggcggggttcttgtccttttccgggtggggggggggggcgtttccggaaaaaaaccggggggggggggggggggt

SEQ ID NO: 12290 - DNA, 396 bp, Zea mays
  unsure (1)..(396): unsure at all n locations
  Clone ID: MRT4577_111202C.1
acgcaggcccaagacttcttacttcccatcccactcaatctttcttatttttcctttttcttttttaccaacactcttttgtccttctcattttacccgcgttccatttcatggtgtaacccggcacacttggttccctgccccccttttggtgggggggggggggttccccctcgccgttctttttccggtctcgcggagttcgtggtttgccnggggctccatttcgttttttccgtgcctgggcggccgccccgctgggggcgttctcccggggtttctgcccctggggcgcgcgcgcgccccttcctgtgggggccccttccccccctgttgggcctcttcctccccttcgccggccgtccccccccttctctttcgctgtctctttccccc

SEQ ID NO: 12291 - DNA, 279 bp, Zea mays
  unsure (1)..(279): unsure at all n locations
  Clone ID: MRT4577_111203C.1
agcggggaccccctagagcggccgaccaactcccctnnnnnnnaaaaaagnaacacccnggangccaaaaaagaaaaccgcccaggcaccccnnacaacgaannccaaanggaacaaaccaaacacccaggggcaacacngaacaacacccgccaagacaaccggaacacaagcncccaagcccaagaacaaccaacccacaaagccgcggaccaaacagcgcaacagcacaaaggancaaaacaaaccacccccacacaccaaaccaacccgaaacaa

SEQ ID NO: 12292 - DNA, 603 bp, Zea mays
  Clone ID: MRT4577_111204C.1
attggtgtgggcaccaaacctcaagaacagactcaagacccaaacaatctgcagaggcaacaacagtccatgaaccaactacttccattgagccaatctcaaaccaatcttgtccaggctcaggtccttatccagaatcaaatgcagcagcaacagcaaccaacatccatggctcaaaatcagcagccagctgccagccagtcactgatcctgccccagcagcagcaacaacagcaacaacatcaacaacaaaagttggtacatcaacagcagcagattttactgcaacagcaacaattgcagcaacagcaacaaaatcagcaacagctaaataagatggctgcacaaatgccaaatctggcatcacatcagccgcaactgtctgatcagcagcttcaactgcaactgttacaaaaactgcaacagcagcagcagtcgttgctatcacaaccagctgttactcttgcacaattacccctaatccaagagcagcaaaagttgattattgatatgttctagcagttgtcaaattctcaaccactttcccagcaacaaacaatgccccaacaaagtattcaagttgcatcacgggcaacaccacca

SEQ ID NO: 12293 - DNA, 650 bp, Zea mays
  Clone ID: MRT4577_111205C.1
ctcactagtaaatggcggctccctcctccaccgccgccaccatcatcagctcctgctgccgcctcgggcctcccgctccgcccgaacaagccgctgcaggcgctcgcaggacgcaggcgccggcagcaggcgtgtcggcgtcgcacgcgctgcgcggggcgtgcgtggcagccgcggcgtgcgcggcgatggggatggcgggcggcggcgacatagcgctggcgcgggacggggcatccgtcgccgcgtggaccgacgccatgggcgccgcgcgcaccaaggcgccggcgccggcgcggtggagcgagcgcaggcagtgcccgccgtggcgcgccaactcgctggagaacgtcgtgcccgagaacctgccccgcccgcccgcgcccaggaggttcgacagcgtctcggtctcggccgccgcgccggacttggtggcgccgccgtcctctgtcctcgcggcggtgcgccccggcacgggctgcttctcgctctgacgcgccgcgggcaactgtggagatcggaggttgtaagaaaaaaaaagcgacaaatgtggaaattggaaaacgcaatatgtacactataggttttattgtctcagtatctcatgaattcttgccggcaacttttgtgttgatggaagtaatttgccc

SEQ ID NO: 12294 - DNA, 672 bp, Zea mays
  Clone ID: MRT4577_111206C.1
cttccggccggtcttcgtttcgacatccaggaaatggctaccgcggcgcgcctcctcctcgtcgtggtgcttctctccgcggcgataccgatcccgtccttcgcgacaagcttcgtcgtcggcgacaagaggcatcgctgggctcccaacgtcaactatacagactgggcggaccgtcaccagttccacgtcggcgactggctcgaattcaggtacgagagggacaggttcgatgtggtgcaggtgaacgagacggcatacgcggcgtgcgacgccagcagccccatcctcagctacagccgcggccacaacttcgtcttccggctcaaccacacgggccggttctacttcatctgcagccgcggctactgctggagtggcatgaaggtctccgtgctcgtccagccgccgccgccgcccccgtcgctgccgccggcgtcccactcccacgcgtcaagcgccagtgcgcgtgtgcggccggcggccgggctttggtgtgcggctctctctaccttgctgggctgggcggtgctcacgccgccgctgtcgtttcgggtctggagttctggacgtccaggcgcgcacacgagtctaaactctaaagctgtttgctaatgtactacccatttcttcttttttttagtatggaaataagagttccggctttagcat

SEQ ID NO: 12295 - DNA, 259 bp, Zea mays
  Clone ID: MRT4577_111207C.1
cttaaaatacaaaaggaaaatccgaaagtagtgaatgaaataaacattgaagatttgtgtcttactaaagcagcttattgtaggtgttggcgttctaaaacgtttcctgcctgcgatggttcacataataaacacaatgaattgacaggagataatgtgggtccactaatactgaagaagaaagaagtataataataataacaatattttctcattctttgtgtatagaaaattttaaaatggtggtcttaattattac

SEQ ID NO: 12296 - DNA, 434 bp, Zea mays
  Clone ID: MRT4577_111208C.1
tacaagagctgtgacgtgacgtgcgcggctccctataccttggctcctatacagcggaccgcccgtcctttttttttttatttgttttttatggcgcaggacatctgtgtgcaggaggacaacataacatggatccttagtgacaacacacttataactatgggtgtgaacccctacaatcgccaagctactgagtagcgccatcgtgtggctcttaagccttcacatatacagtgctggggaagcccgcaatcacctcccgcccatccagttacagtgcaactcttagctgcgcatgctcgaaccccatctctttctttcaagggctgaagtagaccgcgctcctattctcgttcaggacgttggatgccagactcgacccaccatagcgtcgttgcccatagtataggcctagccaagtagtttgaatccct

SEQ ID NO: 12297 - DNA, 263 bp, Zea mays
  Clone ID: MRT4577_111209C.1
atgaagttagtttttattatatctgtggtaaactgcttaatctaccctttgttactactttcaactgtttctgcatgtctatttgataaaaaatcatgtgctgatttctactgtacctattgtcactatgatccttaaggctcattaattgcatggttttttaagtttgtaaattaatttgaaaaagaatattagtaaagaataagggaaaacatgacaattttttgttctttgtaagaataaatctgcaactattgggagtt

SEQ ID NO: 12298 - DNA, 493 bp, Zea mays
  Clone ID: MRT4577_11120C.1
aggaaccccactgccgcgagatggcgtcgcaacagccagatgccaatccaaggcccttcacctcgctaccggccgcaccactgatctggacagagatgaaacccctatactacgagcctgtgatgacccaaggatgtcccagtaggcgactgcccatgcgctgcatgaggacgacaagggtcatgtatatgagacaatgtctgaatgcaacggaccacgatttctaccgaagtgaggttgtcctcgactagcaggcaatgtaccccatctgcacaagacacacacttcctggacccacaagtaaggtggggacatgaaacagcgcgagacccagtacgcccgtgaggaaatcacgagaaaagacctgtctgtcagcacgctagaagcagctatcactaaagctaaaaatctgcccctgagaactgagagtgctaaagcaaggagatcagagataacaacccaagtcacctttgacatgatcccagacctgctt

SEQ ID NO: 12299 - DNA, 526 bp, Zea mays
  Clone ID: MRT4577_111210C.1
ccggccgggaaacaactatactatcacatcaatcttcacttccaaccaacacgcggcgatgtacttcaacaagaacggcatcttcggcctcggtaccagcgtaggattagtctcagctggcctccccaaagacaacgagtacaaaagccacgattgctccggacatttgaactacggacaccacgccttctaccttcacatgggcaccatggacgactctagacattctggttaccaagcaggaactgactggtacctcttctacggaaagaccggcaacgacggacgctgccagggagagattttgggaacggacatcagtgagactactaactgcttggatctggaataacaccttccctggaaagcggatcaagggtctttgcaaccctctcattggggctaacaagaatggtatcaactcttgccagtacgattaggaggggtttgagcacgcgccaccagtggtatcaataatagcaaaatggcctgcgctctgcttggttatcgacaaccgcctcaattt

SEQ ID NO: 12300 - DNA, 500 bp, Zea mays
  Clone ID: MRT4577_111211C.1
ttttttttttttttttttttttttttttttttttttttttttttattttttttttttttttttttttggtttttttagtttttttttggtttgtttttatctaattcttgccaacctgtgtcttctgtgtttatagggaacaccaagaggcccgacctgtccccttggggttaaccgaaaaaaaaacccagggggggggaaaaaccccaactacccccaagctcatgctgttggggaacggcgggggacccccggaaatgcgggaccgggcccggggggggaaccagttttcctgttaggggggcgcaaaaagatgggcgaaaaaagggaaaaaacttaccccggggaaaaagtgtattactggaacaattgcaaaaaaaaaagaacccgggagcaaaaaggggaaagcccggggggcctaaaggggggcctacatgaaatttgttggggagggcgaaccgccccttttccaagaggaaaacaactggggccgaggtctt

SEQ ID NO: 12301 - DNA, 420 bp, Zea mays
  Clone ID: MRT4577_111212C.1
ttctggatcttggccggccttgtgaagctgatgcccaaaaagagagctagcacaaatttttagagctgacctggaacagcggtttgtggagaagcattatggagatgcccagcttcatatcacctgtacacatggttgtccgcgttgagactgaaagtgcgagctgtttcattgctccgaagagatagcatatagtaatcagcggaccatatagtactaaagaaagctcttatacgaacgaatgccgggcggataatctgaaatgccacttgcacattttatttgtcagatcgacattctactactctatgaggctccggccactatcgggcccctataatcgaacttgaactccaaagccgaactacgcgcgggcccagtttcaccgacagcgaggctcttgagatttgaccgccttca

SEQ ID NO: 12302 - DNA, 416 bp, Zea mays
  Clone ID: MRT4577_111213C.1
gaaacatttatggcctcaagatactatacatttaaagcaccccaatgtctctctttgtgtttttttacttccctttcttcttccttatataacatgaagaacattgtattaatctgatttttaaagatctttttgtatgttacgtgttaagggcttgtttggtatcccactgaaatgttctgtgttgcagaccagagtctgtttatgtcagggggatggggccattgcatccttagccattgtcacaaaatatgtggagtagtaacttaatatgtaaagttgtaacatacatacatttaaaatggaaatgcagaaagctgtgaaatgtcttgtgtctcatgttctctgtatttatgcagctgatttgtctgtctgtaactgaagtgtgggtccaaggactgctaactactttgcat

SEQ ID NO: 12303 - DNA, 795 bp, Zea mays
  Clone ID: MRT4577_111214C.1
ccggccgggaaaacccgacctttctcttcttctccaagccagtcttcacatccttcaaaatgggcttcaccgacctcctttccgaaactggagctcacgtgctcaacagctggttgagcacccgctcttacattgttggccaatctgcctctcaggctgatgttgctgccttcaaggctctctccggccccccctccggcgagagctacccccacgccgctcgatggtacaagcacatcgccagctacgagagccagttcgccacccttcccggtgatgcttctgctccctacagcacctacggtcccggctccgctgaggtgaccctcaaccccgccaaggcccctgagaaggctgaggaggccgccgctgaggaggacgacgatgtcgacctgttcggtagcgacgatgaggaggaggatgctgaggccgctcgcgtccgcgaggagcgccttgctgagtaccgcaagaagaaggagaacaagcccaagaccatcgccaagtccgtcgtcactcttgacgttaagccttgggatgacgagactgacatggctgctctcgaggctgccgtccgttctattgagaaggacggtctgacttggggtgcttccaagctcgtccccgttggtttcggtgtcaagaagctccagatcaacctcgttgttgaggatgagaagatctccgtcgccgaccttgaggaggagatccaggagttcgaggactacgtccagttcactgacgttgctggcatgcagaagctgtaaaagcctgcgttagcaatgttcacttatgatg

SEQ ID NO: 12304 - DNA, 349 bp, Zea mays
  Clone ID: MRT4577_111215C.1
attattcggctgctctctccctcagcgctcccaacgcctctctgctggccgcgcccccttctcggcctcttctccccatggtgctcggcgcccaagttccctgctccctctatcttctccttgcctgcgcgcaaagttcctctgtggccgcgctcccatctgctcggggttccatggcgctcacccatggtgccgtcgtcctcaagctcgtcccctgcgtcgcggccactggatggcgcggtcacctctctctggtgccttgcccagtgaaagggaaattatctcaacatttcctataatcatttttggtgtttgacgactatcaaaaaaaaaacaaaaacacaaaagg

SEQ ID NO: 12305 - DNA, 799 bp, Zea mays
  unsure (1)..(799): unsure at all n locations
  Clone ID: MRT4577_111216C.1
acgtgtctcctacgcgttcgcgggcctcccggtgctcatcgggtggcgtctcatgtacgccatcggcgccatcccgcccgtgctcatcgccgccggggtgctcgtcatcatgccagagtcaccgcggtggctcgcgatgcagggccgccacgccgacgcgcgcgcggtgctgctgcgcacgtcggacagcccggcagacgccgacttccggctcggggagatcaagcgagccgccgacgcgccgtcgcccgctgctgcggcgcgccacggtggcggcggtgtctggagggagctcttcgtccggccatccaccacaaccacgagcgtgcggcgcatcctcggctgcgtcctcgggctgcagttcttcgtgcaggcgtccggcgtcgacgccatcctcctcttcagcccgctggtcagcatgacgttcatctcgctcgccgacgccatcaccatgcccgggtgcttcttcctctacgctgcggtgacggcggctgcgtttgtgttcgtgtacacgcggctgccggagaccaagggccggagcctaaaaagacatggaagtgctctccgaaaagtggaaggttgggccggtggncacgtatagttgccattagcacaagatcgcgttcggcagagttagtagaaattatccacaattaccagcagatttggaactccggtcccgcgccgctcgtcggtcgcagctacccccacggtccccacctagagatctcaacatcagatttgaacaccatatactaccaatacctatgaagntatatatatctatctctaattccgg

SEQ ID NO: 12306 - DNA, 1229 bp, Zea mays
  Clone ID: MRT4577_111217C.1
ataaaatataatatgctcatattttttattggggatggagatatgataccgataccggtatgtttatggagatagagatagatataactttataggcacggtatatggtgtttaaatctgatgttgagatctctaggtgggaccgtggggtagctgcgaccgacgagcgcgcgggaccggagttccaaatctgctggtaattgtggatgccaaacgcgaccttgtgctaatggcaactatacgtggccgccctcacttgcggaagagcacttccatgtcttctaggctccggcccttggtctccggcagccgcgtgtacacgaacacaaacgcagccgccgtcaccgcagcgtagaggaagaagcacccgggcatggtgatggcgtcggcgagcgagatgaacgtcatgctgaccaccccgcacgtgagcctgttcacggccacgcccaggctggagccctgcgcgcgcagccgtagcggcaagacctccgcgctgtacgtcgacaccacggacccgtagccgatggagtacgcggccacgaaggccagcaccgacgccaggcacgccgcggccgacgccggcgacgccgtgcccacgcacagcgtcacggcgagggcggtcgcggtcacggcgacgccggcggtgctggcgaggaggagcgggcgccggccgaggcggtcggtgaagagcatggcgacgaggacgaagcacgtcttgacggctccgatggacacggtggcgccgagcacggcggaggtggacgccacgccgaccgccttgaagaccagcgggctgtagaggaggatggcgtcgacgccggacgcctgcacgaagaactgcagcccgaggacgcagccgaggatgcgccgcacgctcgtggttgtggtggatggccggacgaagagctccctccagacaccgccgccaccgtggcgcgccgcagcagcgggcgacggcgcgtcggcggctcgcttgatctccccgagccggaagtcggcgtctgccgggctgtccgacgtgcgcagcagcaccgcgcgcgcgtcggcgtggcggccctgcatcgcgagccaccgcggtgactctggcatgatgacgagcaccccggcggcgatgagcacgggcgggatgacgccgatggcgtacatgagacgccacccgatgtgcaccgggaggcccgcgaacgcgtagtggacacgtagtgacccggccggcctcgaggtacccaatg

SEQ ID NO: 12307 - DNA, 443 bp, Zea mays
  Clone ID: MRT4577_111218C.1
tctagtttttttggagtggaccatcggtcgacctcccgctaggagagacatagagagtagctgtgtcgagagcaagaaaggtgaccaagtgcaaatccacccaagcgaggaacgtcgaaaaaccggtgtgcatcgcagagggggtaatagaagccgactaaagccatggagtgcgtatcactatcttcctaatcgcgatctgggacaccgtggtttacttctggaataacaaatgcacaccccggtgttgacaagggtcttaggacacgatcccttttccatttactagatcacttgataggtggcgtccgacctcgcgctacgcgaacacgtactccctgagcttaccggcgagttccaggagtgcgcccactgaaggtatgacgaaagaacaagtgcgagctactcaggatcaacgtagcccggaacgggatgatcgccga

SEQ ID NO: 12308 - DNA, 222 bp, Zea mays
  Clone ID: MRT4577_111219C.1
aacgcggcacaagctttttttttttcttagtactgtttttaacaaaacatcctttctccctactattatccctttccatttcaatggttcattcaggtaattgttcacactgccaccaggagatgggtgacactccgtagcattatacctgctgaaccattgaactggctatgggtagtttgtaagggaataggttgctttattactacagaacctcggccg

SEQ ID NO: 12309 - DNA, 483 bp, Zea mays
  unsure (1)..(483): unsure at all n locations
  Clone ID: MRT4577_111220C.1
nnnnnnnnnnnnnnnntntttttttttttttttttttttttttttttttttttttttttttttttttccccaaagacatttttttttttttttcctaaaacatgagggcatgaaatgtttgcccttaagaaccctggtcgttaaaaaaaaacgggaaaacattttttttacaaaaacaaaggggttgggtaaaaaccaaaaaaaatacggggcgcaccctaaaaaggcaaatcccccggtgggaaggaataataaaacggtatttccaagttgggtggcctccttttcggaggaaggataaaaattggcccttgagttcaccccccgggggtcaatgcccaaggtaggtaacgggaaacccgggggccataaacacttaccccaccgcctggtccaccgcccgggccgttgtttccgccactggcgcttttttaaccgaaaaccccattgggggaaaacgtgttaactgggggagggaattgg

SEQ ID NO: 12310 - DNA, 700 bp, Zea mays
  Clone ID: MRT4577_111221C.1
aattcggcacgaggcgcgatcgggggaatcttttccccatttcgtttcggccaggagcgacaggcgcgggcgccacggagagtgtgtgagagagagatagagagagagggagatgcgagaggaggtgaggagctcgtcgggggcggtggcagaaacgccgatggccgtcgcccggtcctcgtcgccgccgcacaccccggtagccagttccgccggtgcctcgtcacctgctatgcaaactaatgttgcaagcatagattggttgggtggcaaacaagcttccagagttgactcgtcgtcacaagttgctgcacatgcttatcacccttcccatagttttgatgcagctggcactgctatggattctgcaccatcatgcagaccatgggaacgtggagacttacttcgtcgactggcaacatttaagccttcaacttgggcttctaaaccgaaggctgctagttctttggcctgtgctcagagaggttgggtgaatgttgacatggacaaaattgaatgcgagtcatgtggcacacatctaatcttcaatgcattgacatcctggtcccctgttgaagttgcaaatgctggagaatcctttgccgagcagcttgatgcagcacaccagaatagttgtccctggagaggcaataactgtgctgacagcttggtccagcttcaccttacacaatcagctcta

SEQ ID NO: 12311 - DNA, 477 bp, Zea mays
  Clone ID: MRT4577_111222C.1
ccgagcccgccaagggcaagggacaggaacagcaaatcttccatcttatttcccatggggggggggctgttcacctctcctaaagctgccacacaaaacaacactggcggcaaaaaaaaaacacccaggctgggcggcccccttgtcttccccaccctacacattaacaggcaggccctcttgaaaaactgaccatggggcccaatgggaccccccacaaacgtagcgataaaatagtccgaggggtcatatccaggctgcatgcccaagggcaaagcaccccctgcggccttgcacccctcctaaaacttgggagggagcaactgctgctaacccagaaacttgtcggcccccccctggccaattaggatagaagggggaactttgctgttcttttaaatcaggcaggttgcggcatattccccccaatctgatttagtggaccccaggtaatttgagaatgctttctgaccccag

SEQ ID NO: 12312 - DNA, 310 bp, Zea mays
  Clone ID: MRT4577_111223C.1
atggcccctacaggattcaccattcacaaatgatcatacaggcaggagtgctaaagcattcggttgcaaaatgcgctagctaacaggtccgtacggagaaagaaaactaataggggaacttaaaccattgtgcacggctgacacactatcacaaataatgacgagaccgagagcaatattctgaaaagttgcgctcattaacagagaggaagtgggcctgcctacacataaatagagggaaaaggccatgcagccaattggttcaactaattcaacgctggccaaactattggaacactgagcaacgatc

SEQ ID NO: 12313 - DNA, 391 bp, Zea mays
  Clone ID: MRT4577_111224C.1
accacgcgtccgcccacgcgtccgaaaaaaaagaaaaaaaaaaaaaaaaaaaaaaaaaaaaaaaaaaaaaaaaaaaaaaaaaaaaaaaaaaaaaaaaaaaaaaaaaaaaaaaaaaaaaaaaaaaaaaaaaaaaaaaaaaaaaaaaaaaaaaaaaaaaaaaagggggggccgcccaaggggttcaaactttacttacccttgaatgcaattttatacctcttcaagagggtcaccaaatttaatttcaagggcgttttttttaaaacttcgtaatgggaaaaacctggggtttaccaaatttaacccctttggaaaaaatccccttttcccaattggggttaataccgaaggggcccgaactttttccctttccaaaaatttttgcacccta

SEQ ID NO: 12314 - DNA, 318 bp, Zea mays
  Clone ID: MRT4577_111225C.1
gttctagatgcgagcgccgcccttttttttttttttttttcttatagacaaattggatgtctgctagactagatcgcgtgtctatatatagatatagatacaatctgcttgaacgatcgccctcaaaactggatcaacaaacttaaaatacaaacaataataatagggaggaagatcctctccgtctgcgtacacagcacggccatcacctagtactacaacgacgacatccacaacatcatgaaggactatccccagccagatcacatcgtgcatacaggcctgtttgtaggacttaccaagtaccatcgtcatcca

SEQ ID NO: 12315 - DNA, 1611 bp, Zea mays
  Clone ID: MRT4577_111226C.1
ccattgaagatgtcagacgagaagtcagaatattgagttctttggcaggccacattaacctagtgcaattttatgatgcttttgaggatgaagaaaatgtatatgttgttatggaattatgcaaaggaggtgaactgctggacagaattttggctagaggtggcaaatattctgagggcgatgctaaggttattattcaccaaattctaagtgttgcttcattttgtcatcttcagggtgttgttcaccgggatctgaaaccagagaattttcttttcatgtcaaaggatgagaattctgccttgaaagtcatagactttggtttgtctgactttgttaaaccagatgacagacttaatgacattgttggaagtgcatattatgttgctcctgaagttctccatcgatcttatggcacagaggctgatatgtggagcattggagtaattgcatatattttgctttgtggaagccgccctttctgggcacgaactgagtcaggaatttttcgagctgtcctaaaagcagagcctagttttgatgaaattccatggcctaccctttctgctgaggcgaaagactttgtaagaaggctactcaataaggattaccgtaagcggatgactgctgcacaagccctctgccatccatggatccgtggcacacaggaagttaagattaatctagacatgataatctacaggcttatgagggcttacataagttcatcttctctacggaaatctgcattgagggctcttgcaaaggcactgacgacagatcaactcttctacctaagagagcagtttacattattaggtccaaacaagagtggccatatatcattgcaaaatatgaagacggccttgattaaaaattcctcgggtgcaatgaatgattctaggattcttgactttgttaactcaatatgcaatatccaatatggcatgattgattttgaagagttctctgctgcggccattagtgtatatcaaatggaaggcctggagacctgggaagaacatgctcaacaagcatatgaattgtttgacaaggagggcaaccgaccaattgtgattgaagaacttgcatcggaacttggacttggcccttcgatctcacttcatgttgttctcaaagattggatcagacattcagatggaaacctcagtttcctcgggttcataaaactactgcatggagtttcttcacgcgcaatcaccaaagtataagataaccatttgcatcgaccaatccctgatctctggctagtgcatgccatggctggttgtagaagttgcatgaaaccaatacaaagattaacagatcatcttagcgcaataggtactctcagtaggtgtatatttgccctgcttttcgcaacatggatcgacattgtcctcaagatgttgagaggaatgtacagatttgatttgggaagaatggaaaccctgaaggatttgaggctgttattttgtttgttagttccagtaatgcaggcattgccttcatttgtgttgtgcacctatgccgcttaatgctccatttacatatgctattgttgcatttattatataaatattctagaaaaaaaaaaaaaaaaaagcggcc

SEQ ID NO: 12316 - DNA, 415 bp, Zea mays
  unsure (1)..(415): unsure at all n locations
  Clone ID: MRT4577_111227C.1
acctcctttttgctgangaacgactggctctatagttttttttgaagatcatatggtttcacaatgacacaaacagaacgtttccaaagaatgacgacccatacctttccctaactgctttgctttagaatagtttgactgaaagaacaggttcttatccttcacatgtcacaacatgtttctttcgtggctatgcattggtgctccttttcgcactgactccgttcctttaccattatttcctccctgtttactctttattttgcctacgtttctcgtatttcttaccgtactcttttcatgtgacatgttctgttattttcttcccggtgtttttttcttttacatactctctcatctttctttgttgtttttttgatattcgttttatttttctttttctttttttttattt

SEQ ID NO: 12317 - DNA, 2657 bp, Zea mays
  Clone ID: MRT4577_111228C.1
ggaccgagaaggagagcgcaacggaaagcaacccaaggtctctccttttccgccacacaggactcacgcgctcttcaatcgctcgctccgtttctacctcctctcgccttccttccttccttcgatcccgctttgtttgtcgtcttcgcccgcccccgaagctccgacctttcccccactttcccttggcgtctacggccttgtccggtgtagaaaacaacgggtttcgtttgtgttgttttgctgcggtttttgtccgctcctgggagttcaatccctgctccatctcttaagagcactcctcccctcccactcagtgtgctttgctgttcactttggattccgcggctttgtttcgggttcttgattaggaaggttcggttcctggtttgggaaggtcccccttccgaggcgaggaatttggtgcgggttgatgcgtcttgccaggaatccgcgatgcaatgataggttgttgaagccgaggtgaatctttgacctgcggaatttcctagctgaagtcccaccgcttctcgatcagccgggcgccatgggcctctgcctgggcaagtcggcagcggtccaggagccggcggtggcggaagacaacagcgtagccgatggcgcggcggcgggccgcggcgatgggccgcccgtgaaggcgcctcggacgcccaagcagcccaagttctccttctacctgccgagcccgctccagccctccagctacaagggctcgccggccaactccagcgccgcgtccacgccggcgcgcggcgggttcaagcgcccattcccgccgccgtcgcctgccaagcacatccgtgcgctgctggcgcggcgccacggctcggtcaagcctaacgaggcgtccatccccgaaggcggcgagctggacctggggctggacaagagcttcggctactccaggcacttcgcggccaagtacgaccttggccgggaggtggggcgcggccactttggcttcacctgcgctgccaagtgcaagaagggcgagctcaagggggaggacgtcgccgtcaaggtccttcccaaggccaagatgactactgctattgccattgaagatgtcagacgagaagtcagaatattgagttctttggcaggccacattaacctagtgcaattttatgatgcttttgaggatgaagaaaatgtatatgttgttatggaattatgcaaaggaggtgaactgctggacagaattttggctagaggtggcaaatattctgagggcgatgctaaggttattattcaccaaattctaagtgttgcttcattttgccatcttcagggtgttgttcaccgggatctgaaaccagagaattttcttttcatgtcaaaggatgagaattctgccttgaaagtcatagactttggtttatctgactttgttaaaccagacggcagacttaatgacattgttggaagtgcatattatgttgctcctgaagttctccatcgatcttatggcactgaggcagatatgtggagcattggagtaattgcatatattttgctttgtggaagccgccctttctgggcaagaaccgagtcaggaatttttagagctgtcctaaaagcagatcctagttttgatgaaatcccatggcctaccctttctgctgaagcgaaagacttcgtaaggaggctgctcaataaggattaccgcaagcggatgactgctgcacaagccctctgtcatccatggatccgtggtacacaggaagttaagatttatctagacatgataatctacaggcttatgagggcttacataagttcatcttctctacggaagtctgctttgagggctcttgcaaaggcactgacgacagatcaactcttctacctaagagagcagtttacattgttagatccaaacaagagtggccatatatccttgcaaaatatgaaggcggccttgatgaaaaattcctcgggtgcaatgaacgattctagggttcttgactttgttaactcaatatgcaatatccaatatggaaatattgattttgaagagttttctgctgcggccattagtgtatatcaaatggaaggcctggagacatggcaacaacatgctcaacaagcatatgaattgtttgacagggagggcaaccgcccgattgtgatcgaagaacttgcatcggaactcggacttggcccttcggttccacttcatgttgttctccaagactggatcagacattcagacggaaacctcagtttcctcggcttcataaaactattgcatggagtttcttcacgcacattccctaaagtccaagataaccgtttgcattgaccaatccctaatctcagggccagtgcatgccatggctggctgtagaagttgcatgagagttgagaccatcagaccagtacaaagattaacagatcaggttagggtaagaggtaaaattctctcagtagttgtatatttgctccgcccttgtcctcaagatgttaagaggaatgtacagatttggtttgggaagaatggaaaggctaaaggatttggggctgtttttttttttgcttgtttgttccagtaacacaggtattgcatttcttcttcttaatataatgatgtgtagctctcctgcatattcgataaaaaatgcaggcattgcctt

SEQ ID NO: 12318 - DNA, 628 bp, Zea mays
  Clone ID: MRT4577_111229C.1
caaagtggaggtctgcggggcgcgcttttttttttttttttatcgtacttgcatgcatgcatgcgtatatatatatagatagatgagaattgttgagacgacacggatcatctcctagcgggggcggaactgcatgtggggggacaagacgacggaccctgacggtgagtaacgagctagaattataagaggacatacaacttgggcgaggcaatgaacaagcatcagaggtggggaccacagggcaagggagcacccatccgaggacgagctgatagatatggaggaaagctctgggcggactggtctaatgagccgaggacaaccttgccagcgcaggatgagcaggaccgcgcaggcggatgaggggcaggcggaggccatagtcctcggcgaaggccagtgtgtaaacggtcgatgaccacctgagagtacaccgaccgctccggcgtgaagaggttcagcagtgaggtggccagcgcgggcagcacgtggcgccgatgagcggggcgacaagggcttggcaaccgcgaacctggaccataatgggcgccggaagacaggagggggcgcgcgcgaagatcgtgatgctactgacgccgacggacgattggaggacagagtaggg

SEQ ID NO: 12319 - DNA, 471 bp, Zea mays
  Clone ID: MRT4577_111230C.1
ggccgcttttttttttttttttttattttttttaaagggaaccgcgtccatttatttgcttatgagcacacggtgattactgattctcaagcttcaggagcacatgtgtacctgaacggatgcatctattggacttgtggttgacagaaagatttggatcagcaaatgacccatctggccgtaatgagacatatgcgataacacaacattcgaccaaaaaccctggactatcaacattcatcagacccgaaaggaaactgactgcagcctgccagacaagacctaactccagcatgcttgtacatccgccaccaatcctccaatgcctgatcagcacggcggtacagacagataatgtgagtgtggacttcttcctggcgatgaggatcttgttcatctttgacattccggtatgttcttggagctgggcttccgatattatattcgctcttggcactgcagaagcttaac

SEQ ID NO: 12320 - DNA, 650 bp, Zea mays
  Clone ID: MRT4577_111231C.1
tgggtacctcgaggccggccgggacttgcttcctatcactccctatactcggcggcgtgccgcggatgtattcgtcggcgggcgggatgtgtgggcagaaccagaggttccactgctcgccgacggtgacgaggctcggcggcatgagggctcgactcgtgggtgcgacccgcggccagcctgtggtgaagaataggccgacgcgctgacggtacagttccgcgccatcctcctgaagatcgttgccggcaaggagtctatgggtgagacaatgctggcctgctccttctccctcgccgaggccaagtacatctgtggcgacggcgtccgccacgtcatcctccggttcgtacgagcggtatccgtccgcgtgcgctcccaccgggagaacgtggacgcggacaagctccccaagttcacccacttcatcaagcccggcgcgggctccggggggccctccaacgcgctgccgagcctcacggggctggccctcgaggggaacttcgacgtggactgccgctgcgagcacgacaggacatcgaggtggtgcgcgagctcggactgtctgcgagccacgtcctcgcttgggtccagaaccgccgcacccgctggaagaccaagcatgtggatcgacaactactccgagctcc

SEQ ID NO: 12321 - DNA, 410 bp, Zea mays
  Clone ID: MRT4577_111232C.1
ggttaggactagtagcacataaaaactgtctattttgaatagaaggggaggacgcataaaagaacccttgttcaatgacaccgaaggttccgcgccttggtttttttccggaagatccggaggggcgaaagggcatcacatactgggccacaaaggccccctggatggacaccggtaactcgttctaaatgactagctcccaacttccatgtttacttatttacagcgtttgacagtgagaactgaggcttgctggttttattggcggggaaagggcaagactaggcatccgccttcaccgggagaagaagagcaagcaccaatatgcccgaaaccgctacttacaggtaacagcttaacagcaacgttttacagcattagggaccaacgggcaacaatgggacccgcgg

SEQ ID NO: 12322 - DNA, 361 bp, Zea mays
  Clone ID: MRT4577_111233C.1
gctttaagagcatcttcaaaaggttccttaaagcagacagacttgaagtacaaatgcaaatactagagcagttacagacgagatgaccggaggaaacacgcaaacattactcagggggccagagacagaaacaaggggtcatcatgacgagaccctggctggacagccaaagagtttcatgcaaggtgatcagcatctgcatcggcaatttaagtctggcggtctaagagaaccccgaaaaggtcgcttagacgaggatgatgaacatgaaggtggagcccggggcgccgccgctagtagaccggagccgacgactgcgcgcttgagaccgtaaagttggagggacccgtgacgctaaaca

SEQ ID NO: 12323 - DNA, 224 bp, Zea mays
  Clone ID: MRT4577_111234C.1
ggaagcttacccggggaaatggtggtacactgccgggctcactggctcgtcgggcgaatcttgggtttacaaagcgcacctgacgttcgcacgatgtgacaccatcattcaatgagtttatcacgaccgacatgcggagtatcagaagcaatgctacacgcattcgatgtaactgttgcagacaaactactgagcaaattgtcataggacgatgcctcaagcat

SEQ ID NO: 12324 - DNA, 451 bp, Zea mays
  unsure (1)..(451): unsure at all n locations
  Clone ID: MRT4577_111235C.1
acttcaagactgatatgcttcattccatacaaagaaagaaaaaccattacataaatttaccaatgagataattgcagagaatgtctcatctaatagtatcgactacaacaacagcaacaacaaacacgttcaaagcaaaactcagagaataaactaatcccagttttgctcctaccaaaagaatctacacatggacttaaaatctccaanctcaaagggcttcttcttcttcttcaacttctttcttggggtacaataacaaacccttcccaagcttatttacatataaatcacaactctgtcaattgttgaaaggggtgctgcgtccctttgtacaacttccaccgtgatgaaataaggagctagaaaaataccaacttcttctgttgggttcgttaaaacatactaataccatcagaaacctgttagaaagcgtaagtaaccaccttta

SEQ ID NO: 12325 - DNA, 790 bp, Zea mays
  Clone ID: MRT4577_111236C.1
cgggtttttctcagcatgaaaaactaccgtcttgctgtcgtcgtctcctttctgcagcaaccatcagcgcccaacctgctctctcaccctccgtctgcaacaaccgcccaacgccccagtagatatgaaatcccccttcccgcatgacatcttgacacataaaaatgctccttccagtcaaccggcatacgttatacgagtttcagtgtcgtgtgtaaataagagaaagaaaaggcattttaaaaacaaaagccatagcaaaagcaaaaaaaggaggagaagaagaaaatactcgatgctgctggagaactacaactcggtgagatggaaacagaaaggtctgggttgtatcatgaggtgtaaactggggtggtgggcgtgtggccgtgtttgtgtgtgtgtgtttacagttttgtcacctccgctgcttgaattatgatgaccgaagaatggatcatacatatataatctgatgaatcgtctaggtgacagcaatcagaaacgctgaaaaacggaactcctgctgtcctgcaccagtgctgtccacagatgggtgtcgataccgtgtaccaattttcctcggatgaagtgagagccagtagagatgacacataaaaatgctccttccagacaaccggcatacgttatacgagtttcagtgtcgtgtgtaaataaaagaaagaaaaggcattttaaaaatataaggcatagcaaaagcaaaagcaaaaaagggagagaagaaaatactcgatgctgctggacagctggagaactacaactcggtgagatc

SEQ ID NO: 12326 - DNA, 329 bp, Zea mays
  Clone ID: MRT4577_111237C.1
ctcgaggccggccgggccgggatacaaagaggcgggcacctcctcgccatttcccaaaaccagtgcaagcagaagcagcgcaatggcgagcagcaccatgggcctctcctccacagccttcgccggcaaggcagtgaacgtgacgtcgtctctcttcggcgaggcccgcgtgacgatgcgcaagacggcggcgaaggcaaagccggcggcgagctccgggagcccgtggtacggacccgaccgcgtgctctacctgggaccgatgccaggcgcgcccccgagctacctgacaggcgagataccgaacaaatacagctggcacaccgggg

SEQ ID NO: 12327 - DNA, 632 bp, Zea mays
  Clone ID: MRT4577_111238C.1
atcttactccgccgtcaacgcctagcatctgcaactgcctttgccctctcgcaccttgcgagatggacacaaccttcatcatgatcaaggctgacgcccacctcaggattctgattgttgagcatcatcaaccgtgttgagaagaacgcctcctacctcctgatctagaagcttgtgaacgttgacaggtctgtggttgagaagcactacaacgatgtcgcctccatgaccttcttccacttcctcgaggactacatgatctctgagcttgaggctgacatggacagaggagatcacagatggatcatccctccggggcagaatgatcattagccaggcaccaactcgccctggcttcggaagcccctgaccatccgtgactgtacatctggtgcatgcattgtgagacctgccattcatggactgtggtcgaccattagtacaattggactccacacagtgattgccctgaggctcgccatatgccctgctgactgacacaggaacatgcatctcctgtgatctacacacatgaagcgtggaaaatgactcgttgctgcttgaaaatgaaagcaagcacgccaccatactccgatgtacaatgtgatcagatagagtatgaactgtcatcc

SEQ ID NO: 12328 - DNA, 222 bp, Zea mays
  Clone ID: MRT4577_111239C.1
ggagaccattcattcgagggagggattcattcaggggggggcggatacttccgaaaacattaatcaacgcaaatagtaaaaacaagatgtataaacttacaggcataggttatgtgtaggaaccaccattcttgggattgctgagtcatgtgaaggcaaaacaaaagcattgattagctgaagaggatgaggccttgattgatgattgagtcaatgatgacc

SEQ ID NO: 12329 - DNA, 407 bp, Zea mays
  Clone ID: MRT4577_111240C.1
gacactccatccactgagcgcatgcggaaagccacctctacatccccgggtcctgcgacggcctcctcgcgctcgccgccccgatgcctcgtcgacgacgccgacatgaggaaagacgtcggcgcggcgtgagtactacctgccccgctgaaggtgagcgggttcacgtgcaaggagaaattttcggggtacgagattcttcttcatacgcgcgtgaggaaccccggaaacaccaacgaccgcgggggtgtccgtggtgagggcggcctacgtggagaagttcgcgggcgtcaacacagctgggagtctccatggggcggatcgaataaccgaccggaggacaaaacccggcgaacacggaaccgcgcggcaaccagatcatcctccgcctccaggccacgctcgaa

SEQ ID NO: 12330 - DNA, 361 bp, Zea mays
  Clone ID: MRT4577_111241C.1
cccggtcgccccgcgtcgcccgcgtcggccgcttttttttttttttttttttttttgaccgatatgtaatactaggtatttacaggtgcaaaattttgcaaatgtatattggtattgcaaatacatattattaacataaagcaaaaggatccatctcatggcgcaccagggggggcagtatcaaatttcagacagctcactctgaatactaaggttattataagagccgcaaatgggtgactactaacaaaccgttacaccattacattaccgatcgcatgcgggaatcgtattggtgtaaacgaccattttgagactataataccttgagtttctagagtgagctgctgaactttagaac

SEQ ID NO: 12331 - DNA, 275 bp, Zea mays
  Clone ID: MRT4577_111242C.1
caccagcatcggctgcgctgccgtcgtctgcagcaacgaaggcggcgtcttcgccatctgcagctacaacccgccgggcaacctcgacggccagagtccgtactagcttggcgatcatcgatcatatacgcacgcagctgtggatgcttgcaatacctactacgtgtaagtgtcgtatgcatgagtacatgtatacacataccgtacgtgtgtgtcgacggatgacataaaactgggaaccgcatgccatatttaacacacaccaaaaccaaaaa

SEQ ID NO: 12332 - DNA, 119 bp, Zea mays
  Clone ID: MRT4577_111243C.1
ctgtgccctccaggagggccagcctgctctttggacacctcctgaaatattgattttgtccgtcggaataagaactaccaactccattggtgctatgaagagaagtatggctatcctaa

SEQ ID NO: 12333 - DNA, 761 bp, Zea mays
  Clone ID: MRT4577_111244C.1
aaaagagaattagcaaagaaagatatcctccttctagcatccaggttgtagggaacatccatagccgattcttttcacggtgagtaaaagtcgaagcctttttatcttttcattccacgcttgggttttctttacaggaaaatcaatagctttcgtgaacaactgatcttgttggtcaagtgatgacattccttcagatcttttattatttgcaccatgtatcaattccagtagttcgctgagctggtcaaccattatgtcccttgtaaccacttcaagcatgtcttgggacaatatgatgatctgatcatgatcttctttgttgttactttccagtaagtcaagcagctcaatgaacttcttgcttagggtaggaaggttactcatgttcagctcctttatcaaagtctcttctgctatgtgctcatccaccgcatcgaagatcttttgtatgtaacctctctctcgtgaatcgatcactagttcatatatgatgtttttgaaagaagcatagcattccttgatagcataagtaaaatatggatccgatttcatcctcttctttagatcacgatcttttccaccactatctgcggccatatccaatgctattggaatcttgctggcaagcaggaatggtggccattggattatatccatatcacgatctttgcagtatggaacaagtaacaagtccttctctctgtcgtctatcaaatcttcctcacggaagcttgtgataattaaattccaaatctgag

SEQ ID NO: 12334 - DNA, 305 bp, Zea mays
  Clone ID: MRT4577_111245C.1
cccacgcgtccgcatcccgcctccaaacccgaactccaagtcgccccgcatcgatggcgcccaaggccgagaagaagcccgcggcgaagaagccggcggaggaggagcccgctgccgagaaggcgccggccgggaagaagcccaaggcggagaagcgtgtcccagcaggccaggcccgccgccaggaaggccgccagggaaagaagggcccggagaaaggccaggagaaccttgagaccttccaggaccaccttcttcaagggcctgaaccaggtccacccggccatgggcatttcctttaaggc

SEQ ID NO: 12335 - DNA, 566 bp, Zea mays
  Clone ID: MRT4577_111246C.1
tttttttttttttttttttttttttttttttttttttttttttttttttttttttttttttttttttttttttttttttttttttttgggaaaaaaaaaaaggggttttgcaaccggggctttcccaaaaaattcgggggcaattggtccccattaatcagttccatatttgtccccctccctcggtcagggccctgacggggacctcaataatctgaaccaaaaattttaccggggcatatcaaaaagggaatccccccccgtgaatctgggacccccaaccggaagccaaaccacattgccaaaggaattcacccaatcctggggaacaacgctgcctgattcacaacaaaatacccttttttggggaaagctgatccaccccggatatgatatcatcgaaaacctggaatattggctgggcccgttcaccctccaaaaaagcgggaaacccccctttttaaaggcacaacttcttgtcttggcttttgggtttttaaaacaaagccttactaacccccggggcaaaaaccatatcaacctcacccggcaaaatgaacaagggc

SEQ ID NO: 12336 - DNA, 336 bp, Zea mays
  Clone ID: MRT4577_111247C.1
tcgcgggtcgatacacccgacttagtggcgcccagctcccgcatcttcgggcgccgcgaactggtgaaggaacccgaccagattgccatccggtacctgaagaacgacttcatcaacgacctggcaaccatgctcccgataccgcaaatgatcaaccgggttgttaaaccaactgtgaatacatcctccggcaatcacaacaacaacaacaagctctccaagattgtgccgattcaattcataccaagaatccaacccaaaataacccttaactccaaaattgttcaaggcaattgaattggtaacaaaaattgcctgggcgggggcggcttaaaa

SEQ ID NO: 12337 - DNA, 1328 bp, Zea mays
  Clone ID: MRT4577_111248C.1
gccggccgggttcgggaagggacaggaagctccaagggccaagggaggctgcaggcaggttgtctccctccttcccacctgcaccacccctacccctgccccccatctcatccatcaatgggaaggtcaccttgctgcgatgagaatggtctcaagaagggcccctggacccctgaagaagaccagaagctcatggagtacatccagaagaacggccatgggagctggagggcgctgcctaggcttgccgggctcaacaggtgtggcaagagctgcaggctgagatggaccaactacttgaggccagacatcaagagagggaagttcacccaggaggaagaacagaccatcctccagcttcactccgtccttggcaacaaatggtcagctatcgcaaagcacctccctgggcggactgataacgagatcaagaatttctggaacacgcacctgaagaagaagctgatccagatgggcttcgacccgatgacgcaccggccgagaaccgacttctttgctgctctgcctcaactcattgctcttgcgaacctccgccagcttgtggagcagcggccgtgggatgaccacgctgctaggatacaggttgaggcggtccaggctgcgaagctccagtgcctccagaacctgctccagtctgcagcatccatcaccaccactcccagctccagcagcatgaacaccatccccagtgaccttggcctcctgagtcctccacagatgtcttccttgtctacgttgccttctccaagtttcctggagagtatcagtggccaagacatggtagctggtcaactgtctgacatccagatccctagctctttctttgaacagcccaccagcaacgaggccaaccagcagtcagacttcactccaaagagtagcgtcgagggggagaatggaacccctaaaacgcttctgtcagaaaattcccttccgccgctggccgacttccccatttccaacctgggtgatgcttgcggtgcctcaagctgtgacggtagcagcattcagttcccaagttggcccgagttgtttgatgaacagttcatgtgcgagtttgtatgaattctggcctggagtgagtgtgtttgtgttactctatagtttgtttttttttcagttatagttttcttcccttcttacatctgttttttgtgccatattctggtgtgggtctcagttcagaggtgtagtttccgcatgctgttttttttcctttttgagtgaaaatgtgtgctcctatgcatacactatataccaaacacttgtaaatatacgacactataaattttgaaggtttggatccc

SEQ ID NO: 12338 - DNA, 354 bp, Zea mays
  Clone ID: MRT4577_111249C.1
gtgttcttgtatccctgctagtgttgtctctctcccacatccaccaagtctgctctgtgcagataatcaattgccagtgttgaccattctcacatttctttaccctaccttagccagaacattctacgtagttgctggcctatatgatacttgctccatattcatgtaatactttcctgaagttgaagaagatatctatcatagttgagttccattattcatagacatcagtcgatcaaatcatatatgcttgaacgtacgcctgccttggatgaatcaaattatttgattaatagagctgcttgtacactggctgctatttcatctgtaaattatgctcctgcactcacttat

SEQ ID NO: 12339 - DNA, 454 bp, Zea mays
  unsure (1)..(454): unsure at all n locations
  Clone ID: MRT4577_11124C.1
natcgatgcagcaggcagcacacaacccaacactactctccctcccagtctcgccaacgccaccacccccaccattccaaacccccgtctcccaccgggtgccgtttccctcatccctccctccctgtctccttcggaggctcctctcggactgagagaaccccactcccttgcctaaggttcccggaaccctacccccgatccgtacgccgcgagggtccccgtcgacgagaaggatgctgtcatagaaggggccataaagaacgatatgcgcaggcctgtgctgtatgtcagatcccgcccagtcggctgagccttcatatgcaaggaagagactagggacagggcaatatcttcaaacccgctccaatggccgcagctatggaaaaggcttacggatgctgactaccatgcgctcgagcgtgaccgttggggccgcacaagtccccatgtg

SEQ ID NO: 12340 - DNA, 551 bp, Zea mays
  unsure (1)..(551): unsure at all n locations
  Clone ID: MRT4577_111250C.1
ggcccgctcgaggcnncggccgggcccgggcaccgttttatttatgagattgcaactgctcgcatcgcataagttactgattgagttctgtctgtgtgctccagacattctatgtctccaagaggatggcatatgtactcatcctgaacgaaaattaggcgagaccgatgctataacgggacatggaacatgcggtctggacatgcagctgatgcccgggccatgttgttggacaacgacaaagtgccagtcgcattgtgaccagaacagtgagatcaccacgcttgaacttcgcgataatgttggccagctctgtgactcaaagtcggagggccttgagtgtgtgcaaactgactctgcatattgatctactactccgaaccatccgctcaccgatatccacagcataatagtgtccactctggccacctatgatcctgagggcggggacatcgaacttggccagatcaggacacttctgaacatcgctaacgctctatctaagatgtgcaatgatgctccagtgatagcccgtggagattgtaactcta

SEQ ID NO: 12341 - DNA, 195 bp, Zea mays
  Clone ID: MRT4577_111251C.1
tccacgcgtccgggggaccgaactggggctgggggagctgaattggggccatggaaccattgttaacactgacactggcacctacctggttgagttcgaacatcttttctgaattattgcgctttaatgacttaactaggtatgttgccagtggcttattctacagcacataatttttttagtgggggacaccct

SEQ ID NO: 12342 - DNA, 709 bp, Zea mays
  Clone ID: MRT4577_111252C.1
acctcgaggccggccgggccgggaccggccgggtgaggtctaggacggagaggagaggcccaagcagagtaatggccaaggtctacccaaacagcgcagccgtcgcggcagagcccgccacccgagccgctgccggcgaccaacaacctgaaccgccgacggtgctgacggtatggcgcaagtcgctgctcttcaactgcgacggcttcaccgtgtacgacgcccggggagacctcgccttccgcgtcgactgctacgccacctcccgccggcgcgccgaggtcgcgctcatggacgccgcgggggcgccgctgctcacgctccaccgcaagaggctcagcctggcggagcgctggctcatctacgaagacggcgccggcaccacgcaaccgcagccgcagccgcgtcgccctctcctctccgtccaccgccacgtcggtctccgcgcctccggcgggaagacgctggcgcatgtcttcgcgccctcctcggccgcccaggaggcgttcgtggtcgaggggtcgtacggccggcgtgactgcgccgtgcgcgacgcgcgcggcgacgtcgtggccgaggtccggcgcaaggaggccgtcggcgacgacgtgttcaggctggtggtcagtccccgcttcggcgcgccgctcgccatggggcttgtaatcgtcctcgacgagatgttcggcggccgccgactaaagagaac

SEQ ID NO: 12343 - DNA, 112 bp, Zea mays
  unsure (1)..(112): unsure at all n locations
  Clone ID: MRT4577_111253C.1
tccggctcgccctcgtccatctctatagcgccacggggncaccacctggcggaggtggtcctcctcgcctctgcttcagcggacctcgcagctgcacgcaccgtcaagaggc

SEQ ID NO: 12344 - DNA, 766 bp, Zea mays
  Clone ID: MRT4577_111254C.1
cattgggtacctcgaggccggccggtgcaaaaatctccagtcacaccacacgtcacgctcgcaccggcgggcgggcggcgccctgacggccgagggtcacgtcacacccaggcagcggctgcgctccagaggtaactagtgcggcggacgggcggagggcgggatgctgctgctcaatccgtgtcctatcccaaagtgaaatgccgactgaatcaattggaatatggatgcacccctgtcgagagatttgggaagaaaatgagtacaaggtagccctgtagctcccagatgtaaagggaaacatggggcttgagtgtacgcaagacatacaggaacacatctactcatctgttgtaattatcgctgcctttagctttgcactcgcggctgcctgggggtatcccattcccatctgtaggagagtggaagctgatgaaagaaccaacgttatgacattggtaaaagacaacaacatgcgagcattcagatgcagaagatggtcacgcatttacgtctcattctaaactcctaacctgcaggtaactgaaaatattgtcaaagcgacgatattttgtgaaatccttttttttaagcatcatagtggtcaacaacagtttgaatcacactgcaaactgggagattctagggaacaagtattttacagatctacatacagatgagggactatgtttttttagaacagctggaattgcactgtaaactgaaattctagaacaagcattcgacgtatccaatatcaatcacg

SEQ ID NO: 12345 - DNA, 558 bp, Zea mays
  unsure (1)..(558): unsure at all n locations
  Clone ID: MRT4577_111255C.1
ctcaaacccacccaccaattgagcgcgcgatcaggcgccacaccggcaccggcatgcaccatgggtcctaccacagctcgcctccttcccctcctgcccttcgtcgccgtgttcctcctcgcctcccccgtggacgccgactccgccctggacgcggccacgcggtgcgcggccacgatcgtgtccatctcgccgtgcctgccgcacgtggcggccgtggcgccaccgctggctagctgcccgcctgccccaaccgacgcctgctgcgtcgccttcctccgcgctgtntccccgttggcagcgggaggcggngaggagggctgcctgtgccacctgctccgcaacccgcttctccttggctttcccatcgacgccgnccgcctcgccgcgctcctccctgcctgcgctgcgggaattgccttcgccgccgcccacgtggaggccggctccctcttcgctgacgcctgccgtgntctaaaggtgctgccgggattgcttttcatgccgcagtctacaaccgggttccgagttttccctgctgctgttcctgaattgatg

SEQ ID NO: 12346 - DNA, 360 bp, Zea mays
  Clone ID: MRT4577_111256C.1
aatattattttctttcaaaaaaaaaatattttttgggagtttttttaaggggggtttccgcggaaattaaccgccatgaggtatacaaatatagtatctcctcggggatgatttcaaaaaatgggggaacaaacgccaccccacaaaaaaaggtcaaaggaggggaaaaaaaaaattggggcgaaaaaaaaaaagggaactttataacttagggggggtattaatcaaagaatttgggggaagggggggggctttaagggacctgaaacgggaaagaagagccgtttttatcatgttggttaagacagaaaggacaagcttgggagggttgaacggggggggccctttcctaagggaact

SEQ ID NO: 12347 - DNA, 360 bp, Zea mays
  unsure (1)..(360): unsure at all n locations
  Clone ID: MRT4577_111257C.1
ccccccccccccccccttttacatttaaaacaaacccccctncaacttgagctgtttatatatacctgcaacctttcgcccataccaccccttcaattctattatagaacaacgtttcatactaacccctacaaattctatctccctaaaaatcctgtgtgtgaaacaatatacttccacaatatctatacccacataatcaccacttaattaattatacatattctcatatacatacctacaccacgtcaatacaaactaacacctcatcctcaaaaacaacacccgacgcctgctttacaaccttcaaattgaatacgacctttacacggacaaaccctttcactttactctcatacc

SEQ ID NO: 12348 - DNA, 297 bp, Zea mays
  Clone ID: MRT4577_111258C.1
atagcaatgcatctatcgagtcacggtcgacgtcacctctagatagctccgtcatctgtccacttacatgcgaatgcgaaacttgcgcggtggtcatgtctaactggcagctgaggccaagtcagccaggccgaactacaacgagcggcccgagtacatgactattgagaaagagttgacggtggcgatgataacatcacggtgatcctcgctctgaatgacgatacgatgcttacctacaccgagtcgagtgttacttgcgacgactccatcttgtgggtgtcgcagagagtgaac

SEQ ID NO: 12349 - DNA, 1213 bp, Zea mays
  unsure (1)..(1213): unsure at all n locations
  Clone ID: MRT4577_111259C.1
agaatcttaaaaattaacagactatctcatgcagttaaccaaaagcaaaatagaccagagtttatgcttcctcgcctttgggacttgctacttattgtttgcaacagcaaacagnatcagtcttcagcctattaagacattccaaggcgatcaattactcagacggaacagactgcaatcctatttctcaatatctatggacctgtcaaaattttacagaacctaacgagcacgcccagctataggcaaattgagagacatttagcatttttttttgtttatacagaatagttattaagatacataaatatgcctcccaaaaaggcgaaggaatagcacagagcaacaatgtcaactagatacaaaatgcacagctctagaagggtactcttctacagaggactggacagagtcatggagagtctgtacatagtgagagtggtactgtgaagcgttcatttgcaggtttatgacagatcaaccagatggtctctggtagatatgctttgttcttgggtcaacgattatgccctttccaccattcacttcaaggtcatgctggaacacaaaatcaggaatggtgagctgttcacgtggtacatatctgaatagctgcacaagtctgtcgacatatacaactttcttccagacctccccgtcaacaaaaagttgcatcgccataacagctgttctcagtcccagtgtcgggtggagtatgtatatagtatgaagattttttttatgcttccgacctagtatctgttgtaaccgtttcatgaatcctaaatcaggctgtggttgtaatgatgccacagagtggaaatagacaattgtgtaaggcttctgaatcagagattcaaattcctttactacatatagaacaaatcgttccagatccaagcagcgaagaagaaagtgagcaccaacaatgaccataactggacgcccttcactatcaactcctccacggtaaattattttcatttcagcaacatctgacagattcatagaattcgctttagcaaggtatcgtgaatgaagtgaatattcttcagcagcagataatggtggactgccaagatcaccaaacccaagcatgttagccaagttaagtcccttgtttgcctgagatttttcccattgctccttgcgtcggagatcaggatcctggccgcccttcccacacgccctcgcccatagcccacgcgncaaa

SEQ ID NO: 12350 - DNA, 487 bp, Zea mays
  unsure (1)..(487): unsure at all n locations
  Clone ID: MRT4577_11125C.1
agaacccattctggtggacacatcagcggcatgatgggaagctttggaatctaaataactacagaacagatgtcatccaagcacttggtggtgtagaaggcatcttggagcatactttatttaaagggacttacttccccacttgggagggtctgttttgggagagcggccgagtgatgccgtcggacagctaggtttagtcggtctcgagtctcgattaaccaaccgccaccatctcaatggactcatctcctcctctgctctctgctctgaacctgtgctgtgctatagttttcattcctacccattctctcattttttttccttcggctattatacactgacttgaactgacaattctttgcattagtttctgtgtcgtcgtcgtcctgtacctgtgatccatccatggtaaaaagaaaacacccagaccttgctgtgcnnnnnnnnnnnnnnnnnnnnnnnnnnnnnnnnnnnnnnnnnnnnn

SEQ ID NO: 12351 - DNA, 216 bp, Zea mays
  Clone ID: MRT4577_111260C.1
aatgacatgagtcatgacgtatcggattcgctgaagcgcgaaatgagataggctcgatggatgatgctaagttgagagtccaactaagcgcgatggcagtgtgtgttggtctgtaaaggtgtaggaactagagatggctgcacacatgctggattacataactaatcactaattgcttggttctaggaagcgaaatgatttaaaacaacatcatgt

SEQ ID NO: 12352 - DNA, 353 bp, Zea mays
  unsure (1)..(353): unsure at all n locations
  Clone ID: MRT4577_111261C.1
aaggggggntttttaactagtttacctttttttaccagggggaagcatataacttacttatgaccgaaaccatacatggtaaggggccccagaacattatggctccgatccaagtcgctagctttaaagtcgctaataagaggacctcatccttgaacttgttcatggccgggtccaggaggtccatggaagctaccacgcagccctcaccgtctgcgttcttgcacctaacatggtcaataaccattttggctgtgtcatcgttacagacaatggggacgcggcagggcacccgttgggcccacccaaggtgcaattcgtgctccccgatacgcgttatgacagacaccacg

SEQ ID NO: 12353 - DNA, 852 bp, Zea mays
  Clone ID: MRT4577_111262C.1
cattgggtacctcgaggccggccgggggtccccgttctcttctcagatctaacttgtcccgtgccgcgcgccctcccgcttccgatccccgcgtgagcgcaggccaaaaacctaacccctggtctcaccatcgcttcctccgcctgaggaggagcaggccggcggaggaggagatggtcttcatggcggcgctggaggccgatctgcgcgctctctccgctgaggcacgccgccgccaccccgctgtcaaagacgccgccgagcacgctatactcaagctccgatctctatctgccccaagtgaaatagctcaaaatgaagatatactgcggatgtttctgatggcatgtaatgtcaaatcagtgaagttgagtgtcataggactatcctgtttgcaaaagcttatatcacacgctgctgttgcatcatctgcgctgaaggatatactagcgactttgaaggatcacgcagagatgactgatgagattgttcaactaaagactttgcaaacgatgttgattctctttcaatcacatctacatcctgaaagtgaggagagcatgtcacaagctcttggaatatgcctttacctacttgaaagcaatcgatcttctgacagtgtccgcaatacggcagcagctacgtttagacaagcagtggcattggtcttcgataatgttattcgtgctgaatcacttccctccggtaaagcttcttcagcaagacttggttcccgtgttagcgctgttgctgataacgtcactcatagcttcagtcacacactatcgctaccaagcaactctggggatcctaccatcatgcagaatttgagtgatggtggaaagcttgggc

SEQ ID NO: 12354 - DNA, 570 bp, Zea mays
  unsure (1)..(570): unsure at all n locations
  Clone ID: MRT4577_111263C.1
cgagggggagagagagagagagagaggaagaggcgagcgtcgaccggtcgttcggtgtgaggaggaagaggaagagatcgccggagaagaggaggcggacgagaagagatgtttctggtggattggttctacggggtgctggcgtcgctggggctgtggcagaaggaggccaagatcctcttcctcggcctggacaacgccggcaagaccaccctcctccacatgctcaaggacgagcggctggtgcagcaccagccgacgcagtacccgacgtcggaggagctgagcatcggccagatcaagttcaagaccttcgatctcggtggccaccagatcgcccgccgagtctggaaggactactacgccaaggtggatgcggttgtttacttggtggacgctgctgacaaggaacggtttgcagagtcgaagaaggagctggacggccttctttcagatgactccctagcgaatgtgcctttcctcgtactgggtaacaagattgacatacctatcgcagcatccgaggaggagctgcgctactaccttgngctgagcaacttcaccactggg

SEQ ID NO: 12355 - DNA, 445 bp, Zea mays
  Clone ID: MRT4577_111264C.1
gacgctgcgatgctccctgcgcagtcgcttgtcgcccaaaggtccactcgtggcatgcatgcccaacgtgcgacaaatcacatcggattcatcacaccagagatccagtgtagcaggaagctaacaatgcattagaacgaggattccgccactacacgttcaaatggagacatcatcaacgaaaggcacacccatcagcatgaccaccaacacgtcggatcaccatcagtatgccgaacagcttcgataacgctggatatccgcactaagtggtcgatcgcctcccctgatcgcagtgaccgagcatacttcgacagtaggcaaagtgctggcaacccgttgggattcaatggtaaccagatctgagaaatgtcccaagctgtgcaaaactgttgtcccatacagcagaagagcaatttacatacacgcgaatacatggttcccc

SEQ ID NO: 12356 - DNA, 258 bp, Zea mays
  Clone ID: MRT4577_111265C.1
agactaatcagtaataacccgccttgtgttgtaaaaagtgcccggtcaacagcaacacaccagcgtgtaaaagacttttgccttgctttttaaattgcacgcagagagccttgtttttgggaaatgcgagtattgagtgtggtcccggacccttggacaggacatccaaccgcgctgggtggatagctaatgcggggtgcgccttagtagtctgtgaagagctgggtggggcacgatcccgcaccgtgggtgagagcc

SEQ ID NO: 12357 - DNA, 503 bp, Zea mays
  Clone ID: MRT4577_111266C.1
aagggaaaaaccaaaaaaatttcctgtcccctaaaaatcggtttaggcaaaccactttacgaggggggccacccccccctcgtaaaaatttaaagagatggaaaaaaaggggtttttttttgttttgggggcccccacaaaaaaaccccctgggtagttttggagcaaaccccaccattcttttttggggcccgcccaaactttggaacaaaaggcggcagggagcttttttacccccaaaaaaaaacccccccacccttttctttttttaaaagggccccccgggggccctgaactttgccccggggaaaaccggggaatccccgagcttttccttaatcctgagaaggtggttgtttttggcccggcccccaaaccgggagggggcccccgttttgttttgccccgaaaaccggccaactggaagggcaccaaggagggggccctctgccccccccctccggggggtggccatcaccccccatccgggggggtgggacctc

SEQ ID NO: 12358 - DNA, 506 bp, Zea mays
  Clone ID: MRT4577_111267C.1
gttcagacggatgcttttctatgttaagtgtaaactttgagagctcagtctcggacctaacagaaacagtcttgttcacctcccaagatttaaacaaaaatgcctattgccggactacagtgccccggatacgacagaacacagtggctgtgccctggattgaaatggctccacttccatggcagtaaactttacttgtgcgcctctgcggcggggttatcaccaccgaaagagcagagttggttcttcttttccatgatggtggccttcttcttgtcatatgacagcttattggggatgttcctctgaggctcctttgttggatgattgggcgattgatctaccttatgatcagtacggatggcattatggactttcttgtacagggattccatttcctaagtctcgactaccttgttaatgtacgcactgaggtggctctgagacttttgtaggatgctcttcatttgggcttctgtctgtgcctctggaactatggccaccat

SEQ ID NO: 12359 - DNA, 561 bp, Zea mays
  unsure (1)..(561): unsure at all n locations
  Clone ID: MRT4577_111268C.1
cccagcgtccgcggacgcgtgggcagcaacatcactgatcgccgtgcagcctggtacgtaccacacacacacacacatacagaagaagaagaacgtaccttgcgctacaaccccgtcgccgccgactacgccgatcgtgtccacgggaaccaagcaaagcaaagcaagcgacgcatcggaagaagccggagaccgaccgaccgaccgaccgagctagctacagctcatcagcccatggtgaagacggcgacggccacggcgacggcggcggcgaggcacggcggcgctaataagaggacgtacaagggcgtgcggatgcggagctggggctcctgggtgtggagggtgtccggncgccgggccagaagacgaggatctggctcggctcgcactccaccgccgaggccgcggcgcgcgcctacgacgccgcgctgctctgcctcaggggctgggccgccgcgccggacctcaacttgccgccccgccgcccgctcgcccacgggctncacccgctgccccccgccgacatgtcgaccaaggccatacagcgcgtggccgtcg

SEQ ID NO: 12360 - DNA, 107 bp, Zea mays
  Clone ID: MRT4577_111269C.1
cactaatatttttgagagatatccttaagtggttacatatattctcataataaatcacactactagatctgaaccaccattaatacacactactctataattctcat

SEQ ID NO: 12361 - DNA, 4087 bp, Zea mays
  Clone ID: MRT4577_11126C.1
attttgtttttctgtaaaaccctgaacataggtagaacagcaattgccttcctgagggttgacgatgaacatatgaaagtattcgacaaccgtgtccggcagattctaatgtcatcagggtcaacaacattcaccaagatagtcaataagtggaatacagctctcattggccttatgacatatttccgcgaagcaactgtccatacccaggagcttttggatttactggtcaaatgtgaaaacaagatccagactcgtataaagattggcctgaattcaaagatgcctagtaggtttcctccagttattttctatactcccaaggagattggaggtcttggaatgttatcaatgggccatattcttataccgcagagtgatcttaggtatagcaaacagacagatgttggtgtaacacattttacgggtgggtggggccatgaagaggaccagcttattccaaacttgtatcgctacatccagccatgggagagtgagtttattgattcacagcgtgtttgggctgagtatgctttgaagaggcaggaagcacaatcacagaacagacgattaactcttgaggatcttgaagattcatgggatagaggtatacctcgtatcaacactcttttccaaaaagaccgtcatacactagcctatgacaaaggatggagagtgagaacagattttaagcaatatcaagtgctgaaacagaacccattctggtggacacatcagcggcatgatgggaagctttggaatctaaataactacagaacagatgtcattcaagcacttggtggtgtagaaggcatcttggagcatactttatttaaagggacttacttccccacttgggagggtctgttttgggagaaggcatcaggtttcgaagagtcaatgaaatacaaggaatttggtgatcttatactgaaggcaactgaaccacagatggttctttataatatatatgatgattggttgaaaatatcttattatacacagcattctctcgcattgtgcttattctacgtgcacttcatgtgaataatgagaaggcaaagatgttgctcaaacctgacaaaacaattgttactggacccaatcgaagattgcccatgtgggggtcaccaaccatgattcatgctaaagtgtctgttggtttccaggtccagctcgatcttacggacatattcatgcatggtaaaatcccgacattgaagatttctctgatccagatcttccgtgcacatctgtggcagaagatccatgaaagtgttgttatggatctttgccaagttttagaccaggagttggatgcacttgagattgagactgtgcagaaggagacaatacatcccaggaagagttacaagatgaacagttcctgtgctgatatccttctctttgctgctcatagatggcagatgtccaaaccaagcttagtttctgagtcgaaggatgtatttgatcagaaagcaagtaacaagtattggattgatgtgcaactgcgttggggagactatgattcacatgacatagaacgttatacaagagccaagttcatggattacacaacagacaatatgtccatatacccatcgccaactggtgtgatgattggaatcgatctagcgtataatttgcactctgcttttggcaactggtttcctggatcaaagccactacttcagcaggcaatgaacaagatcatgaagtcaaatcctgctctgtatgtcctgagggagagaataaggaagggtctgcagttgtactcttctgaacccactgaaccatacctgtcttcacagaactatggagagatattcagcaatcaaatcatatggttcgtggatgatacaaatgtgtatcgagtcactattcacaaaacatttgagggtaacttgaccaccaaaccaattaatggtgctattttcattttcaatccaagaacgggtcaactttttcttaaggttatccacacaagtgtatgggcggggcaaaagcgtcttgggcagctggccaagtggaaaaccgctgaggaggttgctgcattggttcgatctcttcctgtagaagagcagccaaagcaaattattgtgacaaggaaggcgcatgttggatcccttggaggtccatctacttgacttccctaacattgttattaagggcagcgagctgcagcttcctttccaggcttgcttgaagattgagaagtttggtgatcttatactgaaggcaactgaaccatacagatgctttataatatatatgatgattggttgaaaagtatatcatcatacacagcattctctcgcattgtgcttattctacgtgcacttcatgtgaataatgagaaggcaaagatgttgctcaaacctgacaaaacaattgttactgaaccacatcatatatggccaactctgaatgatgaacagtggttgaaggttgaatgtgcactaagggacctcattctttctgattatgcaaagaaaaacaatgttaatacttctgcactgacacaatctgaaatgcgagatatcattcttggcgctgaaattgctccaccatcacagcagaggcaacagattgctgaaattgagaaacagtcaagagagactactcagttaactgctgtaaccacaaggacgacgaatgtgcacggagatgaactcattatcacaaccacaagtccatatgagcaacaagcattcgcatcgaagactgattggcgtgtcagagccatctctgccacaaacttgtatctacgtgtaaatcacatttatgtcaattctgatgatataaaggaaactggctacacttacattatgccaaagaacatattgaagaaattcatatgcatagcagatctgcgtacacaaatcgctggattcttatatgggctgagtccacaggacaatcctcaagtcaaagagattaggtgtatagccatccctccgcagcatggaacacaccagatggtgactctgccatcaaatcttcctgaacatgagttccttaatgatcttgaacccttgggatggatgcatacacagccaaatgaagctccacagctatcgccacaggacctgacatcacatgccaagattctggagaacaacaaacaatgggatggtgagaagtgcatcattctgacatgcagcttcaccccaggatcttgctcgttgactgcttacaagctgacaccaagtggttatgagtggggacgcagcaacaaggacaacggaagcaacccacatggatacctcccaactcattacgagaaggtccagatgcttctgagcgaccgcttccttggtttctacatgattccggataacaccccttggaacttcaacttcatgggagtgaagcacgacccacagatgaagtacaacatgaagctgggcatgccccgggacttctatcacgaggaccacaggccgacacacttccttgagttcagcaacatcgaggagggagaggtcgctgaaggtgatagggaggacacattcacgtagggcgctgggcgcctgttttagaaactcagtatctcaaacgcactttagctctgttttgaatggcaatgtgtgaaagctgtaacctgactcgacgggtgtcatctgtttttttggcttaatcctgtatcataccttgttgtaagacagccctggagaggggtaaaaattgtacaagtgcacgccatggcaacagtaaagattttacttagtagctatgctattctaaaaaaaaaaaacccctgcggccggagagcggccgagtgatgccgccagacagctaggtttagtcgtgctcgagtctcgattaaccaacccccaccatctaaatggacttatctcctcctctgctctctgctctgaacctgtgctgtgctatagttttcattcctacccattctctcattttttttccttcggctattatacactgacttgaactgacaattctttgcattagtttctgtgtcgtcgtcgtcctgtacctgtgatccatccatggtaaaaagaaaacacccagaccttgctgtgcatgtacatgcatacaataaaagggtggtaagaaaacc

SEQ ID NO: 12362 - DNA, 1964 bp, Zea mays
  Clone ID: MRT4577_111270C.1
cattgggaccctcgaggccggccgggaccccacgagcagcagttacccttttggcttttgcgacgcgcacagacgaatcggaatttgatgcggttacacgcctgagagcgagcggtggccggcaccggcacgcatggcggcagagaagcaggcggcgatggacgggcggaaggacggggtggcgcgggaggtcatccggatggaacgggaggccgtcatccccatcctcaagcccaagctcgtcatgcgcctcgcgtatctcatagagcatgaagctgatcggaacgagttcctgaagctgtgcaagaaggtggagtacaccatccgggcctggtacctcctccagttcgaagacctcatgcaactgtactcactgtttgatcctgtttctggtaaggagaggttacagcaacagaacctgacgccggaagaaatcgagaccctcgaattcaatttcatgacatatcttttccaggtgatggaaaagagcaacttcaagttgctatcagatgaagagtttgatattgcgcaatctggaaaatatttgttgaatcttccgatcaaagttgatgaatctaagctagacaagaagttgttgacaaaatattttaaagagcacccacatgacaatctaccagagttttcaaacaagtatatcatctttcgtcggggcattggaattgatcgaacaactgactactttttcattgagaaagtagatgtaatgatatcccgagcttggaggtcattgctcagggttaccaggattgaccggttattttctaagaaacaacatttgaagccaaagaatggtacgaagaagactgatgaaattaatgaagatgaagaagatccagaattgtttgttgagagaattcgattagaaaaaattgaactaagtttgaaaaatctcatgagtaagatgacaattcaagaacctacattcgataggatgattgtggtgtacaggagggctggtacaaagactgaacctgatcggggaatatttgtaaagcacttcaagaatatcccaatggctgacatggaaattgttcttccagagaagaaaaatccatcactaacaccaatggattgggtcaagtttctcatttctgctgttatcggtttggtcactctagttggctctcttgaaatgccaaaggctgatgtatgggttgtaatagcaatcttgtctggtgtgattggatactgtgctaagatatacttcacatttcaacaaaatatgacaatgtatcagaatttgattacaaaatcaatgtatgacaaacagcttgatagtgggaaaggaactcttcttcacttatgcgatgacgtgatacagcaagaagttaaagaggtcataatttgttactacattttaatggagcagggaaaagccactatacaagatcttgatttacggtgtgaagagctaatcaaagaagagtttggcgcagattgcaattttgatgttcatgatgctataaagaagttagagaagcttagcattgttcatcgggattcgattggaaggatcttatgcgttccgttgaagcgtgcgaatgagatcattggtacgacgaccgaagaactggtgatgcgagcacaacagaaccttgcttcctgattccatttccagtcacgatggattgctgtaccttccctgtcatctccctgcaaagcgcgcaccagaggggaagcttagcttctgatcatcccggaagtctattcctagtctcatctccctgcaaagcgcgcaccagtaataaggaggaagctcctggtcatcctggaagtctattcacctgtacatgtgtacgtgtgtatctttgcattgcagtgccttccctctcgtttggtttagcacggagtgtatatgtcaaaccctgctgttacacagttgtacataacaattatatgtattttttaaatatataacagtacaaattcgttagttctcccta

SEQ ID NO: 12363 - DNA, 318 bp, Zea mays
  Clone ID: MRT4577_111271C.1
ggaccccaaggggggaatgggattcgccctgcaagtaggtcaaactacaaacttaacttcgggcaattaaatacatcacagggtccacattattcgttactgggaacttaaaccaccaacgatcttgaattggccctacttaaatcaaaatgcccatgggaaaccaacagggatggtggtggaaataggaacctccatttttacaaacttgaggatcctggccattaaacctttgactacgtccgaatcaattgaaaaaaaaatggggggggcgacacccaccacgccggggttttggctgttcaaaaaggaaaaccc

SEQ ID NO: 12364 - DNA, 2373 bp, Zea mays
  Clone ID: MRT4577_111272C.1
ttgggtacctcgaggccggccctgccacgacgcccgcgacaaatccctgcgcgacggcatcttcgcctcccatcccctcccagcttcccctcccactccggccctcacacaaattgcccctcttcttgtcctcctctttacacgctgccgaccacggctgccgccaaccacccgccccacccgtccaccgctgccgagtgctagccatttggagctgccgcgccatggcgtccgtggccgccaccaccacgctggcaccggcactcgcgccccggcgccgggcgcggccagggaccgggctgctgccgccgcgccgggcctcggccgtccgctgctcgctcgaccgtaacgtctccgacatgggcgtcaacgctcccaaagggttattcccacccgagccagagcactacaggggcccgaagctcaaggtggccatcataggggcaggccttgcgggcatgtccaccgctgttgagctcttggaccagggccatgaggttgatttgtacgagtcccgtccgtttatcggtggtaaggttggctcctttgttgacaggcaaggaaaccatatcgagatggggctgcatgtgttcttcgggtgctacagcaatctcttccgcctcatgaagaaggttggcgctgataataatctgctggtgaaggaacatacccatacttttgtaaataaagggggcacgattggtgaacttgattttcggttcccggtgggagctccgttacatggcattcaagcattcctaagaactaatcagctcaaggtttatgataaagcaagaaatgcagttgctcttgcccttagtccagttgttcgggctctggttgatcctgatggtgcattgcagcaagtgcgggacttggatgatataagtttcagtgattggttcatgtccaaagggggtactcgggagagtatcacaagaatgtgggatcctgttgcttacgctttgggtttcattgactgtgataatatcagtgcacgttgcatgcttactattttcaccttgtttgccacaaagacagaggcatccctgttacgcatgttaaagggttcacctgatgtttacttaagtggtccaataaagaagtatataacagacaggggtggtaggtttcacttaaggtggggatgcagagaggttctctatgagaaatcacctgatggagagacctatgttaagggccttctactcaccaaggctacaagtagagagataatcaaagctgatgcatacgtcgcagcctgtgatgttccgggtatcaaaagattacttccatcagaatggagggaatgggaaatgtttgacaatatctacaagttagatggtgtccctgttgtcactgtccagctccgctacaacggatgggtcactgaacttcaagatttggagaaatcaagacaactgcaaagggcggttgggttggataaccttttgtacacggcggatgcagacttttcctgtttttcggaccttgctctctcatctcctgctgattactacattgaagggcaaggttccctgatccaagctgtgctgactcctggagatccatacatgccattgccaaacgaggagatcattagtaaggttcaaaagcaggttgtagaactgttcccatcttcccggggcttggaagttacatggtccagtgtggtaaagatcggacaatcgctgtaccgtgaggctcctggaaacgacccattcaggcctgatcagaagacgcccgttaaaaacttcttcctctctggatcttacacgaaacaggactacattgacagcatggaaggagcaactctctccggcaggcgaacgtcggcctacatctgcggtgccggggaggagctgctggccctccgaaagaagctactcatcgacgacggcgagaaggcgctggggaacgttcaagtcctgcaggctagctgaacaacccctcctgcactgcagagaagcttggatctttccaaccacacatacatgctggaatggacaaaccaaccaaccattggcttttctcgcttcagggtgctggcgattcccgcagcgacctcctgtgtatcgtatccaatttgagcattagatctgccccccctgcaggcgtttctttcctatccctgatccgagaagcagggtgtagtctaggtggctggcatacgggattacatcaggcagtgtgtaagttcagctggaactcgattggtaattgggatggatgattgatgatatatatatagcacacactgttcttgcgtcttgcaagaaaatatagcaagcgatgatccggcgacacttgctgggagactgtaccaaaaaaaaaaaaaaaaaaaaaggaagggcggccgccgaataatagctc

SEQ ID NO: 12365 - DNA, 112 bp, Zea mays
  unsure (1)..(112): unsure at all n locations
  Clone ID: MRT4577_111273C.1
ctgatnccnactattctcaggctatagcctagaatgacacatgancaagagctcactttgcnactntagngtaggtgtaancatggcgnttntcctcaanacttccgaggat

SEQ ID NO: 12366 - DNA, 192 bp, Zea mays
  unsure (1)..(192): unsure at all n locations
  Clone ID: MRT4577_111274C.1
caggtatccggcccggaaccatattcccgggccgacgaaccctcccttcggcggccgcgccggacccaaaagggggggtttactaaanggacgggccgcacccgcaaacgggggagcanaaaagaacggcagggcgacagcgcaagccaagcacagacccaggggcacacaccggagggacgggcaaagccc

SEQ ID NO: 12367 - DNA, 622 bp, Zea mays
  Clone ID: MRT4577_111275C.1
catatcgagatggggctgcatgtgttcttcgggtgctacagcaatctcttccgcctcatgaagaaggttggcgctgataataatctgctggtgaaggaacatacccatacttttgtaaataaagggggcacgattggtgaacttgattttcggttcccggtgggagctccgttacatggcattcaagcattcctaagaactaatcagctcaaggtttatgataaagcaagaaatgcagttgctcttgcccttagtccagttgttcgggctctggttgatcctgatggtgcattgcagcaagtgcgggacttggatgatgtaagtatcccttgcttttatttcagatccattaagagtgtgcatcaggagcattcatttgcaatagtcagtatcttttcaaaatgtgttttgttctaactcgctgataactaaacttttttgtcaatttttttctcaaacactcgttaattttattttaacccatttcagataagtttcagtgattggttcatgtccaaagggggtactcgggagagtatcacaagaatgtgggatcctgttgcttacgctttgggtttcattgactgggataatatcagtgcacggtgcatgcttactattt

SEQ ID NO: 12368 - DNA, 2364 bp, Zea mays
  unsure (1)..(2364): unsure at all n locations
  Clone ID: MRT4577_111276C.1
gccggccgggtcgcggacgcccgcgacaatccctgcgcgacggcatcttcgcctcccatcccctcccagcttcccctcccactccggccctcacacaaattgcccctcttcttctcctcctctttacacgctgccgaccacggctgccgccaaccacccgccccacccgtccactgctcgctcgaccgtaacgtctccgacatgggcgtcaacgctcccaaagggttattcccacccgagccagagcactacaggggcccgaagctcaaggtggccatcataggggcaggccttgcgggcatgtccaccgctgttgagctcttggaccagggccatgaggttgatttgtacgagtcccgtccgtttatcggtggcaaggttggctcctttgttgacaggcaaggaaaccatatcgagatggggctgcatgtgttcttcgggtgctacagcaatctcttccgcctcatgaagaaggttggcgctgataataatctgctggtgaaggaacatacccatacttttgtaaataaagggggcacgattggtgaacttgattttcggttcccggtgggagctccgttacatggcattcaagcattcctaagaactaatcagctcaaggtttatgataaagcaagaaatgcagttgctcttgcccttagntcagttgttcgggctctggttgatcctgatggtgcattgcagcaagtgcgggacttggatgatgtaagtttcagtgattggttcatgtccaaagggggtactcgggagagtatcacaagaatgtgggatcctgttgcttacgctttgggtttcattgactgtgataatatcagtgcacgttgcatgcttactattttcaccttgtttgccacaaagacagaggcatccctgttacgcatgctaaagggttcacctgatgtttacttaagtggcccaataaagaagtatataacagacaggggtggtaggtttcacttaaggtggggatgcagagaggttctctatgagaaatcacctgatggagagacctatgttaaaggccttctcctcaccaaggctacaagtagagagataatcaaagctgatgcatacgtcgcaggttttttttcctttgttctgtctttcttattttgctagcatgcccaaccatacacacttaacttggtgttccacagcctgtgatgttccgggtatcaaaagattacttccatcagaatggagggaatgggaaatgtttgacaatatctacaagttagatggtgtccctgttgtcactgtccagctccgctacaaatggatggtcactgaacttcaagatttggagaaatcaagacaactgcaaagggcggttgggttggataaccttttgtacacggcggatgcagacttttcctgtttttcggaccttgctctctcatctcctgctgattactacattgaagggcaaggttccctgatccaagctgtgctgactcctggagatccatacatgccattgccaaacgaggagatcattagtaaggttcaaaagcaggttgtagaactgttcccatcttcccggggcttggaagttacatggtccagtgtggtaaagatcggacaatcgctgtaccgtgaggctcctggaaacgacccattcaggcctgatcagaagacgcccgttaaaaacttcttccttctctggatcttacacgaaacaggactacattgacagcatggaaggagncactctcntccggcagcgaacgtcggcctacatctgcngtgccggggaggagctgctggccctccgaaagagctactcatcgacgacggcgagaaagcgctggggaacgttcaagtcctgcaggctagctgaacaacccctcctgcactgcagagaagcttggatctttccaaccacacatacatgctggaatggacaaaccaaccaaccattgtcttttctcgcttcagggtgctggcgattcccgcagcaacctcctgtgtatcgtatccaatttgagcattagatctgccccccccccctgcaggcgtttctttcctatccctgatccgagaagcagggtgtagtctaggtggctggcatacgggattacatcaggcagtgtgtaagttcagctggaactcgattggtaattgggatggatgattgatgatatatatatagcacacactgttcttgcgtcttgcaagaaaataaaaacaaaaaaaaaaaaaaaaaaaaaaacataaaaactaaaaattaaaaataacctttaaagaaaggaaaattgcgtcgctgggtcgaaaaaatggacataagctgtttcctagagagaaaaagttatccgtttacaagcccccacaacctaccttttg

SEQ ID NO: 12369 - DNA, 314 bp, Zea mays
  unsure (1)..(314): unsure at all n locations
  Clone ID: MRT4577_111277C.1
tcactanttttctttttttttttttttctttttttggggtttttttttttttttttttccggtttttttaaaaaaaacccgggcccataaaaaggggccaccttaaaacaccccggaccttaacttccctctccgggacctagggcccaaaccttaccacccgggggggggactaaccaaccgggtcccaggttgccccacccccagggtttttggacgaacatttttggggggaaaaatgggaacccccacttcataccttagctcccaatttgggggccaagggcccgggtaccacgggttttttgggaccc

SEQ ID NO: 12370 - DNA, 448 bp, Zea mays
  Clone ID: MRT4577_111278C.1
tttttttttttatttttttattgaatttattttttttttgggggaggtgatcttttaccttataagcgtcgacccacccccctcaaaaaaaaaatataaaaacacgggtttataaaaaaacggacagctcgaaacaccacccgcccttcgggaaaaaaactaatattaaacacggggggaatgaatgaaaaaaattttgggggaaaaaaccccaagcccgtcaaaaaaaaataaaaaaacccccggaaacaaaaaaataaactctcactaggaagccaaacaaggcgacccacggcatcctcccttaatttatcgccccggaccagggggcagaacattctatcctataaatggagaggaaaaaggcttggacacaaaaaaccacagccacacccgggagaagacacttctcttccaaacaaaaacccaaaaaaaccccccgccatac

SEQ ID NO: 12371 - DNA, 189 bp, Zea mays
  Clone ID: MRT4577_111279C.1
tcgagccggccgggagcagttttccgtctcttagttcgacgcaggcgcatgctttctgatgctcgtcgtcgtggttagaggggctgcgagatgttaagactagattaagaagttcacctccttcacgaacaggtaatgccaatgctctcctcatcacactaatccaggtcactgattgtgcggcgcgaa

SEQ ID NO: 12372 - DNA, 439 bp, Zea mays
  unsure (1)..(439): unsure at all n locations
  Clone ID: MRT4577_11127C.1
cacaacaatgcagctggtatcccggcctcagcagtttgatgtcatggtgatgcctaatctctatggtaacattgtcaacaacgtctgtgcagggctagttggaggcccaggccttgtggctggggccaactatggccatgtgtatgcagtattcgagacagctacaaggaacacaggcaaaagtattgccaatgacgaancattgctaaccctactgccacattgctagcaagttgcatgatgctagaccacctcaagctccattcctatgccacctccatccgaaaagctgtcttagcatccatggacaatgaagatatgcataccccagacattggaggccagggcaccacatcccaagccatccaggacatcattcgtcacatccgcatcattaatggacgggctgtggatgcctagctatcgctgcagtttgctc

SEQ ID NO: 12373 - DNA, 677 bp, Zea mays
  unsure (1)..(677): unsure at all n locations
  Clone ID: MRT4577_111280C.1
ctcgagnggccggccgggaaaaaaaaaaaaaaaaaaaaaaaaaaaaaaaaaaacccctttttggaaaagggaagcaaagcaatcggaattttttgggatttttttaaaatttgactacccccaattggtttggttccttcttttgttcgaaaaaacgattttgggggcattgggaaaaaaggggggtccgggaatggggattgaccttggacccacctaattgggggttggggggggggaacaccaccggggggaaaatattcccaacgaccaggggaacccgcccaccccggcctattgtggtttaaccgaacccgaagggtttaatggggaactttccaaaaaccaaggcgccatgaaccccaccaaacccggttttaatgccaaagggttgaaccggagggggtttttttaacccgcggggcaaaaggaacagaaactttggcccgtcaagggcatcccaaggcctggggacaagcccatgattggaggcaactaccagggccaggaaaaacaattcctttgttaagaaaacccccccaagggcccaaacaaaaagaagggaaatggtgaagcctaccttggttccaccattaaaaacccaagggtgaccgggccggcctaatttaatgacttgaaaaggcaggcccccaaggacccccgggtgaattgggggc

SEQ ID NO: 12374 - DNA, 290 bp, Zea mays
  unsure (1)..(290): unsure at all n locations
  Clone ID: MRT4577_111281C.1
ttgatctctaccgnctccccaaacaccgtcgaacctattattaaggtgggatgccgggaccacaccctcnatgttttgaaccttacccacttcaaacttagcttcacttttgattgacaccggggctatattaactccttcgctgtgaaccccaaaaaatcacttttcgcctcctgcaggaaggacagcgttactcttctgttggatttggcttaagggaagaagctgtactctcttgacacgggctccatcatccactctttcttttttttacccaaccgctactggct

SEQ ID NO: 12375 - DNA, 253 bp, Zea mays
  Clone ID: MRT4577_111282C.1
cggcaagcaacatagaaagtcgaatccattaccaccaattgcgctacaatggcgatcaggatacatatcgtccttatgctgattgctcttactacatgtgttgctaacgcgtcattgaaaactaaatgctcacaagctcctactactggccttgttactccatacttatcatcaattgtagcttccatgtgcgaaaacgaagctatacagccctatatgctagacctggccatcgctgacagcaacatactac

SEQ ID NO: 12376 - DNA, 474 bp, Zea mays
  Clone ID: MRT4577_111283C.1
ctccggcctcttccacggccgcctccgccgccgccgccgaccaccatagcaacagatatttcggagctcgcgccttacgcgcatggtttgctcgacgtgcactgtaactaatcgactataagcgtggtggcgattgacgagatgatgccggtggaggaggcggcggcggatgactggtcggagtgcgcgttctcgctgacctgcgaggaagactgcgccgacctcggcgacggcgagctattcccgctctacagtgccggcgacgtggaggaagatgagtacttggagcagctggtgttcaaggagaccagcttctgctcctcctccgactcagctgccgactgcgacggcgatgaagaaggagacgaagaatactcttcgctcacctcagaggagtggttccgccaagctcgcctcgccgccgtcaagtggattcttgagacccgcgggtgcttcggcttcggccaccggacg

SEQ ID NO: 12377 - DNA, 709 bp, Zea mays
  Clone ID: MRT4577_111284C.1
ggccggccgggggaatcgaaaacccaccgcaccctttcatagcctgcctgtccactgttggcttggtgacttcctccgctccgctccgctcccctccgctcccgaacggtcgatctttgcatggcagcagcagctggctccaaggggcgggcgatcgctggaagcttcgtcagccgcgtcctcgccggcaaggccgcctcgccgaggaacacgctgatgcgcgttctgctggtacgcctactttgtctgcttgcgactgcgcgcgtgcgatatacagctgtgtgtcccggccgatcagagacccccttttagataatgggatagagtgttcctggtctacatcacgaagatgacggcctgtcacgcaaacacaagaccaacaaatccaactcaaatagccacaagcggcgatacaaaccccaaacgcagttgggtggacagcgaaaagtaaaaacaaagctcacaaagcaatcctattactaaactgccacccatgaaaagcgaagatctgcatcaccgtcgtctcaagcttcctgcaggcctccctgatgatcttggcgtcttcctcatgcctttgaagttgcgtccagaaacgacaccagtaggttcctctgtaaagtacctgcatgtaagttttgatcggacttttattaaaaaccacatcattcctacttaaaaaaaagaaaaaaaaaaaaaaaaagcggccctc

SEQ ID NO: 12378 - DNA, 343 bp, Zea mays
  Clone ID: MRT4577_111285C.1
ctcttactcgccttccactcccagccaaaaaccctagtcgctcatgtgtccggccaaaaccctacgccggcgccggcgccgccgtcggccgtacctagtcgccgcgggtcggcggcgcgtacatggacgcacgctgataagacactagctggtctgtcccgaatactgggcgtgtgtatggcgctctaggacgcggcggccggataaaaacgctgcagacaggtgatctattattgctgctctgtgattctgacgcgcgttagcagtgactatggaggagccgaatgcgggcgccgccagcacggctgccggggaggtggcggatccggctggcgacaccgga

SEQ ID NO: 12379 - DNA, 1625 bp, Zea mays
  Clone ID: MRT4577_111286C.1
gattgcctcctcgagccgggccgggacacaactacatgtttctttaccctaacggcctaacctttctgctctagcgaaggcacagccgccgctgtttcttcatcttccttgcagcgccggcgctccatcttactctccctcccttactagcgcttgacacgcaggtgacggcggcagcgacggcgctcagactcgggcttttagtgacggcatcagcggtttcccctcccgcctcttgccagtcccatcgcgccctcgcctcgggtcctctgcacaccgtccagtgaccttgcgtgatggactggataaagttttgcagcgattttaccgcaagtgatgggaaacagcatgcattgcttgataatcttaatcaggaattgtcccagaagtctgtactattgggtgatggttttaaactgtcagctgctgataatgatgtgtttgcaactgttcatccttttgtgatccgtgttagtgacagcgagttgcagaaatatccacatgtactgcggtggatggactacattcagaacactgttggtgctggtacaactttgcaaaagataaatgtgaccaagtctgactttgatccaccttctcatccaaggaaagctgataaaaaagatgctgaatcaagttcaaagaaagccatttccgtacagaagactgctgacaagtcaaatggaagtgctgactcaaagaaatccacaagagagcctcctgaaaataaggagaatcctactgctgcggggaacagcaaaacctctggggagaaaaagaaagtgcaagagaagtcagcaggaaaaacaacagagaaagctccagagaaaattgcagacaaggaatcagagtgcgatatcagtatcctgaatatacaggttggccttatccgtaaagcatggaagcatccatctgctgacagccttttagttgaggagatagatttgggagatggtaatgtgcgtcaagttgttagtggtcttgcaaagtattgcagcccagatgatcttactaatcggcatgttgtcttgatcacgaatgtgaagcctggaaagctgcgagatgtaatgtctgctggattggtcctttgtgcttcaactgaagatcatgctgctgtggagcctttgattcctccagaaggagccaagattggagaacgcatttcatttgctgggtttgatgggaagcctgaagatgttctaaatccaaagaaaaagcagctggacaagattaccccgcatcttcgtaccgacgagaatggaattgcaatgttcaaaggtgttccctttactacatcagctggcccatgtagatcttcgattcgcaacggaaatgttaagtgagcagctcattagacatggttgcatagattgacattaaacttatgcagggtgtctgtgtaccattttgtcatacatcatgttttgcccatatttagcgttgcaaaatttgaacagagttacactatctgtaagcaattttctactaatggttggcccagagtttgcttttgagtatgctatcacagacaaatcaaatatccttaagtctacacaggtgtggtcctgtgttgagctcatggtatcgtgtagaataatgccgttcagttctgacgcacagggttt

SEQ ID NO: 12380 - DNA, 206 bp, Zea mays
  Clone ID: MRT4577_111287C.1
tgcatcgccaacacagggggggggacccgttgcggtgccacggtcagcaccgagggcaccggcgcccccgcctccgtcgtcggcgccggggactggtacaaccaggagcttgacctcaccctgcaatagcggatgctctgagtgcagcgcaagtacatgatctacaactactgggccgtccccaggcgctaccagcagggcctttt

SEQ ID NO: 12381 - DNA, 1023 bp, Zea mays
  Clone ID: MRT4577_111288C.1
cccaactacatgtttctttaccctaacggcctaacctttctgctctagcgaaggacagccgccgctgtttcttcatcttcctcgcagcgccggcgctccatcttactctccctcccttactagcgcttggcacgcaggtgacggctgcagcgacggcgttcaggctcgggctctcagtgacggcatcagcggcttcccctcccgcctcttgccagtcctatcgcgccctcgcctcgggtcctctgcacaccgtccagtgaccttgcgtgcgtcagtgcgtgcctccatctttcctcccgcctccggtggatcgtcgacggcgctcagccccggcggcagagccgcgtgccgcggcctgcgagcagcgggagccagccagcagctgctgctcccgcgcgaagcgtgcgcttagcgccgccttttggaaccctgatgcaatatgtaacccatgtctttattttcttcctttataggtgatggactggataaagttttgcagcgattttaccgcaagtgatgggaaacagcatgcattgcttgataatcttaatcaggaattgtcccagaagtctgtactattgggtgatggttttaaactgtcagctgctgataatgatgtgtttgcaactgttcatccttttgtgatccgtgttagtgacagcgagttgcagaaatatccacatgtactgcggtggatggactacattcagaacactgttggtgctggtacaactttgcaaaagataaatgtgaccaagtctgactttgatccaccttctcatccaaggaaagctgataaaaaagatgcttggtgatagaccatagaagattgtttctctgtttgacaagccacttcgatgaattgaacatatcttctaccagacaaaagcagggaaagctgttgtttaccatgttttttttgttgtaactacctttatgtaatttcctggatcttgcgaagcatggattttccctacaataatgcaaccggttgcactggcaactattcctgatgctacggat

SEQ ID NO: 12382 - DNA, 1353 bp, Zea mays
  unsure (1)..(1353): unsure at all n locations
  Clone ID: MRT4577_111289C.1
gggagaaaaagaaagtgcaagagaagtcagcaggaaaaccaacagagaaagctccagaganaattgcagacaaggaatcagagtgcgatatcagtatcctgaatatacaggttggccttatccgtagagcatggaagcatccatctgctgacagccttttagttgaggagatagatttgggagatggtaatgtgcgtcaagttgttagtggtcttgcaaagtattgcagcccagatgatcttactaatcggcatgttgtcttgatcacgaatgtgaagcctggaaagctgcgagatgtaatgtctgctggattggtcctttgtgcttcaactgaagatcatgctgctgtggagcctttgattcctccagaaggagccaagattggagaacgcacttcatttgctgggtcagtatataatcaatttaaaggcccatttgcgcagttagcatttatattctgtctagctgtcctgatttagtgatttatactcatgaatatgtcagccaagctgtaagaaacctaatttctcataagaacaaagtgtatagaacttacaagtgtaatatgaatgaactcatgcatgagttttcttctgccatattaggaatcgaatattgcaagtcagcttgatctacattttgtttgggctcatggtatcttgtagaataattctgttcatttctgaaataaagggtttatcgctcttttgaattttatttcagttctctcgagttatagtttgtattgccctgcattttaacaacgatcttgtttaccagttatgttctggttgttttttattacatcccacgcgtccggtaggtttgatgggaagcctgaagatgttctaaatccaaagaaaaagcagctggacaagattaccccggtacacttcagtggcctgtttgatatgatgtaacatcattgtcatggaatgttcttggctaacataacatactcaattatcagatcctgaattgaaacaccatgtttgtttttatttgatgaatgatgtcgcttattgctatactgtgcaaagtttaccactatggcgctaaccgcgttgtttatgcatccagcatcttcgtaccgacgagaatggaattgcaatgttcaaaggtgttccctttactacatcagctggcccatgtagatcttcgattcacaacggaaatgttaagtgagcagctcattagacatggttgcatagattgacatcaaacttatgcaggctgtttgtgtaccattttgtcatacatcatgttttgcccatatttagcgttgcaaaatttgaacagagttacactatctgtaagcaattttctactaatggttggcccagagtttgcttt

SEQ ID NO: 12383 - DNA, 1536 bp, Zea mays
  Clone ID: MRT4577_11128C.1
accgacgctagaatgcagctccccatagaatgccggccgggaatccaagaacgggtcaacttttccttaaggttatccacacaagtgtatgggcggggcaaaagcgtcttgggcagctggccaagtggaaaaccgctgaggaggttgctgcattggttcgatctcttcctgtagaagagcagccaaagcaaattattgtgacaaggaagggcatgttggatcccttggaggtccatctacttgacttccctaacattgttattaagggcagcgagctgcagcttccttttccaggcttgcttgaagattgagaagtttggtgatcttatactgaaggcaactgaaccacagatggttctttataatatatatgatgattggttgaaaagtatatcatcatacacagcattctcccgcattgtgcttattctacgtgcacttcatgtgaataatgagaaggcaaagatgttgctcaaacctgacaaaacaattgttactgaaccacatcatatatggccgtctctgaatgatgaacagtggttgaaggttgagtgtgcactaagggacctcatcctttctgattatgcaaagaaaaacaatggtaatacttctgcactgacacaatctgaaatgcgagatatcattcttggcgctgaaattgctccaccatcacagcagaggcaacagattgctgaaattgcagtcaagagagactactcagttaactgctgtaaccacaaggacgacaaatgtgcacggagatgaactcattatcacaaccacaagtccatatgagcaacaagcattcgcatcgaagactgattggcgtgtcagagaaatctctgccacaaacttgtatctacgtgtaaatcacatttatgtcaatcctgatgatataaaggttagtatagtgatagcctctctccaactccaataagttgacacagcaaaagaaatgttaaatggttaccaactggcattcgttctaattgcaggaaactggctacaatgtcagggcttggtggctgagtccgcagtggatgccagcagcgttgtggagattcatggcgagctcgagctcggtgccctcacctcttcactcgagcaccctagcggcgcgctcggcgaactcaagcatgcgaggtggcgccaccctcgcccaataccatggcttgaggaggaagggccccagatccgggttgtggagtgagtcgtcggtgtcagtggggaaggcagcgtcacgaacacaatgtccacgttgagcttgacctcctccttcgctcctccctgtctcccccacccaccagctccctccccgtcgtgatgggtccccggcgaggtgaggcaaccagcgatgtggggcggtgctgtttggggaaggagagtgcgggcgcggcagggggagcacgtggtgccgtgctgtttggggaaggggccgcggcgacagggggctgcgccggcgcggggaaaggaagcgggcaacacggcccttacaagtgtagagttgcagggtgagggaggtcgcctaaatccccg

SEQ ID NO: 12384 - DNA, 599 bp, Zea mays
  Clone ID: MRT4577_111290C.1
ggccgctttttattgttttgtttgggatggagaggtctttttgcaaacatagcaaaggttcagctcgcctttaggtatatctggtgcctcattcacatgtccgaccacacgtacgatgtcatgttacgcatgcattcgttgtccaaaattattagagcctatgcgcatcctcttgcatacaattgcactccataacaatcagatagcccctacaactgtgatcacatgcctgatcttatgttaatctggctcacctgcattcggatcttcagatgattgtaacctctacggagccacctatgtaagtcgtggtcctcaacggtcttgagtacgaactcgacaaaggattggtggttcaagagcatgtaccggcgtatagagctttacctactgcaaccaacattttgacatcgaggatgacatctatgcaaaaacagcagatgatgtcttcatgatccacaagcttgagcgaggtgcagtaatacgtcaacgatatgacgctctcctttatcattggcttgacaatcttgccactgggcacaaatggatgatcagatcttgcactccacaatggtatttctatatgaactccaaacctg

SEQ ID NO: 12385 - DNA, 624 bp, Zea mays
  unsure (1)..(624): unsure at all n locations
  Clone ID: MRT4577_111291C.1
tttaaagtaccttttgtattagnggaagtataattatgatataaaatatatattctcaaaaaaaaaaatgagtattataaatttaataaaatttgtttaaataaatttttataagtttataaaattaaatgtgagtaaatactacagagacaatggcgattaatactaagtttaagtggtattgctttattaaaaaaagtgaaaattatatgtgtaaattaaggataatcttaatttatttttaataaaattatttttttttattgagagaagtagtattgttaattatatattatattaaaaatatattttagaataaattatttaataaaattttataaaatattgtatttaaagtatttaaaaaaatttatttattagtataaaaatttctataaaatttatgaattcgacaaatttagatttctgctgtttaacaaaaacattttttttaaaacttattaaaaataatttctgctcaatgataaatatttaattgatagggaatattaactttactaaggtatcgtaataaggctttaattgggctctaagagaatgataaaaagatatctaattttataattntaatattagaactacattaaaaaatgaaaaagtttt

SEQ ID NO: 12386 - DNA, 498 bp, Zea mays
  Clone ID: MRT4577_111292C.1
gggtttggtttttttttttttttttttttttttttttttttttttttttttttttttttttttttttttttttttttttttttttttttttttttttttttttttttttttttttttttttttttttttttttttttttttcgccactgagaagggggggggggaacctttattaatttctttttaaaaaaaaaaaaaacttcctttttaaactgagaagaaaatttgcccattaaggaccgttcccccccccctttaaaccccaaaacaccccggctttcaaaaaattcaagaaattttcggacaagttccacatggaaaaaaacccaaaaaaaattttgctaattttattccaaagttgggcccctccaaaccggaaggggcaaaggcaaaattgccaaaaaaccaaaaaaacccccacttgggtgacaacctaaggggaacagcccaccccaaaattgccagggaaaccaaaaacataaatatttttatgaaaaa

SEQ ID NO: 12387 - DNA, 237 bp, Zea mays
  Clone ID: MRT4577_111293C.1
gacaagcttttttttttttttttttttttttttttttttttttggtttttttttttttttttttttttttccccgggcaacagaatatgatgtatttatcaacccttcaccagggcctgcggcttgcccccaaaaaaatggggggggggggggggacatgttacagtaaacaggaccgaacacccaactgcaacccacctgccttcagtaattttggtatcccgccattatgtcccc

SEQ ID NO: 12388 - DNA, 1480 bp, Zea mays
  Clone ID: MRT4577_111294C.1
ggagcgcgaggaggcgcggtggctccgcgaggagcagcgctggctgcgggaggagcagcggtggctccgcgaggagtcgcgctggcgcgccgagcgcgaggccctcctcgccgaggtcgccgcgctgcggctccgcctccgcgcgctcgagggcgttcgccctgaccacctcgcggtcgccgtcgacgccgtggtctcgcctgcgcccctggccgcggtgcccgcgccgcagcccaggccggcgctcgtcgaggaggcagccgcggtcgaggtcgaggtgaggaaggaggtggtggtggtccaagagaaggaggtggcgcccaaggccgaggcggcggggagcggcgcagctggtgccagcgagagcaggaggacgctgaggacgggggccgagggcgaggacgtgcgcgcgatgcaggaagctttgcagaagctcggtttttactcaggcgaggaagacatggagtactccagtttctcgtctggcaccgagcgagctgtcaagacatggcaggcaacggtaggagcttcagagaacggggtgatgacatcggagctgcttgagtggctattctcggggaagaccggggaagacgtgaaaaccaaagatggcacaaacggagcagcggttcctgctgtaacagggatcgcggaggtacgcaaaactacggttgcagaaaacggtgtctcgggagttggggtctccgagcacagagtgtttcttctcggtgaaaacaggtgggaagacccaaccagactgacgcataacaaaaagacagccagcaccggcacagttgcatctactaagacttgcatctcctgtcgaggcgaaggccgcctcatgtgcttagaatgtgatggaacaggtgagccgaacattgaaccgcagttcttggagtgggtcggtgaagatacgaagtgcccatactgtgaaggaattggttccattttgtgtgatgtttgtgatggaaagaaagtaatggcaagttaagtaaggcttagagcaagaattccctgccttgtctgtgttcggttcccatcccaccctggtaagcacgcctaggccaggcatcaacgccagacagttcgatctggggtcggatgcggctgcctagcgtcgctccccaggcgagggttgcagccagacacgctaataatatcagcatgtgtagatgctagcaaaatattcagttttatcacagaactggagaatgcgttcaaatggcagttcgagtggactgctgtcccgcagaaagcggagacataagcaacagtgtaacacttttatggtacaataggagatggaaaaatacgagggaagaagaggattcctttcccaaatcaggccggtaaaattaacatctctattaacatttcatatgttgcaatctcttcccgagagtatgtgataatcaaagctatgttgcggaatggacgaaatgaacagaataatataagtatttggttgaattcacccatc

SEQ ID NO: 12389 - DNA, 352 bp, Zea mays
  unsure (1)..(352): unsure at all n locations
  Clone ID: MRT4577_111295C.1
gtccggtgtggcaaacatcaatttgtagtgctgtcaatatctgttcaatatacgtgcagctcagttctgacttgnaaaaaaaaaaaaaaaaaaaaaaaaaaaaaaaaaaaaaaaaaaaaaaaaaaaaaaaaaaaaaaaaaaaaaaaaaaaaaaaaaaaaaaaaaaaaaaaaaaaaaaaaaaaaaaggggggggccgttttaaaaaatcaaagtttacttacgcgtgaatgcaaagaaaaaatttttttataggggcaccaaaattaaattaactggccggggtttaaaaacgtgggaactggaaaaaccttggcgttaccaaaataaatcgctttgaagaaaatcccctttt

SEQ ID NO: 12390 - DNA, 318 bp, Zea mays
  unsure (1)..(318): unsure at all n locations
  Clone ID: MRT4577_111296C.1
nnnnnnnnnnnnnnnnnacaagaccnggggcnggggcncannganaagacacaaacnnagcaaggcananacanggancaaagangcacgcnganggaaacacacgggaaaaggggggnacacacacancggccaaacanaggacnacacacaanacacacacccnananaaaaagagagcncacncnnacacaaacagnannacnnancagncanagccaaaagcnanaganggcanccacgangangancggnnccacnangcgccncncagnncccnnccacgacgcccgngccaaaaggnggnggaagagacga

SEQ ID NO: 12391 - DNA, 139 bp, Zea mays
  Clone ID: MRT4577_111297C.1
aactctcttgcttattctcaacagcatcatctaccatacacacagcttcctgctgcgtatttcaacaattctcttacattcaaccaaccggcactatttatctctactccttatttacagcaccaacatctactactat

SEQ ID NO: 12392 - DNA, 565 bp, Zea mays
  unsure (1)..(565): unsure at all n locations
  Clone ID: MRT4577_111298C.1
ggcggtctatctccacacacacactgcaccgccgccgaccaaccaccgtggtgggcttgaagctgaaggcgctggagctgagtcctcctcccttatttacacgcgcacactccacttcatcaccggatcaccagtcagcctacagctcgtcacatctctctctccgcccggccggcctctagactcactctagccatatggccacggcgcacggcagcaggctcatcttcctcttcgaggccacgctcttctcggcgctgctgctcgtcccggcacgccctgcttccgccgcagacggccgcgcgtacccggccggcgactgcccctacccgtgcctgccgccgccccccgtcaccgccaactgcccgccgcctccgccggctgcggcgtcgtactcgtacccgccaccgccgggggcttacattccctacttccagcctgcggcgggtggcggtggtggcgcggtagtggggnggggtacgnngnntacccggngccgccgccgcccaaccccatcctgccgtggtacccatggtactacaagacgccgccgtcgtccgcggtc

SEQ ID NO: 12393 - DNA, 588 bp, Zea mays
  Clone ID: MRT4577_111299C.1
tgggaccctcgaggccggccgggccggggagagtgagagagagagggggagagaaaggttaaggaatccgagctaaggcgccgtttcttctcctcctgcttttttcttctcggcaccgtcactggagggagaggattcacgggacgaggcgacgcggaagggatttcgtcgcttgtgtgggcggcgcgtccgctggttgctttgcttccatggagagggatttcctgggtgcgatcgacagggcgtggaagtgcggcgaggcggcgaaggaggagagccgatcggagccaggtcagtgctagctcctctctcgatgccctgaaagcgtgatttacctaaccgtagtactagtatggcagtagcgactcggcgcgtctaccgcctgatccaccgcggtttgcttgccgcgagcatggaaattattagtcattcgacaagtcagagagattttatttcctctcgtcgtctcgtggccgctggtgcccgcgcgtcagatttggcctgctccgctccgcctccgcagtgtgaatttctgagagataggtttctgtgctgcagacagcccggcggcgacgcgttggcagtttg

SEQ ID NO: 12394 - DNA, 1344 bp, Zea mays
  unsure (1)..(1344): unsure at all n locations
  Clone ID: MRT4577_11129C.1
gcggccccggcggcagcctcgtcgcccgccgcgtccatgcccggcggggtgcgcctttcnttcgaccgacgggagcatggctctggcgctggcccccatctcttccgcctcggccggcggcggcggcggcgccgcagcccccgggcagcagcagcagcacggcgggttctccatcggtagccccccgtccgaccccagcgccaagcctcgaggccggccccccggctccggcaagaagaagcagttcgaagccttgggctcctggggcatcgccttcacccctcacatcctcaccgtcaaggccggcgaggatgttgcttcaaaaataatgacattctcacagcaaggccctcgcacagtctgcatcctttccgcgaatggtgcaattagtaatgttacacttcggcagccagccacatctggtggactagttacttatgaggggcgctttgagataatctcgctatctggttctttcctgcttgcggaggatggtgatactcgcagcaggactggtggcttgagtgtcgcacttgcaggatctgatggccgagttcttggagggtgtgttgctggaatgcttatggctgcaactcctgttcaggttgtggtggctagctttatcgcagagggaaagaaatcaaagccagcggaagcacggaaggttgaaccgatggctgctcctccaccgcagatggctacctttgttccacctccgctggccaccagccctccatcggagggaacatccagcgcatcatctgatgactctggcagcccaatccaccacagtgcgatgccgttcagcaactccagccagcatcaacaccctcaccagcaccagcaccagcacatgccgcctgcctacgcatccgggggttggtccctctcagtgcaccagcagaataggcatgattctgacatgaagatgatgtcgaactaacagtgctcaacctaggcgccccatttgttggttgggctggagaggaaggaagctgctgatggttggtactgccgctatgaaatggtcttcttgcgccgtctgtcctgatcagtgaccccgtgttgctctggtcagtgacggtgttctgctatagctaagatagctaggaaggattagagtttatgggctcacttgctgttgttcccctgggtaagattaatttaatttgaattagccgctgttgtaatgctgtagccagtgtcctaaagtcgcttatcagacagtccctgacgcgagctgtgatggttgcctgatgagatcttcacctcctagtcctaggctagttaaaatatcatttctctagtactatgaatcatgaatttacttggatgcttcggttt

SEQ ID NO: 12395 - DNA, 320 bp, Zea mays
  Clone ID: MRT4577_1112C.1
attcggctcgagggccatcctgctgtttcctagaactaaagcatgtaattcggggctcaaaagtatagaacaaaggctcgtccagatccacagtcatgccaaccacctggtgacttgacgagagagcgagatggcaccaatcagcactgtcgaagcttggatggataactagctaactaacaaggtggccagtgcatacgatgaacaagcaagatcaaatgagatcccgttcttggtgaccaacttggccctgatcaggggcgttgctacccaacctatatcgatagcaaagcgatgagtgccgctcgcgaggggatgag

SEQ ID NO: 12396 - DNA, 1120 bp, Zea mays
  Clone ID: MRT4577_111300C.1
cggacgcacgagcacaaagagggacttgctcgagggtttagctagcttggaagccctccgcaaactcccatggcgtgcctcctcgtgctcgtcatcgctgccacagtactaacgggtccaccgggaaaactgacgcacgccgctcggacgtcgccggcggaggccttctggcatgcggccctccccggcgctcccatgcccgaggccatccgcgagctcttgcgcccagctggtgctgccgggaccaacgctccagacgccgctaggtccaggcaccacgacgccgatccgccgccgatgaacttcaagtacgaagactacaggtcctcgcgtcggaacgaagccaccgccacctccgccgaggccctggaccgcgctggcggcgccgggaacgcggccgcgtcgccggcggtgttcttcctcgaggaggcagtgcgcgtcgggggtgtcctgcccttccgtggtatggtcccgcggggcaccgccagcgtggcagtggcctcgcctccgatgcggctgtacaaggtccgcgccgtgcgggccatcgacgggcgcaggttcatggtgtgccgccgcgaccgcgaggacggccccgacggcgacgccgtgtacgggtgccgcgcgacgggccccgcgagggcgtacgctgtgggcgtggtcggcgagcgcggggagacggtggccgcgaccgtcgtgtgccgcaccgacacgtcccggtggaaccgggtgcgcgccgcgttcaggctgctcgacgtgaagcccggaggcgcggcggtctgccacgcggcgctcggcgcgcaggtaatcccagtcaagaacgacagtggctcctccttggtgtgaaggaaggctccgacgtgttccgtttgtcgtcgtcgtcctggacgttgtgatgcaacgtttctagtagtagctatgtatgctgtatgcatgtggtgaagcaagtgctcgtcggtgtgtagtgttcgctcttctgatccattgtctgtgctctgtactgtagtgatcagcgtcaaaataaagaaatgcctgtccttgtttagaattaaatgatcactctgtcttttggtactctgtactgtagtgatcagcgtcaaaataaacaaggacaggctttctt

SEQ ID NO: 12397 - DNA, 292 bp, Zea mays
  Clone ID: MRT4577_111301C.1
cgtaagctcggaattcggctcgagggaggcgcggcggtctgccacgcggcgctcggcgcgcaggtaatcccagtcaagaacgacagtggctcctccttggtgtgaaggaaggctcccacgtgttccgtttgtcgtcgtcgtcgtgatgcaacgtttctagtagtagctatgtatgcatgtggtgaagcaagtgctcgtcggtgtgtagtgttcgctcttctgatccattgtctgtgctctgtactgtagtgatcagcgtcaaaataaagaaatgcatgtccttgtttaaaat

SEQ ID NO: 12398 - DNA, 362 bp, Zea mays
  Clone ID: MRT4577_111302C.1
tgatgtagagagtgtttgcctgctctcttttcttgggaggtagttaaaccaagggtggggtttatctggactggtgggaagaaattgggaacctctcgtctaccaaattctgctccattcttaatttgagggcaaaagactaaccttatgctctgcggcttctgcacgtgtgtacctcatgtctgatacttctggcctctctcatggtccttaccttggaacaacaactttctgttccttggcttctctgctcatcttggtaattaaggcatctgtttatagtacagcccaagacattgggcctgaacttctcccgtcattaccagatcacaaggtcaatctcaagaatctattgggaatgc

SEQ ID NO: 12399 - DNA, 703 bp, Zea mays
  Clone ID: MRT4577_111303C.1
cattgggtacctcgaggccggccgggaacgcctcccaccgcctctgctctcccccacctcccggtccggcagcagagagcggagatgcagaaagatcgagatccggaggacgcgagtgggagcgccaccaccaacgactgcgacaatgtcgtgcacggggacggccccggggtggtctgaccccctccacgacgctgctcaaggacgagatcgacatcgtgatcccgacgatccgcaaccttcgacttcctgatagatcgtggcggcccttcttccagacctaccacctcatcatcgcgaaggacgtcgagccgaccatgaccatctaggtgtgcgagggcttcgactacgaactctacaaccgcaacgacatcaaccgcatcctcgggcccaaggcctcctgcatctccttctaagactccgcctgccgctgcttcggttacatgtcctcgcagaataagtacatctacaccatctacgacgactgcttcgttggccaggacccatctgggaaggatatcactgctcttgcagcagcacatcacgaacctcctcagaccatccaccacgttcttcttctacaccctgtactacccctaccgtgagggtgctgactttgcgcgtgcataccccttctcactcagggagggtgtcacaccgccttctcgcacggctgtggctgaacatccctgactatgatgct

SEQ ID NO: 12400 - DNA, 1609 bp, Zea mays
  Clone ID: MRT4577_111304C.1
attcgcatgcatcatcatttcctcccacctaaatgtacagggcccacattaatctacgtctttcataggacaccgcaccaaactcccaactcgcaatgcacgtatgaagaaccctagcaagatcattgctgtatgcagcttctgctcatgtgctcggacaacgatcccaaccgccgaagctagctacgcagaggagcacgcacccaccactagtataaagccgcgccaccgccccgggtcgcgccgcactgcatcagagcacgaccacactacccacccacctccactactgaccgattcccagaaagctcgatctagcgcgcgcggctgcagagtgcagacgacgacgtacaccatggcgcggcggtccctggccctgctgctcgcgtcgtcgctcgccctcatgtcggccgccgtcgcatcggcggactcgtggctctacgacaagttcaacacggacggcaccgtccgcacccagtacgacgcgtcggggcaggaggtggcgatgctcagcctggaccgcagctccggcgccggcttcaactccaaggagcagtacctgtacggcgagttcagcgtccagatgaagctcatccccggcaactccgccggcaccgtctcgtgcttctacctctcgtcgggcgacggcgacgggcacgacgagatcgacatggagttcatgggcaacgcgagcgggcagccggtggtgctgaacacgaacgtgtgggccagcggcgacggcaagaaggagcaccagttcgacctctggttcgacccctccgccgactaccacacctacaccatcatctggaacccgaccaacatcctgttcaaggtggacggcgacgtgatccggtgcttcaagcgctacgccgacctgccgtacccgaacgcgaggcccatggcgctgcacgccacgctgtgggacggcagctactgggccaccgagaagggcaaggtgccggtggactggtccgccgcgcccttcgtcgtctcctaccggggctactccgccaacgcctgcgtcagcggcggggcctgcggcggcggcggcgacgacgggtggatgagcaagcagcccgacgacgccgagtggggcaccatccggtgggccgagagcaactacatgcgctacaactactgcgacgacggctggcggttcccccagggcctcccgcccgagtgcagccgcagctaagctagctgattccgccggttttcgtacgctcggcggcgtccgctgacgacacacgccttgttggtttgttcttgctggacatcatacatctctatatgcatgattcttgttctgttattgttaaatcgtgattacaatacttgtaattgtaaagaagtgtgtgggcacgggagtatatcactgtagttttaatttgcttgtaaagaaaagaagggtttttttacttgtgacgcgggagctagcgactgcgtcctgttcgcgtaaaatgtttgcaatggatgatgatgcatgtacgcagcaacagctagcagtgtactacttccacatattattgcgttcaatcaatccagatacacatttaaagttaaaaaaaaaaaaaaaaaggggggccgctcgcgatctagaactagt

SEQ ID NO: 12401 - DNA, 1013 bp, Zea mays
  unsure (1)..(1013): unsure at all n locations
  Clone ID: MRT4577_111305C.1
ngactggggcgcctagcttcttactagttttttttccttgcgcaaagcttgcacttgccgagagagagggagagagaaatccagagataaaggcgcttcattcattccctctcctgctttctctctccaacccatccgtcctctctctccacacataaaaaccaacgaagcgggcgagtgatcaggcagaggcagcaggcaggaaataaatttgaagaaagctagacctctgatcagcaggagctcatgggcgccatgatggcctccataaccagcgagctcctcttcttccttcccttcatcctgctggccctcctcgccttgtacaccaccaccgtcgccaaatgccacggcacccaccagtggcgccgtcagaagaagaagcggcccaacctgcccccgggcgcccgcggatggcccttggtcggcgagactttcggctacctccgcgcccacccggccacctccgtgggccgcttcatggagcggcatgtcgcacggtacgggaagatataccggtcgagcctgttcggggagcggacggtggtgtcggcggacgcggggctgaaccgctacatcctgcagaacgaggggcggctgttcgagtgcagctacccgcgcagcatcggcggcatcctgggcaagtggtccatgctggtgctcgtgggcgacgcgcaccgcgagatgcgcgctatctcgctcaacttcctcagctccgtccgcctccgcgccgtgctgctcccccgaggtggagcgccacaccctgctggtcctccgctcctggccgccctccgacggcaccttctccgcccagcacgaaagctaagaagttcacgtttaacctgatggcgaagaacataatgagcatggaccccggcgaggaggagacggagcggctgcggctggagtacatcaccttcatgaagggcgtcgtgtcagcgccgctcaacttcccgggcacggcctactggaaggcgctcaagtcacgcgcgtccatacttggagtgatagag

SEQ ID NO: 12402 - DNA, 490 bp, Zea mays
  Clone ID: MRT4577_111306C.1
aatgccttgttttgctaggctgttatagttatggccttattactgcaaaagaaagacctaccaggccaggagcaataggtgctttatgttttaccccgggatactgcatggtctcaataaacaccggatggctaccaccatacgggggtccggtccccacccaagacatggagagcccaaccaacggcccccaaaggtgttacgcaatctgccaatgacccacactcagaaagccagggtgggactaccaaaaacccatttgacatgggcttatcattggggtcgatgctcatgcaacatgtcatgcaggagacgaaccgttttcacaaaaaccgacaggttctctatctttcaaggatcattctaccaacaggaaaaacaatcactccatttatgctgtgtggatgaaaagcaatcccgacacacccggactactgcataatacctcccaccataggtggggctagctgggagcaagagccgacatgat

SEQ ID NO: 12403 - DNA, 149 bp, Zea mays
  Clone ID: MRT4577_111307C.1
acccgtccggtccacatcctgccaagcaaaccatcaggatgtttgcctggtttcttctaccgattgggggtgatcttggggaggagggcaccgctctcccacaactgatgcccactcatataagccttgccggaggctcgcagcggacg

SEQ ID NO: 12404 - DNA, 710 bp, Zea mays
  Clone ID: MRT4577_111308C.1
tacctcgaagccggccgggcataatctctcatacacatcactcgtcaacagctctcagacgaattcgtgcatcgaatcctctatcgccgcacccatgtcccgcacaaagcgcaaccgatgaagacgaaccggcgcgaggccccccgcaaccacctgggcactaacgctgcgcgcaagccggacccgcgccccgtcggcgcgaagaagccccaccgcttccgacccttcactgtcgcgctccgcgagatccgcaaggaccacaacaggagtgacatgatcatcttcaagctacccttcaagcgtctcgatggcgagattctaaagaactgtcaagatatgatctgagggcccagccactctctttcgtagaagaagctacaggaggccgtcgaagaggacctggagggactcttctacgtacaccagccttagtctcatacacgccacgattgtcactatcatgaccaaggacatccacatagcgcgccggatctggatagagaggcatagagcgcccgtggtgcagctctgcttggtagtggtactacaagtatatggggggtatcgttacctgactccgtgatcctggatgagaaattgctctagatgccttgacttcagtgcgatggactgcgatagctcttttgtgaagtcatcaatggactagttcttgcagaaaaacgattgaataaaagaaaaaagcggcccct

SEQ ID NO: 12405 - DNA, 2032 bp, Zea mays
  Clone ID: MRT4577_111309C.1
ggtacccccggtgggtccccggggaatcccgtccgctcttcgtctagtatggcagtccactccccctgcagtcttggacgcagggaatacttgaaaccccggctcccgatggatcatggatctcctctctgctgcgtacggtgctacctctgacgatgaggatgccgcggaccgacccttctccatgccggttgccaccaggtccgcctccttctctccacctcccatgaagccgccgcggtgggaatctcacccatacctccctccaacccactgcttcccgcaaccacctctgcccgacgcagcgctgccactggcatctccatccagcggcagatacatttccaagagggagcgcgctctcctggcctcatcaggggcacatattgaatccggatcatccctgcctctgacgagagtggattttgaatctgcagttggctctatcacctatccaaatctacgagctgacattttgcattctttgcgatgccaaccgaaacctggaccaagcacaagtttccctttgaggctctcagtttgtttgaagggtcacactaaagcaatcaattgtgtagattggtcaccgactcatgggcatcttcttgcttctgctggaatggatcacacggttcatgtatggaatgtatgggacaaagggaataccactgctcgtgttttgaaacatcacactgctgctgtaaaggatgtaaggtggtcacttcataggccctttttactttctggagggcttgattgttccttacagctagttgatgttgttgagggaaaagtaatggaagtattcaaggaggatcaagctgtggaggttatcaagttcaatccaagcaaccccgatctcttcctatctggtgggtccaagggttcccttaaactctgggatattcgatgtggtctggtaacaaaagaatttcagagaagccttggaaccatccttgacattgacttcagtgctgatggaagacaatttatctcttcaactgacacaaccagaagcaatattagtgagaacactataattgtttgggatgtcctgcgacaagttcctttatctaaccaggtttataccgaagcattcacatgcccgtgtgtaaggtaccacccacgtgaagcatcatttgttgcacagtccaatgggaactacattgctattttttcagcaaggccacccttcaagctgaacaagtacacgcggtttgaaggacatggagtgtggggtttccctgtgaagtgcagcttttcccttggcgggagagaactcgcatctggttcatccgatgggtccatttacttctatgattacaggtcggcaaggcttttgaggaaaatagaagccttcaaagaggcgtgcactgatgtcgcgtaccacccagtaatgcctaatgtgatcgctgcttgtagctgggctggtgaaatatctgtctttgagtgacatgattataatgctgtgtggagaagcatcagcagttcagaaccgctagcatatatatgtgtgtgtgtgtgtttctgtgactcaaacaccagttaatggtcatagcagattccaaaataaaaataatttgctgtatggagttcatcgtctgaatttcagtctcagcctcgcctatgaagagattatttgtggtttcaaacaaagccttgttctttctgttcaaagtagatgaaacatcatagcacattgattgtagtggcaacatggaccgagaagaagataagtgagttgaagaggctgctgagcgagcaaagcgtatagctgactgaactttcaccgccgcctgagccgtatgatcccgaagtcgatccggccatgaaggaagcattagaaacgataaggatcgccaacgaagctgtcaacagactcctaaatgaagctaccgataagatattgaaagaggactgaattcttgtgtactaaaaaatgtaatattcgtgtatgagtcgaacatcgaacgtttgtatgtatattaatgtaatatatttcttttgcgatgcaaaacaccccccccccccc

SEQ ID NO: 12406 - DNA, 2104 bp, Zea mays
  Clone ID: MRT4577_11130C.1
ccgagggtggcgccgcctctcgtgcttgagttctccgagcgcgccgccagggtgctcgagcgaagaggtgagggcaccgagctcgagctcgccatgaatctccacatcgctgctggcatccactgcggactcagccaccaagccctgacattgtagccagtttcttgcaatcagaacgaatgccagttgatacaagtttgtggcagagatttctctgacacgccaatcagtcttcgatgcgaatgcttgttgctcatatggacttgtggttgtgataatgagttcatctccgtgcacatttgtcgtccttgtggttacagcagttaactgagtagtctctcttgactgcaaaacaagcaatctgttgcctctgctgtgatggtggagcaatttcagcgccaagaatgatatctcgcattttagattgtgtcagtgcagaagtattaacattgtttttctttgcataatcagaaaggatgaggtcccttagtgcacactcaaccccatttcgtgccgggctcatgatggccggtaattgggaggaagcaaaacctttactgttaccatggcgcgcacttgtacaattttaatccctcaccagggcttcttacaacaaagaggtagtataatacaggcttaagcaacaggcgaacagatgacacccgtcaagtcaggttacagctacacacactgccgttaaaacagagcagtttctaacaggcgcctacgtgaatgtgtcctccctatcgccttcagcggcctcaccctcctcgatgttgctgaactcgaggaagtgtgttggcctgtggtcctcgtgatagaagtcccggggcatgcccagcttcatgttgtacttcatctgtgggtcgtgcttcactcccatgaagttgaagttccaaggagcgttatccggaaccatgtagaatccaaggaagcggtcgctcagaagcatctggaccttctcgtagtgagttggaaggtatccatgtggattgcttccgttgtccttgttgctgcgtccccactcgtaaccgcttggtgtcagcttgtatgcagtcaacgagcaagatcctggggtgaagctgcatgtcagaatgatgcacttctcaccatcccattgtttgttgttctccagaatcttggcatgtgatgtcaggtcctgtggcgatagctgtggagcttcatttggctgtgtatgcatccatcccaagggttctagatcattaaggaactcgtgctcaggaagatttgctggaagagtcaccatctggtgtgttccatgctgtggagggatggctatacacctaatctctttgacttgaggattatcctgtggactcagcccatacaaaaatccagcaatttgtgtccgcagatctgctatgcatatgaatttcttcaatatgttctttggcataatgtaagtgtagccagtctcctttatatcatcagaattgacataaatgtgatttacacgaagatacaaatttgtggcagagatggctctgacacgccaatcagtcttggatgcgaatgcttgttgctcgtatggacttgtggttgtgataatgagttcatctccatgcacatttgttgtccttgtggttacagcagttaactgagtcgtctctcttgactgtttctcaatttcagcaatctgttgcctctgctgtgatggtggagcaatttcagcaccaaggatgatatctcgcatttcagattgtgtcagtgcagaagtattaacattgtttttctttgcataatcggaaagaatgaggtcccttagtgcacattcaaccttcaaccactgttcatcattcagagttggccatatatgatgtggttcagtaacaattgttttgtcaggtttgagcaacatctttgccttctcattattcacatgaagtgcacgtagaataagcacaatgcgagagaatgctgtgtatgatgagatacttttcaaccaatcatcatatatattataaagaaccatctgtggttcagttgccttcagtatcagatcaccaaacttctcaatcttcaagcaagcctggaaaggaagctgcagctcgctgcctttgataacaatgttagggaagtcaag

SEQ ID NO: 12407 - DNA, 277 bp, Zea mays
  Clone ID: MRT4577_111310C.1
gtctaggccaaatccaggggaccaggcactcgatccgcctgtgcccaggtgcgatgttcctgccccgactggcggtgggatgacgactgtgaggtatcgggcgatggcggatttgcgacgccagcgaacacagatgatgtcaacgacgtcagcccacgaaagtccatgattcgatgagattggggggggggggtgaggtctccccaagggaggagacatcacccctccatgggagggttggcggcgatatttagggagagaagatgaggggcgggga

SEQ ID NO: 12408 - DNA, 270 bp, Zea mays
  Clone ID: MRT4577_111311C.1
caaaattaatgttattagatttgtattaaggaaacacttaatatgattttgcattgcaaaaaaaacgacatcattggagtaatggttggtcaaagtcttgtcccaggaaatgaaataagcctggtaccttcaaacagagggactatagtgaactgagcaagtagaatttgtcatctacataccaacctccactgtgctgattttcctggtttgttaaagcagattgtatgttgtggttggaaaggatgaagtgcatgtgctgattcatac

SEQ ID NO: 12409 - DNA, 452 bp, Zea mays
  Clone ID: MRT4577_111312C.1
cattgggtacctcgaggccggccggaaccccggctcccgatggatcatagatctcctctctgctgcgtacggtgctacctctgacgatgaggatgccgcggaccgacccttctccatgccggttgccaccagcgctgccactggcatctccatccagcggcagatacatttccaagagggagcgcgctctcctggcctcatcaggggcacatattgaatccggatcatccctgcctctgacgagagtggattttgaatctgcagttggctctatcacctatccaaatctacgagctgacattttgcattctttgcgatgccaaccgaaacctggaccaagcacaagtttccctttgaggctctcagtttgtttgaagggtcacactaaagcaatcaattgtgtagattggtcaccgactcatgggcatcttcttgcttctgctggaatggat

SEQ ID NO: 12410 - DNA, 234 bp, Zea mays
  Clone ID: MRT4577_111313C.1
gtcccaccccaaaagaacccatcgacacaaaggttctttttaagggcattggcggtttttacaaccccaccgctactccttcatacatcacatactgcatgataggctggctggtctccccctgtccggctcccaaccccgtgcatgcgctgaccgcgcccaggcacgtgcttggtaaataataattccgtgggcgcccgtgctcccaggtgcaagctaagccttttcaccctt

SEQ ID NO: 12411 - DNA, 469 bp, Zea mays
  Clone ID: MRT4577_111314C.1
tttttttttttttttttttcagacgatgaactccatacagcaaattatttttattttggaatctgctatgaccattaactggtgtttgagtcacagaagatatataatatatatatatatatatatatatatatatatatatatgctagcggttctgaactgctgatgcttctccacacagcattataatcatgtcactcaaagacagatatttcaccagcccagctacaagcagcgatcacattaggcattactgggtggtacgcgacatcagtgcacgccattttgaaggcttctattttcctcaaaagccttgccgacctgtaatcatagaagtaaatggacccatcggatgaaccagatgcgagttctctcccgccaagggaaaagctgcactttacagggaaaccccacactccatgttcttgaaaccgcgtgttcttgttcaatttgaagggtggtcttgttg

SEQ ID NO: 12412 - DNA, 882 bp, Zea mays
  unsure (1)..(882): unsure at all n locations
  Clone ID: MRT4577_111315C.1
ccgagagtcgtcggggtttcctgcttcaacagtgcttggacggaacccggcgctcgtcccccaccccggccggccgcccatagccagccctccgtcacctcttcaccgcaccctcggactgccccaaggcccccgccgccgctccagcgccgcgcagccaccgccgccgccgccgcctctccttagtcgccgccatgacgaccgcgtccacctcgcaggtgcgccagaactaccaccaggactcagaggccgccatcaaccgccagatcaacctggagctctacgcctnctacgtttacctgtccatgtcttactactttgaccgcgatgatgtggctttgaagaactttgccaaatactttcttcaccaatctcatgaggagagggaacatgctgagaaactgatgaagctgcagaaccaacgaggtggccgaatcttccttcaggatatcaagaaaccagactgtgatgactgggagagcgggctgaatgcaatggagtgtgcattacatttggaaaaaaatgtgaatcagtcactactggaactgcacaaactggccactgacaaaaatgacccccatttgtgtgacttcattgagacacattacctgaatgagcaggtgaaagccatcaaagaattgggtgaccacgtgaccaacttgcgcaagatgggagcgcccgaagtctggcttgccggaatatctctttgacaagcacaccctgggagacagtgataatgaaagctaagcctcgggctaatttccccatagccgtggggtgacttccctggtcaccaaggcagtgcatgcatgttggggtttcctttaccttttctataagttgtaccaaaacatccacttaagttctttgatttgtaccatt

SEQ ID NO: 12413 - DNA, 554 bp, Zea mays
  Clone ID: MRT4577_111316C.1
agaggtggcaatttttcttcacgaaacatgaaaagaaggtaaggtgttttttcgccgaaggctcaaaacggtatatacatagattttatgcttcgcaaagaaatatattacattaatatacatacaaacgttcgatgttcgacgcatacacgaatattacatttttttagtacacaagaattcagtcctctttcaatatcttctcggcagcttcatttaggagtctattgacagcttcgtcaacagcttcgttggcgatccttatcgtttctaatgcttccttcatggccggatcggcttcaggatcatacggctcaggcggcggtgaaagttcagttgtagtaaagaacaagttgttaatccgaagctaaatttcagtaaaagtacctataagctttacgcgctcagcagcctctttagctcacttagcttcttcttgggccatgttgccactacaatcaatgtgctatgatgtttcatctactttgaacagaaagaacaaggctttgtttgaaaccaccaataatctcttcataggcgaggctgagactgaa

SEQ ID NO: 12414 - DNA, 152 bp, Zea mays
  Clone ID: MRT4577_111317C.1
tcgtctcaaaatactatctttttaacaaaaacactattacatatcataattacgttggaagtcttttgatcatgtagggaacgggcgcgttgatgatgaccgtggagtggcaaaaatcctgctgccttaatctactggagcatccaggttac

SEQ ID NO: 12415 - DNA, 649 bp, Zea mays
  Clone ID: MRT4577_111318C.1
atgttggccggccaatcccggacaatcatctcaaacaagctcaggggcaagacgtgcattgccagccaccatggcgctccactctgctgcagccgccgccgctctctcggccctcctgatgctctccttctcaggccttacgctctccgacacgacgccgtccacgccggtgtcaccgtcggccgcgtgcaacgccaccactgacccgaccttctgccggtccgtcctcccgccgcgcggcaagggggacctctacaagtacggccgcttctcggtggccgagtccctggcgggcgcgcgcatgttcgcggccctcgtcgaccgctacctcgcgcgccaccggcacctctcctcgagcgccatcggggcgctgcgggactgccagctcatggccgacctcaacgtggacttcctcacggccgccggcgccacgatcaagaccacggacaccctcctggacccgcaagccgacgacgtgcacacgctgctgtcggcgatcctgaccaaccagcagacgtgcttcgacggcctgcaggccgcgtcggggtcgtggtccgaccgcggcggcctcgacgcgcccatcgccaacggcaccaagctgtacaccctctccccgccaaccttcacaagcaaaaaatggaagacaacg

SEQ ID NO: 12416 - DNA, 298 bp, Zea mays
  Clone ID: MRT4577_111319C.1
agattatgctacaaccactcaccaatgtctgtgatgtccgtagttgtacccaaaaataagtcactcgaacatctgcagcaagagaattccttaacatttttgtaataactgctgatcgggtcaagttgctcttttctactatgaacagcataaccacttggattcaaatttcggatcaccaatagtcattgcaagaacatgaccccagcttgaaatggtggaacctgttcagatgcctgaccacgaactcgctcttaacaatggcgctgatgagcttaaacaccttatggcaatcact

SEQ ID NO: 12417 - DNA, 268 bp, Zea mays
  unsure (1)..(268): unsure at all n locations
  Clone ID: MRT4577_11131C.1
cggncgcgtgggcggacgcgtgggcggacgcgtgggtggagagcaagcccgacttcgtcgtccgcgcctcgttcgcggcgacacagcccaggccgcgccaggagcagttgagccggcgccgggcgcccgaccagcagcattacatgggcgtcctgcggtacccgttgtgcaagtgggccgccgagatcctcaacctcattaagggcgttcgcgtttgtctcgacaccttcccctttgcctagtccgttcagcgctgcctactacctcg

SEQ ID NO: 12418 - DNA, 696 bp, Zea mays
  Clone ID: MRT4577_111320C.1
gccggccaggctccggagttcctacggaacatttccatccacgcccgacaccgcgcaccggcatctccatctccatctctatctctgatccgctgcagcccgtcaggcactttctccatcaatccggccgaccggtgcgcgccaggcagcgagcgatccactgtgtgcgcgcgcagcgcagctaccgaattttcgctgcacaaaaccagagggaggagaggggagggtggcggcaaaaagggaacgaaaagaaaggcagggacagaggtgcacggccaacctgcgtggagtgcgtggactccagcacgggcaagcgccaccccgctcgctgccgatcccaatccggctacagcagtggccgccccgcctgcggaggctccctccgaccgctccccccgccctccatggcacgctccatggagcaccgcgccaccagcgacatgctcatcagcccggactgagataagaacgtgcagatctgtcacatatgcaaccgcgaccctggggaatctcaaagatgtcgtcaaggcactgaacaaacggattggccaccataatccacaagttcaacttcttgcgctaactttggtgcaaactgatattagaaactgtgctgatatacttcacatgcatgtcgcatatagagatatactgcatgatatgctgaagatactgaacaaaaactctgatcctcct

SEQ ID NO: 12419 - DNA, 287 bp, Zea mays
  Clone ID: MRT4577_111321C.1
ctcagccatgaggaccatcgccatccttgctgccattctcctggtggccctgcaggcccaggctgagtcactccaggaaagagctgatgaggctacaacccagaagcagtactggggaagacaaccaggaccttgctatctcctttgcaggaaatggactctctgctcttagaacctcaggttctcaggcaagcgccacctgctattgccgaaccggccgttgtgctacccgtagatcactctccgaggtgtatgaaatcagtggccgcctctacagactctgctgt

SEQ ID NO: 12420 - DNA, 776 bp, Zea mays
  Clone ID: MRT4577_111322C.1
ttcctttcccccacaatcgtacgcttccgctcgaagcttccgccatgagcgaggacgaggctgagagctcgagctccggcgcggccgcgagcgaacccaaggatccgagaacgatcgctcgcaaatatcagctggatctttgcaagagggcagtcgatgagaacatcatagtgtatcttggaacgggatgtgggaagacacacattgccgtgttactcatgtatgagcttggtcacctcatccgcaaacccagccgcgaggtctgcgtcttcctcgcaccgaccataccccttgtccgtcagcaagcaatggtgattgcagattccacaaattttaaagttcaacgttactatggaagtggtaaacactctagagatcaccaggcatgggagaaagagatgggagaatatgaggtccttgtaatgacccctcaaatattattgcacaatttgcggcattgtttcatcaggatggacttaattgcactattgatatttgatgaatgtcatcatgcacaagcacaaaaaaggcatccatatgcacaaattatgaaggaattctacaataatgctgataaacatcctcgtgtttttggcatgactgcttcaccaattattggaaaaggtggttctaacaagcttacctacactaaatgtatcaacagtctcgaggaattacttaatgcaaaggtttgttcagttgataatgtagaacttgaagtgtgattgcttctcctaaggttgaagtgtactttcgacagcacggaattcgagctg

SEQ ID NO: 12421 - DNA, 387 bp, Zea mays
  Clone ID: MRT4577_111323C.1
gttgctcccgctatgaaaacgaaaacagggaacaagagcaaggtttaagttcgcagctatttttgtccaatgatattgatatattgttccaaaaaaaaaaaaaaaaaaaaaaaaaaaaaaaaaaaaaaaaaaaaaaaaaaaaaaaaaaaaaaaaaaaaaaaaaaaaaaaaaaggggcgtgtcgtggtgggggatccaattttacttacgcgggcttgcaacgttatagttttttaataggggaacctaaattaaattaattggccgtggtttaaaaacgtggtgattggaaaaaccttggggtgaccaaattaaattgttttgaagaaaattccctttttgccagttgggttaatagtaaaaaggccctaacttttgttttttccaa

SEQ ID NO: 12422 - DNA, 1475 bp, Zea mays
  Clone ID: MRT4577_111324C.1
ccacgcgtcagatcgtactggaccaatctgccaccacactttgatcacacacaggaagttgagatcagaaaaatgcaggctgccgcaactgccgccgggttcatcgttatccgggccgggtacctcgaggccgggcgggaagcgttccagatcgtactggaccaatctgccaccacactttgatcacacacagacacaggaagttgagatcagaaaaatgcaggctgccgctactgccgccgggttctcggccgtgctgcccgccaagggcaggccggcggcgaggagcagggtggtggcccgtgtccccgccacaaggaggagcgtccgtgtagctgccgtcgtcgcgaccgaggccgcgcagatcgactacagctcaagcgtctcggtgttcccgatggaggcctgcgacctgcttggtggcgacgcgtgcaacgggcccatgttcccggaggccaagcccgcctcggcggcggcggcggcgagcaggagtgtggtcggggtggacagggactacctgtcctacgacgagccaaagacggtgttcccgggcgaggcgtgcgacgacctcggcggcgagttctgcgaggcgccgtaccaggacggcgtctccagggagctggcgcacgcctgaagaccctgatccatccatgtctgtccaccacgctatgtacgtatgtgtagcagatggtttacatctacgtgttagagcccggagagctggagaagctagctagcgtgcttacagaataacagcagccaagcaaagccaagggtgtgtatataataggcatgcccttgggttgtgtcagctgcgactgtatgtatagtttaaacgaagatgaaatggtactgatggtgatattccgtgttttacgatacaaaggctagaaaatagattttgcctggatatcagatagctttcaactaccacaaaatattatttctaccggaaacattgaccgcgtgatttatttcaactatcgcacaatattatcctacaaaaaaaagtaagcgtctgtagccttggccaacaaagcatgaatttcagtactgaatcactagctccaagcaatgcccgacaatactgaagttagctagctatttgttttgtacatgtcagcaatagtcttaattatgtggcagaaagagaaagcagaaaaaacaaagagccagtgagcactccgtcgctcgtatcgcacagaaaaagagggccaaatcggtaatcttatcgcttgctactatctatttggcacacgttcttgctggttgagtttagatctgttacgaaaagtaagcagttgttgactgcttttctaaccggcatttctccaagggacgtgcccctgcacgatccccttgtacggacgtggtttttggccactcctttagtgtccctttcctttgtataaatatcaaaagcaataaaggatatggtacccctttttcaaaaaggtacctcgaaactaaactgc

SEQ ID NO: 12423 - DNA, 768 bp, Zea mays
  unsure (1)..(768): unsure at all n locations
  Clone ID: MRT4577_111325C.1
agtccaagaagtaatcatcaaataaaaagaacatcccggtaagtttgttgacctcacaatgtctcttagttntgagacgttgaaatcgtcgaataatgagttcatcatcaatgaatntgaagatcgtcgaataatgagttcatcatcaatgaatttgaagatctctttctcagtgaagcaaacgattattttttttttttttttttcttcaatcttgttatgcaattctctcttaattatatgaatagctaaaaatgttctctcaacacatgccgctgacacaagtaataatagggctaactcaattagcttgtagaagagtattaataatcatcaacagaccaactacttatgaacttatctaatccagttcagttatgcaaaattgcaaatctagcacaggcgtacaacttgtctgcttggttagtgcttaccttcctgaagatctggactgcttgttgatgagagcagtgatagggagcagcggcgcctgaggaaagggtgcgcgcctacgctgcgccgatcagaagacagaaggaagatggttggacgttggggccgcaagggcatgggcaacgttgcgccgggctaggacagggacggtcacacgagtcgccggcgccgccgtgcctgggctggggttccacgcctggacctcgacgggcacaaggccacaccaaacgccacatcacacgggaagaacgaagaaaggaaccgtggcggcttgacagagaacggacgggatgaccaatcccggccggcctcgag

SEQ ID NO: 12424 - DNA, 825 bp, Zea mays
  Clone ID: MRT4577_111326C.1
acatttcggcacgagagaccggagagtgccatatcccgcgacgccgcagcatccgcttgactccactttatgcaagtgtgcctccggcgaggcctctcgctagtccggcagcacacctcccgcgtccttcccccactgtctctccaccctacccgcttcttccttcaccaatccgcgtccgacccgatgggtgagggttccgttcctggtaaggacgccaaggggaaggggaaggccaagcaccccgcccaggcttcggccctggtcgctcgcgacgactcctatctggaggccgtcacacataagaggattcgcttgttcgaggagatccaggcaaggcaggccgtcgagcggctgaatatcggcggcgaagttatcaagataactctgcctgatggtgcaatcaaagaagggaagaaatggataacaaccccaatggatattgctaaggagatatcaagtggatttgcagctagttgtttgatagctcaagtggacgaaacactctgggatatggggaggccactggaaggtgactgcaaattgcaaatgttcaagtttgataccaatgaaggccgtgacaccttctggcactcaagtgctcatattcttggagaatctcttgagagagcatatggctgcaagctgtgtattgggccttgcaccacaagaggggagggttctactatgatgcttactaccatgagctgacattaacggagagcactttggtgtcatttgaaacaagctaaaaaggctggtgcggaaaagcaacatttgaacgcatcgaggtcagcagggcagaagctctttgaatggttgctg

SEQ ID NO: 12425 - DNA, 494 bp, Zea mays
  Clone ID: MRT4577_111327C.1
attggcccgaacctcttattttcaggaatcagggggaaacacagaagttccaaacaggtcagggggcagggggctccatacccccagattttctaaaaaccggtctaggggcaattaacaggaacggggggccccacatgtttcatgcctgccataaaaaaaaaccccccaatcaagctttttcaaacgaacgaacagacgaggggatttgggatcaaaaaccgggaacaagcccgggggaaaaccaaataaccaggtcgtcggggagggcctgggcttaacggggggggggctttgcccccaccgggtggttgttcccatcggccacaaaaactcggcacaagggacagggtcctttggaggacgaaagccaccgggcgacccaatcccgggggaacacatggggacccgggaatcggggggtaaccccccccagcccaattttggacagggagacccgggactcgtccggtggggagcccccgtcctccccg

SEQ ID NO: 12426 - DNA, 221 bp, Zea mays
  Clone ID: MRT4577_111328C.1
ctttggaatatcttttcttgttgcctacaagttgtgtttctttttgcttactatgtggactctgttagcaggagtcttcatttgcgccagcacctgctgaacctacactggatcatttaagatccttggcgaggaagctgcttgctggttatattgacatacccacaatcacaaacctgagatggtccctgggatactattaaaagatggaaactattgac

SEQ ID NO: 12427 - DNA, 442 bp, Zea mays
  Clone ID: MRT4577_111329C.1
attcggctcgagctcagtcagccacaattcttatacctgcatgaccccatctcaggccctggtgaatgtgtgcagacagcgcgctactatgggacacaggatgtcggataccgcagggattttgtgccggtaattgcaccggatctggtgctgtatgcgaaattcatagcgcacttggactcagactgcatcaagagacggggcttccagcagcgatgggaacaacatatggcagctaaagctcttgagagtttttttggaacattgtcgtgtgtatagggtattttgcacatcgcgatctccttacatgctcagagtgcctttgatgcacaggcggggatatagggtattgtgcacatcgacaaatgtggtgaggttttatacagatttttagacatatattgcaagagcaaaactatgatagtttaaaaaaaaacaaaaa

SEQ ID NO: 12428 - DNA, 490 bp, Zea mays
  Clone ID: MRT4577_11132C.1
actgccaggtggcagtattcgtttagaattacagttttttgcttctgcaaaaaaaaaaaaaaaaaaaacaaaaaaaaaaaaaaaaaaaaaaaaaaaaaaaaaaaaaaaaaaaaaaaaaaaaaaaaaaaaaaaaaaaaaattaaaaaaaaaaaaaaaaaaaaaaaaaaaaaaaaaagttttttgggggggaacaactttagggggaatttttgaaaatttcattaaaattgggggggggttggagtttgtttttaaggggccaatttggccttatggggggtggatttaaatttaatgggcggggtttttaaaggtggggattggaaaaaccttggggttaccaattttaatggttttgagaaaatccctttttggcaagttggggtattagcaaaaaggccggaacggatggcctttccaaaaatttgccaaccttgattggaaaatggaccccccttgtagcgggaaattaaggggggggggggggggg

SEQ ID NO: 12429 - DNA, 678 bp, Zea mays
  Clone ID: MRT4577_111330C.1
attgggaccctcgaggccggccgggatcatgtctccttcctcttcgctagcggcgcctgcgactatacctgtctgtggcaggccaacaaggcaggcaggcaggcagcagcgtgagcgccttgcgagatctaccatagcaggatgaattccaggatctccctcctctgcgccctcgttgtcgcctcctccctcctgcactgaggcatatccgatcggccatgacgcgcagctcctcaggggcatcatcagatacgggtcctctctcgaggacccggcgctgtccgagaacaagaacgcgaacgctgtctcgtgcgagcagttctagaggcacctcaagggagcaggagtatcaccgaacactcacggagcgttcaaccaccgctcgatcagtgcaccggagcgatgcacgtatccacgcgcactaccccaggtacctggaccgctgctcacctcatacgcgttctgtgaccagatgacggacaggcgatgccggcgtgctgtgtcgggactcgaccccgccgtggttctcgacaactacagcatgccgaagaacaaccggttcctctacgacagacagttctccggatacgggatcggcagctagggagactggatcatgtttcatgctcagcaccagcacggttatccggcgactactcgccgtgtcctccgtgctcc

SEQ ID NO: 12430 - DNA, 192 bp, Zea mays
  Clone ID: MRT4577_111331C.1
gaacggctcaataagtgatagggacaaacgacaaggccgcacctcctaccatcaagtgttcatctatcaacaccacgctgagtaacgcgtgcaaaatgctagatcagacaatgctattgacatgggacgggatccaacaaacgaagaactcgtgggacgacggaacgccgggcacaatgtgcccgatccagc

SEQ ID NO: 12431 - DNA, 358 bp, Zea mays
  unsure (1)..(358): unsure at all n locations
  Clone ID: MRT4577_111332C.1
gcggccgttcttttttttttttttttttttncnnccngncgctcatgtactatatatactatgtatttactcaaaaaagaatgagtaaaaattaattagacgggcgacgtacaaacaccttattaacgctaagctacgttattttttctggacttcttttttcgtcttcttctttggcgcgcgcgtatataccctactactagctacttgccgctacggaattaaggcaggagaacagaattagtaagaaacggagtagaactggagtggaggaatagtccctcctgccggaggcaaggcaaggcaagggcggcccaagaacagcatcttgaactgagtactgtacgccgtcgtcttt

SEQ ID NO: 12432 - DNA, 759 bp, Zea mays
  Clone ID: MRT4577_111333C.1
ccttccgggctcccctctcatcatctcctcccccccgcacctgcacagcctctcccgccgcccgccgcgcgccgcctccgcgcgccatccagacgccagtgcgcgtcgcggtccgctgcccgcggtgcgttcaccctctccccatctcccttttcctctcccgcgcgcccttccctacgcgcctccgccggcgacgagtgcccaccagctggtgttacacacgtgtgacaatacattacatggcgctagtacagttcaatggtgccttgcttccccaactcggtgaaaaacctcggacgctattctcgccgcctgcagttgcaagggctacctatgccgatgcaaggttcctggcaccggaaaccagttcaagaggtagaggtaaacacctgctatcatctagttatagtttgcattcgcagacctcttctgaacaaataaaccatgtaccgtcgtcaagatctcgccagaaaaggggctcaagttttgtcgtcagagctgaagctgatttctataacgtacttggtgtctcaagaaatgctagtaaatctgaaatcaagagcgagatcctggtgctgaacaaaagttcaaggaaatcagcaatgcttatgaggttttgtctgatgatgagaagcgatcaatctatgataaatatggagaagcaggtctgaaaggtgctggcatgggcacaggagattactcaaacccgtttgatcttttcgagtccctgtttgaagggattcgtgggatgggtggaat

SEQ ID NO: 12433 - DNA, 829 bp, Zea mays
  unsure (1)..(829): unsure at all n locations
  Clone ID: MRT4577_111334C.1
attgggtacctcgaggccggccgggaccactcaccagtcaccactcaacagccctcccctctcatcatctcctcccccccgcacctgcacagcctctcccgccgcccgccgcgcgccgcctccgcgcgccatccagacgccagtgcgcgtcgcggtccgctgcccgcggtgcgttcaccctctccccatctcccttttcctctcccgcgcgcccttccctacgcgcctccgccggcgacgagtgcccaccagctggtgttacacacgtgtaacaatacattacatggcgctagtacagttcaatggtgccttgcttccccaactcggtgaaaaacctcggacgctatcctcgccgcctgcagttgcaagggctacctatgccgatgcaaggttcctggcaccggaaaccagttcaagaggtagaggtaaacacctgctatcatctagttatagtttgcattcgcagacctcttctgaacaaataaaccatgtaccgtcgtcaagatctcgccagaaaaggggctcaagttttgtcgtcagagctgaagctgatttctataacgtacttggtgtctcaagaaatgctagtaaatctgaaatcaagagcgcctatcggaagcttgctaggagctatcatccagatgtaaacaaagatcctggtgctgaacaaaagttcaaggaaatcagcaatggcttatgaggttttgtctgatgatgagaagcgatcaatctatgataanatatggagaagcaggtctgaaaggtgctggcatgggcacaggagattactcanacccgtttgatcttttcgagtccctgtttgaaggat

SEQ ID NO: 12434 - DNA, 174 bp, Zea mays
  Clone ID: MRT4577_111335C.1
gctcggagtacgtcgcggcgtagtcgaggcagtgcgggatagagggcaccgtgtggggtatattgatagtcggcgctggaattacttacatgacttggataggacgtcagttttctctacaatagcgcgcgccccgcagtacgtgtggggaaggctgggcatcgtgttcaagtg

SEQ ID NO: 12435 - DNA, 5109 bp, Zea mays
  Clone ID: MRT4577_111336C.1
cgccaagccttttgttcaccgttactccgttcaccccgcgaggcgtgactcgtgagctctccgtgtcttggcgatgactgggcgaccgacgatgcagccgtaggccaggggccccaggtcttcctctggtccttctccggcgaagagcaccggtcagcagttactgtggacgatgttcgtttgtgtttatcattttcttggtcttgttcggggcaacaacgacattgggaataagtgtacggcagacaaacagtaacatgggaaggaaaggctcagaaatgtcaccaagtaaaaggtatcccttgaggtctccacatagtagtggtagagttcttcgctctgccttagccaatgataataaggacagtgagcctctgaatgctgctgctgctacccaagccgctgtgaaaaaaagaagtggcagtcagttggatagtcctaatagcagtgtcaggttgtttcactctacatcaaaaaataagaacgaggcatgtagcgggcctctaaatgacaggatccctgataagccagctgcaaataaaagaaaacgtgccagtccttcacaggtgggaagttccagcaacagtgtcagggtgcttcgctctgcaataaaaaataaagatgaggcatgcagtaaatctctaagtgacaggaccgctggtgagccagctgcaaataaaagaaaaaacgtcaatcgctcaaagacggggagtctgagctgtggtgtcagggtgcttctatctgcttcaaaagctaaggatgagacatctaccaagcctttaaatgatagtgctgctgttgaaccagcttcaggtaaaaggaaaggcaccagtccgtcaaaggtgggaagtgccagcaatagtgtcagggtgcttcgatctacttcaaaatataagaatgagacatgtactgagcctttaaatgatagtggtgctgttgaaccagctgcaaataaaaggaaaggtgtcagtcgttcaaaggagagaagtctcaatagcagtgtcagggtgcttcgctctggcctcaaataataagattgaggtatctattaagcctctaggtaatagtactgctggccaaccagctgcgaaaagaagaaaaagcggcagttccttcgaggcaggaagccctgtgagcagtgccagggtgcttcgctctacctcagaaaggaagaatgaggcatctaagcctttaaatgaaagtactgctgctcaaccagctgcgaggaaaaaaaaaagctggggtaatttcaaagaccgacaatccaaagattggtctcagggttcttcgctctgcctcaggaaagaagaatgaagcatgtattgggcatgtaaatgatagtacttctgctgaaccaactgtgacaaaaagaaaccgcaagccttcaatggatcgcagtcccaagaaggactacttaaaaatttgtcaaagagttagatatattttgaatcgaatgaactatcaacaaacctttattcaagcttatgcaagtgaaggttggaaaggccaaagtttggaaaaaataagacctgaaaaggagcttgaacgagccaaggcagaaatcctccaatgcaagttaagaatccgtgaagcttttcgaaatatggactctcttttatccaaggggaagcttgaagaatctttgtttgattccgcaggagaaatttcaagcgaagatatattttgtgctgtatgtggctcaaaggatgttactttacaaaatgacatcattctttgtgatggagcctgtgacagaggattccaccagaactgtttgaaccctcctttgctaactgaagatatacctccgggggatcaaagatggctttgccctgcatgtgtctgcaaagcagactctatagatgcactaaatgaacttcaagggagcaagctctccattcatgactcatgggagaaagttttccctgaggcagcttcaattgccaacggttctaaacaagttgatacttctgatctgctgccagatcatataaagcacagtgacaaccctgcattggttgaagggctgatggtggatgaagtcaggctttctgcagaggatgacagcaaagcggatgaccttcgcttgtcttcggaggactcaggggatggtgacttcgatccgtcaggtccagattctagtgaagaccaaaaagatggattgaactcagaagagtcagatttcacatcagactctgatgatttttgtgctgagattgccaaatcttgtggccaggatgaagtctcggcatctccattatcaaatgtgataaaccatacttatagaatgaaactcagggccagcaacaaccgctctaatgaagaaaaccatgatcatgtatttatggacatggagctagggcaagacatggtgctaccagtttcaagcaggcggcaggtggaacggttggattacaaaaaactatatgatgaggcatatgggaaagaatcatctaattcaagtgatgacaaagagtggtctggaaaagaactattagaaggcagtgaaacagattcacttagtgagcgacctcatcctgtaaaacggtgctctagaagagcacaagcagagcagcagaataatgaacatacaccacagagggagcgccttcatggttctgaaagtgagcagaaaactggaattcttcgatccaatggcagcagtagcacaggacggaagtttggtcctgtagctacccagaaattgaaggtacattttgagaaagatccatatcctagccgtgaaacgaaagagaatatatcagaagaactaggcttgacatttaatcaggtctccagatggttctctagcactcgtcactattcaagggttgcttctgccagaaaagaaatgcatcctgacggccatactagcgagaataatgataccacgactgtagatagcatgcaagcaaggcaacccaacactgtggtgatggaaaagttgactgggaatagaaatgacattgtttctgagaaaccgatggtgcagaacaatcttaaccaaggggtggcagaaaagttgactagggatagaaatgacattgttcctgagaaacaggtggtgcagagcaatcttaaccaatgtaataatgaagatatcccgctttctggaacagaaattgagatggagtcttacgaacaagaatcatctgaaagcagtgatgaagagtggtccacacttagcacaccacgaaaaacaaaattacaaggcaacgaaaaagtatcacttactgaatcactacgttctgcaaaacggtgttctagaagagcaccagctagggagcagaataatgaacatactcagagtgagcaacttcatggttctgtaagtaaacagcaaactgaagttcttcgctccaatgtcagcagtggcgatgcctcaaaatgtcattttggccctatagttactcagaagctgaaggaacattttgaaaaagatccatatccttgccgtgcaacaaaagagggtctggcacaagagctaggactgacatttaatcagatcagtaagtggttctctgccacccatcattattcaagagatgctgttgccaagaaccaaaaatacccaggagaaaatactactgagaataatagtagcacaatctttgatggtatacaagtaatagaacccaattttggtttgatagataaaccagatgcagatacaaatgacatgatttctgaaaagttgatggtacaaattaatcttaacgaaggcattgaagaggatatcccaccgagccaatatactaccaggtgtgaagagaaattaactatgactcaagctgccatctcaagggaagctggacctccaggttatggtcctggagaaaactttcttcaggtcagttcaaggattactagctgtgagcagagtgtgataatggctcctagcgctatcgcaagaggagttggtccaccaggatatacgcctggagaacaccagggcaatggggctccatggaatacaagctatgagcgaagaccgtttacgagtcctgcgactagctcaagagaagtcggacctccaggatatgggcctgaagaaaaccaaggcagtggcatttcctgtaatacaagcagagagcaaatattgtttatgagccctacaaccatctcgagagaacttggtccaccaggatatttgcccagagaaaaccagcgcagtgacacttcatggaatacaagctgtgagtcgggactatttatgagtcctgcgaccacctcaatagaacatggtccaccaggatatgggcctggagaaaaccaggagaatgacagtacaagctgcgagttgagaatgtttacaagtcctacaatcgtctccagagaagttggcccaccaggataccagcagggagtgtttatgagtcctaaaaccatctcaagagaagtctgtcctccaggatttgggtctggagagaaccagggcaacgacactacatggtacaaacagagcgcgtttacaagtcctacaaccatctcgagagaagtcggtccgccagggtatggacaggaagatcagggcaatggtggttcttggaacacgagttgtgagcagggagtgtttacgagtcctactagaggcatctcaagagaagtcggtccgccaggatacgggcccggggaaagtcagggcaataccacttcgtggatttcgacctgccagcagagaatgcttgcaggaatccagagaactggtggctcaaggagtatggacttggaagcctttccaccgggatacggacctggtggtgcttcagggagtgtcataagcccccaagctcggtctgcagagaatgtagaattttcggacgaggctagaaaaaaggctatacagcgggagctgagacggcggcagaagttcaggtgaaggcaatatatccagtcttcaagacaagacaatatatccagtcttgatggctgaatgagtgggcgaccttagttgccatcaagcaaaacccttgttgtatcagctgcttatcttccttttacagacttgcttggtttgtcaaggatttcttatgtgaaccctcttgaacctgaagtattcaatgcgctgtgaatttgtgcagttgccttaatcaaaaaaaaaaaaaaaaa

SEQ ID NO: 12436 - DNA, 877 bp, Zea mays
  unsure (1)..(877): unsure at all n locations
  Clone ID: MRT4577_111337C.1
ggtcctgccgggacagcctacggatgcaaatcagtgcccaggtagcctaccgtgctccagagtggcagagtccagagaccaggcccgcgagctcaccgctcagactttaccgccaagccttttgccttcggttactccgttcaccccgcgaggcgtgactcgtgagctctccgtgtcttggcgatgactgggcgaccgacgatgcagccgtaggccaggggccccaggtcttcctctggtccttctccggcgaagagcaccggtcaggtcctgacacatctattttgactggataacaacgaaggtttctctgatattctgatgttgtagcagttactgtggacgatgttcgtttgtgtttatcattttcttggtcttgttcggggcaacaacgacattgggaataagtgtacggcagacaaacagtaacatgggaaggaaaggctcagaaatgtcaccaagtaaaaggtatcccttgaggtctccacatagtagtggtagagttcttcgctctgccttagccaatgataataaggacagtgagcctctgaatgctgctgctgctacccaagccgctgtgaaaaaaagaagtggcagtcagttggatagtcctaatagcagtgtcaggttgtttcactctacatcaaaaaataagaacgaggcatgtagcgggcctctaaatgacaggatccctgataagccagctgcaaataaaagaaaacgtgccagtccttcacaggtgggaagttccagcaacagtgtcagggtgcttcgctctgcaataaaaaataaagatgaggcatgcagtaaatctctaagtgacaggaccgctggtgagccagctgcaaataaaaaaaaaaaaaaaaaaggcccctan

SEQ ID NO: 12437 - DNA, 5359 bp, Zea mays
  Clone ID: MRT4577_111338C.1
gagaagccggtccgccaggttatgggcctggggaaagtcagggcaagactgcctacagatgcaaatcagtaccaggcgtgctctccgtgagctctacgcctctacctgtgtcttggcgacgactgggcgaccgacgacgcagccgtaggacaggcgaccgacgacgcagccgtaggataggcgaccaggtcttcctgttggctcttgcccttcgccggcgacgagcacccgccaggccacaacgacattgggaacaagtgtatgacatacaaacccccaagctcggtctgcagagtcagaagtatcaccaagcaaaaggtatcccttgaggtctgcacacagtagtggtagagttcttcgctctgccttagccaataataataaggacagtgagcctctgaatgcagctgctgctacccaagctactgtgaaagaaagaagtggcaaccagctagatagtcctaatagcactgtcaggctacttcgttctacgtcaaatattaaggacgaggcacatagcgggcctcttaatgacaggatcattgataagccagctgcaaataaaagaaaacgtgccaatccctcacaggttggaagtcccagcagcagtgtcagggtgcttcgctctgcaataaaaaataaagatatggcgcgcagtgagcctcaaagtgacaggaccgctggtgaggcagctacaaataaaagaaaaaacgccaattcctcaaaggtggggagtctgagctctggtctcagtgtgcttcggtctgcttcaaaagctaaggatgagacatgtatcaaacctttaaatgatagtcctgctgttgaaccagcttcaagtaaaagaaaatgcaccagtccgtcaaaggtgggaagtcccagcaacagtgtcagggtgcttcgatctacttcaaaatataagaatgagacatgtaccgagcctttaaatgatagtggtgctgttgaaccagctgcaaataaaaggaaaggtgtcagtcgttcaaaggagggaagtcccaatagcagtgtcagggtgcttcgctctgcctcaaataataagattgatgtatctattgagccactgaataatagtactactggtcaacctgctgcgaaaagaaaaaaaaaaaacagttcctttaagagcagtgccagggtgctttgctctacctcagaaaggaaaaatgaggcatctagtgagcctttaaatgatagtactgctgctcagccagctgcgaggaaaaagaaaggtggtgcaatgccaaagactgataacccaaagattggtgtcagggttcttcgctctgcctcaggaaagaagaatgagacatgtactgagcctgtaaatcggagtacttctcgtgaaccaactgtgacaaaaaaaagaaattgcaagccttcaaaggatcgcggtcccaagaaggactacttaaaaatttgtcaaagaattaaatatattttgaatcgaatgaagtatgaacaagcctttattcaggcttatgcaagtgaaggttggaaaggccaaagtttggaaaaaataagacccgagaaggagcttgaacgagccaaggcagaaatccttcaatgcaagttaagaatccgggaagcttttcgaaatatggactctcttttatcgaaggggaagcttgaagaatctttgtttgattccgcaggagaaatttcaagcgaagatatattttgtgctgtatgtggctcaaaggatgttactttacaaaatgacatcattctttgtgatggagcctgtgacagaggattccaccagaattgtttgagccctcctttgctaactgaagaaattcctccgggggatcaaggatggctttgccctgcatgtgtctgcaaagcagactctatagatgcattaaatgaacttcaaggaagcaaactctccattcatgactcatgggtgaaagttttccctgaggcagcttcaactgccaatggttctaaacaagttgatgcttctgatctgctgccagatcatataaaggacagtgataaccctgcattggttgaagggctgatggtgaatgaaatcaggatttctgaagaggatgatagcaaagcggatgacctcggcttgccttcggaggactcaggggatggtgacttcgatccgtcaggtccagattctagtgaagaccaaaatgatggattgaactcagaagagtcagatttcacatctgactctgatgatttttgtgctgagattgccaaatcttgcggccaggatgaagtctcggcatctccattatcaaatgtgataaaccatactgatagaatgaaactcagggcctagcaatagacgctctaatgaagaaaaccatgatcatgcatttatggacatggagctagggcaagacatagtgctaccagttgcaagcaggcggcaggttgaacggttggattacaaaaaactatacgatgaggcatatgaggaagaatcatctaattcaagtgatgaagaagagtggtctggaaaagaactcttagaaggcagtggaacagattcacttgatgagccttcgtcctgtaaaaggctctctagaagagcaccagcagggcagcagaataatgaacttacaccacagagccggcctcatggttctaacagtgagcagaaaactgaagttcttcgctccaatggcagtagtagcacaggacggaagtatgatcctgaagttacccagaaattgaaggtgcattttgagaaagatccatatcctagccgtgaaacaaaagaaaatctatcagaagaactaggcttgacatttaatcaggtctccaaatggttctctagtactcgtcactattcaagggttgcttctgccaaaaaagaaatgcatcctgacagccatacttgtgagaataatgatgagacaactgtagacagcatgcaagcaaaacaacccaatgctggggtgatggaaaagttgacgggggatagaaatgacattgtttctgagaaaccgatggtgcaggacaatcttaaccaaggggcgatggaaaagttaactagggatagaaatgacattgttcctgagaaacaggtgatgcagagcagtcttaaccaatgtaataatgaagatatcccgctttctggaacagaaattgagatggagtcttacgaacaagaatcatctgaaagcagtgatgaagagtggtccacacttagcacaccacgaaaaacaaaattacaagaccatggaaaatcatcagttactgaatcacttcgttctgcaaaacggtgttccagaagagcaccagctagggagcagaataatgaacgtattcagagtgagcagcttcatggttctgcaagtgagcagcaaactgaatttcttcgctccaatgtcagcagtggcaaggtctcaaaatatcattttggccctatagttagtcagaagcttaaggaacattttgaaaaagatccatatccttgccgtgcaacaaaagagagtctggcacaagagctaggactgacatttaatcagatcagtaagtggttctctggcactcgtcattattcaagagatgctgttgccaagaatcagaaacgcccgggagaaaatactactgtgaataataatagcacaacctttgatgacatacaagtaatagaacccaatgttgggttgatagataaaccagctgcagatgtaaatgacatgatttctgaaaagttgatggtccaaattaatcttaacgaaggcattgaagaagatatcccaccgagccaatatgccaggtgtgaagagaaaataactatgactccagctgccatctcaagggaagctggtcttccaggttatggtcctggtcctggagaaaactttcttcaggtcagttcaaggaatactagctgtgagcagagtgtgatactggctcctaccgctatcgcaagagaagttggtccaccaggatatgcgactggagaaaaccagggcaatggggctccatggaatacaagttatgagcgaagactatttatgaatcctgtgaccagctcaagagcagtcagtcctccaggatatgggcctgaagaaagccgaggcagtggcatttcctggaatacaagcagtgaacaaatattgtttatgagtcctacaaccatctcaagagaacttggtccaccaggatatgggcctagagaagaccagtgcagtggcacttcatggaatgcaagctgcgagttgggagtatttatgagtcctgtgaccacctcaagagaagacagtccgccaggatatgggcctcgagaaaaccaggagaatgacaatatgagatgcgagttgagaatgtttacaagtcctacaaccatctccagagaagttggcccaccaggatatgagcttactggaaaaaacaagggcaacggcgcttcatgtactacgaattaccagcagggagcgtttacgagtcctgaagccttcccaagagaagcctgtcctccaggatttgtgtctggagagaaccagggtaacgacactccatggtatatgagcagcaaacagatggcgtttacgagtcctacgaccaaccctagagtaggtccgccagggtatggacaggaaaaccagggcagtcgtgtttcttggaatacgagttatgagcagggagtgtttatgagttctacaaacatctcaagagaagccggtccgccaggttatgggcctggggaaagtcagggcaatatcacttcatggatttcgacaggcgggcagagaatgtttacaggtccttcaactatcccgaacgaagtcgggcagcaaggatatggcccttcaggaatcccgggaacggatggctcaaggagtatggacttgaaagcctttccaccaggatatggacctgctggagaaaaccagggcggtggtgcttcagggagcgtcataagcccccaagctcggtctgcagagaacgtagagttttcagacgacgctagaaaaaaggctatacagcgggagctgagacggcggcagaagttcaggtgatggccgtgatgcgaacttctgatcctgctcatcgaattttgactacggattactactttttaagactacatatccagtcttgatggctgaatgagtgacgaccctagttgtcgagacgcaaaaccttttgttgtatgtgttccttttacagacttccttggcttgtcatgaatttctaatgtgaacttgtgctgtgaacttgttgcaaaacctcttgaacctgaagcattcaacatgctgtgaacttgtgcagttgctcttcttctgcatgagttcatgttatctgggttgcacggcatgcaatttcccattgctagaagggtcagataacactgactcgggcccgg

SEQ ID NO: 12438 - DNA, 2480 bp, Zea mays
  unsure (1)..(2480): unsure at all n locations
  Clone ID: MRT4577_111339C.1
ccggcctggccgggggagaaggttttccctgaggcagcttcaattgccaacggttctaaacaagttgatacttctgatctgctgccagatcatataaagcacagtgacaaccctgcattggttgaagggctgatggtgaatgaagtcaggctttctgcagaggatgacagcaaaggggatggtgacttcgatccgtcaggtccagattctagtgaagaccaaaaagatggattgaactcagaagagtcagatttcacatctgactctgatgatttttgtgctgagattgccaaatcttgtggccaggatgaagtctcggcatctccattatcaaatgtgataaaccatacttatagaatgaaactcagggccagcaacaaccgctctaatgaagaaaaccatgatcatgtatttatggacatggagctagggcaagacatggtgctaccagtttcaagcaggcggcaggtggaacggttggattacaaaaaactatatgatgaggcatatgggaaagaatcatctaattcaagtgatgacaaagagtggtctggaaaagaactattagaaggcagngaaacagattcacttagtgagcgacctcatcctgtaaaacggtgctctagatgagcacaagcagagcagcagaataatgaacatacaccacagagtgagcagcttcatggttctgcaagtgagcagcaagctagagagcaacttcatggttctgtaagtaaacagcaaactgaagttcttcgctccaatgtcagcagtggcgatgcctcaaaatgtcattttggccctatagttactcagaagctgaaggaacattttgaaaaagatccatatccttgccgtgcaacaaaagagggtctggcacaagagctaggactgacatttaatcagatcagtaagtggttctctgccacccatcattattcaagagatgctgttgccaagaaccaaaaatacccaggagaaaatactactgagaataatagtagcacaatctttgatggtatacaagtaatagaacccaattttggtttgatagataaaccagatgcagatacaaatgacatgatttctgaaaagttgatggtacaaattaatcttaacgaaggcattgaagaggatatcccaccgagccaatatactaccaggtgtgaagagaaattaactatgactcaagctgccatctcaagggaagctggacctccaggttatggtcctggagaaaactttcttcaggtcagttcaaggattactagctgtgagcagagtgtgataatggctcctagcgctatcgcaagaggagttggtccaccaggatatacgcctggagaacaccagggcaatggggctccatggaatacaagctatgagcgaagaccgtttacgagtcctgcgactagctcaagagaagtcggacctccaggatatgggcctgaagaaaaccaaggcagtggcatttcctgtaatacaagcagagagcaaatattgtttatgagccctacaaccatctcgagagaacttggtccaccaggatatttgcccagagaaaaccagcgcagtgacacttcatggaatacaagctgcgagtcgggactatttatgagtcctgcgaccacctcaatagaacatggtccaccaggatatgggcctggagaaaaccaggagaatgacagtacaagctgcgagttgagaatgtttacaagtcctacaatcgtctccagagaagttggcccaccaggataccagcagggagtgtttatgagtcctaaaaccatctcaagagaagtctgtcctccaggatttgggtctggagagaaccagggcaacgacactacatggtacaaacagagcgcgtttacaagtcctacaaccatctcgagagaagtcggtccgccagggtatggacaggaagatcagggcaatggtggttcttggaacacgagttgtgagcagggagtgtttacgagtcctactagaggcatctcaagagaagtcggtccgccaggatacgggcccggggaaagtcagggcaataccacttcgtggatttcgacctgccagcagagaatgcttgcaggaatccagagaactggtggctcaaggagtatggacttggaagcctttccaccgggatacggacctggtggtgcttcagggagtgtcataagcccccaagctcggtctgcagagaatgtagaattttcggacgaggctagaaaaaaggctatacagcgggagctgagacggcggcagaagttcaggtgaaggcaatatatccagtcttcaagacaagacaatatatccagtcttgatggctgaatgagtgggcgaccttagttgccatcaagcaaaacccttgttgtatcagctgcttatcttccttttacagacttgcttggtttgtcaaggatttcttatgtgaaccctcttgaacctgaagtattcaatgcgctgtgaatttgtgc

SEQ ID NO: 12439 - DNA, 315 bp, Zea mays
  Clone ID: MRT4577_11133C.1
aaaacccgggggtcccctaaaaccccttttaaaataagaacccctttttttttgcaaagaattaagtttttaacaacctaatttttatttgctcaagagcattttcaggggttcttaaaactcactttcaacaactttacattttaacttttaaaacacaagggaagcaaacaaaaacaccccccgcgcgatactgaaacttgtttcagtttttccccatgctaactgcagcatggagactggtccagtcgatcctaccaaccgtaggcggggctgtcctctgcctcctctgacggtcttgattctcgttttttt

SEQ ID NO: 12440 - DNA, 636 bp, Zea mays
  Clone ID: MRT4577_111340C.1
ggcagccgagtcatgtggcccacgggtcaggaggaaggccggatccggaatctcatgcagcagatcggggaagaaaggaggaagctttcttactttgaggggaatgttgtctggctcgaggtgcagaaacatacagatctcatcggtctaggttcttgtcgatctcggaccaggcttcattcccctcaagtggagctcccgggctgttccgcgctcgtacgtgcgtcgattccccctcctgttcttgccgtgagtttccttgggcatatcatcgagatgtgtagcgattctctctcttcgctcgtttgaccttgcttcttcggcctagattgtgcctccgcagctagaatcatgcatgattaggatatgattatctcggcgaatgtttgctatgtgttgggtttcgtgcggtcggcatgcatcagattggtgcaatcataaggattcttgactcaaaagaacacacaggcatgcttgcttttcttcgtttaaactacggccggcttaattggcatctgcatctcccttgtagttgcggtctttttcttctgcccccactttatttctcactttctctaagagtttgtgtatcatctccagttctctctaccccctttcaacatgaaggatcttcgt

SEQ ID NO: 12441 - DNA, 196 bp, Zea mays
  Clone ID: MRT4577_111341C.1
ggcgacttaacttacagtaaagaaattagcacgatatcgaccgtttttgtttcttgcaaccatgactgaagagccaaaatttacagtattgggcagcattggtttgccttctttgcctgcttggagaacatctgaaaagcagcactcagatcaaagcttttcctcgggccgaattcgaactttttttttgggtttg

SEQ ID NO: 12442 - DNA, 420 bp, Zea mays
  Clone ID: MRT4577_111342C.1
cacgacgcacagagacgaacgcgcaagcatggccgccaccatgaagctgtcactcaccttcgtcctcctcctctccgcgctggtggtgttcggggacgcgcaggcgacctgcgacaacatccggtgcatccagggagggtacatcacctgcaagaactaccccggccagaagctcgacgggtgcgcctgcgtgtgcgcgcccgaggacggcaagggctgcgtgctccacctcgacagcggctccaccaacaaatgcaccaagtactgaaccggattacacgcgttcgtcattttcatctctgctctcgtgtttgagttcgagctaaataaagctgcacgtgtgtcgtacgtacatggagtaaataacgaatggaatgtaagtttgtgtcgtggaatgaaatggaatgcaatccgttgatc

SEQ ID NO: 12443 - DNA, 437 bp, Zea mays
  Clone ID: MRT4577_111343C.1
ccttattgctctacttgttcgccaggtccggggtcacccaaacatcaagagctattagccttataatggactcctcatatggcacaaacgctgcagattaaggcaaaattctctcgaggctcaaagatttctattaggaacttaaagctcctaggacatataggttgatggccaaaactaaatccctctggagttctcggtggaaggaccaccataaaatccccggaaggggcctatccaccctcttgaagagacacgccagtggcggtggccccaccattaactttgagatacgtagaccccattaaacttgcccttaaccttgtcgggggggcccccccagaccttgcggtcaaaaacatccccgcggaacttggaaaccttcacctttttaacccttaccttggaaggggggactcgacccgaatttctaactt

SEQ ID NO: 12444 - DNA, 1069 bp, Zea mays
  Clone ID: MRT4577_111344C.1
cattgcctcgaggccggccgggccggggcacctcagcacaacactctccccagctcgagtaaccacagcgagaaccaatcgccaagcaaaaagcccgagaaagaaagaacaaacaggagacacagatggcggctgcagcgaaggcgtcgtggatggtggcgatgagcgtcggggccgtggaggcgctcaaggaccaggcgggcctgtgccgctggaactacgcgctgcgctccgtccaccgcgccgccaaggccaacgctcccagcttcgcgcaggccaggaagctggcgccgcccgccgcggacaaggccgccgcggaggaggggatgaggaccgtcatgtacctcagctgctggggccctaactagctagggcctctgctagtttcggcttcctgcaaccgtaccgagctcggcttcaaatctgatccatgactggttgccttgccgacccactgtaacataggagtatagcaccacgatgatgatgatgaaaagttctgccacttgatttcagttcctcaaaactctgaatccctacgctactgtgctggcatggaaataaaatgaagagtgcatttctgttcaaaaaaaaaaaaaaaaaaaaaaaaaaaaaaaaaaaaaaaaaaaaaaaaaaaaaaaaaaaaaaaggagtccgccgcaacctctcctccggaatcgacgaggggaaaccctagggccggagtcccgttccctcctcccacgacccatggggtcgaatatggcgaacgcgccgccgatgaaggggggaaaggccgggttcaaagctggaatgagggatccgcagaacaggatccgcatcacgctctcctccaaaagggtcaagaacctcaaaaaagtctgcggggatctggggaagggcgccaagggaaaggagctcaaggtcaagggccccggggggatgcctaccaaggggctccacatcaccaccaggaagtctccctggggcgaaggaaccaacacctgggatcgctttgagatgaggattcacaagagggtgatcgatcttgtcagaacaccagacgttgtcaagcagatcacctcaatca

SEQ ID NO: 12445 - DNA, 306 bp, Zea mays
  unsure (1)..(306): unsure at all n locations
  Clone ID: MRT4577_111345C.1
ctatgacgnnnnnnncacgcgnncgtaagctcggaattcggctcgaggatatatacactttcgctataatgtactgggttgctagtgattgggtggcagttaaacggatgtgtctcgctttcaggatacgaccatcgaattttgtatggtacaatattatatatattaacctcgggagcatatcttgcactgcgttggtgcacgtgaccccgtttcgcctcagccacatgatacacatgctacggtcaagcagacgtcttgccttcttagcgcctgccttggtccagagagcactgcacatgtatg

SEQ ID NO: 12446 - DNA, 298 bp, Zea mays
  Clone ID: MRT4577_111346C.1
accgttccgttaaacggtcgcctacaggcaggtataccaccgccccttttacggcccctgggcggaaatccaaaacgaataaggagagaatggctttgttcaatggtagtaaaatttgagctactcaaaatggaaggtaggccctcaatctcattactagctataagctacacagcgtcgcctatactgtgatagtgagagagaagcttttaatgagtgagacggtagagggagacaatggcatcgatggactcaaatgatatcaattccagacgaatgtgcgctactaaaccaaatt

SEQ ID NO: 12447 - DNA, 794 bp, Zea mays
  Clone ID: MRT4577_111347C.1
ccggccgggtcagccacatccaacggccaggcggggtctcacctcaacctccccgcctctacataaatgcctccaccacgcgagcctcaaaacctaacgctgtccgtcgccacctctcctccggcatcgacgaggcgaaaccctagcgcccgagtccctctccctgctcccacaacccatggcggcggatatggcgtacgcgccgccgatgaaggctggcaaggccgggttcgaggctggcatgatggatccacagcacaggatccgcatcacgctctcctccaagagcgtcaagaacctcgagaaagtctgcggggatctggtgaagggcgccaagggtaaggagctcaaggtcaagggccccgtgcggatgcctaccaaggtgctccacatcaccaccaggaagtctccctgtggagaaggtaccaacacctgggatcgctttgagatgaggattcacaagagggtgatcgatctcgtcagtacaccagacgttgtcaagcagatcacctcaatcaccattgaaccaggtgtcgaggttgaggtgactatcagtgacgcttaatatggtagccttatcatttcaaaaggcttctagtgaacaggatattttcaattcctagtgagaacttgtgtaacagaggaatccaagtatttcatatcaaagtttaaaagtcttatcgagggttcgcggtatggatgtatcctgtttcaaatgatttctcctaatgtatgaatggaaacggttaatggatgccccaaaaaaacaaaaaaaaaaaaaaaaatttgcggcc

SEQ ID NO: 12448 - DNA, 410 bp, Zea mays
  Clone ID: MRT4577_111348C.1
tcatattttttttttgttcttctcgggcgtgaaacacagttttatcgatattgtacggcgtaccaaaacaaacaacatcacttcaaggtcgtaagatgaataagagcctaagtaataacggcatgatttttgcagaccacagggccgataaatttaggccggtaattctaccccgggctatcaggggggggttattctcaagggaaagaccatcgaaccataaacaatgaacaccacagcgcagagagcatggccatagcagggaccagctgaggcgctctcctggattctagcttatatacaggacattgctctaacctaaacgtccacttgttcaaaacctgcgaagatatcctgatgcaacaggtggcgatctaggaggggggcgccagatcttggggacggcacat

SEQ ID NO: 12449 - DNA, 1907 bp, Zea mays
  Clone ID: MRT4577_111349C.1
gggtacctcgaggccggccgggaacgactctcggcaacggatatctcggctctcgcatcgatgaagaacgtagcaaaatgcgatacctggtgtgaattgcagaatcccgcgaaccatcgagtttttgaacgcaagttgcgcccgaagccttctggcggagggcacgtctgcctgggcgtcacgccaacgctctccgccgccacttctcctccggcatcgacgaggcgaagccccagcgcccgagtccctctccctgctcccacgacccatggcggcggatatggcgtacgcgccgccgatgaaggcgggcaaggccgggttcgaggctggcatgatggatccgcagcacaggatccgcatcacgctctcctccaagagcgtcaagaacctcgagaaagtctgcggggatctggtgaagggcgccaagggtaaggagctcaaggtcaagggccccgtgcggatgcctaccaaggtgctccacatcaccaccaggaagtctccctgtggagaaggtaccaacacctgggatcgctttgagatgaggattcacaagagggtgatcgatctcgtcagtacaccagacgttgtcaagcagatcacctcgatcactattgaaccaggtgtcgaggttgaggtgactatcagtgacgcttaatatggtagccttatcatttcaaaaggcttctagtgaacaggatattttcaattcctagtgagaacttgtgtaacagaggaatccaagtatttcatatcaaagttaaaaagtcttatcgagggttcgcggtatggatgtatcctgtttcaaatgatttcccctaatgtatgaatgaaaacggttaatggaaaaaaaaaaaaaaaaaaaaaaaagcgaaaagcggagggagggggaagggacgtgggaccgatccaatcatcaatccactagcttcactgggaaacgaagaaagaacataggactgatccggtcggtgggacttcctctcgaatcgccctgttcgagaccctagttgccccacgaaccgaggatccaagatgagtttcctgttcgggaagcggaagacgcccgccgagctgttaagagaaaacaagagaatgctggatcgatccatcagggaaattgagcgggagaggcaaggattgcaggcccaggagaaaaagctcatcactgagatcaagaaagcagctaaagaaggccagatgggagctgtcaaagtaatggccaaagaccttattcgtacccggcatcagataacaaagttctaccaactcaaatctcagctccaaggagtttctctaagagttcagacactaaaatcaactcaagctatgggtgatgccatgaagggtgtcacaaaggcaatgtcccaaatgaacaggcagctaaatctaccaggattgcagaggataatgcaagagtttgagcgacagaacgagaggatggagatggtgagtgaagtgatgggagatgccatagatgatgctttggaaggagatgaggaagaagaagaaactgaggagcttgtgaatcaagtacttgatgaaattggcattgatatcaaccaagagcttgttggagctccgtcggccactgttgctcaacctgcttctgtgggaagggtcgcccaggctgagagtgctgggaatgctgacagtggtatcgacgctgatttgcaggcaaggctagacaatctgaggagaatgtaggtgctacactagcaaaaagagtagtgccttcaagcactgttcctgcgaatgtgaatgaatacctgatcgatcaaagcggttacaagccaatgtgtatgttgaaatgaatgaagtgttcaatatgccggtagtaataacaaatgatgattatatatttattacatgtattgtcatatactaaaaaaaaaaaaaaaaaagcggcc

SEQ ID NO: 12450 - DNA, 2399 bp, Zea mays
  Clone ID: MRT4577_11134C.1
cgacaggaccactgccactgtgaagcacagcgtcagcggcgacaagacgaaggggcggaagctgccaagccgatagatctacgcaaatggagaccaaggacgtgtcgccgctcgccgccgccaccaccaccaccgcggcgcccgtgcctgcaccgacctctcaaccgcctccgccgccggccccttcttctatggcgccgccgcagcaccagcaccagcaccatccgccgccgccgttcgcgcagcaggcggccccggttccgtcgcctgccgcgtccatgcccggcggcatgcggctctcgttcgaccagatgtccgggaaggcgcccggggagcagcaccaccactccgcgcccatgctgtacacggtgccaccaccgcagtccgccgcgggcgcgggcgcaccgggggccaatgtgctgggcatgggcgagctgatgcgcaagaagcgcggccggccgcaagtacgcgcccgacgggagcatggctctggcgctggcccccatctcctccgcctccgccggcggcgccgcagcccccggacagcagcagcacggcggcgggttctccatcagcagtcccccgtccgaccccaacgccaagcgccgcggccgaccccccggctccggcaagaagaagcagttcgaggccctgggttcctggggcatcgctttcacccctcacatcctcgccgtcaaggcaggcgaggatgttgcttcaaaaataatgacattctcacagcaaggccctcgcacagtctgcatcctctcggcgaatggcgcgattagcaacgttacgcttcggcagccagccacatctggtggactagttacttatgaggggcgtttcgagataatctcgctgtccggttctttcctgctcgcggaggatggtgacactcgcagcaggactggtggcttgagcgtcgcgctcgcgggatctgacggccgagttcttggagggtgtgtcgctggaatgcttatggctgcaactcctgtccaggtcgtggtggctagttttatcgcagaggggaagaaatctaagccagccgaagcgcggaaggtcgaaccgatggctgctcccccgccgccgccgccacagatggctgccttcgtgccggctccggtggccaccagccctccgtcggaggggacgtccagcgcgtcgtctgatgactccggcagcccgatcaaccacggtgcgatgccgttcagccactccagtcagcaccagcaccctcaccagcaccagcagcacatgccgcctgcctacgcgtccgggggctggtccctctcggtgcaccagcagaacaggcatgattctgacatgaagatgatgtcgaactaacaggcgccccattcgttggtgtttgggctggagaggaaggaaaggaacctgctgatggttaggttggtactgctgctatgaaacggtcctcttgcgcgtcgtctgtgctctggtcagtgacgacgtgtcgatctgctacttaagctaagctagctaggagagttagggttcatggtctcaccccccgctgttgtgcccctgagtaagattaatttaatttgaattagtcgctctcataatgctgcgagttgtgatggtttcctgatcagatcttcaccttctaggctagttaaaatatcatttctctagtactatggatcatggatttacttggatacttgggtttaattcaggaatttgatcgtatgataaatagtataaaaaaaaaaaaaaaaaaaaaaaaaaaaaaaaaatttaatttgaattagccgctctcataatgctgcgagttgtgatggtttcctgatcagatcttcaccttctaggctagttaaaatatcatttctctagtactatggatcatggatttacttggatacttgggttcagtgcaggaatttgatcgtcatgattctgacatgaagatgatgtcgaactaacagtgctcaacctaggcgtcccatttgttggttgggctggagaggaaggaagctgctgatggttggtactgctgctatgaaatggtcttcttgcgccgtctgtcctgatcagtgaccccgtgttgctctggtcaatgacggtgtgtctgctatagctaagatagctaggaaggattagagtttatgggctcacttgctgttgttcccctgggtaagattaatttaatttgaattagccgctgttgtaatgctgtagccagtgtcctgaagtcgcttatcagtcagtccctgacgcgagctgtgatggttgcctgatgagatcttcacctcctagtcctaggctagttaaaatatcatttctctagtactatgaatcatgaatttacttggatgcttcggtttgattcaggaatttgatcgtattatgtttcgttttgttccccaaaaaaaaaa

SEQ ID NO: 12451 - DNA, 208 bp, Zea mays
  Clone ID: MRT4577_111350C.1
cgcctgtccatcgcctttctataagtccttctctccagacctaaaagcagctgcagctggaagggcacaaattccactgtgtaaaataaaatattaggggcaacacacttcatcaaggcagcaggaatgagagagagcagagaagatcaaggatgaagtcttgggtactgaaaaattcagtgctgggcagaaaaactgacagggtagt

SEQ ID NO: 12452 - DNA, 1384 bp, Zea mays
  Clone ID: MRT4577_111351C.1
cggccgggccgggcacgactctcggcaacggatatctcggctctcgcatcgatgaagaacgtagcaaaatgcgatacctggtgtgaattgcagaatcccgcgaaccatcgagtttttgaacgcaagttgcgcccgaagccttctggcggagggcacgtctgcctgggcgtcacgccgagtctattctagcggctacgcgtaacgctgtccgccgccacctctcctccggcatcgacgaggcgaaaccctagcgccggagtcccgctccctcctcccacgacccatggcgtcggatatggcgtacgcgccgccgatgaaggcgggcaaggccgggttcgaagctggcatgatggatccgcagcacaggatccgcatcacgctctcctccaagagcgtcaagaacctcgagaaagtctgcggggatctggtgaagggcgccaagggtaaggagctcaaggtcaagggccccgtgcggatgcctaccaaggtgctccacatcaccaccaggaagtctccctgtggcgaaggtaccaacacctgggatcgctttgagatgaggattcacaagagggtgatcgatctcgtcagtacaccagacgttgtcaagcagatcacctcaatcaccattgaaccaggtgtcgaggttgaggtgactatcagtgacgcttaatatggtagccttatcatttcaaaaggcttctagtgaacaggatattttcaattcctagtgagaacttgtgtaacagaggaatccaagtatttcatatcaaagtttaaaagtcttatcgagggttcgcggtatggatgtatcctgtttcaaatgatttctcctaatgtatgaatgaaaacggttaatggatgccccagtatgcattgcttttcatgacgtgagaaatatagattctgtttcagatgttatcagaaaaaaaaaaaaaaaaaagcggccactttcttacaccccctcaccttctcacgtccaacaggaaggtctcgaatcgtctcatctgttgtgatggatgtctagagctgtgggttgcgatgtgttgtatgctgagcagatgatgttaacatctacatcgactgagatctttcggggtctctgatgtccaaaaaaatcgagctttttaaaactgatgcttagcgtattgtcaccgagaaagtttcatcttcgtttacggatcatgttgtattcatgtgtatcaacatttaagcgcatttgtgtggtgtcgtactctttggatacgatcttaggctgaacatatgatgttaactaggagatgctgctgagatattacatcattgaagtctctaaaaccgagctttttaaactgatgcttgggctatgatagtatgtttagtgcggatcacattctagatattgcat

SEQ ID NO: 12453 - DNA, 287 bp, Zea mays
  unsure (1)..(287): unsure at all n locations
  Clone ID: MRT4577_111352C.1
cccacgcgttcgtccacgcgtgcgtccacgcgtccgtccacgcgtcctaaacgcgggcggggtactcactgaccgctcgggtgtgtacgcccatgttggcgagtacattcggttcggcgccggtgtggtccggtaccacgactactaatccatccaccgcgcgttcggtgactcgcgtgtgggcctcatgcccgatgctatgcccgatcacgacgaccacaaggagtacatgaatgaagcgttcctactgttcaatgaggacggcaacngatctatatctatcgtct

SEQ ID NO: 12454 - DNA, 1382 bp, Zea mays
  Clone ID: MRT4577_111353C.1
cccggtctcgggcgcccaatttctgtgaacaggtcaaacccccccgcggcgccccacccccgcacgcagcgagtcagcgacgccccggccccgcgtcttcgtattcataacgccagagtccagactccagagtcctcagtcctcaccggcttctcctcccttcccgtcaccgatggagctgttcgcgcgcgcgaaggtggtgcggctcaggagccaccacgacaagttcctgtacgcggacgaggacgaggtgcgcgtgacgcaggaccgggacgggtcctcggcgaacgcgcggtggaccgtcgaggcggcgccgcacagcgcgggcgccgtccgcctgcgcagccgctacgggcgctacctcaccgcctccggggagccgttcctgctggggatgacggggcggaaggtgaggcagacggcgcccgccgcgccgcgcccggccaacgcgtccgtggactgggagcccctgcgggacggcttccaggcgcgcctccgcaccaaggcgggccacttcctccgcgccaacggggggctcccgccctggaggaactcggtcacccacgacgtgccccaccgcaccgccacgcaggactgggtgctctgggacgtcgaggtcgtgcagctcctcacgcccgcgccgcggcccgagcgcaccggctccgcgcccgtcgccaagttgccggactcgccgcccgcgccggacctcggcaagccaccgcaggcgcatgggccgcaccaccgcccatccaagtcctacgcgacgccaccgcccacgctcgagcccgtggcgccgccgccgccgccgccgccgccgtccaggctcaataagctcgagtcctccctttctttctccgcccccttgcacaaggtggagggacgtgccatccattaccatattgcagatgatctgggcaatgtggatgaaggcacagtgggacactccttcacattcaatggcagcaacttggaggagctcgcccacaagttgcaggaggagaccggtctggaggacatcattatatgcacacgcagccctatcaacgggaagctcactcctctccgtctgcagctgccaccgaacaacgcagcgatgcatatcgtgctcgtccaggagtcctcaaaggtggccaaatcatttccttggccatatggttcataaaccacaaacctttggcggagacagggccttgagttctggtggagaaaatgccggttgtgcagttacaccgggctatcagaagcaacctaccgtaaacttcatccgtgtacagtaaaaagaggcacctccgctagtatatatagcgtaaaaccagcggagattagtcgtgcggtatactgagagatgtgttccattaattaatttataccctgaatcgtgt

SEQ ID NO: 12455 - DNA, 238 bp, Zea mays
  Clone ID: MRT4577_111354C.1
cctccgcgtcacccctctcgtcgcctcttgcggcgaccggcggcggatcgtccgcggcgcaacgcgaccatggggctcttcaccgttccgaagaaggtcaccatccccttcgaaggccagaagcccggtacctccggcctccgcaagaaggttactgtattccagcagcctcattagctgcagagctttgtcgagtcaacattcaatgtccttcctgcagaccaagtaaaatgtgcac

SEQ ID NO: 12456 - DNA, 110 bp, Zea mays
  unsure (1)..(110): unsure at all n locations
  Clone ID: MRT4577_111355C.1
ctctanggaccgatagaacattgagccatcccatccaccaaaggtattctgccaatttttaaagcatagaacccctaccatattctttaatttgtacgctcaaatatact

SEQ ID NO: 12457 - DNA, 374 bp, Zea mays
  Clone ID: MRT4577_111356C.1
attatgtatttttgggtgattatgtagacagaggatattactccatcgaaacagtgtctttgatcatggccttgaaggttcgttaccctggaagaatacatatattacgtggaaaccacgagtctcgccaaatcacacaagtatatggtttctacgaccagtgtctaaagtattatggaactccaaacgtttggaagtatttcaccgatttgttcgattttttgcctttgagcatagtggtagacaacaaagtcttttgcgttcacggaggattatctccgcaattagatactcttgatcacgtgcgtcaactggataggttccacgaggttccccacgagggtaccatttgtgaccttatttggtccgatcct

SEQ ID NO: 12458 - DNA, 1076 bp, Zea mays
  Clone ID: MRT4577_111357C.1
caaacagtgtccatgaacaaatgcagcgagtccaacctgctaacggtgcacaatcttcaaatgttggcaagatcaatcagatggaacagtctttcattctaagcggtgaaaatgaaaaaccatttacatacatatacagcatgcttattgactggggtaggcaacaggacacaaaagcctacattcaaggaaaaatcaagggtctgatcacttctgtaaaaaaatttcaatataaacaacgcaccaagtacgagctttatgtatatatagatgatgggagtttcatttcagaggccttcattgacagtgatattgtgaataacatgcttggcctttctcctggagaggttactgctgcacttgctggtgaattagagtttgcatcacccagtgaagtgaaagaaactttgaaaggatttcagaagtttttggtgaagtttgagggtatgatgcttatcgagttaaacaagaactctcctgttcctgttgttcgtgagttaaatgaaggttgctcaagttctactgcatggcttctgctcggaaggctgaaaacaatttcttctcagaagaagaccatccaaactcaggatattatggacaccactccatgattgtttcgatcctctaaaccccagcgggtacgcagatccgcaatgattttttgttgagccaggccattggccaaatgcatttgagaagtatggttaattaaattagctttacgatacatatatctgttggcttgtaaatcttagggctagtttggaagccacaaaaccggagaggattggagaggttaaaatccctttcttatttaaattgaataaggcctagtttggaaggctaaaacccggagaggattgaagggttaaaatccctttcttattcaattttgaataaggaggggattttagcccctctatccccttccgggtttaaggttcccaaactagcactaaaaaggggattttagcccctctaatcccctccgatttttgaatcccaaactaacccaactaacccttaatgtaattatcgttcatgtgtcctcatgccttattatggtctggaagtgc

SEQ ID NO: 12459 - DNA, 578 bp, Zea mays
  Clone ID: MRT4577_111358C.1
ggaaaaaaaaaggacaagctagtggggcagtatccaattacatatggccaaaaaaaaaaaacctaaaatcgcggggaaaaaaacagcaaactttttagctaaaaaaaaagcaaagctgggggggtttatccaattacatagccccaaaaaaaaaaaacctaaatttatagggaaaaaaagcaaacggtttagctaaagactaatcaacccctaagggcccagggaacattaggcattttcaaacaatatcttaaatcggagccccaggaaaaatggcttcggaccagcgggcatgacactaagggctaggggaaaaaccctctttttttccctttttttaggggggaaaacttttgggggcctaaattctagctttttactccttaacgggatattaaatttctcattcgcagcccttttttggtcaacgggtaaggctaatcaaaacccccgggcttttttcatttcttaaaatccatcgggttctttctttttttaaaaaaattggttaaaagtttcggggaagcctttcttttcagcttgaaaggcggcggctttggcctttttctttccagggg

SEQ ID NO: 12460 - DNA, 457 bp, Zea mays
  Clone ID: MRT4577_111359C.1
atttctttgtactcaggccgaattggtatcctacacagctatctaatatctactttctaatccatcaaaatgtgggcaaaagctgtgtctatcttcgccttggcgaccaccgccgttgcgcaaaccaagggtttcaactacggcgccaccaacgcagatggctcatgccgtggatacaacgactttgtgcgcttcttcaatgaggcgaagagcctacctggtgcttcaggcttcaacacagcacgcctatacacctcagtccaatgcggcaccgcagccgaccccatatctgccttccaagcagccatcgataccgacacacagattctcgttggtctctgggctagtgccggacgtaccgcttacgagaatgaactcaacgccttgattcgaggtgccagggacctcggtagcgctatcaccgacaaggtcattggtatcagcgtgggatctgaag

SEQ ID NO: 12461 - DNA, 444 bp, Zea mays
  unsure (1)..(444): unsure at all n locations
  Clone ID: MRT4577_11135C.1
acccttgatcaacactcaccatttactgtccaaaggggaaaaactgctattctgatataggagcggaagttttggcgcgagcttatttactttgttgctgctgtcacgtcacgaaatggactattgcagattaccgaacactactgcctgttggggaaaaaaaatagngctctagcatcggacgcaatggcnagttggcagtatcttatgcctttggcaattctcttgtggtccatagcggagtgctcactgcatctaaaatggtaaaaatgaatgggtgctgtcgtgtgtggcatccacgcgaccttaatattctactgtaaatcgcccctttaacaaataagcctgtcttaagagactgcaaagtgcatctggacaattgaagttccatctctcttacattattcagaccacttgtttcttcccgtctcctggaaatctatg

SEQ ID NO: 12462 - DNA, 843 bp, Zea mays
  Clone ID: MRT4577_111360C.1
actccgctctcgccagctttccccttccaaaaaaccgagtttgaaagtcggtaagctgtgccgcccctctccgcctccgaggctcccttgccacgaatctcgccgccatggccgccgcctccgcgccgctgctgctcgccctggcgctcgccttcgccgcctccctggccgccgcgggggacaccaaccgcgtctacgacccttgcaccgacaccaagatccagcgcggggacggcttcaccttcggcctcgccttcgccgccaacggcgccttctactccggctccacccagctctccccctgcgaccgccgcctcacccagctctcgcagctctccctcttccgccccaaggtcgacgagatctccctcctcaccgtcaacaccaccactggcttcagccccgcctcagctggtgggtacatggtagcatttgctggcaggaagtatgcagccagatctcaaccagtctttgtctccaattcctcagttacagtgtccagcttcaccctggttcttgaattcaacaaaggcaagcttcagaacctgcactggaagaaggacgggtgtggtgcctgcacagggaagccaaacttcatctgcctcggcaagcaaacctgcgccatcagaacaaacatctgcaagagcaataaccagggatccatggactgcagcatcggcatccagctggccttctcgggcacggacaagcacgagtcggtcctcaactcgtggtacgaggtgtcgaacctgcagcagtactcgctctacgggctgtactcgaacgtgaaggggtccctgagcggccagttcaacagttcttctaggctctcctggaacgacc

SEQ ID NO: 12463 - DNA, 328 bp, Zea mays
  unsure (1)..(328): unsure at all n locations
  Clone ID: MRT4577_111361C.1
ggagataagtcatngctaganncgnangngcgggtagtctccaaatgtgggcgatagccactnngctctaagatcgggagtaatgaggtataaatcatcgctgtggtgtgctnaaaaaaaaaaaaaaaaaaaaaacaaaaaaaaaaaaaaaaaaccaaacaagcacaaagaccacaaaaaaagaaaaaaaagagaaacatcagaagaccaaaagcaagaagaacaaaagatgcanggggcgcccccccaccaagagctccccccaccccgggaaaaaattccgcacccgtcccacagcggaccccctttcccttacagggggaggaag

SEQ ID NO: 12464 - DNA, 266 bp, Zea mays
  unsure (1)..(266): unsure at all n locations
  Clone ID: MRT4577_111362C.1
caggggagcaaggggnngcccnnggancacggacagcacanaaacncaagaggaacaaccacacacacanacanagncgcggacacacacaaaagaccgnancgancccggggancnaggacaaacaaaagggggagganaaaaacaagggaggnnaaccaaagaaggcagcagcaacaacagcnnngccagcggggangacccganagggggcnanaagcgaggggccagncacgngggcanggaacnncacagncnnaccagca

SEQ ID NO: 12465 - DNA, 184 bp, Zea mays
  unsure (1)..(184): unsure at all n locations
  Clone ID: MRT4577_111363C.1
agggcggacaccgggcncgcaggcccggcgctgacagcccgcccgggcccgcgcgggcggcgcgcacgggcgccgcccacgggggggcgagcacggccggcacnacagccaccacgccaggcgagggaacacgccaaggggaaccgcgcaggccacgagacggacagcccggcaccacgacagc

SEQ ID NO: 12466 - DNA, 276 bp, Zea mays
  unsure (1)..(276): unsure at all n locations
  Clone ID: MRT4577_111364C.1
atcatacacaagcttaaaatcaatgtgattagcattgctgtcattcttgggcaagtgacacatgcagctgcagattgtgatatctgacaaaggagatgatagggcctacttgttctattggtgcgctgagattgaaaagatgagcagctactatgataggaaggnnnagcagcatggctgaaagatctagcgaagacaatgttatgaagctccgatcactatgtgatgaaaaggctgaactcactgtgcgactcgagcatgtaattcatgtctaca

SEQ ID NO: 12467 - DNA, 343 bp, Zea mays
  unsure (1)..(343): unsure at all n locations
  Clone ID: MRT4577_111365C.1
tcgacggacgcaggcaggccatcaaagatttatttccacactactcaaatgcagtgtatgctggatgtggaaataggggcacagacaagcttagcgggggcaaggctgggnttcctatgggcaagaccgtcaaaataaaccccaagggagaaggggcagtgaaccgacgggtcgatgcaaagacgaacacatcctagcatgctcgtgtccacgggaaggaagctccaatatcgacgtganctgaacaggaagacgacaacgcctggaattacagaaagaagccaacgcctgatgtggatttgagagggacaagacaaggctgcacaacaacactgcactaatt

SEQ ID NO: 12468 - DNA, 269 bp, Zea mays
  Clone ID: MRT4577_111366C.1
cgagcattcttcaggtcatctgttccttctgagaaaacatggtcaacgtcttgaaaggagtgcttatagaatgtgatcctgccatgaagcagtttctgctgtacttggatgagtccaatgccctggggaagaagttcatcattcaagacattgatgacactcacgtctttgtaatagcagaattggttaatgtcctccaggagcgagtgggtgaattaatggaccaaaatgctttttcccttacccagaaatgaaaatactcaatatgg

SEQ ID NO: 12469 - DNA, 243 bp, Zea mays
  Clone ID: MRT4577_111367C.1
gatgacggacaggtatcaattgctgctgctaccatattctgttcagaaagtctctccacctggaggctagcccacaactaccagttatgaccagaaaacagcgtgttatcgaggaggaaaaataacaatctatgctaatgacaaaatgaatacaaccctcaactattcagtatggaactaagtccagaacaggccttacattgatactacctacaacgcactcaaaagataatgacactactt

SEQ ID NO: 12470 - DNA, 1176 bp, Zea mays
  Clone ID: MRT4577_111368C.1
ctcgaggccggccgggcctgccggcatgtgcagtccgcgccctcccctcggccggatcctccgcctcgccgtcgccgtcgcggcctgcgcctgctttcctagccccgtctccggcatccggaagggcattggctttattcaaccaattgtgtgcagaagcactgttcaggggcggcatctgatctctgatgataatggttatgtatgttctgcactttcaatcaatccatggtctcactgctgcccaacaacaggggaccgcttttcctgccagggctgcgaacttgatttacagtgctgcaattcatatgaatattgtgtttctttctgtttgaatccttctaagatcaagaaagaagacgtgctgaagctgaaggtagctaagccagttactgctggaacatacacaaatgttttcgatttctgcatgggacgatgccgccatagctctgcaagtgtggttcatgaaaatgcctatgccagtgatttccatcactgtttttcagtgcaacaaaattcatcaggatcaactgagtctagttctgtatcaaagttgttgggcattaacgttgtagtaggaaggcccagggaatcttgcagcttggtgtgcaaagtaagaggacagtcctgtgttccaagcaggctctctgtgttgaacaaatgtgagataatccaggagcatgcttatacatgcagatggatgagcggctcacatgtgatggttcgcaccatcatacccggcggctctgtccatgcgcctgagaaggggaaatgaatgtgacactcataagacagcagaggggaaacaagtggaggcgataagctgataaccgatggttctccatcacacccccatgacgaacaacctctccgcgcatcggttgcgggtttcctcaacaagaacgccctactctcctgtttctgggaaggattatggatgcaaaatgaaatggagtgcctgcaaagatctgctccagttcttgagaggcgtcgtggatgcagaaggagatgcaatgcaatacctttcaaatccttgcatggtatctggtaggattttgcatgctgaatgaaaatgcacgcaggcgattccatgagcctttcgtgcatgttttgaaacacctgaaccaattatatatattcgtaatatattgcacaagcttccatgcatgttttaag

SEQ ID NO: 12471 - DNA, 301 bp, Zea mays
  Clone ID: MRT4577_111369C.1
ccgagcatacagcgccagcaaggatacccacactcttcactggaggtgagttcaggaagtccttaggcatgggttatcagatagagtccctgctgtcataggagctagcaaatagagctacagccttgtccagctcatggaagcctctttggatgtctacagcatcttagtgcagcctgagctatgacaccagatgagatgcaagatcctctctccgaaggaagaaatggaacaggactcctatcctggcgctcgccgtgccattcaggggaaaccctcccctgaatgagagggtggagca

SEQ ID NO: 12472 - DNA, 2424 bp, Zea mays
  Clone ID: MRT4577_11136C.1
gcgtactaagcagtactatcggaatccgggtcactcacgcgtccggccgctttttttttaaagaattgagtaaaccaaatcacatttcaaatcaacaatggtacaacctgtacagtgtactacatcacttccggtagaaatcaacaagggctttagacagcaagtgtagtttcgacatgtgtggtccattgtacacgagatagtatttaagaagccatacagtgtaaatcttggttgtatgagccaacccacgctgcaaaaactaaaacaaaaaaagatggcgtacgtatattcgtagatgtggagtgcaagtaccatggagtgaacagatacagatgggagcagcagagcacagtggacggggggagcaactgaacacaatctgtcgaacgatggtaactgagatggagctttcactttgttcacttgtgccttgctactccggcgactcatgttggtatgcggttaagctgtccatcatatatgcatattcacagtcacggaggttgcttcagaagagctcttcagagttgaatttgttccatgcctccttaagaatgtcaaagactttttcggcaatatatttctgctgaagtgttgcacctttctgttgcaccttatcaggatgaatgcacagcgttgccttcctgtactgcttcttaacagcagctccagtaattaaatcagtcaatgatacagcttgccatccacattctggccaaagtatatattgtaaagttgataacaaagcacgcaagttgccctctttcccagcagaccacctcttgatttcgaagtctagagtgtctccaattctatctctctctgcctgctccctctgaacttgcatatcacgttcattcttctcagccagagcttttgccgctcgttcacgagtcctctgatgacgttctaacctagcacgtcttctttcttcactttctccctcaacttcttgaaaaacatcagaagatgcaggagctccaaataagtcagacagatcatcaccaaaacttgtggctgatgccacttttctcacaggagccgaagttgatgctgctctctgtgatccattagttgttcctctgccttgagctccaaaaccaaacatagaatccactgttggtgttggagccctctgtttcggcgcactgttggcacgagaacccacaccaaagaatgactcaagatcatctggtgtgctctgtttttctcttgaagcagcagctgctgctgcggtggcagcggctgcagctgcagctgcctgcctttctcgagcctcagtagcagctctttccactgcagctcgttcagctctcttccttgcttcttgctgagctctctcagcagcagctctttctgctgctgccctctccctagcagcagccctctccctctccttggcttcagctgctgccttctccttggcttcagcagcagccctctcctttgcttctgcagcagctctctcccttgcttctgcagctaccctagctgctctttctttggcctcaactgcagccctctcacgggcttcctgttgagccctttgcacagcagcacgctgtgaacgctggcgggcctctctttcagcttttgcacgagcttcagcagatgctctctcacgtgcctcctttgtagccctctccactgcctgtcgttctctctctctttctctctgttgttccaactccctctccttttcaagccttctctgctccctctccatctcctccctcagcttcatttctctttctttctccaatctttcttgcctgtctttctcttcagtatctgatgagcttctttcatagtcctcatcaaaaacagtgttgccataagcaggcatttgaggtttgcccatggaaaagccttccaggtcatctattgaagaaacctccggttgctttggcaaatctgtgtaatggttctgatttggggtagactgacgagcatgcccattctcctttgcatttgctctcagtggctttcgtttgagaagaggtggtgatctggagggtggtggagcaatagttggtgctgtgaaaaggggaatctcggaaactgtgagccatatatcatcttcagattcagtagatcgtggtgactgatcttccgtatcattaccacgaacgtcagaataccttgcagactgtgacttgggcatgacattatcaaagtcttccatagaagattgacgcgctgaatttctatccattgaatggtgtagaggactcgaatcgcggactgcgcttggcggttttgtgtccttggcatgaccattgaattcggaggtaaacaaaggatctgattttggagcctggtcaaaagcacttgattgctcgaataaactatcgtcatcagcagtactattggcagctttgccatcaaagcttgcaggtttatccagatcttccacgggat

SEQ ID NO: 12473 - DNA, 2260 bp, Zea mays
  Clone ID: MRT4577_111370C.1
ctgcttgtctcgccgggtttacacaatagggtgaggggcgtccattgcgagttgcgactgcgtcgccgattcccctgccggcatgtgcagtccgcgccctcccctcggccggatcctccgcctcgccgtcgccgtcgcggcctgcgcctgctttcctagccccgtctccggcatccggaagggcattggctttattcaaccaattgtgtgcagaagcactgttcaggggcggcatctgatctctgatgataatggttatgtatgttctgcactttcaatcaatccatggtctcactgctgcccaacaacaggggaccgcttttcctgccagggctgcgaacttgatttacagtgctgcaattcatatgaatattgtgtttcttgctgtttgaatccttctaagatcaagaaagaagacgtgctgaagctgaaggtagctaagccagttactgctggaacatacacaaatgttttcgatttctgcatgggacgatgccgccatagctctgcaagtgtggttcatgaaaatgcctatgccagtgatttccatcactgtttttcagtgcaacaaaattcatcaggatcaactgagtctagttctgtatcaaagttgttgggcattaacgttgtagtaggaaggcccagggaatcttgcagcttggtgtgcaaagtaagaggacagtcctgtgttccaagcaggctctctgtgttgaacaaatgtgagattttgcagaaatatatgagatgcaagagtggctgctttcccagccttggaccagatcaacctgctgaagttgttgacgaagctccaaccagcttgaatccaggagcatgcttatacatgcagatggatgagcggctcacatgtgatggttcgcaccatcatacccggcggctctgtccatgcgcctgagaaggggaaatgaatgtgacactcataagacagcagagggcttgcttactcgacaggaaacaagtggaggcgataagctgataaccgatggttctccatcacacccccatgacgaacaacctctccacgcaccggttgcgggtttcctcaacaagaacgccctactctcctcctgtttctgggaaggattatggatgcaaaatgaaatggagtgcctgcaaagatctgctccggttcttgagaagcgtcgtggatgcagaaggagatgcaatacctttcaaatccttgcatggtatctggtaggattttgcatgctgaatgaaaatgcacgcaggcgattccatgagcctttcatgcatgttttgagacacctgaaccaatttatatattcgtaatatattgcacaagcttccatgcatgttttaagacaaaagtaacccaaacagaactagggatacatgatcttttaaatcaattacaccatgccagcatctctgcaccacaaactcccatgcccttttttggtcagcctcggtcaaaaagaataatcaggcttgaaatctttcatgaactttggtctctccctccctttgttatcatctttgcgtggtggcactctctgctgcagctgcagcttcgtcttgctggttctcctcctggaaggccgggtgggtgaggatgttccccaggagctgtgtgcccctgagcgcattggtgagcggcaggtgaccctcaggtgtgtcatcctttatctcccacatgaactcgtcagggaaggccctgtagttgtactgctctacctcagtgtccagcttcttcatccagccgaccctgatgaagaagcgggtgaagtcgcgctgcgatttctcccagagccgccgctgcacgctgtacccgaacttgccattgctgtgctctttccagagctcgtcaatggcgcgaaggtcctcggcggagatgaactggacctctgagaagaagacgtaccctcggcgcctcgcggactcgccagcaaggtcgatgatgagcgcccgggtggtctcgtcggcctggcggtagtcccctgccgcgagctggcggctgaggaggtcaagggagggggctggtgatgagtcttcttctgctgctgatgcagctgccggggccactggagttggagctgacgagttggtggtcgaggttgtggtcaccgagcgggaggtgttggggtggagcctgaaggaaatgctgctgccggtgttggtggagagcttgaacagggcagacggggagccgtcatggctgccgccgttgctggcgaaagaatggtgctgcgggagaagaaaggattgcagagaagcatttgcc

SEQ ID NO: 12474 - DNA, 287 bp, Zea mays
  unsure (1)..(287): unsure at all n locations
  Clone ID: MRT4577_111371C.1
agagattccgtcgcacacatggccgctctcgactcagacgcccgcacgaggtgcaggctccttcactatctgtaccgtctcctacagtccgcgtccacaaccgctgtcaccncgtcgaccttaaccagccgcttcctctgctactcctcgcaggtgccgagcacacctgaccactacccttacattcggatcccagacgtgcgcgtctctacgctcctctaaggcttccgcgtcatcaagcaggcctaaccggtcggcacacggattgcctccgtaggcgtatgggt

SEQ ID NO: 12475 - DNA, 330 bp, Zea mays
  Clone ID: MRT4577_111372C.1
cccacgcgtccgcggacgcgtggggttgttcccatgcttactgcacctaacaaacgacggagatgaagacatggggtttgtgcttaatccagcagagagtgtggacgaatgctggttggagcagtttcttgaacgggacgccattgtggctgcgcgatccacttacactctcattctgacggtgtcatgggagcaggacaatattcctgaatacagattttgtgaaatgatcctcgagagctggcctaatcaaaactcgtatgactctgaagctaataaggaggtgaaactgacagcttatttgtcgacttaacacagacagtcgacaac

SEQ ID NO: 12476 - DNA, 303 bp, Zea mays
  unsure (1)..(303): unsure at all n locations
  Clone ID: MRT4577_111373C.1
aaacnacccggcgctgcgccctgctccactctggcgcgtccctggtggtccatgggagctaccaaggtcaatgagggggggtccttgtaatatgtttatgatgtgtttttctttttttttctttttttctaattatatgtaagattatggacatgttactagacgtaatctatgcatagagctttatctatatttggggggggggaaaaaaaaaaaaaaaaaanntcnnnncnntctaaaagatccaancttacctacccntacatgcaacnccataactcttctatantgtnacctaaatta

SEQ ID NO: 12477 - DNA, 341 bp, Zea mays
  Clone ID: MRT4577_111374C.1
ggccccacaaaaaaaaattttgggttcccctttggggttttttacaaaggttgtttttcccaatttcttctggaaaacaggggtcccccttttaatacaaagccccgaatcccaggttctttttttttttttgtcccaaattttttggtttaaaaccaatttaaacgtggccccgggacttattttttttttaaggggacctggttcagggaaattattttcccaactgggcccccacgggcctttggggccctacaagaaaggggcgggggccttcctagttcaaaatgaacgggcccgggcttttttgtagggggcccaaaaatgccggggggtccttt

SEQ ID NO: 12478 - DNA, 234 bp, Zea mays
  Clone ID: MRT4577_111375C.1
atgtcatggtgcgtgtgcatgcaaatgttgcgaggcgggcggtgtgggttattctctctgtctcgacctcaccagttacatcaggtgttcgacctcggcatcggtaggtacaacgagacgtgccacaacatcgtcaccaagtacatatctgagtgggaggccatggtcacacgtgcgaggaggtggattgacttcaagaacgactacaagaccatggacctcaacttcatgtag

SEQ ID NO: 12479 - DNA, 729 bp, Zea mays
  Clone ID: MRT4577_111376C.1
cctcgaggccggccgggccgggatttccctcggagaaagtgttgcggaattcacatcagccagggagaagcccgctgacagctgcaactgcaagccgccacgggctgagctgaggctgtgtcgatccatccgtattcaggaaaacaacgccaatcaatccagtccagaggaagggcgatggccgccgctaggatcgccgcctgcaccacctccgcccgcaccgccctcgccttggcagacgaccccgcgccgccggacacgctggacgtggtgcgccggcagcgccagctcctacgccgcgccgcggccctctgcctcgaccccatcgccgaggagtccgacggtggcatcgactctgcctccgacgtccactccttgggccggagccggagccggggccagaccgccgccacctccgcactgccggcgcgtccctgaggatctgaaccgtcaaagacgagaccttttccttcttgccataggagttgttggggacttgttcttaaatgctaagagttaagaacaaggcaacaaaaaaagaaaaaagtgttactgtcgtccgtccttcaaagcattatatcccttcgggaaataatgagtttcggacgaaggtcataagagacataccttcgtaaacataacaagtaatgacgaaggactcatataaagcatgaaatataatataagcatcatcataaaaaaaaaaaaaaaaaaaaacccacgcgtccg

SEQ ID NO: 12480 - DNA, 225 bp, Zea mays
  Clone ID: MRT4577_111377C.1
gatgattgccgcaccaaataactacagagctagcttctgaaccacacagggacgctttaacaccacacgagcttgatggatagcgggaccaacctcccgaacacgaaggagctccagttctggatatgcaagtgggatcgataagacctgtacatgtggcgagacacaaccgccgagctggagaacgactccaagacgcagctcgacggtgctgacagagccttc

SEQ ID NO: 12481 - DNA, 393 bp, Zea mays
  Clone ID: MRT4577_111378C.1
aggaaaaaccaaacgagttccttgcacaaattttcagaggggggtacaatttgacgatcagggagacacatgccgcacttttacattttattccaccaggcaaaaaattttttttgttcctttttagcaaacgttaaaaaacaaaacccttgacgggggggaacttgttgaaacttcacaaggggacgccgttcattccgtttcccacgttctggttgacgggcttattttgggggaaaaggccctccaatgagttgtcgtttttcccaccccagttggggattttgaggagaacaaacaggtttaaacccaactttttaaggaaattcaaaggggagcccctttccccctttgaacaatattttttggatttttggcctttttggggggttc

SEQ ID NO: 12482 - DNA, 1720 bp, Zea mays
  Clone ID: MRT4577_111379C.1
aatataggatttggaaataaaattgaagagaaaagagaagtgagaaaagaaaaccttagattcaaaataaaggaaaatatataaataaagatattacttcatactgacattttgatgtaagtgtttagtataaagtgcaaaattcacaacaaaggttgggattcaaatttgaaatttaaaaataaaagggaaagaaagcaaagaaaaaaagaaaagaaaaagaaaagagaattctcctgcactgggccttaaccctgcgcgcgacccatttcctgtgcttgtccgcggcccactcggcccagccggaccgccggcataaaggagcgccgatacctggtccccacttgtcatccacacgtgctcacgctcgcctcgtgactcgctgtcacgtgggtccccttgtcagtgcttgtaacaccacgtgcggagcccttcctctagttgtgggacccacttggtcagcgactgctgctcactaaacaatcaatcgccgctaggatcgccgcttgcaccacctccgcccgcaccgccctcgccttggcagacgaccccgcgccgccggacacgctggacgtggtgcgccggcagcgccagctcctacgccgcgccgccgcgctctgcctcgaccccatcgccgaggagtccgacggtggcatcgactctgcctccgacgtccaccccttgggtcggagccggggccagaccgccgccacctccgcactgccggcgcggccctgaggatctgaaccgtcaaagacgagacctttttctccttgccctaggagtggagttttttcccgtgggttttaagaaatactccgtaccatgtatatgttgatactatagtagtattgtagaatatagaccaaaagctgtttcagacaccattgcaaaatagagctttcaatatcatggtttaatccgaactgtggtaattttcgagtatttgacactgttggggacttgttctcaaatgctatgagtaagaacaaggcaacacaaaaacgcaaaattttaaaccgtcaagacatgcacttttctatcgttgcgctaccggacagtgttatttgtctcttaatttatatataaggtcatgtttaaatatattagagataatagttaaaaaaaaaaaaaaaaaagtccactatttcccttaggatataatgatcttcagacgaaggtcatgaaggacataccttcatcgatgtggtaaacgatgtagaaataaaagcatataaaatgcaaaagaatataaataatccttaccattcaatatattatttatattcttattttataaacatggatggacataaatgatatttatattatatcaataccttcttcttgttagaggtgaaaatgtaagagtgacgcgagagaaattacgatacatcatgaatagtacgatgttactgttcatctatttataggcgcgggacacagcccggacaaaattacattcatgtccctgatatttactgttaatcataaggcaagatatcaaggactaagtagtcttttctcctttaagtcggttccatctttcaccatcgtcattatattaaaccgaggctctttcagccacagcttcggcgtcctttcatcctgccttcaagtcgtatcttcatatcacgcataccttcatctcaaagccgaaaccaactgtaatagtctatgttatactgaaaaacatattagtcacattttttagaccttg

SEQ ID NO: 12483 - DNA, 148 bp, Zea mays
  Clone ID: MRT4577_11137C.1
accacaccgacaccgacgtggtgatcgtaggcaccgggtccgcagacctgtcctgcgcgtacgaactgtccaaggaccccacagtgagcatagccatcgtggagcagtccgtgtccccaggcagcagcgcgtagctgggccggcagct

SEQ ID NO: 12484 - DNA, 552 bp, Zea mays
  Clone ID: MRT4577_111380C.1
cccacgcgtccgcccacgcgtccggcggcgcccttttttttttttttttttttttttgactatggcggtgatctggttcatcgcagaaacagaagtacagaagccagtggctttgtcgtccacctgtgaagagctgaatacgttttgtctcagtgacgcagtagagtagcttaacactacatactgtaaacatcatcatttatcagcacgggatcctattctccaaaaggaaaaagacaatatttttttttgatcaactatgcctccctcatagctagagatagtaagcagggtctgcctgccggatgggctgttgatgaggctagaagatcgttgggcctcggaacggcaagcagacaaccctcaggtccctaggctgcgggacctcctccaaccatgccagccgacacgtctgctcctccgcaataggcacgtcgtcgtcacagatggcaccgcttgtggctgtcgacctacaggtacagggacgaggacgatggtgttcgccgcccttttttttttttttttttgaaacggaaacaaagatgtatcatc

SEQ ID NO: 12485 - DNA, 265 bp, Zea mays
  Clone ID: MRT4577_111381C.1
gccgattactaattatttataagtagcctactctgtttctcggactaacactccctccacggggccttgacaacctacggcgggggcctcgagaccaacatcatcctccatcatgagacgcaaaaatacctcggcttaaacttcaacaccttctccacggaggaggcgatgcggaacgccatcgatggcatgaacggcaaggagctggacggccgcaacatcaccgtcaacgatgcccaatccctccgctgacgtggaggcggcg

SEQ ID NO: 12486 - DNA, 552 bp, Zea mays
  Clone ID: MRT4577_111382C.1
aaaaaaaaaaaaaaaaaaaaaaaaaaaaaaaaaaaaaaaaaaaaaaaaaaaaaaaaaaaaaaaaaaaaaaaaaaaaaaaaaaaaaaaaaaaaaaaaaaaaaaagagaaataaaaagaaaaaaaaaaaaaaaaaaaaaaaatatgtgtttttttggtccggggggggaaccagacacaaaaccccacagcctgggtacaaaaaatcttcttggggggcctttttgggtgtgggggagaaaaatatgaacgcgttgggggtgtcttccccggtttccccccgggaaacctttgaaaaagggggtattaaggagagaacccccgcgcggggaaagccccgttgtgggcagaaagttcttccgcgccctgggggactttctcgtttttttcttcctgccaagggggggttagtttgttccattcgctctaagggcgggggactgtttttttggcggccatctttttatcgcacgaaatacgtgtgggcgggggggggtcccccgggcaaaaaaacgaccaaagggccggcaaacgggcgttttttcgggtggtttg

SEQ ID NO: 12487 - DNA, 614 bp, Zea mays
  Clone ID: MRT4577_111383C.1
ccggccgggaaaaaaagcaaggcctctgcggttgtgggctgtgcccatgactccaggccaacatgtaattatatcgccgtgggtaacgaggtgagcgccggcgacgccgcggagatgctgctcgcctgctccgtatcatcctggctgctggccgagtgaggaggcacgggcgtgcatagaacaaagccacacttcgaatgtcgacgtgcgccgccctgacacagagcgcaaggagtccatcctcgctcccgtgtacgccatctatcttgtggtctgatggcacatcgcgggtactagagtccaccatgcgacaaccgtcgatgttttcttcatcgtgaacaaagatcctagaggccatttggagggtggcctgctacaagcctacaagggagggagagagaggatgcttggcagtctcgttttctggctgatttcgtgtaagcagatcgggagcagcttttcagtgaacaatttggtcatcgatcgcgaaattgtactctaaagtagacatgtgcatcgatggtcacatgcgaagtcttttgtaccttatgatcaagaaaagacttgtccgctcaaatctgaattagaaaaaaaaaaaaaaaaaatttgcggcc

SEQ ID NO: 12488 - DNA, 296 bp, Zea mays
  Clone ID: MRT4577_111384C.1
agaacgtgtttccctccaaatttaggtcgagccatatatgctgatggaaccacaaataactcacggaaggaaaagaaaccctcgtgacttgactggactggacatgcgagatgatgtccaatccccaaaatgaacaagaacgacagattacattacaatacaccaagatttatggcacaagaaccaaccccagactttctccttccttgaggaacatgcggattacacaaaagaacctggcgcctactagtacaggcggagcacgctggcggccttggtcggtaggccgagatccc

SEQ ID NO: 12489 - DNA, 331 bp, Zea mays
  Clone ID: MRT4577_111385C.1
attaagaccattaactgcatctactccagttctcaaaagaacccgatcgacagggggagctggttgctctttgccctcactctactgtctctacctgcaagctcctcctacactcatacaaacggcctatgaggctgccatccaccgactacctttcatcaaccgtcgcctgaacatgtgacaaacccaattgaccaaccacacacgatgcatcatccaaccccaacacacatgtcaccatcatcacacttgtcactgcaacaacatgtacccctattacagcatttaccttctgtacaattccactaacataatattacggcccaacatc

SEQ ID NO: 12490 - DNA, 776 bp, Zea mays
  Clone ID: MRT4577_111386C.1
cactccatagggcgaattgttccaacgccggccgccgggaggcagaaggcctctgcggttgtgggctgtgcccatgactccaggccaacatgtaattatatcgccgtgggtaacgaggtgagcgccggcgacgccgcggagatgctgctcgcctgctccgtatcatcctggctgctggccgagtgaggaggcacgggcgtgcatagaacaaagccacacttcgaatgtcgacgtgcgccgccctgacacagagcgcaaggagtccatcctcgctcccgtgtacgccatctatcttgtggtctgatggcacatcgcgggtactagagtccaccatgcgacaaccgtcgatgttttcttcatcgtgaacaaaggcgctcggctactgctaatcgtcctgcctagagttcgcacagcagcagcaacacgtccgtccatccaggctgctgccatgggcctgcaggccctcgggccggggttctgccaaccaaccggcctgccaagaattcacgcataaaagtccgatcctagaggccatttggagggtggcctgctacaagcctacaagggagggagagagaggatgcttggcagtctcgttttctggctgatttcgtgtaagcagatcgggagcagcttttcagtgaacaatttggtcatcgatcgcgaaattgtactctaaagtagacatgtgcatcgatggtcacgtgcgaagtcttttgtaccttatgatcaagaaaagacttgtccgcaaaaaaaaaaaaaaaaaatttgcggcc

SEQ ID NO: 12491 - DNA, 1191 bp, Zea mays
  Clone ID: MRT4577_111387C.1
tggcataaaagatgttttcaagactgtttacaaggaaggaggcgcacgatctttgtatcgtggagtaggtacgtcttatcctctcatacagtctcatttcattcactttgatttgtagtactatcgtttatggcttattatcagtatgaggttatgaacgtttcctgtttctttccagcattccatgccagataatgctcacacgtgcacgcctttgtttctgtgtaacttgatgctaagtatcagtttaggtttataccaaataggcatcttgagttctttcttggttttcctgaaaacaaggtgtttagttactttaaatgccaagtgctggttccataggtgaacgaaaacactatagccagggtttaaacatattagtttaacatgagttaccatatgaatatcctgtaaattttagtttaaatttcattaattgagatgtctgtattatgtattatatcatgagaggaggattaaagattcttttaatgaatttcaggcccaactcttattggtattcttccatatgctggcttgaagttttacatatatgaagatctgaaatctcaagttccagacgattacaaggattctgttatactgaagctctcttgcggagctttagctggtctatttggacaaaccctcacttatccactggatgttgtccggagacaaatgcaggttcagagcaagcagtctcaaaattcgagcgatggcttccgtataaaaggaacttttcagggtttcttgctcatcattcggtgccaagggtggagacaactttttgttggcttgagccttaactatgtcaaggttgtcccttcagtagctatcggtttcccaacatacgacatgatgaaggcattgcttggagttcctccccgaaaaagagtccatgcgtcaggtggtaacaagtgaagcaatgttggccatccttgtgttatgactgatgaactaaagaaattttaggttgtgacattgttattcttgttatgaatcccattgcatagggtggagggtgttcccccttggtcaaatagctatattcatgtaacattaagttgagatgcttgtatcatccattatgctgcttgtaatgtacccatgaatacaatgacgccccaaaaaaaaaaaaaaaaaaaaaaaaaaaaaaaaaaaaaaaaaaaaaaacacacccacaaaacc

SEQ ID NO: 12492 - DNA, 151 bp, Zea mays
  Clone ID: MRT4577_111388C.1
gcctcagtcaaacccgtcaaattgcgcattccccgcatacggggcgccaacagcgggggcagtgctgctggggtcaccagccaccggagagtgggcggcagggggagagccgcggggcgggaaccttaagggatcatggaggcggggaaga

SEQ ID NO: 12493 - DNA, 2618 bp, Zea mays
  Clone ID: MRT4577_111389C.1
cccactcgctcgcaactcgccgcgcggcggaaacgccacgcccggggtgagatccgcgcgggccctcgcctgcctcgtcaccgtcccgcggcctccgatctccacagggcggccggaggagtcggaggggcagagtgagatggcggcggaggagggggccatgtcgccgacgaggatgcttgcggaggggcacctgcgggtggccaccggcgggggcgcgccggcggacggcgggatcgccgtcagacacctcccgcaccatcaccccactaagaaagacaatgttggtgggaaaactgaaaaagacaatcatgaaggtgtaaattctttactatctgaggagttggaaaaactagctaatgggaatagcaagattcctggtacattagatgagtatagaaagcttgtcgttccaataattgaggagtattttagtacaggagatgtggaattggcagcttctgagctgaagtgtcttggatctgatcagtttcatcattactttgtgaagaagcttatatctatggcaatggatcgccatgacaaagaaaaagaaatggcatcgattctgttatcatctttgtatgctgatctactgagctcctacaggatcagtgaaggttttatgatgcttctggagtctacagaagatctaactgttgatataccggatgctactgatgtattggcagtttttattgcacgggctattgttgatgaaattttgcctcctgttttcctcactcgagctagggcactacttccagaattttccaagggcattcaagttctgcaggttgttgaaaagagctatttgtcagctccccaccatgcagaattagttgaacgcaaatggggtggaagcacacactctactgtagaagaagcaaaaagtaagattaagaatattctaagagaatatattgagaatgaagacatagatgaagcctttaggtgtataagagagctcagccttccatttttccatcatgaggttgtgaagcgtgctctcacctttggtatagagaacgtatcctcgcaaccatcaatccttaagttattgaaggaggcagctgcaagttgcttgatcagtcctaatcaaatctcaaagggtttttctagactagctgagggtgttgacgacttgagtcttgatattccttctgctaaagctctttttgacaagctggtttcaacagctatatctgaaggatggcttgatgcttcttttggtaaatcagctgcccctgatgaagagatacaaagtacaagcgttgtaaaggtgaagcgttttaaagaagaatgtggccacataattcatgagtattttctctcagatgatgtcccagaacttattcgaagccttgaagagctttctgctccagaattcaatcccattttcctcaagaagcttgtgacgcttgctatggatagaaagagcagagagaaggagatggcctcagtactcctttcttcattgagattagaattgttttcaactgatgacatcattgagggttttgtaatgctcttgcagtcagcagaagacactgcactcgacattgtggatgctcctagtgaacttgctctcttcctagctagggcagtgattgatgaagtattaattccgctcaatttggatgaaatcagcattaagcttcggccgaacagcagtggcagccaaactgtccagatggcgcgtgctctactgtcagctcgccattctggtgagcggatactgcggtgctggggcggtggcactggatgggctgtggaagatactaaggacaagatcactaagctattggaggaatacaacactggtggtgacctaggagaagcctgcagatgcatccgtgatcttgggatgcccttcttcaaccatgaggtggtaaagaaggcactggtcatggcgatggagaagcagaatgacaccagcatcttggtcctgctgcaggagtgtttcggcgaggggctcataaccatcaaccagatgaccaaaggctttgcccgtgtcaaggaaggccttgatgatctgatcctcgacatcccaaatgcccaggagaagtttggagagtatgtggagctggcaacagagcgcggctggctgctgccgaccttcgcctccgttccctgagcatccaccactggcgataccttccttatgtgtacatttgtgcccatgatgtcattagctccgtaccaaagttttcctattcctagtttacttatgttaccgtatactggaggattgtaggatggatgtggtgtcggttgttgagatagtgtcctattggtctagtctgggagggtacttttgagagttaaaagaataaagccatttcgtttcaggttatgagatgtacgctgcaacctttgtccctggatggacctggtggtaccatattcttaatatgatttattgccgatctgggaagtggaagtgcttggaactaaaaaaagaaaaaaaaaaaaaaaaaaaaaaaaagtactctgcgttgttaccactgctttgcatggatatcaacacaatacattatgtaattctcgcgatgtactaacttgattcaaatttagacagcaaggtttattaaatggtgtagaaggaccctttagtt

SEQ ID NO: 12494 - DNA, 206 bp, Zea mays
  Clone ID: MRT4577_11138C.1
gcgtgcgcccacgcgtacggttgaatggcaaacaaatgttctggtcaaacgtaatgaagtagagaatgttggtcattttgcttgtgggcgctgggcgtcattacatgaccgtggtagggacagtgatgatgatgacgtccgttacagggactacgacgtggcagctcttgctaataacttaagtcatgcatttctttatgggatat

SEQ ID NO: 12495 - DNA, 1536 bp, Zea mays
  Clone ID: MRT4577_111390C.1
aaaaatctatcactttctaaatttaaattatatagacttcttcatcttactctgcacataattctcatgatgctctaattcttctcacaaccatattctccacagataaattcttagattttttagaaaagcttgtcagaaaaaaaatgaaacaaaccggtccaaaaaaacgcagttagaaaactgaaccacccctacctcaattgacaatgtcaccatcaaccattgtaaacaagttcagaattctactgggctcgaattattttggaagttgctcatttaacagagcgctaagcagatgacccaaaaatttcctcaatgaaacatttcgcagttcatgaaatcaacagactgcaacgaccaaaagatgccggtaaccccaacagttttgttttccccagctgacctgatatgacccaaacagtcatgctaggaccttagaagaaaaaatagtcttgataatcaatcagggcttgagggccacagcaattccaaccttcgagctcttctcaatggtctttgtatcgacctcagccgagatggtgaccagcgactttggcctccactcatgctggatcaggacgctggctttgcccgagttgttgatgcgtgccttcaagacggttagtgggtccagagtgtgctgcccgccaaaggtgagggtgttttcattggtcgagaaactgtgggtaagctctgccccaacagctgtgtttgtcaattcgctcaccttgtggtagtaagctccagtaaaggttgtctccctttgttgttcatattaagggatgcgataaggtcttcatgagtgaacatcaatccagcattgtattgggggtgaagtttccagtggcagaatcaaatgagatctctgcaccaactgcgagagccttagtgccaaaggcagcagagaggttggctacaggattggctgtcagactaacgcttgcattaactccagcataatcatgcaaatactgaagctcaacctttccagatctctgatcaggaacagcaaagcttaagatagtcttcagtcctggtgttgcaatctcattgacagtaactgtagtaatgatatttgactctgagtttgctttcacatctacggtcatgttcttgttctttatctgtgaatggatctcactgaagatcaggtcagctttctttgtgctagtagcagtgacagcgacgccattggagctgtaggtagtgagggtgaacttgtggtctgtctggtagtccttgtacagcagatccctggtcttcttgccgatctcggtgtagaggcctggtccgaccatcttctcggcggagacgacgcgacgcgacgaggtgtggcggcgtggagatgctgcggggtgtgaggatgatttggacgcgacggaaaggaggccggggacaatccacagacggacccaacaaaagttgagagggcgactattggaagtagcgccggaaaattagggctgcgtttggagcagctccagatgctggtcttaaagaatcgacttctgtcccggacgctaatacacatct

SEQ ID NO: 12496 - DNA, 455 bp, Zea mays
  Clone ID: MRT4577_111391C.1
tttttgttggatgcgtatggtatgcgaaagctgatgttgttgatcttacttcctcctggcccgaacggttgctactaataatgctgctggagaaaccttgctcccatcactgtgctctgggtcctcatactgggcgcgaccacagggagagggctgtgccgacgacaacagaccatgtgacgatgtcgacgacagccacacacctttggggttgtgctcttgtgccatatcccaaacgcggcggctcataacaagatgtatgtgctctccgcggcgcacactctcgaggagagcacactgctcttacaagagcagcgttgacacgagcgagattgacgacaacacacacctataagaggggacacgcgccgccacagagtgttggacatcttctacatctccgccggggagaacgccgccgatgttttctgtgttagagcgcttttgttgttgtt

SEQ ID NO: 12497 - DNA, 281 bp, Zea mays
  Clone ID: MRT4577_111392C.1
gaaggttgtagactggctggatgatgtcagtagcaatggattagtcctagcatgcgtttgtcagcacatctcttagcatgtcctgcccagtttgccagctcagtcattcgttcacctaatgttagcaaactagcaccacaaggaatttaagacagatgttgcctgcttcttttgtcattgtgtcacattgcttgcacaagcctggggcacagtttagtcttagttttgacaccccccccatgtttcttttaaaaaggcaaagagccgatccccaaatcctg

SEQ ID NO: 12498 - DNA, 112 bp, Zea mays
  Clone ID: MRT4577_111393C.1
cacacgccggtgcgcacggatgtttcaggactgagtcgtgacgctccatgtctccaggagaagagcacagattcatcgctccaacgcctagccgctgaatagccactggatc

SEQ ID NO: 12499 - DNA, 500 bp, Zea mays
  Clone ID: MRT4577_111394C.1
ttgggtacctcgaggccggccgggatccacccgtcctgattgtcccgttagactaggttagtcccgggtgtcgaccagctcgcggaaatggtggccttcaggttccatcagtaccaggtggtggggcgcgcgctgactgacgcccgagcgaccaggaccccactatttaccgcatgattctctgggtcaccaactaacttcgcgcacaagaaccaccactgccacttcctgaggaagtggaagaaggttaagaagagcaacggtcaggtcctgggcatcaacgagatcttcgagcgtaacccgacgacgatcaagaactacggcatctggctgcgctaccagagcagaaccggctaccacaacatgtacaaggagtaccgcgacacacccctggacggcgctgatgacacagtacaatgagatgctttttggcaccgcgtgagggcccactgcattcaaatcagtaagaccggcacggtgcacttcaagctgagcacgag

SEQ ID NO: 12500 - DNA, 199 bp, Zea mays
  Clone ID: MRT4577_111395C.1
ctgttctctttttcttgttatgtttttagcttctctgcgttagtcctagttcattgtttttccttatgctttctttagtgttcttctttctatagtcggagtggacctcccgcccttgccctgggggcatgggctgcaccagaaacctcagcgttttctgcggcaggcaccaccgttacggggagaaggggacttccgc

SEQ ID NO: 12501 - DNA, 718 bp, Zea mays
  unsure (1)..(718): unsure at all n locations
  Clone ID: MRT4577_111396C.1
cattgggaccctcgaggccggccggngaacaacttctccagcaacaccctaatgcaccccngcttaagccaccatgaaatccggatctctcttcacgtaccctcttgctaccatctctctaatcttcgcttgctctgcggagtctcgcccgttcgacagcatcgtcaactcgctccacatcctgaccgagcaatcaccgcttcgcgactacatcatgggcaaaccagaggggcaggcctcaactggcgtcatcatatccgatgttatcggaaacacacaggagattgccatcttcagcggcctgacaagggacatcgacgctgtagccggacggttagacaacgcagcgcagaacgccactgtactcgctccccacaacagcgtcatgcgcgacttgaagaggaaaccatgggaagacccagacgactacaacaaactgggcgccgaagcctaccagggcgctagcggagaagaccgcgcaaagagcaacctcgagcgcttcgtccagcgacacattgtaccggaaagtccgtgggaagagggcaagaagatcaagacacttgccggcaacgagatctggtgggagtccaaggacggccaaaagaagatccaacccgncaacgtcgaaatcaagagtatcgctgacaaggtcgccaacggtgaagtctgggtgcttggaggatctctcgcttagacattttgntctatgaatcatggc

SEQ ID NO: 12502 - DNA, 228 bp, Zea mays
  Clone ID: MRT4577_111397C.1
ttttaaacagctgctgttgccctctgtcgtgtgggcggcggttgatcaactaactggcgggtgggccagcagctgcgaccacctcctccctacgtaacactgctcacccatcacctgttgccgttcctctttactctcacaatcatatcctaaaacccctccttatacactcataccctctaatggggcttgtatgggggcctcctctaattctatctacttctacat

SEQ ID NO: 12503 - DNA, 2755 bp, Zea mays
  unsure (1)..(2755): unsure at all n locations
  Clone ID: MRT4577_111399C.1
gggcacagaggaaagcctctcaacacggctcgcgtgcagaggatatatatacacaagggcgccaaatacatttcccaactccaacaagaacagcgccatttcttaatcgcagcgcctaaacccagcccctcctaattatatcaccgcacagctgctagaaccaggtgcgatttacaggcttaaaacgcaccggcatggccactgtacaggacaacggtgtcctgcacttgcacccctatgccgtcgccgcggcggcagcggcattgatctcggcgtacatggtgtggttctgggcgctgacgcgacggctgtccgggccgcggatgtggcccctcgtcggcagcctgcccagcgtcgtcctgaatcgggcgcgggttcacgactggatcgtcgacaacctgcgctccaagggggaagcggccacgtaccagacgtgcatcttgccgctgccgttcttggcgcggcgccaggggctggtgaccgtgacgtgcaacccgcggaacctggagcacatcctgcgcgcgcgtttcgacaactaccccaagggccccatgtggcaggcggcgttccacgatctcctgggccagggcatcttcaactccgacggcgagacgtggctgctccagcgcaagacggcggcgctcgagttcaccacgcggaccttgcgccaggcgatggcgcgctgggccaaccgcatcatcaagtaccgcctgtggagtatcctcgcagaccactgcgaggccgcggcgagcgtcgacctccaggacctgctcttgcgcctcaccttcgacaacatctgtggcctcaccttcggcaaggaccccgagacactgtcgccggggttgcaggagaaccccttcgccaacgccttcgactccgccaccgaggcgacgctgcagaggttcctgttccccagcttcctgtggcgcgtcaagaaggcgctcggcgtcggcagcgagcggagcctccgcgagagcctcgcgatcgtggaccagtacatgacggaggccatcgcggcgcgcaaggcgaatccgtcggacgacctgctctccaggttcatgaagaagcgcgacggcagcggcagggcgttccccgaggacgtgctccagtgggtcgcgctcaacttcgtgctcgcgggacgcgacacgtcgtccgtcgcgctcagctggttcttctggatgctcatgctgcggcgcgacgtcgagcgcaaggtggtcctggagatcgtctccgtcctcagggagacgcgtggcgacgactgcgggaggtggaccgaggagccgctggacttcgacgagctggaccgcctcgtgtacctgaaggcggcattggcggagacgctgcggctgtacccgtcggtgccgcaggactccaagtacgtggtggaggacgacgtgttgcccgatggcaccgtggtgccggccggctcagcggtcacctactccatctactcggttggacggatggagagcatctggggaaaagactgctctgagttccggcctgagcggtggctctcggctgacgggacccggttcgagccggccaaggacgcgtaccgcttcgtggcgttcaacggagggccgcggacgtgcctgggcaaggacctggcgtacttgcagatgaagtctatcgcttccgctgtgctactgcgccactcggtggagctcgtccctggacacaaggtggagcagaagatgtcgctcactctgttcatgaagaacggcctccgagtgcacgtcaagccgcgggacctcgccggctacgtcgtggcaccggaggaagccccgcagctgggagcctttgtgatctcgaccacaactgcagcagctgcataagcctgcatgtgcccgcgcacattggcactcgtttcttcgtgctgaagttcttctatatgcctctgcctgtcaaagtcatatcgtttcttcgtttctccctcttcattagactgttaggtttgtgggtacctggcgtcatattggttgtacctgtgtagtttttgtgtggatggatcggtttgtgtcgaattcggcacgaggcgcgctccacgtgctggcctactcgggccacgtcgtccgcgtcgacctggacaccatggcgtgcgcggtcaccccgctcccggcgcccgtcnnnnnnnnnnnnnnnnnnnnnnnctgccgcggccgcctgcggttcgcgtccagcgacggccagcgcctcaggatctgggagctccaggacgccgccgcgggcgagtgggcgctcaagcacgagatcggggtcagcgacgtcgtccccggcgacgcggcgtcacagcccatcacgttcctgttcatggcgttccaccccgaccgggagctggtgtacctgtggtcgccgtggaagctgctggcgttcgacttggtcgagaggcgcgtccaggaatgggtgttcggctccgagaaagaaggcacgcatctcatacaggtttggctgttcccgttctcgcgccatttggccaacgcgctggcctgatcaggccggctttgccgacgagccggaaatagcattggggcccaagtgtttcgttgcctacccagtaccaacaagtccacaaccacaatgctcgggttactaaaaggnnnnnnnnnnnnnnnnnnnnnnnnnnnnnnnnnnntgttcgtcggaagtgtccacctccattaacttgctctgtcccctcatcttcgatcacattttctcgncttcttttttttcaagtactctgattattttttgacttggtttgtatataata

SEQ ID NO: 12504 - DNA, 264 bp, Zea mays
  unsure (1)..(264): unsure at all n locations
  Clone ID: MRT4577_11139C.1
cactgagttattaagaatgtagtgtanacaccgatgcataactacaatttctttaacccaancacaaaacatcactcacaaaaacacgaccctttctcaaaaagaaattcacccccatcttctgctcctatatatagtatcctgaaaaaacccggtaaaaacaaattcctacgtgactttaaccaacaaaagactgtaatctctatttaccgttgcctatactatcactacaccaaattcattgccttcctataagccaaccct

SEQ ID NO: 12505 - DNA, 718 bp, Zea mays
  unsure (1)..(718): unsure at all n locations
  Clone ID: MRT4577_1113C.1
gccgggaaaaaaaaaaaaaaaaaaaaaaaaaaaaaagcgaccccaggtcagtcgggactccccgctgagtttaagcatataaataagcggaggagttgcttgtgctccgataaataagataaataatcaattctatcgtctgggttgctttgacttaaaaaaaaaaaaaaaaaaaaaaaaaaaaaaaaatttgctgcccacccttgtcactgctaatttgggcggagcggaggagttgcttgggctccgataaataagataaataatcaattctatcgtcggggttgctttgccttaaaaaaaaaaaaaaaaaaaaaaaaaaaaaaaaaatttgttgcccccccttgccactgttaatttgggcggagcggagaatttgtttgccccccaaaaaaaaaaaaaaaaaataaattttttcgggggggtggttttgccttaaaaaaaaaaaaaaaaaaaaaaaaaaaaaaaatttttgcgcccccccttggcccctgtaaattgggccgggcgggaggatttttttgccccccaaaaaaaaaaaaaaaaaaaaattttttccggggggggggtttgccctaaaaaaaaaaaaaaaaagaaaaaggcnnnnnntttttgtccccccccttttccattttaatttggccggggggggagaattttctgccccccaaaaaaaaaaaaaaaaaaacaattttttcgggggggggggtttgccctt

SEQ ID NO: 12506 - DNA, 579 bp, Zea mays
  unsure (1)..(579): unsure at all n locations
  Clone ID: MRT4577_111400C.1
gcccgagccctattctttttgcacgtcccgggctatacagcattcctatggctttgcgcgcccggccgtgccatcccttactgcgtcgctgaggtcttgacgttcgcttttgcgacgccgagtagtgtaatgatggtaacagcatcaaacactgagtggccactacgcctgaggcatcacacgttggatgactggtgtatgcggacgcgctacagaagatgatatgcatgagcacaggcactacacaccagcagatgatctgagggttgtgaagaccaactgcagagattaagccatatcacatgttgtgcaattgcgaacgacaccatggttagggcataggctgctgtctaatgtgccgaggctatggggcccgcaaggattggagctgctgcatgggtcggcatgaggacctaacgcgacatacaagctgcgagatgtggctccgctgatttcaaccagggaggaactgacaacctgctcaatctgtgcctggtggcaaactattccagaagcagcgcgtcgtgtgcttgagctgcanatgctgcagccatgactggggctgctcacgactatgac

SEQ ID NO: 12507 - DNA, 292 bp, Zea mays
  Clone ID: MRT4577_111401C.1
tttttgtggttaaaacatttcacatggtatagaaaccgggaaatccaccccattttaaagggccattcattcttggcacgggtgctcagattacaacgctttcagaattcagatacatacaagcggcacagtccaaggcaaatttttttctatcgcctttttcagccacgcccaacaaaccaattaagtttgtcaacccattttacgaaacaagggttacgacaggaacaacgggctttcacatgggttggggccacaacatacaaagggggggggcttttccccagaagaa

SEQ ID NO: 12508 - DNA, 836 bp, Zea mays
  unsure (1)..(836): unsure at all n locations
  Clone ID: MRT4577_111402C.1
gggctcgaggccggccgggctttcttcctcttcctcccctagtatactccaattcccacgtactcttcctccttctcctcctcctctctccctctctctcgccagaggatccaagaagtacaattgcagctctctccattcgttcccaatcccaacacagcctctcagctcagctcagggagttcccctgcttgtttttgctctagtgctgttggctgccacagaaaaggactgcatgtgcagcagctgcaaagacagaatttctttatttttttcaccccaccttctcccaaggtgctgttggtgccccaggtggaggcaactggcgaagtgtgtgcgttctttgcttgatcaactaggttgagttgagccattccttgccccagtgttctctcggattcatggttgtggaactaatccgagattagctggagctgttcgttttcccttccaagaagacgaaggcgggggcgaggcgagagtacctgttgcgcgcctgaggcggtgcaatgtcgtcttcctgcataccgaccggcctgcggctggacctggacatggtgaaggcggcggcgtcgccggtgggcgcgcactcgtcgccgctgcgcccggcgcactactcgtcgccgtcgtcgacgctgtcgtcggaggcgtccaacgcctcgtcatcgtcggcgacgtcggtgtcgctcaagcgggctcgcgcgccgcggaagcggcccaaccaggcgtacaacgaggccgccgcgctgctcgcgtccatccaccccttcgtgttccccgtgaacaagagccccaagacggcgccgncgcgcccgccgcagctctccgtgctggcg

SEQ ID NO: 12509 - DNA, 763 bp, Zea mays
  Clone ID: MRT4577_111403C.1
cggccgggatagcctgccttgcttcattttcttttcagtcgaacgcaggagcacctgcagcatgtagcccggccttcttctacctctagccttcccctgtcgagctctttggtacatggaattttccccctctgctacacctcccctgggctacgcacttgtcctcacctccccgccatctacctcaaccagcagccaccatctccctgtatttcccagccgtggagcccaggatgccgaccagggacaccagcagccggcgtcccaagctcgagcagccgctgctcctcaacgccggcacccgctaagtttcgtcagccggtctgcagctcccctctgctcggacgccagtcgagctcctccctggcgcacctcgccagcagcagagaatctccaagtgcaggcgaccagcatctttccccatggcgcccctgctcctatctctagcccctcctctctgttccttgcgcagacgaatttcttctccaaggccgacgcttgttttccccctacttcatctcctccacgctgcaaggcagtaggcaagtccctgcatcctgctcgacctccgcctccggtcgtcgtcctcgtcggcagcaagccgcgccggacactctgtgctttggccgcgtcgcgtccagggactcccatggctgcctccctggcgtacctcgcgcagcagccgcgacgccagttcgcgtagccacgtggatctccttgcgtcgcgcccttggcatgctcgacgtaatgccgcagcaagtag

SEQ ID NO: 12510 - DNA, 324 bp, Zea mays
  Clone ID: MRT4577_111404C.1
gtgctgcgctgttgctgcccaaggcaacgcgcgccaaattaaagggtcattacaagatataggaccccggatgtgctcttaatatgatgtggcgttggatgaaaaagctaaaccgaatgctacgtggactggacggaatattacagtacaccccaatactgcggcatgattggtttgatcaaaggtgttttagacattacacggatgccaatcctccttttgtacggcgcgatcaggaatggacaaggcctgtgggactcggctaaggacctcgtctatcaggttccaaacagatcattccgatgcggaacacggaagcatgcc

SEQ ID NO: 12511 - DNA, 791 bp, Zea mays
  Clone ID: MRT4577_111405C.1
ccggccgggtttgagcatgagatgctcaccgctacccagtcgtcggccctcgagaagtcgtacgagcttcccgacggacaggtcatcaccatcggcaacgagcgattccgaacccccgaggtgctcttccagcccgccttcctcggcctcgaagccgccggtatccacgagaccacctacaactcgatcatgaagtgtgacctcgacatccgaaaggacctctacggcaacattgtcatgtccggtggtaccaccatgtacgccggtatctcggaccgtatgcagaaggagatcaccgctcttgcccccagctcgatgaaggtcaagattgttgctccccccgagcgcaagtactcggtctggatcggtggttcgattctcgcctcgctctccaccttccagcagatgtggatctcgaagcaggagtacgacgagtctggaccttcgatcgtccaccgcaagtgcttctaagcgggtcaacaagtcgcgtccgaagcagaggtgctgctgccggacacgtttgcggatctctccctcctgcacgacaattcaaggctgcaagtggacggtgcgctggtgttgctttcggtgctgacggcacgcgttcgacgaggacgagcaggagccatttcggttccagactctaccgacggacaacggtgttgccagtggtcgaactgatagcctggcgtatccgaatatggagacatcctttcccctcctcacacgtaaatgtaggcccatggtgggcgtctttcccaccctcacaatgaaagatatcgatggttcct

SEQ ID NO: 12512 - DNA, 279 bp, Zea mays
  Clone ID: MRT4577_111406C.1
cttccctagttccctcccctaaaagccaaaaacatttggagagagagagagaggggatcgatcgagggagagaggggaaaccgagcaaccaagacgcacacgacgatggagcgagcggacgaggacgcgtgccgggtggcgctgctggacgcggacggcggcggcggcgccggcggcgagggcggcaagaagcagcagcagcagctcgcggcgcgggtgtgggaggagtcgaggaagctgtgggacatcgtggcgccggccatcttcagccgagacgtc

SEQ ID NO: 12513 - DNA, 242 bp, Zea mays
  Clone ID: MRT4577_111407C.1
ccgggaagatttttccgaaaaaatatccggattttcgatttccgacagatatcaaacatattgttttcgaatccgattcccgaataaattttccggttttgtttccgttttaaaaaaaagaccggatttccgaaaatcccatccgaaccagtttttaccctttttcaatttttgatctggacgggttttttctaaataatattacatccctagcgtcaaaattattttcttctaaaacaaac

SEQ ID NO: 12514 - DNA, 546 bp, Zea mays
  unsure (1)..(546): unsure at all n locations
  Clone ID: MRT4577_111408C.1
gacagaaacgtcaccagctctgtagtctcctatcaacaaccttttccactaatgcataagcatttcaacgcctagattaaccgattaaacatcatctcaccttctaaaattatgtcactacttcaatctaagttaagctcttattctcagcttctcaaattatgtcactgcagactgctccaatcaaagttggctctcatttaaacaggtggaacatgctctacttacacaggttctatattgttacttaacacacatcaagcacacgttctatattgtcagatacttctgctatactggtagccttgtgtaaaaggcttctgaaagtaaagtttttggtctgcgacaccaagacttctgcatcttagtggagcatcatggaccttgacaggttggtntcagccgcccatctactgggcttgctctcctggacttggaacatgcacctcatgtttttgacaagtaggttgttcctcttcctcatcttctgactcactaagccatccatagcagggtcgccttgggccagtcctagcagaataaaaa

SEQ ID NO: 12515 - DNA, 448 bp, Zea mays
  Clone ID: MRT4577_111409C.1
ggtgattctctgtatctcggtctatgtaaggcgtgtaatttcttcttattattaatataatgatacacagctctcctacgtgtttgagagaaaaaaaacaatttgatatgttctgttcaatcaaaatgcataatgataacagttattggcagttgtcagaacagcatgcactagatttgtaataggagagaacatgtgactattgaggttaattgtttttactttttagagatcatgatggatgttcagaatggtgcctctttttttttattttgaacttcacatatgagtataaggttatgcttgttcttggagtttttttcccttcaagaaaagcagcacttagttgtatttcatgaaaaaaccaagtactgactgtctttactgttcaaattttcatgtcactaatttaatattggttccttttatacttcaatggacatgcaaa

SEQ ID NO: 12516 - DNA, 286 bp, Zea mays
  unsure (1)..(286): unsure at all n locations
  Clone ID: MRT4577_11140C.1
tagttctctcttaaatgtaaacttacatngccggcgccgttgttacttacatctgctgggtgtacaccaaagatctctacaccaatacacgccagtgacctacaaatgttaatacttctggctaatacacgttacaaacaatcccctatcttttagtcaatatgctatataatccataccattctaaacacatcgtgacctttataccagacaatgcaattgttccttttctcacctgcctctaggatattgatgcatgttcaacatacacctatcctggaaaggc

SEQ ID NO: 12517 - DNA, 237 bp, Zea mays
  Clone ID: MRT4577_111410C.1
ttttctttgccagttctccttcacaaggagcggcaaccttacaatgcagggcggcttcttaaaatttttctaccaacgaaggatgcggcttcttaccttcctattcttatggcaaaagatcgaaagattctatgcatccatgactttgctaaattcacaactgtatgccttcaagtttacattttgattcaacaacaaaaccatgatgcatttgctttaaaatacccaagattcttt

SEQ ID NO: 12518 - DNA, 328 bp, Zea mays
  Clone ID: MRT4577_111411C.1
ggggcgccaaacaagataggggcgacaagggaacattgcccccacatggttagtttgtgggcaccaacatatttccccaaaccttacaaaaggcggcccctggcctttttatttgggccggaaccccttaagaacaatatttaaaaaaaaaaaaatccgcaggcttgtggatgtttcactgcccctaccttattgaggaaaagttcaggggcaccaccaaagggaaacccccctaatcggaggctaaattcaggatcccaaacgcctgggaggaatcaacagtgtcacggggggattcctttaatggtttgaaggccccccccacctt

SEQ ID NO: 12519 - DNA, 2137 bp, Zea mays
  Clone ID: MRT4577_111412C.1
cggcctctcctgctactcgcacttactgccccgcctcctctccttctactcacaccacccgtcgctcctccccgccgcctcctccctcgccgccggttccacgtgccccgaaccctacaatgtcctcatctccaactgcctcaaccacggcctcccgcaccacgcgctggccgcgtaccatgagatgatcgacaaggatgccgttccccctgatgccttcacttaccccaaagtgctccgtgcctgtgccgagaccgggaacctcgctctcgggcgggcggtgcacgtgcgcgccgtggacgccggcatggacgggcacctgtttttccagaacgcactggtgtccatgtacgccaagtgttgggaccttgcggctgcgcgcacggtgttcgacggaatggaacatagggatgtggtgtcgtggaactcgatgatctctggctacgctgcatctggacagtggagaaaggcagtagagctatttcttcgaatgcaggctgagggtgcggagatgaactcagtgacatggaacacgatcgccggcggttacattcagatgcatgattacagggcagcagttggattaattcgggatatggtgagaggtggtgcgagcattgattttgtgactttggtgattggatcaaacgcatgctcacgggcaggatggttgaggcttgggaaagagatacatgggttggcagtccgaatgcaatgtcacgaaatcgacagtgtgatcaatgcagtgatcacaatgtatgccaggtgcaacgatatggagcgtgctctcatgctgttcaagatgataagatgcccgggtctagtagcatggaatacaacgatagctggttttgcattattggatgatgcagaagcagcttctagacttttccgtgaaatggtggtatgcggtgatgtgcaaccgaattatgttactgtggtcacctaccttgccttgtatgcccgtgttgctaacctgcagcatgggcgggagcttcacacgcacattgttaagcaaggattcaaagggtatcgtctactgtggaactctcttattgatatgtactcaaaatcagggaggctttcagtggctcaaaatgtatttgatactatggatgaccctgacatgatatccttcacttcaatgatagcaggatatggaatgcaaggaaaaggaattatttctctgcgctttttcaaacagatgattgacagtgggatcatgccagatgccatcatcatggttactgtactctctgcttgtagccactctgggcttgtgggtgaaggggaagagctttttgacaagatggtgaagtcatatggtataaagccccagatggagcactattcttgcatggttgatctatatgcacgtgctggactattggaaaaggcggaagaattgctcaaccagactcccttccctccgacatcaacaatggttgcagcattagtaggagcttgccatgagcaaggtaacataataattggtgaaaggtcagcaagaaggctcttggagatgaagacagagaacgctgggcacttcgttctgattgctaacatgtatgcagctgcaggttgctggaatgagctagcaacagtcagaaaactgatgagagatctgggtgtcatgaaagcacctgggttagcatgggccgaccttggtaacgggtttaccccttttctggttggggataggtcgaaccctctagctccagaaatctatgaggttttggatgaactaactgaacaaatgagtaatatgaataattgcagtgatccggacatactatccatggaggaacacatggagtaatgtgttcatggtaggacaaggacagattgcggctttggtgtaaaatggagttcattaatacaatgtagagatttcaccatgaagcgaaagggttaaaagggaaaaggtgatgtccttcaagaagcagctcatgcaatcacaagttgcttcctcatcgatggtgtcttagctgggatgcatgctaggtgatcgctacggtcacgacaagacttgacggctgtaaggtgaaggtagcctcaactcgatgccaggataactgatactgatttttgagggtgtgcattcagtattaaccagctgcctgatttgagatatgtc

SEQ ID NO: 12520 - DNA, 435 bp, Zea mays
  Clone ID: MRT4577_111413C.1
acagcacgatttattctttaatggataagtccaactcttagctcttttccccctcaccagatatattataactatataagatgtgacctctacaatacagatcgaggattatgacatactaaaggtccggatgctgaagcatatatgtacaggcaagcgatcaaaactatgggccaagagagctgtgctacttatactcgcaacttaatcctacgctagcaatgtcataatttgatcacgcatgccatctttagacgagaccttcatccgaaaaccaaacttctgggatgttagctctcaccgccctttttatgttgaccgttgtagcttattgaaacctgacttccctttggagaactttgcccaactgtctgtgcaatatgtgatcttacaggggacagacttgtctgtaacgtcccaggtgactgaccatgg

SEQ ID NO: 12521 - DNA, 773 bp, Zea mays
  Clone ID: MRT4577_111414C.1
ccggccgggatcacaactttcaccatggccatcactaaatttggactcctcacgtttctcgctgcgagtgccgcccaagtcagcggcgattctagcttgcagcctcccgctaaaagtcctgtactcaatgactttacaccccaaggatgcttcagtactctcccatcaaaggcaagcgtcggcacggaaagcactttcatgacgaccggtcaatgcttcaactactgccaaaaagagaagaatagcgttgctatcctttacgcgaccaagtgctactgttccgatacctatccggccaaatcctcgctggtggacgacgaccagtgcaacttgagttgcccgggatacccccgagaggcctgtggaggcatgaagccagatgcctatagcgtgtataacacagggctcaatttgaacccagagtacgacaccgctgaaggcaaagatgacgactcatccagtactgtttctggcactacaactcaggatgtaacaacgacttgggtttccaccagcacgaccacccacgccatctcagagaccgaaactgaggagaccagtatatctacagctcgatctgaagagacttcacaagttgcgcctgtggttaacgaaaacactgctgccgctacccccagcgcatctgcctcgacagttccagaaaacgcctcaccccggctctccaaccccattggcaatattgtcagaatgattgctcgcctactctaaataaacggtttcatagtcacgatgtaaattccatagatgcgcca

SEQ ID NO: 12522 - DNA, 2663 bp, Zea mays
  Clone ID: MRT4577_111415C.1
cattgggtacctcgaggccggccgggatctttgttgccttttcggccggcagcccggctgcgaccattcgtgtacccgtgatactgggagttcaagacctccgctcatgtccgccgcggcggcgcttttagcccggccaccaccgccaactcctgccgccaccgtccattcactcttcgcctccctatccgacccggccgccctccaccacctacccgccccgctcctcgccttctcccaactccgccacctgctgccgcccgacgccgccacccaactcctccttcgcccaatcgcctcgctcctccaactccaccgctccgacctccgcataggcctccagcttcacgggctctccctgtccctcggcctctcctgctactcgcacttactgccccgcctcctctccttctactcacaccacccgtcgctcctccccgccgcctcctccctcgccgccggttccacgtgccccgaaccctacaatgtcctcatctccaactgcctcaaccacggcctcccgcaccacgcgctggccgcgtaccatgagatgatcgacaaggatgccgttccccctgatgccttcacttaccccaaagtgctccgtgcctgtgccgagaccgggaacctcgctctcgggcgggcggtgcacgtgcgcgccgtggacgccggcatggacgggcacctgtttttccagaacgcactggtgtccatgtacgccaagtgttgggaccttgcggctgcgcgcacggtgttcgacggaatggaacatagggatgtggtgtcgtggaactcgatgatctctggctacgctgcatctggacagtggagaaaggcagtagagctatttcttcgaatgcaggctgagggtgcggagatgaactcagtgacatggaacacgatcgccggcggttacattcagatgcatgattacagggcagcagttggattaattcgggatatggtgagaggtggtgcgagcattgattttgtgactttggtgattggatcaaacgcatgctcacgggcaggatggttgaggcttgggaaagagatacatgggttggcagtccgaatgcaatgtcacgaaatcgacagtgtgatcaatgcagtgatcacaatgtatgccaggtgcaacgatatggagcgtgctctcatgctgttcaagatgataagatgcccgggtctagtagcatggaatacaacgatagctggttttgcattattggatgatgcagaagcagcttctagacttttccgtgaaatggtggtatgcggtgatgtgcaaccgaattatgttactgtggtcacctaccttgccttgtgtgcccgtgttgctaacctgcagcatgggcgggagcttcacacgcacattgttaagcaaggattcaaagggtatcgtctactgtggaactctcttattgatatgtactcaaaatcagggaggctttcagtggctcaaaatgtatttgatactatggatgaccctgacatgatatccttcacttcaatgatagcaggatatggaatgcaaggaaaaggaattatttctctgcgctttttcaaacagatgattgacagtgggatcatgccagatgccatcatcatggttactgtactctctgcttgtagccactctgggcttgtgggtgaaggggaagagctttttgacaagatggtgaagtcatatggtataaagccccagatggagcactattcttgcatggttgatctatatgcacgtgctggactattggaaaaggcggaagaattgctcaaccagactcccttccctccgacatcaacaatggttgcagcattagtaggagcttgccatgagcaaggtaacataataattggtgaaaggtcagcaagaaggctcttggagatgaagacagagaacgctgggcacttcgttctgattgctaacatgtatgcagctgcaggttgctggaatgagctagcaacagtcagaaaactgatgagagatctgggtgtcatgaaagcacctgggttagcatgggccgaccttggtaacgggtttaccccttttctggttggggataggtcgaaccctctagctccagaaatctatgaggttttggatgaactaactgaacaaatgagtaatatgaataattgcagtgatccggacatactatccatggaggaacacatggagtaatgtgttcatggtaggacaaggacagattgcggctttggtgtaaaatggagttcattaatacaatgtagagatttcaccatgaagcgaaagggttaaaagggaaaaggtgatgtccttcaagaagcagctcatgtaagtgctactgtgcgagaagatgggcttaccaacatacactcaacgtttatgcatgttgaatgtttcctcgaacgtccaggcaatcacaagttgcttcctcatcgatggtgtcttagctgggatgcatgctaggtgatcgctacggtcacgacaagacttgacggctgtaaggtgaaggtagcctcaactcgatgccaggataactgatactgatttttgagggtgtgcattcagtattaaccagctgcctgatttgagatatgtccacaaacgaaaaaaaaaaaaaaaaaaagcggccagtacttcaagcaaatgggttacacagccgtaactcataactcgt

SEQ ID NO: 12523 - DNA, 754 bp, Zea mays
  Clone ID: MRT4577_111416C.1
acgcgtccgcctggctggtggagcgcggcgcggggcatgcgtgcaagtgcaaccaatcgcctcgtcgtgtgcgctcgcctttgcttccctcgttaacgtgagtaacctcgttggctgatcaaggctttgacggcggcaccaacgttcttccctcgccgcctcgttgcgtccgcccgcccagcgccaactcctcgtcctcgtacataaccccccaccccaccgcgtacagcgttccctctcgcgccccgcggtgagctacccccgctcgcctttagctagctacccaccatggccctcccgccgtcctcctcgccgtcgtcgctctccgccgcgtcagcgcagcccacgcccctgcacctgcacctcccgaccaaggcgcccggccgcctcccgctgctccccttctcgcgcgccgccctcccgccgccgctgcgcctccgcattgcgcgcaccagcctccccccgggcacgcccctcccgcgcgcgctcctgccaccaccctccgcctccgccgacgccgcagcctccgacgtcggcggcggcggcgccggcttcggcggccatgacgacgacgacagccacaaccaccacggcggcgagggtggcggcgacgacggcggccatggcgacgacgccggccacggcgatgacgcgcccggcggcggcgacgcccgcggggaggcgctgttcgtgctggcgcagctgggccgcaagctcgacagcctgccgtccgatctcgccgccgccgtcgaca

SEQ ID NO: 12524 - DNA, 193 bp, Zea mays
  Clone ID: MRT4577_111417C.1
cctatagtgagtctataacgctatcagaacatattgccaatcactcttgcttcagtgagttctgtttgttggacgctagagctatctgctatcgtctacggggtggtcgtgaggcgcagggtgtgttcgatcccttctcgatggatctctgggacgctgtcgagactatgttccactccatcgtcgcgtgggt

SEQ ID NO: 12525 - DNA, 586 bp, Zea mays
  Clone ID: MRT4577_111418C.1
ccggccggggtcaatacccataccaacgccatgccagagtcattggttcagagatgcatctgaagaaggaggcgtgacgaacgacgcatcgagagtgacgcaaggccgacacgagcggagcaatctttggagacactagaaccattcgtgcgcgccctctgccgcgcttccgacagctgatgctgcgcaagtcgggcacccagcgccagcagccggcgatgtggcggcggagccagaacctccggcagatcaagcaggtccacgcgctcatgggcctgcagggcttgctctcagactcctcggagcttcgcgagctcatcttcgccttcgctgtcggggtccggggcggaaccgagcacgcccgcctcgagttcgaccgaatcccggaccccgaccgggtgatgtacaacaccctcatccgcggggccgagcacagtgatgcgccccgggacgccgtttcgatctacgcgcgcatggtccggcacagcgccgactgcgacctgatgacgctgaggccggacaagcgcaccttaccgttcgtgctgcgcgcctgcgccgtcatgggcgcgggcgaaaccggcgcgca

SEQ ID NO: 12526 - DNA, 259 bp, Zea mays
  Clone ID: MRT4577_111419C.1
ggcggtgttgatgtatttcccaagaacgtgaactctgctgtggccacaatcaagaccaaacgcaccatccacttcgtcgactgcggcccgactggcttcaagtgccgattcaactaccagcctaccaccgatcgcaatgcggcgatctgggcggggggcatcaagacgtgtgtatgatctccaaccccaccagtggtgtggaagggttctcctgcattgacaacgatttcaatctcatgtaactaccccggcggtcgct

SEQ ID NO: 12527 - DNA, 1103 bp, Zea mays
  Clone ID: MRT4577_11141C.1
tcgctgttttttccggccggggcatccggcacaaaccaactgcatcaagctccaccagagaagacagcccgccgaggcgccgacggccgcagccgcgggcggactcgtgagtcgcgagtacgccgctgcagttcccaactcagggtgcctgcccgtaacctacccaagagcggtcccgccatgcgcgcggaggtcacccagatcagcgccctaaccgccgtggccgcgcacgtgctctgctctgcgggccttgctgccgcccacgccctcgctggccgcggcgcgctcgtctccgaccccgcgctcgcccttcgccttctcatggtctgtgaagcgcccatagtcatcgcagtgttcagctacctccggcgtgatgctaaaagttgctcgtttttcagggctgttgcaagaggattgatcggcttgcccgtgggagcgttccttaatgcatttggagcaatcattcttggggcacctgttggagtcaagtactggatagctactatttactggtcgcttgtcatgtccctgttcacgtttgttcccgcagcatgtgtctttggagcatccaggatcgattggcaggatgtgctttctcactccatttatttcacgccaactgatgttgagaactacatgatctctgcaccttgccatggagctgtgctaggagcatggctcggtgcttggcctatgccacttgactgggagagaccatggcaggaatggccaatctgtgtcacttatggtgcagttgctgggtatttgatcggaatggcagtgtcattggtcctaacagcacttcacaagagaagggtccgtgcaaaagctgactagccgttcttcccacaaagcaatgtatttgccgataacctttcttgttcctgcgagtactcgtcactttcagtagccttttcacccaggttcacattgttgtattcttttgaagcccccctcattttttttttgcagttgtacattgttttcttgaatgtaatgtgaaggactcagtttattactgtaaaatgcacgtttgttgagagagtgcgtgttgcacaaagttacctgctttattacgtaaaaaaaaaaaaaaaaaagcggcc

SEQ ID NO: 12528 - DNA, 257 bp, Zea mays
  Clone ID: MRT4577_111420C.1
ggaatgtatattgttaagtcactgttatcaagggacacataaaagcagaatcataaaactggactgcagccatcatcacagtacccgagtctatgcatgtaggtcatcctcactcagatcttagagtcacaaccaagactccaaaaaaccaacgaagtcccttcaatgtgagtaaaggcaacagcttcaagcactgacaatttttaacagtgattattcaaggaatgcacagtagccacagttcagacaaatcaact

SEQ ID NO: 12529 - DNA, 744 bp, Zea mays
  Clone ID: MRT4577_111421C.1
atcctctccaccgacgtcgtttttctccctgcaaaatactagccaattctccatttctccttaattatccaccagccgccgcccggggttcttcaaaaaatctgccgccgccgctcatggaagagatctcgccgcccctccctgctcagatttttcctcagcggctttatctacgcgcgtagcttcctggcgcgctccatctccatcgcgcgcgcaggctcttccagtctgcgagctgccaaactcgccgtggagctcctctgcgtcgcgcgctccttcctccaaccgcgcacccacatcctctgctcgctcgtcgccgtagcccctggtccctgccatggccgccgttccctggttggagtggatcctcagctcggctcctatttctctgctcgcccctgtgccgtcgctcagctcgccgtggaggttgtccgccatgttactctgcatcctgctactctccagaccaccggatcctgcactcaccccggccgcgacctcgccgtcgttcctcagctcgcgggtgccgttgttccgtgtgcttggccatcagcgttcggcggccgtcacgacatccccaagtctatcgcatcatgcttcggtcgtcgatcggctgaccatcgtcgtcgtgttccctgcttccctcgtcggtcgacctcgccgcggctaagtccatccgccgtgctatgtgctgcggtctctggtcgaaggacatccataccctatgccccttgctccctccct

SEQ ID NO: 12530 - DNA, 311 bp, Zea mays
  Clone ID: MRT4577_111422C.1
tcgtcttggacccggcccttaacttccatgggctttcgccgtcggttacactggggcccaacgctcttccccgcgttcgggcccggcttcttccccttacccttctccttcttttggtggctccactgactttaggcgaccggccccggccaccggcattggaaggcctagctgctgcaggaactggcctggcggcccgccggttcttcggttggagcgtttccggtttcttggatgcaccggctgcttcgatggctggcctttcgcccgccggagagggccccgacgccgtggagatccgtgaagtttgg

SEQ ID NO: 12531 - DNA, 249 bp, Zea mays
  Clone ID: MRT4577_111423C.1
ctgctctgacatttttataagtacagacagggtcgctggagatttcaaggcagccagagagtgtcgcaaaacgcctggactcggtccacagacaaaggtgaattataacacgtgcccgcgtttttagtcctgccatcagatacatgaaactgaactcaggcttgttcggttctcctattgtggattgagtgagcttggttgggtttaaatccaatcaagtcaaactttttttaaatattttttaatctt

SEQ ID NO: 12532 - DNA, 495 bp, Zea mays
  Clone ID: MRT4577_111424C.1
ccgctgctccctatctacctgctcctagctcacgcacactatctggcttaagctcaaaaagcaccttcggtggtcatgtgaggtccgatcccataaatctgccacatgactgcatgatctggccttacagttccgagagcctccagctctactcccaccacgccagtgtcaacttcatttactaatagacctgacacggcgcgatcttcaggaccctccttctgcactgcccgtaggagagctcgtgagcccgtacgtcgcacggttcatcttgccgacgcctgaacaactgctcgagtcgagctatacccccattcaagcacagcacgatcgggacgtcgcttctctttttcccatctcacgactacaggatctgtctgctgagactcggacgaagaacagtcgctcaagactgctgctgcatgatagtacatgaggtgacaaggggcgcgcgttgcactctctgctcctgcgacagcagcgacgtcagaatca

SEQ ID NO: 12533 - DNA, 265 bp, Zea mays
  Clone ID: MRT4577_111425C.1
gactctcaccgacgtcactcacacggcggccttcatctcctcgccgaggacttttcgtaggggcgtttacaaatgacggggcgtccccagccgttgcggcgcagtaccaccaatacttctctcacgattgcctttgaacctgccagagcctcaaccatacacgaccactgcggcaactcattctatggggccatacggccgtatttctataccggatcctacccgctagaggaactatcatctggactgagcgtcccccgacgac

SEQ ID NO: 12534 - DNA, 843 bp, Zea mays
  Clone ID: MRT4577_111426C.1
tcgaggccggccgggccgggattccgcgactatggcggcggcaccggcaggcggcggccctcgggcattgtcccagcgggagcaggacatccagatgatgctcgccgccgatgtccacctcggcaccaagaactgcgacttccaggtggagcgctacgtgtacaagcgccgcactgatggtaccaatccaaatctttcgagactaaccaaatgtttacctccaatgcttgttgtatttgatatctagttttagatctgctcgtgtttacttctattggaacttgctatgcgcttgcgtttattaagatgcgatgtatagatcaactgagaaatattggcgcgtagtttcattcgagaaatagtgattcgtaggcatgtaattctagttaaatttaccgttgatagaagcgttagctactttaatatcgtttctccagtatggtcttgtggatttgtctagcataaagagctgaagaatctaaatgtgagctgtgatacacatgtgtacaatctaaacgtgacaacacaaatggtattcgtctcaatttcataccataaatatgagctgtgcaattggtttatactagattctatcaaaaataaaggatcaattgattgataccaaacatctttttgtctgtgttgctgtgattgttcactggaatcaatgggacaatggcttcgtagttcagtgctaactcgagttgcttatgctggcaatttcttatacctaacagtaagggcttttggatattattatcataattatctttcaggtatctatattattaaccctggaaagactgggaccagcttcagttggccgccagggtcatcgttgca

SEQ ID NO: 12535 - DNA, 429 bp, Zea mays
  Clone ID: MRT4577_111427C.1
acgggctcttagacgtgatgcaggccggcgtcatgtgatgcccgtgaaggtgatctcgtaccgtgcttcaagacgctgaatgcgtttccctgctgatggcgccacggagagcagttgtgtcctagctcccgacatccaagcccagaatacccatgcggatgccgtagatcaacagtttttatttcctaagaaattcatgcgccgtgtatgatgcagatgctgagacctgtagactaggattagggaagttggagacgaactttggtttcctagcggaaagtagaatacctgtacgaacgtcattcacaagcgacgggcgtaactgccaacgaagggcagcttttgatgcaaaccgtgaccacgagggaggggtactaaaactggactgatgacgtcttccgctctgtagattcctcgatgtctaaaaac

SEQ ID NO: 12536 - DNA, 711 bp, Zea mays
  Clone ID: MRT4577_111428C.1
ccccccccccccccccccctttcctttttttttttccgaattggtacctcgagccggccgggcgtccccgtctcaccgcactgccttgccccctactctgcctcgcttagcttagccgccgctgctacgcactctcgccgtccttgttcccgcgtcgctctgctcgcgatggcgtcccgcgttgcagtgctgctcgtggccgtggcggccgtgctgttcgccgcggcgtcggcgcaggagatggacctgggcgtgccgcccgcgccggcgcccgacacgggcgcggcagcgggggccgcggcgtcggtcctggccgtggcttgctctgccgtcttcttcatcctcgtcgccggtggcctcgtgcagtaggcgctgccgtcgacgtggtggctagctgctggttcggggtcaggcggagccctgttcgatcgttttcgccttagttagtagtagaagtagcagtcatgggctgtgttgattgtgtccctgtctccccctggtgggcgttgtgatcttgtgctattgcttattctttttgtaccatactgcattgttcgacgtataccttgtgttgaggcgtgtgttgtatgaataaagacgatggatctcgttcgtcaatcgtcattaggaaagctgggttccatgttctgttcatttgcgatagaaatctcccaaacatacccgcaaaaaaaaaaaaaaaaaaagcggccc

SEQ ID NO: 12537 - DNA, 348 bp, Zea mays
  Clone ID: MRT4577_111429C.1
cttaaataggggccggcgggcttggattactgaccatgtccacattccttgatttatttgctcaaccctgaatcatctatgccaagatttaccgcgatttaaatggagccaatcctgaacggagacggcccacccaacattattacatacaaagcaacaaatcatgattggagcgatcatggacgaacaccaaaacagaacttttacaacggttacttttatcctttacgagtatttatatgaagtttgctaggcttatgaaatgagatatcttcatactaactctagtcacatgccgaactattagaatgttcactatctctgagctgcaatagaacgtgataatac

SEQ ID NO: 12538 - DNA, 1728 bp, Zea mays
  Clone ID: MRT4577_11142C.1
ccgggcgggtggggtccgcctttgcggcggaaattggcaccatgcgggtaacagaacaattggatgctctgtatatgctcaggacagatccgattgattatttggtcgttccccgggtgatcgcctgtggattaatgttaccgattttgaccggattgtctctgtttgtgggcatggcgggaggattggtaatttcctccagtctttatgccattaatccaaccatttttttaaactctgtgcaaaatttcacccagctatgggatgtatttgcttgtttgttcaaatctttggtatttggcgtcatcatcgccattattggttgtagttggggcttaaccaccactgggggggccaagggagtaggcgagtccaccaccactgcagtggtcacgtccctattggccattttcatcagcaactttttcctatcttggttaatgtttcaggggacgggggataccgccctaggctagagggctatggcattgaccttggttatgggagccatagcatctccgtgggtttctgtggggacaaagctctgctacagtcggttaaacgaatctttctatccctctaatcccctaacagcacccaatcccatgaatattttcggcattggcttacccgaactaggtttaatctttgttattgccctattggtgtttggccctaaaaaattaccagaagtggggcgcagtttgggcaaagctctgcggggattccaggaagcttccaaggaatttgaaacggaactgaaacgggaagcccaaaatttggaaaagtcagtacaaattaaggcagaactagaagaaagtaaaaccccagagagtagcagtagctcagaaaaggccagctaacccctccttggcgatctcgaggccagggtagtggttatatccgactgcactattgtgaaaaacagacccgctccggcaaaaaatcctacgagcagtactactatcactacgaactggaggtaaaggggaaacgggtaaaacgctctgcctatatcccgaaggataagcttgatgtggtggaggaatgggatagaaagaaagtggatgtagtcctcattctgcaatatcttggcaaggcgacggactaattaaacccaacaacggcgatcgattaatcccgtccggcgagttggtgcggatttgttagttaacccctagtaatttttgttgactcttggtcttatgccgacagctatgtaggcttttaatcaagaatgaacgaaatcaagaaataaagaaaagttggagtaggttaaatcgaaattcctggaaagcttgtttttcggggaaataacctgctcaagactaactaacgaaataacgaaagcaagacttaaagcaaagatagaaacttggcagaaagaacgaattaacgaaaaaaagaaatatattagtgaggtcactctagactttccccatgctcaaaacggcctatattgtctgcggcagtcccggtgccggcaaaaccttctatggcaaagaactagccaaactgaagcaagctattttccttgatattgatacagcaacagaacgccttgtccggttagccctccaactatcaggtcaagatcctaatgatcgtgacagtctctatttcaagagcaattttcggaatccaatctacgagcagttatttgacattgcccaagataatttgctttggaacgatgtggtcataacagggccttttaccaaagaaatc

SEQ ID NO: 12539 - DNA, 329 bp, Zea mays
  Clone ID: MRT4577_111430C.1
attgagaactgtctcgttaaataaattaatgtacaatgcctcgctaatagcacgctatagtgcgctaatagcatattttcagggacacgctattttttgtactagtgcgctatttttttcattgctactataacatccgcatttgaccattagagctcgaatttaataaagttggtgtatcacgcggccaaccgcgccagggcctcgccggcatgctccccggtggactgccggagccggcggtagtcgtcgtagccgaatgtcctgaagaggcggtggctgccggcgccgacaaaggcgtccggcgcgcggaccacgtcgtcttttgg

SEQ ID NO: 12540 - DNA, 366 bp, Zea mays
  Clone ID: MRT4577_111431C.1
ctccattaaacaggggggttcgtaacacaggcaagggatgaaacagggggacaccaaaatgggaggcggggctccatttcaaaacccgccaaataaaaggggggggggcgtcgaactaaaagcattcacgatgggcgggtccggacccccataaaaaggaaagagcaaaggggggcagacaattacaaatgccagagccgcgccgcgcacatttagcaggtcactgccccatctgaagggccttgaggtactccggctcaagggcttgcctagctgggattcttttgcttggctcataccgaagcattttggagagaaggtccaccccagcagggtctacatttgggactattgctggcaggccct

SEQ ID NO: 12541 - DNA, 1136 bp, Zea mays
  Clone ID: MRT4577_111432C.1
gccggcccgtccgggcagtcggccatggggagaccgagagctaccaccaccgcagcctcttccaagccgaagccgaagccgaagcccaagcccaggtccagggccaagcctagggcgacgcctagccccgtctccctgctctccggcatctcctctccttacgcgtgccgcacgccgtcccctgctgccgccgacctcagcttcctctcgccctcgtccccgccggcggaacccggaaccaggaattcttcgcccctcgccgcccccactaccaagtccaccatcggagacctgaggagccttgccgcgtcgcacctcgactccctgaagcgccgcttggacttgctccacggcgactatgtccgcgaccttgaggcctcccactcccgcatctccaagcgcgtcaaggtggctggtccccgttccctgcctctgcgtagctcgctcactccttcggttgcttcgtcgagttcatcatgtgcgatgatgtgatgactgatgtcatcttctcccgcgtgccctgcgctcagatgcagtcccatggctgcctgcagctagcagaggaagtggacaaggagcagcagaagatagccgacaagatcgccgagcgcgccgagctggtgaagacctcttacaagaagttcgtggctgaagtgcaggcgtccacatcccgtgtgtgcaaggtgactgtccctgagatgacgaagtccatggagagggctattgatggcttgcgcagtcgctacatctccgctataccatcagcttagctggtgctgttgtccacatcaattgaggtcacatgttgagtcttaaatcggcttcgcagcagggacttgcacatttgtacataatatcaccgttgcatgagtacatgagatagttcattgctacatctccatttccagatatcccgaaaagtcaataatagttccttcgatccttggaacttttttttttgcttcgtcgcatttcttgtgcatcccgtaagatgctactgtcgatgtacctttcacgctcagagcatctaatttttaatcatgtttgttctagcagtacgttagctatcgcctcaagcctgaatggtcagttgctgcatgacaattaacaaccaaaacccaggtcttgttttgttc

SEQ ID NO: 12542 - DNA, 443 bp, Zea mays
  unsure (1)..(443): unsure at all n locations
  Clone ID: MRT4577_111433C.1
ctaaataatggagagtcattttgttatatattggcataagcctagtgaagtgagccctagaggtgccttggtggttgcattcatgtcgttgcatagtgtttctaagtgcaaaaggtgtttgaaacatgttaatataccttggagaagcttttgataaattttcatatttttcggaatatttttctattttctggaaaccaaaatctaattatttgaggtacttaaaaacattttcaaaagctctaaatatgttttttgagttcgttgggtgtcaaatcatgtctaagaattttcctagaattttttgagtcttcatgatatttttcggacattaaatacgatttaagccattttctggaattattttaatcctaaaaattgatttatttccgaaaattaaaatatctttaaaccctagcantttatatggttggagtcctttc

SEQ ID NO: 12543 - DNA, 555 bp, Zea mays
  unsure (1)..(555): unsure at all n locations
  Clone ID: MRT4577_111434C.1
cccgggttcgacccacgccgtccgcccacgccgtccggtagctgcatacactgccaacgtctcacgaagaaggtaagtgccagatgtaggcgagtgtctcgttgcccatgcanngcagtgtatagcatgctgacgtgccanagtaacgaacccatctccacacaatctctgcgtccatttgcatnnncacattggnnagagcgttacggggcctnnctcttagnnattgggtagtttaaagtcgatggctgcgaggagnagtgagacacacnnnagccttgnngttatagtnnaggcatccccttgttagctcnntagcagtgttctacccctgagagnggttttagatgtnncggattcaataccaatctnnggtggttgcttggatattnatcctgaattgtgctatgggttttcagcccattagatattcatcagggtttaaattgagcagcgtctgaaatttgttttcttgaacagatcaatgcctgggagtttttttcgcaaatatttcatctctaggngaaaaattttagatggaagaagagataaata

SEQ ID NO: 12544 - DNA, 229 bp, Zea mays
  Clone ID: MRT4577_111435C.1
agcacgcctgagctgtggcatataccatgcttgattgacatgcaggaaatggcagttactctggggtatgtctcctgtgtcatcagattagacagctcactcagtgcattgcgataccacttatgaatactgcactctgtgctcggactacaattcacactgctaacggtggactactctactgctctcccagaactgcgaagacgctattggctagggctataagtac

SEQ ID NO: 12545 - DNA, 766 bp, Zea mays
  unsure (1)..(766): unsure at all n locations
  Clone ID: MRT4577_111436C.1
agttcctgcatacactctccgcttcccgctccgatcgacctgatccctccccaccaccgagcccatgtaggaccagctcaccgacgaccagatcgccgagatcaaggaggccttcagctctcttccacgaggacgcggatggatgaatcactaccaaggagctgggcactgacatgcgctcgctggggccaaatcctacagaggctgagctccaggacatgatcaacgaactcgatgctgatggaaacgtcaccatcgatttcccatagtttctcaagcttatggctcgcacgatgaaagacaccgacactgatgaatagctcaaggaggacttccgtgtgtttgacaaggaccataacgtgttcatctcgtgcgccgagctccgccatgacatgacaaatcttggagagaagctaactgatgacgaggtgtacgagatgatccgtgaggctgatgtcgatggagatggtcatatcaactatcaggagattgtcaaggtcatgatggtcaactgagccacagaatcataatctgaaggcagagaagattctgcattgcatattagtcaagatgcaactttatattccatcgacttctaacgaaacattctgctagttgtatctgctgaaaatgacaatgtaggaccgtgctttgatcttccctccaggtgnatgtcataactgctggttcatgagaccttgcaatgattgccctctctgntgagncttgattgcagctaaaatcatatgtagtttcagcccaccac

SEQ ID NO: 12546 - DNA, 946 bp, Zea mays
  Clone ID: MRT4577_111437C.1
tctaaaatcttatcactagcgatagtgaaagatacgttctaagtcattgtaaaactaagcaatataactgcagtactgtacaaaggaacctactttagctagctttaattaatttatacgacagcacgctaagacggcgcaataatctacatatacacgtaccaatacgtacaaatagttatctctggttcctgcgcgtgccataccctgcggacaagaggtgtgcgtagaggatctgattccaaacgtccggcacgccggggaggcaccagtggctgcagtcctccggcgcgtccggcggcgttccgggctccctgtgccctgccgggtggccatcaggcctgagctccgtcatgtgagtgatgttcagaaacctcgccttcctcccgtggctcttgatatcctccgtcatcttcgcaatcatcgcgttcatccatgagtactcttcctcggagcggccattgtttgtggtcggtggctctcgctggccggcgcacgaaccgccagtgttccaggtgccgttgctgtaatgcgagggagaataactcctgaagaagaaatagctttccgaaagctgagcactactcaattcccaatctttcaccgtctgcagggaccgttgaaaagcttccttgatgtccatggttttgttcaagcggtcgccgaccatgaaatagtttcctgccttgacggttttgtgctggttccaccagtggccggagttgagcacgagcacgtcggcggcggcccaccggtcggcgtgccgtggcagcgcgtcaaggcggacgccccccctcacgctgcctgccgtcgcgttgtttgccgccgggaagcggtggaccatcacgatcatgggcgcgcggtagtactcgacggagaggttgtagtcggcgaaaaccatggcgaggtagcccttgtgccggctgatcggcttcccggaccgctc

SEQ ID NO: 12547 - DNA, 624 bp, Zea mays
  Clone ID: MRT4577_111438C.1
gggggccaaatacaacagaccaatccatatacttttaaagggggcaggacaaggcaaagcgacttattttacacacagaaaccacatcagtcacataacacaagtccccaaccaacaaatttacccatataaagagggagggggggccctttttccaactatactcagttttccaacgacgaatcagggaaaaataaaaaacttgacgagttaaatggagggggcggaaaaggcaggagttcatcacaaaaaagccatttaaactttcaaatacgctggtgggcctacccataaaatatgccacttcctgtaaaaccccctggggggagcaggcccgttgcttttgacgttttggtgaacatgcaaaaacaatcgttgcatgcgaggggaaaagtcatgcttgttgtcggtcatgggcaacgagggccttttccttggggggggggcctgcacattggggctaattttgggggacaaaaaccccttggcttttgcaaattctgaaaattgcatgtagcttggcaacaggttgctgttgctgttgctcgggcaaggtttttgttcaacggggccggatttaacaaccttgcttgagctctctctctggggaaggcttgattcctt

SEQ ID NO: 12548 - DNA, 594 bp, Zea mays
  Clone ID: MRT4577_111439C.1
accaagtcgctcctctgcgccgagtggtaccgatactagactgagactaggcgtgagtatcatgcacctgctctaagtagcggttctgggtggaagccaccgtcggggggcagcgtgggaggacgcgccgggagcaaagggagagcgccggccgagacaccccgtcctgtcaacgtccgggaagagtacctgaggaccctgtccctgtactaacagtttggacaggtcccaggactgcggggcgagtctccgggtttactctacgccgaaggagataaaccgccacgaagaaggaccactggttacaatgggcctaggataatcggctaggaattccaggagaacgtgtagactaagtaccatctcgctaccgttcacttagtaatgataacgggtacaggtttcttcacccataactcaaggacgcataccgtaacaagttaaaacgtccacacttaattaaaacgaatcctgactacgacgttcgcttccttatacaaactagttgtctaaagcttggatttactattccttgcgtatagaacatacacctgtagtcactcgaattggtcctagaacttgctgagccatagt

SEQ ID NO: 12549 - DNA, 225 bp, Zea mays
  Clone ID: MRT4577_11143C.1
ggaactcgcgcgcacgacaacaaggcgcagcataggtacacccgttgcacccgcgttgctggccctctgcgcgtgttgccggcatcgccgaagaggtcagcggccgcagatttcaaggcagggacgagcaacggtaacgcagtcagcgtcaaatcaatccatgacgacgtctgatagatcctgtgagatgacctgaaggtgacgttactaggcgtgtgtattttc

SEQ ID NO: 12550 - DNA, 551 bp, Zea mays
  Clone ID: MRT4577_111440C.1
gggcgaaactggattacgggttaaacaatggctcagggttaaactatgaaagggggcacctcctttatcctgcattggggaaatctgaacccggggacccacagggagtggggggtcttcataacccaaaggggacccagagggctaaaatcaaatccctgaaaaaggtttccattggaaaaagagcttaacaaggcttcaaaaaggggaaaaaaggacatgcttcatgaaacatttacaagggcaacacacgttttttcagttccagggggccccggacttcatattcttaagttcccccagctggcggcatgtttccttgggggcctctaaaagcttatcatacttaaattgcaaggccagcttctttgccttgagcttttcataggcaaaaattgacgggccacccagcttttggtgaacaaattcgactgcaaaagaaggcttatcgttctcctcgaacagggccacaaaagctttcgggagggtatcgacccccccactggattcaaaatacttccggaacgcttctttcttggcttccctggcca

SEQ ID NO: 12551 - DNA, 171 bp, Zea mays
  Clone ID: MRT4577_111441C.1
atctgatcgtctcgccttcatcaagatgcagacacgcagccttgcctgcgacccgattccagatgcagcagtgcgtccagaggttgaatgtagcgctgagaattatttcatggagagaaatcatgttgcagaagtcagaatctaacaactaccgggtacctggattccaac

SEQ ID NO: 12552 - DNA, 776 bp, Zea mays
  unsure (1)..(776): unsure at all n locations
  Clone ID: MRT4577_111442C.1
cattgggaccctcgaggccggccgggggccccagactcccaagagagggggcaacaccgagacgggggaatttttctttagccaaatcaaatcaaggtgtgggtgggtgcagtgcagaagtagagtggaggagatgggagacgaaagcaacgagcgggaggcgacgcggcgcctccagcggtgctcgtcacagctgcgcatgcgctccagcacggcatggcgggcgcacgccgggatggtggtcgtccagctcgccttcagcggctaccacgtcctcaccaagtccgtcctgagcgcgggcatgaaccaggtggtcttctgcgtctaccgcgacctcgtcgcgctcgccatcctcgcccccgtcgccttcctcggcgagagaagggtgaggcctccgttgacccctcagatgctcgcgtccttcgctcttcttggcttcactgggctgttcgtgaacccgctcctcttcctcgtcggcctccaacacaccaacgcttcgtacgccgcagcgttcgagccctgcgtgcccgtgttcgcgttcctcttggccgtgattgccggcgttgaaacgatcaacgtctccacgcaacatggcgtcctcaaagtcgncggcacaggccgtcgggtgtctcaggcgcccttctcatggctttgtacagaggcccgtccttgacaattggctgagtttggnaaatagaaagcgccgccgccactgcgccggcgagtgaaaacgtcaccgccaccattcctgctgctcatcagtggccgacatctac

SEQ ID NO: 12553 - DNA, 170 bp, Zea mays
  Clone ID: MRT4577_111443C.1
caaataacaatagcttaactagttttcatataacatcacacatccaaatatagttcaatttggcacagtgtaataaggttcatttctaacattactctaatttaacatccaaatatagttcaacttggacagcataacaaggtccacttgctaagttctaacttggacag

SEQ ID NO: 12554 - DNA, 471 bp, Zea mays
  Clone ID: MRT4577_111444C.1
gttcccacctgcgcaagaggacgaactgctaccccctcacctcgccctcgccgcctgcttctcttcagcttctcccccaccaaccgcagcagcaagagcgagactgagaatggccgcggcgccggcggccctccagtcctgccatatctcccggctcgccgacctccgtcgcgcgaagacgccggccactaccaccgtgccacaggacctttctgcgtctggattcatcgagcacgccggcgcccactgtcgtgacaaggcatggcatgtatccgaaaagctcttagaactaggcaacaggaagagcaacggaccaaaagactgctaacgcaaacttgaatgtaaactgaatgctggtaccctccaaactgatctagatggtatggaggctcctccattcatctatatcgatcaagtcaagaatgcactaacagcagcgcagttgatgtttctgctgcaaaatgtgtagga

SEQ ID NO: 12555 - DNA, 1593 bp, Zea mays
  Clone ID: MRT4577_111445C.1
atggctgctttaattgtgggaagtctggacactttatcaaggactgtccctatccaaagcaaaataaaccaaattctcaacagacttctaggaacacgtctcaaggcaagggaaatgtggccaacactccagcgggcaaaaatacaaggaaaactaggcgagtctactaccacctcggaaggagaaccggtgatgatgggtaatccgagggatgtattccctgaagatttgctcggattacctccggagagggatgtggagtttgtgattgaattgaaactcggacatgttttatctgctaaagggattacggttgatcccagcaaggttaaggatattctggaatggaaatctcctacctcggtacatcaagttagaagtttccttggattgtatggttattaccgcaggtttatcccagatttctccaaaatcgttaaacctattactaagttactgaagaatgatgttaagtttgactggtctcccaagtgcaaagaggcctttgaacaattgaaaatattgctgaccactgcaccagttttggctcaaccggatattgagaagccatttgatgtttattgtgacgcattaggcattggacttggtttaaagtacattttcacccagtcggagctaaacatgagacagagaaggtggctcgacctgatcaaggattatgacctagaaattcattatcacccaagaaaggctaatgtggtggcagatgctttaagttgtaaagtcttttgtcattgtctcactatgggatttcctgacaccaccttatgtcaggaaatggaaatattaaatctagggatagtgcaacaaggaaccttgatgcatttaaagcttgggtcaattattctacaaaagattattgatgctcaaaggatcgataagggtatgaaatatatacatgagaaagtggaggctggcaaagctaattgttttaggaaagatgataaaggaataatatggtttaaagaccgcatagtggtgcataaggatgctgaacttcgtcaacaaatcttggatgaagctcatcttagtcgacgtgtcaaggcgatacatatgaaaactgctggacctctacaatccttgtcgatccccacatggaaatgggaagaccttagtatggattttgttgtgggattacccaagacatctaaagggtatgactctatttgggtgatagtggactggcatacaaagacagcacattttcttcaggttaaaacagatcacccagttgctatttatgctcagttgtaccttgctcgtattctcatcctgcatggagttccaaagacgatagtgtcagaccgaggaccacaatttgtatccatgttttgggaagagctgcacaaatctttgggcactaaattgctccacgattcagcctatcatccacaaacaagtgggcaaactgaaagggtaaatcaaatattggaagatatgctacacgcctatgtcttggagttcctacaaaaatgggatgattgtctgtcgctggcagaattttcttataataacagttaccaagaaagtattaaaatggcaccgtttgaagccctgtacggacggcgatga

SEQ ID NO: 12556 - DNA, 498 bp, Zea mays
  Clone ID: MRT4577_111446C.1
gaaaattaaaaataaagaattgaatgaattaatgtctgatgtacaagatctaatggtacaaatgctacaactatgctgcgataaaaatacacgatgtgacagttttcaagggtgtgaattgaacaaagatacaagagccagaggaaacaatgtaataatcaattgtgaaacatagtatgtaccgattttcctgatcatgtgagcatacaatgaattcgctgtgtcaaaaaggtttactgggcttgctgttgtctctcttgagttgaactttcaactttttaccacctaattggtatccattcatcacactaatggctgcttgtgcaaaagctggagaatcgtagcttacgaaaccaaagcatttactaacaccagttgccttgtctacaaaaactttagcactcagtactctaccaaaactatgaaatgcatttgcaagatcatggtcaccaaattcttgtggaatgtgatatatgaacaaattggctccaggagggc

SEQ ID NO: 12557 - DNA, 510 bp, Zea mays
  Clone ID: MRT4577_111447C.1
acattaccttctcctcttcctgtttagccgccgccgcctccccttccaccatggccgccgccccctccccttccaccgtggccgccgccccctatcgcccgacggcgagcccgccctcccgtccccctttcctctggtcgccctcacgcactgcatcgcctactggtcgcgctctctctctctctctctctctctctctctctgtattcccccctgcccccaccaccacgggcaactccggcgaggtccgacggcatacagcacatccaccagctcatctcgtgacactgctccttctccaccgcgttgacccgacgcgcctcccctctacgcgcggacccggataaccctagcggtacggtcggcggaccacgacgtcaccatcaacgccggcgctgcacccgcacctccggatggtcctccacgaccgcggccgaactttcgcgcactgcatcgcctcctcgatgtgcagaagtctccatcaactggaggagcgcgatgaccgtcgat

SEQ ID NO: 12558 - DNA, 400 bp, Zea mays
  Clone ID: MRT4577_111448C.1
ttaacaattcagatgtttaaactagatatgcggggtaaatacaatgccatatacacgatctgttagccacagcctcagtgggagagtgggagagatcctcaaatacaggtggtgcatgaacctggacctcctttgttatctatcttcctccctgagagcagaggtcagagccgggtaggtcatatgacaaccaagtgccaaaagaacccgcctcagcaatgacactgctagcgtacgtacgtgcgacgacaagcattaataattcacacaatggcaacactttcagcactggagcatacttaattacaagctaccatgaattctgcaaacattgcccatctttctacaaacacacactctttcgccctatgggctatgacaagcattactacttgttagc

SEQ ID NO: 12559 - DNA, 319 bp, Zea mays
  Clone ID: MRT4577_111449C.1
cagttaagcttgagcaagaaaggaacaggtctagcagtttccagaagctgaccaatgcacgcggacaagtagtaatgcttgtcatagcccatagggcgagagagtgtgtgtttgtagaaagatgggcgatgtttgcagaattcatggtagcttgtaattaagggggtgtttggttttagagactaaaaattagtgcctagtaaccaaacactacctaagtatgctccagtgctggaagtgttgtcattgtgtgaattattaatgcttgttgtcgcacgtacgtacgctagcagtgtcattgctgaagcgggctattttg

SEQ ID NO: 12560 - DNA, 274 bp, Zea mays
  Clone ID: MRT4577_11144C.1
attctcgcggacgtgaactccgaatgcggctctagtcgagatccggtgtcgctacaggccgatggagacgtcgttcctggagaagatggtagcagagatacatcgctttatccttaccagtgcgtctcaggactggaaagtcctgacgatcgctcaattcgctcttaacgaggcacagacatcacggctggcggatcatagatcctagaagcttcactgaggcccgtcgagaacagggcgatgatgctagaggagacggtacagagactggact

SEQ ID NO: 12561 - DNA, 2223 bp, Zea mays
  Clone ID: MRT4577_111450C.1
cattgggtacctcgaggccggccgggattgtgtggcctggcttccgttccgcccgccgaggccagtgtggcaggcagctcccgcgcgagcgcgagcgcgatccagaggctggcgcacctgcgtcactcgctccgcgctgccgcgatctcctctgacgtcgaagtcgcccgggggatgacacagggggaaggggtggtgtgggaggggtgaacaggagctcggtgacttttgtgaggggcgccagatggaggagcgccggctcgacacgccggcgatgaggagaatcagcgagtggattctttcactagagttcccaagcgatattaccatccaggttggggaggcgaccttcaacttgcacaagctcccgttggcatcgaggtgcggctacataagggagcaggtgtcggggatcaatggctccagggtcacccacatcgacatcacgggcttgccgggcggcgccgcggcgttcgagctcgtcaccaaattctgctacggcgagaacttcgagctcacggaggacaacgtcgccatgctgcggtgcgccgccgagcacctggagatgaccgacgacgacagcaggggcgggaacctggccggcaggaccgaggcctacctggaggcagtggcgctcatgagcctcgcgggcgcggtcaccgtgctccggaggtcggaggacctcctcccggtgtccgaggaggtggacctcgtcggcaggtgcgtcgacgccatcgcctacttcacctgcaacgacagtcagttcagcatgtccaacggtaacggcatggacgtgtcgtcgtccaaggtcatcatcgatgattggttggctgacgagctgacgtcgctgcggattgacacgttccagagagtcgtaattgccatgaaggcgagggggttcaagggcattgctctgggcacgctcatcatgctctatgctcagaagtcgctgcgaatgctggacacacacggaagggagaagcaaaagatggagccgaggcaggaacacgagaagcgtgtggtgcttgagaccatcgtgactctgctgcccaaggagaggaactccatgtccgtgagcttcctctcgatgctgcttcgagcagcgctgtgcctggacacgaccctggcgtgccggctcgacctcgagaagcggatggccgcgcagctcgggcaggccgtgctcgacgacctcctgatcccgatcttcttgcccgacgccggcaacacgttcgacgtcgacgcggtccagaggatcctggtcgggtacctggagcacgaggccgaggcggaccggctggactacaacaccgacgacgacttcacctcgacggcgtcgccgcccaacgacgtcggaatggtcggcaagctcatggagtcctacctggctgagatcgcctcggacgtggacctgcccgttgacaagttcaccggcctcgccgagatgatcccggaacgcgccaggttcaacgacgacggcatgtaccgttccatcgacatctacttgaaggcgcatccgtatctgagcgaggccgagcggaagacggtgtgccgggtgatggactgccagaagctgtcgcgcgaggcgtgcgcgcacgcggcgcagaacaatcggctgccagtgcagacagtggtgcaggttctccaccacgagcagcggcgcctgcgcgaggcccctacgtcgtcgttctacggcggcgagtccccgaccccggcgccgagcctccagggccggcacggccggagcgtgccggacgagatgtcacagctgcagcgggagaacgaggagctcaagatggagctgctgcggctgaagatgaacctgagggacccgtcggcgcccccgcagcccagcgacgctccaccatcggggcgccgcccgctgccgaagaaggcggcaggcggcagcggggggttcattaacaacgtgtccaagaagctcgggcggctgaacccgttcctgcggcctgacgccgtgggtggcgccaaagtgcgcaccaagccgtccaggaccaaggatcggaggcactccatcggctagtgattggaattggctcatgctcattgccggcttctttcatcttgaatcttcttgacggctatttcactcgatgaacgtaaaaaaacactcgttgattgattgattgaatggccgagtcgtgagtaaagatgtgtagctatcgcacttgaacataaataagatgctatgttatactttcttcaaaa

SEQ ID NO: 12562 - DNA, 519 bp, Zea mays
  Clone ID: MRT4577_111451C.1
gtaaataaattaaattaattgttaaaaaaaaaaaaaaatagaaagtttggaaaaaaaaaaaaaaaccagaaaagggggggcaaaaaaagaaggagaaaaaaaaaaacaaaaaaagaggaaaaaaaaaaagaggaataaaaatggaaaaagaaataatcagcaagaaaaaaagatacacaaacaaaaagaaaaaaaaaaaaaaacgcaagcaaaaaaagaaaaaaaaagggagcccaaaaagagaactaacccacattaaagggggaaaactcaatgggccctttgcacaaaggaaacccgtaaagccaacggaaaaaaagaaacggccacccccccgggagagggggaaaccgtattaggcacaaaagagaaattttattggaccaaggagacggggaaaaagtgagtggcccgaagcggggggcgctgggagaggcccgaaaggagggccaaactgggttgggcccaaaagggaaaaaccagggggagggggggaaaaaggggggaataagatgaggc

SEQ ID NO: 12563 - DNA, 219 bp, Zea mays
  Clone ID: MRT4577_111452C.1
ttctcttatccctgcaacatttgatcaacaattctaatttcttcaatcatagaaatcttcccgaattgagtaaactttaaaaggtccccgggaccttatctactatataatttcataattcaaatttaattatattcaaaattccttataatacattatctacttttcttttacatatatattcatttaaaatgacatatatattatacttatattatc

SEQ ID NO: 12564 - DNA, 1277 bp, Zea mays
  unsure (1)..(1277): unsure at all n locations
  Clone ID: MRT4577_111453C.1
gccattgtgtggcctggcttccgttccgcccgccgaggccagtgtggcaggcagctcccgcgcgagcgcgagcgcgatccagaggctggcgcacctgcgtcactcgctccgcgctgccgcgatctcctctgacgtcgaagtcgcccgggggatgacacagggggaaggggtggtgtgggaggggtgaacaggagctcggtgacttttgtgagggccgccagatggaggagcgccggctcgacacgccggcgatgaggagaatcagcgagtggtatatacgttcctagcttctcctaccatccctgctgcgtctccttgctctactttccattaattggcatgttgctgctgctgtttcgcatttgattcgatgagttcgtgtccgtaaccggcgctgatagcttgttcagtccgattttgaactgaaaacaaacagctatcgtcattaagctagcaacacgtgacctgtgctttcagatcttcacgtcttttacccgctgaaccgctcgctctagccaaaccctgcaaatgaagttttgcggagtttgaggctggctcttttgcttcgcttgattgttgcaggattctttcactagagttcccaagcgatattaccatccaggttggggaggcgaccttcaacttgcacaagctcccgttggcatcgaggtgcggctacataagggagcaggtgtcggggatcaatggctccagggtcacccacatcgacatcacgggcttgccgggcggcgccgcggcgttcgagctcgtcaccaaattctgctacggcgagaacttcgagctcacggaggacaacgtcgccatgctgcggtgcgccgccgagcacctgcagatgaccgacgacgacagcaggggcgggaacctggccggcaggaccgaggcctacctggaggccgtggcgctgatgagcctcgcgggcgcggtcaccgtgctccggaggtcggaggacctcctcccggtgtccgaggaggtggacctcgtcggcaggtgcgtcgacgccatcgcctacttcacctgcaacgacagtcagttcagcatgtccaacggtaaccggcatggaacgtgtcngtcgtccaaggtcatcatcgaatgatttggttgggctgacgagctcacgtcngctgcgggattgacacgttcccagagagtcgtaattgccatgaaaggcgaggggggttcaaggggcattgcttctgggcacgctcatcatgctcctatgcgcagaagtcgctgcgaacgctggacacacatcggaa

SEQ ID NO: 12565 - DNA, 1405 bp, Zea mays
  Clone ID: MRT4577_111454C.1
ccacgcgtccgcttccgctccatactagccgaaagagatctcggctccgccgcccggcgccatggtggaggccaacccccccctcgtcatgcgcgagactctcacacacacctgtctacgcctcgcgccgtagttctgcacctgcacccatctcaccatggaatcggagaggtacatctgcgtacgagcgacctccccgcagaacagcttcgccaccacagacatggcaccatcgagtcggagacgcacctgtgcgtccacgggacccccccccaatacagtgtcgtaagcaacgatattcccacgcccatccagccgccccgacacaccatcgccgccgactccaccctcatgaaccccaacaccaggatcctcgccctgaaagcccaaatacctggaacaacacaggatcaccttcaaatatttaacattgaggctaagactaagatcaagtctcaccagatgccggagcaggtcgtattctggaaatggatcactcccaaattgttgggtttggtgacacaaacatcagtttaccactggtcgattgaaggtgattctgagcccgtcactagtacttattggaattgcacctggagccccagagaggccacaactggtgaagggaaatatgcaacttttttctgtcgatcaacagcgtagccaggcacttgaagcccacgcagcatcttttgcaacatttaaggttgttggtaatgagaatccatcaactcttatttgtttcgcctcaaagacaactaatgctggacagatcacttcaaagttgcatgttattgaactgggtgcacagccagggaaacctggtttttctaagaaacaagccgacctcttcttccccccagatttccaggatgattttcctgtagctatgcaggtttcacaaaagtatgggcttatctatgtaattactaagcttggccttttgtttgtatatgacttggaaactgccgcggcagtttacagaaatagaatcagtccagaccctatattcttgacggcggaatcttcctctactggtggattttatgccatcaacagaagagggcaggttttacatgccacagttaatgatgcaactgttgtaccttttgtcagtggccaattaaacaaccttgagcttgctgtgaatctggccaagagagctaaccttccaggcgctgagaacttggttgtgcaaagattccaggaactgtttgcacagacaaaatacaaggaagcagctgagcttgccgcagaatctccccagggtctcctgaggacgcctgagactgtggcaaaatttcagagtgttcctgtgcaagctgggcaaacgcccccactcttgcagtactttggcacattgcttactcgagggaagctcaatgcctttgagtctcttgagcta

SEQ ID NO: 12566 - DNA, 310 bp, Zea mays
  Clone ID: MRT4577_111455C.1
aatctagaaatgtactttcttatttctgggaagccacaaacatcatccaaaaaacttcattattgaagtataactcataacccatcattggtggtgccctcttttagattgcttatgagttatactttaataatgaagtttaagttatgaggaatttaatttagtggagctccgtttagtctttgtttgccttacatttttaataacgttcttacgcttttgtgtattctttctctgaatcttcgtacaggctttttctcatatttttttaaaatactctgtccgcaagtttaaatggtctttgcttaaa

SEQ ID NO: 12567 - DNA, 396 bp, Zea mays
  Clone ID: MRT4577_111456C.1
ccgtccgaaaaaaaaaaaaaaaaaaaaaaaaaaaaaaaaaaaaaaaaaaaaaaaaaaaaaaaaaaaaaaaaaaaaaaaaaaaaaaaaaaaaaaaaaaaaaaaaaaaaaaaaaaaaaaaaaaaaaaaaaaaaagggggggccgtttttaggggttccaggtttacctccgcgggcttgcaacttaatagtttttttttagggccccctaattccaattaacgggccggcgtttaacaccgtcgggattggaaaacccttgggtttccccactttaatcgctttggggacaatccccttttcgccacttgggttaataccaaaaaggccccccccaaccgcctttccaaaaatttgcccaccctgattgggaaaggggacccccctttttggggtcct

SEQ ID NO: 12568 - DNA, 494 bp, Zea mays
  Clone ID: MRT4577_111457C.1
attgggtacctcgaggccggccgggacctctcctccgctcctctcgctcttatatactcgctcttccatcgaaatgacattctgcttccaagggctgcctgacggctctgaactccaacatgtgcccccagacttctcccgacataaatgaaggcgactcctgatcgcatttggagtacgacctcacagccactgacctcctctgaaacacctgaatgaaaaccttactctgatccatctctgaggccatgcgaccacaacctcgtcgaagccatgcatcccaagaaacagctctaccactgtttcccccaccacaagatttaagaggcaaaagaatcatatccctctgctcatctgaaacactagcactaggtatatatctaacctgtgagaagattactggccttcattctgcagtgaataccactatcatgatgccccactagattattgacttgatactcgcatgcacaacggctgcgctaaataccacg

SEQ ID NO: 12569 - DNA, 334 bp, Zea mays
  Clone ID: MRT4577_111458C.1
tcgtactcgcgcccgcgcagaggcgcagattttgttgtctttgtactcgcctatccccgcgactcaaagctgctaccatttcctaccgccgccgctgcagctccaccccattccgtcgacaccatgagggagtgcatctcgatccacatcggccaagccggtatccaggacggaaacgcgtgctgggagctctactgcctcgagcatggcattcaggctgatgggaagatgcccggcgacaagaccatcgggggtggtgaagatgctacaaacacctactttagagagactggtgctgggaagcaaatacctacagctgcatttgatgaacttg

SEQ ID NO: 12570 - DNA, 525 bp, Zea mays
  Clone ID: MRT4577_111459C.1
tatcttccggccggtctcaaaaacaccttgtggtaactgccggtgtaatatatggatcgagcggactagacacctgattctgttgtcttcagcacactggtggcgtgcctgatagcagtgagcggcgtggtatacaagtatgtgatcctgaatgctagcaatgccgtccatatcattgggggggggggtgaatacactaaatgaattgatatgcaatgtcacgtagactttatgagacttctatgttatagtttgctatctatgtaaccaatgagaattgacattattgtatgatgtagaattgatcactactagtatatacttatgatatactgatagtgccatctattattttgttgccatccaaaaactttggtggcagctgaacaaacgaaagggcggtcgttctatagttgacaagataaggcatgcatggatgctacatattagctattagtaatagttgcctctatgtaaaggagtggagagatttgaaagacgacgtgacggactaaaacttgggca

SEQ ID NO: 12571 - DNA, 166 bp, Zea mays
  Clone ID: MRT4577_11145C.1
ggtgcttacttttattcattatttgattttatgcttgttaattctaacagggcggacaaactataaaaattcacccttgaaatgtaccactactaaggcgggacaaagagggggccacgacacaaacaccagcgccgggctttgtcccacaaaaaccaaacccaaa

SEQ ID NO: 12572 - DNA, 790 bp, Zea mays
  unsure (1)..(790): unsure at all n locations
  Clone ID: MRT4577_111460C.1
aattcagcagtggtgcccaaactcttacccagtacagaaatggctgcgtccgacgagtcgccgatggtgcggccgacggtgcaggagctgacggcggccggcgtcgaggagccgccgcggcagtacgtgttgccggagcaagaccgtcacggcgacctgctggcagccgacgagtttccggagcccacccccctcatcgatcttagccggctcacggacgccgacgaggccgagaggctccgggcggctctgcagacctggggcttcttcctggccaccaaccatgggatcgaggactctctcatggacgccatgatgagcgtgtcgagggagttcttccggcagccggcagaggagaagcagaaatgcagcaacctggtggacggcaacggcaaggactaccaggtggaagggtatggcagtgacaaggtggtgtccgaggatcaggtcctcaactggagcgaccggttgcatctgagagtggagccggaagatgagaggaatttcgccaagtggcccagtcacccggaatctttcaggttacttacttccctaccttgagtgatgtttttcgcatttttaatactgtattagctttagttgcaaaggaggatgcagtgaaatttcaggaaatctcagtgcaaagaatagtactctgtgatccagtcaatggtctcgtagcattgcctgtctctcttgctagtggacccgtgttatcatgccatttcctataatgaagntagggataagtttttttgattacacaactttctttgtgaattaaacttct

SEQ ID NO: 12573 - DNA, 112 bp, Zea mays
  Clone ID: MRT4577_111461C.1
tcgaggactgtgtgagatgcattcaattggtcatggatggccgtcaatgtgtctttcacaacgtgtactacacggtgacttcgtaaacgacgtttacattgtgcagttgttg

SEQ ID NO: 12574 - DNA, 247 bp, Zea mays
  Clone ID: MRT4577_111462C.1
aattataataatagtttgtttgaattactccatggtacactgataacagagttaaaggggtttgatacatggttaggaaagtttaaatgtgtagcaaaagtagcaaatactttttttattatgtatgaggtagttttgatagtagtggaacatgaagatgtgtgtgttgaactgtaggggctgatggaaagggtttggttgagtttacaggtggtggttgtggaaggagtatttttggggtgagtgt

SEQ ID NO: 12575 - DNA, 363 bp, Zea mays
  Clone ID: MRT4577_111463C.1
ctcgcaccttttgtggctgcgcctatttcctttcgagcgctgcgttgaaaaccccgcctactggttttagttccctggctgaatcacaacccagtcaggaaccaagtccaataactctcttgggctttggggggttggacagctacaaccgactaaaaacatgtgcttgctgaacaactatcttaacattggcacaaaatacaatctttgagactagtatatggtctcatttgggacatacggtgtaggaaaccggtgaggatccttgtacaggtcttgatagatgtacttaggcttaaccctttccgggacgggctcaatggggatatttctgttgccatagatcaccccaataatgggtcc

SEQ ID NO: 12576 - DNA, 492 bp, Zea mays
  Clone ID: MRT4577_111464C.1
cgacccacgcccccggagaaccaaccgaataaccgctccaaaccctcctgccgattctgctttttacaactccgaggctaacaggcatgggcacgggacttgctactgcacctgttccggcgcccctacttgggcccgtactcgccgcccttcgcgtggccactcgctggcgcatgcgctccacggtgctcaccactgaaggcaccgctgaacccacgcttcgcactatcctgaacactaagcagaactgcaacccgtacgacaaccacccctacacttaccgttaccacagcggccactacagaggagactcaaagagagaaactgagagcgtatatgctagcgggaccatggaaactaccaagtcaactacagagttacggaatgggcattactgtgggtcttaatacccatttgaagacccatgtgctgcggctcctcactgttcttatgactattgaaaaaagaggcgagcattaaggcttggagaat

SEQ ID NO: 12577 - DNA, 142 bp, Zea mays
  Clone ID: MRT4577_111465C.1
tgcttttatttaacagcatgacgcgatataccgatatacaacgagtgtcaataacaccagtagaacagtctcaagtctaaaaactacgtggactacatcgacttcagatggactggactgtacacaatcggtacggaaatgt

SEQ ID NO: 12578 - DNA, 1139 bp, Zea mays
  Clone ID: MRT4577_111466C.1
tcggaggaatgcaatgccgtaaacgaaagtttcccatccttgtgttttggggggtgggccatcgcggtgttgataagaaaaaggcggactccttgtaccagtttggttttgttttgtacgcgcattggttcctggcttgctcaataaattgcaaccacttccttccgaattccgatctagcggactaccagttcctcccgatcttgggtttgaggaggccccgagccgagcgtcaggcatggagcactgctatttgaggcagccgatctcgagggccgaggcagtgcccgagaggaggtccaggttgtggcagatggacgcgctgccgctgccgccccgggcggaggtcctctgcccccagcctcgccgcgccgcccggatccccttcgccgtttcagtaaacaaggccatccccagtgcgcttccgccgtacagaccagcctccgcctgcgacatactcgatgatcttatcctcagcaagaatgacttctcagatggagcagattcgagcagcggccaggcgggttttttatgcggctcgcctccagtgcgcgctaacaaccctgtcgtccatgacccgcagttcggtaaaagagcgctgccatccatgtctcccctagggagcagctcccacgtcaagcttaaggttgaggcaggctcgctgttggggtcgtgcttcggtgcgccgaaggtctcacacgaagaagcagcttcggctgaagtcgtctccaagagatggccgaaggtcccttttcatggagcttcggcgttttaaaccgacatagagatagaatgacctttttatacatataggtctgagtcaatgctgtaaactttcgcaaggggcataattgtaatttgtcacaggctgcggcctgtgcctataaatagatgaacagtacctctgtaccgttcaggcgaacttgcttttggccttcgcatcacatttgtactttttgccttccgcaagaccgaaggtacatttgtacttcaaagtcatttatattcattaatacaagtagagataatcctatgatactcctccatttgtcttgaatcaattgaaaagttcaccaaaaaaaaaaaaaaggacgacgcgcgctagacgtcatacagagctccacaggccgccgggccgc

SEQ ID NO: 12579 - DNA, 149 bp, Zea mays
  Clone ID: MRT4577_111467C.1
acccatctatcttaatcggtcagggaagtgggggttctttattgactgcaaaaacacaaaacaatggccccaaaaggccatgactacgacaggagggcggacgcaaacccaccaaggcgtacccactgcatcagaggcccacacagaaa

SEQ ID NO: 12580 - DNA, 597 bp, Zea mays
  Clone ID: MRT4577_111468C.1
cgtcgtcaagctagctagctctcgcgcgcaactgtgtgtctgtgtctgtgtgtgtgccctttgccccccacatctcatctacaattctacgtagaccttactgcattctgctggccgtctaattaataacaggctgcttctactccaacgccctcggagggctcaagtgctacgagaaccccaagcacaaggtcaccgctgtccccgccgacgaagaagagatctgcggtgccactttcaaggtggtggaaggctctactgtcctgacggcgctgcactgatcggtcatcagctggcggaggcgatgcgatgatgatgcagaactttgtacatgcgttggtggatggtggtgtaacatagtggctgccaacaagtcatgctcatgcaaaccaatgaatctatctctgtatcatcgatctcggttgcttgctagtccagactccagacatggctatatatatatagctggtgctaataaataggagtataatcgtcatatcgatcggttgcgtgtggaatgccaatcatgtgtgtaatctgttggcaaataacaaacctctgttcctcccagaaaaaaaaaaaaaaaaaaggccccta

SEQ ID NO: 12581 - DNA, 3410 bp, Zea mays
  Clone ID: MRT4577_111469C.1
cctcgagtccggccggggttgccttcctccttttccagtcggaggaatgcaatgccgtaaacgaaagtttcccatccttgtgttttggggggtgggccatcgcggtgttgataagaaaaaggcggactccttgtaccagtttggttttgttttgtacgcgcattggttcctggcttgctcaataaattgcaaccacttccttccgaattccgatctagcggactaccagttcctcccgatcttgggtttgaggaggccccgagccgagcgtcaggcatggagcactgctatttgaggcagccgatctcgagggccgaggcagtgcccgagaggaggtccaggttgtggcagatggacgcgctgccgctgccgccccgggcggaggtcctctgcccccagcctcgccgcgccgcccggatccccttcgccgtttcagtaaacaaggccatccccaggtcgaattgtgcgcttccgccgtacagaccagcctccgcctgcgacatactcgatgatcttatcctcagcaagaatgacttctcagatggagcagattcgagcagcggccaggcgggttttttatgcggctcgcctccagtgcgcgctaacaaccctgtcgtccatgacccgcagttcggtaaaagagcgctgccatccatgtctcccctagggagcagctcccacgtcaagcttaaggttgaggcaggctcgaaaatgggtggcggcacggtggtgtgtggcggcagtgtcgggagctggcgtcaggaagctcctcggcagaggctcgtcgtccacgccaccctgcggagcctcgcggacgagaagaagacggggctgctccgggcgctccccggcgcggcggagcggctgcggctggaggacatgtacgacgccgacaccttcgagcccgccatcgccggctgccacttcgtcttcctcgtcgccacgcccctgacgcacgaccccaccagcaccaagtacaagaacacgacggaggcggcggtggacgcggcgcgcatcatcctccggcagtgcgcgctgtccggcacggtgaagcgcgtcatccacacggcctcggtcacggccgcgtcgccgctcaaggaggacggcagcgggtacaaggaccgttggacgccgctcaccaacgccccccacgccccaccggctcgccgggctcgcccgccgcgctgttcatcgtcaccgcgcggccgcggcctcccagcgtcgaacggtatcgcacgcgcttcgggtcctgccgcgctcgggagatggcacctttctccgtcggccgcgcagcgcaggcacggattgctcggttctctgctcgatgaagaaggtgtcactatgccaaacctgggctgagtcgcagaatcccgcgcgcgcgggcagagctaggcagaccattggagagaggatcgttggagctcggccgagctgagcacgcacagtgtgattgtgtgtgtgtgtctgacatggcgtcgctctggctagcgagagcgtcgtcccagctggcgcgccgtgccgccgccaggaggcctcctccgcgtcctgcgcgccacggctccgaccaacccaccagttcgtggttcctgggctcagtgccgccgccggcccttgggtcagcagcggcggacacctgccgccgcggcttctgctccgtccggcgcttcgcaggggagagcagcgctgctgctgctgcggcggctgtcgtcgacgaggagccggagagcgggttcgcagccggcgatcagcaggcagttgactttcctggagggaaagtatcctttgtggcagaaatgaacttccttccagaatcgacgagggaaaggatcaactgctaccgcgtgcttgacgacgacggcagaacgatatcaggaagtagattccaagaggtcagtcgggagctggctctgaagatgtacagcgagatggtgacgctccagatcatggataccatcttctacgaggctcagaggcagggcaggatctcgttctacctcacttccaacggcgaggaagcgatcaacatagcctctgctgctgctctcagcattgatgacattgtgctgcctcagtacagggaacctggtgttcttctatggcgtggcttcactctgcaggagtttgcaaaccagtgctttgggaacaaagctggactatggtaaagggaggcagatgcccattcactatgggtcgaaccgtctgaactatttcacagtctcgtcacctatcgcaacacagctcccgcatgctgttggagctgcctactctctgaagatggacaagaaggacgcgtgtgccatcacatactttggggacggtgggacaagtgagggagacttccatgcagcgctcaacttcgcggctgttatggaggcaccggtgatcttcttctgccgcaacaatggctgggccatcagcactccgactactgaacaattcagaagtgatggagttgtcatccgtggccaggcttatgggatccgtggcatccgagtagatggcaatgatgctcttgctgtgtacagcgcaatccatgctgcccgagaaatggctgtaactgaaggaagaccaattttagttgaggcactgacttaccgagtcggccatcactcgacatccgatgattcgaccaagtacaggccagttgatgagattgagcattggcgaacagcgagggatccgatttccagatacagaaaatgggttcagggtaatgactggtggtctgatgctgaagaatctgagctcaggagcagagtgagaaaagagcttctccaagccatccaggttgcagaaagaatgccaaaaccaccagttactgagcttttcactgatgtttacgacaagatcccttccaacctgcatgaacaagagcaattgctgcgggatacaatcatgaggcaccctgcagactacccaactgatgtacctgttggggtcgtgcttcggtatgccgaaggtctcacacgaagaagcagcttcggccaaagtcgtttctaagagatggccgaaggtcccttttcatggagcttcggcgttttaaaccgacatagaggcagaatgacctttttatacatgtatgtccgagtcaatgttgtaaacttccgcaaggggcataattgtaatttgtcacaggctgcgacctgtgtctataaatagatgaacagtacctctgtactgttcacgcgaacttgcttttggccttcgcatcacattcgtactttttgccttccgcaagatcgaaggtacatttgtacttcaaagtcatttatattcattaatacaagtagagataactccatgataataaaaaaaaaaaaaaaaaaaaaaaaaaaaaaaaaaaaaaaaaaaaaaaagtatgcgtcgaccagagcagcagctagatagattctgaactactagtatgaact

SEQ ID NO: 12582 - DNA, 247 bp, Zea mays
  Clone ID: MRT4577_11146C.1
attcggctcgagctgatatgctggagtgtttgtttgaggaaaatgttggggataaatcggacaagcaaactatatacatactctggcggatggtgttgatagagaatggatcgatgagtgtgagacgtgaaacacatgaagaaggaaacaacaatacaggggcgggccccatctaatgaacctgttacccacgaaattaatgccgggcggggacctgctggagtgccatattccattataaggagtg

SEQ ID NO: 12583 - DNA, 1135 bp, Zea mays
  unsure (1)..(1135): unsure at all n locations
  Clone ID: MRT4577_111470C.1
cgagtatcgtcacctcctctctgtgtgcgtgccgtctcttctccattggctttgagctggggggactccggggcctttaattcccccttgtctcctccttttaatccttgaaaggagcacacggccgcctttatcttcctttgtgttcctgcctttctttctatcttatcccccctttccaagctctcatctcctttatccctccttttctttctcgtatggagaggagctttaccctccctctcccacaccttgcatcaaaagagcagccatgtcttgggtgatggagtgagtagaagtgctacgccacagatgcaaccctacaagagcacaagcaaagttgagtttatgtggtgcgctgcgatgtttctctctcatcttttccttgttttttttcacctttttatttgccttttcccattctctttaatctcgcctttgtatccatgtgcttggttctttgttgcactgcactgcagttgttgcaccataagaatccaaagtcctccacgctcataccccctctgatatgtgcttgctatatccatctcttcaatctcccatacatactacatgttcttgcttcgtagtagttgtcagttaccttaacaatcatcattcaggtttgcagtggtatcatctaacgatgagcaatatgtgtccatcaccaggggctagggctagggaagcccatggaggagatgctcatggctggaaacgcaaatctaaaccagaatccaaacccaccgccggctgcgccctcggctcccggcgcccagagggcaggcgctcccgccgcggttgcggcagcgccgcctagcgctggcgcgaccggaggagcggggccggagcggcgggcgcggccgcagaaggagaaggcgctcaactgcccgcggtgcaactccaccaataccaagttctgctattacaacaactatagcctccagcagccgcgctacttctgcaagacgtgccgtcgctactggaccgagggcggctcgctccgcaacgttccggtgggcggcggctccaggaagaacaagcgctcgtcctcggccgtgtnncgtcggcggttgcggncgccgccgcctccacctccgcggctatgtctggcacggtccccgtggggctcgcg

SEQ ID NO: 12584 - DNA, 376 bp, Zea mays
  Clone ID: MRT4577_111471C.1
aaacaggggggcagtccaagcccttcatttaacttttagtttttacagggccaagggccaccaatcaagccaagcaggtttgacaaaacatttgtcaaaccaggttttaccaccgacaaggtgctcccccatggggccccaacattcaaaggggggggggggtttttttggttaatgaaccggcccctgcaaattttcccccccttttttgggaaattaagggggcattatttgggacttgggaacttttaggaacttgttaaacttttaagcactttttgggaacaattgtggggccgaacttatagatctctctcttagatattcccattttttggtaagggcttaggcgggttttgtatgggccctttttttt

SEQ ID NO: 12585 - DNA, 277 bp, Zea mays
  Clone ID: MRT4577_111472C.1
gaggatgtaaacggaggaccgtaaactgccgtggaatgtggggagttaaccaaactgtacacaacactctgccttacacagtgcttttaaaacgcccgttccagattacaaaccgccctctccacgaccaccgaatacaacacatgccgtcggccaggctacatgcctacagcgcctacagcaaattcgtgaacacctcaacaatcttgttcagacgctcaaacgagacaggtgaaaattcctgatatcgccattcaattcacaccatccaagcgcg

SEQ ID NO: 12586 - DNA, 170 bp, Zea mays
  Clone ID: MRT4577_111473C.1
tctagatatccttgttaggtatgaagagttggatagggaggatgggcttcgtactggtagatcaagctgcataagatgctcgtccagatttatggtcatgtactttatcaggtacacatggatcttttcgctcagatttggaagacgattgctttacttatccaagaaca

SEQ ID NO: 12587 - DNA, 397 bp, Zea mays
  Clone ID: MRT4577_111474C.1
ataatcgacacaactaacaagagaacactccggcgtcccccacctcccgacctccaccaacccccgccgccgccccaatcccctagcatccaccagccctgtgcgctgcggcgccgccctcgcttccttccggcgccccgtcggcccacctcctcggccgcgccgcggatcggccccctccgccgcgtcgcggatccgccccctcctggcagatccctcccgcacggcgagctagaagttcggagcgccaccaccgctcccttctccagcgacccctcccgcacggcgagctggatgcagttgatccccggggcttgggcagttcagcccatccggcgagcacggtcgtctcctgccacccccaatagatgcgacccagcgggcccgatggacgctc

SEQ ID NO: 12588 - DNA, 179 bp, Zea mays
  Clone ID: MRT4577_111475C.1
tttttggtgggcatgtgtaaaaataataattagaaattcaagtgacacacattggaataattgaaacgacttggtatgtatttttagacacttaaatttcattgagtcatacttggatcaagtattatttatcagaaactttttgtgtaagtcaaactgtaagcacacactgtgaattt

SEQ ID NO: 12589 - DNA, 313 bp, Zea mays
  Clone ID: MRT4577_111476C.1
cactgatgtagactgaccgtacgtaagtcgaatcggtcagtccatctacccagagagtgggtacaccctgataagattgctttgtccccatctctggatttgatggcgactacatgattgagaggtgcaccaaccttgacttgtaaaaaggcccgaacctgcttgaggctcttgaccagatcaccgagtccaagagaccttcggacaagcccctgcgtctccccctgcacgatgtgtacaagaattgtggtattggaactgtacccgttagtcgtgtcgagactcgtgtcatcaagcctggtatgggtgtcac

SEQ ID NO: 12590 - DNA, 319 bp, Zea mays
  Clone ID: MRT4577_111477C.1
gcgtctcctgtgttgctacaccgtgagtttccccaggggctacataaaacggtgtgagggtggacaaccactgaggatcatctaatcatacaagtgctggaacgactgcccatacatactagtccatttcagaaaagcaggtcctagctgaggacattatgaacatctcggcacaagcttatggtggacaggcgacagttgttgaccatacacacttatcttaaagaccaacaccagcttcgtgggccgccgctcaagaataaccacgcttacattcgcgatattccgacgtcttagctgctctctaacgcgacctaac

SEQ ID NO: 12591 - DNA, 425 bp, Zea mays
  Clone ID: MRT4577_111478C.1
ggagccaaaacttgtttatattatcaaagcatggggtttaatatctctggaatcgatctctgaacatgggaagcacttctcactctcgctacagttattattaatgactgacttgttatcgaacaacccgctctacgaagaaataacctccacgaaaatcaaaattatttacattctggacccaaatctaatcttatctaacgaaacaaccccaataaaactaaaagggaaacatttaccacctaataaagtcggtacaattaaaatccggttcgggacttaaagttcgcttgtcggttcaaggctgcttcgattgggacggctcttgatgttattgctctgcaactgtgctctggttcccgaccacgaaaacgatgaagctgaagaaaaaaaagcgaaaagctggccaaaaaagaagcctgatt

SEQ ID NO: 12592 - DNA, 356 bp, Zea mays
  Clone ID: MRT4577_111479C.1
attcggctcgaggttgatgaacggattacaaggaagatgggggagacgtacaattcaagatgccacagcgagcatagggcagatgttgaggccaaccacatttggatattctcaggggggatagcataaatattggacaccacagaatcatttgttgacatcaggaaattaaagccctactattaagccaagggactctggtcacacaaagtttaggataccagaggaacggctcaatgaattggatggaaggcctcataaaaaaaatcgagaggttgtacacctatcatacagttgagatgcagacatttgtactgtacgagcatgaacatacatggctgcaaatggcacacctg

SEQ ID NO: 12593 - DNA, 282 bp, Zea mays
  Clone ID: MRT4577_11147C.1
cgcagggcaacagcccatctgcttggctgaccccacacccaggaccactgtccggctctaacacagctattaagtgctacctgcctctcaggcactctcctcgcccagtttctgaggtcagacgagtgtctgcgatgtcttcccgcactctattccccagcctctttctgctttcatgctcagcacatcatcttcctactccagtctcttccccaaagtctcaccttttcttccaatagaaaattccgcttgacctttggtgcactgcccacttcccagctc

SEQ ID NO: 12594 - DNA, 395 bp, Zea mays
  Clone ID: MRT4577_111480C.1
ccaacgccaaatattgtgccctcaatggcactcgtatcccccttctcgggctgaaacaccggcgggccggcgcttgcctcgaatgggcaacgggccttatcctccttactgggcggccagacgcttctgaagcacacactgagctcccggccgtcgatcgcccttcggcgccccggaggaccctaacagggcgatctggtttcccggcaacaacccttcgcccgcgctcgaacggaggctttcccgtgacgatacgttctgaaccatgacgccactaataaagacaatgtaggcgggaaaactaaaaaaaacaatcatgaaggcgacaatcctttactatctgacgaggtggaaaaactatctaatgggaatagcatgactactggtgcattaca

SEQ ID NO: 12595 - DNA, 243 bp, Zea mays
  Clone ID: MRT4577_111481C.1
cccctcccttttttttttttttttttttttaaaaaaaaaccgcagcgatttcttattataggcatgaaacaaactcaaaaaccccttctctttattacaatataaccccaccaaatccctcacaaataataaccatctaaccatatacaaacattcaccctttgtccaaaccaaccacatattcatactcccccctattacaccactaactaataaaaaaaacaaacatatacttccttccca

SEQ ID NO: 12596 - DNA, 824 bp, Zea mays
  Clone ID: MRT4577_111482C.1
gccggccgggctgcgattactgacaagcgccagagcagagagggagagatagaacacacaaggggagaggggtggggaagggaaggcgaagggaggcgcactcgtcccgtctggtgctctggtatcgtctccccccggcagggaaggagtagaaggaaggagagtacgtaggaggaggaggggagaatgcgtgtcggcggcgggcgggacgacgacgacgaggtgtccgggaagctcaagagcatggacgtggacaagctggagaacggcggcagggaggagagcccgcggcccgccgtcaagtaccacggctggaaggccatgccgttcatcatcgggaacgagaaggcgacgtcgtaccagttcgcggtgctcttcgtggccttcgcgttcctggtgctgggctcggcggggatccgcccctgcagcatgcccttcggcgccgaccagttcgaccccaacacggagtctggcaagcgcggcatcaacagcttcttcaactggtactacttcaccttcacggccgccatgatgatctccgccaccgtcatcatctacgtgcagagcaacgtgagctggcccatcgggctgggcatccccacggcactcatgttcctggcatgcgtgctcttcttcgtgggcacgcgcctatacgtgcgggtgacgcccgaggggagccccttcaccagcgtcgtgcaggtgctatcggccgcgctcaagaagcggtcgctgaagcagcccaaggacccgaagcaggacctcttcgacccgccgcacaccagcggcattcgtcaccaagttggcgcacacggaccagttccgct

SEQ ID NO: 12597 - DNA, 799 bp, Zea mays
  Clone ID: MRT4577_111483C.1
cattgggtacctcgagcccgccggccgggactgacaagcgccagagcagagagggagagagagaacacacaaggggaggggtggggaagggaagggaagggaggcgcactcgtcccgtctggtatcgtctcccccggcagtgaaggagtagaaggaaggagagtaggagtaggaggggagaatgcgtgtcggcggcgggcgggacgacgacgacgaggtgtcccggaagctcaagagcatggacgtggacaagctggagaacggcggcggggaggagagcccgcggcccgccgtcaagtaccacggctggaaggccatgccgttcatcatcgggaacgagacgttcgagaagctggggacgctgggcacgtcggcgaacctgctggtgtacctgacgcaggtgttccacatgcggagcgtggacgcggcgacgctgctcaacgggctcaacggcaccaccagcctcgcccccatcatcggcgccttcctctccgacgcctacctcggccgctacctcgcgctcgccatcgcctccgtcgcctccctcatcggcatgttcctgctgacgatgacggccggcgcgaatagcctgcacccgccggagtgcagcgtgggcgagacctgcgagaaggcgacgtcgtaccagttcgcggtgctcttcgtggccttcgcgttcctggtgctgggctcggcggggatccgcccctgcagcatgccctttcggcgccgaccagttcgaccccaacacggagtctggcaagcgcggcatcacagcttcttcactggtactacttcacct

SEQ ID NO: 12598 - DNA, 1016 bp, Zea mays
  Clone ID: MRT4577_111484C.1
ttcaaaaaagaagaaaaagacaaagggcaaaaaggggaagaagtataagaaaggaagccacagaagttctgtgcttggtcttgcatggaacaaggaagttaggaatgttctagctagtgcaagtgcagacacaactgttaaaatctgggatatagctgttggtaaatgtgcagtcactctagaacaccatgatgacaaggttcaagcagttgcttggagcccacagtcacctgaagttctgcttagcggatcctttgataaaacagttgccatgaatgatatgaaagatggtgggcagaattgtcataaatggtctgttgaagcagacgtcgaaagtttagcttggaatccacacaatgaacattcatttgtggtcagtcttgaaaatgggatggttcaagccttcgataagcgaacagcttcatcaagttcttctggccagtctatgtatacccttcatgcacacgataaggctgtttcttccatctccttcaacccgtctgcccctaactttctcgcaacaggctcagttgataaaatggtgaaactatgggatctatcaaacgacaaaccatcatgcattgcctcccaaaatccaaagcttggagctattttttcggtatcattttcaaatgacagccccttcttgttagcatgtggaggttcaaaaggcaaactgaaggtttgggacacgcttacggagcctgcagtagccaacaagttcagcaaatagaactgccgctgtttgccattataagttatttcccggcacacacatgtttgggtagattgaagttatagtcgaagttttgcccttgtgagttgaggagcccaattgtataatgaactcatgaaatcaatccaagcattgatttatgtattagtggtgggcagaggttttggagtggacgtattaactttatgacggtgcgagttgggttgtgacttcccaattttttgtgaaagaagttagtgatcttcagaccaacaaaaaaaaaaaaaaaaaacccgcggcc

SEQ ID NO: 12599 - DNA, 649 bp, Zea mays
  Clone ID: MRT4577_111485C.1
cagttgataaaatggtaaggacgttccaatagtttggtggcgtatagatacgtttaaacctgttgctaaaacacatctgcaaacgtaggtgaaactatgggatctatcaaacgacaaaccatcatgcattgcctcccaaaatccaaagcttgtatgttttcaaacgaactagatgtttactttttggaagaaattgtttttcctgtatcgtttatacactcaaatttttccagggagctattttttcggtatcattttcaaatgacagccccttcttgttagcatgtggaggttcaaaaggcaaactgaaggtttgggacacgcttacggagcctgcagtagccaacaagttcagcaaatagaactgccgcagtttgccgttatttgggtagccaacaagttatttcccggcacacacatgtttgggtagattgaagtcatagtcgaagttttgcccttgtgagttgaggagcccaattgtataatgaactcatgaaatcaatccaagcattgatttatgtattagtggtgggcagaggttttggagtggaggtattaagtttatgacggtgcgagttgggttgtgacttcccaatttttttgtgaaagaagttagtgatcttcagaccagatcactttatctcgatcc

SEQ ID NO: 12600 - DNA, 182 bp, Zea mays
  Clone ID: MRT4577_111486C.1
gatagttacaaattttaagaacaatagaactttggaggtttatgtttagcgcaactaggtatcctgaccacatgaattttttacctgacagtttattggtgctataatgggtgcaagagatttaaatatacagacagaacatggacatcttggcatgcccagtaatatttgctgcgttgttg

SEQ ID NO: 12601 - DNA, 259 bp, Zea mays
  Clone ID: MRT4577_111487C.1
tttcacgggatatatgccctttattgccacgatcccaacgttataaaaggagacgggaactcttgcaacatacaccatggcagaagaaatatttcttccacacaaatcggggcaggagaacacaaagttctgggttcagataacagagcagcgcagcagtgagcagtcttgaagggaagagagatggatgattcccttgagaaactaggaggggggagacatgggattgcccacaagaagacggtcgtccttccggact

SEQ ID NO: 12602 - DNA, 322 bp, Zea mays
  Clone ID: MRT4577_111488C.1
tgccgccgttgggtccgcgcccccttccggggccgtcggccctgcgggcgcctccgtcccctccagcgtttggtccggtgttgctccggtgtgctgtcggccctcccttgccgctgtgttggtggcgtcttttcttgtgtggccgactcccttacccggcggttctggggcgtggcctgctttctgtttctttcttcttctgagggtgatcttgtcgagctggtcgtggtccccctcgccggggggctggcgcgtttggcccttcggctcggtgttgtccgggctaaccgggcgccgttcgtggtcggtgtgccgcccgtcg

SEQ ID NO: 12603 - DNA, 324 bp, Zea mays
  Clone ID: MRT4577_111489C.1
ttgttttttttttctttttggttttttttttttttttttttttttttttttttcttttttgggtttctgctgggggtatgttggggggtccagggtcttttcccgccggttggggccgggccgggcctccgcgggctcgccggggtgttcccgcgccgggggggggggtcatttttttttttgtgcctccgccgggttcgctgctggggctcttgtttggtatcctcccgttggccctcccgcgtcggccttcgtgggttgttccctggccccccttgaggaactcgttccgcgccgcccttttcccgggggggtgtctcgcgg

SEQ ID NO: 12604 - DNA, 413 bp, Zea mays
  unsure (1)..(413): unsure at all n locations
  Clone ID: MRT4577_11148C.1
cggggcgcgaccacagccgncctcccggtccaaacaccaagccacttgaaactttcttttttccctaaaaggcccctttaagggggaagcacaaccctttttttggggggttaaccaaacattttaattcttcccgccacccccccaaaactgaatgcctcccttccagaatccattggagcccacactacttcttcctgcatttaatccggttaaaaccatttttttctaaccatccattaacccattatcctgaatgtaaatttgtttaaaggaacaaaaaattttcaattattaaaaatccgtacctttgccttaaatgagaccaatattgaatgttaagacctaataatcttgacccatcattccttccttccagttagaataaaattggatgagtttatagattctgg

SEQ ID NO: 12605 - DNA, 231 bp, Zea mays
  Clone ID: MRT4577_111490C.1
cgaagcgagcgggactgcgagcgcgggggattgatgggggcggcaatggcgtgcctgcaatggcggtggtggtggtggatccactcccgcattggcagtaattgtgcctaacggcttgaccataacttcccatgggccggtcagagcataggaccaaagactaaacgggtgttatatatgtatgggtcaacgaccacattgctctcactgtatatattctcaatctgttgc

SEQ ID NO: 12606 - DNA, 219 bp, Zea mays
  Clone ID: MRT4577_111491C.1
ttttggtggaacttaaacgaaatgcacgtaagcgtcctaaagcacgacacgaaccctccacaatgacgccacacgatgaacgccagggacaacaacaatcagatacgcagacaaaacgttagatgctgagcctaagacctgaggcaaagagctggagcctacaacaagtaggaccgaacccccctcgtagagttcccaaacagcactaacgccagaaag

SEQ ID NO: 12607 - DNA, 644 bp, Zea mays
  Clone ID: MRT4577_111492C.1
aaaaaatgcatgttgggaacaaaagttacatgttgagcatggatttttttatgggtggtttttttgtttgccatttcagacaacttactttgttgagtggaatcttctatgccgtttatgttttgtgtaactagcgatctgctctaagatgaaaatgtagctaatctagagcaagcacaaatacttgcaatgatcaaaatactttatataaacattggaaatagttgcatctgtggtggaaattcaatacaagaataaaatagaaagtactaattgtgttgaagttcaatttgtttgttaattttttgttgtagctgataatggcatattttgctgaaatagatcatttgagtttctgcagaggggttagaatagttattgttgttccagaagtagatgcctgtgttgaagtggaggaagtgtaatacaatgcttacctttgcatgaatctgacagtttcccgcatagctttggtcaaacctgacaaagcaagaggggtggaggatgttttgctgagagctgctcaaactggtggaatatctgagaaggtgtctgaagaaagactcatctcccttctagagcaaattaacagccacacaagcaagcaaaccaaaattacggtatgtaaaagcatggtgaaattt

SEQ ID NO: 12608 - DNA, 272 bp, Zea mays
  Clone ID: MRT4577_111493C.1
gccgatcgcacagacatcgcgtaatcgtagagactacaggacattacgagctcagagcgcatgacggaacgaacatgaagccaaccgaacagaacaaacataggaccgacctaccgacctaccagccgtactaccggacctacgacgaaggacactaccctaggaccagaccgacccgaggaatactaccaaccagacttacacgcggaggcagaccgggtagtcgacgaaggaaccccctgatgagcaggaacctggagaggaatggcagg

SEQ ID NO: 12609 - DNA, 246 bp, Zea mays
  Clone ID: MRT4577_111494C.1
agctccgaggaaccaatgcacatacaagcgcactagcgacacatgacgggggtaaatagttacctatcttgactcttgccctagtgctatgcacaaagctttcattttgctagtaggcacttacatcctagtgccattattccacagtttctcccaccagttacttcaatgggcttcgcacacctatctgagcatgccaacatgcaccagcaagcgcttgtggcgagcgacttacaacaaccaatt

SEQ ID NO: 12610 - DNA, 195 bp, Zea mays
  Clone ID: MRT4577_111495C.1
ctcgcccgttttttcttctaaccacgacgtgtgccgagcactactttagagcttggtacccacccgaacatggttaacggattcatatcccgcccccgccatgccgataccggccgaccccaaaggaagcttcactggatgcccccctccgatccagagctcccctctggttcatacacccccccgccactcact

SEQ ID NO: 12611 - DNA, 338 bp, Zea mays
  Clone ID: MRT4577_111496C.1
aattttgcacgaggatgggcgatgtctgctcgctccagggcgccaagtgtatgtgcaaggtcgtcgcctagcgccactcgcatggtgctgtgtgacaacatatcagggcatcaccaagccggcgattcataggtcggctaggagagccgcgttcaagctcatatggggactcatctacgaggagacccgaggcgtcctcaagatcttccctccagaacctaatccgcaactccctcagctacacccagcacgcccgtcgcaagactggcatcgccatggacttcgtttacgctctcaagaaccatggccgcaccttctagggttctgacggttatggt

SEQ ID NO: 12612 - DNA, 1077 bp, Zea mays
  Clone ID: MRT4577_111498C.1
ggtttaggagggagagatttgacaagccggatgtgaggcagtggaacaacgtccgcccttggggaacgaacacagggaaggaagcaggggaatcatcggtgccaaagatggtggggcaaggagtctatggtgttgggcctgtccttgcagcactcatggctcggaggagggagttttatgcgctgtatatacaggaaagtatggatttgagcgggaacaacaagaaaaggaaagataagaaggcagttgagaaagtgctgcggatggcagaggagactgggctgaatgttattgagactccaaagcatgatcttaacatggtggggataaccgaccacaccaaggtgtggtgctcgatgcatcacccttggaaatggtcaatataaaggagttagatccagtcagggtggaaggtggaaaggcacctgtgtggatagccttggatgagattatggatcctcagaatttaggagccattattaggtccgcctactactttggtgctcagggtgttgtgttgtgtgctaagaactctgctccattaagtggagtagtgagcaaagctagtgcaggttcactcgagttgattgagctactctcctgcagaaacatgatgcagttcttgtcttcgtcagctgaaaatggttggcgagtccttggtggtaccattgctaacaaagctgtacctctctctcaagtggaattaggggtgccaactattcttgtgatgggtagtgaaggcactggattgagacccctggttgagcgatcctgcacacatcttgtcagaatacctggaaatgttgatgtatctgttgaaggagcagatgcagatgcaggggaagaaggtgacagttctagtaatcgagatttgagatcattccttgcggtcgagagtttgaatgttagtgttgcagcaggagtgttgctttatcatctggctgcaaaagatgcctgccccataagcgataagcctagtgttattctaatgtaaggatactttgtgattcgtgcatgtcatagttattacaattgcctaatttaatttctgctaatgaattatttatttctcataaa

SEQ ID NO: 12613 - DNA, 394 bp, Zea mays
  Clone ID: MRT4577_11149C.1
ggcaaacattttggatggttttggtttttttttagggaaaaaagggagaagaaccattttttttgcactttttaaaaaacccgggtttaagggggggggtttttccaacccaacccaaacccggggaaaaaccacctgaacaaatgtggatttacaacccaaattcccccggtgggccagggatcttaaacccggggcttttaaaaaaaaagttttttgggaaaattacaatggttgccccccaaaaagctttccttttttgggaacaatcttttaaaccgggacttcgaaggctttttcaaaaaagcccaaccctttttaaaacccttggggcccccctaaaaagggattggaactttaaaaccaaatttttttttgcccccggaaattccgg

SEQ ID NO: 12614 - DNA, 777 bp, Zea mays
  Clone ID: MRT4577_1114C.1
gccggttcggggacgacgacaacccaccacatctcgacgcccgacaacaagactcgcaatcatggctgtcggcaagaacaagcgtctttcaaagggaaagaagggtctcaagaagaagaccgacaccttcgctaagaaggactggtacaacatcaaggccccaggaactttcgcggtccgagatgttggaaagaccctcgtcaaccgtaccactggtctcaagaacgcaaacgatgctctgaagggccggatattcgaggtctcgctcgccgatctccagaaggatgaggaccacgccttccgcaaggtcaagcttcgcgtcgacgaggttcagggcaagaactgcctgaccaacttccacggtctcgacttcacctccgacaagctccgctccctcgtccgcaagtggcaatccctcatcgaggccaacgtcgtcgtcaagaccaccgatgactacctcatccgcctcttctgcattgccttcaccaagcgacgaccaaaccaggtcaagaagaccacatacgctcaaacttcgcagatcagggctatccgcaagaagatgatggagatcatgacccgcgacgccagcgcatgcaccctcgctcagctcacccagaagctcatccccgaggtcattggtcgtgagattgagaaggccacccagggcatctaccccctccagaacgtccacgtccgaaaggtcaagctcctcaaggcacccaagttggaccttggtgctctccttggtctccacggcgagtcgagccaggacgactc

SEQ ID NO: 12615 - DNA, 250 bp, Zea mays
  Clone ID: MRT4577_111500C.1
ctgtccctccttatactccttgctatttctgcataacttgctaacgctacaattttccctcaatgctcacaagctcctatagcttcccttcttcccccataccttccatcaattatagcttcaatatttgaaaacccacctctttaaccctataagctccaacaagcaatctcatcaagcaacatacctttattacccttgtttcaacaatctccaaccctatctttatttcaatcatttgtacaaacca

SEQ ID NO: 12616 - DNA, 288 bp, Zea mays
  Clone ID: MRT4577_111501C.1
cgggggagctactgcagcgtgtctcccgccagacaatgcaggaggttatacgaactgtctttgcccgcctgccggacatcaatgtcaccttgttgtccgacgagcagagtggcatgtccggaacaaatcagatttggtctgcaaacttaaggaaatcgcatatcttttcagattcagtttgcagaatttgaagggcctatttattctgtggaaggtcttacagatagggattatggtttagtttattcagtatgctaatttgcatccattagtaagtacactagaagt

SEQ ID NO: 12617 - DNA, 205 bp, Zea mays
  Clone ID: MRT4577_111502C.1
tcaacaggagcatgatcaggacatagggaccaccataagggataagatgatgcctcatgcagcttactgcgttactgatgaggctgtgcaaggtgaggataatgttgagctgggccacgattatgaagatgatgatgatgaatacgatgaccaagatgactatgatgaaaaagaggatcatgatgaggcagcgcataatgaggac

SEQ ID NO: 12618 - DNA, 319 bp, Zea mays
  Clone ID: MRT4577_111503C.1
gcaccgtcgactgcactaaagccatatgtccacatggcggcaaatttgctctagctctggctttggagtgtgtacggacatttccgaatggtgcagtctatagttcctcttccccgtacctgtaacagcgggtgtctttcgtatgtgaaaacccaattctttaaaccctaccagatcccacaaggcaatacagctgcatctaccttatcacccttgttcctccaacaatcatcagccctattacatcagttacctttgtgcattaattggcacaaaacatcagggcacaacacttacaacaacttgggttagcaaacct

SEQ ID NO: 12619 - DNA, 204 bp, Zea mays
  Clone ID: MRT4577_111504C.1
gcatgcccccgtccgtaagttgggatttggcttgaggcggcagggacttccttttttcctgaagagaacctcattacctggttccgaaacctgaaaatattttttggtggctttggggccgggttcttttggggctaacctttttgggccgaattccaattaccttaggctatttaaagtttaaaatattttttccatattcca

SEQ ID NO: 12620 - DNA, 301 bp, Zea mays
  Clone ID: MRT4577_111505C.1
gatcgtctcatgctcacactcttaccaagaccaacgaaagggctggtccgttaagagagggcctagggctcatgtcctgcgtctgcctaatagtcttgtcgtgttccccgtcaccctacgtgcggcagtaccacgaccggttttggcacgagctgcccctctacctggagatgcgcaggtaggaggacctgacacaaccgagatacgcggagctcccatgaggtcgactatcgtaccttcgacggctcatactacgacgagcacgctctcgagccagagaacgaggaggagctgaacgacc

SEQ ID NO: 12621 - DNA, 433 bp, Zea mays
  unsure (1)..(433): unsure at all n locations
  Clone ID: MRT4577_111506C.1
cccacgcgtccgcccacgcgtccggtgaccatacattagcctggaagaagtgccttgtagacatttgtccaatttcatgatgattgaagcaactgcnaaaaaaaaaaaaaaaaaaaaaaaaaaaaaaaaaaaaaaaaaaaaaaaaaaaaaaaaaaaaaaaaaaaaaaaaaaaaaaaaaaaaaaaaaaaaaaaaaaaaaaaaaaaaaaaaaaaaaaaaaaaaaaaaaaaaaggggggggccgtttaaaaggatcaaagttaactaacgcgggcatgcaaagtaaaagttttttaatagggcaaccaaaataaaattaacgggccggggtttaaaaacgtgggaactggaaaaaccctggggtaaccaaaataaatcgctttgaaaaaaatccccttttcgcaagttggggaaaaacaaaaaaggccccaaccaa

SEQ ID NO: 12622 - DNA, 357 bp, Zea mays
  Clone ID: MRT4577_111507C.1
ggaggagacccaccgtcggctcgcccgggtggggattcccactcacgacatgaacctgtccccaatccattttgcccgcgacttttgatggagtctttcctcgcctcgcaatcatttaggttttccttttccgccgtagccagcaccaggggccccgtttccccaaggcctctagcgctttcaccctcaccagcgccggggcccgatttctctcgctccgtgctggccacacagactcaaaacttgaggtgctttcacaggacgatattcttaacgcaaaggagcttgtccaattggagaaatgtttgtcattcaatgacatatcagctaagcaggggattcgcattcgcagacact

SEQ ID NO: 12623 - DNA, 369 bp, Zea mays
  Clone ID: MRT4577_111508C.1
tttatttagatcaaggttccttcgaagaaaaaagaggctcgggttacggtgacattggccaattgcaggttctgtcatgttgcttatgatgaaatatttggaacgacttaaaccctagaaaaaaaaaaaataaaaaaaaaaaaaaaaaacgccagccgcctaaataccacggttgctaaccgtgccaacaataaaggacaggaccctggaatatatacgaggtcaccctaaaaggggggccgccaatatattaaactggaagagcgggaaaaaatttccctgctggaactggagatgcaactatacttcctcatagcaggcgatttcgcacgcgagtaaagaagaggctggggtgccccatgcgtaaaa

SEQ ID NO: 12624 - DNA, 411 bp, Zea mays
  Clone ID: MRT4577_111509C.1
ctcgctagtcgctacagctacagctagtacgtactatactatactaataaaagctacagtttcgtccggttctaaaaaaaaaaaaaaaaaaaaaaaaaaaaaaaaaaaaaaaaaaaaaaaaaaaaaaaaaaaaaaaaaaaaaaaaaaaaaaaaaaaaaaaaaaaaaaaaaaaaaaaaaaaaaggggcggccgttttaaagaatcaaagttaactaacccgtgcatgcaacgtaaaagtttttttatggggccaccaaaattaaattaactggccgtcttttaaaaacgtgggaactggaaaaaccctggggtaaccaaactaaatggctttgaaaaaaatccccttttcgcaagttggcgtaaaacaaaaaaggcccaaaccagacgcccttccaaaaaattgcccaacct

SEQ ID NO: 12625 - DNA, 366 bp, Zea mays
  Clone ID: MRT4577_11150C.1
gcattaaaagaaagctttgctcctcaaacaaccatgtgtgagaatccattgatgaggacaaggatgaatgaatgtcaaatgtgataagggcgcggaaaaaaacatgaattgtcggggtatctatacataatataccctttggcagaatggattgtcattgtacatagtaaagtttgcgtgttgaagagccttaagttcgcaaacaaaaagaaacttggaagccctgcactgacatactggtactgcgcttgttcagggacgagctctgcatctggcacagcctctccttggacagggcgggacatgtaccgaggacatgcacgatatgtgggctggccgtcgaggatgccaaaccgctgctagatg

SEQ ID NO: 12626 - DNA, 360 bp, Zea mays
  unsure (1)..(360): unsure at all n locations
  Clone ID: MRT4577_111510C.1
gcagcagacacctccgccacctccaccctcgaatcgttccccaccatggcgtcgcagggatcctccgtcttcgccgcactcgagcaggccccggaggaccccatcctcggagtgaccgttgcctacatcccacaaccaacctggggaaatcacccaaaagtcttcaccctatctggcttgaacgttaggagctaccgctattatgatcctgcaacatgcagccttcacttcgaangactcctggaagacctcggttctgctccttcaggttcaattgtactgctgcatgctgtgctcaaaaacctactggagtagatcctaccatcgaacagtgggaacagattangcagtgatgagatc

SEQ ID NO: 12627 - DNA, 397 bp, Zea mays
  Clone ID: MRT4577_111511C.1
aaaaactatgtttttgtgagtatttgaactcgcaacctccctctacgtggctgaaaaattgtataatcttttattcaggtagcatcttcaaagctgcagggctcaacaacagtaacctggacacgtgtctcattggagctatctcggttcttgccactggtgtcacaaccacgatcttggacagagctggccggagaatcctcctcattatttcttcttctgggatgaccctaagccttctggcagttgctgttgtattttgcatcaaggataacattgcacaagactctgacttgtacaacatcttaagaatggtgtccttggttggtgtcgtggcttatgtcactgccttctccttcggtatgggttccattccttggatcataatgtctgagat

SEQ ID NO: 12628 - DNA, 377 bp, Zea mays
  Clone ID: MRT4577_111512C.1
ggttcctcgaggccggccgggacgccgttcacgtcccccggcccccgctctcgtttcccccgcccgcaccaggcacgctcacgcgctgcgcaccggatggcccctgctaacgtgcgcgcggcgcaggcgcaggcccccagcgccgaccgcaggttaagtacgctagtggggcacctgctgccttcctccccacgaagagcagcagcagacacctccgccacctccaccctcgaatcgttcccctaccggaccgaggaagggaagcccctagtgctgaacgtggtcaggcgcgccgagcaaatgttgatcaataatccgtcacgtgtccaggagtacctaccaatcaccggcctgcctgaattcaataagctgagcgc

SEQ ID NO: 12629 - DNA, 286 bp, Zea mays
  unsure (1)..(286): unsure at all n locations
  Clone ID: MRT4577_111513C.1
ctcctcgcatttcttcccatccgatccccccttcgcgaccaaaaccccaactggcgccgcatcgatgggggccaagcgcgagagnagacccgcggcgaanacgccggcggaggagcagcccgcggccgagaaggcgcccgccgggaagaggccgaagggnagacagcgggtccccgctggcaacgccgctgccaatgaaggcggcgagggcaagaggggcaacaacaagggcaagaagagcgtggacacctacaagatctacatcttcaaggtgctgaagcaggtg

SEQ ID NO: 12630 - DNA, 2152 bp, Zea mays
  Clone ID: MRT4577_111514C.1
cattgggtacctcgaggccggccggggcgcacgccgtttccacgtcccccggcccccgctctcgtttcccccgcccgcaccaggcacgctcacgcgctgcgcaccggatggcccctgctaacgtgcgcgcggcgcaggcgcaggcgcaggcccccagcgccgaccgcaggttaagtacgctagtggggcacctgctgccttcctccccacgaagagcagcagcagacacctccgccacctccaccctcgaatcgttccccaccatggcgtcgcagggatcctccgtcttcgccgcactcgagcaggccccggaggaccccatcctcggagtgaccgttgcctacaacaaggatcccagccccgtgaaggtcaacctcggggtcggcgcctaccggaccgaggaagggaagcccctagtgctgaacgtggtcaggcgcgccgagcaaatgttgatcaataatccgtcacgtgtcaaggagtacctaccaatcaccggtctggctgaattcaataagctgagcgctaagcttatctttggcgctgacagccctgctattcaggagaatagggttgctaccgtgcagtgcctatcgggtactggttctttaagagtcggaggtgaatttcttgcaaggcactatcacgagcgcactatctacatcccacaaccaacctggggaaatcacccaaaagtcttcactctatctggcttgaacgttaggagctaccgctattatgatcctgcaacatgcagccttcacttcgaaggactcctggaagacctcggttctgctccttcaggttcaattgtactgctgcatgcctgtgcccacaaccctactggagtagatcctaccatcgaacagtgggaacagattaggcagctgatgagatcaaaatcactgcttccgttctttgacagtgcctatcaaggctttgcaagtggaagtcttgacaaagatgctcagtcagtgcgtatgtttgttgctgatggtggtgaacttctcatggctcagagctacgctaagaacatgggattgtatggagagcgtgttggcgctttgagcattgtatgtaaaagtgccgatgtagctgttagggttgaaagtcaactcaaacttgtcatcaggcctatgtattcaaaccctcctcttcatggtgcctctatcgttgctaccatactcagggacaggatcattaacatgaggcaccatgaatggactctggaactgaaggccatggctgataggatcattaacatgaggcaacaactatttaatgcgctgaaatccagaggaacccctggtgattggagccatatcattaagcaaattgggatgtttactttcactgggctgaatagcgaacaagtggcattcatgaggcaggaataccacatttatatgacatctgatgggaggatcagcatggccggtttgagcatgaggactgtgccccatcttgcagatgccatacacgctgcagttactcaactgaaatgaggatagtatcgcagctttcgtgaataaaacctgaatcacccacaacaatgttcataagtactcagccagtggtatttactggttgacctactgtagtttgcgtcggaatagatatgtttttttttactctgttcgtggggcagttttgtactggtggattcataaggactctgattatggtgcgttcggaacttataataataagcacatgaaattttgcttcaggtgcagtgatgctgtctcattaagttattagttattaggttgctgtcttattaagttatcaggtcgcagctgggttgaagcggagcacctgtcttgatttatctcttctcttttctagagagcttctgtcattcgtgtgcccttttatatcattttgctctatcaatgattatcctacaatctgcagtagttttgattccgttttgttctttgcctgctgtactggctcagaagtacggtaatgctcgcaagctttgcggttgttgatttagggactgaaaggatctgtttagaaaggtgtcgatttggagactcaaaaggatcaagaccttccaaggaaggtgaattgagtttctctaaattttcttgtatgaattaaaaagttttgtatcataatttttaattctatactagcatgataattc

SEQ ID NO: 12631 - DNA, 594 bp, Zea mays
  Clone ID: MRT4577_111515C.1
ggcatgtcaattttcactgtttgtcggtctccaggcgatgatacatccattcccattgctctatgatgtagcttttaactatgtcagagtaggtatgcatttgtatccacattagagtaattggggccttactcgaagattatagccaccaacatgctccacatacgtttctagtcttgagcagccctgttcttcatagaatgtagcaaccaaagagatctctaaccgttagattggatgaccgcacccacgtgtacaatctcgcgtgagcctggtcgaccgcgtacgaccgttttaggcgtacgtgtggatgcaaccaacataactttttttgcgtctgtctatacaacccgcgcttcacatgtgcatgcaaccaaacacaaactcagataaagtcaacgcacgtggtaacgcgggacgggacggtgcaactaaccgatcaccatggtacatcttgtatccactctcccgatgcccctctttcctagatgaattgtcgatgtcgcaagcgtgccacattcaaagagcgaacaaccgaaatgtttgggtagttagaaataaagaaatgaggtgagcaagtatggaggaatgggc

SEQ ID NO: 12632 - DNA, 286 bp, Zea mays
  Clone ID: MRT4577_111516C.1
cacttactcacctactctctatttttcacctacttcacatcatctctagagccttttacaactttggctaacgtaactacataccatcaacaacaacatcttcaacaatttattccaattctcagtcaactatccatttttaaccctaccttctacctacaactactttcatctatcccactctcattttcaattcacctacttacctacaacaacaattacttcaacaaattttaccaactctcactcatctatcttattcaaacccttctacctacttacaaca

SEQ ID NO: 12633 - DNA, 375 bp, Zea mays
  Clone ID: MRT4577_111517C.1
cggaccctgcctggatgatggacctctcactgatggtgacaccttcgaagcagagatcgtagcagaggtgatgttcttgaacgcacttcttcttgttactgacgatgagactaccttccacgcgctgcatatggtgaccttgaacactctggcgtagatgaagtgatgactgtcgcactatcgacagctctgccttcctccacaggtgatagcagggagagcaggctcacgcatctgctctctctggacactccaccttagaacagcaatggttgacctgaggcttgaaccaatacagacacttggagatagagcgcactgtcctacaggggttgctcgcactcagcgctggtgcaggaggaacggtgtctgggc

SEQ ID NO: 12634 - DNA, 1047 bp, Zea mays
  Clone ID: MRT4577_111518C.1
ctgcgcagtcccggtgacatgaaaatccagagctacttaagtgaggtaggatacaacagttgagaaccatagtgcttgcagaatggctgacatggattgtaccagtacaaatatgtattctttagatactgaaatgccaagtgataccctagaatcatcaggcccagtggaaagtagcatgcctgaaactgaagaggatgcttacgctatcagtcagtgcaataaaggtagtgctccagaacattcaagtgatgagaataactttgataatattcaaatgcagtctgaaatagttcagggttcagccgaggaaaacagattggatgattgttgcatgtctgctatctcggaggaggacgtattgatttctggacaagaagatgacataaggaatcttcccaatgatgaagaattatgtgcggaagtagaaggaccaaggaaacaaatccagagatgttttacattggaagaagctgctgatacaattctcttctgtagttccattgtccacgaccttgcatacaaggctgcgactattgtgttggaaaacaagaaggaaccaaagtttgtggactctattcgtccaactgttgcaatagttagaggatgtttttctaaggaagagagtttaccaaagctgcctcacagacgaaccccaaaccgtaaggtgaaaaggaaaagattggaaggcgaaacaactacaacggaaactacagagaaagacgttgtcgcgaatgactccccccctgtatgttctgcatcgggtattacaaggaattccgacaatatgaagccgccaaagctggagtccaagtgcaactgtataattatgtgagtaactcggtcacatccaagatcgaaattcctacctgcttggtttaaccccatcagcagcgatggagttcaacacagtggatcttccgctagattattttgcaaaggtgcatttgctgtgttttaggtgacagaatgcactgcgagctgctattcttttgtaaagtcttttcttatcttttccccttgtcatgaggcccttgcggtttgccc

SEQ ID NO: 12635 - DNA, 412 bp, Zea mays
  Clone ID: MRT4577_111519C.1
gaaaatgtccgctctctttttggtagtgtggctccatatgttgtatcgcaggtatctagcagttcacttaagaaggccattggattcaaaacagaggtatcttactgtgatgcattgatggtcctgaagtcttggataacgtcaaaggttccctttagagcaagtatgagccagatgtggaaattctataccttattgtctgaaggcgtggcagacgcaaagattgacattaaacgggagttcatgtcgtctccctctatatttacaccactacagcgtcctcgggcaatttaaagacatcccatctattggacgctccatcactagctgcaatagacaaaacttagaggagccatttccactatttcatctattaaaacaagtaagaaaatagaaaggcttggaagcaatg

SEQ ID NO: 12636 - DNA, 646 bp, Zea mays
  Clone ID: MRT4577_11151C.1
ctcctctcactcgcctcgacgcgcctctgatagttcgtagccgccggtccgtccgcctccctctccgcctcccgtccccaagggcaatacatttcaagcggcaatggcggaccaggctaaccaacccactgtccttcataagctcggtggccagttccacctgcgctcgatcatctctgaaagtgcacggtcccgtaacctatgcccatctgtctcatcttattgaaggagatttgccacaaggaactacatgaccccgaggcctttgggcccctcgatggttggtagcggtggcctccatgttccagtgatgaggaccccggtctggggtaatggtcctgctgaaaaaggggggtagaacctcctgatcgatttcctggagggcggaggttcaactgcttgttccaaaaatggtggtggtccccatcagcgtgtggaagtggttattccgaaaccagaacagatgatttagcccggaaagctatccaaaaccgaccaaggtattggtgactggttccaaagtaccactaaaggtgagggtttctcctccttgtggaagggcaacactgctaaaggtattcggtacttccccactccaggtttgcactttgcatttaaggactacctccagaaggtgtttaacttc

SEQ ID NO: 12637 - DNA, 2044 bp, Zea mays
  Clone ID: MRT4577_111520C.1
cggacgcgtgggcggacgcgtgggcgcaaagtacgcctacctgtacacgatgcttaacaagcagagctgcacagggcagaatggcatgtggcattacagatggcaaatcgcacggacgagtcaaggcctccaacgcgaaccccttggtggccgcctccagctgcgcgaatgtgaactctccatggggtccttgaacgatgacgatccgctccgcttccgcgtcatcacacgcgacagctgccatcggaataggatgcgcgcccgcgacccgtacggtttgtgacttcaaaaataatagcaagaagcctcgaagacattcttttggataaagttaggaaagtaccatgcatcccactttcagatggttcatttacctctatttcagatggtcgtatatggttgccatatgatgttgccaattccattcctgaatgcagtagcattccgaattttctagctctatatggtaatcttcgaactgtaagtccaaaccttctccctgcatgctgcaaaaataaatatctcatggaggaagtcagaataaatgatctagcagacatgctccaaaggatcggggtgcggaagttgtctgggcatgacattgttaaaaatcacatcatggtgtccttgcgtaacggtttagatgctaatgtggctgatatagtgattagagagtatgtgagctttattatggttcatcttcagtcttcttgcaccagctgtaactttgaaagaggagagatagtgtcagaactacggaagagtcctatattccttacaaaccatggatacaagagcccagctgatgaaccaattcacttcagtaaagattatggaaattccgtggatgctactagactcttcagaatgtagaaataagttggattgaacttgatagtacctatttgcagcatcatggttcacagtcgtcatcatttgcactggaaaaatggaggcaattttttgaagaaatgggtgtgactgattttgtgcagaaaagcagttgaatcatcatttatgaagtgcattcaaagcttcaaatggatagcatcaagaatggatgaggatcttcattatgcaacagatttattctatgattgtgaaaatgtccgctctctttttggtagtgtggctccatatgttgtatcgcaggtatctagcagttcacttaagaaggccattggattcaaaacagaggtatcttactgtgatgcattgatggtcctgaagtcttgcataatgtcaaaggttccctttagagcaagtatgagccatatgtggaaattctataccttattgtctgaaggcgtggcagacgcaaagattgacattaaacgggagttcatgtcgtctccctctatatttacaccactacagcgtcctcgggcaagtggaagagactttgttaaaacgaactaaagtgtttctctgctcatattccagtgtttatttataacatgcctttgttttattattttggttttttaaatgtcatgcttatatcctggtttggatatccagtttaaagacatctcatctattggacgctccatcactagttgcaatagacaaaactcagaggcaattacttatctcaatcttacttctacatttatatttccctcttgtgttttaccttttgcttaagagccatttcccctatttcatctattaaaacaagtaagaaaatagaaaggcttggaagcaatggtgttccacccagaacaagccgactcaagtgaggcaacgagtcaggaagcgcaccatggtcggatgaacgaagaagaaaaatctgttgcatggaatggatgtatgttattagattaaaataacaaaatttatgtatggatagaatcacaaatgaattctgaaacattttctcataacagtaaaaaaacaaaatttatgtatggatcgaatcacaaaaaaaaaaaaaaaaaaaaactcataacagctttgacaagaattcggagaaaatccccaatcaaggccgagatgctccaaacgaggcctgtgaaaagactggcggctcgaccggggaagc

SEQ ID NO: 12638 - DNA, 626 bp, Zea mays
  unsure (1)..(626): unsure at all n locations
  Clone ID: MRT4577_111521C.1
cccacgcgtccgcccacgcgtccgctgtgaactagaggcatcaagaggttgttttcatttgcttgtggttcatcgtacctnctgttttgtgcatgttgtaccacaggtatctagcaggtcacttaagaaggccattggattcaaaactcatgtacgttactgtgatgcattgatggtcctgaagtcttggataacgtcaaaggttccctttagagcaagtatgagccagatgtggaaattctataccttattgtctgaaggcgtggcagacgcaaagattgacattaaacgggagttcatgtcgtctccctctatatttacaccactacagcgtcctcgggcaagagccatttccactatttcatctattaaaacaagtaagaaaatagaaaggcttggaagcaatggtgttccacccagaacaagccgactcaaggtatggcatggtcttgtcggcccctgtggcagcacatggccttcattgctagctgcactgatgtgagtagcgactttttgtctactctttgcaaaacagtgaggcaacgagtcaggaagcgcaccatggtcggatgaacgaagaagaaaaatctgttgcatggaatggatgtatgttattagattaaaat

SEQ ID NO: 12639 - DNA, 241 bp, Zea mays
  Clone ID: MRT4577_111522C.1
aaaaaaaataaatacctaactataaaataaattaaaaacaataacaactaaaataaaaggaaagcacacatcaaacattcactcaccaaaaaaaaaaaaccaaaaaccataacaaaaccaactaaccaacaaccagatcgcctatttcaaggacacctttaacctcttcgacaatgaccgctacaatttcattacaaccaaagatcaattaactttcattccatcactttttcaaaaccca

SEQ ID NO: 12640 - DNA, 1628 bp, Zea mays
  Clone ID: MRT4577_111523C.1
gcgcaccatggtcggatgaacgaagaagaaaaatctgttgcatggaatggatgtatgttggtagattaaaataacggggtttatgtatggatagaatcacaaatgaattctgaaacattttcttataacaatattaccccccagggtaaaaaaaaatttttgaaataaatttcaccttttttttaaaacttcccattaaaccaatattttgtgtttttaatataacaaaaaatggccaatcactggaactgtttgtatcataagcacatttttattcttaacgggggcgccctttttacccgggtcgtccggtgtagtgattatgtgagctttattatggttcatcttcagtcttcttgcaccagctgtaactttgaaagagagatagtgtcagaactacggaagagtcctatattccttacaaaccatggatacaagagcccagctgatgaaccaattcacttcagtaaagattatggaaattccgtggatgctactagactcttcagaatgtagaaataagttggattgaacttgatagtacctatttgcagcatcatggttcacagtcgtcatcatttgcactggaaaaatggaggcaattttttgaagaaatgggtgtgactgattttgtgcaggtagtgaaagttgaaaaaactttatcccaagttgattctattctagcaggaggactttctctagctgatgtatctacaaaacaatgtacagtgtatgactgggagtcaccagaattatctagaattttatcaatattttcttcaaaaagatgcaaggaaaaatgtgtatatcttctggaagttcttgatagattctgggatgatcattatagggcaaaatctaggatcttcacagatgctacacattgtggtgaaaacagagcagttgaatcatcatttatgaagtgcattcaaagcttcaaatggatagcatcaagaatggatgaggatcttcattatgcaacagatttattctatgattgtgaaaatgtccgctctctttttggtagtgtggctccatatgttgtatcgcaggtatctagcagttcacttaagaaggccattggattcaaaacagaagtatcttactgtgatgcattgatggtcctgaagtcttgcataatgtcaaaggttccctttagagcaagtatgagccatatgtggaaattctataccttattgtctgaaggcgtggcagacgcaaagattgacattaaacgggagttcatgtcgtctccctctatatttacaccactacagcgtcctcgggcaagtgagttcatgtcgtctccctctatattgccactcaagtttctgtttacaagatcgacagttactcgtcagaatagccagaagtgctagcacttccttttgagtaatgacagtaactccatttatatttggtgaaaatgtttagcgtcacatgatctgtgttcttaggatattgaggtctaaatgactacttcaatctggaatcagatttaatatgttgctgggttgatgagatgagaaaaaaaatgtccactatactgtttagcaatattttcactctttaaatggcatgtaagtctgtgaaaaagagttgcatgggaggattaatgtgattttaat

SEQ ID NO: 12641 - DNA, 387 bp, Zea mays
  Clone ID: MRT4577_111524C.1
aatgacagattggcaaggctggtggtgacaagtggaagtccctgtctgatgccgtgagtttgtttgttccccagtcccattttaaccgtttgagtccgcagttggttgcggtgtgcgttgttcttacgataagcgtgttgctctagatgtatccgcgctcgtcccctgtgtgtttgtatgtatatcagtaattatattatatatcatgtttacccgatccatcgttagatctgctaaaattccatatgttaaattcgaaatgggttggtattactcgtgatttgaatttaaatttcaccgcgcctcatgttttcgaattgtaatgactgatgtctaaggtattagactcttgcttagacttcatatatgtggaattgctgctgccta

SEQ ID NO: 12642 - DNA, 344 bp, Zea mays
  Clone ID: MRT4577_111525C.1
ctatctttttcttttttccattcttaagacgccacacaaggtgagatattaaacaaaaatgggggccaacaacccacaggtgacaggaacaaaacccacgaaacgctgtaaaaaaaaaccaccccgcagagcactccattgacacagtactaaattgtgtaacatgcatgtcaaagcgacaccctacaccactacacgtgccaaatgctacaccggcagccattatagcagtcctccatccacaaggaaatctatcgaacaaccgagccagcaccttgtgtgtgggggcacccagaggaatccggtcagcaaataccacagcgaggcaagaccaggggacgaac

SEQ ID NO: 12643 - DNA, 504 bp, Zea mays
  unsure (1)..(504): unsure at all n locations
  Clone ID: MRT4577_111526C.1
naaaaaaaaaaaaaaaaaaaaaaaaaaaaaaaaaaaaaaaaaaaaaaaaaaaaaaaaaaaaaaaaaaaaaaaaaaaaaaaaaaaaaaaaaaaaaaaaaaaaaaaaaaaaaaaaaaaaagcccttaaaaaaaaagaaagggtccccctccgtttcaaaagggaaaagaattgccccccttaattggcaattgttaatattttgcccccagtcccctcccccaatttgttccgccaaaaacaacatggggaaaagttttaataacagcccatccccacaaaaaggttacaggaaaaaaactccaacccaaagtcctcggggtcgttttggaggccgtaatactgatagggccctccaaactagtttttggggaagaaattttccccggaattgaaggcctaataaccttcgaaaaccatttgaaaaatttgcccccgtaaaaaacatatatttgcaaaagaataactacactcggaagggacccttgatttattaattgagagggg

SEQ ID NO: 12644 - DNA, 144 bp, Zea mays
  Clone ID: MRT4577_111527C.1
gggtggatccggcggacagcgtcacagatcttagctgatgtgatttatgaatgaaaggaggtgggcaaatttacgacgagggataacgggaaagcaagggatatggatttgtttgtcaaactgatgatggtaggtgtgcggaat

SEQ ID NO: 12645 - DNA, 314 bp, Zea mays
  Clone ID: MRT4577_111528C.1
ctggtttgtcacttcttgtttcggatctatagatgcaaaaacactactgcagtcaagtgaaggatatcgatgcacacgtcttatactatcctcgcacaactgaatcacggagcttctgttttaataccactggtaccgttcaaaataccgacctcttcatcaaatatatcctcccctgtgaggttcaagggctgttcatatcccttaataacgtgaaatcataacacagattgcatttaacctccttatcaaacttatctactgaatgatttatatataattccttatgacacaacactgaacaatttcgcatt

SEQ ID NO: 12646 - DNA, 507 bp, Zea mays
  Clone ID: MRT4577_111529C.1
agcagtggtaacaacgcagagtacttttttttttttttttttttttttttttttttaggttttttttttttttttttttttttttttttttttttttttttttcttcttcttcgggtccccctaataaagcaagggaaaaaaaaaacagagagagagagatcaaagccctattccaacgcatccatcagggggggggggggggggaggtaatcttaactggggccaacggccaaaccacgacgccaatcgttttccggaagggggggaaaggggaaaaccaaaaaggaaaaaaaacccccgcccgcccgatttaaaattaaagccaaagggcaccggccttcttggggagggcccccacccccccggaaatggggacggccatgacccggccgagccccccggggagcttcccgccccccccggggactctgggggggtccccccgcttaagggcgaattttgggggattccctccccctgggggcccctcgggcctgcttctaggg

SEQ ID NO: 12647 - DNA, 278 bp, Zea mays
  Clone ID: MRT4577_11152C.1
attcggctcgagacgggctacacagctcactagagagctagcgcaagcgatctatcaaggtttactcttggaagaagccaggtgggcgcgtgaatatggatcgcctcactgtgatggcgccgccgttgctcgacctgctactgctgctcctctcgagacgctcgacggccgcgtcacagcacggcgaaggctggtggtaggaggtcaaggggcagagtacaccaagcgaggaggaacagactggcaaaggcaaagggagggggctgttcctgctgcac

SEQ ID NO: 12648 - DNA, 274 bp, Zea mays
  Clone ID: MRT4577_111530C.1
tggggaacacacgtgcagagaacactgacgcgcaacgactctaatgatgtgcgtcgggggcgcatgacgccttcagaaagatcggtttgttgggacctatagaaccaggtaccgaccgaggcttaaggtggctgcgaggcatatgcgagcggaccagctaccctatacatattcactcgatgtgattgagccgattaaccttgctgatgtcgacacaaatgcgaatcttattggagaaaggtgagtcgttgtaatcccaattgttcaacaggtg

SEQ ID NO: 12649 - DNA, 1150 bp, Zea mays
  unsure (1)..(1150): unsure at all n locations
  Clone ID: MRT4577_111531C.1
ccggccggacacgactctcgtgaacggatatctcggctctcgcatcgatgaaaaaaaaaaaaccgagacaccgcgtgcgaaccaagcagaccacaacaagaagaagcgtagtcgtcgccggaaggaaaggcgcggagcaagatgtcgtggcaggcgtacgtcgacgagcacctgatgtgcgagatcgaaggacagcatctcagcgccgccgccatcgtcggtcacgacggcagcgtttgggcgcagtccgagagcttccccgagttaaagcctgaggaggttgctggtatcataaaggactttgatgaacctggtactcttgcaccaactggtcttttcgttggaggtacaaagtacatggtgatccaaggtgaacctggagttgtcatccgaggaaagaagggcactgggggcattactatcaagaaaaccggcatgtccttgattattggtgtctacgacgagccaatgactccagggcaatgcaacatggtggtggagaggctcggcgattacctgatcgagcagggcttctaaaagttcgtcatgttctgttttggtcatttgggcaccaaagtttgcgcctcatttggttctgtaatccgtgagctcgtgcatgtacttggcgtattgcatgcagtgaataatttagcttgggtttgtttgttgggggcagtgttggggacggatttggattggggtttatgcttggcatcgcgtcgtatcgaaactcagctgctgtttcgctgagtaatgtacatttccctggtaatggtacttgtggacaaaaaaatttatctcccataatattttcagcattcaaaaacacaccaagcgaagcgcactagcaacgacctaacaccaatggctaccaagatattagccctccttgcgcttcttgcccttttagtgagcgcaacaaatgcgttcattattccacagtgctcacttgctcctagtgccagtattccacagttcctcccaccagttacttcaatgggcttngaacatccagccgtgcaagcctacaggctacaactagcgcttgcggngagcgccttacaacaaccaaatgcccaattgcaacaacaattcttggcacatntaaccctacaaaccattggcacgcaacaacaacaacaacagtttt

SEQ ID NO: 12650 - DNA, 979 bp, Zea mays
  unsure (1)..(979): unsure at all n locations
  Clone ID: MRT4577_111532C.1
tccggngttgacacacgcacagatgatgtccatgggaagtgggctgtgcattcctcccatgctgctgccaccagccatgcagcacctgcagattcctccggttgctgctcacttccctcatctcggcatgggattgggctacggcgggatgggtgtcctcgatatgaacagcgcggcggcagcggtgccatttccgcacatgcccggtgctcacttcccttgcccgatgatcccaggcgcgccactaccacagggtctcggaatcggaatgcctggcagaaacacgatgccggtgttcggagtccctcctgggcaaccaatccagccaccattcccatctttggcgggccttcctgtcaggccaaacctggcacctcctcacgcctcctcagccgccatggctaacatggtgcaggagcaacagcagcagcagcatcagagcctgaataatggagcatcaacagcagcagcagcagcagcaacagcatcagatcctcagttgcagactatcgtgcaggccgagagacagcattttagtgtgccctcttcagcacaaaccgagagcgatcagtttttggatggtggtggcaacagggctatttgtacagggagaaatgaggctgaaacttgaaaaacactcagcaggtctcgactaacaggctgcagatgtgaatatcagcgccaactcatcctggaaaagagcctaacgagtttcaagatccacgaagcagatccgtcacttgataagactccaatcaatcaagacagggccatgacaggacgtctagctttagcgagctaagatgctcctaagttttgtgtcaaatgtagatggtagatggaacctggttacaagaaacatttcttggcagccggtgctttttctttttttcttttggcttcactgaagttttcttggatcagtatatctaatttcctcaggcattcagtgatcatatgcacaaagatatctgtcccc

SEQ ID NO: 12651 - DNA, 176 bp, Zea mays
  Clone ID: MRT4577_111533C.1
gtcgcggtagccggctgttgcggaggatgtatcaggcaggccatggcgtcttcatcggcgagcccttctgccgtcctcgagattcacaatgatcttgaggtccaggccaacgcccttatcaagatccataaagacattgtcaagaaccaccaggtcctgtatgcatttcatcatta

SEQ ID NO: 12652 - DNA, 1122 bp, Zea mays
  Clone ID: MRT4577_111534C.1
attgggtacctcgaggccggccggaggaagctatctaattataaagcttaataaagtatagcggcgtcgctgtgtgtgtttcgagtcagtcagtcagtcagttgcgtgccatggcatgctccgagtctgagatgatgatgatgcctgatggcggcgtcgtgtcctcccctggccccctggggcgcttctggcgagcagtgtgttgtgttgtgttgtgtgggtgccgcacgctagcaggctagccatgtgccctgctgtgttgtgtcaccatccatctataatcttatctataccccaccttttgtgtaaaaaaaaccgagacaccgcgtgcgaaccaagcagaccacagcaagaagcgtagtcgtcgccggaaggaaaggcgcggagcaagatgtcgtggcaggcgtacgtcgatgagcacctgatgtgcgagatcgaaggacaacatctcagcgccgccgccatcgtcggtcacgacggcagcgcttgggcgcagtccgagagcttccccgagttaaagcctgaggaggttgctggtatcataaaggactttgatgaacctggtactcttgcaccaactggtcttttcgttggaggtacaaagtacatggtgatccaaggtgaacctggagttgtcatccgaggaaagaagggcactgggggcattactatcaagaaaaccggcatgtccttgattattggtgtctacgacgagccaatgactccagggcaatgcaacatggtggtggagaggctcggcgattacctgatcgagcagggcttctaaaagttcgtcatgttctgttttggtcatttgggcaccaaagtttgcgcctcatttggttctgtaatccgtgagctcgtgcatgtacttggcgtattgcatgcagtgaataatttagcttgggtttgtttgttgggggcagtgttggggacggatttggattggggtttatgcttggcatcgcgtcgtatcgaaactcagctgctgtttcgctgagtaatgtacatttccctggtaatggtacttgtggactctgatgcttttatgggaacgagtgcattttactgccgtgcttggccgtgctgttaagcaaaaaaaaaaaaaaaaaacccgcggcc

SEQ ID NO: 12653 - DNA, 843 bp, Zea mays
  Clone ID: MRT4577_111535C.1
cccacaaaccacgcaaccgatatattccccagcacccccagtctccagccgtccaaccgagacaccgcgtgcgaaccaagcagaccacaacaagaagaagcgtagtcgtcgccggaaggaagggcgcggagcaagatgtcgtggcaggcgtacgtcgacgagcacctgatgtgcgagatcgaaggacagcatctcagcgccgccgccatcgtcggtcacgacggcagcgtttgggcgcagtccgagagcttccccgagttaaagcctgaggaggttgctggtatcataaaggactttgatgaacctggtactcttgcaccaactggtcttttcgttggaggtacaaagtacatggtgatccaaggtgaacctggagttgtcatccgaggaaagaagggcactgggggcattactatcaagaaaaccggcatgtccttgattattggtgtctacgacgagccaatgactccagggcaatgcaacatggtggtggagaggctcggcgattacctgattgagcagggcttctaaaagttcgctatatgctgttttggtcatttgggcaccaaagtttgcgcctcatttggttctgtaatccgtgggctcgtgcatgtacttggcgtattgcatgcagtgaataatttagcttgggtttgtttgttgggggcagtgttggggaccgatttggattggggtttatgcttggcatcgcgtcgtatcgatactcagctgctgtttcgctgagtaatgtacatttccctggtaatggtacttgtggactctgctgcttttatgggaacgagtgcattttactgctgtaaaaaaaaaaaaaaaaaagcggcc

SEQ ID NO: 12654 - DNA, 808 bp, Zea mays
  Clone ID: MRT4577_111536C.1
tggggcaacctgcaccagctgaaagaccaggtaggataaggcgactagaatcacatgtcaaaaatgcagaggatgaggaaagaactcttgaagaatctttagaagcgaaaggagttctccttgctcgggctcatgaggaaaccaaggacttgcttaagctactctttaagagctttgttgacgtgctcactgaacgtttgccgcctgtctctgttgatggggaaattcctaatctgcgcagtggagatcaaaatgtaaattttgcagctcaaaattctgaagcagcaacaatggagattgacaatgaaaatggagcagataataatagtgaaccgaatgagcgaaacacaaaaaatgcatataatgttggagagcttgagcagtggtgtctctgtacactgggttatctcaagtcattttcccgccaatatgcaagtgagatttggtcaaacattgcaatgttggatgaggtcttcgttggggatgttcacccacttatccgaaaagctgctttctctggtttgcgcagatttaccaatgaagggtctcatccttgaatttgacaccatacccatattctttatagaactgagtgtattgtacctgtatgatagaggacaacttttctccttgtttaactaatcaaataggcataaacatttttccttggtttcgtatgccttttttttctgttcccttgcttctcggccactaaatgaaaatttttaccaggtaactaagttaatgttcttttctgaagtaacatcagaatatgcatggttcagtgttaatttaacatattggctgg

SEQ ID NO: 12655 - DNA, 335 bp, Zea mays
  Clone ID: MRT4577_111537C.1
actacgggctgaggcagaggataggcctaataggagaacaaatagtgccaatgcatatatgaacattgctgcctgcctatatgttgaaaatgtggaatcggaattacgcgaggaataccgatctgatgtgctgtggcttgaggataggcctaatcagaaaacaaataatgccaattgatatatgaacattcttgactgcttatttcttgaaaatgtggaatcgggacaccacgaggaatgcccatctcatgatcttagagtccatgataggcctaataagataacagaggatgtcaattcatatatgaacattgttgcctacgtatttgttgaaa

SEQ ID NO: 12656 - DNA, 476 bp, Zea mays
  Clone ID: MRT4577_111538C.1
caaaaaaaggcactcttttgtttgcgcagattccaccaccctatggcctatgagccctaaagcaaagccggccccgtggctctggcatgccttcggacatctactcgtcttccggcgttaacaacaaagtacgatggggagcccttgtcaaggtccacggggcccacccttaaaacacgggctatttcttcccatttgatgacgtgcgatttatggagctcgaaaggcgtgactaccctgactgggacgatttccacctgtcgagggtggacaaggcggcccttggggccacccgggtgaattcatagagccggtggagctactttctgttctctaaccccatcgagggcacaaagggctctggggtcaccctcccgaggggccaattgcctgcggtccccggcctgcgagggactctgatctccctcataagctgaaccaatctgcttgaccttgcattgccaatttactccaaa

SEQ ID NO: 12657 - DNA, 567 bp, Zea mays
  unsure (1)..(567): unsure at all n locations
  Clone ID: MRT4577_111539C.1
ccanccaccccncgcnattttagcagcccaggccgccggcggggggcggcacccaccaaaccacagcgagacccgaccccgccgncgcgangaggccggcgcngcncaagnccacggccgagcnccnccgccgcagccgcggcnacgccnccccggccaacccggagcggaagggggccanccngggcgcgggggggggcancgggcagccgcncnccctccncaagaagcncaacccgcgcggcgcccccctcnccctcnangagancgccgggacccccggcgncgcggccgacgncncccacancaacncccccgcccnggngaaggggnncaagggggacgaccagcncggggaggcgcncgagggcnccgacgncgncancaacccagccggggngcccaggaagcccggcangacnagggacgaccncnncaacancaacgccggcancgnnaaggggcncngcacngccancgccaagcaccgccccaacgcncnngncaanangancagcaacccngncaacnccacngncccganngcggcggaggnnnncaagaagg

SEQ ID NO: 12658 - DNA, 367 bp, Zea mays
  Clone ID: MRT4577_11153C.1
tcgatacctttcacccttcctctcaggaagccgaaccctagccaccgtgctcactttccagctctgaacccttcgcgggcgagtccacggcagtgcatgacctgatcctgctgtctaagccaccgcggtgagatgttgatggtgtctggcggccgacggaactcctatgcgaaagagatgaccctccgccgcaggatatccatcatattcaacatgacgcaagaacacttaccttctttaaaagactactacgatcatttagaacaacctgagcacatgactttcaacctcatccaacgcatacatctcgtggagattgaaccgaagattgcacgataccaacaagaaaatgcagagcagatttact

SEQ ID NO: 12659 - DNA, 263 bp, Zea mays
  Clone ID: MRT4577_111540C.1
gccaaatcctttggcatacgtgatggccttcaacaatctctctttaagtttttctttgcttgagtattccggaagtaaaagcacattaaagcaagtatgagatgtaggtaacctttctgtgtctgggccatttttggctataatcatctttaattttcctagtcctcccacaggtgctctgtctgtgcccgttgtaaactgcaagaagagtacttttctgttcatctgtaaatgaatgaacgatttcccagaactccctaatc

SEQ ID NO: 12660 - DNA, 406 bp, Zea mays
  Clone ID: MRT4577_111541C.1
gggatcaatggggcggggcatatgcttatttcaaatacaatggggtaaattgcgggtaagcacggggcatcaaatttttatcgttggctaccaataaagaggggggggggggggggcctttcatcgctgggttgcggggtgttctccctttcgtgtccggcgccaccaccccaaaagcaccatggggacccttgcgccatgcccccatccgggcatcgcgccacttgcattttaaactagtaaaagcctaaaaaggggtaccggtaagcccttccattttattttacctcacaaacccaatgttggagctgtgggtgtgtccctgagcaaaagcaaaccaacctttcctgctacgtggtcagcgttggattaccggtcggctctgcagttctgggttcaggggggg

SEQ ID NO: 12661 - DNA, 454 bp, Zea mays
  Clone ID: MRT4577_111542C.1
acagatcagaccagaccagacccgtcccgcgaatgtaaggtcaaaccaaccgtgatccgcgaattcgagacagaggaggggaggggctcgggcgcatgaaatatttgcagggtcagaggctggagaccactctggccatcgcggcaaccttaacacaatgattgatggaatgcttgttactctgtgctatgatggacgttttctgcgtgtggcttgctcactgggtgctattgccatttgtcttaatggagggtaatgtctgttcattgttcatttagtctaggcgacctttcatcagtagagaaaatctcactgactatgatacggagatcttcaatctaatgttcattatggacagttgctctgtccagtagttgggcacatgtgttttatacttatgggaagtgttttgatccatgtagcattaagcttcgttggttttaaggattggttg

SEQ ID NO: 12662 - DNA, 824 bp, Zea mays
  unsure (1)..(824): unsure at all n locations
  Clone ID: MRT4577_111543C.1
acttctcagtctcagtccttcctccaatttcgtgtgcctcgtcacccggcaatctctccgccggcgacgggagacgagacaacatgccagacccccttctgcacccgagccttctcgcaggcgtggagtgaagaagcgaatcgtcccggcttggatatgtttctcttttactggtgatgatgcaatcaaatccaaatctaatcgagctctccaccgattacgccagtgttcttcagcgcgcaagatcgattacagttgaccccacaagagtcgccgcagtttatatttcaagaatcttttagggggattcagttaaacatccatgcccgcgctgagacttcccctggaaatcaagattcaagaaccatctccatcaatggatgacgcgggaggggacattctcccgtctctcggccgcgtgcgcctcggcgatctcgcggccgtcgagggcctcgcttccgacagctacaagatatgcgtatcgacactgatgcagtcgctggctcagtactcggcagccatcatccagctgcctccggccgatgctgccctcttaaggtctggtctggactccgctcgcctcttcttccaccagcgagtgtatgattcggtgggcgatgttgtccattcggatgacgcccgcgagtggaagacatctggttactatgcagatcctcaaatgtggctggaaatgtatgattataggcctggtgttactgtcagagagcatggtggcgcaatggaattgtccccgtctgggctgcccgacatattttcatggctgngaaagtttgccgagatatcttggatgcggttagcttctc

SEQ ID NO: 12663 - DNA, 282 bp, Zea mays
  Clone ID: MRT4577_111544C.1
caatttatgactgtggggataaaggaaattcattctggttacaggattgagagtgcggttgctgaaaagtcacatgaagatcacgcagagcatgatcatgaacaccatgagcatgagaatgaacacgaccatgaccatcatcaccatcatgatcatgatcatggtaagccttgatgttggaacattattatggcatgagctgactgacgtggtagtatcaaactcctgattctctatgatcagtagcactcacttgtaccaccaattaggaaatgatgtgca

SEQ ID NO: 12664 - DNA, 3807 bp, Zea mays
  Clone ID: MRT4577_111545C.1
ccggccgggactcgcagaatcttctgccactgcccttccatctcgtcccttcgctacaagtcatctcgccgcaaccgcaacccgcagccatggggacggaggcggagcagccggacatggacagccaccgaaacgacggcgtcgtggtggtgccagcgccgcgcccgcgtaaggggctcgcctcctgggcgcttgacctgctcgagtccctcgccgtgcgcctcggccacgacaagaccaagccgctccactggctctccggcaacttcgcccccgtcgtcgaggagaccccgccggccccaaaccttaccgtccgcggacacctcccggagtgcttgaatggagagtttgtcagggttgggcctaatccgaagtttgctcctgttgcggggtatcactggtttgatggagacgggatgattcatgccatgcgtattaaagatggaaaagctacctatgtatcaagatatgtgaagactgcccgcctcaaacaagaggagtattttggtggagcgaagtttatgaagattggagacctgaagggattttttggattgtttatggtccaaatgcagcaacttcggaaaaaattcaaagtcttggattttacctatggatttgggacagctaatactgcacttatatatcatcatggtaaactcatggccttgtcagaagcagataagccatatgttgttaaggtccttgaagatggagacttgcagactcttggcttgttggattatgacaaaaggttgaaacattctttcactgcccatccaaaggttgacccttttacagatgaaatgttcacattcagatattcacacgaacctccatactgtacataccgtgtgattaacaaagacggagctatgcttgatcctgtgccaataacaataccgggaatctgtaatgatgcatgattttgccatcacagagaattactctatttttatggacctccctttattgttccgaccaaaggaaatggtgaagaacggtgagtttatctacaagtttgattctacaaagaaaggtcgttttggtattctcccccgctatgcaaaggatgacaaactcatcagatggtttcaactccctaattgtttcatattccataatgctaatgcttgggaagagggtgatgaagttgttctcattacctgccgccttgagaatccagatttggacaaggtgaatggatatcaaagtgacaagctcgaaaacttcgggaatgagctgtacgagatgagattcaacatgaaaacgggtgctgcttcacaaaagcaattgtctgtttctgctgtggattttcctcgtgttaatgagagctatactggcagaaagcagcggtatgtctactgcactatacttgacagcattgcgaaggtgactggcatcataaagtttgatctgcatgctgaaccggaaagtggtgtgaaagaacttgaagtgggaggaaatgtacaaggcatatatgacctgggacctggtagatttggttcagaggcgatttttgttcccaagcatccaggtgtgtctggagaagaagatgacggctatttgatattctttgtacacgacgagaacacagggaaatctgaagtaaatgttatcgatgcaaagacaatgtctgctgatccagttgcggtggttgagcttcctaatagggttccttatggattccatgccttctttgtaactgaggaccaactggctcgacaggcggaggggcagtgaagatacggcacctgcagattctgcacacgcgggtacaggttggaaattattgcagaggacatgtatatgtataggacaagtttattacacatgtattcgaaccacacattacacaagtttattgcaggacgtgtattcgaaccacacattacacatgtatatgtataggacaagtttattacagtcctgcaataaacttgtgtaatgtgtggttcgaatacatgtgtaataaacttgtcccatacatatacatgccctgcaataatttccaacctgtacccgcgtgtgcagaatctgcaggtgccgtatcttcactgcccctccgcctgtcgagccagttggtcctcagttacaaaaaaggcatggaatccataaggaaccctattaggaagctcaaccaccgcaactggatcagcagacattgtctttgcatcgataacatttacttcagatttccctgtgttctcgtcgtgtacaaagaatatcaaatagccgtcatcttcttctccggacacacctggatgcttgggaacaaaaatcgcctctgaaccaaatctaccaggtcccaggtcatatatgccttgtacatttcctcccacttcaagttctttcacaccactttccggttcagcatgcagatcaaactttatgatgccagtcaccttcgcaatgctgtcaagtatagtgcagtagacataccgctgctttctgccagtatagctctcattaacacgaggaaaatccacagcagaaacagacaattgcttttgtgaagcagcacccgttttcatgttgaatctcatctcgtacagctcattcccgaagttttcgagcttgtcactttgatatccattcaccttgtccaaatctggattctcaaggcggcaggtaatgagaacaacttcatcaccctcttcccaagcattagcattatggaatatgaaacaattagggagttgaaaccatctgatgagtttgtcatcctttgcatagcgggggagaataccaaaacgacctttctttgtaggatcaaacttgtagataaactcaccgttcttcaccatttcctttggtcggaacaataaagggaggtccataaaaatagagtaattctctgtgatggcaaaatcatgcatcattacagattccggtattgttattggcacaggatcaagcatagctccttctttgttaatcacacggtatgtacagtatggaggttcatgtgaatatccgaatgtgaacatttcatctgtaaaagggtcaacctttggatgggcagtaaaagaatgtttcaaccttttgtcataatccaacaagccaagagtctgcaagtctccatcttcaaggaccttaacaacatatggcttatctgcttctgacaaggccatgagtttaccatgatgatatataagtgcagtattagctgtcccaaatccataggtaaaatccaagactttgaattttttccgaagttgctgcatttggaccataaacaatccaaaaaatcccttaaggtctccaatcttcataaactttgctccaccaaaatactcctcttgtttgaggcgggcagtcttcacatatcttgatacataggtagcttttccatccttaatacgcatggcatgaatcatcccgtctccatcaaaccagtgataccccgcaacaggagcaaacttcggattaggcccaaccctgacaaactctccattcaagcactccgggaggtgtccgcggacggtaaggtttggggccggcggggtctcctcgacgacgggggcgaagttgccggagagccagtggagcggcttggtcttgtcgtggccgaggcgcacggcgagggactcaagcaggtcgagcgcccaggaagcgagccccttacgcgggcgcggcgctggcaccaccacgacgccgtcgtttcggtggctgtccatgtccggctgctccgcctccgtccccatggctgcgggttccggttgcggcgagatgacttgtaggcttgtagcgaagggacgagatggaaggggagtggcagctcggccggcctcgaggtacccaatg

SEQ ID NO: 12665 - DNA, 358 bp, Zea mays
  unsure (1)..(358): unsure at all n locations
  Clone ID: MRT4577_111546C.1
aaagagcaaccctttgtctctgcgtcnccacttctagaattctttgcacangaacagacgtcggaggggcgtattacttaccaaacggatcctcctacatccatatataaacgctggtttatcaagaatacccaagaaaagcacttcgaatagatgattcagcgccagagatggcttataaccaatagttcattatctaatggatttttccgttctaatactccatccgagagttattagtatttatcaaatcttgttatatctaacggaacgctattgcatcgaatgacaaagaccatttttaaaaaaagatggctctctctctgatgaaatgaaaataggatttcatgtatgtaac

SEQ ID NO: 12666 - DNA, 464 bp, Zea mays
  Clone ID: MRT4577_111547C.1
gacgatgcacgcgcgcgtacgcttgcttgctttctagcgagcggccttccttttttttttttttttttctgttctaaagtctggatgacccataaataggggggtacaaagcacaaggagcaatggcacatatatagtcacatggtatcacaccaaaccactaaggctgaatgggcaaaatggagtataaggtctctaccccggtcatcacactgaccgggctgaatctacatttagattactctattcgcccgaattctgtttcttttctttttctttttgatgcaaagggcaaaagtctatgaagtaagaatcacacacaatatattcgcctacaaggctctggattataaccggtgtgaacaagggcgactctggccccatgtgtccatcttccccctactatacacactcctcctacacgagcgatactgctaggtataggtccacgagcttaccacgga

SEQ ID NO: 12667 - DNA, 715 bp, Zea mays
  Clone ID: MRT4577_111548C.1
atattcgatccgccgcccaccctcgcccgaatccgccgcgccgactaatctgggacccacacacagcgcctccgcgcaccgccggccgtcctccaccagttctgggctggtgacaccgtaacggatttatcttggaaaagtcgaagtgctccagggagtttggcccggaatttccttgttgagttatcacaagagtggtggctccatatactggttcggtatttgtgtcttacacctggcgtctggagctcaggagtgggatattgtcgtggtaggccacatacctattaatagaccgctgtaaacgtagtgcatagtggacactgaaagcactattcggctttctgaatatagattgctataatggaggataggaggacaattctgatggaccgttatgaaatcgggaggcaattagggcaagggaactctgccaaggtatattatggtcggaatctcgcaggtggacaggctgttgcgataaagatgatcgataaggagaaggtttcgagggttggcctaattgtgcagataaagagggagatctcgataatgggattggtaaggcatcccaacgtcttgaagcttttcgaggtaatggctagcaagagcaagatttactttgttttggagtatgccaaaggcggcgagcttttcaacaaaataaccaagggaaagttaagcgaggatgctgcaaggaaatacttccatcagc

SEQ ID NO: 12668 - DNA, 428 bp, Zea mays
  Clone ID: MRT4577_111549C.1
gggggggggcatgcaaaacgtttctggaaatccccaaaatacaacagccgggggggggagctccggggatacaaatggacaaaaaacgccccccggcgggcattacctaaatttacaaggggcaggcccacattaattacaggcccctgggggtcccgaaaaaatggggggggaaaaaaaaaagcccccggtcaaacccataagatgggggggttaaaacgggcgacccccccaccaaaaagggcttccactgtttgggcccccccaggatgggggccgatagggcccccccccgggagggcccgaaacacgggtttaaaagagggggactttttggagggggccctggaacttttggagggcacaaagggggggaaggacccgttggtcgggttgggcccctgcaccaaggacccgggggtcaaccc

SEQ ID NO: 12669 - DNA, 362 bp, Zea mays
  Clone ID: MRT4577_11154C.1
ctacaacctagcaacaatggctaccaagcatattatagctacttgctcttcttgcgcttcatgcgagcgcaacaaatgcttgcattatatccacgagagacgtcacttgctctgactgctacattagttaacacgagagagctcctgacctaattacgttcaaatggacttgcgaacacccatctatgctagcctataagctataacaagcaattgaggcgagcgatctacaacaaccaacctaccaatcgcaacaacattccttgctacatctaacaatacacacgatggcaacgcaacagcaccaacaatacctaccagcactgtgccacctagccatggtgaaccctgccggctacttg

SEQ ID NO: 12670 - DNA, 377 bp, Zea mays
  Clone ID: MRT4577_111550C.1
aacggggggtgcccccctctgcctgctacaaacgacgggggggtacgaatggaagattggagactgccagccaacccactaccacatgcttgcaagctgcccggggtagttcatactatccggcgccggctccggctaccagaggagctggccctgcacacgcacttagggggcagaccaccacaggactgacggggcgcgggtagactctagcgagcgacaggtcgactgaccgacaagaccgtccgaccaccacgtgatatgatacacccgcgccgaccaggaagggcaaaccctgggatgccgaatgctggagagcgcaaacataagaagcgatacagctgactgcccaaaaagacaaagaacaaacgtgaggt

SEQ ID NO: 12671 - DNA, 368 bp, Zea mays
  Clone ID: MRT4577_111551C.1
ggccgacgggcgctgagacttgaacttcagtggcttagacactacaaggagccttgtggtcatacacacagggacttacacttgataacaccagactggccaatcatgaagactagggttacattgaggggctgctacttgaagctcttgctgaagaacaccatggatacgaagaacccgctcagaggcctatggcgcttggcggggtccttgtcatccttggggtttctaagagagagtacgaagagaacgacggcggagcgagccctcgactttgtttggagtggttgggggcggcacgcgaataatgcttgggtgtgcgagcacgaatacgtatgtaggtcagggccagtatgttgcgggtgacg

SEQ ID NO: 12672 - DNA, 523 bp, Zea mays
  Clone ID: MRT4577_111552C.1
cccacagcgagacgcacagggcgaacgcgcaagatgagctgcacatggcaggctctctcgaggaatgctagcctactgaagagacatctagggagtaaggcgcgcactaaaccaacgcgaccagaagcggacccctctgcacgtcagtggcatgggcatacacgaccaccagatagagggtgtacaacgtggtggccgcaggggacttaagcgagaagagactgcactcgatggggggaccactggtaatcgaacgaccaggacagcccttactaaccctcgtcgtatggagagataaacacagcccaccttgaaaacaggtagctcgctcagggtttctaaagggatgtgtgcctgctgtctgctgctgctgagtgctggaggaatgctgaggatgatagttacacgagagatgtacggcaatcccagcacatgttataggagatagcattggacaccaccccagctattatgatatgatactaactgggcgtgataataatctgcagcaagagtgtgcatg

SEQ ID NO: 12673 - DNA, 246 bp, Zea mays
  Clone ID: MRT4577_111553C.1
caaaattgaggggggtccaatgaattcaaaaaaaaagtaaaatgaatccatgcatgtgtgtatatcaaacaggactttgcttgcagccggcggtccggtcattgtaatttgcagacgaaaagcaaacaaatcttgcattggatcggaggcggttgctggacgacgaagtatagcagttctagcagccagccagcgtttgcgaatgtgtttaacgaaccgcgtgtacttaattagatagggcgatgg

SEQ ID NO: 12674 - DNA, 250 bp, Zea mays
  unsure (1)..(250): unsure at all n locations
  Clone ID: MRT4577_111554C.1
acgcacacgtacagagtcgggacggtggcgagtggnctggacgcgtgggttctgttccaagcatatactactctatgtacagtggataaactaggacatccacagtttgcctgctgttcatgtcctttattattccattaagctaatagtattattctgttccaagcatatactatctatgtaccgtggataatcaaagtaatggtgttctgttttttagatggatgcaaccactcccaaatactccaag

SEQ ID NO: 12675 - DNA, 431 bp, Zea mays
  Clone ID: MRT4577_111555C.1
ggaacgggaaagggaacccagctcattttttattgattcgtagggtcccaaaaggccaagaaaaatcaaaaaaaataagactgggggactcccccgagctaaaaagaacaaaagctttcatggggaacaaacctgtagtcggggatgcaaaaattttggggggcccaaccttacaacaatccagaccttgagagcttaatcagattttgagggcagaaaacaggcccccctggacgtagtcgttgtaaacgaggctgaccaggtagaaggttttctgaaccttttttagaagctccctcgaagaatcaccctcagggaacatgcaaccccccccccgaggccaaatttaaaaggcttggtccttccaaaccataaaacttggatgacccacaaccggggggtggataatctccttgccagggaaaaccccc

SEQ ID NO: 12676 - DNA, 400 bp, Zea mays
  Clone ID: MRT4577_111556C.1
agggctacttatggcggtacgtggaaggaggaaagattcattgtattgggggcaaatgcatatttcttgggaattctgctgcgctacagcagctctttatactgtggcggaggggcagggcttgatctgagtacaggtcctagcgcgaggtctagtggaagatcagaaatagtggaagaaagaacaaacgaaccatttcgatctttgcaggcgaccgctttattatagaaatagagaatttattcttgatattgatgtgcttacaaaataccgtattaattcattctataacatcatatccctaatgtgatatggcactaaagggtgaactggacagctgcaataagacgtcattcttgaacgaacatccactttgaagtttattgaatatattccatga

SEQ ID NO: 12677 - DNA, 125 bp, Zea mays
  Clone ID: MRT4577_111557C.1
ccaaagggcatgcagctgccagatgggatgtgacgctgtatgattatagctattagtctcctgttttgagcattgagccttggttggttcccttagccagaacgtgtttgcaagctccataggtg

SEQ ID NO: 12678 - DNA, 405 bp, Zea mays
  Clone ID: MRT4577_111558C.1
gagcttattagtcggcggccgccctttctgttttcttttgcgggaacagagagtgccggctggtgtgtacttcaccaggagtctgcccgggaacccagcttcacgagcagtacacgcactgagccccagagcggacagcgcgccgctgagccgctcggtgcacgcggtgaatctcggctcgacgggcgcgccgagcgatctaccggggctccttcagaggaacgggcgggagcgtcacggcgctagctgacgcggacgccgcagcctttttattgcgcgcgccgctcttcttgagcccgacgctggacttgatccgtatcacgcgctcctcgaagtcgatcgtgcgcagtggacgtcttggtggccgccggggtcgactcctggtaggctgctgaggcggtgtcc

SEQ ID NO: 12679 - DNA, 563 bp, Zea mays
  Clone ID: MRT4577_111559C.1
gcgttcgctcaacacacacagcagctcgaggaagagagagagagaagttgtcgtggttcgggctaccaccaccacatccagccggcttcctcggcgtagggccctaaccaggtgttcaagatcttctgccgcgccaacgataactactgcctggccgttcgagacggctgccgtcttgctgggctgggtcaacctcaaggagaccaccagcactggtacaaggacatgcgcttcattacccggttcaaggacgaggaaggcatgccggtgttcgcgctcgtcaacaagggcacggcggctcgcaatgaagcactagctcggacagtcccacccggtcaatctcgagcctttcagccctgaccaggaggacgcatcggtgctgtggacggagataaggacgtgggcaagggttttctttgcatacgcatggtcaacaacacccgtctgaactttgacgccttgcacggtgacaaggaccacggtggcgtgcacgactgctccggcgtagtgctctgggagtggtgcatgggctagaaccagagctggaagattctgccgtgggg

SEQ ID NO: 12680 - DNA, 332 bp, Zea mays
  Clone ID: MRT4577_11155C.1
aagctaggacccaaacgagatttcactatataagagcatgtcttttttaggctctctctagactactatgatgggaccttgtgatcctctatgggaccgtgctaaaatcatgagagtcgatattggacaaaataatcgccgacgaaaagccatgtcatagtaatcgtacttaaactgagaaacatagcacaaagcataggaaaggtccaaaacatatttttgtaaagaacaatatcatatactatctctattcacaaataggagatactggtgaattttttttggaaaaattagaccacttggggcaatcaaaatatttattcaaaaaatga

SEQ ID NO: 12681 - DNA, 245 bp, Zea mays
  Clone ID: MRT4577_111560C.1
gttcacccgtcgtccttgtaggttctttacttgaaaacggcaggcgcaccacaagcagcaaaatgctcatcttaggtccgatattaacgctcgggtctagcgcagatgttcacagcgagggtaacaaacttgcaaaccatgtccacacttatattaaaactggctacatgaagtacctggccatgtacattaattttcagggtccccaggcgcacaccatccttgcaatgcagggctgaaaaacc

SEQ ID NO: 12682 - DNA, 354 bp, Zea mays
  unsure (1)..(354): unsure at all n locations
  Clone ID: MRT4577_111561C.1
cttttcttggaaattggtaggttgaacatggctgcaagatacagcaaggaccttttgctgccgaaggttatgttttgaagttcatgctaccttttaaagtnaaaaaaaaaaaaaaaaaaaaaaaaaaaaaaaaaaaaaaaaaaaaaaaaaaaaaaaaaaaaaaaaaaaaaaaaaaaaggggggggggaganaaaaaaannnaaaaaaaaaaaaaaaaaaaaaaataaaaaanaaaaaaataaaaaaaaaaaaataaaanaaaaaaaaaaaaaaaaannggggggaaattttttgagttacaaaatttaattgggtggaaaaaaaagttaatatttttagttgggggaataaaaa

SEQ ID NO: 12683 - DNA, 307 bp, Zea mays
  Clone ID: MRT4577_111562C.1
gtggtttggttgaaccggtagcgggcttcttccttattgatgatactactatccacattggaggactttccatcaccgacatgtggtgtcctaattttgatcggccccacatgggtgtcactcatacgtggatactggagacgacctcatttccattcggttcaaacgttacgtacttgtataaaacaacaaagttggcacaggtactggctcaaaataaatcctttgccgcctgtgatgcctgcgacctttctctccagctactaccaggccacaacaggcactattatgcagtctctgccatgct

SEQ ID NO: 12684 - DNA, 324 bp, Zea mays
  Clone ID: MRT4577_111564C.1
tggacgcgtgggcgcacgcgtggggtcaatgttgatctgctatacctagctatgaactgggcagcttatatcaattcaggctattttcagtgcatgttgccacacccaaagtcttaataatttaaatgagtaacatggttaagcctggttgtcccattcaatcccaccagctagtaatttgaatgggataaaacccaattgattaaccttacatcttccaacattcttattcgacaagaaagaaaggattcttgccaatacacttttaacaactctgtaaaccctattactgctgttacgttgggttcatacttttggcacaat

SEQ ID NO: 12685 - DNA, 195 bp, Zea mays
  Clone ID: MRT4577_111566C.1
agccttgggttttgtttttattttttatgtgatatgttttgtttctttttatgttctcttttgaatagaacccaaggcttcccattactaatcagctgagaaaatttttcaccaaatgggctagaaactggaacccctcggaacgatgattcagatctaacttccgtggaccggcctactaaacacacaaccgac

SEQ ID NO: 12686 - DNA, 398 bp, Zea mays
  Clone ID: MRT4577_111567C.1
ggggattgcctaataaagcccacaaacacaaaccgagcatggaacaattcaaagaagaaccgccaaatagaaaaaaaacccgaggcccccctctcgcctaaataaagcaatccacgcatgggagcgacaaaaccaggagaagggcccaaaaaactaggcctaacaacgccatgcgagatggcccataggacccaacccacccaaaaaaaggcacaccgtgggccctgctaaacgccaaccgagaaaaaaaaagggccgggcgtaaaaaaaccctcaattgaaatccgggaaggcaggggcaaagacatccccataaatctgggcgggcccgggaccaagggtaaggcccgccccaaaaccaagactaggcccaaaagaaccggccccaaggaggttaa

SEQ ID NO: 12687 - DNA, 743 bp, Zea mays
  Clone ID: MRT4577_111568C.1
ccggccgggagtacgtcacatgggagggccagcgcgtcgtcttccacgcctgggagtacaacgcgacggtggaattctactgggcgccgttccttgtggagtcgaactcggacgaccccaagatccacagcatccagcaccggatcatcaaggcggacacgatcggggcgcacgccgagaactggcgcggcgtggactacctcgtcttcaacacctacatgtggtggatgaacacgctggacatgaaagtcatgagaccgggcgccaagagctgggaggagcacgacgaggtggtgcggatcgaagcgtaccggaaggtgctgatgacgtgggcgagctgggtgaacgacaacgtcgacccggcgcgcacgtccgtcttcttcatgagcatgtctcctctccatatcagcccgcaggtgtggggcaacccagacgggatccggtgcgccaaggagacgatgccgctgctggactggcacggcccgctgtggctgggcatggactgggacatgttccaccaggcgaggaacgtgtcccgcgggggcggggcgtcgccgcgggtgcccatcaccttcctcgacatcaccaccatgtcggagcggcgcaaggacggccacacctccgtgcacaccatccgccaggggaaggtgctgggccccgaggagcaggccgacccggccacctacgccgactgcatccactggtgcctgcccggcgtgccgacatctgggaactcatgctct

SEQ ID NO: 12688 - DNA, 471 bp, Zea mays
  Clone ID: MRT4577_111569C.1
gcacccgtacctaagctcggaattcggctcgaggatggttagtagtcatatttttgttgagcctaacaccatggccttatgcgcgggagccatcaaatggaccaagagacccgccaagcgcaggtataccatgcttaacttcgggatgaagaatctaggacgcacacatctgttgatcaaggacacttggctatatcttgtcggaggaagcagctatctgcaccccatggtcctaggggattgacacaccgtcgggtcctggatatactcataaacagcacttacacgttcacttcaaaggaggatgtgttctggattaccaattgatccgacagctgcagcttgacaatatggttccccacatcgtgttccttcgcatcaagctgggcgtgcttttagcactatgggtactataagtgggaaggatcctaaggcgctcgatttccacctatcaaattggggctattacta

SEQ ID NO: 12689 - DNA, 466 bp, Zea mays
  Clone ID: MRT4577_11156C.1
gaaaccttattgtttatattcgtaacaaagcacatgagagctaggaacttattgaattcggtaccgggcggttgccggtaagtggaacacaacttgtcatcgagtccaaaaccagggtgggctccccttacacgggcccctgttcacatttatatctcaggatagacaagcaggactgatggtctgccaccaatagccattggggactacccactataggctggcagaaatatgtctctctactgggtttagaacatgtgcttgatcacgaagacgacgcggatggtgaagccccactcgacggagaaccaaaacacgaacttgatcacgtggtagttcagaacaatcccggccttggcgtcctacatgctcgaactgctgataccgcggaaggccactgacaccagatcctgctacacctactccataatacccttgtttggcccctaagacgcaggcttaatag

SEQ ID NO: 12690 - DNA, 331 bp, Zea mays
  Clone ID: MRT4577_111570C.1
aaaaaaaaaaaagtttctcttataaaaaaaaaaaggaagggtgggaaaaataatacttaaagtttaattataatgaatatggaaaaataaaaaaggttgctaagggggcattattaaaagtaaaaactaactgctaagggcattaaaattaaaaattagctagatcatttttacctatttttgagattgattaaaaaaagtgaaaaagatggaatggaatggaaaatgataacaatgaaagctgatgatcttaacttaaaaaaataccgtatgaaatgcactataaaattacctatttgacgatagctaaattgggcctaatatgttagaa

SEQ ID NO: 12691 - DNA, 492 bp, Zea mays
  Clone ID: MRT4577_111571C.1
cccacgcgtccgcccacgcgtccgatcaggctcagccagcttgaacaacaagttcaagtggcaagagtacagggtgtcttcttgggcactggtgagcagccaggttttccttctgccccttcaccagctgcagtatttgacgtggagtatgggaggtgggttgaagagcacagcaagctgatgttccagctgagggccgcgttgagcgagcacctggcggacgaacagctgcagagcttggtgagcggtggcatggcgcagcacgaggagctgctgagcctgaaaggcgccatggccagggccgacgtcttccacatcttgtctgggctgtgggtatcccctgctgagcgttgcttcctttggttgggaggctttcgcccctcggaggttataaaggtgatgctaaagcatgtggagccgctgtcagagggtcagatccttggcatctaccaactccagcagctggtgcaggcgagggaagaggctctgaac

SEQ ID NO: 12692 - DNA, 222 bp, Zea mays
  Clone ID: MRT4577_111572C.1
gcggggagccaggaccaggagaccgagcgagggtgctcatcgcagctcgggggcacgcgcacagcagccagatcagcagcgctgcatccccgaccccgagtactcaaggagcgctacgaggacgaagagcctcatcggacgccacaacaagggattcgcgcaacatctggaacagacggcagccgtttcacttcccttcctcagaggaggagtcgcagcaga

SEQ ID NO: 12693 - DNA, 304 bp, Zea mays
  Clone ID: MRT4577_111573C.1
gcccacaccataccataccatatcacaccagccttcctcgcgatctctccgtctcccgtctccaccgcgccctcctccccaccggattcggaggcgattcacggggccggtgcgcaggttgctgctgcgcatccgcggaggttgactaccatggaggatctgggcatcgaggcgaaggaggccgcggtgcgcgaggtggcgaactgctcccgctcccggagctcctctcttctatcgcctccattaaatctgactacctcgcgcggcagcagacaaatgatgcacaactcagtacaatggtggc

SEQ ID NO: 12694 - DNA, 299 bp, Zea mays
  Clone ID: MRT4577_111574C.1
ttcacttccaaccgagagaaacggcacgcagaccaggccgtctctcacggggctggggccaatcaccaatctacaggaccaccatcacgtccgcggagagagcgacggctacggcacctacaagacagggcccaccgatatcagaatcaaccaccctaccatgagcacccacgcgatccggctggtggacccagtagacggttccaccgccataaacgcatccaacggacactgcaccaggaacgaacaccttatgcagcacagggccagccacgacgccacccagaacagggagaaac

SEQ ID NO: 12695 - DNA, 431 bp, Zea mays
  Clone ID: MRT4577_111575C.1
gggaaggggcccgggtccctcccctttgttaagtccaaaaaccaaaaccttttttaaaaaaaaaaaataaatgggggcgcccaaaagaaaagaaaagaaaagaaaagaaaattgggttttttttaaaagcttttagttaccaattcgtcagcaagggaaaaaaaacgtgccccccaatccatgcaaggggccaaaaactgaaataggggaaaggcgggtttgctcattgggacaacaatcctttgggcctgttaggtttcaaaatggaattatcacttttttccgggtgggagttgtggtccttttggaaatccatttttgggctccctccaagggggggcttaaatcttttttcccctttaggaattggatcatccgattccaccttccggacaacttgacccattttggggtttttttttgaatttgga

SEQ ID NO: 12696 - DNA, 795 bp, Zea mays
  Clone ID: MRT4577_111576C.1
agagagaccagaaaaacagaacaagcagccttccactcagtaacgctgagcatcctctgcagttcctggcaatggcggccaccgggcactcttgcttgctcatgctgcttctcctcgcgagtttcgtcgctgatggccagccagtctccatgcccaacaccgaggctgccgcggaccaccttgcgctggtgtcattcaagtcgctgataaccagcgacccgtcgtcagcgctggcctcatggtcatggggcggcaaccgatcgctcccgctgtgccggtggcgcggcgtgacgtgcggcgctcggggcagccatcgtgggcgtgtcgtagccctggacctcagcaaccttggcctttcaggcgccattgccccttcggtaggcaatctcacctacctgagaaagctccatcttcccatgaaccggctcgctggcaccataccgtcggagcttggccgcctcgtcaacctccggcatgtcaacctgagctacaactcccttgaaggcggcatcccggcgtcactctcacagtgccatcagctcgagaacatcagcctggcatacaacaacctcaccgggggaatccctccagacatgggtgatctgcccggcatgcgccggctccaggtgcagtacaacatgctcgacggcccgatactccgctcgttaggctcgttacgcggcctcgagcttcttcatgtctccaacaacagacttacaggaatgatcccttcagaaattggcacctcacaacctagtaagcctaacctcactacatcacttgacaggtcagtcc

SEQ ID NO: 12697 - DNA, 348 bp, Zea mays
  Clone ID: MRT4577_111577C.1
aaaaaccagcacatataaaaacgggcacattggaacatacaccaagacttcgtttttatattaaaaaataaaaagaaggccctgctttaaacctttacgaaactacaattagttaaagacatctacggggaagggggaaagcactgaaaagaccctcccctacagatctaggcaagtataaaaaccggggtgccctccgacacaaaagggcaatcttatgccaagtaaggacgttaactgataacaacagaggatacattttaatactgggagcaggcatccaaaaaacaaccagcctggacgggaaacaaacagtttatgcactgtccgaagaagcgtacattttca

SEQ ID NO: 12698 - DNA, 309 bp, Zea mays
  Clone ID: MRT4577_111578C.1
gggggaaaccaaaaaaacccggaatgggttttacttaacataaattctaacaagaaatcggccctttttggcgcacatcccaacgcttaaaaggggggggcaaaccttggggcaaacgggtaataacttaaattcctcccgaggggaaaaaaaaaacatgcccgggtcggggcaggaataaaaaaagttcttggttgggttaaaaaaacggggcaggagggggcaccagccctggagggaccaccaattggaattgccagagaaacctggggggggcggaaaagaagacattcagggggggccccgttt

SEQ ID NO: 12699 - DNA, 701 bp, Zea mays
  Clone ID: MRT4577_111579C.1
cactactgtttcccctgagttgtgattctgatggaacattatgtttcatcaagatcattccagtacctgttatataaaaaaaaaaaaaaaaagattcgagcgaactcacccgagccaccagcccaccagtaccccaacacacaaaacttgcacaggatcaaagatggcggcgtcgtgccacgacgtggacgtgccggggaagccgacggagacgggcacggcgctcctggaggcggcgacgggcgccatccaggggttcgccccgatcaaccagatccaccagcacctctgcgccttccatttctacggggacgacatgacgcgacaggtggaggcgcaccacttctgcgcgcacctcaacgaggacgtgcggcagtgcctcgtctttgacgggcccgacgccggtgcgcgcctcatcggcgtcgagtacatcgtcaccgaggagctgttcctcacgctgcccgacgaggagaagccgctgtggcacactcacgagttcgaggtcaagggcggcatgctctttatgcccggcgtccccggcgtcgtcgagcgccgcgacctcgagcaggtggccaagacatacggcaagaccgtccacttctggcaggtcgaccgcggcgacgccctcccgctcggcctcccgcagatcatgatggcgctcacccgcgagggccagctccggcaggatctcgccgactgtg

SEQ ID NO: 12700 - DNA, 222 bp, Zea mays
  unsure (1)..(222): unsure at all n locations
  Clone ID: MRT4577_11157C.1
gacccacgcgtcggcgacggtccgggacgtggggcgcgccgttcaagtcggacctgatcgccatcgccaagttcaaggcgatggcgcccgggatgttcgtccaccccagggcgggccacgccggccccgccgcgggctccatcaccaacggcgcgncatggctgctgacggttgccgcgggccgcatggcgcgcgcgatacgcagcaccgtcaggctcggcg

SEQ ID NO: 12701 - DNA, 596 bp, Zea mays
  Clone ID: MRT4577_111580C.1
gctggactttcccaagtggaaggctaccctcatctttcactaatggcagactaggacaagcattacccaggcctgcaagcttgttaaggactaggaacccaagcaagaactcaccatgccaatcaaacctgttgggtggatatgtgggcaggtgttgaagaacttttctggaagaatcgaggggatccagaaagcaatcatggaccttgtagatgagtttaaagatgaatttcccaccatcctaagattatcacagtctaatcagaaaagagaacctgcgcagaaaacatccaaaatcaggatggctattgctttagctaagattaatcgagcaacattaattcgtggattaaacagcatatccagatcctccaaatcagtggccaaacttctgcatcctcagcttgcatgcagacttttagagctaagggacatatctggtcgtctgctgagggaagttaatgcgccgaggcaacccctatataacattcaggtcagaaagggttctttgtttgaaatcatctcctttccagcaaagactgctttaactagcataatatatgcttcatatgcagcactaatttatttggcagtct

SEQ ID NO: 12702 - DNA, 294 bp, Zea mays
  Clone ID: MRT4577_111581C.1
aaagatacgaatctcttaaaggggtcgaccccaagtttctgaggaacatgcgctttgccaagaagcacaacaagaaaggcctgaagaagatgcaggccaacaatgccaaggcagtgagtgcacgagcagaggccatcaaggccctcgtgaagcctcaggctgtcaagcccaagatgccaaagggctccagccgcaaactcagccgtctggctttcatcgctcaccccaagcttgggaagaagattcgaagctacatggccaagggtcgtaggctctggcaaccaaagcccaagg

SEQ ID NO: 12703 - DNA, 545 bp, Zea mays
  unsure (1)..(545): unsure at all n locations
  Clone ID: MRT4577_111582C.1
aagcagtggtaacaacgcagaggactttntttttttttttttttcttttttttggggggtttttttttttttttttttttttttttttttttttttttttttttttttttttttttttttttcccgaagggttttttgaaattaattaaccttgggcaaaaaaacagaaaaaagggggtttatggccccacccagggggggtccaaaagttggccaaacacagttcgggggggttaaaattggggttgttaaaaaaaccccaaattttctttttcaggggggggaatttaacgggacgggggccacttgatcgggttttctttaaggaattagggaacaatacgggggcccttaaaaaaaaaacccccccggcccttcctggggttggttaggtaaaccataggggcgggggggccggccttagagtttccggggtacttggggtggtccccagggtttgggggggaatttgggaaaattccatcacagggggggggggctaggagtggcttntaggggccccactctccctcttaggggggggc

SEQ ID NO: 12704 - DNA, 619 bp, Zea mays
  Clone ID: MRT4577_111583C.1
atcccggggttggctactctcctccttccggttcgggttcgggttcgtgtagggggtgggggttcggtttcacgggtgagcggtatcgaaaggcggcattcggatgtagagtaccggtgcttcgtcgggggcctcgcctgggccacggactaccactccctgcacaactccttcatcacctacagcgaggtcctcaactgggggggggggggacatttttatacgcagaggccccccggattctgcttcgtcaccttctccaccgtagaggcgatgcccaacgccatccagggcatgaactgaaaggagctggacggccgcaacatcaccgtaaacgaggcccagtcccgcggcggccgtggatgcggctgatgcggcgggtactgtggtggccctggaggctgcggctaccgcggtggcgggcgccgtgatggctgcggcagctactgaggtggcagcagctaccgtggtggcagcggctgctacagtggtggtggcggcggctaccgaagtggcaaccgtggcggcatgctacagcaactccgactggaactggacgaactgtatcgtgaggcccacacagtcaagttatcctgttcgctaccgtgttgtttaccct

SEQ ID NO: 12705 - DNA, 648 bp, Zea mays
  unsure (1)..(648): unsure at all n locations
  Clone ID: MRT4577_111584C.1
ggtacaacaaggagggggaanacccctcaacccaaaaggaagggattacaactcactccctaaacagcacaaaacaagaccctgccagctgctcaggcatgtatccaagaagccctgccgagcagctcctggagcaccaacccaaaaggatgtgattacaactcactccctaaccagcacaaaacacgaccctgccagctgctcagtcatgtagccaagaagccctgccgagcagctcctggagcaccttgtctccagccataacccaaagcctactctcagcttctacctcctgacagattgcggacacactgggatgccgaccatcgaacacacaagcatttctatgttcccataaagaccatattaccagaataattagagaattgagccctttccttttctccttaggcacccttcttatagccctgctccaccacgctgaaaaacctggggcgtcatggtcaggtgccaaatacaccagaccaacaggattcttgtccaagtttccctggagaaaaacagttcaacataatatgctgaatggtctcttgctcttgatcacacagggggcaaacactatggtgtggcagcccatgtttaagcaatctctccgcagtccagcacctgttcttgattgccagccat

SEQ ID NO: 12706 - DNA, 384 bp, Zea mays
  unsure (1)..(384): unsure at all n locations
  Clone ID: MRT4577_111585C.1
cccacgcctgcccgaatacatttttgcgctttgacaactaggacccacagtgacgggtttaaatgttagagtgttgaaaacccctncanaaaaaacaactagagactgaatgcattaacatctcctattgtcaagcagaaatctgcggctgaaactcaaggttactattactcacataattacacgaatccttacacagaaacaaaatatcataatacaaaatgcgtgtctatactgaaccaaatacgtttttacattcctcagatacttcccaactaggagaagggggcgtatctagatgattatgatgcggtgcaaaaggaactaactcacctgttctccattgactcacatggcaatatccttgcaccaagaaaaacctgt

SEQ ID NO: 12707 - DNA, 763 bp, Zea mays
  Clone ID: MRT4577_111586C.1
tttttttttttttttttttttctcgaaaacgcaggagagttgtgtgtcatttcattaagaaaggaataaaggtacaacaagaggggaagaccctgccacaacccaaaagtaagtgattacaactcactccctaaacaacacaaaacacgaccctgccagctgcttaggcatgtagccaagaagccctgccgagcagctcctggagcaccttgtctccagccataacccaaagcctactctcagcttctacctcctgacaggttgtggagacactgggatcccaaccatcgaacacacaagcattcctatgtttccacaaagaccatactactagaataattagagaattgagcccttcccttttctccttaggcacccttcttacagccctgctccaccacgctgaaaaccccgaggtgtaatggttaggtgccaaatccacgagaccaacacatagcaggattcttgtccaagttttcctggagaaaatacagttcaacataatatgctgaatggtctcttgctctcgatcacacagggggcaaacactatgatgtggcagcccatgtttaagaaatctctccacattccagcacctgttcttgattgccagccgtaagaagaacttacacctaaggggggcccaagacttccaaatccgtttccaaggtattataagcaaacactaggttgtataaaactataaattccccaattttccaacctcgggccctagaatcagcaacacatttgcattcgagca

SEQ ID NO: 12708 - DNA, 242 bp, Zea mays
  unsure (1)..(242): unsure at all n locations
  Clone ID: MRT4577_111587C.1
aaacaagaagacagttatagtcagaagtagtcagtacaagctatctagcaagcatggataaaataaataatnctagagaacagataatgtcnnatgaagagaaaacaagtcatcgatctgttaaagatgaagcaggtgctaatacggagatagaatcgtccgngctctggaaacctgtgaatagtcttgtagaagctgcgagcagtactaaggcactgtctagtggaccaaggacaactttg

SEQ ID NO: 12709 - DNA, 283 bp, Zea mays
  Clone ID: MRT4577_111588C.1
cgttccaagacactggagagtctgagcctcgccaacagtgatagtagtgttgaataggcttgagtgacgtgggttgggactagcatcgatcaagtctgctctctatgctgcatctgtaggctgcgtctatcgtgatatgcaatacactgctctaggtgatgatgattatatgaataatataatccccacacagagaaccaaccattacagtcgatcaccgtcaagcacaacgaccagctactcatcagccacaacccgtatggtcagactgcacgtatgcagg

SEQ ID NO: 12710 - DNA, 555 bp, Zea mays
  Clone ID: MRT4577_111589C.1
gttgtattgccttattttattttttgttcatttgcgcgaaacgcaaatattacaccaaaaaattctaacacatcgtgagtgacagctggctgggagaaaaaaaacacagggcgaacttccttccaaatgggaagctaagcaaaatatatccacagtgcacaccaacagaacaccggaccccctgaacaccaccgcgtgccctcgacacaacccccctggggattctgcaacccagggggagagacaagactcctggggagctttcaaacctgaaaaggaaattcgatgcccattatgcacatgactcctgatatcgggatgatgagaaccactatcccacacgaaagttccttcacaggagactttatttgacgaggcactcaccatcgaattcatcgccctgaacagaatatcgcgccgttagtcttattctccgcgagatgcctacccaaccccaagcccgaagggctctccagcaaaccacacagttgggacccatagaggaccgtgtataaaactcccgacaagtccaaccagtccacaagctggcaaagc

SEQ ID NO: 12711 - DNA, 471 bp, Zea mays
  Clone ID: MRT4577_11158C.1
tgcagaaatagaacggaggaaaaacacaacaaatcttcygccagtgattcaaccaatttagagaacacactcgaagcactkcyacyctagccacccmcagatcaagtagaacccttgagtagaagagcagccgttgcttttttacaaatagtgacaaaacaagcccmaaattggagttaagatcctctaaaataaatgggtcaaaccatcccaaatctaatacktctacctacacagtktagaagggttgatcatatggatgagcgtacctaggagccagaccaccyttctctkawttgatcycgacggcaagggggagggctgcagcaccagcccsggaggcccstcgagcacgcccccmgcygacccsagcacctccsttatgaccacgcccycygtygtagccbccytgawgcbatawtgctawctgcaacaacacaaaccacgcagagaccatcacagckccatcct

SEQ ID NO: 12712 - DNA, 232 bp, Zea mays
  Clone ID: MRT4577_111590C.1
ggaccggtccggaagacccacgccgaccgcacgcgatcgttaaaactgatgatgggctagcctcatgccctaaagcctgaaatggatgaggggctctggcaatagcaggaggcctacggagggctgcttcctaaggctagttatatctaaacagcagagcgtgtaccatccttaatcccccgggatggagggccaacagcaacaagatgcaccatcatcttacttctttaac

SEQ ID NO: 12713 - DNA, 386 bp, Zea mays
  Clone ID: MRT4577_111591C.1
gggtttgtggggtttttttttttttttttttttttttttttttttttttttttttttttttttttttttttggcgggactttgactttccaatccaaaaatcgggaaagaacacgaaaaccaagggggggggggtcttttcaatttgggccctggggggggggtgtccctttcaaccgggcgggaccttttgccagagctgttgacccctgacttggctgggagtctggaactggagatcgggtttccggatgccttccttctccatgcttcggaccagcaggagttttttcccggacttttttttcccctggggttaagggtaagcaccgcagggctttcttttcacccaaaccttcgccggatttgcgggccccacccccaaaa

SEQ ID NO: 12714 - DNA, 2562 bp, Zea mays
  Clone ID: MRT4577_111592C.1
atgaacgtcggcaccggtgtgcctgacgcggccgcccacgccagagcagtcgcaggactggcccctgctagcgctgtcgcgggtctagcccctactggcgctgttgcaggtctaccccctgctggcgcagccaccaccgacgttgacgagcgcctggccgcgcccctggccgctggcctctcctcgcctagcgccactgctgcggccagcgcacgcgccgccgaccttgtccccttcgggcttggcctaccaaactacccggcgtgtacaggcgcccttaccggtctcctatcaccgacccgcctcccgaggcagccgccctctgggttctccaccactcgtccgctcgttgccgatgccacctgggcttccacgccgctctccaccgactccaccatgtcatcggccatcgcggctatccaggctgccctggccacctctcaggagcgcgagcgcgccacgtcccgcgcactagaacaggagcgcgccctggccgccacactgatcgcccagatggccactacgcagcgtctcgccatcggccctcctccagtcgaccaagagacacccccgcccaccccagaggctccccatgcctctggactcgatgctgaccacatcgccgctctccacgcccaggcgggtgagagactccaatttgtcgagattcctcgcaaacgggaaaaagagataagcaaagaaaagccatgtatttgggagatagttgaaaatggaatgcactttgatagtacggataaccctgtattcattaatgagcaaattcataagaatgcacaagctaccactgttttgctagcatccttgtgcagggatgaatacaacaaggtgagcggcttggacaacgccaagcaaatatgggacaccctcaagatatcgcatgaggggaacgacgccaccgtgatcaccaaaatggagttggtggaaggcgagctagaaaggtttgccatgattaggggagaggagccaactcaaacatacaacaggctcaagaccctggtcaacaagattaggagctatggaagcacaagatggacggaccacgacgtcgtccgactaatgctaaggtcatttactgtaattgacccccatcttgtcaaccttattcgtgagaatcccaggtacaccaagatgacgcccgaggagattcttgggaagtttgtgagcggacgtatgatggtgaaggaggctcaatatgtggacgatgcattaaatggcccaatgcccatctacgagccacagcccgttgcgctcaaggcaacaagcagcaaggaggcgctacctagcaaggtggcagaagtagaggctgctgggctcaacgaggatgaaatggcgctcatcatcaagcacttcaagaccgctcttaaaggacgcaaggagtaccccaacaagaacaaaacaaggggaaagcgctcatgcttcaagtgcggaataagaaaagagcaggaagaaggagaagaaaaacaactacagaaaggcaaagggcgaggcacacctcggaaaggaatgggactcagactgctcttcttccgactccgacgacgaaggactcgctgcctcggccttcaacaagtcctctctcttccccaacgaacgattcacttgcctcatggccaaggagaagaagatagagctaaagtagataaaatcaatgaattgattgatgctttaaatgaaaagaatagactcttagaaaagcaagaggatattttgtatgaagagcatgataaatttgttattgtgcaaaaatctcttgctttagagattaaaaggaatgaaatgttgtcttctgaattatctgcttgtcatgaaactgtgtctagtttaaagagcattaatgatgatttaaatgttaagttagaagaagcaaataaatctagttcatgtgtagagcatgttattatttgtaatagatgtaaggattttgatgttgatgcttgtgatgaacaccttatgtctattaccaaattaaatgatgaggtggcaagtcttaatgctcaacttaagacttgcaaaattaattttgatcaattaaaaattgctagagatgcctacaccgtgggtagacacccctctattaaggatggacttggttttcaaaaggaaaccaagaacttaacaagccaaaaggctcccattcccaacaaggagaaagggaaggcccctatggcaaatagtaataaaaggaatcatgctttcatttataatgataggaaattttctagaaatgctcattataataggagttatgacgcgtttaattcacatgctatgtttgcttctagctctactttcgtgcatagtaatggtaggcctaggagaaattttgtgtctcatgctcctaggaaaatgtgtaataaacctactactgtctttcatgcttgcaacactacgtttgtactttcatgtaaaaatgaaaaagtggttgctagaaaattgggatccaaatgcaaaggagacaaggcttgcatttgggtaccaaaagctattgtgactaaccttgtaggacccaacaagagttgcgtacctaaaacccaagcctaa

SEQ ID NO: 12715 - DNA, 489 bp, Zea mays
  unsure (1)..(489): unsure at all n locations
  Clone ID: MRT4577_111593C.1
ccggggcttgctacncctaatcattttgttggtgctgacactaactgcaggcatatacaccctgttagttgcctacatgggagggggcctactctgctcacgaggtcgaccacgccctacgagcaaaaactcgcggctctgctacggctcccgacctgccttcggcgcacccaaggtcagtgctggcggaaagaccactccctgacgctgagcgccggggctcgcaggccgaagaccccataaggagagtgatgcactggcgtccctgggggcacactataagaacacagaccaatctgaccagatcttgaatgctatcttgcatgagcatgcttttgcagtcaaatctgggtacaaccatactgtaaaaaacaactggtatcctgtctgtggaaatcatatagcttagccactgcttgcacacatgaacaacatgaacgcatggtatagctggataactagctgggtggatatatatatgatatatgg

SEQ ID NO: 12716 - DNA, 262 bp, Zea mays
  Clone ID: MRT4577_111594C.1
gggaacccggaaaaatcacctttttcccaaacattatatacccaattgggttttttgggaagggaaggccccataaagtttaaggccttggaacagcctgccgaaaaagcttttttgggaacatgcagtttaaggggtgcttactgggggccccttccactagattttcgggttaattcgctaaatatgggggcaaaaaaacgcggggggtttctttttttttaagggacgccgggtttcccccggttcaattggttaaaaa

SEQ ID NO: 12717 - DNA, 648 bp, Zea mays
  Clone ID: MRT4577_111595C.1
tagctgctttccaaaatatcatgtagtctgcgagcttcttccaagggatctactgggaaaacttcttctatccaaagcatccgcatgttctgcactggaacagggaactccacattgaacccatttatatcatctgggctcagagctgatgcgataacattcatagatcccttgcaacaagcattaaggacaataaatttcagaagtttgtcttccaagcgacttaaggctttgtccgaaacagaagatgcatccaaatctcggcaatagaaatcaggaggaattccacagttctttacggtaacacttgtgtgctgcttcaacattttttcaagacagcatccaatagtatattttaattttgtgctattctctcctccttttgaaagctttaaattaacagaagcatccagatgcacaatttcctgcagcctaagcaataattctgccctagcatcatcagcccagccacagcacagggatgatccatcatccagaataaaaccagctagccgaacttttacattcggagtttcaccctgattagtcgatttgttcaataccagcacaaggatagttgctaccctgcagtgaaattgcatgggtctactgtctgtaaaatacttctgatgaaagaacaagcacggt

SEQ ID NO: 12718 - DNA, 265 bp, Zea mays
  Clone ID: MRT4577_111596C.1
agccggccgggccgggggctccggtatcggtgccctggccctgggtggtgtttggcatcacaccacttcactccccactccctgctcagagtgctcgcctgcccgccccgttcgccggccgtcgttgaagagctcgctcgcgtgaataaatagcgcctcactgcccggaccggagctcgggctcaccggagacgctcctcctcctcctcctcctccttcttcatccgtcccggcgcgctgagatcctacccaggagaggacagga

SEQ ID NO: 12719 - DNA, 1781 bp, Zea mays
  Clone ID: MRT4577_111597C.1
tttttttttttttttttttttttttttttttttttaacgaacaaagccttactgatagattttaatttgtgaaaaaaaatagagaagtcagttcgcctccacgtgaacatctcggtcttttcaatgatccaaagctgaacgctcatagagtacacaacaacgtttacagctttacatgttctctctctctaaaacaagtactgcatgatgttgaactgacgacgcgcctcacagccatgactatgcgttgaaaaattcacatctttgttgccagctatccaggttctcaatagactttttcttcttatccgaggaaatcaacatgtcatcatttcttagccttcctacctctcttcgcaggttgggttttcctcgtgccctttttagggccctttcctgcaaccttcgccttcttcggtgccttccccgttgttttctctgctttccttttggtctttgccttaggttgaccttcatcttcgttattattcagatcgttttgattagcctgtggttcatagagtttgtcaccctcctcatctgaatcaaatgtgaatccatcaagggtaccttcccaccatagtctctgcttcaaataaattggattgtggttccagttgaatgaagtcattcattatagcctctatctttgcttctgattgtcccacactcacaacacaaaatgtcctggatggaactatagttgttttgtatattgttcctttcaggtccaacaacaaatcctgttttgcagtaggaccatttgaaactactatcctcccaaccgcaccaatatctccacttaaatctatcgagtcaccatcacattcaatcaatgcctttgaacgttgaactttatctggaaatattaatggtaacctctgggagacagagttccctgtgagtttatcttgcacatcatcctcagcatctccattccctgcttggtctgcaccagtttttgttccagcatcctttgtttttttagtcttagtttgttgagcattctttctcttggcagtgctaagtgagccctcttcatggttatcttcatgggccctcgaaaggctgtttcccggtgaagcatcagaaccagatgaaagtgttaccatatccttctttggagtcaagcgtctaggagtattagcttgtttttcatccatagttgacccctcttttttactgacaaggttttttcttctagtagctgctgagattttgtttttattttgtgaagcaccatctctatcacgtgcatgatctggactagcgtgcttctctcccttgttttgttttctagatgtactggttcttgtaggactagcttcaggggaggtatctgaaccagaagaaagcatcacaggtgccacagttggtgcctgaaacgcgcggagccagtcaggatcatcttcttcgtcccccatgctagctgctcagttgcgcggttgcgccgctcgctggaaccgtggaagtgagggagagacgggtcagatgttgagggcggtttggcagcgcaccaaacaagcaactagcctctctagcttcaactcccagtcccaggcactcttgctcccagccgctctctggcttcgtaaatcaccccttcggcagcgcttcttcccactcctccagacgaaggcagatgcagctccccacgccgccgcagagaaggaataggagggcacgcgggggagaagggaggggaaggcgcggcggaccggcggcgcaggcgcgtcgatgtgaagcaacgccaatgggccagtcgcggaagcggagcccgg

SEQ ID NO: 12720 - DNA, 578 bp, Zea mays
  unsure (1)..(578): unsure at all n locations
  Clone ID: MRT4577_111598C.1
ggtaccctcgggctcggccgggagacccgtcgcacttggatagacaacgtcgccgacgatgctctacagcggggacaagggccgcgcgcaggatactttggtcgtcttcgaacgcgctctggtgcataagtgtagcttcgcatcaagggccttccgctacaccgacatcgagaggagaagcaaccgtcaacgtcgacccgagtgcacgtcgtctttggaggctaaccatggggccaggtgggctcgcctgcttccactgatcgtgaacctagagcaattggtgctggcgagccaacctaggcgagaggatttctcgtcatagctgctgcgccaccacggaaccacagaacgcgtgggcagagcaatacaatgtcctaaattcaggtaccgccaagatgaggagcatgaaggatgtcgtgatgagtctgtgagaggtctatgtcggcgtctactagtcaactatgggtgcggaagatcgttgtcattatatgatgaatttattaagctattntgtatagaacctctactatataatanagatatgactttgctttcggaaaaaaaaaaaaaaaagagcg

SEQ ID NO: 12721 - DNA, 340 bp, Zea mays
  Clone ID: MRT4577_111599C.1
ggatacataacatgcatgtagcattattcatgcctaaagaacatgaccaccggaccaccggttgctacaaccaggcacaaacggctaaatacattaaacacccagtgtccacaaacaggtactgacctaatagggaagcaaacaccgcccaaatggaacagatccaactctccaggggagggggggaatcaaactaaaagggggaggaacacaagctctatctatatacactagacttgacggtacggtgcagggcaaggacccaactactgctgcgcatggaggctggcgggaacaccaccacaccacagcatgcagtgatagacagacgaccctacta

SEQ ID NO: 12722 - DNA, 1630 bp, Zea mays
  Clone ID: MRT4577_11159C.1
attggtacctcgagccggccgggctcgtttccgcgaggacggataggacattcggcgttcctaggtaccccgctgcttccgtgctcacctcgcctgcagggccgcagccgctggaagaacacgaagacgacgggagtgcggggtggcgtcgccgctggagcaccagctgtagccgccggctaggcctccgcgccgctctccgtggccaacgcgccgtcatgcttgcggcgtcggcgcggcggctgtccgccgccgcctcgttttcctcttcttccatgcgctccagccagctcgccgccgtactgaaccaacagaggtggatgcacgacaggaacaagaaggcgatggagctggtggccaagggatggagtgcgctccaggaggtcgaccgcgtcatcgactacgccgatctcaacgacaagcgcctcatcccgcttctaaggggcgctaaggaaaactttgagctggctttggagattgacaatggtaatacacatgcgaggtattggctgggaaaaatgcatttcaagtatcatgttcctggtgcttgcaaggcagttggtgctgctttgttggttgaagctgcaaatatgggtgatccagatgcacagtatgaacttggatgtcgactaagaattgagaatgactatgttcagtcggatcaacaggctttccattacattgagcaagctgttgatcagctgcaccctggtgctttatatcttctcggtgctgtatatctaactggggactgtgttaagagagatatggcttccgcgttgtggtgttttcatagagcttcagaaaagggacatgctggtgcagctatcgcatatggatccttgcttcttaaaggtgctgaaatacctgaagttattacaaggttcaactcaggcaagagtccatcaactgggaaaatgcggaaaaggacccaacagcaggatccagtaaagctagcgaaagaacagtttcaaattgcagctgaggcaggctgtgatctcggtctgcggtggttgaagaggcttgaagcttatgaaaaccaagaagaaaagctaaagcaggttcagcaatgatatccactgaaagaatcccattgcatttgtcgcatacaagtatggtatatggcagcatggttgctgcacataggtataccaataatttcctttcctgccttcattatgttggaggctattcgatcctcggatgttcgggtcaactttgcaggaagatatactgaaatttggatatttagactaacttcttggattataggcgattggatgttcactttgtacgatgtattagcgttgacattactggaagccctaattgtgagaagtagaaacatatcatgtgtgttgctacgggcattatggatgatttagaataaaattagactatataactacttatacgaaggaataaattgtggcatatgatgatgtggataaaaaaaaaaaaaaaaaaaaaaaaaaaaaataaaaataaaaaaaaaaaaaaaaaaatttaaaaaaaaaaaaaaaaaaaaaaaaatatatattaggggggcccccccccatttgtggtttctccccccgaatattaatccgggcccgggccccggggggttcccatttttttttatgggggg

SEQ ID NO: 12723 - DNA, 2280 bp, Zea mays
  Clone ID: MRT4577_1115C.1
atttcagttcggctgctgcaagaaccgaacagagcagctgcgacgagcccaaccagtgagggggagagatggcccgtcgcgccgtcgacttgctcgtctttttttttttttttttttttttcctttttttttttttttttttttttttagcggcagtcaaacatatcattgcttgatcatcgattaaagaaaccacatagttcacccttgagtacatcagcggggttttttttttcatgcccttaaaaaacagtgcatgaatactacacattaaaactgtacatataccacagacattctatatatggacactacttcatcttttgtctgatatttcatcaagggcaggtctcaagcccatattgcaagtgatgacatagagagcgcaccgaggaacaatgcgatgtatgccatcacttgctgtcgcagggtccctgtcatctttccacccaagaaatctacagcaatgagatccactagtgacatgtatatgagaatgccagcagataccgagtcaagaatgccctcgaccacaagggcccttgggctattgggattgtaaaatggggtcatgcctgccccagcagctattcctgccggtgttgtgatggcgaaaaaagatgccattaaaactgctgaaagggtcttgaattgttaacaagctgtgcagcgttgggcaagaaagctagatcggtacctcgagttttgcgggggcaagaaccgaacagagcagctgcgacgagcccaaccagtgagggggagagatggcccgtcgcgccgtcgccttgctcgtcgccgtcgcgctcgcgaccgtgctcctgcatacggcggaggttgcggcggggcagaagaagccggcgacggccgcgaggcgggaggacatcccctacatccggtgccaggtgtgcgagcggatcgcgcgcgagatctccgcgcaggtcgccaagaagcaccaggctctcccgccctccaagaaggtaccggagatcgagatcatcgaggtcgcggagaatgtctgcaacctaaagaagcaggaggcggattggatgcttcggatcgatatcgtcgagaaaggcgacaagctcgagcttgttgagcaagatgaggaagggcattgcaatgcagaatgcaagaccattgagcgtgcatgtcaggaggtgataggatatgctgataccgatgttgctgagtttgtatacaaaaataacccctcggtcgatcagcttatgaaatttctctgcaaagatctttcgaaagcatgtgccaaggacccaccgccagttccaaaagatcgtgtccctggggaaccatttgcaaggaagccatcaaaggatgctgagatggaaaagatattgagatcaatggagggtatgccgggagccccaagcatgaaaatgtactccagggacgatctgatgaaaaataactttggtactgaagacgacgacgaggaggatgatgaagatgaggatgacaacttcccaaagaacttggggaaagctctgaaaaacaagggctctcaaaagaaagatttgaaacagcaagtcgtgcagcagttcaaggataccagcaagaagttgaaagggcatgtaaacaaggtgtccggtatggtaaagaaatggtggaaaggggcaaagaagcctgccaaatccagcaaaagcaaaactgagctctgaagcattgttgaatcacgtcagtaaatctcatccgtcttccacttctcctggagcaaagttttagatggttatcggaagataaaagttacagcaacgcaaccagggcttttgttagagagtttagctacataaaacgtgtacaattgtttgtttttaacttctgttatttgcagtgtacactagtaaaagaactgaactccgatgatagtttttttccagattagtcgtgtcccaattggtcgttatagtgtttgatactctataaaactaaacagctggtgacgccagggaattagtttattggctatgcataatcgaacttttcactaattaaaaaaaaaaaaaaactcgggagtgctgcgacacaagtggcctgattgtgcatgggctccgcgacactcccagtgacaatccgatgatcacagagtgtgacacaatccccatctccagtatctgtgacacgacaatggagcgcacatgtgccgacacctccccctcgctaccctctacttgcaccggctcatgcacatggctgtggctgtggctgtggctgtgaccgtgtccatggcagtgcgtttgcaacagcggggccttgcgctcgtcc

SEQ ID NO: 12724 - DNA, 499 bp, Zea mays
  Clone ID: MRT4577_111600C.1
gtctagttctagaacgcgagcgggcgccctttttttttttttttttttttttttttttttttttttttttttaaaatccaacgacaattcaatcgcatttcttatttccccccagatgacaagatcagacatatgtataaaaataaaaatgccacatatctgtagcgcacagtaaggggaggggggtcaataacaaacgagcatttgtagcgctgaatcacactcgaaaaagcgtgcatgatgagccatgcaatgcaaaggcagcttttttgttaacaaaaagctgaataatcagatgtgctcaaagtccttgagggcccaccggccgtctgcgcccctgaccatgcccttgttgagggccacccgccacctgggcggcacggggtactcgtccctgagcgcgtcggcgcccttgttgacgagcgccacgtcgcggcccacctccagcctgaaccctccggcggcgccctgctcgccggccacgccgtgcaggtagcac

SEQ ID NO: 12725 - DNA, 721 bp, Zea mays
  unsure (1)..(721): unsure at all n locations
  Clone ID: MRT4577_111601C.1
ccggccgggacatctacaaaacccccctccccctccatgaattttctacgacgcttcactccgcttcgatcattctctcgaacattcacaacaacacgcgccatcatgtctaagctttacgttggaaacctgtcctggaacaccaccgatgagactctccgccagaccttcagcgagttcggcgaggtcaccgactctatcatcatgcgcgaccgtgataccggccgtgcccgtggtttcggtttcgttaccttcagcaccgaggagcaggctaccgctgctgtcgatgccctgaacgagcaggagcttgacggtcgtcgcatccgtgtcaacgtcgccaacgcccgtcctgccggcggtaacggcggcggcttcggtggtggccgaggtggcggctacggtggtggtcgaggtggttacggcggcggtgaccgcagctacggtggtggtgaccgcagctacggcggtggtgaccgtggtggttactaagagacttgacttggcttttgacttcttcacttgacttccggatcaccagacgcgggttgacatgtatcgtcgaccccaaacgaaaaaataatgaatggatgatgggtttggccgctaaaaacccagtcgcttgagattgacggtggagagggacttttcaaagataccataagacaacagacagaactctgaactttttctcatcaaaaaaaaaaagaaaaaaggngcggcc

SEQ ID NO: 12726 - DNA, 922 bp, Zea mays
  unsure (1)..(922): unsure at all n locations
  Clone ID: MRT4577_111602C.1
ggtctgcgaggcgacgaaaaaaaaaatagggcttcatcccaccgcgcgccactggaccttgaacggttgaacccccctgcctccccagttccccagccatggcggcggccccctacgaccgggaggacggtctgcagccgtcggcgccgccgcacgcggtggacgcttacgatcccaactacgtgccggactccgtcaagaccttcgtggtgcacctgtaccgccacatccgggacaagaacgtctacgagatccaccagatgtacgagggcggcttccagcgcctctccgaccgcctcttccgcgacgcgccctggccctccgcggaggccgtcgcaccctactgcgacggcgatcccgtcttcctcctcctctaccgcgagctctggttccgccacgcccacgcccgcctctctccgctcactgccgcgcaccgcgccgagtcctggaccaactactgcgacctcttcagagtcgtcctccacggcgtcgtcaacatgcagctgcccaaccagtggctctgggacatggtcgacgagtttgtctaccagttccagagctgctgccaataccgcgccaagctcaagaccaagaccgaggacgagctcaaccagctcaagcaattcgacaaggcgtggaacgtgtacggggtcctcaactacctgcaggcgctggtcgagaagtccatgatcacacagatcctcgagagggagaaggagggcctggagcagttcaccgccaccgatggctacgactacgagggcgggagcaacgtgctcaaggtgctcggctactacagcatgattggcctcctcaggatacactgcctccttngggattacccacactggctcaagtgcctcggtcccatcgacctncaccagcaaggggtctacagcattgtcatcgggagcacatttcc

SEQ ID NO: 12727 - DNA, 340 bp, Zea mays
  unsure (1)..(340): unsure at all n locations
  Clone ID: MRT4577_111603C.1
ccggagactaggaccgaatcggagatcttaacaatcgatataaagcctcgctggaagaagggaactaagatcacattccccgacaagggaaacgagcagccaaaccaactcccatgctttggtacagatcgttgtaccgcgcgatgaggtttctcttcaatctattctaagtttcgatcattattgaacaacacttcatggatatgcaaattttgaacttggttctctgatgcccacagaactgaaagtgtggtaaccttcgaccagttcttcatcttctgtnnnnnnnnnnnnnnnnnnnnnnnnnnnnnnnnnnnnnnnnnnnnnnnnnnnnnnnnnn

SEQ ID NO: 12728 - DNA, 2132 bp, Zea mays
  Clone ID: MRT4577_111604C.1
gctacgagccaggcaagcaaaaaatagggtttcatcccaccgcgcgccactggaccttgaacccccctgcctccccagttccccagccgcggctcgaggccggccgggccgggctaagccacagcaagcaagcaaaaccagcatctcctccatcccaccccgcgccgccgccgccgccgcatcccctcccgtcccgaaccctaacccaactccatcatggcggccgcccactacgatcgcgaggacggcctgcctccatcggcgccgccgcacgcggcgacggacgcgtacgaccccaactacgtgccggactccgtcaagaccttcgtggtgcacctgtaccgccacatccgggacaagaacgtgtacgagatccaccagatgtacgagggcggcttccagcgcctctccgaccgcctcttccgcgacgtgccctggccctccgcggaggccgtgtctccctactgcgacggcgaccacgtattcctcctcctctaccgcgagctctggtaccgccacgcccacgcccgcctctccccgctcaccgccgcgcaccgcgccgagtcgtggaccaactactgcgacctctttagcgtcgtactccacggcgtcgtcaacatgcagctgcctaaccagtggctctgggacatggtcgacgagttcgtctaccagtttcagagcttctgccagtaccgagccaagctcaagaccaagacggaagacgagctcaaccagctcaagcagttcgacaaggcgtggaacgtgtacggggtcctcaactacctgcaagcgttggttgagaagtccatgatcacgcagatcctcgagaaggagaaggagggcctggagcagttcactgccaccgatggctacgactacgagggtggcagcaacgtgctcaaggtgctgggctactacagcatgattggcctcctaaggatacactgtctcctcggggattaccacaccggcctcaagtgcctcgcgcccatcgacctcaaccagcaaggggtctacaccattgtcattgggagccacatctcagccatctaccactacggcttcgcaaaccttatgatgcgcaggtatgttgaggccactcgtgaattcaacaagattcttctgtatatcctcaagtacaagcagtaccaccagaattcccctcagtatgatcagatactgaagaaaaatgagcagatgtatgcattgttggcaatttgcctatctttgtgcccacagaacaagctcattgatgaaaatgttagcacccagctgaaagaaaagtataatgacaagatgacaaagatgcagaggtatgatgatgaagcatacgctgcttatgatgagctattctcgtatgcttgccccaagttcattacaccgtcgcctccaattctggaccagccgctaacaaactataaccaggatgcataccgtcttcagttgaagttgtttctctatgaagtaaagcagcaacagttgctttctgggattcggagttatctgaagctatattcaacaataaccattagcaaacttgcccaatatatggaagtggatgaagcaacactaaggtcgatcctgatgacatacaagcacaaaatgcatgcagttgacagtgaaggaaagatagtatcaagtgcagactttgacttctacatcgtcgaggatgtgattcatgttgtggagtccaaacctaccaagcgtcatggtgattactttttgagacaaattttgaagtttgaggaaatgattggtgaactggagaaggtacagcttgactgaaatctgatagcgatcatggagagaaatgtcactgtttcctttttgctctcttttgtactccgttgaaaccccatcttttttttttttgtttccttattgactctgaagcccgttgaaaccggccattattaaccgtgtaccgtgtaatgttacttactagtaaattgaaagcccattgtttttttgtttccttattgactctgaagcccgttgaaaccggccattattaaccgtgtaccgtgtaatgttacttaggccctgtttgtttcggattataatctctctagattatataatccagcgcaaataattcaataggtaaacaaacacttaaaaaaaaaaaaaaa

SEQ ID NO: 12729 - DNA, 264 bp, Zea mays
  Clone ID: MRT4577_111605C.1
cttttctttcgtcatgctcgcttcacttgcggagaagggtgcattcccccctgcctgcgacgccaccgtcgcttctttccagcggtcccgacgactctctcgcagcggcggcggcggcggcactttctgcgagaatctgttaaacgctggccggtccatccggcattggatgatgatgatgactgcaccagctgtttgaaatgaacgggggaaaaatgcagctgcgagaatctgttaaagcgcttttgccacgagagcacgttt

SEQ ID NO: 12730 - DNA, 359 bp, Zea mays
  Clone ID: MRT4577_111606C.1
gtccgcttatgggggtttgccggtttttcttttttgcggtaaaaataacaatatgttatatttttcacacagtagttaacaaaagtgaaacttttgtactcattcaaagacagcatgtatctccttacaatgaatacgggccattttcgcttttatgatcaatatgcatggagtgttaatcctgctacaaaatttttatggggggccacagggagaaaccttttcccctcaaacgggggccaagcgttatacgacatctggccttgcggatttagggtgtatgataacaccttgtgccgacaggaatggcgagaagtactcttagttcagccaaaaagaccaccgttgcctttgttccc

SEQ ID NO: 12731 - DNA, 485 bp, Zea mays
  unsure (1)..(485): unsure at all n locations
  Clone ID: MRT4577_111607C.1
cccacgcgtccgatcgcaactcgatctcttccaatcctacggcggcggcggcggcacgcggacgtcggcgtcctcgcggcgcccctgcacggcggcggcggtgccctcccgcgccggctcgggcgccttcgcgtacgacggcatgcgcgccacgcctctgtccacgtccacggccaacttcacgcgctccctccgcaaggcggcctccttcgcgcacaagaaggcgccccccagcgcncgacgcgccgccgccgcggcgcgcgctgagcagcaaggagaacagcagcagcgccaccatcggtggcggcgtcgaaggaggcgctactggagtcgccgcaccggncgttcggtgccggagcctgcatccgccgtgaacgggtcggccctgggagccgacaaggcggaagcggagcacgggacggtggtgaatgggcngggcgcgctgcgggagaccgtggcgccgcgcagaagcatgagccggagcc

SEQ ID NO: 12732 - DNA, 393 bp, Zea mays
  Clone ID: MRT4577_111608C.1
aataattacggtccaggggtttttgtttttttgtttttttaaaagttccaacagcaaaaagtttgtccaggggccagggttaatgaaaaaattaaaaatttcgaaccccctgtttttattttgaacccgggggggggttggggctaatatagaagagccgactgcctgcaaattataaccgggaccgggacgggggtgattttccactgaggcagggtcctggtaccttgaagactgacccccgccacgggacacttttctttgatttttgagggatgcactagacactagctcggaccaaaaagactgtgaagttttatttgggggagaccacaaactctatgctaaggataaaaggttggcaccttgcacagggttcaaaacccaggacct

SEQ ID NO: 12733 - DNA, 1262 bp, Zea mays
  Clone ID: MRT4577_111609C.1
attcgggttgatgatgcaacattgctccccccctgacccgccctccgtgccgtgcccactcccccgcagcttcgggcccctgccatgccgtcctcgtcgtcgctgatccaaggcatctccatctccgtctccgacgacgacgaggccaccggcaaggtgcgcgtccgcgtccgccgcaagcgctcccgcggccccgcatccgcttcggcgcgccgccgccgcatcctcttccgcgccgcgcggctgggcgtgccgctcctcctcgccgccctcgccgtgtgcctcctcctctacgagtcctaccgcctcacgccttcccgctcctccacactgcctccgccgtccttcgcggacatcagccgcctctcccgcaacgcccgcgccgccgatggcgccaggaagtcatgcctgaagtttcttgatcctgagaagcttcaaaatttggaactaccagaaattcctgaaacaaatttgtcgatcaaggaagttctgtacagatcaagtctgccccatatcgtcaatgatacaccaccacatacagagaattcccggttcaactcgttcacaggatatcagacactcactgaacgagaagaaagcttcaagatgaagaaaagtgtgacagtgcactgtggcttttataatgaaaatggagggttcagagtttctgatgttgacagagaatatatgagatcctgtgaagtagttgttgcaacttgtgcatttggtggaggtgacgaccttcatcagcctatagggatgaccgaaaactccatcagaaaggtttgctatgtagctttctgggatgaagtcacccgtgcagctcaagaggaggaaggacacacgatcagtgaagaccttgtgattggcctatggcggatcattcttgttagcgatcttcctttctcagatcaacggttgaatgggaaaattcctaagctgataggccatcgcctcttccccatggcacggtactcaatttgggtggattcaaaatctcagttccggagagacccattgggagtccttgaagcccttttgtggcgctcaaactcttctctagcgttatctgaacacggagctcggagtagcctgtacgatgaggcgaaagcaattgttaagaaacacaaagcaactccagaggaagttgaagtgcagttggatcagtaccgacgaggacggcatggcaggggcccgaagctgcggggagaggagtgggcacggcacggagggcgtggggtcagggggggagggactgttgc

SEQ ID NO: 12734 - DNA, 847 bp, Zea mays
  unsure (1)..(847): unsure at all n locations
  Clone ID: MRT4577_11160C.1
gggtacctcgaggccggccgggaaggtacccactgcttccgtgctcacctcgcctgcagggccgcagccgctggaagaagggtaagacgacgggagtgcgggatggcgtcgccgctggagcaccagctgtagccgccggctaggcctccgcgccgctctccgtggccaacgcgccgtcatgcttgcggcgtcggcgcggcggctgtccgccgccgcctcgttttcctcttcttccatgcgctccagccagctcgccgccgtactgaaccaacagaggtggatgcacgacaggaacaagaaggcgatggagctggtggccaagggatggagtgcgctccaggaggtcgaccgcgtcatcgactacgccgatctcaacgacaagcgcctcatcccgcttctaaggggcgctaaggaaaactttgagctggctttggagattgacaatagtaatacacatgcgaggtattggctgggaaaaatgcatttcaagtatcatgttcctggtgcttgcaaggcagttggtgctgctttgttggttgaagctgcaaatatgggtgatccagatgcacagtatgaacttggatgtcgactaagaattgaggttttcactgttcatacgggtcccttctgctcattgggtcaatcacctagttttttttgttaggtagtgggcattttatattctggaatttcttttcattttaattgatggtccatttatgttgctcttgtagaatgactatgttcagtcggatcaacaggctttccattacattgagcaagctgttgatcaggtatgcagtgtgctgcttacctgaatgccaaaaaaaaaaaaaaaaaagcggnc

SEQ ID NO: 12735 - DNA, 193 bp, Zea mays
  Clone ID: MRT4577_111610C.1
gggcacgctgtcagccaccagcacactggggggtttcctctactgccggcaccatcgcctcgcggccgcctgccgctccgctcgagagtttttatgtgaagattttttgaatccgacaagatggtgctgaagacggatctctgccgcttcaggggggggaggatctatcctgataaaggcatgcgagctattg

SEQ ID NO: 12736 - DNA, 774 bp, Zea mays
  Clone ID: MRT4577_111611C.1
acaattcggagagcgaaaaggcggacgccaagggaggcagcaagtcagaggtgagcggtgagcagagggttccgtcggtgcggcagtacaaccggtcgaagctgccacggctccggtggactcctgacctccacatggccttcgtccatgccgttgagaggctcggtgggcaagagagagcgacccctaagctggtgcttcagatgatgaatgtccggggcctcagcattgctcatgtaaaaagccacctgcagatgtacagaagcaagaagctagaccaagatggccgcccgaggggagcagtttcctcagtgtattctccaatggatttccatttcatgagagctgatcatcggcgcttccacaacatgtccttcttccaaagagcagcagcctcggcctcctcctccggcgggcaggaacgcggcggcttcttcgcgtcgaggaacttcagcactccggagttgagccggctctatggactcctccaccatcgcccggctccgacccaaactttcgacttcagaaattccagtttcagaaatcatgagtggccgtgggccgcgtcgtcgaatcagcaggaggcgatgacaatctccaggaagcacgttgtcatgccaccctcgacatcgccgcagacacacgcatcgcttgcatcttccgcagcgctgaggagcgatcggcggtggtggcctttcactgaggccggcgctgctgtcgccgccggcgagcacagggcagggacaggagttaccagtgtaaaattcgacaact

SEQ ID NO: 12737 - DNA, 204 bp, Zea mays
  Clone ID: MRT4577_111612C.1
agcagacttatatgcagacaacatgcagtcaacatccatttcaggagatagaaaaggtagtagcgggtgccttacttagatttgcgtcattagtgaacttgcgacattgctgctggcaaacatttggccatatctgctctactatatatacctcaacaacatccattgcctgttgatgaggatggctacattgactacattttc

SEQ ID NO: 12738 - DNA, 477 bp, Zea mays
  Clone ID: MRT4577_111613C.1
gccggccttttcgaaatagtaactttatgcatcaattcttatctgaggtagagaagagtactgaagtctctattggtcagtggacaaaagtagaatagtgtgaaggagtcgagtacacacgtgaatcttcttatattaaatatttgggtggatcgattggaccaaaatcgacgaaatgctatttaaaagaagacatgatgcatttggacatcaatgattatatctcacaattaactgtgactcaaacacccaatgtaccatctggtggctcatttcaagtcaaaacacgaacatgtatttcatatgttggacaaaggcaagtacgtgtgctggtcactgtactcgtggagtttactaaatcatcttggctgaaatctaccattgaaacggcctcccttgatggacagccaaattattaccacaatctccattttagccatcaacacatatttgcctcccccgccacgcccctcatcc

SEQ ID NO: 12739 - DNA, 317 bp, Zea mays
  Clone ID: MRT4577_111614C.1
cgggggaaaaagggggcaaaaggctaaaccctttaaaccagttaacccattcccacggggcatgagaattcacaacgcacatgcttgtacacaaagggggcaagatgggtcttcataaaaaaaaatttcccggcaaacacccaccatttgcccaaggtccaaaaaggggggggcacataccccatgtttctaccagatgttcagtccacggggccccctcgggggcggacccaaaggccgacccgtaaaaaaagcctgaaagggggggccaaaatttcggggccccccaaagttcactacaatttttagggggaaag

SEQ ID NO: 12740 - DNA, 456 bp, Zea mays
  unsure (1)..(456): unsure at all n locations
  Clone ID: MRT4577_111615C.1
attcggctcgagcgcccatggccatggcagacgaaacccttgcgccctcgtcgtgggtggcaaagccctaaactttagtccacctccatttcggaaccttagccgggcgttcctgcgccgctgccatgggctgcagtcgccatgtccgttttgtctcctccggcgtcaagctaccgtccgcgtccgcgccatccccgttcccggcgcccgctcccgcgctcctctctgcggcgctcccgttcgcgcacatcggccgcgccatcgacgccgccgcgcgccgcctgggcgcatgcctgccccgcgtcccggttgcacgggccgacacggctccgcccccgccgcggaggcacgggaaggacggcggaggggccgaggagcgggtgctgatcagcgaggttgcggtgcggngaaaggacngngagccactggagcggcccgagctggaggccgaggccg

SEQ ID NO: 12741 - DNA, 841 bp, Zea mays
  Clone ID: MRT4577_111616C.1
gccggccggtctctgagtcagtccctcccagcggctcgccatgccacctgctcctccagtcctctctccatccctctccggctctccgcctctccccctcgtgaggaggtgaggagaggagaagcaacagagggggccgcggcgaccgaccgaccgaccgacgtgtcctgagtcctggtgctggtggtgggtgcttctcgttcctggcgggtccatacacggcggggtgctagctaagggagaggtgccggcgtcggcgtcggctgcgaggagcaggagcagcaggccaccgacggattcggagatctcgccggagaagatgaagagatctgcatctgtgagtgcccctccctactgtccgtgcccgtgccgcgctcctcgtctcccgggatcgcgggaggcccaagggacgatggatcgtgccgttacccgtcacggggttccggtgagcagtgcccgaccgacccgttgccctttctgctgcatctcaataccgccgttggcccgaggagattggcggacggcctcacgcgctgctgccgtcctagatcgatcctgcattcctgcgtggcgcctgctggcattgccgcgtgatctgccgtttgttttcccctgtcacttgatcgaatatacatatttatttctttttgcaaaaccggtccgtgttccaaacaattggtatatcgccttagttgaaggtgtcacattgatccacaattcaataaagcaatttttgagataggtaacacgagaggaaactaaatgcgttggcccctctcagctttgtgtgccatgttcagatgctataaaaaccatctcgacgaagatttcagtgaacttt

SEQ ID NO: 12742 - DNA, 597 bp, Zea mays
  unsure (1)..(597): unsure at all n locations
  Clone ID: MRT4577_111617C.1
gagagccacaccaccgggggggagagcgaccaacagaagaggcccnccccgagcggcgggccccaggcgggagcagcaggacaccnagcacggagcggagcacaacaaggcncccgcgccgcaaccgccggccccagggncancgacgacggcgccggcacgncngggagcgcgggggggaagaggcngnccgaggccgggaaaaccgaccngcnngagcnggaagcgacggaccacagcggcgggcggaagcacaagacgaacngcgccggcagcaacgacgaggcaggcgccaaccgggcggagggcgagaacggcggcaagacgaaccccagccggcccagcgncaacgccaccccgaagcgccgcaacggccgcaccgacgncgactaccncgcccagaacgncgacaaggaggacggnggcgngcacgaagaagaccacgnccagaagagaagcgaacnggcggacagcgcggaagagaagggggagaagcacgcagccacngcgcacgccaggggcagagacgacangacaagcccggccangcagcgccncaacgaacaccagccgaacgggccggcgacgccggcggac

SEQ ID NO: 12743 - DNA, 454 bp, Zea mays
  Clone ID: MRT4577_111618C.1
gcagatgctcaccgtacggatttgatgaccattacaagattcgtgttgaatgaacaatcaaagtatccagaatctcgtggtgatttcaccattttgcttagtcacatcgttttgggttgcaaattcgtttgcagtgctgttaataaggctggtttggctaagttaattggacttgcaggggaaacaaacattcagggtgaagagcaaaagaaacttgatgtgctctctaatgatgtctttgtcaacgctttggttagcagtggtagaacttctgttcttgtctcggaggaagatgaggaagctacgtttgtggagccatccaagcgtggaaagtactgtgttgtttttgatccgcttgatggatcttcaaacattgactgtggtgtttccattggcacaatttttggaatttacacgttggaccacactgatgagccaaccactgcagatgttc

SEQ ID NO: 12744 - DNA, 347 bp, Zea mays
  unsure (1)..(347): unsure at all n locations
  Clone ID: MRT4577_111619C.1
aaggggggaaccacgcgnnncgggaaaaaaaaagnnaaaacatatataaatttgaggacgcctataaaacgggggagccgtgggggtacaccttttaatcatccccaagaccaaccccaagaacgcaaagaggacttttgaaaaatcattaaccaacatgtaaaccaacccctccaatgtcgtttagcgtgaccacactacatgtcctggcgacaagaaaactcttggagggtacaccctacaactcctagcaacgccgaataacatttgctctctgctataagatcataccaccgctctctgtgccacctcacagcataaacaaaaccctccatactttgttatac

SEQ ID NO: 12745 - DNA, 347 bp, Zea mays
  Clone ID: MRT4577_11161C.1
agagacacgacagtttaatcacacgaccatgtcaatcaaaggcggggcagaccggcgacgatgccagactcgatgccgcactcatcattgcccttcttgatgttgaagaagccctggttaggcccagtcctcgatccacgagtgggcaacagtccactagtcaacaccgtagtcaacaccccagccaagaatcttgacggcttggccgcccagcagatcgccggactggtggctagtgactcccgacttgtagatcacgaagtcggagtatacagagaacgctgcctctacggggccattggtgatgatctcggtggcagatcttgttcgcatgcgaggggactgag

SEQ ID NO: 12746 - DNA, 494 bp, Zea mays
  Clone ID: MRT4577_111620C.1
ctcaaaacgacatctagggctatcaatggttgaaaccaatagactgcttgactggggagcatgccaagaaccttcttcttgtgtctgagcctggctgattggaatataagattaggtacatgccatagggcatactaatccaataaccgacctccatctcatttgtacccctacattcacaaatatatgacaccagtgacttttcttcccaaaattgtaaatcactcggatcattaaaaatatctattaaaaaatgtaaatgcttaagttacactcaaacaaccttaactgctaaaacatatcacagcaaaattaatgataactcatggctgtgtaataagacgagtgattgaaggtttggaaaaaggcaacaggcgtaatatatttgtgaacggaggtagcacttatttaagtaaccagttcaagcatggtgacaactcttgacgactaatatggttaggaggcaaaggcctgtgatgggctcgtgtgacaaa

SEQ ID NO: 12747 - DNA, 248 bp, Zea mays
  Clone ID: MRT4577_111621C.1
actgggtcttcagaccattacctttatctactccagagcgcagaagaacccgatcgacaccatgagggtgttgctcgttgccctcgatctcctggatctcgctgcgagcgccacctccacgcatacaagacggaggatgcggatgacaaccaccgacgccggttcatctaccgccgacggtgcatctgacacctccggatcacctgccacctccgatgaatctcacacacgacggaaaaactgccgac

SEQ ID NO: 12748 - DNA, 2415 bp, Zea mays
  Clone ID: MRT4577_111622C.1
tgggaccctcgaggccggccgggccgggatcttcgattcctcttcgccgctgcagctccagaatggctgctaaacccttcctctcaatccctgccgcggcggtggctcgccttccctttcgcctcctctgctcggcagctccacctccccgcctcctccctttcttcccccagccattcctgctccaaagacgcagcctttccgcctccaccgtacccgccggcaggcgtagcagtcctccggccccggtcatcagcgagggcagggatgacgaggacgccgccgtcggccggcctgtatgtcctggatgcggggtctttatgcaggatgaggatcccaacctccctggcttcttcaagaacccctcccgcagctcccaggacgagacgggaggaagtggagaagtgctcctggccgccgatacggatgcgtttcttgaagaagaagatgataatgatgatcggagggtggcggatgacgcgtcggatgctgaactggagggtctggacagcgatatcgatgagttccttgaagaattcgataagggggacgaagatgacgggttaccggtgaaaagcgccactgataccgatgctttcgccagcgattgggactctgattgggaggagatggaagaagacgaggatgagaaatggaggaaagaactggatggtttcaccctgccgggtgtcgggtacgggaacatcactgaggaaacgatcgagaggatgaagaaagagaagctgtccaagtcccagaggaagcgccaggcgagggaggccaaaagggctgaggccgaggaggattcagccctcgtctgtagccggtgccactcgctgaggaactatgggcttgtgaagaatgacaaggctgagaacctgatcccggactttgatttcgatcggttcatctcgtctcggctcatgaagcggtcagctggtaccccggtcatcgtcatggtggtggactgcgcagacttcgatgggtcgtttcctaagcgagctgccaagtcattgttcgaggcacttgaaggaaggagaaattcaaaggcgagtgaaacgccgagacttgttcttgttggtacaaaggtggatttgcttccatggcagcaaatgggagtgcggttggataagtgggtccgtggccgtgctaaggctttgggagcacccaagctagatggtgtgttcttgatcagcgtccacagagatttggctgttagaaacctaattacatacatcaaggagtcagcaggacctcgtagcaatgtttgggtgattggtgcacagaatgctgggaaatctacgctgatcaatgcttttgcaaagaaacagggtgttaagatcacaagattgactgaagctgctgtcccgggaacaacattaggcatattgagggtaacaggtgttttacctgcaaaggcaaagatgtatgacactcctggcctgttgcatccttacataatggcaatgagattaaataatgaggaacggaagatggttgaaataaggaaagaaatgcggccacgatccttcagggtgaaagtaggacaatccgtacatattggaggcttggcacggctggatgtgctaaaatcatcagtgcaaactatctatataactgtttgggcatcttccaatgttcccctccatcttggaaagactgaaaattctgatgaattgcgagacaaacattttggcatcagacttcagccaccaattggcccagagcgagtcgatgaattgggtcactggacaggaagatctattgaggtgtctggggcaagctgggatgtcaacagtatggacattgctgtttctggccttggatggtactccttgggccttaaaggcactgccactgtttccttatggacatttgagggcattggtgtgacagaacgtgatgcaatgattctgcaccgagcccagtttctcgaaaggcctggattttggttacctattgccattgctaatgctataggtgaggagacaagaaagaagaacgaaaagagaaaggctgagcaaagaagaagagaggaagaagagctccttttggaagaaatggtttagtgatgattctgtagcccagcccacaaagttaggattctgtttctcttgtcaacacgggcttttgtttatcctagttcttgatgtcttttgacataggctgcatcctgtgattttttttcttagcttatgtatatctcaaattttctgtgtatttgttttccatgtgttttacaaccagttttgtcagttctgcttgcatcttacagattcaattcctgcaacttgaggaaaattgatatcctagattacctattcagctgtgtgcaaaatgggactgtttagacatgcagagcagccaatttattatgtactatttttttgaattgaaaacaatttattatgcact

SEQ ID NO: 12749 - DNA, 1240 bp, Zea mays
  Clone ID: MRT4577_111623C.1
tatacgtacagttaatagcagctagctgttggtgtggattgctatgcgttactagcctatagtaccatacccatccgtgtggccctcccccaagggccagggcgccaggccaaccaaaagactccttccttgcgcagatctccgtccgtcgctctccgaactctgattgaggaggagtgaagcttcttttcttcttcctccagtcatcccattgcaaaagtagaagcagggaaggaattggaagcatgaacaagcagcagcaggcgtacgggtacggaaatgggcagcaggccgacgtcccaggctactgctgtttccatccccgggaggtcggcgtcggcgtctgcgctcactgcctcaaggatcgcctcctcctcctcctcgccgctgccaacaacaataagatcgacgacgacgcccgccgcaaaagcaggagcaggagcaggagcatctccctccccaaggtcttcgcgctcggctcctccttcctccagcgcctcgactcccgccaccaccggggacgagggcgggacaacaactgctactccgacgacgacgacgccaccgcctccgtcgcaagcctcgatgattccttcatctccatcaaattcgaggacaacggcaaggcgacgtgggacagccagagccagcacaaggcggcagctcccgcgaggtcgtcgtcgacgacgaccatggtagcggtggagcacgtcaagcgtgtcggcgtcacccggtggcgcaaacaggtggtgggccgcatgctgcagctggcgcgctggaggaggtcgtccgccgctgcgggtgggctggacggcaagaaggcggcggcggcggcggctgagcggtccaaggccagagggagaggctggatccggagcctcactcggaggcgcgcgcacggggaccgggcgtggtaggtcgccgtcgtcggtaaggaggcccggtcggtcgggggcggggcagcccatgcatgcatgcatggtgtccgatggatggatggatctgcgagcttccccccttgctttggatggagacgtagtaattgcttgcttgtgctttgtaccaagtgagatgagtgagtgcctccttttacctactataggctactatacgtacagttaatagcagctagctgttggtgtggattgctatgcgttagtacttgttaaaagaaagaaagagatatgtatatgtatatggtgcatgcaagaccggcaaattaaataaagtaatgcaatgc

SEQ ID NO: 12750 - DNA, 425 bp, Zea mays
  unsure (1)..(425): unsure at all n locations
  Clone ID: MRT4577_111624C.1
cttgtaaaatttaaaaaaaaantgccccttttcccttctttctcaaaaaaacccccctaaaaaccaacccattttatantctcttttcttttttccacaaaccaaacccccccccttaaaattcttccttccttcaaaactatctttttacccccaactaaaaaaaaatctaacttttccccttctctttttttttttttttttccatacccaattaaacctttgaaaaaacccccaacccgaacaagccttcttttaccataaataaacattaaaaaccccttccccaaaaatttccccaaaatgtcaaaaaaactcacccctttttttacccctaaatttcttacccttaccttcatcctttccaacttttcctttatcgatcccattttaaaactcttcctaaatatcattcaaaacttttt

SEQ ID NO: 12751 - DNA, 571 bp, Zea mays
  Clone ID: MRT4577_111625C.1
aatctagaaatggactgactgattcatgcgacgccgcagacataatgcaaagagcttatttattgagctaaggctgataaccaatcgaaaatagggcaccaccaacgaggggttgttgctagaacactcttgtgtttgtcaaaggaaggtcgttaaaatggaaccacttgctgcaggtgcaaaaggcggccagcgttaggcataccgggcaggtaaaacgccacccactgttgttgcggcaagaaggcagcagggctgacatcagctagctggctgaatggtagaagctgttgctgctgcaaataaccaggagagctcaatgctgctaccctgactgaatggaagaaattcttggggttagccagcaactagctggctcaatggtaattgttgttccaaataagcaccacagttcaatgcagccagttggttgaatggaagaaactgatgttgctgaaagtatgcagcaaggtttgctagcacaagttgctgtagttggtgggccctgatgttcttgcccaccaaatggaccaaaggtaactgctgtaatagggctgacggttgttggagg

SEQ ID NO: 12752 - DNA, 855 bp, Zea mays
  Clone ID: MRT4577_111626C.1
gctggctgttgagaggttcattgagcagagttgggcaggccaccgtcccgtctcccctaccataccataccatacccatccgtgtggccctcccccaagggccagggcgccaggccaaccaaaagactccttccttgcgcagatctccgtccgtcgctctccgaactctgattgaggaggagtgaagcttcttttcttcttcctccagtcatcccattgcaaaagtagaagcagggaaggaattggaagcatgaacaagcagcagcaggcgtacgggtacggaaatgggcagcaggccgacgtcccaggctactgctgtttccatccccgggaggtcggcgtcggcgtctgcgctcactgcctcaaggatcgcctcctcctcctcctcgccgctgccaacaacaataagatcgacgacgacgcccgccgcaaaagcaggagcaggagcaggagcatctccctccccaaggtcttcgcgctcggctcctccttcctccagcgcctcgactcccgccaccaccggggacgagggcgggacaacaactgctactccgacgacgacgacgccaccgcctccgtcgcaagcctcgatggtacaatcccatccatctgcagtttgcttgtttcttgtctgcttgccagatcaatgattcagtggcccggcggatgtcaaaaaaaaaagattccttcatctcatcaaattcgaggacaacggcaaggcgacgtgggacagccagagccagcacaaggcggcagctcccgcgaggtcgtcgtcgacgacgaccatggtagcggaggagcacgtcaagcgtgtcggcgtcacccggtggcgcaaacaggtggtgggccgcatgc

SEQ ID NO: 12753 - DNA, 449 bp, Zea mays
  Clone ID: MRT4577_111627C.1
aaagtatgtgtgccataaactataaactgtcacacgacatagacgcccgagacactgaaaacacacagagatttttttcacactccacactttctcttttaacgggcgatgggaaaaaactcaaagatactctatttgaggggaaaatctaacacgcgcaaaaatccaacaccaattaaaaaccaagggacaaaacacatacgagcgaaccaacttttttagagacgaaacaacacactgcactgtaacccacaccgctccttcacacgaccagagactctggcttgcacaaggggttgttaagagaggagcggaaccctttcccacacacacatctttcccacagacccctccccacgccctaaaaaacaaaacctgcaccccgagacacagctcctagcctcgaaaatatctgacccgagaaactccccccaaaacgcgggagcacc

SEQ ID NO: 12754 - DNA, 391 bp, Zea mays
  unsure (1)..(391): unsure at all n locations
  Clone ID: MRT4577_111628C.1
gggtggtgtttttttttttttttttttttttggaaagataacctgggggagcaggtggattactttttttaccttccatacccagggggacttacaggtgggcctcctctgccgatgacgggccgacagggtggccaagaccaagggcgggggggggggggctttttttttttttgggtttggacggttnagcccttaagggcctgtgccaaggggactgggggccccccgggcctaaaggtcggggctgcccctaatcggggggtcaatcgggggggggcggggggtgcctcgcttccacatccttggggcggggcgttgccccctggtcattcagctgggggagcgctctggggtcgaccttgcactcgcttggccccgcgggggggtt

SEQ ID NO: 12755 - DNA, 254 bp, Zea mays
  Clone ID: MRT4577_111629C.1
ctaaaccctaccgcccttcgtctctggtccatgatggggccctcgaccatggcggcgcgggcaccgggctgctgctcctcggcggcgctcgccttcttccgtctccatccccttcgatgcgccgtccgccccgccgccgctctcgttggagggtgctcctctggcctccgcgcgcggctgccggagccgtctggcgcatagcatcgtggacttggttatggaggagctcgcttcgccggcgcgccgggtctcgg

SEQ ID NO: 12756 - DNA, 715 bp, Zea mays
  Clone ID: MRT4577_11162C.1
cttcgaggggccggccgggccgggggcaaaattccaattccaacccgagacccagagggctcctgcccccatttgatccctccccccctccctccctcctcccatcacagggccgtcgactcgagcctctccttcatcagcgctgactgctccgtcggagcagacgacgtcgcggagacattcctcagcgtgctcgatcgcttgtcggtctccagctcggggctgaccccgggatctcgtggatctcgtgccgggaagctcatgacgcgcaatttccgtcgcatctgctcccgatcacgagctgattgttatgtcctgaagagtgtcctgagattcgagcggaccggataacctcgcggtccaaggagtgcgacgataatgccacagcggttgtggagaacacggatgtaattgttactaaccacgatgactcagaaggatccttctgcatcgaaatgctggacaaactaacgcagacctggattgcgtcgacagtacttgtagcgcaacctcaatccaagtcacagtcagcaattcttataaatgaggagaagatatcggctggtgagaagggcgtttccttgaatgattccatctggatccctgagatagatacccgcctttgtttaacaacagcggaaaatcaaaggttcataagttgttttcctgcagcaaggggagtacttgggtgtcgcccaaaaacccgctgtggatt

SEQ ID NO: 12757 - DNA, 223 bp, Zea mays
  Clone ID: MRT4577_111630C.1
tgatgtgcgcggcggacccgcgccacgggcggtacctgacagcgtccgccatgttccggggcaagatgagcaccaaggaggtggacgagcagatgatcaacgtgcagaacaaggactcctgctagtaggtggacactaaggctgcgcgcaagtcggccccggccaccggtggtgtgaagaagccccaccgatttcgccccggcaccgtgggggtgggtgagat

SEQ ID NO: 12758 - DNA, 320 bp, Zea mays
  unsure (1)..(320): unsure at all n locations
  Clone ID: MRT4577_111631C.1
ancggcaattaataactcgggctggccaatttttgaattcggacagcaacaacagacaaaaacgtaactgtctagcagtatggcagcatgccctgccggtcaatgaaagttcacaagagggcatggcctcctctagccagaggatgacgtaacaccatagagggggaatcttgacgggagccaacagaaacggagcttgccgcctcggccggacaaaggaaacactccggccatgggggaagcctcattggcttgcaaaacaccgggccagacagggtgtaattaaagccggaggatgcccatggagttcggcacaccat

SEQ ID NO: 12759 - DNA, 172 bp, Zea mays
  Clone ID: MRT4577_111632C.1
acggaagcatcatcattagctgcaacatctgaagatgatgaactaataatttgggagctttaaatgcaaagagatacacaagacgaggctgactccagagctaagatgaacgagcatgcaaatacacctgaataattctcagcaaaaattgtatctgcatatacacggccag

SEQ ID NO: 12760 - DNA, 300 bp, Zea mays
  Clone ID: MRT4577_111633C.1
cccgaaaaaaatctcatccaaatatttgttttttcttaggaaacccccccttgttggggggcccccttttcggtcccctcttatttttaaccaaaaaaagggcccccccacccgggggttgcccccccccccagacgggtttcttcaaaaaaaactggttgtttggcaccattcttttcttctttaaaaagggcgccccccatgggttccccccccccaagggtataaacacccgtggcccttgtggggggccccccccaaattttcaccaaaccatttgtttaaaaggaaccccctttt

SEQ ID NO: 12761 - DNA, 372 bp, Zea mays
  Clone ID: MRT4577_111634C.1
cccacccggattttgatcttgaccgggcaccactccactccagggggggattgaattaaaataggcggtgggttcaactaggccgcgaagggatggcgtcgggctcagaagcgcacgggggcaacccgccggagcaaggcacacaagagagcgagcggcgggagaaggcggatgacccacgccacggcgaacgagggccaccctagcaaggcgggggaccaggggtcacatgccgagcttgactcttgccttgctgaggaccccgacagcaagggtgcttgtgagacctgcaccaagaccaacaggggcatggtctttggtgagatcacccaccaggccaatgtggactaccagaagattggcaaggagacc

SEQ ID NO: 12762 - DNA, 815 bp, Zea mays
  unsure (1)..(815): unsure at all n locations
  Clone ID: MRT4577_111635C.1
cattgggtacctcgaggccggccggggtcttgttctaccaggagtcgttaggcattccaatctgaactgtacttcctaaaacaaccagacactacaaactaccgcaaccatgggtaaggagaagtctcacatcaacgtcgtcgttatcggccacgtcgactccggcaagtcgaccaccaccggtcacttgatctacaagtgcggtggtatcgacaagcgtaccatcgagaagttcgagaaggaagccgccgaactcggcaagggttccttcaagtacgcatgggttcttgacaagctgaagtccgagcgtgagcgcggtatcaccatcgatatcgctctctggaagttcgagactcccaagtacaacgtcactgttatcgacgcccccggtcaccgtgatttcatcaagaacatgatcactggtacctcccaggctgactgcgccattctcatcattgccgccggtactggtgagttcgaggctggtatctccaaggatggccagacccgtgagcacgcccttctcgcctacaccctcggtgtgaagcagctcatcgtcgccatcaacaagatggacaccaccaagtggtccgaggcccgttaccaggagatcatcaaggagacctccggtttcatcaagaaggtcggcttcaaccccaagcacgttcccttcgtccccatctccggcttcaacggtgacaacatgatcgacgtctccaccaactgcccctggtacaagggttgggagaaggagaccaaggccaaggccactggncagaccctcctcgangccatcgacgccattgaccccccta

SEQ ID NO: 12763 - DNA, 822 bp, Zea mays
  unsure (1)..(822): unsure at all n locations
  Clone ID: MRT4577_111636C.1
atgtatgctgaggttgttgtgggtgttgtagaaaacaaacaagatgcagtggactatcttacatggacattcatgtacaggcggctgaacaagaaccccaactactacaatctgcagggtgtaagtcacaggcatctgtcggatcatctttctgagctaatcgagacagtgttgaatgacctggagtcaagcaagtgcgtggctgtagaggaggatatgtacctgaagccgctcaaccttggtctcattgctgcttactactacatcagctacaccactatcgaacggttcagttcgatgctaactcagaagaccaagatgaaaggcctcctggaaatcctagcttcggcatcggaatatgcagagcttccaagtcgcccaggcgaagaggaatacattgagaggctagttcgtcaccagagattctctattgacaaacccaagtatggtgatccacatgtcaaggcaaacgccctgctgcagtcccactttgcaaggcacacggtggtagggaacctggcagccgaccaacgggagatcctcctttctgctcataggctgctcctggcaatggttgatgtcatctctagcagtggatggctcactctggctctgaatgcaatggagctgagccaaatggttactcaaggcatgtgggatcgtgattctgtgctgctccaactntcacacttcaccagggacctggcccggagatgccagnaaaacgaagcgaagcccatcgagagcatctttgatctggctgagatgagcatcgatgagatgcgggacctgctgcagctgtcaaactctgagctgcaggac

SEQ ID NO: 12764 - DNA, 292 bp, Zea mays
  Clone ID: MRT4577_111637C.1
ttctatctctcggtcgcacaacctgccgcaggggggttcctttcaaggtagggtcggcacttccctcacgcacgagtgacaggggacgacatcatgtccaacaatgcccaagcaaggagcacgagaacagtcgacttgccgtagcaacaggctgtagcgctccagatcagtcaatgacccgtactgaaggtcaataggaccaacttaacaaatggacgtagaaaaggagcaagtggtgaaacaccggcagtttagccactgcatgctttaggaactgcttggacgcaaacaa

SEQ ID NO: 12765 - DNA, 233 bp, Zea mays
  Clone ID: MRT4577_111638C.1
caccattaagcgtatgcgtccatccttgatcggaagaatgactcctccccagaaaacaatggcccttaaggccttttttttggattacattcgcatgaatcccttcttggtaaaatacactccatcgtgctgactgattatggggaaaaaagcgcctgattgacgtggcaccccatctttcatacacagccagaagcgtcaataccctatcaaacaaaccctccgtcatccat

SEQ ID NO: 12766 - DNA, 338 bp, Zea mays
  Clone ID: MRT4577_111639C.1
agcagcgcagacccctaccctcgctcgcgtctccctatccattcccaaataatccccacctcccgctgctgctccgccgcccgccatggcctccctcacctcggcgtccacttcactcctcttcccgcaggcctcctcatccaggagccgcatccgtctctccacccccctgggcttctccgcgcagcctgcgcggctgcggagccagggggcggcagtgggcgcgcggcggcgcgggcgcctgctggtggtgcgcgcggcgaggggcaagttcgagcgcaccaaaccacacgtcaacataggcaccatcggccatgtcgaccacggaaagaccactc

SEQ ID NO: 12767 - DNA, 831 bp, Zea mays
  Clone ID: MRT4577_11163C.1
cacacgcgtccgcccacgcgtccgggctcacgatcatctctcggaacgggtcgcgcgcgatcgagaacgaagccgagctggtgcgcgccgctgcgggcgccgggttccgcgtcgccgtgctccagccacgccaggacacggagctcgccaggatgtaccgcgccctaaacgcctctgacgtcatggtgggcgtgcacggcgcggccatgacgcacttcctgttcatgcgcccgggctcggtgttcattcaggtggtgccgcttggcaccgactgggccgccgagacgtactacggcgagcccgcgcggcggctgggcctacgctacttgccgtacaaaatcctgccgtccgagagctcgatttacaggaagtacgccaacgacgacccggtgctgactgacccggataccgtgaacgctaagggatggcaggtaaccaagcaggtttatctggacggccagaacgtgcgcctggacatggcacggttccgccgccggttgcgccaggcgtatgaccactgggcgcagcgccaccgtgcgggattgggcgtggaacagaggatataccactgaagcgtgggtgtcacatagtgatttttttttcattttttcacggtggaggatattttcaattggtttttttcatttttgtgacagtgaatattgtaattttaatactcctagaacatatacagagggtgatcggtgctccatgcggagtttgatgagtacaaaaaaaaaaaaaaaaaagcggaacaagttgtcaaataaacgtgagaaaaaaggacagagagaatttggttcaatacaaaaaaaaaaaaaaaaagcggcc

SEQ ID NO: 12768 - DNA, 336 bp, Zea mays
  Clone ID: MRT4577_111640C.1
aacagacatacacacacacttacagggcgatataatcccgagcctggagatccccgacaaggtacgccatcatgcatctggtcacgttgcgaccatggagctcaacaccgaccaaatctaccgagactacatgctcgattccgaagataactggaattgccagctcgaaaacattaccttcaccgccaaatatggaaacgttccacagatccatgcacgtcttcatcaaactatgcctagtcatatttatgattatacctgatatgctcaagaacgctaccatgttcaagctcttggaaactacaattaatcgcaaatgatcacctattacaattt

SEQ ID NO: 12769 - DNA, 220 bp, Zea mays
  Clone ID: MRT4577_111641C.1
tcgcctcgacacaattggtgagccaagggcttcctttcccaatgaactgttcagtagagaaaagcttccgcaaagcttttctcccccacaagcagaaggctcgaaggaagttggcaaggaggaggaagatgaagtcaccacagtggcagttgacctcaacaagagtaccacaagcattgatcatgacctcgacagttcattgggaaaggaagcccttggc

SEQ ID NO: 12770 - DNA, 554 bp, Zea mays
  unsure (1)..(554): unsure at all n locations
  Clone ID: MRT4577_111642C.1
ccggccgggaagatttctttcaccttgtccgactccatctcccccttagggtctcgtctcgtctctcgtcgttctccgcgaagatgccgaagagcaagggcaaagcaagatggaaccgtaagatgggaaagaacgatgctgacgacgacaactccgatgtcgcattcaaggaaaatccctccgagaacgcttaagtgaccaggatgatcgccaacaggcggagacatgccatctgcgtcagatgcacacgccgcctctgtcatatttgggctactacgccccagaaggtgtgaatcgcgactgcatacatcgtattcaccggactccgctactaccacgacgactaggccgacgctatcctcaagtacatgaacgacgatnagcgcctgctcaaggcctacggtgaggttcctgacacgctcaggttcaacgagggcgtccacctcgatggccccgacgaatacgaggatggcagcgactacatccaggtcgaggactacgacatcgacgagatctaactaatctgttgctgcttacggctacctgtattgtta

SEQ ID NO: 12771 - DNA, 1164 bp, Zea mays
  Clone ID: MRT4577_111643C.1
cccccgaggtcggccgggattctgaaattgttatctctcctatttgtcttcctctcctgcccagcaccattggctggccagacgttctgcggtgattacaatggtgccagggccaattgagaagtggaattaaaatagcagccaagaaacttgaagcatgttctttacaaggactattggaattccaaaacgaaatccagcttatagcaaagcttcaacacaaaaatctcgttaagctgctgggttgctgcactagaggagatcaagaaaagatgcttatatatgaatacatggaaaataaaagtctagattacttcatatttgataatgtgaagggagcagatctaaactggtcaaaacgcctgcacataattaatgggatagctcaagggcttctttaccttcacaattattcacggttatgcgttgtccatagggatttgaaagcaagtaacattctcttggatagtgaaatgaatccaaaaatatcagattttgggatggccagaatattctgttcaaacgcgaaagaatcaaatactacaagaatagtgggcacacatggctacatacctcctgaatatgcttttcatggggtttgctccatcaaatcagatgtttttagctacggggtattgacattggaaattctaagctcaaagaggacggtccaattctatgagtacaaccaaaagctatataatctcatctcatatgcttggcaactttggacggacggaaaatcagatgagctgatttattctcctccaggcaatgtacgtgaagagatagaaaggcacattcaggtggcactcttatgtgttcaagaaaatgcggagcatcgacctgatatggagcgagttgtcacaatgctaaacagtaaggatgtggacttacccaagcctatgcagccagcttacttccatgtaaatcctagtgaggaagaagtttcatcacgaagcattaatatgactatgagtatcacgctggaaaggtagaagcacattgtcattgttttttgagaaaaatgcttgtaactatctgcatcaagaggaaaaaaattgcaccgatatagtcatgtgagtaagttgattgttatgcatattcattaatacaacatatgtttttacattaaaaaaaaaaaaaaaaaaaaaaaaagcggcc

SEQ ID NO: 12772 - DNA, 137 bp, Zea mays
  Clone ID: MRT4577_111644C.1
attatgtaacaagtaagatacatagatctagaacatctttaatagaacaagaaaacacatagggacctaccagcttgcacaatctatagggacaggcgataagagatttcagatataacatagcaacccaaggtatg

SEQ ID NO: 12773 - DNA, 186 bp, Zea mays
  unsure (1)..(186): unsure at all n locations
  Clone ID: MRT4577_111645C.1
aaagcangttccccgacgggagcggcgaggcgacggagaacggcagcaacggagcggagcagcaggagccgaccaagcagcccaagccagagacaaacaccgacaaggagcacccggcgcagaagcaccgcggcggggccaacacggacgaggagaccccggagcaggagcgccacccggaggagg

SEQ ID NO: 12774 - DNA, 718 bp, Zea mays
  Clone ID: MRT4577_111646C.1
cccgtttcggtgttatccattaatcatggccagaccgccagacggggcgcccgctggacctgatgacacgtcgccgccgccttcttccaactcgtcgactccgcctccttccgactcatcgacgccgccacccaagtcctccggctcgggctcgccgtcgccatcgccacccgcacagtcattgtcgccgccaccaccggcgtcgccgcaggatagcacggcgccagcggccagaggctcgccggccgcgccgtcgagggactccccgtcaccaccggctccaaagcgcagcgacagtgactccgataatagtggcagcagcaagagcggaagcggaagcggaagcagaagcagaagcagcgggtcgacgcaggtggatgtcatcctggccggcgtggtgattggggtcctggcctttagcctgctgatgtgcatcgccgcgtgcgtgtgctgcgccaagaagaagaggaggaagaagcccccgcacatgaacatgccgtactacaccgacgagcacgggaacgtcttctacgcgaacagcatgcccaagtggcagagcagcgcgatggaccacggctggcacgcgccgtactcgcccgcaagcggggacatgagcggctcgcacgggccggggccgggccagatgccgccctcgccggcatgccgtccctgggcttcttcaagagctcgtctcgtacgaaaagctggcggcggcgac

SEQ ID NO: 12775 - DNA, 475 bp, Zea mays
  unsure (1)..(475): unsure at all n locations
  Clone ID: MRT4577_111647C.1
gccggggctgcaaggtacgtacagctgtggtagaggtgtaactgacatcgacgctcgatcagaaggctcaagatgcgtgatgcccacagtcctgtgttttggccatgatacattcatgacgcgatcaattgattgtttacgtcttctttctactacggtactatctggnttacgcttatagactacactttttatagaatgtggattaaatatagagatgagaatggggtataaccagagcttctgtttcaattggaccaaggtgccttgacctgacctgcatgccagttacgctgtaggctgtagccctgtaagcattaatgccggcatcacgagaagattactggcgacgtaactgtatcaacgtactgcttattggtcggtacagatcggcactacatcactatctcgcctgacgccaaagcatggactttcttttcgctcaaattcatttcgagtagcttaaagatcttgc

SEQ ID NO: 12776 - DNA, 563 bp, Zea mays
  unsure (1)..(563): unsure at all n locations
  Clone ID: MRT4577_111648C.1
nncgtccgaaaaaaaaaaaaaaaaaaaaaaaaaaaaaaaaaaaaaaaaaaaaaaaaaaaaaaaaaaaaaaaaaaaaaaaaaaaaaaaaaaaaaaaaaaaaaaaaaaaaaaaaagggggggcccgcttttaaaggacccattttttcgtgcccgctcttgcaaagtaatagttcttttttagggaccccaaattcaggtgaaaggccggcgtttccaaacttaggggcttggaaaaaccttggctttccccaatttaatggctttgcaaaaaatccccttttccccggttggctaaaaagaaaaggggccgaaccgaccacttttcccaacattggcccaccctatttggcaagggggacgccccttttacggccactttaaccgcggcggttgggggggtcccccccacggtaccttttactttttccccttccttagcccccgctctttgggttttttcccttttttttttaaaccggtggcccgttttccccctccaatttttaaatggggggctcctttaggggtcccaatttagggtttggggggccctcccccccaaa

SEQ ID NO: 12777 - DNA, 1314 bp, Zea mays
  unsure (1)..(1314): unsure at all n locations
  Clone ID: MRT4577_111649C.1
acaagccctagatgtcccccctctcctgcccccgccngcgccgccgccgcccgcgccacgggccgatcccaccagatctcgcgcgaatcggaggccccgctcctccccgtggcccgattctccgcccgcgcgaccaggaacggcgctgatttgagccggttttggaggtgaggtgggggtgcgatttcggtggtcctgggccttgcggggccgggtggatggatgcggtggagctgccgttaccagccaaggtggagttcgggaagatcctggcgccggcagctgctgtggagggggtggatggggccgtcgtcggtggtggccccggaggtgggagcggggaggtgctcaggagctgcgccgacgcggatcagcgtcacggtggtgatgtgaagcagcacaaccagaatgcagaaggctttccgtcttatagaagtaaaaggacgcctttggaagtctctatacagaaatctcttggttttggtttgaagtccgaaaatggtcaacctgtgattatgttgcaaatgatacggttcaatccctgcataagcaagatagtaagatagtgataaaaaagaccataaaattgttggacggtccaccttatccaaaaaggccaaagcttgagccagcacaaactggtagagatgctgaggctaagggacatgaattcatatcacagaagaatgtgcctgatttaacaccatgcacaacatctggagaactgcgtgtcattatattaagaagaaaaagactaaggtcctagatgaccagtacaaacatcaaagggcctccttacggcggctaccaacaagcataaacgaaaccatccatgactaaaaaataataataacggccaatcatcaaaaggaacctgtcaccccttttcagaaggactaaggccacattcttcgcagtcatgcagccccagccagacaccatatcctagcatcattcttgatgtcctgagtaatagtattgatgctcggagtattgattcatagtttcgtacaattacaaggcaaatgcccaaagctggaatggaagctaagtttgtgcaggacatattctcaatcttggcagcaatggaactatgtttaccaggcagatttgcaaggatggtctaatcttgtattactgtgacaagatcaaataaatattaggactaaattttgtaaatggaagtgagtcagtagatagaatgggatagcttggttattttttcccctgtggagggtgctatggtccttttatcccttattcatatgaagtttacattttctaaaaaaaaaaaaaaaaaaaaaaaaaaaccca

SEQ ID NO: 12778 - DNA, 260 bp, Zea mays
  Clone ID: MRT4577_11164C.1
cggacgcgtggggcatcatactgactcgcaaatgttaagcctgggcttctgcctcccgtcccaatttgggtgtctgtcacccacaattcgttgcgcctgaaattctgtaatttgtatttagaccgagtgtaatctgagaatataccaatgtagtgtaaattcattgttgcatcttttcgtcgcattgctgcggcgtgaatattaacttttatatgtaccgtattgtacagtctttcataatactatttgttttctaatac

SEQ ID NO: 12779 - DNA, 530 bp, Zea mays
  Clone ID: MRT4577_111650C.1
tttttttttttttttttagtcgaggaggattgggacttccactaagacattgaccccttctcgatcgattatgcctcaacgatcgtcgatgagtccgatgcatattcgttgtttgttgcgtgagttgcttgcctcctacatgcccctttgtactctcctcctcggaagatgattgggactgtgatgaggcatacatcgactccactgaggaggaagtctcctctgaggagatcggaggagttggtagagatgtggctgcgtaacagcagctccaccaacgaggagcctgaggaggacctcgactgagatttcagcgacgatactagtgtggagagcttccttgacgtcgctgccgccaatgacggtggtgacaaggaggaactagagcgtaagcgtaggaggttgatcagatacctctgccttttatagataagatttcttatatagggtccccttgtagtcctgctccttctcgatgaaataaataaaacttttggtcaaaaaaaaaaaaaaaaaaaggcccctagggt

SEQ ID NO: 12780 - DNA, 531 bp, Zea mays
  Clone ID: MRT4577_111651C.1
ctcgaggccggccgggccggggacattgatcccttctcgattgattatgcctcaatgatcgctgatgagtccgatgcatattcgttgtttgttgcgtgagttgctcgcctcctgctgattgggactatgattatgcctcaatgcccctttgtaccctccaccttggaagatgattgggactatgatgaggcatacatcgactccactgaggaggaagtctccgctgaggagatcagaggagttggtagagatgtggctgcgcaatagcagctccaccaatgaggagcctgaggaggacctcgactaagatttcagcgacgatcctagtgtggagagcttccctgacgctgttgccaccaatgaaagtggtgacaaggaggaactagagcgtaagcgtaagaggttgatcagatacctctgccttttatagataagatttctttgatagggtccccttgtagtcctgctccttctcgatgaaataaataaaactttctgttaaaaaaaaaaaaaaaaaaggcccctagggcc

SEQ ID NO: 12781 - DNA, 545 bp, Zea mays
  Clone ID: MRT4577_111652C.1
actctcccttgatggagaaacaaccaccatcaatggctgtcgtgacctctctctccccaccgaccctccctctccctagctctccctctccctatcctccctctataaaagctggccatgccgccggagcttcccccctccactcatccgagctctctctctctctcacacacgctcgcgtcctcgccataccgtccgtgtcgtgccccgcccgtgtgtgctatgccccctgctcgatcgcaccgtgcccctgctcctcggtcgcaccgtgcccctgctcccggccgcgcccgcgtcctcaccgccgaccgcctgcttgccgtggatgatcccctccattcttcgatttgtacctgcgcacagtccgagagcaaggtggaagagaacacaaatttttattaaaatttttaaagtcatgtttgaattagttcatgttttctataattatttgtttgaatttgtgaatattgtgaatatgaaatcatgtgtatgtaaacgattgattttaagtgtatgcgaggaaaaaaaaaaaaaaaaaagcggcc

SEQ ID NO: 12782 - DNA, 397 bp, Zea mays
  Clone ID: MRT4577_111653C.1
cctgagggtacccctacgtctgagcttcgtaagagtccgctaggcagcccagtgaagactgaccttgcgctaggtcccatggatcctggtgctactgtagagaatgaccagaaggaaaattacacagaagggcttacttctatgcaaaaggctaagatagctggaatctctgatatcgagtctttcaaaaggctcctcaaggtgctcacacagaaggtcagctggcaatcagatgctgcctcagcaattgctgctgttgtaatacaatgcagaactggcagtgggaagagacgtaacattgggacaaggggcgacatatggctcctgtttgttggtcctgaccaggcaggcaagaggaagatggtgaatgcattgtctgagctgatggtaaatgctc

SEQ ID NO: 12783 - DNA, 287 bp, Zea mays
  Clone ID: MRT4577_111654C.1
ctatctagggggtgggtctcttttattattcacttcttttttttttaaaggaaaaaccaataattttttaattcttaaccttcccaaccccccgggtggatttcaagcgtgcttcccccttacccggctcccaaggggataaatttaccccggagtttttcctgccggttttggttactcaatttatttgtgccaccacaccctgaaatggaggcttattaaagaccaaggccgttccatttccactttggggtttgaactacgacgactacctcttcccggggggg

SEQ ID NO: 12784 - DNA, 251 bp, Zea mays
  unsure (1)..(251): unsure at all n locations
  Clone ID: MRT4577_111655C.1
gccgggnttcgatccccgtatctagcagacaaaatagcgagacaagtctacaaagatttgtgagagtgatccggcgctgagaagagattgttacgatcgccgcagggaggaggaggaggaggaggacaggggggctactactacccctgcagccggccaggagagggatacggctacggacagggtggccagcggcagatgtatccaccctgtagtcccggcaccaccgacggcggaccaaggatcggccg

SEQ ID NO: 12785 - DNA, 1911 bp, Zea mays
  Clone ID: MRT4577_111656C.1
atgggaaatgagcagtatgtcttatcacgagttgaagaagttctcactataggagagcagggagaaatcgtcgatgctgcccctgcccctcaacaattagaagatggtgttcaactcactattgatgaattagttgagatcaacctaggggctgaggatgatccacgtcccacgtttgacaacatcatcgcagaagtagaaaagttgatcactgctgggtttatcaaagaagtgcaatacccacgatggcttgcaaacattgtccacgtaatgaagaaaaatggacaagtacgagtatgcgttgattttcgtgacttgaatcgtgcttgccccaaagatgactttcctattcccatcactgagatggtggttaatgctacaacaggatatggtgttctatccttcatggatgggtcgtctggctataatcaaatcaaaatgaatgaggatgatgcaatagatactgcattccgcacccctaaagggaatttttattacatagtcatgtcgtttggcttgaagaatgctggtgccacatatcaacgagcaatgactgttgtgcttgatgatcttatccatcactctatagaatgctacattgatgacatagtggtgaagacaaaagaatgtcaaagacatcaggatgatcttcgtgttgtcttcaacagacttcgaaagcatcaattaaatatgaaccctttaaaatgcgcctttgctgttaaatcaggtgtgtttttaggtttcgttgtccatcatcgaggtattgaaatagagccaaagaaaattaaggcaataaagaaaatgcctcctcctaaaaatttaagtggcctcatctttgcagggcgtactcaaccattcacgagattaatgaggaaaggtgtgccattccattgggatgagcaatgccaaaatgcgcttgatagtctaaagaggtacttacttaatcctccagtattggctgcacctctcgtggcaagagcagaccctgtaaggtatgtgctaaatcaaccggccctcatgggacgccttggtaaatgggccgtaatcatgatggaatttgacattacttatgtgccagaaaaagcaattaaaggtcaagccttggctaattttcttgctactcatcctgtgctagatgattcgacgttggtgatagacttgcccgacaaggatgtttttaccatcgacatagagtcaccatgggagctttattttgatggagcgtctcgtatagagactgatcctgatgctgcactagtgctcccaaatggggagcccgctcaaataaaaattgaagaaaggtggcttctaccagccgtcttagaattagtcccacaagaatgtgaagtcaaccatattatcgttatggttgttgatgaaagtgattggcgtaaaccattcttggattattttaatcgtggcattctcccaaaggatcttgtggaaagacatcgtctacaacaacgtctgcctatttatacctacaaggctggggtattgtaccgacggtcttttggtcaagaaattctttcacgatgtgtgtcaagggaagaaaccaatcagatattacaagaaatgcgtaaggactgtctcaagatcgccaagtcttgtcacagttgtcaagtgcatgataattttaaacatctaccgccagaacctcttcatcctacagttccctcatggctatttgacgcttggagaattgatgttaacggtgccatcgaacctccatctgccagggggcaccatttcattctagctgcaaccgattacttctctaagtgggctgaagctataccgttgagagaagtcaagtcggataatgtcattaactttctagagcagcatattatatatcgcttcggagtgccacgacgcatcacttctgataatggaaaggctctcaaataa

SEQ ID NO: 12786 - DNA, 202 bp, Zea mays
  Clone ID: MRT4577_111658C.1
gaccattcttattttatttggtataccacacatgataacgagtgtcgttttactgcattattacatatatggatagacagagatggatagaggggatttcccaaatgtcatgaatcattagtagggcggaagggcaggggagacgccacaggggaaggtgcggaaactgggcagcggggacctggccgggcggccccccaca

SEQ ID NO: 12787 - DNA, 966 bp, Zea mays
  unsure (1)..(966): unsure at all n locations
  Clone ID: MRT4577_111659C.1
gtccggtccggttctcttcgccgcggcggcggatggccctgccgctctacggctgcaggtcctgcgctgtgcatgatgccatcatcttctgccactgctgtgacgccaggctgtgcctgcactgcgacgccgccgtgcacggggctaccgaggcgggggcgctccacccgcgcgcccggctctgcgacgcgtgcggcgccgcgccggccgcgctgcgctgcgacggcaccgtgacgctgtgcgccgtgtgcgtcggccgcggtgctcccggcgtgacccgcacccgcgtggccacgtacaccggctgtccgggccctgctgagatggtgcgcctcatttccgtagacccaccgcagctggagcaggactttgaggcctggctcgcagacaagctcccgcgtttggtcgtggaggaggatgttgggctcccgccagactgggatgtcgccgtggaaactgcaaggcttgagaagatgctggcagaatgctgtgagcctgagactgaggaagctgaccagcagcgactgcagatgcagatgctgctgcaagatgcaagcgctatggccaagaagcgagaggggagagagagggccaaacaaagatatatcgagaagaggaagaatagaaggttctgcaagcagatcatgtatgcttctcgtaaggccagagcagacacgagatggcgagtgaaaggccgctttgccaagcaggcttccgctagcttctagtgatctccctgatctgctttcacagtcatttttgtgttgtcatctcgctcgcactttgctcaatccctcttcggcttcaacaacaaatttctcttgggtaatttattttccataattacatatattttccctgcttgtcagatgtaatatttttctttccttttattcaagaactaaatgcaattcaatacgtatgtggatcggactatataaaaaaaaaaaaaaagagttanaaann

SEQ ID NO: 12788 - DNA, 432 bp, Zea mays
  Clone ID: MRT4577_11165C.1
ccgcggcggcgacgagacgggggacgcggggcggaagatcaccaagcagggagaccaaccctgacgagctggaactgatgaacaaggaggctgagggaccttaaaagcgacctgccctaagcaaaggggaccactgtcctacgaatgctgcaagactcccaggattatatgtaagtgagggaagcggaggagagaagctaatgcctgagaggcactcaaagaaaggcatagagctgatccttagaacagaaagagccaaagctgaacaatccaccaagactctgactagtgcaacaggagcaaacttaacagacgagagctggatcactgcaaccggctgccaagacaaaaagcgcaccgaaaaaggcacacaaggaggcgaagctaacaacacaccagacctaagggaaaaagatgaggaagacaaacagg

SEQ ID NO: 12789 - DNA, 231 bp, Zea mays
  unsure (1)..(231): unsure at all n locations
  Clone ID: MRT4577_111660C.1
aaaaaccgggncggcccaagccgtccgaagggttctttccatagagaataatatacagtttattcgacgaaagaaacgaatgtaatatagagatatgagtggaatgcagcaaccgaactggcggaacaggcttccgttttcaatttcctgtgggaagtcgggtagggaaatcctggggggtgatttggtttaataaaccttgcctgccgatttgaatctcgtttaaccagc

SEQ ID NO: 12790 - DNA, 751 bp, Zea mays
  Clone ID: MRT4577_111661C.1
ccggccgggttcgagcgaaaacgaaagggcagggggcggcggagcccgacctgctagcctcgggtggcggcggcagcggctccttgcctgcgccgtacccgtgtgtcatgacgacgaggtagcgacgacaccgacgcttgtcagcctataggccgccaccagcggctgctgctcacctacacgcctgtgcgtccgtacggtgagacagtggaggcaacacgcgctcgcgtgcctttacgacgagaaaacggtggcgcgctggcttgcccgcgcattggggccggtgtgcggtgtccacccgcccgctcgccgggatggcatggctgtttgcggggcggcatgtctgcgtgcccgcgctgtgggcttgcaaggtggcggctgcgttccagctcgccttcgaggagcggtggctgctgcttgcagcggcgcggcctgcagtcataccaggtccaatccggcgcgctcgcatctactcgtggtgcagtgtagcctgcgtgctcgcctgcagggtggcggcagggcctgtgcccgcacgtttgcacttgcttgcagtggaatcaagttaggaacaaataaatgagaggggaagacgacgtgttgtgcaccaacagccataaatcagatgagtatgtgtagtcatatcccttctgcgcatgcatgctttagattcttacctttgcttttcttttatctctgtgaactcgtcgcaagagcattcgtgctgataacgtgttaagaaccctttactact

SEQ ID NO: 12791 - DNA, 655 bp, Zea mays
  Clone ID: MRT4577_111662C.1
attttattctcccaatttagggagacgccagcggcgttggtgaaggtttggaaacttggcgtggtttctatcaaagcataaggcccacacagatgggtctttctctgaatattgatatgtcctctactgcatttattgagcccctccctgtgattgattttgttgctcagcttcttgacggagatatctcagttagaccattgtctgattctgatcgtgtgaagattaaaaaagccctacgaggtgtgaaagtcgaggtcacacaccgtggaaacatgcgtaggaagtatcggatatctggcctcacttcacaagcaacaagggagtcatcattccctattgatgatcgtggtactgttaagactgtggtgcaatacttcctggagacttatggctttaatattcagcacaccactttaccttgtttgcaagtgggcaatcagcaaagaataaattatctgcctatggaggtctgtaagatagttgagggacagcgttactcaaaacgactcaatgagaaacagatcactgctctactgaaggtgacttgccagcgtccccaagagcgtgagaaagccatcttgcaaactgtgcatcacaatgcctactccgaggatccttatgcccaggaatttggtataaagattgatgagcg

SEQ ID NO: 12792 - DNA, 274 bp, Zea mays
  Clone ID: MRT4577_111663C.1
atctcgcttcacaataaaacacagcttaaaaataaaataactgagagaaatagaattcagcaaatagttatttgttgcacttgaactgaaacgtactgtactgtaaattatgactcattttaagtgacctttaaaatcagatgtatctattaagcttgtgcaattatagacataaagaaatgggtgacaggcttaacctcacctatgaatgtacagtatgtggatttgtgaaactgactgtaggaagtcaaaaacttgtactgtgtcttgtgtt

SEQ ID NO: 12793 - DNA, 487 bp, Zea mays
  Clone ID: MRT4577_111664C.1
gaaggtttggaaacgtggcgtggtttctatcaaagcataaggcccacacagatgggtctttctctgaatattggttagataccatcgttctcatttattgggtcatctaccttctatttttcaaacttgatacatgaccataatggaggagcacactacattctagatcatgatgcctatggatgtagtttgtggcatcactatttggtcttatctgaaatattgagtttgtgtaatttcttttttttcgcagatatgtcctctactgcatttattgagcccctccctgtgattgattttgttgctcagcttcttgacagagatatctcagttagaccattgtctgattctgatcgtgtgaagattaaaaaagccctacgaggtgtgaaagtcgaggtcacacaccgtggaaacatgcgtaggaagtatcggatatctggcctcacttcacaagcaacaagggagttatcattccctattgatgatc

SEQ ID NO: 12794 - DNA, 259 bp, Zea mays
  unsure (1)..(259): unsure at all n locations
  Clone ID: MRT4577_111665C.1
cccntaccctttaatcaaccccaaacaaacncccccaagcagggatacaggggcaaaggggcgccaacaccaacgcgacacaggacacgaacaccaggaaccaaggcggcccccaaaaggaaagggcgcccgaccacacaagcacgtgggcagcaaaaacaacccaagaacaaaagccccccagggaccccgggcccaaggcagggggcgcccccctgccggaggaagacngacggaaaggaacggacagggcccaccc

SEQ ID NO: 12795 - DNA, 274 bp, Zea mays
  Clone ID: MRT4577_111666C.1
catcacacattcacccattctccgctaaaccgaccccgacacacattcaacacacacacacaaacacaccggggggggggggtcccccctctgctcacaaaacaaacatccaaatccaggcgcccataacacaacaccacactcctgaacgcgtgagaacaagccccgataaaactcacagggacaccttgtccagaccccaaatgacattgccacaataaaacagcccacccagcccaaacaccaccgccaccatcccgtcctcaggcaacca

SEQ ID NO: 12796 - DNA, 449 bp, Zea mays
  Clone ID: MRT4577_111667C.1
ggaagaaagaaagttataatgtaatagaactgctaaagtagatgctaataatgaagataaaatgttgacatcaagtctgcaatcattatatcaagtctttgatgtcttccgaggaatgtaaaccattccgattctagcactaagctcctcaaacttgaccctcccaagtgacttagcgagcagttggttctaagtgttgaggtagttattcaagcagctggtagtgacgtgacatttgacctagaactgttgtcatggaatatgtgggttcttcgccaagaccaagacatacttattatccaccccgagctttactgctccaacatttctgtcaaagagaccaatcagagagacttgccaatggttagattttttttgatgggtatgtatatcgaataatacaatccgatgggtattatatatgttgccatctctagtagcatctccat

SEQ ID NO: 12797 - DNA, 521 bp, Zea mays
  Clone ID: MRT4577_111668C.1
gtggggttttttttttttttttttttttttgggcttttttttttttttgcgagaaataaaggggtagtgtttatttatacacaaacttactacacgataccactatgcaaatgcagcgcgtgatgcgtttggaaagcatgaaacaagccttttattggaaggagtgctagttgatttgttttcagcctgactaaaaaactccctccactaggcagcaggggtaacactagggctaggggcacggatcaggccttggtgcaggatgcccagttgcaggacgccccgtaggaacagttaagccttttgttttcggggccggacggctttgtgggccgggcacacatgcacgggctgaactggcaattgtccccgtagtcctaagtgggggggtcccggtgaccgccgttcctggacttgcaactgttgtttttgccgtgggggcacggtacggggcacccagatttggcgtcaaaccctatgccctaacgatgcctcttaatttcctctaggggtctccggtt

SEQ ID NO: 12798 - DNA, 341 bp, Zea mays
  Clone ID: MRT4577_111669C.1
gccttaatcgcaacctttttttaaaaccctttaggcaaagcaagccgaacgggcccgaacggaatttgggacttggggtgggcctcctgcttggcctggccggtgggggcaacgctttgccgcccgggggggccaaggtgccagtgggcttgctgggcggccaacgccggcggaggcaccggcccggcttgggctaagggcccgggccgctctagttgcggggtgctgccggttggtcccgctgggtccggttcaaatccgttaattgccgtaggcaagagttggcctcaattttaaacggagccaaacggatgctagctgccattcgtggggaccaaatt

SEQ ID NO: 12799 - DNA, 496 bp, Zea mays
  Clone ID: MRT4577_11166C.1
aaaccgggttgtttgtttcccctttcttcccaggttttttttggttttttttgggaattaacgcttttttccacaaaatttggttcccggtggtcttttttctcccccttccggggggggaaccaacccccccttgttttgggggttttttttttttgagaaaatttttttttcccgtgggcaaccagttaaatggggccatggttttgttaccttttcccggggttaagggcctccttttttgaccccccccaggtgttttttgggtccgggggtttcccccctttggaattagctttttttccctggggccttccttccccccccgtttcgggccaagattttttttcctttcctttttttaaagaaagggttttatctttggggctcccccttttttcttttttggaccccccctttttttgtcttaagcttccccccctttttccgggtcccttttttttttcctcttttctcaaaggtcttgttttttttt

SEQ ID NO: 12800 - DNA, 305 bp, Zea mays
  Clone ID: MRT4577_111670C.1
tttatatttttcccacagaactcatctctcgagcacagttgtaatttatagatagactggcgaaaaactactagaaatcattatacttcataaacaaacattttgtactctgttctaagttacttagtcacattatcaaacatctttttgacaaaaattacttattatcttatatataatttctaaactttaactataatttaattattatttcatcacaattcctattaatcaaacacaactatgtctttctcaaattcttaaattctgaattttctttttatattataattgtttattcaaat

SEQ ID NO: 12801 - DNA, 492 bp, Zea mays
  Clone ID: MRT4577_111671C.1
gggggcggcagcggcagcggcagcggagaggagcgccgccgcggggtgccgtggaccgaggacgagcacaggctgtttctggaggggcttgagaagtacgggcgcggcgactggcggaacatctcgcgctggtcggtgaagacgcggacgcccacgcaggtggccagccacgcgcagaagtacttcatccgccaggccagcgccgccagccgcggcgacaccaagcgcaagagcatccacgacatcaccaccccgtgatggctcctgctcgtggaggacaaagctagcaccgagagatccagacctggctactgctgctacctgcattttatctttacctttgcgagacgggaacaaaaaaaaacaaacagccgtccctgtggttgtagaaatgtaggcaaagctaagttagcctggctggaatctggggtccggtataactgtattaagcggcactacaatgactatcgaataaataagttttgcaagttt

SEQ ID NO: 12802 - DNA, 745 bp, Zea mays
  unsure (1)..(745): unsure at all n locations
  Clone ID: MRT4577_111672C.1
ccggccgggacagcaggcacagaaattgcctgcccggttgctaacattcctttgtcgaatgtggagcgtctgcggtctacgctttctgcagtttcactgacggagctcattgaattagtcccgctgctggtgagcagatcatcgacatcggcagatgcacatcctgacaagaagaagcttttctcagtgcaagatttcttcagatatgcagaaattgaaggaaagcgattctttgaagagttggacagagatggtgatggccaagtcactctagaagatctcgaaattgcaacgaggaagaggcggttaccaaggagaaggaagcaaccattctccgagcgtataccacgttgtgtttgagcaagtctggaacacttcacaaaagtcaaattttgacttctttgaaaggtgctggacttccagccaatgaagataatgccgctgccatgctacgttatctaaatgctgattcagaaggatcaatctcatatggccatttccgcaacttcatgcttctacttccttcggaacgtcttgaggatgatcctcggaacatttggtttgaagcagccaccgttgttgctgtccccccacctatagaaatatctgcaggaagtgttttgaagtctgctttagctggaggtcttgcaagtgcgctntctacctctctgctgcatcctattgattcaatgaagacacgtgtccaagcatctacgctctcattttctgagctcatttcaaagct

SEQ ID NO: 12803 - DNA, 675 bp, Zea mays
  unsure (1)..(675): unsure at all n locations
  Clone ID: MRT4577_111673C.1
gtacgcctgcaggtactggtccggaattcccgggtcgacccacgcgtccggcggccgatgcgccgtgcagcgctgcggggcagggccgctggactaggtggggggccagggggcggtggcgggaggattgagtgcctagacggtcgcccaggagcaggtgtagctacttcacatcgactgactccaagatggcaatccagttgcgttcgctcttccccttggcgttgcccggaatgctggccctccttggctggtggtggtttttctctcgtaaaaaagatcggctcagcagcagtgataagcaggtggagacactgaaggttggccctgccatcaaggaccgacggctcagtgaagaggcctgtcctggagttctgtctgtggcccccactgtcacacagcctcctggaagggaagagcagcgctctgtggacaagccttctacagagcccctggccttgccgaggactcgccaggttcgacgaagatcagagtcctcaggcaacctccccagcgttgcagacacgaggtcgcagccaggaccgtgcagagatgagatcgccaaagtggaactctccctgatgggggacaaagccaaatctattcctcttggatgtccgcttctccanaggatgcgtccttcccctatgaagcagtgganagggtgtagcagga

SEQ ID NO: 12804 - DNA, 3025 bp, Zea mays
  Clone ID: MRT4577_111674C.1
tgcagtttcactgacggagctcattgaattagttccgcagctggtgagcagatcatcgacatcggcagatgcacatcctgacaagaagaagcttttctcagtgcaagacttcttcagatatgcggaaattgaaggaaagcgattctttgaagagttagacagagatggtgatggccaagtcactctagaagatctcgaaattgcaacgaggaagaggcggttgccaaggaggtatgctcgagaattgttcaggcgtacaagaagcaacttcttttcgaaatcaattgggtggaagcaatttttatccttgatggaacagaaggaagcaaccattctccgagcatataccacgttgtgtttgagcaagtctggaacacttcacaagaatcaaattttgacttccttgaaaggtgctggacttccagccaatgaagataatgccgctgccatgctacggtatctaaatgctgattcagaaggatcaatctcatatggccatttccgcaacttcatgcttctacttccttcagaacgccttgaggatgatcctcggtatgtctgatgtatcctgttagaagaaacctgtgattgaattggctttagggaatagtgactctgcaatcatcaccaattctgacaattatcttctctttacttacaaattcactcaggaacatttggtttgaagcagccaccgttgttgctgtatccccacctatagaaatatctacaggaagtgttttgaagtctgctttagctggaggtcttgcaagtgctctctctacctctctgctgcatcctattgattcaatgaagacacgtgtccaagcatctacactctcatttcccgagctcatttcaaagcttccacaaattggacttcgaggattgtatcgaggttctatcccagcaattctcggccagttttcaagccatggtttgaggacaggaatctttgaagcaagcaagcttgtattaattaatgtcgctccaacacttccagagattcaagtgcaatcaattgcatccttctgcagcacagtcttagggactgcagtccgtatcccttgtgaggttcttaagcagcgattgcaggctggaatattcgacaatgtaggggaggcgattgttggcaccatgcgacgagatggcccaaagggattttttcgtggcactggggccacactgtgtcgcgaggttcctttctatgttgctggaatgtgcctctatgcagaagctaagaaggcagcacagcatgttttgaggagagacttggaagcatgggaagtagtggcagttggagcattgtctggaggacttgcggcaatagtgaccactccctttgacgtgatgaagactaggatgatgactgcccctccaggcacaccagtgtctatgcagatgataatcttgtccatccttggaaacgagggtccacttgggctctttaagggcgcgatcccccgcttcttctggattgctcctcttggagcaatgaactttgcaggctatgagcttgccaagaaggcaatgataaaagatgagaaaaattccagtgagtcaacatgctgatttcttgccaagaaagcagtgatcaaccatgcaacttttttattttatttttgggtccatacggctccgggatgatcctcggaacatttggtttgaagcagccaccgttgttgctgtccccccacctatagaaatatctgcaggaagtgttttgaagtctgctttagctggaggtcttgcaagtgcgctttctacctctctgctgcatcctattgattcaatgaagacacgtgtccaagcatctacactctcatttcctgagctcatttcaaagcttccacaaattgggcttcgaggattgtatcgaggttctatcccagcaattctcggccagttttcaagccatggtttgaggacaggaatctttgaagcaagcaagcttgtattaattaatgtagctccaacacttccagagattcaggtgcaatcaattgcatccttctgcagcacagtcctagggactgcagtccggatcccttgtgaggttcttaagcaacgtttgcaggctggaatattcaacaatgtaggggaggcgattgttggcaccatgcgacaagatggcccaaagggtttttttcgcggcactggggccacactgtgtcgcgaggttcctttctatgttgctggaatgtgcctctatgcagaagctaagaaggcagcacagcatgttttgaggagagacttggaagcatgggaaatagtggcagttggagcattgtctggaggacttgcggcaatagtaaccactccctttgacgtgatgaagactaggatgatgactgcccctccaggcacaccagtgtctatgcagatgataatcttctccatccttcgaaatgagggtccacttggactctttaagggcgcgatcccccgcttcttctggatcgctcctcttggagcaatgaattttgcaggctatgagcttgccaagaaggcgatgatcaaagatgagaacagttccagtgagtcaacaaaagagaacttgccaagaaagcagtgatcaaggatgagtgtgaatctagggcgtcaatacaggacaagaaaaccatgatggataccacaggataatctaacgtttacctggttaacatctatggtgcaaagaaattgaaaccatggaacagttttttttgtgtgtgtgttcatgtagcagagaagcaacagaacatctgccttttttgatacttgaatctaattttgggttgccgcgtctttttgcccctctaggaattccattcccataggccttgagatggttgtatagtatacagtacatgagagagacagatgcacatgctggagctgttgctcttttgtttgttatttgacgatgatccatagccttcctggttaaacatgatgtaaatttgctcttgtacttaccctgatgaggacagttggctttgacccaattgttctggtgtttgaaatggactgaaaggcgacgagg

SEQ ID NO: 12805 - DNA, 675 bp, Zea mays
  unsure (1)..(675): unsure at all n locations
  Clone ID: MRT4577_111675C.1
ccccgcgtccggccaccgctcggctctctagtgcccagccgagctccccatggcgtgccctccctgcatccatggccactgtgcagctccctgctcctccctcctccagccgcgcgcaaccggcttctcctccacgtgcccctgctaccatggctggcgcgctctctctctctctctccagcgccgcgcccctccccctcccctctgctcgctcgcgcccggccggagctccctagctcaccgacgtttctccctgtgcgccgtggcttccctttcaccgagctccctcagccatggcgcgcccctctccctgagttccttccccagccgcgcgctctggagcacccctgcgcgcgcgtcctctcatggcgtccagtcgctcgctccacagctcagatcttgcccatggcggctccccctgctcggcaccgcctcgagctcgctatgccgtgcgccctgctctctgttgctgctcgtcggtgctctgccatggagctcgcccgcgacgctcggcgttctgtctgttcgtgcttgcccctgcgtcaaccccatcatcacgccggtatcctgctcgtgagtttctcctgcgcactatggtgctggccagtcttctcttccagctcgctcccttcgctagccgtnctagctccaatccatggcgctcggcacctacac

SEQ ID NO: 12806 - DNA, 390 bp, Zea mays
  Clone ID: MRT4577_111676C.1
tggcttggaacctttgggctgatttatgtgcttgtttatgtgcttggctatatactcgcctaaatcggtctgtgaatacgttttccataccatgtgcagcgactaaaccgacctcccacgtcgataatgcggcgaatgctatgaaaggggagtacgcaagaggaccaggatcgaatcctgccgagtaaacgtagggggtcggattacaacgatgacaaagacgctgactccagtcgatatgaacatgttacacgtcgcggattaggtcgcgtcgagagaatacgctaagtccactcatgccatgacattcgatatgaacgtgaggtagtacacgtccaatgcgtacgactttgacatatcatatagtccagtcgattgtgacctatagag

SEQ ID NO: 12807 - DNA, 380 bp, Zea mays
  Clone ID: MRT4577_111677C.1
cggggagaggcgtccccatcctgtttcctgggaaagagtcttcctttggaagtgtcaccgctttcccaaaagaatagttgggggggggctgtgccccgtagacccctccttcagctagctcggagacgcccccatcccctatcggttcatgtgaacgtgattaaacatactactgttggatgtggggccagcagacaggcccctgggggcctctttaaccacggctatttttgtgtaacagacacggaactgtgtgagctgagagactccagtgctgatgagatgactggtgaccggctgtgttttcaaacacagacttccatgcttgatgctgtgaaatctgacaagctggtctgcattcctgcgacgcggactggtac

SEQ ID NO: 12808 - DNA, 536 bp, Zea mays
  Clone ID: MRT4577_111678C.1
atcaaatggtgttttgtctcctgattattctcgaattatgtaaaacgaatgttacaagtttataggttggaccagcttaaaaagaagatatttgtgaagaataatgataactgaattggtgaagaggatgaaaacacaaaaaaaagtttcagttttatggtttttcagtagataagtgaaatgtcatgtgaagttgcttcttcaagtcttgcacgtactgtttcggcagtcgacattttattgatgcgaacaagaagatccccaaaagatgcttttgtttcagatatccaatccgggaccaattgcaacatcagacttaattgttcttccacttcccttctatcagttatattgatttggtttgcaataatcttgtaaagaagctcctccttcgtgatgactgtccgatttgttgagtgaaacactctatgaatcaaattaacaagctgtggcaaattgtgcttttcgggttcagactttgggctctttattattgactgaaggaggctatcatcatcagaagcattatcaccttc

SEQ ID NO: 12809 - DNA, 398 bp, Zea mays
  Clone ID: MRT4577_111679C.1
ataacttcttgggcgaattttatacccggcgcaagaagggtgggtatgtataggcatgcccgaaacgcaagacaaaaagagcccgagaagcccgaacaagtgacgacggggctttacagggactctgtttctacctagggccctaaaacaaagagccagggttcccctggggctgggggccgccgccgccgccgccgccgaagcccggggcgccgtacccggggcttagcagcggcggggagaaccatgaccccgcgtagttaaactgcttttccccggccgccacgggccccgccgcaccggtctgtgcgcccctgctttcccgggccatggccggctatagcggaagcctccgggggccccgcccccgcgcggcaggaggtcgtgttgcgtacccg

SEQ ID NO: 12810 - DNA, 1421 bp, Zea mays
  Clone ID: MRT4577_11167C.1
cagcagtgagctcagtacacagctaggcacagcgacggggtccggtccagggccatggctaaggaaagcaagctaacggccggagtggccgccgcgctgaccgtcgtcgctgcttgcgcgctatgcctgctgctgccggcgacggcccgcgcgcagtccgggtgggattctacgacaccagctgccccaacgccgaggccctcgtccgccaggccgtcgctgcacccttcgccaaggacgccggcatcgccgccggcctcatccgcctccacttccacgactgctttgtcaggggctgtgatggatccgtcctcctcaccgtgaatcctggcggcgggcagactgagcgtgacgccctcccaaacaacccgagcctccgcggcttcgacgtgatcgacgccgccaagaccgccgttgagcagagctgcccgcgcacagtctcgtgcgccgacatcgtcgccttcgccgcccgcgacagcatcagtctcaccgggagcgtctcgtaccaggtccccgcgggccggcgcgacggccgcgtgtccaacgcgacggagaccgtcgacctacccccgcccacctccacggcgcaaagcctgaccgacttgttcaaggtcaaggagcttagcgtggaggacatggtcgtcctctccggcgctcacaccgtcggccgctccttctgcgcctccttcttcaagcgcgtctggaacacaagcacgaaccccgctaccgcaatcgtggacgcggggctgagcccgtcgtacgcgcagctactacgcgcgctgtgcccgtcaaacacgacgcagacgacgccgatcacgacggccatggacccgggaacgcccaacgtgctggacaacaactactacaagcttcctgcctcgcggcatggggctcttcttctccgacaaccagctgcgcgtgaacccgcagatggccgcgctggtgagcagcttcgcgtccaacgagacgctgtggaaggagaaattcgcggcggccatggtaaagatgggacgcatccaggtgcagacagggacgtgcggagaggtccgtctcaactgcggcgtcgtcaacccgagttcgtactcgtcgtcgtcggcggtggagctgggttcgagcgcgccagcagccgtcggtgaagagggctacgccgcgagctagtagctcgcataccagtcttcggccgccgtcgttgtcgagatcaatgattttttttctctctctcgcatgcatccctcttctgcttttattttgtcgcgtggactgtggtttttgttgtgtcgatgatctttgttgtgtgccagtgccactaaacgtacgcatgccggccggcgaactcttaacttcggtggcgggtaataataagcatatgtatgagtaagaaaaaaaaaaaaaaaaaaaacacgcgtccgcggacgcgtggg

SEQ ID NO: 12811 - DNA, 344 bp, Zea mays
  Clone ID: MRT4577_111680C.1
cccacccctcccgctttcctggaacatgaaactagcgaaaaccatcgctgtaatttccagtttacaactcaggaatcgatatacgtgctcgctgaaactccctggccttctatgttgcttccataccctcattttccttaacaagccccaagatcctcagccatgatgggtacctcgtaccctattggacgaactctaggacattcttggggaaaagcacctggtgcagcagctaatcgcgccgatttagaagcctgtgtacaatctcgtaacgaatggggcgaccctccttttgacactaatgaaattatcgtaacagcttgcaaaaagaccgcttaactact

SEQ ID NO: 12812 - DNA, 1645 bp, Zea mays
  Clone ID: MRT4577_111681C.1
ccggccgggtacctctagtccttacccgcagctggcaaacaaatggccaccgtcctgagcagcccccgcgcgccggccttctccttctccctccgcgccgcgccagcgcccactaccgtggccatgacccgtggcggtggcgccagcagcaggctgcgcgcgcaggccacctacaacgtgaagctcatcacgccggagggggaggtggagatgcaggtgcccgacgacgtctacatcctggactacgccgaggaggaaggcatcgacctgccttactcctgccgcgcggggtcctgctcctcctgcgccggcaaggtcgtctccggctccctcgaccagtccgaccagagcttcctcgacgacagccaggtcgccgacggctgggtgctcacctgcgttgcgtaccccacctccgacgtcgtcatcgagacgcacaaggaggatgaccttatctcctaagcaaattaataaagcaccgccaattatcacgtcgacttgcaagcacaggacaggataatagaagatgtctcaatactggctatgcatgtaatttttttgggttttgtccgtttcaaactgtattctaaattaaaaaaaaaaaaagagacagctagcccacatagcccttccagcaacgcgcgatcgaagggttgagagctattggaagcaagtactacgtgcatggcgaggtttgcgctcgtggcgtgcgctgccgcggcggcggcggcgctgctgctgctcggcgtggcggcggcggacgtggcgtcgatcatcacgcaggacgtgtacaaccagatgctgcccaaccgcgacaacacgcagtgccccgccaacggcttctacacctacgacgccttcatccaggccgtcaacttcttcccggggttcggcaccggctccagcaccgacgaactcaacaagcgcgagctcgccgccttcttcggccagacctcccacgagactaccggtggcacgacaggtgccgccgaccagttccagtggggttactgcttcaaggaggagatcaacaaggccacaagtcctccctactatggacgcggaccaattcaattgacagggcaggccaactaccagcaagccggggacgcgataggcgaggacctggtgaacaacccggacctggtgtcctcggacgcggtggtctccttcaagacggccatctggttctggatgacggcgcagtcgcccaagccgtcgtgccacgacgtgatcctcggcaactggacgccgtcgagcgccgacgcggcggcggggcgggttcccggctacggcgccatcaccaacatcatcaacggcgccaaagactgcggcgtggggcaaaacgccgccaacgtcgaccgcatcggctactacaagcgctactgcgacatgctcggcgtcggctacggcgacaacctcgactgctactcccagcagcacttctgatgaactgctgttcgacttgactgctagcactgttgctacagtataagatctgtgtccggacgtgttccatacatattttattattttaatacaataaaggctgatgatccggttatatatatatgaaatctttatcttattatgaacatgggattttcgaaatccgacgctagaaaaaaaaaaaaaaaaaaggccccta

SEQ ID NO: 12813 - DNA, 515 bp, Zea mays
  Clone ID: MRT4577_111682C.1
cggtccggccttccctggaaaaaaaaaaaaaaaaataaaaaaaaaaaaaaaaaaaaaaaaaaaaaaaaaaaaaaaaaaaaaaaaaaaaaaaaaaaaaaaaaaaaaaaaaaaaaaaaaaaaaaaaaaaaaaaaagggggggccccttttttgggtccccctttttcttccccgggcttgcgcggtttttttttttttttttgggcccctaaatttaattggggggggggggttttacaacggggggatggggaaaaccctgggggtgcccccttttttccctttggggaaaatcccctttttccccgttggggtattttcaaaagggccccccccctttcccctttccaaaattttgccacccttattgggaattgggaccccccctttggcgggcctttaaacgcggggggtttggggttttcccccctggtgccctcttctttttccggggccttatggccccttttttttgtttttttcccttcttttttggcccggtttgccggttttcccc

SEQ ID NO: 12814 - DNA, 895 bp, Zea mays
  Clone ID: MRT4577_111683C.1
ggccgcttttttttttttttttaagggatttctctaatttattgacacttgatgaaaaaaaaggggtacatgtgaggttgaactgttcgtttaaatagttgaacctcatatattccgttcactctctcttcctatcatttgttgaatcaccctttggttatcctttttatcttatacctgtgtttttggttcaagaataaagaacaagccggcgacaaatattcgaaaacagaggtaataatttagaatacagtttgaaacggacaaaacccaaaaaaattacatgcatagccagtattgagacatcttctattatcctgtcctgtgcttgcaagtcgacgtgataattggcggtgctttattaatttgcttaggagataaggtcatcctccttgtgcgtctcgatgacgacgtcggaggtggggtacgcaacgcaggtgagcacccagccgtcggcgacctggctgtcgtcgaggaagctctggtcggactggtcgagggagccggagacgaccttgccggcgcaggaggagcaggaccccgcgcggcaggagtaaggcaggtcgatgccttcctcctcggcgtagtccaggatgtagacgtcgtcgggcacctgcagctccacctccccctccggcgtgatgagcttcacgttgtaggtggcctgcgcgcgcagcctgctgctggcgccaccgccacgggtcatggccacggtagtgggcgctggcgcggcgcggagggagaaggagaaggccggcgcgcgggggctgctcaggacggtggccatttgtttgctagctgcgggtaatggctggagtgagcggctgctagtgctggtctgctggacagatagcttccctgccccagatatgcgaatgagatgatggatggcccc

SEQ ID NO: 12815 - DNA, 184 bp, Zea mays
  Clone ID: MRT4577_111684C.1
gccactcgttcgacgacgcgtcagtctgcatgccgggggcaccactatctgagtagggggtaagctcgacctaattactttcacacgttaccccctacgtactacaggatactgacctccgcttccagctgtcatagtgcagatattttgacgcaagagctatcaccatctgaccgactactta

SEQ ID NO: 12816 - DNA, 1578 bp, Zea mays
  Clone ID: MRT4577_111685C.1
aatgtgatcagcagtttcgcgttcgtggccacacacttcgcaagtgtcctcatccacaatttttttcagtagcagattttctttggactgaattttcccctgggtgagtagccaagcgaagaattgggctctcggtggcgctttattgctccaaatgaaggctgcagcagggttcgtcaccctatcttgctttttgaggaaatcatagagcttggatgtttggaattttccactctgagagacaaacgaacagacgcgagtgtcttgctgttgactgagggcagaatcattgatgatgtcctggacttgatggagttccatctgtgcctgatctgaaagtctagggactagagatagtccatttgtgacaatgtcgtggacacttgattgcttggccaaacagtgagagtagagcgctggtaggcgtgttgccagatcatcttccccacaccaagtgtcatgccagaagtttgtgttatggccatttccgactacggaagtagtgatggtctggtagatgggtagcaccgcgcgcaggttgttccagtgcaccccgtgcacatcaccctccaaggtagccacgttgcagtttgctcttgcccaagccgcccaagaggagttaggagctgaatgaaacctatgaattagccagacagcaggcagcagccatgtccaaggtcttcaccctcgacgcggtcgccaagcacaactccaaggaggattgctggctcatcatcggcggcaaggtgtatgatgtgacgaagtttttggtagaccacccaggaggtgatcatctcattcgcatatctggggcagggaagctatctgtccaccagaccagcactagcagccgctcactccagccattacccgcagctagcaaacaaatggccaccgtcctgagcagcccccgcgcgccggccttctccttctccctccgcgccgcgccagcgcccactaccgtggccatgacccgtggcggtggcgccagcagcaggctgcgcgcgcaggccacctacaacgtgaagctcatcacgccggagggggaggtggagctgcaggtgcccgacgacgtctacatcctggactacgccgaggaggaaggcatcgacctgccctactcctgccgcgcggggtcctgctcctcctgcgccggcaaggtcgtctccggctccgtggaccagtccgaccagagctacctcgacgacggccagatcgccgccggctgggtgctcacctgcgtggcgtaccccacctccgacgtcgtcatcgagacgcacaaggaggatgaccttatctcctaagcaaattaataaagcaccgccaattatcacgtcaacgacttgcaagcacaggagagtagaagatgtctcaatactggctgtgcatgtaatttttttgtccgtttcaaactgtattgtaaactattacctctgttttcaaatatttgtcatcggcttgttctttattcttgaaccaaaaacacaggtataagataaaaaggataaccaaggggtgattcaacaaatgataggaagagagagtgaacggaatatatgaggttcaactatttaaacg

SEQ ID NO: 12817 - DNA, 211 bp, Zea mays
  unsure (1)..(211): unsure at all n locations
  Clone ID: MRT4577_111686C.1
ggcgaggggggcaaaacgggggctggccacaaacggcaggcggcgcacgggcggacccccggcgagaggggggcncaagcagcgcnggcncaacagccgggcaaccaggaggaggagcgggaaagcaaccgcggagccaggaccggcaagaacgagcggancaacacgncccgncaggggccgaacagccacgaggacagcgccccgggag

SEQ ID NO: 12818 - DNA, 436 bp, Zea mays
  Clone ID: MRT4577_111687C.1
ctttgggctgatttatgtgcttgtggatgtgcgggtagtggtattggtgcgccttcgttccggatggctggtttgaagtggcgtaataagtattccttattgtgtacttagaagtgttggcctctggtgacgacgctgtttactgaggtgtagggtcgaggatttgtttgatgctacgctgttgctaaattgaatggttaagactaagcaggatttggcgtaatgagttattgcccaaccttcagggcctccggagcgcccccccccctctctctgctgctgagctaaaaaaagaaaaaagaaaagaaacggctaaaatgtgtggatagcgagcccggatgctcgcgcaccctggcgattcgcgcccccccccctctcggagggtccccggcttgtacgcaacccagttgggcccgcgatccgcgatcccgcgagc

SEQ ID NO: 12819 - DNA, 1065 bp, Zea mays
  Clone ID: MRT4577_111688C.1
ttgggttaaaaaaaggaacgggtttttccaaaatttacccggaattttaaaaaaattttaaggtttcaaatttccttttcccattagggggcgcaaatttttgggaaggggattgggtggggcctttttggtttttcccccactggggaaaagggggatttcttccaagccaattaaatggggaacccccggggttttcccatccccgcggttttaaaaggcgggcaaggggggggggttaataggctcccttttggggggaatggggtacggggccccccctgggggtggcgggtttggaaaaatttgtattggaattcccccacccgggggggtcccttgtttttgagggggccggggccttgggggcccttttttttttttttttgggtttttttttttttttttttttttttttttttttttttttttttttttttttttttttttttttttttttttttttttttttttttttttttttttttataatcagaccatagagttggccaagaacttcgtttccttaaggccatggcccgtggaaataatggtgccttgcattgcgttcattcatatatagaacaatcagcaaacaggaagatcgtgtaattgcaggacaaggctatatatatatatatatatatagaacaatctgctaaagctgagcctagccagtggttcattacttattccaaacaagacgcaaaaatcggatgcaacttcttttctccatgcatcccctcttcttcagctaaatgtcgtcaggaccgctggggagcggggcgtagccgttgggactcgcaggagctccgttcgatttggcaactggtatgcacttgaggacggcaccgacgaccaagctgaccgacccgaggccgacgctgagcagccaaagccgccagtcgagtgggacggtgctggcaaaggtgccgagcagctctacgatcaccacttggaacaggaccgtcgcggctatgatcgcgatgaagatccagttggtgaccatgccgcggaacacgttgatcttctccatttctctgctgtttctcgagccgaatacct

SEQ ID NO: 12820 - DNA, 581 bp, Zea mays
  Clone ID: MRT4577_111689C.1
ccggccggctctgccgtcgcctgtccctttcgcccgtgcttctccgccgtcaaggccgcctcccactgcgaagagactccgactcagatggccagccgctgggtccggcccgaggtgtacccgctgttcgcggcgatcggtgcgtggtgcgtcaggcattctgcaggctttaatcctcttccggaacatcactgccaaccctgaagtcatgcctaacaaggcatggagggcagctgcagtgcttgagaaccatgacgaggggagacgctacgccatgcatggcctaagaagctacgcgcaccacaagactcctgagatcatgcctgcagttaacaagttcttcactgaccctaagtgaagcatgttgattggcctactactactactacttgctactgttgattttacactctgctggcaactcaatatgttgaggacatccatgacctataaaaacactttgagcgcttggagatgactcggtatatgtatgatgctcgatgagttggatcgatcatgcttgacattcatattcatgtgtcatttgcacgctacatactagatctgtaaaaccgtctttg

SEQ ID NO: 12821 - DNA, 471 bp, Zea mays
  Clone ID: MRT4577_11168C.1
gcctcgcctcgcctcccttctctggtcagtcttctcggatctccggctcaaattcgtctccccaatccccagttccaggttcttggaggaggggggaggccatgggcagcttcgccaagctggccaagaggtgcgtggagacggaggcgccggtcatggtgaagatacaagagctgcttcgaggggtcactgatgtgatgtcgcttgcgcagggaattgtttattggcaacctcctgagacagccctgaacaaggtcaaggaaattgtatgggaaccagcaaccagtaaatatggtgctgatgatggccttcccgagcttcgagaagcacttctcgggaagcttcacagggagaataagctaaccaagtcatcggttatggtgactgccggtgcaaatcaggcttttgtaaaccttgttctgaccctttgcgatgctggtgattcagttgtcatgtttgcaccatattact

SEQ ID NO: 12822 - DNA, 1323 bp, Zea mays
  Clone ID: MRT4577_111690C.1
tctgtgatcatcttgctaacaaccttccattatcttttcctccttcttcttcttcttttgctccctgctttctctagctctcagctcagctcagcgcgctcacaaacaaatatctgtcctcttcgatcggatccacaactactaaagcaccaccgtaccaccattaccagaccggcgcccgtatgcgattacccggcaaattagcacccgggttctgatcgatcatcgtcagcccttggattcattccatcctcgttccattgatacggtacggtggccaagctaaattaagaagcccacacccagcgtcgtcgtcgtgcttgcaattgcatcttcttccacatgtctccttcaccgccgccaagcagcggctgcagcctagcagtactagtaggcggcacgagtactgcagggtcgtccaacatgagcctgcgcgagaggagggacgccgtcaggcacgccgccgacgccgccctcgccgccgcacggggcgccgcgccgcgctggagccgggctttggcggcggagctctcgtcgcagtcgcagtcgcagcagcatggccggtggcactggcacgacgacgacgcgccccacctgcttgtcgccggcgccgatgcacggccttcgggccatcagacgtgcttgccgtgcgggacggcggcggcggtggcagcagccggctgcaggaagaccgtgccgaggcggcggaggctccgggtccgggccaggcccaagagcggagccactacggcctggtccgctggcgctgtcgcgcgggtcgtggcgaggcggcgggcgcgggccggggcgctgaggaggatggtgccgggagggcgagggatggcggacgagtgcacgctgcttggtgagaccctagactacgccgtgtcgctcagagctcaggtcgacgccatgcagctcctgttgaggacgctccagcctccaggccacgccaacaacaacccttaatttgctgaagcagcagtagtgaggggaattcgaactactacacatatatatacgtactgaaatgtgatcaagaccgtccatcgttcatggatataatataagacatgcatcatgacggaatggagagcttttccccggccctctcttcctttattctcctcttgcatacgtgctgctagcagctctcttcctgtttgtttcttcattctgtagcactgagagagatcatgaggcgaagaaggtcatgtgtgcgtgccgtatatatatgtacagtacagtactagtgtgtgctacgtacgtgctactccgacacaaatatatatatgcatgtacataagtttttggttactcttt

SEQ ID NO: 12823 - DNA, 562 bp, Zea mays
  Clone ID: MRT4577_111691C.1
ttctttttcttcttcttgttcttcttttgctccctgctttctctagctagctctcggctcatcagcgcgctcacacgatcggatccacaactactaaagcagcaccaccatattaccaggccggcggccgtatgcgattacccggcaaattagcacccgggttctgatcatcgtcaggccttggattcattccatcctcgttccattggtacggtacggtggccaagctaattaagaagcccacacccagcgtcgtcgatcgtgcttgtgcttccaattgctatcttcttccacatgtctccttcaccgccgccaagcagcggctgcagcctagcagtactagtaggcggcacgagtactgcagggtcgtccaacaagttcaggcacgccatcctcaggaacctgctcctacggctcagcaacaaggacggcgctgcgtcgccgtcgtggtccagtgccatgagcctgcgcgagaggagggacgccgtcaggcacgccgccgacgccgccctcgccgccgcacggggcgccgcgccgcgctggagccgggctttggcggcgg

SEQ ID NO: 12824 - DNA, 518 bp, Zea mays
  Clone ID: MRT4577_111692C.1
cgcgacacagctaactaggaaggcggcctgccaccttagataagctctgtttcactatccatcttttttgcttttttaactcttaagaagcattttttttttgtggtgcctgaccagacctacttgttggtaagctgttgtgcgcacaaaccgggaagtcacaatacagaaatggcggactcattaggagtcgaacttttttattactttacccctttttacattctagttttgtgatccgcgcacggcggaagcctagaagacaaataacctaagggggggtagagaatgagatatatacgtctccattggggacccccgttggcctcatgtgtactgcaggctgcagacccacgctgctataaatgaaggggggctgatcaggaacaaaaaaaaaaattcctttttgaaaaataaaccccccccacgatgggtgggggaaaaatttttttttaaggggggccccattttcgagcttccgcccccccggaaataaattccggaccttttcttggggg

SEQ ID NO: 12825 - DNA, 384 bp, Zea mays
  Clone ID: MRT4577_111693C.1
gcctgcagtgataccgggccggctaattacaggggcgcccctttttggcacaagaaccagttggtggcttttttacaacaggttgggggttaacccggaacccttttatcacttccacaattggtggcccttggccaacttggtttgtggggacccgagggcttcttacaaaaaacattatttggggggccccctttttaaatggttaataaggggcaaccaaaaaaaaaagtttttgggagaaggccgggggcctcccaaaaaaaggaggtacaatggccaaaaattttgatttttttaaaggggggggggggtaaccccaaaccggtggtaaaaaagaaacaaaatattattttaaaagggggggggcccccggggaatcaa

SEQ ID NO: 12826 - DNA, 236 bp, Zea mays
  unsure (1)..(236): unsure at all n locations
  Clone ID: MRT4577_111694C.1
ccatggcctctcctactctgggcgcgacggcatcngacgtaggggtatcctctgaggctggatgctancntggtgtgtgtggacagtggactgcatcttcccttggcttgtacacatatagtagtgaacatgattcatttacatctattttcttccacgaacagatcttataccataacacactgaaacacgtcggagtccggtcctctttctaaaaaaaaaaaaaaaaattaaaa

SEQ ID NO: 12827 - DNA, 265 bp, Zea mays
  Clone ID: MRT4577_111695C.1
acatctgggggggttagaccccagagggggaggcactttgacccaaaaaagcgtgcattgcccaaacgcttatgaatggcgctaaatcaactttgcacaccaggatcaacataacattaagaccggaataacccatatataaacaggtgggggttgggtcaacggaaagaatgccattatgtaggaagggggaaggaaaaacaaaatataacttcatggggaactgtaaaggtcaaaacacttttcaaggcaaaggaatgaaaaa

SEQ ID NO: 12828 - DNA, 1292 bp, Zea mays
  unsure (1)..(1292): unsure at all n locations
  Clone ID: MRT4577_111696C.1
gccccgatctcgcctccatggacgcggtgccgcccgcgcgcgcggcgcggcccacgagcccgtcgcgagcgcccaaggcgatccgcagcaccaagccgcggggcctcgacgaggacaccgcggcgccgcccgcgttccccaaggccaagtccctcccctcctccgccgccggagccgaggcctcgctcctccaccacaaccaccacgcggacgtcccgatggacgcccgcgtctgggcggggctccccgacgacctcctcgtggaggtgctagcccgcgtgtcgcccttcctcctcttccgcctccgtaccgtttgccgtcgctgggagtccgtcctccacgacccggctttcctcgccgcgcacgccgcggttccctcccacgggccctgcctcctcaccgtctccaggggcggcaacggcacccactccccgccgcagtgcagcgtgctcagcgtccccctgcacgcccgctacaagctccccttcgccttcctccccgcctgggacctctggcttgtcggctcttcgggagggctcgtctgcttctccggcttcgacggcgccgccttccgcacggtcgtctgcaacccgctcacgcaggcctggcgggtgctccccgacatgcactgcaaccagcagcggcagctggtgctcactgtagacaagaaccgccgctccttcaaggtaatcgccgccagcgacgtgtatggggacaagactctccccactgaggtatacaactccaaggaggataaatggtcggtgcaccagatgatgcccacggcgaacctgtgctcgtcgaaaatggccttctgtgactctacgctgtacctggagacgctctctccgctggggctgatgatgtatagagtggacgcggggcgttgggagcatatacctgccaagttcccacgatccctgctagatggctatctggtggctggagctcgcacgaggctgttcttggttgggcggattgggctatacagcacactgcagagtatgaggatctgggagctagatcatggtagatcagtttgggtggagataagccgaatgccgcccaggtacttcagggctctgctgaggttgtcggcggagaggttcgagtgctttggacaggacaacttgatatgtctcacttcctggaaccagngcaaaggtcttctctatgatattgataagaaggcttggtcatggattgctggctgcgctagccagctgtgcaatagtcaggtctgcttttacgagccaaggtttgatacatcaatctattgagtacggcatatg

SEQ ID NO: 12829 - DNA, 225 bp, Zea mays
  Clone ID: MRT4577_111697C.1
ccacgcgtccttgtcttgagcattgccaagaactggcgggcttacacccacgaaggggtactaccatcatgggcggggcgactctgctgctgatatcgagaaggctgggctggactacaagatgagccacatttcgaccagcaggggcgcgagcttgaaactcttggaaggcaagactctacctggtgtccttgccctcgatgacgcctagatccagtgctgctg

SEQ ID NO: 12830 - DNA, 127 bp, Zea mays
  Clone ID: MRT4577_111698C.1
acgccgggacgtgagcagagtattcaccgtcgccgggagagacaacgagagaatatttggtaggtgtttctattcagatatttcgtaacctcctctgttctgttacagcatatttattcccacatgg

SEQ ID NO: 12831 - DNA, 618 bp, Zea mays
  Clone ID: MRT4577_111699C.1
cgggccgaagacgcgcacgcgcttgctcaagttccgtttcgtcatgaccggggagcgtcgggtccgcggtccgcctcttgccgccatttcggagaaacttggctgctgacagggacgcgacgagtgtggggtgcgaacgcagttaagcgcttgtgttaatacagcacagcagcaggctagcagcacacatcgacgacgacgacgacgacttggagtctccaccacgcacccaccccaattatcgcgcggcgcggcgctagccaagccagcacatatatatttaaacgaaaacagcgggcattgttgcgacatgaatttggcacatacttacgcgcggtaggcgacgagttgattgtcatgctgaccttagcatgcgtgtgtggtgtggttgtgcaatatctctcttgtctcacgatgcgtgtgtagggcaacacatggtgtcatcagagagcttgtgtcgatacagaggtatcgtatgaagggctaatggtcattcgatgtacaaaatttttaacttggaccatgatgccctgggttaagtggtccagagaaatatataagggcttactcggaatatgtgtaatttgactctataaataggagactttccaagcccgg

SEQ ID NO: 12832 - DNA, 101 bp, Zea mays
  Clone ID: MRT4577_11169C.1
agttctctataatgtgtctaagtggaccattgtggtcttcttattatgtcgctgtgttgtgaatatttgaggcatgccgcctagtcgtggtgggtgatggt

SEQ ID NO: 12833 - DNA, 193 bp, Zea mays
  Clone ID: MRT4577_1116C.1
gctgcatttggtatggtctgtggagggctgtaggcacacctcgtacctggagatgtgtggtgccatggaatgaccattctttgctttttttgctgacattttcttatgggtacgatcctggatataaacaggggaaacatggtatgaaccaccagctcaatgaagctaaaaataccatggttggaaacagcgc

SEQ ID NO: 12834 - DNA, 586 bp, Zea mays
  Clone ID: MRT4577_111700C.1
cggcaccggcactggcgcggtccagtgcaggcggtcctccggtggcgcgggcatgcggccctagccccggccccagcctcggcggcgaccaaccgccaccaggcgggcgcggccacggcacggcggggcggccacggcggcgcgggcaacggttgcctgggcgcgcaggccctagcggcgcgcagccccggcgcacgcgcgggtgcggcctgtgggacaccggcgttccggacgtggccccgcacggcggcggcggcccgtcccaagcctcggcgcgcgggcgcggctgcgctggccccggccccgtcgttttggcgcggcggctcccagccccgtcgacgcgggcgcgggtgctctgttcaggcgcgcggccccccggcccctcggtggcttggcacagaccggcgcacgagggcgggcgcggctgctctgcacaagcgcgcggcccctcggcggcggttcgcggcggcgcgggcgaggcccctggcccgggcgatggaatcccctgcgcaggcgcgctgtcaggcagccctgaccttggcacacgaacccggctgcagcgtgggcagatggcctctgcgcacag

SEQ ID NO: 12835 - DNA, 354 bp, Zea mays
  Clone ID: MRT4577_111701C.1
tgctcggaattcggctcgagctgagctccaccgcctttttttcactcttcgcccgtctcgggcaagccggccaatttccacaatcgggtgtggtgatacagttcggccttaacatcgttatcatggctgccagtggggacatgttaccctattacattgccccacaatattccagcggaaagcctaattggttaatcctgggctgcatgttgagtcattccacttacatgaataatgttgcactaaataacctattctaactaggaagacctgtccccccttctgcataactgtaatgactaaatcccgaagagtggcggttagaaaactgcgctccactatgcttttttcttt

SEQ ID NO: 12836 - DNA, 2288 bp, Zea mays
  Clone ID: MRT4577_111702C.1
ttcaccccgactcagctccggcaggtgtataacctctatcgccatccgttccctactccacttcaatctgctattcctgctccactccgcttcaatccgccgcccctgctccagtaggaacgttccccaccccggcaaccccccacgctagctactccggagcaccggaacgcaccgtcgcccccgtcaagcaggttgcgccgcccgcccgtggtgccggcgctgtgctggaggcggtggagctggggccgtggggaagcttctcgctggggagagccgggacaagctagagcgacggacatgggtcaccagtaagccacggtcaggggcatttcagtcctacctagcagtggtgatggcaaaaatctaacataatgattgaagcagctaggaaggcgcccatgttgtctgaataggaatgctctggtggatttgcagcaagaaaaaccttggaatgaatgtacaagccacttagggtgctgtattagagctgtaacaggatgggttcgttatgctgcgttgcggcacggcctcatggggctagcacagcaagccgggagtggtcctctattagccgtagcgacccaccctggcgtactggtgctggattttccccacctctgtctagagggtgggagtacaggatcaactcggaagggctgtcttatggatcccatggtgatagtggggtcgctgtgaactatggatcatcactatcatcaaatagtaaaggggctagtaggagctgggagaggaatgagcttccacaagatcaccgctactctacatctgagggtgccatttcgtatctcaacagcccagatatcagcttccagaatcaccatattatgctaccgatgctgcaagatctctagtgttgatgaatacatgagagtctcagtcgctgagcctattggttctttattattgtcagacggaatgtcaggtcaacataatagtggtggttccacgtcctcttgctctgatggaagcgaatatgatattgtacctaaatcatacacatcaacgccccgcaacttcccaagtcgtcgatcattcctgtcgaagccaatccaccctgtttcatttccagaacatgcactagaagcacaggaaactcgaagtcatgttgcaagcgcaagctccaacaatcctctgtgctctgaatacaagggaacaggagaactttgcttcccggactacggtagcggccgtcacggggagtcaggaaattggagtgctgcaagcagcatggatcttactgatctatcagaacaacccgaagctggacaagctggactactgcgtcctaacaatgcaatgcagaaaacaaggtgcgacctctgcgagaggcttctgacaaagaggtcaccttgtggttctcgtagaatcgtacgcaccggagatttgcctgttgctggtgttctaccatgctcccatgtctaccatgccgagtgtctagagcggaccacacccaaggggcagaagcacgaccctccttgccccgtgtgcgacaagctggctggtaaagataccgagcagtggtcaatctgcaggttgaaaaatgggttcccaaggttccgctcgctaggggaagggccttctcgggttttcagctgcgctgatgctggagattgcgttgctggggccgttcagattccaagatcaaatagcatcgggctattgactcgcagtggtcacaagaggcatgcatcttcgaagggagagcccagcaaagactcggctgagacatcaagaaatgcttgcatgtaacttcctaatgcactcagtaggtcttatgtccatgaccttgcattgttatagttgcaaggtcttatgtccatgacctcgcattgttatagttgcaaggttatgtatgcatgcttacggatgttttcatggcttaatggcgccgctaggaaatgacatagatatgcctgtttatctcctatcatccctggtttgatgacaaggggataggagaggagaggaaatcccttgctattcaaaaaattttcttcataaaaaaaaaaaaaaaaaaaatttgtcgggggagccggtaccatggatctccatcgattctcttgtcgccaaactagccctcagttgtcaggttgccacttgtgcataatgttgttcctgatgaagttgtattgtgctggaaatcgcaagtagactgctcatccagttctatgaaactaccgcaattacctggcccctacagtctacggccctactctgtaacattgtatggttgtaacgctgtcaatgttgagacgagatttgcc

SEQ ID NO: 12837 - DNA, 298 bp, Zea mays
  unsure (1)..(298): unsure at all n locations
  Clone ID: MRT4577_111703C.1
cggacgcgtgggcaaaatcctccgaaccccgccgccgacgagcgagctatggcgctggcgcggcggctgctccgagatctccttcctcgataactccgccccgccaccgccaccaccgcctcctaagccattcaccattgaggaccgcccgggcgagcagtgggcccgcctgcgccgcgtgttccctgcggccgagggggaggaagaggaggtcagggtggacgccacgttggtcgacggcgcgctccctccctcccgctcgggcgcggacacgggcggtnccgcccagatgcatatc

SEQ ID NO: 12838 - DNA, 1134 bp, Zea mays
  unsure (1)..(1134): unsure at all n locations
  Clone ID: MRT4577_111704C.1
cattgggtacctcgagggcgagacgccacctcctagcttcccttcccctcggctgccctcaaaaccccctcaaaatcctccgaaccccgccgccgacgagcgagctatggcgctggcgcggcggctgctccgccttactccctacctcggcacgctctcgctcccaccccccaactcgcatctcctccggaatcgcacctatatctctgacatgcgccgctctgccttcgtcgaccgcttgctccgttccgtacgctccgagatctccttcctcgataactccgccccgccaccgccaccaccgcctcctaagccattcaccattgaggaccgcccgggcgagcagtgggcccgcctgcgccgcgtgttccctgcggccgagggggaggaagaggaggtcagggtggacgccacgttggtcgacggcgcgctccctccctcccgctcgggcgcggacacgggcggcccgcccagaatgcatatcagtgttaaggttgaggtctccaaggccgcgcggcctggagtggcgctcaccttcgagtgctccgcgtggcctgacgagatggaggtgcggagggtctttcccgtccgccgcggcgggcctgccccagtgcagcagtacgtcggccgccaattcagtgagttggatgaggaaatgcaaagtgccgtacaagactacctggagaaaattggagtgaatgatgaccttgctgcatttttgcacgcctacatggaaaacaaggagcacactgaactgatcagatggctgaaaaacgttgagtgccatatcaagaagtgaacattctagtcgggttaatactttgtcctacagcacttgcagatgcagcttttgatcgcaatcttggaactttactaggccccatttaaatccttagaattgattaagctcatattgttgtatgagaaatatcacgcctacatggaaaacagggatcatactgaacttatcagatgactgaaaaacgtagtgccatatcaaaaaaaattgcattctagttgtgttnaaaaaaaaaaaaaaaaaaaaaaaaaaaaaaaaaaaaaaaaaaaaaaaaaaaaaaaaaaaaaaaaaaaaaaaaaaaaaaaaaaaaaaaaggggcggccgttttaaaggat

SEQ ID NO: 12839 - DNA, 225 bp, Zea mays
  unsure (1)..(225): unsure at all n locations
  Clone ID: MRT4577_111705C.1
gccaccgaggaaagtggcgaggaaaacctgcgggagaatgtncangaagggggcgggntnaacctcacngagatagtgcaagaaggtggcgaggaaaaccctaccggagaaagtgcaaggaagtttccaagaaaaccctaccgggaaagagaaataaagggttatgggagggttaaaaaccccccaaaaggccccgaaaggatcctgttgaaaacccctttcttt

SEQ ID NO: 12840 - DNA, 320 bp, Zea mays
  Clone ID: MRT4577_111706C.1
atctacccaaaccttgaaaattgctttgtcagtcacacacatgtgttcgtgcctccagcaagatgatccgatcgtggtcgtgctagtgttcttgatggacggcactgtctcacggacgccgtaatatccttgtatctcctcatatcaccaccagttataacaatgactgcctggatgctaataccaaatcgcatgcaaaccttactgatgccgatcgcgacgaaacaggtgacggctacgaatgcagagacgtgcacagacaccgcttcaattccatgcgtacatccgactctatagttatctggattgagcgtcagcat

SEQ ID NO: 12841 - DNA, 928 bp, Zea mays
  Clone ID: MRT4577_111707C.1
atcgatcagaaaatttacggctcataattctcgtctgcttatccgctccgttctctccctcaacttcagcaagttccccgcaaaaccgcagccggaggtcgccggtcgccaccaccaatggggccacccgccatggcgttccaagccctcaccctcacgccactccccttctcactccacagctcgagccgccgcgtccgcgtgcttgccgttgcggccgaccagactcctccgcccgcccccccttcggagccggcgaacagccctagccgcctccttcgcgagctcgcgcagcggaagaaggccgtatcccctaagaagaagcatccgccgcgtcgcttcatcctgaagccacctctcgatgacgagcgccttacccggcggttcctcagcagcccgcagctgtcgctcaaggcgctcccgctgctctcttcctgcctcccctccgcgccgctctccaccgccgacaggacctggatggacgagtacctcctcgaggccaagcaggcgctcgggtacccgctcgcgccctcggagacgctcggcgaaggcgatgactgccccgcgcgtcatttcgatgtgctgttctacctcgcgttccagcatctggacccctctagcgagcgcacgcggatgcggcacgtacggaacggccactccaggctctggttcctgggtcagtacgttctggagctcgcgttctgcgagttcttcttgcagaggtaccccagggagtcacctgggccgatgagggagcgggtgttcgctctaattgggaagaaagtgttgccccgatggctcaaggctgccagcctgcacaatttggtcttcccctatgatgatttggataagatgatacgaaaggaccgggagccgccgtccaaggctgtattctgggcaatatttggagctatatatttgtgctttg

SEQ ID NO: 12842 - DNA, 2087 bp, Zea mays
  Clone ID: MRT4577_111708C.1
gtgacactggatggtaactacttcaatggaagtgtgccagactggcttgactcattctcgaacctcattgttcttcggttgcagagtaaccagctgaaggggtccataccagcatcgattggcaaagctgccatgcttacggagctcgcgcttgccggcaatagcatctcgggggatgttccaaatggagtcaacctaaataagcttgagatgctggatttaagggacaacaagttggatggagagcttcctgagatgcctacatcagtggtaacaatcttacttagtaaaaattcactaaagggtgaaattcctgagcagtttggtcagttgaaccggcttcagcaccttgatgtctcgttcaacttccttgtggggagtcctcccgcagagctgtttgctctccctaacatcagttatctgaatttggcggcaaatatgcttagtggttcattgttaagtagtttaacatgcagcagcaccctgggatttgtggatttgtccactaaccgactcacaggcgatctgcccagctgtctgaacggtaatttgaataacaaggtcgttaagtttgatgggaattgctttagagttgaccctgcccaccagcatgaagataaatattgccaacaatctcataatgggagaggatcaaaaaaggatgttggacttgtagtcactgttgttggcatattgtttgttattcttgtgctttctctgttgttaatggcttccaacaaaagaagctgtcagaaagttctggccgaacaagcgtgggcggacgcgtgggcacaagataatttgttgtcaggaatgtcgtctgaactgctggtgaatgcaaggtgcatatctcaagctgtcaagttaggaacacaaatacaaccgtcatatcacatattttctttagaagaactcaaggaagcaacaaagagctttgaaaggtcagcatttttaggcgagggagcaattggaaagctgtacaagggaaggttagagaatgcaaccctgattgccataagatgtttgccattgcaccagcgatattcaattaggaatctaaagcttcgtttagatctccttgcaaagcttcgtcatccaaatttggtttgcttattggggcactgcattgatagtgcggttgatgaatcaactgtgaagagggttttccttgtgtatgaatatgtgcctggtggaactctttcttcttatctttctgcctgtagtccagacaagactctgaaatggtgtgataggctgcaagtgctgattgccattgctaaggctgttcatttcctacatacaggaataattcctggttccttatccaatcggctaaaatcttccagtattttggttgatgaacaccatacggcaaagttgagtgactatggattatctataatcacagaggagatatacagacatgagatacagacatgaggtaataggacaaaaggaaaaatacttgcaaaatgatgctacagaaatggaaaatttggaggatgatgtatgctcttttggttatattctactggaagtacttatgggcccaaaattaaatgagaaaggtggccctttcattttgaaagatctggttgtgtcaatgtctactttggaagagcgcgatcaagttgtggatcctgtcatcattggcacttgttcacaggattcgttatccatcgtggtttcaattatgataaaatgcctgtccatcgaatgctcggcccgaccttccatggaagaagttctctggaacctgcaatatgctgcccaggtccagacaatggcggacagcgaccaacgatcagaagtttcctcacaagcttgttagcatggaaactggaaatagctcgaaactgtaatctagatcggatcaaagatgataggaagcaagaatcatgtttatatgatcttgatttgagaacaggggatgaccggatgagtgagctcggctaactgttgcttcatggctatcctgaatttgatctctccattgcaactgtttgctgctacatccaaatcaggttccttgtaaaataaatagtccaattcccacaattgatcatatcattaacaaacctaccctg

SEQ ID NO: 12843 - DNA, 581 bp, Zea mays
  Clone ID: MRT4577_111709C.1
gcaactcctgcttgctctgggtggcaagtaaacaaacaaagcgaggtagacgacgactgttctagcaaggctaatgggtggttcgctctaaccagcaggaagacgccttaagcggttccctggctgatgtgccggccgctcttgtggcggtgcgcttccggacgcctcacctcaagacaaatgcgtgtcatctcttggtgcgctttctcggtcccctacgagccgggccagtccgctcacctcgtcgacgcatcggagcacctctcactactcctcacacacaaccaggccgctcctaccgccccacctccattcgcggccacacgctcgacttattatcctctgctacaaggggtgctgcacaaccttgggtcacctgagccaccatcccgggctgtcaagcaaggtccccaacaatgcgctcctcgtgatccacgcctacaacacgctgcgctaccgtacgccctacccaacctgcttaatgctcccccagttcacctgcttctacgcctttgtactattgaacaagccaccaactacctgcttgtcgcttcttacctcgacagcagcatgccgctctt

SEQ ID NO: 12844 - DNA, 401 bp, Zea mays
  Clone ID: MRT4577_11170C.1
gggaaaagggttggttcttatataggatataagtatatcccaatgggccaccccccagaacccgaataattaccggggcccgggcttctcacaccccctcaccccaagagaagttgaggaattcaaagccagcccgggccagagtggaaggggaaccgatccccaaccatcgggggagccctgggaagaacccttctcttgctcccctccttgcccccccctggtgctgctccctgggccccccccttggtcattttttcctcacctgccccctgcttttgctgccccttggcaacttctaaaagaccccctgattccttacccaccgcaaaaacccataccgggggggcgaccgccccaacgccccaaaatcctcccaagcccaaaatcatgattggccc

SEQ ID NO: 12845 - DNA, 305 bp, Zea mays
  Clone ID: MRT4577_111710C.1
caatttccaattcgacccacgcttagcgactagttctagttcgcggcggccgttctttatgtataactagtctagttctagatcgcggtcattgtctctagtaaatgggagcttacatactcttgcatcccacgacatacatattatctaccactacaaaaattcaatctactcctcttcttaataccttgtaaccaatttttttatccatcactatacaaaaataaataaactatctatacatataatttttctcagatcactttatagcgtataagttaacaccgatccccatttccaacatt

SEQ ID NO: 12846 - DNA, 917 bp, Zea mays
  Clone ID: MRT4577_111711C.1
gccggccgggtcctaagacttcatcatgccggtgtcgtctcctctactcgttgaagaaaaagatgctaaagaatcaatttccatcagccatgacgtccgcgtcgatactcgataggcactgtgagagtctgaggtttcccttcctctccagctcggtacagtagaaaccacaggttagaccgacgaggcaaagcagagcaagaagattttgtcatggctgcgacgcaactcctcctcgccgccctcctcctcctgcctctcgccgccctcctcctcggaaagcggcacgggccccgcaagggcaagaacggcgcccggctcccgccgggcccaccgggtctgccgttcctcggcaacctgctgttgctgaggcgctactcgtccgacgtggaggcgctgctccggcgcctcgtcgcgcgttacggcccggtcgtgtccctgcgggcagggccgagcctgtcggtcttcatcgctgaccgccgcgtcgcgcacgcggccctggtcgagagcggggccgcgctcgccgaccgccccgcggtcacgcgcgcgctcctgggggagagcggcaacaccatctcgcggtccagctacgggcccgtgtggcgcctcctgcgccgcaacctcgtctccgaaacgctgcacccgtcgcgggtgaagctgttcgcgccggcgcgcgcgtgggtgcgccgcgtgctcgctgagaagctcgggcgggaggccgaggaggcgcaggcgagggcccaggcgccgccccccgcgatggaggcgttccggtacgccatgttctcctcctcgtgctcatgtgcttcggcgagcggctggacgagcccgcggtgcgcgccatcgcgtccgcgcagtacggctggctcatgttcgtggccaagaacacgagccccctcgcgttctggccggcactg

SEQ ID NO: 12847 - DNA, 678 bp, Zea mays
  unsure (1)..(678): unsure at all n locations
  Clone ID: MRT4577_111712C.1
cgggtagtggaatataaaagaaaattctagaatttagaagtggagaaagaaaagaaaatgtgtatacaaattataaataaaggaaagaatattatgtgcaacatgattctcttaaattgaggaggatttaccatagagcaaaattgaattttgaactttgaatttcaaactcaaagaaaaagaaaaacagaaaatataacataaaagaaaaaggaaaggagatacctgcgcatgggctagatcctcacgccttcggcccactttgcctccactcgcgcatggcccaacctcacctcgcgcggcccgttcccccttgcgctgactggtgggaccctggggataggcgcagcaaacactccgcgcgggttgaatcagccgcttgctcgcgggacccaccttgctggcgatcctcttcttcccgtggttctcggcgcagttggttgaccaccagaattccgagaagctcggcgcgcgggggaagtggtgngaggagggcgaccgggtataaattagtgctctgcttggtcgccttgactcccgcaaacgagggccagcacaccgtagccactgcaccgccgccgaaaccataggaaggccccgccgncgccgcggactcgatcggccgctgccggtgaagccttcggacctatcctgggtgcactctacggagcttgggcg

SEQ ID NO: 12848 - DNA, 192 bp, Zea mays
  Clone ID: MRT4577_111713C.1
ggcaagcagctggaagatggacgtactttgtctgactacaatattcaaaaggagtctactcttcatctggtgtagtctcttcatggtggtgataagttaaggtggaagaagtcttacaccgctcccatgaagtataatctcaagagagagtaggttaagtctggctgtcctgaagtattatagaggtgtatg

SEQ ID NO: 12849 - DNA, 481 bp, Zea mays
  Clone ID: MRT4577_111714C.1
caaggtacgtggatggcatggcatggcagtgccacacgtgttttcgatcgatctagctactcatgcatgatatacgacgattgctttgcatatgcagtgcgacgcgtcgctggggatgaagattgccacccggctcaacatgaaggcaaacatgtgatgcttctgctgaatagaataataatgaagacgcatgcatgtcgtcgccaggaacaagagaaataatacaagaccaccacgcatgggcatactccatatatatatgtatagcccgtgcccgtgtccgcctttgtaccaatacaagccaagactagtggatgtattattattattattattgcgctatcacatacatgtacccctgctacctgaagatggatgtgtatcgagttatcaaattaagacacctgcagcaaaaaaaaaaaaaaaaagggcggccgcgggcgccccaaacccagggcagagtctcatggtgacggggaga

SEQ ID NO: 12850 - DNA, 303 bp, Zea mays
  Clone ID: MRT4577_111715C.1
gggcccacaagctaaaagcgccatgttttaaaatatactagaggataatcaccattccaaactagaacattttcattggagcatggcatgttaatcggcaaaaggaaccgccagtactggatattagtcagcatcaccatcactgggtactttgagacagagatgcgcctttacagggttgggggcggagcttcggacacagtcgagggatttggacgagctaaaaactggattcaggcctgaagactggcccaccttgaacaggttcctggtcccgccacaaagggacttgtaccttggagc

SEQ ID NO: 12851 - DNA, 312 bp, Zea mays
  Clone ID: MRT4577_111716C.1
gttggattgtattgtttattttattactttttttttaggaggaggattcaatggtggaccatcacacggtcttggtggtttcgggattgatgattcccacacaaggggacactgaagcagattcctttgtagagctgggatgttctagggacgaatttggctaggaattaagggggccgggggaatcctgtggtacgaatgaagaaactggggcggactggataggccacgactggggaggcttgatcttcccgggttgaacatgttgcccggtggcaacccttccacggacacttggttggacgcctggtg

SEQ ID NO: 12852 - DNA, 820 bp, Zea mays
  Clone ID: MRT4577_111717C.1
agggggaaaattagaggaaattatttctcctaccctttcccctctctttctctctctgatctaccctctctctaaaagactggatacagaacgaggaaaacaaacacccgaaaagaaaggaagaagaggagaagaacaccaaacaagcagaacttttttttgagaactccataggctgtggaattgtctccaggaatcccctctgggtttgacgagattcatacagagaaatacttcttgattttccccctttcttttgctcaagaatttacctgtacaggcgaaaccgcttctttgttcccttttttttctgtgtttgttttattgggattttcctctggtccgttcttcttcacctgtgaggtggtgagaagcagagagaatcatggggaagcaaggaccctgccgtcattgtggagtcacaagtactcccctgtggcgaaatgggccaccagataagccggtgctctgcaatgcatgtggctcgagatggagaacaaagggttcattggcaaactacactccaatgcatcgcaaggacgatattgatgacgatgaacccagagttagcaagctgaagccaccgacatcaaagctgaagtcacagaagaaaaaaccaaatcacattataatggagaatgggccattttctggtcagaatttccgaaagatgggggatgtcgaccaaagctatcggtctagttcgggatctgcagtatcatactctgagagttgtgccccatatggtgctgctgatgcaagtgaaatgactggttcagcacagtcgcatgcttgggggagtccctagtgccatcaagaa

SEQ ID NO: 12853 - DNA, 702 bp, Zea mays
  Clone ID: MRT4577_111718C.1
gaggtcttcggccggggatagacgatgtcgagaacccctcagggcgtactccactctcttgacgactcacgagcacagcaaggctcgctcgctcgcacacaccaagcaagcaggccgcaggcgtgtcacaggctctccgccgtaccccaacgcgctttccccggagccatggccagactggcgctggtgctcctcctgctgctggccgtggcggcgcccgcgtggaccggcgccggcgcgagccacctcgatcagggcttgagcttcctctcctccggcgaccgccggcgagagtgccgcggcacggtggccgagtgcctgaacgagtcagaggacctggacctgacggcggtgcccgtgttcgaggagtcccaccgccagacgctctacggtggcatggatagggtcatcaagtacggcacagctagggatggacaacgggaaatgttctacgtggtggagctaacaaccacaattgacagcccggatgacaacttaaagaacacatgcagtattgtgtggatcacactgaatagggtagcaagctggccaaagtgaaggcgcaggtttcagaagtcaagggtgttatgatggaaaacattgaaaaggttctaggatcgtggagagaagattgagctgcttgtcgacaagaccgagaatcttcgctcacaggcacaagatttcagacagcagggaacaaat

SEQ ID NO: 12854 - DNA, 921 bp, Zea mays
  Clone ID: MRT4577_111719C.1
ccccctcggcggccgcgtggacattgggcacctcgaggccggccgggatccaattcctatgccctgcacccgcagacggggagctcgcgtcttccttcggatggtggatgcatgcatgcatggtagacacgccggcccaaccagagttgacaagtggaagcgtatgggtattaccagcaacgacgcggcccctcgtgccgtcctcctccgcttcttgtttctgctctgcataggctgcaaatgcctggcatcagaggtagaggccacccagacggcgaccctcgcggtggacgcctcgccgcagcttgctcggaagatccctgatacactgttcgggatcttctttgaggagatcaaccatgcaggggctggtggcatatgggctgaacttgttagtaacagagggtttgaagctggaggcctccatactccatcaaacattgacccatggtccatcattggagacgactcctctgtatttgtggagaccgatcgcacatcatgtttcagtcgaaacatcgttgctctcaggatggaggtcctttgcgataactgtcctactggtggtgttggtgtttacaacccagggttctggggcatgaacatagaagaaggaaaggtctacaatcttgttatgtttgttaagtcaccagaaacaactgacttgacagtttcactaacaagctctaacgggttgcaaaatctggcttcagctacagtaacagtttccggcgaatcaaactggataaaagtggagcaaaagttggttgctaaaggaaccaatagaacctcaaggcttcaaataacaactaacaagaaagggagtgtctggtttgatcaagtatcactcatgcctgaagacacatacaagggacatggctttcgcacagacttataatccatgatttttggatttaaacc

SEQ ID NO: 12855 - DNA, 234 bp, Zea mays
  Clone ID: MRT4577_11171C.1
aaaaaaaaaaaaaaaataaataaaaattaaaaaagcaaaaaaaaataaaaaagaagaagaagagagaaaaaaaaattttgatcgcgagcggcctttctggcgagcttatactgtctttatttaggcttgcatcatcttgcacaccaacaagtattgtgattattgctccttttcagactttcatgctgatcactgcttttatttactctactgccattggttctcattcctcga

SEQ ID NO: 12856 - DNA, 421 bp, Zea mays
  Clone ID: MRT4577_111720C.1
gtatctgggtgcgggcccatactcatgtggggtagttttatagaacggcggggtgggcaccacaaggccagaattggaggaaccattttggacggcagcagtgcctgacagcagctgtggtgccataagggaagagacggctactctgaaagtgccaacgggcagaacacatattaccgtgtttctagaacctgataataggtgcgagcatgcggaccctgcagggatgcaaggctgagcaaaaaattactctgaggacgtgagtacacccgtatacacacgacaggaggaaccaagaactgttgacgttgaagaggaagaagagcgcgatgctgcaggagagggaacgaacggtgcgaaaacgaagaagactgtgacggagaaatattgggattgggaacaactcaatgagacaaagacc

SEQ ID NO: 12857 - DNA, 694 bp, Zea mays
  unsure (1)..(694): unsure at all n locations
  Clone ID: MRT4577_111721C.1
ggaccctcgggctggccaagcgatttctatcagaaaccaggtcgctgatgttgtatttaaagaatttgcttgacatccaaaggtctatatttggaatggttaaggacatccattacccatggtggtggcagcacctgtccagctaaacctcgacgaggtccgtcatgggaccaccgcagcgcctactgctttgagaaagcagatcgacgagggcacctacggtgaagtgtacatggcgaaggagacagactggatctgcatgatgttacatgagcatgagggttgtggacttgaattccacaaattatacacacatgaaaaaactgctagggattaagtgtgactgtgtgatgatgtctgacgctcctgttcagcagatttcatatgaacagtggtggaagagctgtcgatcagccactgcatcagcacatcatattgtgctgggctgctcctccgcggtgtacgatagggacaagaccgcctcttccccctccccgcgcttttgttgatcggccttcagtttctcaaggtacgtgactgtgagcacggngttgctgctaaacagcgaccacctcaacctacacctcaatgtttttttgagaaattactgtgaaggaccgtactagaggaaccattggaagaacgccacctctgtgtagaatttgaattggcaatgatgcttctgaatttgttg

SEQ ID NO: 12858 - DNA, 818 bp, Zea mays
  Clone ID: MRT4577_111722C.1
gaggtcggccgggattttttatactcgcagatcccatcaaaccagtgttatagccattgatattcttatttgatccacaaagcccctcgttgtccttagctagtctgccgacattcgcgaaacacactgtgttgaactcgcccgtcatttgaataactccagtcattacaaccgtgactctgcgtacgtatcgcagcagcagcataaaacccacttcgtcctttacgaccatctgaacgggtcaagcctcacgccaaaaaaatccaacccatcaccctcattcgttgtgcatttctggacatgatacacgcccttcttaaggcaagcctcgtcggcctcgcgttgctcgcttctgagtcgatcggatgtctccctgcaacttacaagtatggcaccaaccttggcggatggctgctgagtgaaccgtggatgaacccagttgaatggctcgcgatggggggtgaatattgtcctacagacagttcatcatgtgccgcatctgagtggagactttctcgcaagttgggacaaaaggccgccaacgaggcattcctgaaacattggcaatcttggtttactcaagatcatgtaaaccagctcaaggctttgaagctggatcacgttagaattccgcttggtttttggatagtcgaggaacttgtggaagcaccggccgaactctatgcccagggcggctggatggagctgaaaagaggactgcgacaacttcgcgacgccggcttccatgtaacactcgacatgcatgcccttccgggagtatccgcatctaaccaacagtttgcaggcaatgtaacttc

SEQ ID NO: 12859 - DNA, 275 bp, Zea mays
  Clone ID: MRT4577_111723C.1
cttcgaagaggcgcgcctggccggccgtctcgcggcgctgttcggtgcagggttcctcctgggcccgctcctcgacggaatccactcccgcgtcggcctccaggtgtacgggaacggcgccctcgaagccggggcccttcgcacccacgtcctggtgccgcccctgctcggcgcgttctacctcaccgtcggcctgctccacctgttcctggacgagagggcgcccccgaaatccagggccaccgggaccgcgcggaggacggcgacgtcgctgc

SEQ ID NO: 12860 - DNA, 467 bp, Zea mays
  unsure (1)..(467): unsure at all n locations
  Clone ID: MRT4577_111724C.1
atttatctatctttttgtatacaacggaggctggcgggcattattgggtgggattttgcaagcagaaaggccgccccccttcaccaaacaaaatattaagtcctgctaagaggtgtcagtctaagtcttgccgagcgcaaaaaaacaggtgggcttgtattaccaagacttattcacgggccaaccgcccattgcttacctaaaaaccctatgaatacctggtcaacaaaaaatcgtaaagaagtgccattctcacaaaatntccaccctttttttaaaaatggaaactggtacccacataaacttttcagggcaaattaacaaaatttttcggacctcttagaaaatcaaacctatttaattggccttgtaccttcatgttttgaagagcctcactgaccgatctgcatatgggtgcaagattaggcccatattgggccccaccacgtaatgactctgcacactaa

SEQ ID NO: 12861 - DNA, 979 bp, Zea mays
  unsure (1)..(979): unsure at all n locations
  Clone ID: MRT4577_111725C.1
tgggaccctcgaggccggccgggccccaccggttcacancggcactcccgggtcgacccacgcgtccgcctctccggtcggtctggccctcttcttcctatctgtccccgtctccatctccatcctttctttttttccgatgactactcctcttcactctcctcagtcctgagcttatcttccttccccacacgtcaagaaccttgtgacacctctcagcgcctttagcgagttagcctccctcttgcgcgcgccgcagtggcacaccataataaataaatccccaccctctcccggctctttcagtcttcacctagcaacaacctgtccaagaaccagcagccaaaggacaagacaagagacacaacgaaaggaaaggaaccaagagaaagatcgagaagagaggagccttcgcttttggacttgcaccgtcgtgatctgtcccgcgaccacatgaggatccacccagcatcccccaccgccggcggcaagaaggacctccggcgcctgccgcacgtgtacagcaaggtgctggagctgccgctcccggcggacaccgacgtccaggtgttcgaaggcccagacgccttccacttcgtcgcggcgccggccgccggtgcgcgtgccgccgccaccgtgcgggtgcgcaccgtcaggatccaccccggggtcaccaaggtcgtggtgcaggccggagccgccgaacgggccgctgacgacgacgccgccagcgacagcatggagctcgacaggtggcggtcccggctgcccgagccgacctgtccgggccatggcggtggccgggtacgtcgacggccaagcttcgtcgtcaacgggtgcccaaaggccccgttgccgaggaaggcgccgacgcaagggcaaggcgaggttaacttggagtgcggcgccggaggcaagatcactggaagactcgtggttgtacagtaggagcgtctaatctatgtactactactccata

SEQ ID NO: 12862 - DNA, 775 bp, Zea mays
  unsure (1)..(775): unsure at all n locations
  Clone ID: MRT4577_111726C.1
ttcaaaagtcttccctagcaacaacctgtccaagaaccagcagccaaaggacaagagacacaacgaaaggaaaggaaccaagagaaagatcgagaagagaggagccttcgcttttggacttgcaccgtcgtgatctgtcccgcgaccacatgaggatccacccagcatcccccaccgccggcggcaagaaggacctccggcgcctgccgcacgtgtacagcaaggtgctggagctgccgctcccggcggacaccgacgtccaggtgttcgaaggccccgacgccttccacttcgtcgcggcgccggccgccggtgcgcgtgcggcggccgccgccgccgccaccaccgtgcgggtgcgcaccgtcaggatccaccccggggtcaccaaggtcgtggtgcaggccggaggcgccgaacgggccgctgacgacgacgacgcgagcgacagcatggagctcgacaggtggcggtcccggctgcccgagccgacctgtccggccatggcggtggccgggtacgtcgacggccagctcgtcgtcacggtgcccaagggccccggtgccgaggaaggcgccgacgcagggcaaggcgaggttacctggaggtgcggcggcggaggcaagatcactggaagactcgtggttgtacagtaggagcgtctaatctatgtactactactccatagtaatgtcttgccatctttctttctttttttttgtaaattaagatgggctagctgntcatcacgttgccttccccttccctgcttcgcatc

SEQ ID NO: 12863 - DNA, 317 bp, Zea mays
  Clone ID: MRT4577_111727C.1
cgtcgacccactcgtcctcgaacgcctcgtacaaaaaaacacccagttctgagtcggaagtttgactcccgcacaacggggcaacacaaaacgggtacaacatcacatccctccgacatcatcctgaagaccgcactcatcacaccagcaccttgtagcattaccgcatcaaccgacaccatcaccaccttaacctacaaactcaccgctacactcaatgcacctccccaacttacatatccatgacacctacttctcttgcctacattagctcattgcacacactcaggcaaccttggacacctgatacgacaatc

SEQ ID NO: 12864 - DNA, 1552 bp, Zea mays
  unsure (1)..(1552): unsure at all n locations
  Clone ID: MRT4577_111728C.1
cagccggcgggaccggcctcgcacaggagaagacacgcacacacaatctctccggtcggtctggccctcttcttcctatctgtccccgtctccatctccatcctttctttttttccgatgactactcctcttcactctcctcagtcctgagcttatcttccttccccacacgtaaagaaccttgtgacacctctcagcgactttagcgagttagactccctcttgcgcgcgacgtagtggaacaccataataaataaatccccaccctctcccggatctttcngacttcaccgcnggtttaaaagccctcctccggagagtgtcgaaaaatacgccgngnggtcggcgtctagaactagtggatgccttttctgcgggggtgccgcacgagcaagaaccagcagccaaaggacaagagacaacgaaaggaaaggaaccgagagaagaggggagccttcgcttttggacttgcaccgtcgtgatctgtcccgcgaccacatgaggatccacccagcatcccccaccgccggcggcaagaaggacctccggcgcgctgcggcaatttgtacctcgagggggcgggagtcttcacctagcaacaacctacctgtccaagaaccagcagccaaaggacaagacaagagacacaacgaaaggaaaggaaccaagagaaagatcgagaagagaggagccttcgcttttggacttgcaccgtcgtgatctgtcccgcgaccacatgaggatccacccagcatcccccaccgccggcggcaagaaggacctccggcgcctgccgcacgtgtacagcaaggtgctggagctgccgctcccggcggacaccgacgtccaggtgttcgaaggcccagacgccttccacttcgtcgcggcgccggccgccggtgcgcgtgccgccgccaccgtgcgggtgcgcaccgtcaggatccaccccggggtcaccaaggtcgtggtgcaggccggagccgccgaacgggccgctgacgacgacgccgccagcgacagcatggagctcgacaggtggcggtcccggctgcccgagccgacctgtccggccatggcggtggccgggtacgtcgacggccagctcgtcgtcacggtgcccaagggccccggtgccgaggaaggcgccgacgcagggcaaggcgaggttacctggaggtgcggcggcggaggcaagatcactggaagactcgtggttgtacagtaggagcgtctaatctatgtactactactccatagtaatgtcttgccatctttctttctttttttggtaaattaagatgggctagctgttcatcatgttgccttccccttccctgcttcgcatcagagacagtcagacaggcgatgtttcatgagctatgttctcttcctcctgcttctcttctcaagcatgtgagaaccagctactgtggattacctttggttgccctaaaatcagatgtaaatttctagataaacaaactgtgcggtgtttgtgtgcccaaaaaaaaaaaaaaaaaaaaaaaaactcgagggggggccgcgggtaccc

SEQ ID NO: 12865 - DNA, 229 bp, Zea mays
  unsure (1)..(229): unsure at all n locations
  Clone ID: MRT4577_111729C.1
agcagtggtaacaacgcagagtactcggtgtgttcctttttttgtttgtactactctgttgtgttatgtatataaataagtggtggagaagaaagttacgaggattgctttagtaacggtgagcgaaccgggagcagtttagnttgagaattgggcggtcttggtgtccgaatgggggggtggagaggggtgtttagtgagggacggggggtgtgttttgtggtttggg

SEQ ID NO: 12866 - DNA, 2027 bp, Zea mays
  Clone ID: MRT4577_11172C.1
ctacgcctcagacctcggtgcaaacctgccgcgaaaatagcagccgcccgttcgctctcccactcctcccgcgatgagcgacccgcggggccacgccgccggtcccgaccgtgacggggacgacccgctcgccgaggacgccaacagcgaggaagcgtggcagacgcccgagaaagagccggttgctgtgtcgaaagaggcggctgcgcggggtggggacacgaccccggacgccgaaccggagagcgatgacggagagggaggagtgggctccccggatcagatggagcccaatgcggacggggagcgcgcaccgcccgtggccgcggctgaggacccggaggggattgttggcagcgcaaaggtggagacgaacggcgaggacgccatcagccttgacgccgacggggaggaggaggacgacgatgatgacggagacgaggaggaggaggaggaggacgacgacgacgacgactccacccctgatgcgtctccgagggccgaggtgaaggtggagggcgaaagctccacggggatgacccagagtggcgccggccaccgcgtggaggtggaaccggaccccttcctcgacggtgatgactctgggacggaggaggagcaaggtgcgttcatggcggagctggagcgcttccatagggagcacagtctcgagttcaagccgcccaagttctacggcaagggcctcaactgcctcaagttatggaggcaggtcgcccacctgggaggccacgagcaggtaacggtttgtaaactatggcgtcaagttggagagactttcaggccaccaaagacctgcacgactgtttcttggtcatttcgaattttctatgagaaggcacttcttgaatacgaaaaacacaaggtccggactggtcagcttcagataccaccgcctggtttaccacagcctagtggtgctgaccgtgaggtggttgtaaatcaatcatcttctgccagagttagaagggatgctgcagcgcgtgctatgcagggttggcatgctcaccgccttctcacaaatggcacttatggggataacattttgaaggacaaagatacaatgccacttccaaatcgtgataaaaacctaagctttggggtgctcaagagaaagaaagcatctagtccagagtatgctctcaagtcgtcccgctcaaaaacaaataagtcacaggaagattctatggtcgttgacgttggagaaccagccgactgggtgaagatcaatgtgcggcagactaaagattgctttgaagtttatgcactagttccgggacttctaagagaggaggtgcatgttcaatcagatcctgctggacgtctggttatcacaggggatccagagcagcctgataatccttgggggatcactccgttcaagaaggtggtcaacttgccatcaagaatcgatcctcaccaaacatccgctgttgtcacgcttcatggtcagctattcgtgcgtgcaccatttggtcatcctgatatgtagatatgaaatcctgtttacttcagttttgttgactggcgatgcctcgtcatcagtgatattccttgatattactagggtttatgtcaattctgttgaggaaataggattttgtttgagcagatacatgatgtcaagctgacttagctgaaccgttctgtggttggatgctgattgctgctgttgccatctgttatcaccttgtttattactccctccgttcttttttatttgttgtggtttagtttaaaaatgaactagaggacgataaatatttgagaacggaggtagtattatagtagtggccataaagttagctgattcatgcatgtattccagtttcatggtgagattttatagagaaaggagatgttgttcgtagtagggctaatttgacattatgattacttattgttctttattatttttcttctgtattataaatgcctctctgggtcactccaggcgccttaatgttgcatttttgtgcataacgccggttcctatggtttatgaagct

SEQ ID NO: 12867 - DNA, 1593 bp, Zea mays
  Clone ID: MRT4577_111730C.1
tctgagatgcctgaaaaaggattcccgcctcatgaggtcacttacacaactctgatgaaagggtacatcaagaagaaagcttttgacaatgcctacgcccttcttaatgaaatgcgtcagaatggagtttcttgcggcgattatacgtataatattctcataaatggactttacatggtcaatcgtgtttgtgaagttgatgaaatgttgaaaagatttttgagtgaaggttttgttccgaccacaatgacatacaatagtatcattaatggatttgtgaaagctggtatgatgggctctgcattcggtatgtatcggcagatgcgcaagaaaggtataactcccaatatagtaacatataccagttttatagatggttattgtaggaccaactgctgtgatcttgcagtgaagctgctcatttacgtgaggcgcgatggcattcaacctgacattgctgcatacaacgctttcatagatacgttttgcaaacaggggaatatgtctcgtgcactccattttttggttcttctgttgaaagatggtttaacaccagatgtcactgtctacaatagttttgttacagggtacaagaatttgaaaatgatggcagaagcttcaaagttctattatagcatgatcaaacagagagttgttgctgatacagaaatctatacaaccttaattgatgggttctcaaaagttggcaatgtggcctttgctttggaactgtactcagagatgatggccaatcacgttattcctgatgataaaactttcacagcactaacccacggtctttgccgaagtggagatattgatggtgctaagaggttattggatgatatgagaagattagatgtgtctccaaatattgttacttataacatgctgataaatgcatgcgtccgtgatggtaagctgcaagaggcattccaactgcatgatgagatgctcagcagtggagtcgtgcctgatgatactacatatgacatactccctcggaccaataatagttgattttccacctgccaggattgcttgctgcttgttcaagcctccagtctgacacagtgtattaccaaccagagggaatacgagttagcttgaaacttttggaagcaagtcctgcagatgctgaaaatcatgtttcaattctgccagtaaagtatgaagaaccttaacatgcgattcagcagattgaaatttaggaaacttgcactgtaaatgaagtgaactccttgtcagttataatttttcctttccaatatatctctacccctttaaagcacgactttgacacgccgcgcactcccatggtgctgggaactcccgcacttccctcagcctcctctcgcgtggtgctcggaagtcggaaccctcaacctcctccctcgtccctcggtgtttgaaattactgtgcttcccttagcctcctcccctggttctcgaaactactagagatggatttagatctttatttaaatgttattttttttttgtcttctttctttgattgtaaacaagtaacatatataatttactgtgtaaatttatatttttattttcaatattgaatctattaatatttat

SEQ ID NO: 12868 - DNA, 1101 bp, Zea mays
  unsure (1)..(1101): unsure at all n locations
  Clone ID: MRT4577_111731C.1
ccgggtcggacctatcgtncggcctcaaatcagncagcgccgtgccggggtctgctagnaacagtgacagaaacgaccgcaacgcagcaggcccgccgcgcagcccaggatccatccatccacctcacaccgngtcgtcgtccagctcacactccccggccgcgcccccgctgctcctcncctcggtgtcaggctgggatttaggcgagcgaggaccagtaactgacgtctctccttccttcccccctgctccggcccctctacaaatccccgattaaaccctagacttccctccccacccaaatgcgcgccccctcctaggcggcgcccctcgaattcggcaccggctccgccgtaggccagggtgcgtacaatgagtgcgggtttcgacaagcagatattggctcagaagctttcgaagcttaatagctcacagcagaccatagagactttatcacattggtgtgtctttcatcatcgttgctgccaacaagttgtagaaacatgggattctgagttccatgcagctcctggagagaggagggtgtctttgctgtaccttgcgaatgatattatgcagaatagcagaaaagaaggtaatggatatatagctgaattcatgagggtcatccctgctgccttgaatggagtgttgactgtaagagatgattttgggcggaatgtcccaaaaagactggccgactacagtatcaagcatgcttgttgttttgcttcaaaccaacacagaagcatggaagctgaaaactcattgacaacgaatgtatgaggcacttagggagtcaggcatcttctgcagtggggtgtctgcgccgacggggctataggctaccgtcggcacacatcaagatcgtgaagcattccatgggggagaccgtggacaacaacaacaagatgatctcaagtgaggacccttttggttgttctccaaaggcatcgtcagtttttatgtcatcaatagcagacaacacttggtttagacantgctgtctaagactgtgcacgacanccgacctcctcaacttactcatccantgtcgtcaatagcggacaacgcgtgacaagctaaggtgagggtgagaa

SEQ ID NO: 12869 - DNA, 335 bp, Zea mays
  Clone ID: MRT4577_111732C.1
gcataagctctctataaatactgatgagctatctgctgtttcatgagcgtctgacatagccatatgtttactggactggccatgatattacctgggctaggctttgaccgtcccattcttgttggaccgcctggatgggcaagaatgggcacccaggtttgcagctctgatgcttaccgatcgctggacttcgtgcttgacatggcaggccgtgacgaagcaaatctgtggtcaggggacgactctagctaagtggacgaatacccctcgcatgatcagcaggcccagttcctcgtgtacgagagctcatgtttactacataggcccgtcgacag

SEQ ID NO: 12870 - DNA, 742 bp, Zea mays
  unsure (1)..(742): unsure at all n locations
  Clone ID: MRT4577_111733C.1
ggtccatcgcctcgcctaattcaaccccatctcggccgtcgtgcgcgacatgctctctccatcccgtcccgcccaccgctgctcccttgcctgagctgccgcccgccgccgtcgccgtgggaccgatcggtagtaatcggtccagagcgcggtgcagcgagcgggagcgagggaggcgtcgtcggccgtccttcgtgccccgcgttcgttcttggaattggtccgcgcgcgtcctcatcagctgcgggagtcagggtggcgcctcgtgaggcggcgcggcggtgcaagaccgccgagtgccgcgcgcccaggccttgcgcgccaagctcgaggcggcgggctgggtgatggtgcgcttcctccggcgcggacacagccttcacaagaccggatcgcacaacagcaaccagcagcagcagccgctgcgagagcgctacctcgacaggagcggcagcgacacgggcgagatgtatagcaatggcgccggcggcaccccgccccttgccaacagccaggcggcagcggccggggcgggcgcggttgcgccagggccgcgacgggccgctctcagagctggacgtgatgaaggagaagttcgccaagctcctgctgngcgaggacatgtncggcaccggcaagggcgtgccgttcgcgctcgcgctgttcaacgccgtcaccaacctcgcggngtccgtctttggcgagcaccgcaagctggagcccatggcgcccgacaccaagg

SEQ ID NO: 12871 - DNA, 379 bp, Zea mays
  Clone ID: MRT4577_111734C.1
gttctagatcgcgagcggctgcccttttttttcccttttttttttttcttttttttttttggaaccaaacagcaattgtacaagtacattcgacaacgcgccagccagtacatacagcaatccttgtgtgacacaatcacacaatagagcaacaacacgatcgatcgacgcgactactacaagctagccgtattatcgtacgtacgtacactttttacgtaattactagccgctaataacaacaggacgatcctgcagctgctaatggtatgcgtgcatggttggttccatgaccacaccgtagttcgtacctacgcgggggggcactcgacgtcgttgtcaccggcggcggggaatttgtcgtcgccgaccctgacgg

SEQ ID NO: 12872 - DNA, 443 bp, Zea mays
  Clone ID: MRT4577_111735C.1
attcggctcgagtcggaacgttgttataaacgttgctgttttcagataagcacgtaactcactatctatctatcaatcgatatctccgagttcagccgaaccaaactccgaagctatggcagagctccaaaccaaggttgaacctgttacggtcccggctccggtggatcccgagccaccgctagctgaggctccgccgctcgagaagaaagcggtggcggtgccaccacctgttccggctgcggcagaggaaaccaaagctcttgttattgtggagaaggagaaggagaatgagaagataccagaacctgtaaaaaagaacgcctcacgtggatcccttgatagagacattgctcttgcagaaatagagaaagagaaacgattgtctaatgtgaaggcttgggaagaaagtgaaaaatccaaagcagagaataaagcccaaa

SEQ ID NO: 12873 - DNA, 513 bp, Zea mays
  Clone ID: MRT4577_111736C.1
cccatacctcacggaggccctcctccccaccctgccgctcacctctcgccgccgattgctctgcctgcggtaaccatctcatatctcaccgaagatgacggaaatcctgcacatccagcgtgctcaatgaggcaaccagatcggtgccaatgtctgcgaggtggtgcgagatgaacatgacattgaaccaactgagcgctacaccgctacctctgacctgcaagagtaacgagtcaatgaccaccacatatgaagcctcatgagatctctttggaccccgtgctcctctaatgcaccttgagaccaggtaattgttacagtgtccgaactggcgccttatgggcagatcttccgacctgacaactttcgtcaatgggcaatctgatgtgcataacaactgatccgaagcccactacaccgatagtgctgggcttatcaattctcgactgcatgactataggaaggaggatgacaactgcgactgtcctcaaggattccaagtatgtcactctc

SEQ ID NO: 12874 - DNA, 229 bp, Zea mays
  unsure (1)..(229): unsure at all n locations
  Clone ID: MRT4577_111737C.1
ggaanacccggggcgacgccgacgcgtccggcacgccccagcttggctggttatantattagtgttgttcgccgccaaagaaagaaacggcctgctggcttcactctcacgccttccaggttcaaatgttttgagacgtgtacctacacgtnngcatgtggtttcaaagaaatggcggacctngctggcgttgcccaatggaagatactggcccacctcttttgctttt

SEQ ID NO: 12875 - DNA, 762 bp, Zea mays
  Clone ID: MRT4577_111738C.1
aaattcaacccaagaggaggaagaacaccaaggactcactaccagcgcctctccgcgatccaaatcctcccgggaaagttcttggttgatctcttcctcctcgaccgcctcccaggttcttggtgtagcttttgccactctcaccaggagatttcatgtctgatcttgacgttcagatcccaactgcctttgacccctttgccgaggcgaatgctggggacgctggtgcagctgccggatcaaaagactacgttcatgtacgcatccagcagcgtaatggtcgcaagagcctgaccactgtccagggtctgaagaaggagttcagctacagcaagatcctcaaagacctcaagaaagagttttgctgcaatggtacagttgtccaggacacagaacttggacaggtcattcaactccagggtgatcagaggaagaacgtctcaaacttccttgtccaggccggcattgtgaagaaggaacacatcaagattcatggtttctgagcaactgccagctccatatcagagtctacatgcaaagcagctatatattggtggtgcggtatatttagttgtgtgctagcgctagcaggcgtcaccagcttgcgcgctccgagtatacagaaaatctagcatagcccacctctctgcgtgtatgcttgttaccgttgtgttgaaactttgtaaggagcaccatcgttagatggcttgttaccctctcccatcaaggttggataataatatatgctttctgaagcgtgac

SEQ ID NO: 12876 - DNA, 255 bp, Zea mays
  Clone ID: MRT4577_111739C.1
acgccacgcgtacgctgacgcgtgggtgctacagacctgcagcctactgaggcggaggatcttgctctaactaacccccccacaacagacacacgacgcacctgcaacactgacaatgctgcgtgccaacagggggtaggaacataatgcattgacgatgacgactagccacaaacgacacagcactgatgttacacattgggagcgacctgaacgttacctttagttattaaaaagttattttatcgacaaata

SEQ ID NO: 12877 - DNA, 873 bp, Zea mays
  Clone ID: MRT4577_11173C.1
ggtttcggaattccgcggaccccacgcgtccgacccacgcgtccgtataatctctcttcgtcactagctcgtggtaataagggaagcttgatcatctttccttatggcggtgatgaagagcagcacaatcgtcgcgcttctgttggctgttgccattctgtcctcactgtctccatgctacgaagccggcggctgcatcgggaaacccaagaagtcaccgccgccgccgagaaggccatacttctcgtcctattccgaggaccaccagaactgccgcttgatctgtagctcgaagggtttcaaggacggtggctggtgtgacgaaagcgtggagcacaaagtgtgctgctgctcccattagaaatataatagcgtatgttatgttgatgcatatatatatgcatcatccatctacctgtgtggtgcaaaattctgaataaaacctgaataaaacctgattgagtacaaaaaaaaaaaaaaaaaaaaaaaaaaaaaaaaaaaaaacaagaaaaaaaaaaataaaaaaaaaaaaattttttagaaatagttttttgtgtttggggtttaacaaaaaaaaaaaaaaaaagaaaaaaaataaaatggggggcgccccttttaaagaacccaaatttacaaaccctggattaaaaaataaaatttttttataggggcccccaaaattaatttcgggggccggattttaaaaacgtcggaatgggaaaaacccgggggttccccaattaaaagcctttaaaaaaattcccctttttgacaagtggggttaaaacaaaaaaggccccaacccatttccccttttccaaaaaattttcccaaccttataattggaaaatggggacccccccccttttaagg

SEQ ID NO: 12878 - DNA, 403 bp, Zea mays
  unsure (1)..(403): unsure at all n locations
  Clone ID: MRT4577_111740C.1
tcgagggcggncgggacatcgttgcaaacacgggttcccttatatcgagtgttctcgcctcttcttcctcttccggcgcgagaagggcggacccggagccgggactggtgccctccgcggccccatgaactgtcgggcgctccaagagcaagttccaggaggtgcctgagactggtgtcaccttcctcgacgttgccggcgcggaccacgccaagctcgagctgcaggagggcgtggatttcctcaagaaccccgacaagtacgccgctgctcgtgcagccaaaatcccgaagggttgtctcctcgtcggcccgcctgcgacagggaagaccctccgtgcgcgtgacgtcgctgaggaggccgcggagcccttcttctcctgcgctgcctctgaactcgtcga

SEQ ID NO: 12879 - DNA, 528 bp, Zea mays
  Clone ID: MRT4577_111741C.1
cctcgaggcggccgggtgtgtccttctcgcctaggctaccccgcgacagaaacgtcatgtagaaagggcgctcgatcgaataccggtaccgtgtctgacatggtacgccaccgacgtactctatcagccgtcttggtgcctctgtcgacgcccggactcatgaattcgctcggcgagtagtcactccggtccctgcagcctagggcggctatggtatgactatcatactgtccgcgtgggagttctgcgactccctcgtccacgtccatcaaggagaaggctgcggccgaaatgaccgcggtgggcctgttggtcgcactgctgctgacgtatttcgtgtaggccgcgcagtcctaagagttctacgccggtcactcaagaacttcctcctcagacattctgaccgaagcgatcatgatcgttagttattgtcagctgcatgtgtctccgtgtccaacttctactgctccaagacggcactgtgctaatccatcatatggatcgtatcgcctgtgtactgtcctgtgc

SEQ ID NO: 12880 - DNA, 510 bp, Zea mays
  Clone ID: MRT4577_111742C.1
ggccccaaaacaaggcaaggtggaaaaacccaaccctttttttttttggaaaaaaaaggggggaaaagggcctttgaccccacaaaaaattttgggtggttaccccggggggttttttgaaggggaaaacaacccccccccccctttgggaaatttggggaggggcctcaaggggggaaccctaaaaaagggttgtggaacttcccaaaaaccttggccttcccgggatttttttttttgaaaaaaaaagggttttgttttttttttgtaagccaaaaaaaccagggcctttttttttttttttttaaacctaaaaaacgggaccttttgggggggtttccccaaaaaaagggcccaaagggggttaactttttccggaaagggaaggtcccgggcctttaaaacaaaaatttgccctcgggttgagaaaaacccatttttcaaaatggttttaaaaagttcttctatcctgaaaaaatttgtgggggcccaagaaatatttttcccccc

SEQ ID NO: 12881 - DNA, 332 bp, Zea mays
  Clone ID: MRT4577_111743C.1
acattaaaaactgctgattattggaaacataccataattcaaagacaacccacccgagagcccgaagtacacaggtgtgcctttcaaacctaacaggaacatgaaagagggatgcttgccgacaacagtgaacacacggagaaagacggccccacaatctgcttgaggggaaagaggttgttaatgatgcccaaacaaacctactggaaaacgattggaacggatgatcatgaagagagggcccagccatagtgggggacgatgaggacggcgcatgggcaacggctgtcacaggaccggatgaactggggatcccaaaagagcacccaggg

SEQ ID NO: 12882 - DNA, 1864 bp, Zea mays
  Clone ID: MRT4577_111744C.1
cttcttcgccacacacacacacggctgctagtgtacacagaggcacagcagcaggaggatggccgtagtgccggcggcgccggtggttcttggagtggccatggtgctcgtcgtcgggctggccgccagcgccggcgcggccgggcagctcaggatggggttctacgcccagagctgcccgggtgtggcgcgcgtggtgggcgacttcgtccggcagcacgtccgccgcgtgcccaccgacgccgcccgcgttgctccggctgcacttccacgactgcttcgtcaggggctgcgacgcctccgtcctgctcaactccaccgccggcagcgtggccgagaaggacgcgccgccgaacctgacgttgcgcggcttcgacctcgtcgaccgcatcaaggctctcgtcggggaagactgcgacggcgtcgtctcctgcgccgacctcctcgcgctcgtccaactggacgcggtcgtcgatatcggcgggcctgcgtcgctcgtggcgacctggaggagagtgtgcacggtgtccgccatgcaggaagcgctcgacgacatccccaagcacaccatgaccttcccgcagctggccagcctgttcgccagcaaaggcctcggcgtccgtgacctcgtctggctctcaggcgcgcacacgatcggcatcgcgcactgctcctccttcgcggaccgcctgtacggctacccaggcggcggcgttggcgcggccgggaacgacacggccgaggccgacccggccctggacgcgacctacgcggccaacctgcggaggcgcaagtgccgggcggcgagcggcgggtacgcggaggacggcgtggtggagatggacccgggcagccacctgacgttcgacctgggctactaccgcgcgctgctcaagcgcaggggcctgctccgctccgacgccgcgctgctcaccgacgcggcggcgcgcgccgacgtcgagggcgtcgcggccgggcccgaggaggtcttcttccagctgttcgcgcggtccatggccaggctggcggcgctgcaggtcaagaccggcgccgagggggaggtcaggaggaactgcgctgtcgtcaacggcggctaatgcattgactaaaatatgaagaagcagagagacattgcctctctttttcgcaatcatgctgcaaagaaacaaaagtttattgattcttcattatctccggatgttactcaagcgtcgacacatcaagaacaagagaaagagatgataaatgaagaaattgtgaatccaatgccatctgcaccgccaccgccaacaatttatgatgtcagtcatcttccacacgatccaggtgaaaggaaacctattgcaagttaccatgctaatgatcacggtgcaattcgaagaacatatattcttagaggtccatttcaaccatatgcacatgaattcccaaataggaaaattggagatagagatcgccattttaattttgtgtggtttcaaaattttccttggattgaatataatgtcaagaaagatgctgcattttgctttatgtgctacttattcaaaagtaaagcaaataagggcaaagggacttctgcatttacttcagatggttggaataattggaataaagggtctgaagcacttctaaaacatgtgggttctatgtcacataagacagccgaagagaaatatcttagctttataaatcctaatgcagcaattgataataaaattgagaagtggagtgatgatgatcacaatctttataagataaggttgacatattcacttcgatgtttgaagtttcttttgcatcaaggattgtcattccgtggacatgatgaaagtgaagagtctagcaacagagaaacttattg

SEQ ID NO: 12883 - DNA, 757 bp, Zea mays
  Clone ID: MRT4577_111745C.1
ccggccgggccggacatgcaaaggaacgcggtgcaaaaatatatgctgaagttcgaggctacggaatgtctggtgatgcacaccacataactcagccacaaagtggtggtagaggtgctattttagccatgaagcgtgctttggaccagtcaggtcttcatgtaaatgaaattggttatgtgaatgcgcatgccacgtcgactcctcttggtgatgctgtggaggcgaacgcgatcaaatctgtatttggcgaccacgcagcatccggtgatcttgcaatatcctcaacaaagggagcaattggtcatctgctaggggcagctggatcagtggaagcaatcttcactgtgctagcaattcaccacggactcgctccgcctactcttaacctggagcggccggacccgctgttcgaaggggcattcacgccactagctgcgcccaagaagatgtcgatacgagcagccatctccaactctttcgggtttggtggaactaacacgtcgctgctgttctcgtgcccgccctagtcctagtgtaacggcgctctgttttctggtcctcgctggaagtgaagaggcttcctgtaatattcagatatgttccgcaaggcaccacccgcctttagctgaagtttcttcaagttgttttttttcaagtcttagttaaactctgtttcgttatttttttttaaaaaaaggaaaaagatggaaatttgataggtgagtgagacgttccctttggacatcattagcgt

SEQ ID NO: 12884 - DNA, 345 bp, Zea mays
  unsure (1)..(345): unsure at all n locations
  Clone ID: MRT4577_111746C.1
cggcctgagctaggaaagtcatttctaacaagactaaaaataataattaaaaaaaaaaaagaaaaaagaaaattaatttaattttaatttttttttttgcttgggcctcggccgcgcctccgctgagggcgggtcctgggcatttccctggggggggggggggcttgggcctggggggggcgggcccccttggcccgggggggagtccaattacattggcctggtcgtccttttacaaggctgggactgaccaaaaccttgcccttaccaattttaattgcctggaagcccattttccctttctggagttggtcgnatatggaggggcccggtccccttgccctt

SEQ ID NO: 12885 - DNA, 360 bp, Zea mays
  Clone ID: MRT4577_111747C.1
ctcttttttttgaagcaacaacgtaaacatccataggtattcggaataacccgggaggagaagcaggttaattaacgactcttacaacatcaggtgttgtgaaccacacaatacttcataacagacacacataacacgattgcaggagcaacttacggcagatcacgggataagggcagtacactggcctgaagctgtgtcatcagcaaacttctctagtactcttcacccttggggccatcctacccctgatcgaactcagcgccgaccttctcagagtccttctctagcgccaccagggcctcacgggcctcagagaacttactcttgcttcataccctcaccgacataccagtgcac

SEQ ID NO: 12886 - DNA, 520 bp, Zea mays
  Clone ID: MRT4577_111748C.1
agggggggtttcttatttttatttttacaaaaacacttatatatgcttccaaaactattaacacggtggaacactgcctccgcttcacaatccttgacccactgaaaaaacataaaaccaaaggagtctgaaggacccaattttgtttgttaaaagcaagcaacccgaccaaccctgaacggcttgctacccaccaaaaccacgcccaagacaaaacgacccgaaccacacttgggatatagggcaagccaaaaaaaaaaaaaaacactactggaaggagttttaaccattctgattaacttacaataaccacttaacccttcaactggtccatgaactgataacgaacaccaaaccaaacgccgcgaccataaatggacgactgaaccccaaaactgaggccgctccacacagtgaggtacaatccgaaaaactggaccccccaggactgctaggaaacaatcaaattcgccgaacaacccaagaaggagacggtcccaaccacggggacccacccaaa

SEQ ID NO: 12887 - DNA, 1100 bp, Zea mays
  Clone ID: MRT4577_111749C.1
gcgggcctcatgttgcttgctgtacgtgcactatttggcctcgcggaaggtgttgcatttccgacgatgagcaccttcttaccgaagtggttcccaacacatgagcgtgctactgccgttggcatttccatgggtggattccatcttggaaatgtcataagcttcctagcaacaccaatcatcatgtcacacataggcctctcgggaacatttgccttcttcgcatcgcttggttatttgtggatctctgtatggatgatgaacgtagaaagtgacccacttgacagccatactataagcaagtctgagttgcaattaattctagctggaagagctggatctaaagtccaaggcagtaataaattcccatcccttagggaattgttctcaaggactgaattcttggctgtcactttggccaatgtggtcaacaactggggctattttgtcctattgtcgtggatgcctgtgtacttcaaaacggtttataacgtcaatctgaaacaagcagcgtggttcagcgccataccttgggcagtcatggctatgtccggctatgttgcaggagcctctgcagatttcctgatcaaatctggtttccccataggactagttcggaaaattatgcagtccattggttttatggggccttgcgtggcattgctatgcttaaggtttgcccaaactccatcagttgctgcagttctcatgaccattgccctgagcttgagttctttcagccaagccggatacttttgcaatatacaggacattgctcccaaatacgctggatctttgcatgggatgacgaacggcatagggacggtggccgccatagttagtaccatcgggaccggctacttcgtccagtggctagggtccttccaggcattcctcaccctcacggctgcgctctacttcagcgccaccgtcttctacaacgtctacgcaaccggagacctgatttttgactgagacaagacatgctaatgctaggattctttcgtgtagacgcagaatcccaaagtgtaccaatatttattatttatttgtacctcccaaggatggaataaaatagaggctgattgtttgccaagctt

SEQ ID NO: 12888 - DNA, 476 bp, Zea mays
  Clone ID: MRT4577_11174C.1
gccggccgggccgggagaacaacaatctataatctctcttcgtcactagctcgtggtaataagggaagcttgatcatctttccttacggcggtgatgaagagcagcacaatcgtcgcgcttctattggctgttgccattctgtcctcactgtctccatgctacgaagccggcggctgcatcgggaaacccaagaagtcaccgccgccgccgagaaggccatacttctcgtcctattccgaggaccaccagaaggaccaccagaattgccgcttgatctgtagctccaagggtttcaaggacggtggctggtgtgacgaaagcgtggagcacaaagtgtgctgctgctcccattagaaatataatagcgtatgttatgttgatgcatatatatatgcatcgtccatctacctctgtggtgcaaaattctgaataaaatctggcttttttggaaaaaaaaaaaaaaaaaaggccccta

SEQ ID NO: 12889 - DNA, 187 bp, Zea mays
  Clone ID: MRT4577_111750C.1
agtccagcttctcctctgcgattacttttggccctataatactgcggttcactggctggaaactggtcccaatatcgcttgacatccttgcgctgggatacaaagcgcgtgccttcaacatgcacgaatggaatggccccctgacgctaaccggtggggtcccaggacctacacttgcgccctacgc

SEQ ID NO: 12890 - DNA, 379 bp, Zea mays
  Clone ID: MRT4577_111751C.1
tccagctgatatcatccaaaacaagcccaatagcatgatccaaaaagagaaaagtatgtgtgttatctagcacgatgccatccttatctaacttgaactatttttagtatgtaaaatttgcattatagattttcttattggtactgaagaagttggtgattcttttgaggatatttcaggaagccctggtgttgaagctgcaaaggattttaatgcttctgcaaatgctggaacaagatcaagtgtagacactcatattagctggaacaacaagccaaaaattgcttcttgatgtagaggctattataaatcttcttcgttgtctgaaataatctcagcccgggacaccaattcaaaaacaaatgaagaagtcaagaca

SEQ ID NO: 12891 - DNA, 544 bp, Zea mays
  Clone ID: MRT4577_111752C.1
cgggccgggattcatccagctagagttccacgtacgtagcagtgatccattcccacgtacgttccagaagaatctgcagcagggacgagcagctagccatccatccatccacatgggccgttggttgaagccagatgtgtacccgctgatcgcggccatgtcgttcgtgacggggatgtgcgtgttccagctggcccggaacgtgctgatgaacccggacgtgcgggtgagcaagagcagccgccagagcgccgtgctggacaacgccgtcgagggccagcgctacagccagcacgccttccgccgcttcctcgccacgcagcgcccggaggtcttccccgccctcaacagcttcttctccgactccaataataataacacccccgccgacaagtgataaattcatctcatcgacggtctggtggtcttaattactcttacgccgcgcgccggccggcgacgacggcgcccgcgtgtctgtaatcatgccgcatatatatagtgtacatgtgccggtcgaataaaagttgagtctcttaagtcc

SEQ ID NO: 12892 - DNA, 183 bp, Zea mays
  Clone ID: MRT4577_111753C.1
aaattattggtacgcccgggcaaacaaaaggaagggggggttttaaattcatgtcaccacacaaaaatttgaaggggttaaaggtttccagaagactattttaatgtcactgggcgtatttggcacaatgcccattacttattacagttttttattgaccgcccgggtaaacggacccaaggc

SEQ ID NO: 12893 - DNA, 441 bp, Zea mays
  unsure (1)..(441): unsure at all n locations
  Clone ID: MRT4577_111754C.1
gtacaacatcacggggtacgttgcgatgggcaaggacttcacgtccgatggacttcccggcgaccgacagcgcatgcggacgctgggggcggtaagatccgtggtgtacggcaagaggcagaccgcgnaaggggatgaaggctgtgaaccaggtgtggaagggcggcgcgtcacccacgggcggcgcccnagacaagaacccgttngaggggggaatacagagatcaaagagaaagctatcgacanacggtaaggctttgggcgcggtacgagccagcanagcccgtgagtaaggagaggagntcggggaagcttaaggggtaaggtgcagcggtgcagcgaaagtctnatttgtaaaatcntcaaactgtgaaaccttggtttgttaccttgctgtanaaagnnnttgagcaggatgnnttgggagcatgttccggtctt

SEQ ID NO: 12894 - DNA, 337 bp, Zea mays
  Clone ID: MRT4577_111755C.1
tcttgacagcctacccctcccttctcgcgctggcccaggaaggcgcccgccttatctacgactgggcccacaacggtatgcttagcgacggtgagccgccactgcacaggttgacccaaggagcgatagccgcccaaaacgtggcggagctcgagagcctcctgtctggcatgattgacgtcgaggagcacagagacgtcacctatcacatgatgtttctagagggctacaagcaagcgagcctgggaaactgctggctttcactgctcgcaacgtcagactcatgcagccggagggcactcgccagctgaagtgctgcaccctgcaaggatgagga

SEQ ID NO: 12895 - DNA, 502 bp, Zea mays
  Clone ID: MRT4577_111756C.1
ccatgctacctattgcgctgggaggctctctttcctcccctctcgtgtctgcttgcaggcggcgttgctcgcctcctttcccctcccctttgctaggggatatagcagcactgcctgcatcatgcatcccgtctatacaccaccaatactatccctcctatactgtacctgcatcacacttgatacctatgcaggtgcattcgctacgggggggggggggggggggacacttgcgctacattgaatcgactcgaccgacagagacgtctggccagcccctcctggccctatctctgctctcctgactcaccttgcttttgcgacgctgtgtctggggggcacgggtcgcttcgccgctgccatgatgccttctgggggggcgtctgggtctaccctcgctggtgttgcgcagagcgctgcttctcgggtgggcaggtcgttttctcctctgctgccgggggccttgggtcctggtgtcttgtgcccgcccagggcgtgtgcc

SEQ ID NO: 12896 - DNA, 233 bp, Zea mays
  Clone ID: MRT4577_111757C.1
tcagacccacgcgtgtcgcgtttgtgcacgaggactgtatatatccgcatagggtcgggggtctagcggggccggcatcccccacacgagggccgcccctggcggtgccgaactggctcagcagaaaggccacatttaggccagcttaacaattgaaggtggaatcccaccacttgctcaatggctagaatcacaggcacttacggtgccaagagcaattgctgggaccttgc

SEQ ID NO: 12897 - DNA, 845 bp, Zea mays
  unsure (1)..(845): unsure at all n locations
  Clone ID: MRT4577_111759C.1
ggtggtgatcatggaggtcacgtggttccagggggacctggactatgagttcgacgcgcccaggtggttcgaccttgcccaagaggaggcgccgctggatgccgctgcggcgcaagagtggttcacctccgcccccagctacccgccctctcccttaattgctaagatgttagctgaggatcttgggttacaaaccattagaagcattgcagatacagatgatctgcattgttctacagcttctcacgaatgttctagtggcatgggaccaaaaatccgtcagcttgaagttaaaataggacgaaaagcttgcaatggtgcatcagaaaatgaacgccgttctcactatcaaactaccatggaatgcaggggggtnanangttccacactgatgaagcctactgccagccaattagccaagcaaaacagaccggcacagttaaagaatttgacacagaataaaaagtcagtgggagttataagagagagaagtaccataagctcaaacgattgcaattaccaatccactaaaagacaaagattagagaatgggcatctcaacaaggctgctgctactgctatccagcatgagtttattcataaaaatcatgaaaagaatgttatgaatcaaaacatggatcagcccactgttctgcccagattgaagattacaattcctagatcacctgatttggcaacaaagctaagagcagagaggtcaaaagctcaaagagcagtgccaactcttccaaagcagttaaatgacttaattcaacgggttgcaccctctgctcctacagttcaagtcgcaccaactagaaaggtagttgttcctttttgggcta

SEQ ID NO: 12898 - DNA, 503 bp, Zea mays
  Clone ID: MRT4577_11175C.1
ataaaaaaaaaaaaaaaaaaaaaaaaaaaaaaaaaaaaaaaaaaaaaaaaaaaaaaaaaaaaaaaaaaaaaaaaaaaaaaaaaaaaaaaaccttgggcctttccccccttaggggcaatttttgcaaatttccctccccttgggggccgttcgaccttccttttagggggcccatttccccttttttgggggggttttacaatcccttggccggggttttccaccgtgttgccggggaaacccctggggttccccactttatttcccttgggggccttccccttttccccgtttggcctattgccaattgggcccgcccggttcgcctttccaaaaattggcccaccctttttgggaaatgtaccccccctgtacgggggctttaaccccgggggtggcgggggttccccccaggggacccgttacctttcccagcgccttagcccctgcttttttggtttctttccctgcttttctcgccactttccccggttttccccttc

SEQ ID NO: 12899 - DNA, 878 bp, Zea mays
  Clone ID: MRT4577_111760C.1
aattcggcacgaggggccctctagcgttgtttggtcaatcctctctctcccttccccatctccccgtaccccaaaccctaggacgcagcgccgccgccgtagcaccctcacacgcagcaagatgaggccgcgcggcaggggcgacgacgtcgaagacgacgaggatgagtacgaggacatcacgccccctcgaagaacgccagagcctgaggccgaccccgtccgctcgccctcgccctcgccctcgcccgctcctgcccccgccccaccacatcccgcgcgtgcccctctcagcagtctcgttgtcaggccgccgccgcagcaacaggagaacggcggcggatcctccccgccctcatcctccgcccgctcgctttctcccagcaccggcggacaccgaggccgcggggcctcgcccccgcggcgacggcgggacttctcaccgccgcctccccgtggttgggtgaggcgccggtcgccgctgccgccaccgccggagaggcggcgtcctgggagcccgccgccccagcgccgacgctttagcccaccgccccggtcccacctaccgcggcatccgcgcttccacgatgagcaggaaggatatggaatgcatgcaggcccttcgccaccacgcagagcagaagccagcaaatttgatgatgatgttagtccacgttacactcatggatatcaagggggtggtagaggaggtgcaaggttccgagagggtcctccaccatatggaagaggtagatcatatgggagaggttatggtgctccacatggaaaggatctgattaatattgatggagaatatggtcaccgaaatgacccagatctgtcgccaagagaaggtgattggatatgccagaacccta

SEQ ID NO: 12900 - DNA, 219 bp, Zea mays
  Clone ID: MRT4577_111761C.1
gcacgaggtcaagaaaaggagaaattgtgacaaatgtgttgggtgtttgtgcacctgacatgcagtttatatatgtcttacctggttgggagggttctgcacatgacgggcgtgtgcttcgagatgccatctcgaggccgaatggattacgtgtccctcaaggcgagttctgtcccttcatattgaaaaaacaattatttaggcatagttattggtatt

SEQ ID NO: 12901 - DNA, 359 bp, Zea mays
  Clone ID: MRT4577_111762C.1
cgcaagcaccgaacggagagcaagcatgaaagcaaccaccgcactgccactaccgggcaatggcccgctcctacgtgtttgtcgtcgcgctcctcctggacgctgtcattgtggcaagtcatcctgtgcctatgcattgtctacctctccccccgcggggccattgccgcgcgggtctcccccggcgccagcgcaccatgacgcgggcctgactccggctcgttaccggactcttggttggatgcgccctgcaccagcagtgtttgacactagatagctagtcgcttgacgcacgatctacctctgcatctacacggtgatcgagttctagctgtgtggggatgcaatgcaaaatttcg

SEQ ID NO: 12902 - DNA, 595 bp, Zea mays
  Clone ID: MRT4577_111763C.1
ggcctgccgggactctccgaccgcacgctccgcgacgcgatggccgcgctccgcctcagctacttcaccctgcgacccgccggcgcctcttcctgacgcgacctaatcgagtgcacggtccgcctccttctccagggcaggcgcggcggctcctgtccctccggctggccaacacccggcgccgcggcggagacacgtgagggcacgagaccgctacagaggccgggggggggagaaaaaggtgaacatgcgcggagggcgcaagaccgaacactactccttagccaacggcgtggcacctctcaaacccgcagacaagaagcggcgcggaggcccgttcggagcccatatgaacgccgacggcgagatcctaaggaacggcggcaccaagaacggacatcggctagtcggcggagctcgaggcgtcgtgctgctccggctggaggccgccgtcgaggagtccgagtacggcgcgtggccctgccactgtcggctgtcgccgaaggccgaagactgcttcacaaaccgcgagatatataaccagctgcacgctttcgattcaatatactgtgggacgaatgcatgacaatcaggg

SEQ ID NO: 12903 - DNA, 270 bp, Zea mays
  Clone ID: MRT4577_111764C.1
gacgctattacataagctgcttctgcggcagaaacgatcaatacaaagagctgtatcttaaagttacaatcctgtagacctaagtgatcaccacatacgatgtgtatgaaaagattgcgttctatgcatgctctgatacctgtatcagaaatgctgtgagggatggcctgaacttacgaccatataacaatactgcttggcgacagggaaatgatgagattgctaaactcagaggaatggggcatagacacccataacacacgcacactt

SEQ ID NO: 12904 - DNA, 339 bp, Zea mays
  Clone ID: MRT4577_111765C.1
aaacaagaacactgtttatgcagtccacgggacattgaaaagaccgggacttcaagattacatgtaggattgttgttatatcatgagtgttcaaaagatgtggcccaaagacaaaatgctgtgacaacagtgttgctgttatccagtacatggggaacattgcggatccttaggagccgtgaaaaagaatgaccgacgtggactaaggtgaggcgtgaagctaaagacggcacgagttagtaattagggggggtccggacatggaaaaagtggtaccgcttctaacgtcgctgtctgaacatgcaagacagggtcattgagcggtgacaggagttggtg

SEQ ID NO: 12905 - DNA, 308 bp, Zea mays
  Clone ID: MRT4577_111766C.1
ctcaagcactataatagaagtacttgttattcttacataagactcataacaagagtagaaattattacgaaaacgggggtaacgtgtgcttcgacaactttggtgacaaggtgaagaattggttgacctttaatgagccctatacatttacttcattttcctatggaaccactgtctcatgccccatgacgatgctcacctgtactagactgtaccatctcaactgataattcactcgtctaaccttacattgctgaccacaacattcttctagcccacgcttaggctgttgatctttactacaagta

SEQ ID NO: 12906 - DNA, 272 bp, Zea mays
  Clone ID: MRT4577_111767C.1
tccaggcgttgctagacaacacccacaggacacccgatctacccgcaggcgcagtagcaacaaccgtagccgactgccagtcagtgcgtgccatgaacctggctgtcccggctaggcagcaaaacaaccaggacgcagaccatagcggcaagacagaggccgatgacgtcctcgggactgaggcgtgtgcccaaccgaagctacctctcatcctgcgtgacgacaacacctacgacgccatgctgccgcctgtcatcttacccatggccgac

SEQ ID NO: 12907 - DNA, 463 bp, Zea mays
  Clone ID: MRT4577_111768C.1
gccggccggtccggcgaaagtaatctgagtacgagaaccacatctcgcttagccatgtactcatccttatggcatgtgatgccagagaagtcacaagtgtacaaggcggagagactgctgctcaagttgtgcacgctggctctgtcattacatctccccaggtctttactgttctgatcgctctaccagctactgtgccatctacaatcgcgagggcatcaccaatgccactatcatgcacataaactaccgatcattccaattcctgaaataacccacaataaaggcaacaaaagctggaggctagcagccatatacctacaggcggtgaagaactacgacatccaccaggctgccaaaattccacatatcattcagcgagacctccaacctctggggctcgcgctggacaacattccgactatagcgaggcgcattacgcgcattcactacgcgcccgata

SEQ ID NO: 12908 - DNA, 659 bp, Zea mays
  Clone ID: MRT4577_111769C.1
tatcagcatgacttgcaagcagctagctactgtttacagatgtcctctacttgccaaaaaataacaaaggggttctcgttcttgaaagctgcatagatagcacctcaacttggccactaaaacaactaagtttttttatggacatgtctgatgtttttctcaataattgtgcaaattttcctttcataattttcgtcgtcggggggcaggaaccgggcggtgtacgtgctggcgcagtgcacgctggacatgccgccggaccactgccgggcctcctcgatggagccatggcagagagcggcgacggaaggtcagcggcgacaagatggacgtggcggtcttcggggcgcggtgcaccctgcggtatgagatggacctgcagttcttcaatgtcactggcaacagcaagatgctgtccctatatttttacagatatttttaataatgacctcagtggaccctatgcatttcttgagccaccttttgttcaaagatcccttctatataagatacaggcaaggagaaaaaatagattaatcggtctcgaagcttctgatacactcagttctcacatgtcgcatgaaatggacctcactagaaaccaaacacccttgaatcgcagtcacccacgtcgccaacaggagtgacttcctcaccct

SEQ ID NO: 12909 - DNA, 481 bp, Zea mays
  unsure (1)..(481): unsure at all n locations
  Clone ID: MRT4577_11176C.1
gaacggcgtcaagttcggcgaggcggtgtggttcaaggccggccgcaatctttggagggcgggctggactacctggggaaccccacctgtgcacccagagcatctgccattggcgtgccagtggtgctcatgggcttgcgagggctaccgcgtcggcggcggccgtcgggaaggctgacaggtgtaccccgcggcccttcgacccgtgggcctgcgcgcccggacaccgncgcgactcaagtgaagactaagaacggccgcttgccatgtttccatgttcggctttcgtcaggccatctaccggcagggcccctcgagacctttcgaccactcgccgccccgtcgcacaaccctgggcatcgcacgacttctccccggcactaactgactgagcacgccgacatgtgtactaccatcagatccaccancgttctncgtccgcgagtgacagtgtggcctttctgcctctacttgtcagatc

SEQ ID NO: 12910 - DNA, 339 bp, Zea mays
  unsure (1)..(339): unsure at all n locations
  Clone ID: MRT4577_111770C.1
aaaaaaatntttttttccccacaacaaacccccccccccagggaaatttttaacagattttgaatgggaaccgccaaccaaagagggagaggaggggacagggggacacgactatagagggcgatcaggaccggcaacagatattggagcccatgaccacacaagcggatgggtgtgcccccccctagctagctcgatcactagatcgttcggcctgatccgggacaccgagaaactaacgatcatggccgcgcgcaccactggctaactcaaggacatgggcatcagggcggcgaggcagaactcgaaccagcagctgttgccgcccaaggagacact

SEQ ID NO: 12911 - DNA, 412 bp, Zea mays
  Clone ID: MRT4577_111771C.1
gaagttctgaatcccgccctcttttttttcgtttgatgcgcggatacctggatgccaatccaggctccgtgatggcgttagcagttagcactgacattgttcagttttgggtacgaataatacaacatggtgctcagggttagtgctaacttatcttcttgtgctagcgacaaaccatagttagattgggctccttgctgcactccaaacaatcagggtagaatcacataattctcgagactgactgatggaatgcattccctttccctaaaacctatacctgtctgtcatataggagaatgagtagaaaagaactgctccatcagatcccctttctcaatctcattttttattaatataatcgtcagctccctgcttgggttggttttatatatttatataaaaaataaag

SEQ ID NO: 12912 - DNA, 161 bp, Zea mays
  Clone ID: MRT4577_111772C.1
gttttctgcggtttccatgagccgaggtctggaagtgattgtttacaacagcagagggaacttggtgcaaggacttttaacacctgcgaactggtgcacatgcagacttataggggcatacctgcgtaccataaacaaggtcggctgtgctacttgcacag

SEQ ID NO: 12913 - DNA, 764 bp, Zea mays
  unsure (1)..(764): unsure at all n locations
  Clone ID: MRT4577_111773C.1
tctttgtattcggccgaggttccgccccccgccgcccgccgcccgccccgcgaccccgaggaggaggcatgatgcagaccatcctggcgtcggagacgatgtacatcccggcgggcgtcacggtgacggtggcggccaagctgctgacggtggccggcccccgcgggaagctcacccctaacttcgcgcacctcaaccttgacttccagctgcaggagggcggccgctagctcaaggtgcatgcatggtctcccacccgccgaccatggctgccatccgcactgtcatcccccacgtccctagcctaatcaagggcgtcaccctgggctaccgctacaagatgaggttcgtctatgcccatttccccatcaacgtgtccatcacgcactccaacatcgccatcgagatcttgcacttcctcgncgagaagaaggtcagaacgttgtacatgcttgaccgcttgaccattctccgctccgagaaggccaagtgactagctttttctcgatggcaacgacgtcgagttagtctctctctctggctccctcatcnaccagaaatgccatgtnaagaagaaggatatcaggaagtttttggatggtatctatgtgagcacaagggtgtgatcgaaaggagccgtggggaccagtagtcttatcgttttagttggaatatcggttgggttgcaatttttctaggtgaacttgtaatcgttaggagcctttggggccctttcttatctcaatattttcgtatctgttaag

SEQ ID NO: 12914 - DNA, 272 bp, Zea mays
  Clone ID: MRT4577_111774C.1
aaacccggccgacccatcatccccctagctgctcctaccaattttatcccatactattattaaacatactctggtgcacattatgcagcacattattacatatggtaccttcctcacttaccagaagaacccgaactgtaaattaaccttgaccaacttttacgtatgcaaatcattagcaacaaggacaacatgtttgatttctttaaagcatgaactgagtctcaacgtgcaaactatcttattaccttaggaggtattcaaagcaacca

SEQ ID NO: 12915 - DNA, 279 bp, Zea mays
  unsure (1)..(279): unsure at all n locations
  Clone ID: MRT4577_111775C.1
gcagccatgggtttatctttggccgccgtttcgagcacattcctgggcacccgcctgggggaccgggcgccacagaacgggcgcatcgtagcccagttcgggttcaggttgggctgaaaggcgaatcctgcttcgaaaaaagtggcgaagacatcgacctcctctgaccggacgctgtggttccccggcgccgtggctcccgactacctgtacttgctcctggtcggcgactacngattcgacccgttcagtctctggaagcccgtggagtacctgcag

SEQ ID NO: 12916 - DNA, 1348 bp, Zea mays
  Clone ID: MRT4577_111776C.1
tgattcaattctcctcaatcaaagaacgtgcccacgcccgtccgaaaaaaactaatagaaaaaataaaaagaatccattgactcgcagcttcccctgctcctgctctcaccatttccacctataaagtcggccgcagcctcctgcgcgacaaacacctcccaacccaatctcctcactctcagagagagccccaagccaagatctgcgcgggcaagtcaccaggcgaagcaccggctcccatggccgtggacctgatgggctgctacgccccgcgccgcgccaacgaccagctcgccatccaggaggcggcggcggccgggctccgcaacctggagctgctggtgacgtccctgtccacgcaggccgccgcgccgcacagggccgctgatcagccgttcggcgagatcgccggccaggccgtctccaagttccgcaaggtcatctccatcctcgaccgcacggggcacgcccgcttccgccgcgggcccgtcgagccgccgccgccgacgccgcctcctgtcgtccccggtcctgcccctggcgcccgtcagcgtggcgcagccgccgcagagcctgacgctggacttcacgaagccgaacctggccgtgtcggccgccacgtccgtcacctccacgtccttcttctcgtcggtcacggccggcgagggcagcgtctccaagggccggagcctcatgtcctccgggaagccgccgctgtccggccacaagcggaagccctgcgccggcgcccactccgaggccaccaccaacggcagccggtgccactgctccaagagaaggaagaaccgcgtgaagaggaccatcagagtgccggcgatcagctcgaaggtcgccgacatcccgccggacgagtactcgtggaggaagtacggccagaagcccatcaagggctccccttacccacggggctactacaagtgcagcactgtgcggggatgcccggcgaggaagcacgtggagcgggccaccgacgacccggccatgctggtggtgacgtacgagggcgagcaccgccacacgccgggcgcggtccaggggccgagccccctggcgaccgcgtcgccggtgcccgtcgccgtctccgccggcaacgggctcgttgtctagtctactaaaagctaggattagcttctcgtcttctttgttttttttttgtttgagctgatgtccgtgtaaaacaaggaagaaggttgtagaaagagggagaggaggacaccggaatttcgatgccgcaaaactcaaacctttgtgtcgtgtcctaaaaaaaaaaaaaaaaaaaaagcaccgcctcacgccgggcgcgcccgcgcccgcgcccagccccct

SEQ ID NO: 12917 - DNA, 248 bp, Zea mays
  Clone ID: MRT4577_111777C.1
tgatcaggggcctggtgccaactgacgttgccgacattgttacattgcccagatgctgttcaccttggacacctgatacgactatgactactaccgcgcgtacactgaattatgtccttcggattttcaaaggatctctgaggcgcatcctacaccgagcaatgtgcagatctatttcttcctctgtaccctacctttggctaaaccgattcctagaatgacaggactttaatcataaaagataactc

SEQ ID NO: 12918 - DNA, 407 bp, Zea mays
  Clone ID: MRT4577_111778C.1
gataatctgacgctccaaacaatgcactgcattagctatcagggcttcagattctgcaaaggctaaatctgtcatatggtctggacactggcattcgtgtgaacaagatctatgcgaagagtccaatgaaaacagctaacctcgacaatcgacagattcctgaccatctactcgatgtacttataatctatacctaggcgtgctcatcgtgacctttacggagcctgcatacctacaccatggcaccaattgctatagatactataagaatatcggagctaatgcaatctgaagagagttacgaactgacgctggagtgaagaccattacggatctgaatgccctgacgtttctgaatgtaagtgaaactgcttacctgtcagaccttacctatgatatccacattg

SEQ ID NO: 12919 - DNA, 1258 bp, Zea mays
  Clone ID: MRT4577_111779C.1
ccgggaggtggaatggtaaaggggtctaccccaccatttccacctataaagccggtccgcggcatcccttccgacctcgaccggccgggaacctcccttcccgacccaattctcctcaatcaaagaaagtccccacgcagagcaagccaagatctgcgccgcggcgaagcaaatcagcaaagcaaagcaccggctggctcccatggccgtggacctgatggggtgctacgccccgcgccgcgccaacgaccagctcgccatccaggaggcggcggcggcggggctccgcagcctggagctcctcgtgtcgtcgctgtccacgcaggccgccgcgccgcacagggccgcggctcaccagctgcagaagccgccttcgcagccgccgatcggcgagatcgccgaccaggccgtctccaggttccgcaaggtcatctccatcctggaccgcaccggccacgcccgcttccgccgcgggcccgtcgtcgagcccgccaccggtgcctgctccggccgtcgccgctcccgctccggcccccgctctccacgtggtggctcccgtcgccgtggcgcagccccagagcctgaccctggacttcaccaagccgaacctggccgtgtcgggcggcgccacgtccgtcacctccacgtccttcttctcctcggtcacggccggcgagggcagcgtgtccaagggccgcagcctggtgtcctccggcaagccgccgctgtccgggcacaagcggaagccctgcgccggcgcgcactccgaggccaccaccaacggcagccgctgccactgctccaagagaaggaaaaaccgcgtgaagaggaccatcagagtgccggcgatcagcgccaagatcgcggacatcccgccggacgagtactcgtggaggaagtacggccagaagcccatcaagggatccccctacccacggggctactacaagtgcagcaccgtgcgggggtgcccggcgaggaagcacgtggagcgcgccaccgacgacccggccatgctggtggtgacgtacgagggcgagcaccgccacacgccgggcgcgcccgcgcccgcgcccagccccctaagcgactcactcttctgcagcaagccaacacattgttgtcgacagctattatcaatggcgtagtccctgctacctgctctattgttcttgcatcttgagcggaccactggattctaaggcaccctgaaatctgtctacgagatctctaagattatgagatgacctatgacccc

SEQ ID NO: 12920 - DNA, 574 bp, Zea mays
  unsure (1)..(574): unsure at all n locations
  Clone ID: MRT4577_11177C.1
ggccgggnataaaaatgtgtgtccactctctttcaccttaccacgcactggcggcttattctgagacagctccttcccccaaccgctggctgacgtttattgcgccaccttcatcttagctgtctgcagaacaaagtgcatccaacggccatacccctccaggtggcgcacacctgaccctaccctagtggcgtcctctccatgaccaattgccccgtccttatctggtcctccacctctgccctagtctagggtgatgctgcaccgggggaccacccattacttggattcactggaggctgccgacgcctctttcaagtgcaaccaacgcttctcacctgtgcctacattactcctttctagaactcgtctacaactcttaatctgtgccacctcggctgagacgctatggcgctcatagggacatggttactggctcacctgctacagatcctcttttctgcacgacccgggcacaacttgtggcaccttggaactaagcccctctcccctgcaatgcatgcctttgctgtgcccttccggactcccccagcgcttgcggcagggccttgcc

SEQ ID NO: 12921 - DNA, 310 bp, Zea mays
  Clone ID: MRT4577_111780C.1
cgtgtctatctcggatatcaacatgaccgaagtagagttgtctgtgttgctgttagctaagtaggaggaaagaggatttcctagtaccatagagagtatagatggcatgtatatattggaagcggaggaactgtcctattggatggggaggacagttcacaaggaggacattaagtcaccgatcatcatgctcaaggcgattgccgcgtatgacttgcggatctaacatgttttttggatggtaggatcgaacaacgacgtgaacaagttcaaccaatcaccgttgttcgctgatgcactcaagggtgaa

SEQ ID NO: 12922 - DNA, 2793 bp, Zea mays
  unsure (1)..(2793): unsure at all n locations
  Clone ID: MRT4577_111781C.1
gcggcaaggatgcgcctgcacgcggaggtgcgggatgagatggaggaggggagcgaggtgggggctgtgacggcttcggcggggctgtcgccaccgccactcatcggtgcggcggcgccggttcaccttcttcttcgtgagggccggcagcctctgcactgcaggatctcatcccctccggctgcccgtgcccagccgtcgtggcgcgacggcggcggtcggtctggtagggctcccctcctttccaccagatcagaacagatagtcatagatcactagatcagtgtcacaccacgacccgccagccggaccgccacttgccaaccaacgcctttccctcctcctccgcctccgggcgctagcgggaatggacgccgccgagctgcccctcgtctaccacatcggtctggtgctggccgcgctctgggccgccgccgccgtcggcttccgcggctccctcctctacctcctcgccttcctctacctctacatggtaaatgctcgctgtgcagtgagactgcggaagaggatacaacatgaagagatgaaatctgcctaccaacgaaggctcctctctgatgcagaatcagcacgctggttaaaccatgcaatcgacaagatgtggcctgtctgtatggagaagatcgtttcaaaacttctacggcccatcataccatggttcttggataagttcaaaccttggacagtcagcaaagcaagtattcaggaactttacatgggcaggaatccaccaatctttacctccatgagagttctaccagagacatcagatgatgaccatttggttcttgagctgggattgaattttctttctgctgaagatatgagtgctgtacttgctatgcagctgcacaagagtgtgggacttggaatgactgcaaagatgcatttaacaagcatgcatgtcgagggaaagatattagttggtgtgaattttgttcggagttggccatttcttggccgtgtaagactatgttgttgtggagccaccttattttcagatggctgtgaaaccactcattagtcacgggctcgatgtcactgagtttccaggaatttcaggatggctggataagttgatggatactgcatttgggcagacattagttgagcccaatatgatagtaataaatgtggaaaaatttgcatctactccttcagaaaataactggttcagcattgaggagagacctcctattgcatatgtgaagcttgagattctagaaggaactgacatgaagccatctgatataaatggactagcggacccatatgtgaaaggtcaccttggtcctttcaaattccaaacacagatacagaggaaaacattgtcccctaagtggtttgaagaatttaaaataccaatcacatcatgggaggcaacgaatgaacttatcatggaagttcgtgataaggaccccatgtttgatgactcacttgggcaatgtaccattagtttacatgatctgagaggtggacaaagacatgacaaatggatatcactgaataatgtgaagaaaggaaggattcacttggcagtaacaattgatgatatatccgaggaccaaaatacatcaagtttggaccaatcattgaagcaagcggatactgaactaccagtatcaacatctgtttgtagcgaagtggatgctagtgaacctcctgaagaaaagaaagtcttaatggatgaagtggagcacataaacattgatggacaagaacagcctggaggtttatatgtacatcgccctggcactggggttccaaggacatgggaatcccggaaaggacgagcacgaaacccagacacacagattcaccaagaggttgacaagcaaaaggaagtcccaacaccaaaagggagtgggcaagggggtctatttaacgtaggctcctttttccggtggaactcgaggaaggggagctccagaaatctcgatgccagccctcctgcaactccgggttctcagagcgtgacagagcttgatccaaagctccctcaaactccacgtcccaacctgaaggagctaggcgagaagcggacgtcgataaagatcgtagtggacgaagaagcaagcccggcagacaaggtgggaggtgcggagaactcaggagaagatgtggcgaaggtgatagagaaaaatgcaggtgaaccgggcaggtcactgacaagcacattgagcaggaagatttgcagaaggagagcagatgataggctatcagatatccccgagaagattgaagctcgtggatctaagccggtgagtgaagggcctattcttgttagaggtgagccaatgataacagtggaccatccgacgacggaacatagcgatggaggtggcactgagcaagatgcggtgggagcaaaggttgctactcagacctcataaggattgctacttaaggtcagcagttcttgttcttgtaatctttgctggtcgatttggttcgggcatgggaccttgctttctgtttatagatcagtgtccatagttgcgaagggtatccatttagaaatggctgaaaaatatagtaacaaagagcagcgtgttgtgcagtgatatacgctcatgttgataagatggctctgttagatcttgtttacttatgtaaagaaacatgaattgcatatatttcttgacataaataatgtaaaacgtatttttttggttgcaagtatcctccacccggccgtttatggatgtagtttttagctctgatctatatatcggttgataagataagaagtttnnnnnnnnaaaaaaaaaa

SEQ ID NO: 12923 - DNA, 389 bp, Zea mays
  Clone ID: MRT4577_111782C.1
ttgttcgagtattaagataaccaacaggcgtgtaaatgccattgaacatgtcatcattccccggattgaacgtactcttgcttatatcatcacagagctggatgagagagagcgagaagagttctataggttaaagaaaatacaagagaagaaaaagattctaaaggaaaaatctgagaaggacttggagcaaaggagagcagctggagaggtgttggagcctgctaatcttctggctgaagagaaggacgaggatcttctatttgaataatctttcctgttctggttctttgagaaaccctaacactggcttcattttaattcacagtgtgtaggtttgatttgtgtggctattgattttttggcctaagaatttcactggttgtaaa

SEQ ID NO: 12924 - DNA, 2627 bp, Zea mays
  Clone ID: MRT4577_111783C.1
cccctccggctgcccgtgcccagacgtcgtggcgcggcggcggcggtcggtctggtagggctcccctcctttccaccagagcagaacatatagtcatagatcagtgtcacaccacgacccgccagccagaccgccacttgccaaccaacgcctttccctcctcctcctccgcctccgggcgctagcgggaatggacgccgccgagctgcccctcgtctaccacatcggcctggtgctggccgcgctctgggccgccgccgccgtcggcttccgcggctccctcctctacctcctcgccttcctctacctctacatggtaaatgctcgctgtgcagtgagactgcggaagaggatacaacatgaagagatgaaatctgcctaccaacgaaggctcctctctgatgcagaatcagcacgctggttaaaccatgcaatcgacaagatgtggcctgtctgtatggagaagatcgtttcaaaacttctacggcccatcataccatggttcttggataagttcaaaccttggacagtcagcaaagcaagtattcaggaactttacatgggcaggaatccaccaatctttacctccatgagagttctaccagagacatcagatgatgaccatttggttcttgagctgggattgaattttctttctgctgaagatatgagtgctgtacttgctatgcagctgcacaagagtgtgggacttggaatgactgcaaatatgcatttaacaagcatgcatgtcgagggaaagatattagttggtgtgaaatttgttcggagttggccatttcttggccgtgtaagactatgttttgtggagccaccttattttcagatggctgtgaaaccactcattaatcacgggctcgatgtcactgagtttccaggaatttcaggatggctggataagttgatggatactgcatttgggcagacattagttgagcccaatatgatagtaataaatgtggaaaaatttgcatctactccttcagaaaataactggttcagcattgaggagagacctcctattgcatatgtgaagcttgagattctagaaggaactgacatgaagccatctgatataaatggtgaggatgaattgtgcagcttctgtgttactcttaattggtgtaacacaattgatgatccaatgcacaggactagcggacccatatgtgaaaggtcaccttggtccttttaaattccaaacacagatacagaggaaaacattgtcccctaagtggtttgaagaatttaaaataccaatcacatcatgggaggcaacgaatgaacttgtcatggaagttcgtgataaggaccccatgtttgatgactcacttgggcaatgtaccattagtttacatgatctgagaggtggacaaagacatgacaaatggatatcactgaataatgtgaagaaaggaaggattcacttggcagtaacaattgatgatatatccgaggaccaaaatacatcaagtttggaccaatcattgaagcaagccgatactgaactaccagtatcaacatctgtttgtagcgaagtggatgctagtgaacctcctgaagaaaagaaagtcttaatggatgaagtggagcacataaacattgatggacaagaacagcctggaggtttatatgtacatcgccctggcactggggttccaaggacatgggaatcccggaaaggacgagcacgaaacccagacacacagattcaccaagaggttgacaagcaaaaggaagtcccaacaccaaaagggagtgggcaagggggtctatttaacgtaggctcctttttccggtggaactcgaggaaggggagctccagaaatctcgatgccagccctcctgcaactccgggttctcagagcgtgacagagcttgatccaaagctccctcaaactccacgtcccaacctgaaggagctaggcgagaagcggacgtcgataaagatcgtagtggacgaagaagcaagcccggcagacacggtgggaggtgcggataactcgggagaagatgtggcgaaggtgatagagaaaaatgcaggtgaaccgggcaggtcactgacaagcacattgagcaggaagatttgcagaaggagagcagatgataggctatcagatatctccgagcagattgaagctcgtggatctaagccggtgagtgaagggcctattcttgttagaggtgagccaatgataacagaggatcatccgacgacggaacatagcgatggaggtggcgctgagcaagatgcggtgggagcaaaggttgctactcagatctcgtaaggattgcgacttaaggtcagcagttcttgttcttgtaatctttgctggtcgatttggttcgcgcatgggaccttgctttccgtttatagactcatggtggtgaagaatgtcagatcatggacttgtttcagtgtccatagttgcgaagggtatccatttagaaatggctgaaaaatatagtaacaaagagcagcgtgttgtgcagtgatatacgctcatgttgataagatggctctgttagatcttttttacttatgtaaagaaacatgaattgcatatatttcttgacataaataatgtaaaacgtattttttttgttgc

SEQ ID NO: 12925 - DNA, 157 bp, Zea mays
  Clone ID: MRT4577_111784C.1
tcgcagatcggcagtaagaaacccgctataaactgtgattggatgcacattctcttagcttcttccacgaatgctgaccctacctagatgtgaagcttcgcagaatgcatagtcattcactgtagatcttactgaaatgcgtatgtgatttaatgta

SEQ ID NO: 12926 - DNA, 225 bp, Zea mays
  Clone ID: MRT4577_111785C.1
aaaggtaaagcccccttagatgtaaaccctggacaaccttaacctagagcccccctcctcaaaagtgaggggaaaccccccaaaagctaaaacgctttaaaactcggaggggcccccaactggcctgggaaaggaaacccccaggggagcacccctttcgggaaaggacccggacccggttcccccaggaccccaatggggaaccccccctggggccttcccggc

SEQ ID NO: 12927 - DNA, 122 bp, Zea mays
  Clone ID: MRT4577_111786C.1
ctgaaaagccaggtacttcacacaggaggttatcatgcacaaagggggggttatgttgacgagactggccaggtctggcaagaccaaactgtgtctcatccggggggctgcagaagcaaagt

SEQ ID NO: 12928 - DNA, 559 bp, Zea mays
  Clone ID: MRT4577_111787C.1
gtggtaagtctggtcactactttgctaaatgtccataaacaagtgatagtgacagggacgatgacaagaaagggaagaagtaaatggaaaagaagaaatactacaacaagaagaagggtggcgaggcgcacataggatgagaatgggactcccacgagggctccatccactcctccgacgaggacgccgccaacatcgccatcaacaaaggtcttctcttccccaacgtcggccacaagtgtctcatggccaaggatagcaaaaagaagaaggtacattctagagatatccccaaatatattatttccaatgagggggtagctctagtgaaaaggatgatgatttgtcttctctttttgcaaaccttaccatagagcaaaaaggaaaaaataatgaatcgttaaaaaccattaacgagaaggatgaaatcttggaatgccaagaggacttgctcgttaagaaaaataaaaaaattgttaagctaaaagatgcttttgctcttgaagttgaaaaagcaaaaacttgaataaagagctaaatacatgaaatgattcaattt

SEQ ID NO: 12929 - DNA, 354 bp, Zea mays
  Clone ID: MRT4577_111788C.1
tgtagaatatacacgctgttccagttgcaagatctttagaaaacacgaatctgccccttgccaggcaggcacagtaaaagattcaaatcaatgcaaagatcaacctcatagggaatacatcattatcaatgcatggtatcactttttctatctccttccgcagcacctcactcactctccccgccggttgtcccctacggacaggcttaaactatgttcgtcaacgtcgccccgttaaacgctgtatttggccttggcacgagtgctaccactgtgtgcactatcggtatggcccgaaaattcaacgacatccgcctccttcagacgcaagaccttcttgaaacgacgtccaat

SEQ ID NO: 12930 - DNA, 318 bp, Zea mays
  unsure (1)..(318): unsure at all n locations
  Clone ID: MRT4577_111789C.1
gaacaggggggggcanagagacctttcccatgggaaggggaattaacaatgagatgcgctcaagaaactcggtgcgctcactgggtatgcctgaataggaggccnggcacttatntgtctggggggggggggattancattngtaaatnagtgcgcaggtacaacngnctaaatcctttgcatctgggcaaatttggaaataaggactggggggtgcccatcagtaaacacatgatgctactggtggtaaactaaatggggcaaatttcataatgctagggattggtctcgggtctaagggggtntgttggttggttt

SEQ ID NO: 12931 - DNA, 288 bp, Zea mays
  unsure (1)..(288): unsure at all n locations
  Clone ID: MRT4577_11178C.1
cttcttccgtgcgccncttttgcgtgtgcgattagtgcaaatggactggacctggtcttctgacagaacacaaatggtccttttgtctggttctaccatgcaggacggactcgctgtgacagagcttggggctggggcgtgttattaccattgggaacgcgggggccagttgggtgagagttacaaaagcaaatggtgtcgggtgtgttgctcccacattctctccttggctctgtggggccgttcttatcttggtgggaattcgcaatcttcgacgtctttattgat

SEQ ID NO: 12932 - DNA, 695 bp, Zea mays
  Clone ID: MRT4577_111790C.1
tcgggtcctcaacttcccgctccgcatcggctccgagatcgccgcggcggccgccgccgtcgcggccactgcccctgccgcgggagacaagcgggcgtccccagagccgaccgcgagctccgactcctccccttcggcctcctctgcgacaccgaagcggaggaagagaggcgaggccgctgccgcgaccatggccatggcccttgtgccgcccccgccggcggcgcaggcgcccgtccagctgaccctcccggcccgtccgtggttcgccgccggccccgtccagcagctagtgagctaactgatgctgtaccagtggttcctggttcatggattcatctcagtgcaagaacagagcaacaagatgcgcatcatcaaacacacacgcgcgcgcacgcgcgtgcgctggaccaagaaatgcgtgtgacgagctcgagggcatcgtcatctggatgttctctggttcgcatggaaactgttcctccatggtcgctagtgtggtggcttgtgaattgtgatgtgtagaaccagaatgaatcgtgtttgtggcgtcattgcattggattcggacgagttgaaatcggaagcttctctgttgagagacgctggtggtactggacctggtgcaagtttgcatcagcaagtctcgaatggatattattctttgttgtttggtattccaaatggttcctttg

SEQ ID NO: 12933 - DNA, 2529 bp, Zea mays
  Clone ID: MRT4577_111791C.1
ctctgcccttgtcgcttcaaccctcctcttgctctccctccaacgtctctcactccccggtcggcacgagccgcccccgtcacaccgccggaaccctacacaaggtcccacagtcaatgccgcccgcttcacgccccgccgctgcctcctccgctctacccgcgccgccccgccgcctccgacgccgccgcccgctcaaagccacactagccaccacccccgcggctgacgcaggcgccgccgctggagctgcccgccacggcggccccgagactccgcatctctgttgggccgcgtctagcggcgagagcaatgcaaacgcagagaggccgcgcggggacccgccctcctccgtcagacgcttggccgcggcggtgtggcggctgcggccacccgaggaggcacccaccgccggccagtatgacgccgcctcccgtgtcggcctcgagcatataccgagacatctacaagctcacctcctgcgcaagaatcctcttacttaccaccgtagtttcaaaaaagacatttcaagccccaactccgtcctggagccacatagtgaagagctccacaagatacatcttggtctttcctctggtgtggaggatgcaacaaaatgggagcatataaaacataaagagcatagaaccagatggtgcctatgtgattgctagccaactaaatctcgttgaggaacagcaagggggcagctatgttgctagccttgagttggagcttcagcaggcacgggatagagtgagcaagctagaagctgaacggctttcagccaagaagcaactgaatcacttgttcaagaaacttgcagaggagaaagcagcttggcggaacagagagcacaagaaagttcaagccattcttgaagatatgaaggctgatctggagcatgagaaaaagaaccggaggcagttggagactattaacttcaagcttgttgatgagttgaaagaggtcaaaatggccgcgaagcagctattgcaagagtatgacaacgagcagaagacgcgggaactcacggatgaggtgtgcaacaagctagtgagggagatagaggaacacaagtcagagatcgaagccttgaagcaggattctgtcaaactacgcggcgacctggatgaggataggaaattgctacagatggctgaggtgtggcgtgaggagcgagtgcagatgaaacttgtcgatgccaagctcattcttgaggccaaatatgaacagttgagcaaactgcaggaggaggtggaggctttcattttgactttcagctcttccaaaggagacagcacaattgttgaagccgcacacaacattgtacaggccattgggtcggccagagaccaagaggttgaattcacatatgagccaccaagagcatcagaagatatactggccatctttgaagagctacgcccaagtgaagagatggagaaaaaggaaaccgaaccatgcctaaagcaagaaatccaagaagctagcccaacagctgatatatttctggaaaatcgagccagattgttcccagatggaagccattctgatgagagcgataaggaagatggaagcagctgggagaccatgagccatgaagagatgcaaggctcaagccattcgccgtatgaaagtgaacattcagtcaacaagatctttgacagaatttcgtggaccagtggaaacgattctgagggtgagcaggccaacaaactgtgtgatgacttgagcagtgtgtacctgacggacatggaacagtccaagaagaaagagtccgccatatcaaagctgtggaagtcatctccactgaaaaactgtgaattccgtacaaaagatgttgcggatatgataaatgggagattatcaagtgcaagtcttccaaatggtgtgtactctactgccaaaggcttgaatctagatatgggggacagcacccctagcaccacgcaatggagctcaccggattcgatgaacagccagctcaaccggggtttcagaggttgcatggagatggttcagaggcagagcctgaaggcgaagctccttgaagctcggatggagagccagaagattcagctccgccatgtgctcaaccagaaaacttaagttagaaccgcactgtgtcgaaataaaattccaagcattggatttattacatttcccttgtccattgtagtatgtagcttagtctcatgtgtttctgcttcatagaactatatagctagctatagccttgtaggctgacctggccatggttgatgcagctgtctaattgtggcagtacatttgacaggttatgtgcccgtctttatgtgtaatgtggcagtaaactgtaaaccagaagcattattcagactaactgtaccagtactgtagcaggctagcaacaaacaaaatgcatcgttcagacaaactgtaccattggcagtgaagaattttaaaacttctaaatacgtgtttcaaaagggggggggggggggggggggggggggggggggggggggggggggggggggggggggt

SEQ ID NO: 12934 - DNA, 334 bp, Zea mays
  Clone ID: MRT4577_111792C.1
gttcaagcccaacccgcggtctcacgtgcaggagtactgtctcgtggtcagctttctttctcacctggccgagagcctgcacaccttcttcttcctcttcgactacttggtcgtgccgtccgactaccgccacatggaagggttcggcgtgaacacgtacacgttcgtgagctctgctgtgaaggctcattacttcaagttccactggaatctctacttctgtattcggttcatcctgactttctatttttcttttcttttttcttattcttttctctcttttttttttctcttttattttttctatttttatttatctttttatttttttttt

SEQ ID NO: 12935 - DNA, 398 bp, Zea mays
  Clone ID: MRT4577_111793C.1
ccagtttcgcgcgcgcgcgcgcgccgtctacgtcggctccgtgtctccgccccgagctgcgcgtgtaatctcagacccagcctaagcaaaccaccagagtcagtaccccgccagcacccgagcccctgttctggtgattggtgaagaccttgtcgcagatcgcaacgatgtcgggcgcggcagggacgccaccggaagacggaggggatcggccgtggcagtcttaccataccgcatacaccaacgccaaagctggtacgggcgcactttctctgctcgctccgtattgggggtttccgggctgacatggcgccggcttaacacgaaacctacggatagggtttcgccataagtgctttactagttggtccgcataatattagaacaaatctggaact

SEQ ID NO: 12936 - DNA, 840 bp, Zea mays
  unsure (1)..(840): unsure at all n locations
  Clone ID: MRT4577_111794C.1
ttccaaaaattagcgcgacagctgttcacactgctgactgctccaccctcgagcgatccgtccgtctgccgccaccttcatcccctcaccccatggcggccgccgggtggtcctcggccgccttcctcgcactcctcctcctcctgctcccgttcgcgcccagcccagcacgcgcggcgacgccggggaagtccccgtcgcccacgtccaccgccgtgttccagctccagggcgccgtctatcccatcgggcattactatgtcaccatgaacattggggacccggcgaagccctacttcctggacgtcgacaccggcagcgacctcagctggctgcagtgcgacgccccctgccaaagctgcaacaaggtgccacacccatggtacaagccaacaaagaacaagattgttccctgtgcagcttcgctctgcactagtttgagccctaacaagaaatgcgccgtaccacagcaatgtgattaccagatcaagtacacggacaaggcaacttcactcggcgtgctcgtcgctgacaactttacactgtccctgaggaattcatccactgtccgtgccaacctcacctttggctgtggatatgatcagcaagtgggaaagaatggcgcagtgcaggcggcgacggacggcttgcttgcgcttgggaaaggatcagttagcctgctctcgcagctcaagcagcaagggattaccaaggaatgttgttggccattgcttcagcacngaatggaggaggcttcctgtttcttcggggatgatatcgtacccacctcgcgntgtaacttgggntcccatggctcgtaccacatctggggaatactac

SEQ ID NO: 12937 - DNA, 673 bp, Zea mays
  unsure (1)..(673): unsure at all n locations
  Clone ID: MRT4577_111795C.1
tttcgaggccggccggggatacgagtgacatggaaatcctattccttcatatctcgcgatcacctcgattatcttgccccacgaaaggcgaggagcgttggcactgggcgtgaagttgcggatgggcgtcgcgctcgcggtgaagaaaaaagtaccctgttccttcacgatacgactgcaccacgccagtgccaccacaagatcttggagggcgcctcgataaaaaagtccctgcagaagtgcatcagggccggcggcggtaaggctgagaacctcgcggattccgttgccatcgtctcgtgagaagaccaaggcctgcgactgctgctgacgtacccttctccaagaggtacctgaaataatcgatcaagaatgcttggataagcgcaacgtgcgggattggctacacgtggctgctgacataaggaccgagacgtgtatgagctccgctacttcaacattgctgacaacgaggtataggaatcaagattatattgcactacgcttatattttatgattgaactcgttgcattttgatacctgtacccgtagattcgcaaatgtcccatgttatggtagtggnatcggctaatttgaagaatccttatgtactgaatctctgcaaaaagctatgttgtggacagaactgtaacgtgccgtatttcttgccat

SEQ ID NO: 12938 - DNA, 660 bp, Zea mays
  unsure (1)..(660): unsure at all n locations
  Clone ID: MRT4577_111796C.1
acctcgaggccggccgggatgcatatgaaataaactgcaaccgtgacaaaagttgcgtagcaatagcatactcttactctgattcgttagtgaagaaaaatggcaacaatcatcgccggcaccccaactacatcaatcactcgcacaggtcatgtgctcaaacgacctgttggggcctcatcctctaccgttcttggattgccagcaatggccaaggcggggagagtgaggtgctccatggaggaaaagccttcaagcagctcaaacctagggatgggggcatccttgttagcagctgcagctgccgcaaccatgtcaagcccagcagccatggctttggttgatgagagactcagcactgaaggaactgggcttccctttgggcttagcaacaccttcttggttggatcctgtttggtgtctttggtctcatatgggctctcttctttgtctacacttccacccttgaagaggatgaagagtctggattgtccctctaaacccccatgtgatgatgcatgtattgtagaaattgcaaagagntatgtccttttctgttgtattaaaaactacttgtgtatccaatttcaaacttactaagttattgatttcttctcatccagagctttcncnanaagaaaaaaaaaaaaaaaagcggcc

SEQ ID NO: 12939 - DNA, 158 bp, Zea mays
  Clone ID: MRT4577_111797C.1
aactggttctggaaagactatcactatttatggttgggaaatcaatactggtcttactccaagggccacatctgtactttttaccggtgatcaagcgcgatggcaacaaatattcattttctttgatggcatatatcgcggagcatcatcaagataat

SEQ ID NO: 12940 - DNA, 825 bp, Zea mays
  Clone ID: MRT4577_111798C.1
atgcggcgacatcacgaggctgaagaacgggatccggcacaacccatatcccgggacgaagccttagaagtgggagaaactcccgacgagcgagtacaccgagaaaggcggaactcccgccgctgtgatcgccgacaagctcaggaccgagaacgggagcaagccgagcaaggtgcaaggctgcgtcgagagaaccatctatttgcttggaacctgtaccccgacttcgctcgcgcaatgaacacaccgagtgaagttggaggggtgctggcccagatagctgacgacctcctgcgaactccagacgcggaaggctaccgacgactgcttactcgagcagctaatcaccttctacccatcgctcatcctccgagcgacctacgccatgccatcaatagccgccatccagtggcccccaacttcaaggtctctaatgtcgacaagtacgatcccaagcaggacccgggtgactggttggccgtctacacaaccgccgcccgggccgccggggcgacaaaagacgtaatgacgacgtatttgcccatcgtcctagggcaagacacactgcagtggctccgacatctgccacgtcactgcattgacgattgcagcgatttcagtcggcgtttcatcgccaacttccagtctctctttgacaatctagtgcagccatgggacctcaaatccatcaggcgccagagcgatgaaacactcggatcatacctcaagaggtttcagaccatgaggaaccgcatccccgaggtcgccgaggcagcagtgattgaagatttctaccggggatccaatgactcggcttttgtttga

SEQ ID NO: 12941 - DNA, 181 bp, Zea mays
  Clone ID: MRT4577_111799C.1
aacttccccgcggcgcccaagggagtagtccttggttgttttttggttcttcaactcggcggccccgtgcccttgggcggcccctgcaactacattattggcagtgccagctgcgacagcttcttctaggtccacatggggatcctcgccgctcttaacgcgtaccgttcacatatttcct

SEQ ID NO: 12942 - DNA, 201 bp, Zea mays
  Clone ID: MRT4577_11179C.1
tcgcttactctccacaacggcattaatccacttcatctttttataatacggtgcacgcgccccacaattacccatattttatattttctcacaccacattacattcacacattctcctcattacaaatatttactctatcacacatttttttcacatatttcctatacttaatatcattaatataattttcttcctttatc

SEQ ID NO: 12943 - DNA, 556 bp, Zea mays
  unsure (1)..(556): unsure at all n locations
  Clone ID: MRT4577_1117C.1
cgttgctgtcgaggcttttcatgcagattctgcatgagcggtctgaagctttgaaacacggatccatttagctggcggaacttgagtcgtctgcggtttgtgggcacttcatccagagctccagcctgatgaaccggtctccagtttggagaaattgtcggctgcattgggggatctgaaaatctcagcattctgaaggttaggactgatctccacggctctcagaggtcttctatcatctcgagttccttcctgcagcaaggtcgtaggacatgcggaacccgtcctgaaggaggacgggtcggtgtacctcttcaagcacgccccgtcgccaccgacatcgtacttgtcaagcacgaagagcttgggcggcccgcggcactgcttgaccgactccatgatgaagcgaggcgtgtcgcctcctgcgacaaccccatggnccacccttggatttggatgccagtcgacacccctgttagaggcaacgacgtgcaggtaggttctctggcaggagtcttcctctagcagcggcagctccgcctccagctgctgcacc

SEQ ID NO: 12944 - DNA, 391 bp, Zea mays
  Clone ID: MRT4577_111800C.1
gatctattctactgagagaaacaggggtacataccgtcattgttgtttatcgcagcagccatggcggcggcgtcttgcagcgaagacccgcctcctccttcgcctccctgcgtgttccggcgaggagactggttcccgtcgctggtcggcggtggatcggctcctccagtggcacctgcaggggagggtcggatccggttggggagatcaccggatcagacgccatagatcgcagtcttccaatcactccgagcgcctaggtgatgggaacctcgtggaatgtcgattagggttttgtggtcgagcgttagcgttggctaaacccgtcggcccccttaatcgtatttatatggtgtcgtgtgaccgggggctgcaaccaacggttaggatg

SEQ ID NO: 12945 - DNA, 619 bp, Zea mays
  unsure (1)..(619): unsure at all n locations
  Clone ID: MRT4577_111801C.1
gggatacccggagacattcgcacatcggcgtgtccgtcatgacctcccctacaccctcggccacctcaccagagcaatctcgccgccgataagcccctccaccctttcctccgccgcgtgtactatttaattgggagaaggacctcaggttaggtttagcaaaaccccaggggttttctgaactgtcagtggcacatttgaatagtgacatgaggactagtctgtaaggaaacttaaaacattcgtcagggaccccgatgcaaagatagtttccatttaaccatttctgtttttttaattaacagagaactgacaaaattcataacttgaagaatatttatccaaaattagtcaaaccaattttgctggattcaaaataatataatctatcacgcaaatatagtaaaccccatgatttatgtattaatttttagagttttaaattaaataaggaaactgcccaaaccttattaatataaggaaaaatagttatgcttctgtactaggcttaagaaaatttgtagagatacatacccaacgtaagccctgtttaaaaaaaacttagcaccccagtgtacaagattaactcangattatctattaaaaactatatctgtgc

SEQ ID NO: 12946 - DNA, 163 bp, Zea mays
  Clone ID: MRT4577_111802C.1
gactcttgggctaaagttcatactatatggctgcgtgtagttataactaagccgacttttcctccctggatgggttatttcaaacatgttaatgccatcctacacaataatatatttaaaaaatatttccataatggtaaaaatcatacatactcatcttaat

SEQ ID NO: 12947 - DNA, 317 bp, Zea mays
  Clone ID: MRT4577_111803C.1
tcgcggacgcgtgggaaaaaaaaaaatttaattataaaaaaaaaaaaaaaaaaaaaaaaaaaatataaaaaaaaaaaaaaataaaaaaaaataaataaaaaaaaaaaaaatattttattatgtaaaaataaattgagtttactgttctttgtttttcaactttctttatttgtatttccctggtgttaccttttttttttggcttgctaattataattcttttgtgtggctttcttattagctaatttgtataaaccttgtgtttttcctatcaattggtctgtctgatttgctaattttacgcgctttggtctttt

SEQ ID NO: 12948 - DNA, 400 bp, Zea mays
  Clone ID: MRT4577_111804C.1
ccttaggatttaacttagaataaagcctgacgggggtaggagcacccatcgatccggagtccatgctggttgatgcatgggtctgctggagcccgaggatgaacacagctactaacaacttgactacagaccgacctttaatcaaaaacacagatgggcaacaacaaacacgagacgaacgaagataaacactctggactagggtaaacaacacggttgcgaacaggataacttgggcggtcgggccccacctgttaggctcctccagttcccgccggagatgccgtagccctcgtcacggatgactccgtcttatgcgtcgtcatcagcaccttatactatgccctttagctcaatttcaatgtcttttagttattatttggttatataattgatattg

SEQ ID NO: 12949 - DNA, 292 bp, Zea mays
  Clone ID: MRT4577_111805C.1
gggtaagcaataatttgaaactcaaaaacgcaaaaccccaaccaaatattttattcccgtaacaaataacaaaaattttttatccatggcctgaaaccccaatgcgcataaaaagatttaaacggcaaactaaaaaagccaaaaagaaaatttacataaaaaaaattataagaatccgaaacaccacgcgccttcctaaccacaaaaacccaaaaaccccttttcccaccccccatttacccttaagggggtttcaaggggggactaacaaccgccattcccaatctttttt

SEQ ID NO: 12950 - DNA, 184 bp, Zea mays
  Clone ID: MRT4577_111806C.1
aaaaacacggggtgggttttttggccggacaccttaacccctgacaaatgttaaagcacggctaatcccgggcattagccattcttatcgtttgacaaacaaaataagcctatatcaagaacttttatatctttggccgatagttccctttgccccaaattttaagaaaaaggtctctcttaac

SEQ ID NO: 12951 - DNA, 304 bp, Zea mays
  Clone ID: MRT4577_111807C.1
ctgacgcgtgggagcagtcttcaaatacttgcataagatggcaggttccgtaatttccttggacaacttagaagggcgcctcggagaggccggcgatgcggctgtgttcacggaggaaaaccagtgcccggacaccgtgtggaccgcgtccgtaccggtgggcggcgggcggcagctgaaccgcggcgagatctggcggatcacggcccccgcaggcacgacggccgcgcgcatctgggcgcgcacggggtgccagtacgacgcgagcaggctcgggaactggcgcacggcggactgcagcggc

SEQ ID NO: 12952 - DNA, 230 bp, Zea mays
  Clone ID: MRT4577_111808C.1
gtccatctaccatatgcagatcacctgcctttcctgctctccccgtgggttaatcgcacgccccaaatctccccgttcaagaggggacccacgcatcgcgtcagatccatactgcgctttgaaggctgcaactagtttttttaccagccatggacgaagcctcggatgctaacaccggcaagaactcctgctggatgcggcgcaaggccaaccccaagaccaagacgagc

SEQ ID NO: 12953 - DNA, 333 bp, Zea mays
  Clone ID: MRT4577_111809C.1
gaaagaaccatactaaaccaacatttttagccaaaatataacaactactgatgcgactatatttttcttcatgggcctctacggccaccatgtgagcgcaacctcacaagcatcatatagacaatcgctcactcgctgctcctgccaccattgcacagttccttataccaaaacctaaatgttgaaccctacacgtaccaacacacgctaacatgtaacatcaaacctttatcacccgcgtttcacaaccactaattagccaaattacacaacaaaccttggcagattttacatgtcacagaatatcagcgcacacacaactacacacaactt

SEQ ID NO: 12954 - DNA, 531 bp, Zea mays
  Clone ID: MRT4577_11180C.1
gccccctctcgagtttttttttttttttttttttttttttttttttttttttttttttttttttttttttttggaaacaagccctgggttttactgggatttccttttgttctccaaaacttgacgggaagtggttttatcgagcaaacctttcgaccaaaagggtttgaggaagctaaaaaagttccttccctactactaaccggaattcctaattaccggggggggggaacaaacgttaataaattaaagaacccaacagggaactttacggcaacccgccggaaaaaaaaaaaaaaaagtaactccgttgaaagggtcattcgtgggggcgtcccgaccggggggggggggtcatcccgtgggggacgccgatttcgccggacctttgcccgtccctccttgggttggccgccttgttgggggggccgtcgtcgttggagctggacaacaacgggggcaccccgaactcgctgggcgtttcgctcacgaagctcctgctggggtcctcggggaggaacccccccgggg

SEQ ID NO: 12955 - DNA, 731 bp, Zea mays
  Clone ID: MRT4577_111810C.1
ttccctgactgaagtttggagatttttaaaggagttgacacagttcatcagtcgttccagccatagcagatctgatgttttgaagaaattgaattttgtaatgactgtgaggcataaactttatcactttctatcaacactacagcagtatctccactgccatttatctgatatatcttggcgccgttttcaacattcccttaaaaatcaggtgagggatatactggatctggagtatgtgcatatgtgttatattactgatgcacttgacatatgtttattatctgatgagtcaaaacaagttgctacgataatcaagagcatgctgcagctggctttggagttacgatcatgctttcagagtggtgacacttgtgatttatcagtaaatcaactcagtaatttgcaataccttataaacttctctcaggtggatgtaattagaacaaagttcgaggataacatcaaagatctctatattttgcattcgaaatcttcaaaatatggagagcttggcctttcccgtttctgggggtatctgaactacaatgagtatcattctacgaaagtcagcaaagatatggacagcttctgtttttgataggacattgcaagactgaaatatacgctggtttgatcaaattggcccttgtcaatacttggagatgcatgtatgtccctaacggtgtatcccagttttacgataaaaatggaaatcatgtgtagttctg

SEQ ID NO: 12956 - DNA, 285 bp, Zea mays
  Clone ID: MRT4577_111811C.1
gaaaaaattcatataagttttctttatgtgaaattgttccgaggaacaaaaggcaaggaaaccaaaaataaagaatccatgtggactctgaaacatcgtagtaatagtttgctgccggatcgctggactgcccttgacacaccaggccgtatcggtatgaaatccatattacaccaaacagagcgggaaactagctcactaattacccggaaaatggggttggctgtgctgactggcgttccgctcacatttatcagaagctaaaggctggcagagtaacgcgac

SEQ ID NO: 12957 - DNA, 1294 bp, Zea mays
  Clone ID: MRT4577_111812C.1
gcgcccgggccgccctcgggcccttcccccctccccgcgcgatcgcccgccgcagcagcaatgcctccacctccgccgccggccgcccgcatcagggggcggtgcagcgcgctcagcttcgcggcggcgcgggaccgctgcttcagccaccgcttccgcagggcggggctgcgcccgctcgccgtgccgctccctggcccgggcccaggccccgacgccgacccggccaccaccgtccacatgtgggtgcccgcgggcccgccgccgcggaacccgctgctcctcctgcacggcttcggcgcctccgccacgtggcagtgggcgccctacctccgcccgctgatcgccgccggcttcgaccccatcgtgcccgacctcctcttcttcggcgcctcctgcacgcgcctccccgatcgctccgacgccttccaggcctccgccatcaaggccgccatggacgccatcggggtccccaggttcggcctcgtcggcgtcagctacggcggcttcgtcgcctaccggatggccgccatgttcccggaggcggtccaccgggtcgccctggtctgcgctggggtctgcctcgaggagagagacctggcggagggcctcttccccgtggccgggatcggggaggccgccgcgctgctcgtgccgcaccgcccggaggaggtgcgccgcctagtccgcctcaccttcgcgcgcccgcccctcatcatgccctcctgcttcctatgggactacatcaaggtgatgggctctgatcatatccaggagaaagctgagctgctatacgctttgattaacgggaggcaactctgtactcttccaaaattgacccagccgacgcttataatctggggagagcaagatcgggtgttcccaatggagctggctcacagattgaatcggcatctagaggggaattctcgattagttgtcataaaaaatgctgggcacgcggtcaatatcgagaagcccagggaagtgtgccggagcatcattgagttcttcaaggagccggtcgctggagctgcaaatgcggacgacaaggtgtagtagcttccaccaatggcggacgtggacaggtcttcgctgggcatcggcagacggcgcacccgcttgtggcacgcaaacacaaggcagatacgtggcattgtacatctacatccctctgccattgttctgatgtacttaaagggtgtatgtagagtcattgcagtagcgattcataaagcatgtaacggggaacagagggaaaccatagtggctcaaatccgagtgaaaccactgt

SEQ ID NO: 12958 - DNA, 1223 bp, Zea mays
  Clone ID: MRT4577_111813C.1
cattgggacctcgagccggccgggtaaccttttgccgtcttgcggcggccttctgctccgccgctcgttctcatatcttgcggcggcctggggaaaaagaggagagatcggagatgaaggcgtgtgcgaaggctgcgggggagaggctgtcgctggtctgtgctccgtcaactaggcagcctctagctcggagctttgttaaggcaagaagattaccctctcaacatgagacgaagtcacaagtatcctgctcggttagggtgtcagaaaacacagctcacagaatagatgccacagcagaaaatattttcccagcagtgaaagatcatgtcttgaaagcaactgatgcaatcaacagaggagaagtgattgcggtgcctactgataccatatacgggtttgcatgtgatgcatgctctgcaggagcagttaatcgtatttatgagatcaaaggacgcatacaaacaaggcctctggcaatttgtgttggtgatgtctcagacatatcacggtttgctttagtggaccacttgccacatggcttgcttgatagtctacttcctgggcctgtcactattgttctaaaacgaggtgaaaacagcatattagagagatcacttaatcctggcttggatagcattggagttcgtgtgccggatctggatttcatacgatccattgctcgtggtactggaagtgcacttgcactggccagcgccaacttaagcggacagcctagtagtgtctgtgtcaaagatttcgagggtttatggccacattgttcatttgtctttgatggtggagtacttccttctgggcgtgctggttcaacaatcgttgatctaataacaccaggagtttacaagatattgagggatggaagctcaaggaaggaaacagcagcagtgctcggcaagttcggctttgttgaagcgttgtaactactcggcactttaagaaagtaagcacgatcaaagagtggctgtcttatccacattatatcttgtttaattagtgatacattagagcttttgttgctgtttgtgcttttcttttacatcttcaaacttattgtattattgcgaatgtgatgttgagtagaataacagagttcacattatttaagctgtgtagagtgtgtgacatgggcttgttttgtagcaaatgaagcagctcagttgtggattttggatgtgttgtgaacgaaaatatgccattttctt

SEQ ID NO: 12959 - DNA, 367 bp, Zea mays
  Clone ID: MRT4577_111814C.1
gggagctggacgacgaaatgttcaacgaagaccagctgaaatcgatggtcaaattggctccgctgtccaccgatcccgagctgctgaaggactatgcccatgccccaccagaggtgctggcaacgctgggagatgcagaacaatactacctggccatcatggacattcctcgctttgaagctcgcgtccgcgcattcctcttcaagcgcaccttctttggcattgtcaacaccctcagcgaagaagtcgacaacgccctgtcggctatcaagaagatcgccaccaacttccagttcgccaagctgcttgaagtcatgctccatcttggtaacttgctcaactatgaaactgttgccggtgattgcta

SEQ ID NO: 12960 - DNA, 767 bp, Zea mays
  Clone ID: MRT4577_111815C.1
cctcgaggctcgcgggaggccggggccgtcttgcggcggccttctgctccgccgctcgttctcataccttgcggcggcctggggaaaaagaggagagatcggagatgaaggcgtgtgcgaaggctgcgggggagaggctgccgctggtctgtgctccgtcaactaggcagcctctagctcggaggtctccttgtcatctgggtcccaggccattggacgctcttcccctgctgttgctctgggacacctgggcctgctttgttaaggcaagaagattaccctctcaacatgagacgaagtcacaagtatcctgctcggttagggtgtcagaaaacacagctcacagaatagatgccacagcagaaaatattttcccagcagtgaaagatcatgtcttgaaagcaactgatgcaatcaacagaggagaagtgattgcggtgcctactgataccatatacgggtttgcatgtgatgcatgctctgcaggagcagttaatcgtatttatgagatcaaaggacgcatacaaacaaggcctctggcaatttgtgttggtgatgtctcagacatatcacggtttgctttagtggaccacttgccacatggcttgcttgatagtctacttcctgggcctgtcactattgttctaaaacgaggtgaaaacagcatattagagagatcacttaatcctggcttggatagcattggagttcgtgtgccggatctggattcatacgatccattgctcgtgggactggaagtgcacttg

SEQ ID NO: 12961 - DNA, 269 bp, Zea mays
  Clone ID: MRT4577_111816C.1
agaccctgacataactaactaggacatacatccctactaggtgacatcccagatggcacaatttccacagccattacccaaccaagtacaataacacaacagcgctagggagcagctagataccagcggataggatagatcagatcactaatattagctgagaagattcatatgcgagcacctagtccaaatcttgagccgacgcacccatcgattacaaatgctgactggaccattgtatatagacagatgctggcccagagaagata

SEQ ID NO: 12962 - DNA, 389 bp, Zea mays
  Clone ID: MRT4577_111817C.1
cccacagccaaaaaaagacggggcttgcatttcagggccggaaagggaaaaaaagggggccttatggtcccccggggggggaacccaggggggtttttttttataacggggggccggtgacagatttttaagggctcctaaaacagaaccccagggccggaacggggtttttttcctggaggtttttaaccaaaaaggcctaaaaaggcctacccggcaaagaaacatttgggggggccacgggtcctgacgggaaagctgcccttcttggacaaggtatttctgccccgggaggcccccgccctggaaaaccctatccgggggggccctaaaaccatccgaatccgggagggggccataaatgggggcccaaaagatggggggggcca

SEQ ID NO: 12963 - DNA, 647 bp, Zea mays
  Clone ID: MRT4577_111818C.1
ttggagaaaggggaagagaagtagaggaggaggaggaggactgaggaaggaagacgaattcgactcggagttttggacttggccatttgggtttggcacctgttccttcccctaaggcccaatcttgccgtccggcgatttttctttggatttctttggtgaaaccctcggcggatggtcgcttgggagccaagcatttgattcgatcttaagtggtccaggcgattggaggagctgctggctgctgctgttcccggggagtggattttcttgaggtgcagtgaatctgtcctgctgtcataggtttaaaaaaaacaattcaaattgcctggccttggatcaagtccattttcctatagagattgccatctgtcttaagtcaaagcagctgtatttctggcaaacacaacgagctagtttcatatacagcgttcagttgatggctgctcatcctgttgaatcagaagcaagcagtgaaacagacaatcaccctttactgatagaccacatggaaaatactgctcatcttgagattgcaattgagagcccaagggatgatgttgcttcatcgtcaaccactcgtcgggaggataatgatggtttggatcgattgcctcacatctcagaaagttcttcggagacaacta

SEQ ID NO: 12964 - DNA, 565 bp, Zea mays
  Clone ID: MRT4577_111819C.1
ctacggaaagggcgtcttcctgcgggggggggtgggggggtgaaacctttcccgcttctcccaattccctcccctggccggccctccatacccgtacgactacaccttggaggggagtgcattctagatccacatctggcaggggcggtatacaagtctgaaacgcctactcagagctgggggggggggggcatgccattcacgcttacagtcaaatgcccggtgacaagcaccattgggggaggtgatgatgctttcaacaccttcttcatttagactggggctgggaaacacatgccccttgctggttttgttgaccttaaacccactgtaatttataaagggaggactgggacctaccgtcaggtcttccaccctaagcaattcataactgggaaggaggattcctccaacaactttacccgtggtcactacaccattggcaaggagattgttgacctgtaccttgatctcatcaagaagcttcacgactactgcactgatctacacagcttccctctcttaaacgctgttgatagacgaacaggatctggactaacttacc

SEQ ID NO: 12965 - DNA, 352 bp, Zea mays
  Clone ID: MRT4577_11181C.1
ggggcactatcggggagtggccccgtcttttcgggaattattcttttaagaggggttttcccgtttttatttgaacttggaaccgacctggagctgcggttgttattttgggctgtgctagcttacttatgtggggtgggggggggattgattgtttgataatgtgaatttggttggttgaatatgcgtttgctggtgaaattatgatttctgcattgggtgtactttctgtggagttgtttgttcttgtgacacaaggttcttgtttttctggtcgtaagatgctttattgttggtttattaaatgggtaacagggtgtttgtagtgttggtatattttgtttgggggggt

SEQ ID NO: 12966 - DNA, 395 bp, Zea mays
  Clone ID: MRT4577_111820C.1
cccacacgtccgctttgctcttgatccattcgtattcattctaactcaattaatcaaaagctccccctgagttcatgtccaattttctcttgtgcatatttccatatctttgttccaacttgcacatttacatatctttgttccaacctctccccctttgtcattaattgccataaaagggttgttctaaggctctgggaaaatgtacttgtgaatattataccaacttgaaagtactcaataagtttttgatggacaccatatgcatgataaaatccttgacatcacttgcatgaacttattttacgagagagttgctctcttgaattgatgatcacttaaggttgtggatcacttgaagtcttgtatcactcaaaggatatcaattgtatgat

SEQ ID NO: 12967 - DNA, 165 bp, Zea mays
  Clone ID: MRT4577_111821C.1
ccccaaaccaaccgaggggggcatttttctaaacaaaccgcagcaatcaacaacaaccggcaaagcaaaacccatgaagcacacaaaaaccgaactccaagccaaaaaaacagcatcctccaccaaccgtggtggaggaaaggcaacgaaagacgctcgaaccgg

SEQ ID NO: 12968 - DNA, 712 bp, Zea mays
  Clone ID: MRT4577_111822C.1
ggccgccccttttttttttttttttttggtaggggggctgcttttttttttttttgtatgttgatgaacagagcatttttgaactcaataattgtcgcccgctagttcatttttgaactaaaccgtgacaactaaaaaaagaatggagttagtacaaggccagcttctattgaaaggggacacaaaagacgaaaggaatggagtaactaaccaaaacagtgacagtgctgattttcaagttactgccacttcacacccacaaatacaaacagaaaattgatgcgaaaatgtagtcgaattgttatttggccgtattattttgcaagcgaagaggacttcgcagtctcgacggtatgacttccatgccaagcagaaacaatagttaaccagtggaagatcactctttcttcccaaccccatgagacatgttgtaaactccacgcccaatcatgaacatgctggaggcagcgagtgcaagggggatggcgacggaggtgatcacgtcgtagcgccctttcaggtaggtgtgcttggtcaagttctggaagtaatgttgctgcttgaagagcctctcacgcggcagaaatggtacttctgtcatcctggctgccgaggggagcaacgcggtggccggcggaggagcaggtggggatctgcgagagggggaggctgcggacccgacctgacggaagcgaaggaatagcccggccgg

SEQ ID NO: 12969 - DNA, 757 bp, Zea mays
  Clone ID: MRT4577_111823C.1
agccgtggcctccccgcggcccggctattccttcgcttccgtcaggtcgggtccgcagcctccccctctcgcagatccccacctgctcctccgccggccaccgcgttgctcccctcggcagccaggatgacagaagtaccatttctgccgcgtgagaggctcttcaagcagcaacattacttccagaacttgaccaagcacacctacctgaaagggcgctacgacgtgatcacctccgtcgccatcccccttgcactcgctgcctccagcatgttcatgattgggcgtggagtttacaacatgtctcatggggttgggaagaaagagtgatcttccactggttaactattgtttctgcttggcatggaagtcataccgtcgagactgcgaagtcctcttcgcttgcaaaataatacggccaaataacaattcgactacattttcgcatcaattttctgtttgtatttgtgggtgtgaagtggcagtaacttgaaaatcagcactgtcactgttttggttagttactccattcctttcgtcttttgtgtcccctttcaatagaagcaagctggccttgtacttcctccattcttttttttagttgtcacggtttagttcaaaaaaatgaactagcgggcgacaattatttagttcaaaaatgctctgttcatcaaaaaaaaaaaaaaaaaaggggtctatggtgcacaaaactgtcaaaacagccggaaaattgtggttcattgctgtaaatcacgct

SEQ ID NO: 12970 - DNA, 164 bp, Zea mays
  Clone ID: MRT4577_111824C.1
cttgttctggattatcggagtgtgtggttaaaattattatgttgtggtatccagcttaagcagtgctccgatccgagacccggaaaaggaacactgtttaaaccagcccccacccactgataatttaaaaaaaaaacacccttaatccaaaaaaaacccgtggg

SEQ ID NO: 12971 - DNA, 287 bp, Zea mays
  Clone ID: MRT4577_111825C.1
ggtgggggggtttttttttttttttttttttttttttgggggaaccacttgcttttccccttcccggtttcgggtcacccttaaaaaattttttccccccccaaaaaaaaaccggcggtttgttacaaaccgggccccaaatcaaaaaccaaattggccctatggggaaggggggccccgccaatttaaaacacccttccatatgggggaataaaaatggagcacccttggggcccttaggggggaacaggcccttcctccttttaagggtttggtcccggccccgg

SEQ ID NO: 12972 - DNA, 812 bp, Zea mays
  unsure (1)..(812): unsure at all n locations
  Clone ID: MRT4577_111826C.1
ccggccggctattccttcgcttccgtcaggtcgggtccgcagcctcctcctctcgcagatccccacctgttccgccgccggccaccgcgttgctcccctcggcagccaggatgacagaagcaccatttctgccgcgtgagaagctcttcaagcagcaacattacttccagaacttgaccaagcacacctacctgaaagggcgctacgacgtgatcacatctgtcgccatcccccttgcactcgctgcctccagcatgttcatgattgggcgtggagtttataacatgtctcatggggttgggaagaaagagtgatcttccactggttaactattgtttctgcttggcatggaagtcataccgttgagactgcgaagtcctcttcgcttgcaaaataatacggccaaataacaattcgactacattttcgcatcaattttctgtttgtatttgtgggtgtgaagtggcagtaacttgaaaatcagcactgtcactgttttggttagttactccattcctttcgtcttttgtgtcccctttcaatagaagcaagctggccttgtacttcctccattcttttttttagttgtcacggtttagttcatagttcaaaaatgaactagcgggcgacaattatttagttcaaaaatgctctgttcatcaacatgcacgtaacgtaaggggtctgtggtgcacaaaactgtcaaaacaggcggaaattgtggttcattgctgtaaatcacgctcatttcgtttggtccgtggtgcacaaaactgtcaaaccaggcggaaaattgtgggntcattgcatta

SEQ ID NO: 12973 - DNA, 344 bp, Zea mays
  Clone ID: MRT4577_111827C.1
aaaggaactggctggcctttgggggaaaaggtaaccaagcaacatttttttgcctttgttaagggggacccgttcacattaacagttctgggagcctttgtggccggccccacagagcagaaacacatactaaaacttgccaaagctgccggcgacaaaattgatttatagttgccacatttatcacacgacacatgtcccagcggtttaacaccggaaataaggggcagattaacagtcccccggaggccgattggggaagcccccaggccggagggcgggggtttgattgattatagatcgggtcggcggttgggattgaaaccgaagggaattgcccccca

SEQ ID NO: 12974 - DNA, 281 bp, Zea mays
  unsure (1)..(281): unsure at all n locations
  Clone ID: MRT4577_111828C.1
gtggtggggtgtttgttatatgtatattataactacttgaaaatctacctgaagaacagttttgatttagcgaattacatgtgcaatatgcgacctttacgggtacataaaggttataaattttaaggttgaaaagatgttagttttttggggggggtggatgtacaaatgattgaatattnnaggataaatgaggatggttgtaggtggttaggagagggatttttggtattgtaacaattggattttaagttgtataaagagatgaagggaattaaaat

SEQ ID NO: 12975 - DNA, 742 bp, Zea mays
  Clone ID: MRT4577_111829C.1
ttgggtccctcgaggccggccgggggtcaagtggaaccccgtggccaatgttgctgcttgacatctggactttcctgcgaaccatggacgtacctgtcaacaccctgcttgctcaggcttacgtgtccatcgtgtgcgagctcgtgcaccaagcccgtcctgccggcgcagcacgtgcgtgaaggccgctggcggtgggaggacgccaaggccaaggagtgcggcctccacaagggctacattgacaactacgaccaggcggcggcccccaggttcgccaacgacaacggctccgcgtactccccggacatcttcgagatcctccgccgtggtgtccctcacccgcaccgagatcgagaacctgctgctcctggagaacctcgacgagccgtggctcctggtgctgtacgcgccctggtgcccgttctgccacgccatggaggtctcctacatggagcttaccaaaaagctggcgacctcccggcctaacctggccaatttctgctcggacagctagcagaatccgatcgcgtaggcctatttgcagatgcagagatttcccagcgtgctcctgttcacggcgcgcaccggcaggcccatcatgtacccgtcggagaagagggactgcgactcgctcctcgacttcgtcaacatgctccgaggatatacgacctccagtgtgcgagaaccatcgctctctgtcagtctgtatgatcttatgttgggctttatgagcttatct

SEQ ID NO: 12976 - DNA, 422 bp, Zea mays
  Clone ID: MRT4577_11182C.1
cagcgatcaaggctccattgacgtctgtagagcatatcaagtgtgtgcatcagccacctagggaaaatattaataaactaggaggttcagaaactaggcgggacacttgtatatataacctgtatcacacaacgaaccaaataaaggtttaatgctggatacagtggatctatagccagcccgcaatctcgtgccaggagtacaaaagacgagcgaaatttacaaagaaagaatacatagattggcttcgaaaagaggatatatccatgctgggcttgctgtgcttacacttatccttcctggagcctactgacattgcttcggtgggctcacaggacacactgattattcccacaccttcgcttgagccctcctttttgcattcatcctatatggaggcagttaattaagggacgggaaac

SEQ ID NO: 12977 - DNA, 603 bp, Zea mays
  Clone ID: MRT4577_111830C.1
gtcagtgtgagcaatgacctgaatgaacaattgaaatgaaaagaaaaaagtattgttccaaaaaaaaaaaaaaaaaaaaaaaaaaaaaaaaaaaaaaaaaaaaaaaaaaaaaaagaaaaaaaaaaaaaaaaaaaaaaaaaaaaaaaaaaaaaaaattaaaccaaaaaaaaaaaaaaaaaaaaaaaaaaggtttgtccttgggccggaaccaccttaagggcaaattttgaaaatttccataaaattgggggccgttcaaccttccttttaaagggcccatttccccttatagggagtcgtttaaaaattaatgggccgtgttttaaaaacgtgggaattggaaaaaccttgggtttcccaaattaaatccctttgaaaaaaatccccttttcccaagttggggaaaaagaaaaaaggcccgcaccaatcgcctttccaaaaatttgccaaccctaaatggcaaaggaaccccccctgaaggggcccataaagcgcgggggttgtggtggttaccccaagggtgaccgttacatttgccagcgccttaggccccgttcttttggtttttttcctttcttttttgcccactttcgccggttttcc

SEQ ID NO: 12978 - DNA, 251 bp, Zea mays
  Clone ID: MRT4577_111831C.1
ttatgctggggggggccaaaccctcaactccccagataaaactaggtcgcgtccaggatggaccagtccgctttaacctagattttgggcaagcccttgcccgcgtaaggaaagggcctttaaaaaaaaatcttttaactgaattttggttttttcagaactttgggcggggcctttttctttttggggggggataatagtcttttggtttgctaataacgggtttttttgtgactaccggtacccttttt

SEQ ID NO: 12979 - DNA, 179 bp, Zea mays
  Clone ID: MRT4577_111832C.1
cgaaactgatatttggataactgaatcaattccattggtggctcaaaaaaggggcacaagcacaggtataaaaacaaaaaataatacaaccatggtatgaccaccggcactagaaaaatacatagctttgcaactatgttacacaaggaaataataagggttacatgaaatgaataata

SEQ ID NO: 12980 - DNA, 326 bp, Zea mays
  Clone ID: MRT4577_111833C.1
gttctcagtggcggtcaccatcttcggtggccgcggccatgccgccacctggggcaagaagctcgacgccgaggcatacgactgcaacaacgttgtggagcaggagctcccctgtggaggcgtcctcatctaccagagctttgccgcgaacgaagaggttgctgtctctgccgggtcgcccaggtccgtcttccactgcttcgaggccgagactgtggagagccacccgctggtcaaggaaggcaagctcgccaacctcctcgcatggcgagcggaggattctctggaggagggcgtggtgctgtgcgagtgatttgctgtcgaat

SEQ ID NO: 12981 - DNA, 529 bp, Zea mays
  Clone ID: MRT4577_111834C.1
attgggtacctcgaggccggccgggaagtaaacctctttaccaactcctcccgccgtgcccgtccggtttgcgacgatgctacagctcgccctcgccttcgccctctgcgtcctcgccggcggcggcgtccgcgcgcagccgttcgactacccgacggcgaagccctcgacgacgtgggccaacacggacgcctcgctcccgcaccacgtcacctacgccgacggctccgtggcgcgcgccgcgctgctgcggctcaacccggcggggtacggcccgtcctacgccttcggcttcttctgcaccaaccacctcgcgtcgccctgcgccgagttcctcctcggcgtggccgtcgtctactgcaacagcggcgggctcatgacctccgtcgtggcgggcatcccgcaggtcgtctggtccgccaaccgcggcagccccgtcggggagggcgccgccgcggagctcacggacgcgggcgacctcgtgctccgctccgcccagggcgccgtcgtctggtccgccgcgcgcacc

SEQ ID NO: 12982 - DNA, 193 bp, Zea mays
  Clone ID: MRT4577_111835C.1
attgcagggagagaaggacgacaagatcattggcgtctgggccgacgaccccgagtaccggcactaccacgacattagggaggttttcccttaccggcttcaagaaaaccggcggttttttgaagactggacgcgcgcttggtctttttttttttttttttttttattgggaaaaatcttgctgtttattttt

SEQ ID NO: 12983 - DNA, 434 bp, Zea mays
  unsure (1)..(434): unsure at all n locations
  Clone ID: MRT4577_111836C.1
cccacgcgtacgcacacacacagagagagtcaagtggtttccaaagccaagtgtgtactagcagtttagcaacgagctagcgcgggctgcagcacgcagccatcatgtcggacgagaagcaccaccacttgttgatccaccacaagaatgacgatggagcagccctacgtcgagtacagttacttcgagaccgatgtgtgtaccgccacctgacggggctagtaccagatggacagtgtgtgtcgagaagagctctggtacactcagaatatctgcgagacacattgacttgaagcatgtgattgctgatacaattggtcttacaggtcttggaagcctnctttctattttcagcagcatatgttcgtgcttatcttctgctgctgtaccttgctttgatcactcctatcatccatgacttctacaactacgat

SEQ ID NO: 12984 - DNA, 515 bp, Zea mays
  Clone ID: MRT4577_111837C.1
cccacgcgtccggtttgctgatatggctgacaggggcgtggcaccatgtgccacgacgtacaacacacttctggatgggctgctcaaggctggccacgtgacaaatgcattcaggatgttcaggtacctgcagagggcggggcttcccgtaggcattgtgacttacaacacaatgatcaacgggctgtgcaagtcaggcaaggtgggctatgcccgcatggtccttaaggagctggggaggacagagcatgccccgaacgctgtcacgtacacaacagttatgaagtgctgctttaggtatggcaggtttgagcaagggttggagacgttcttgtccctgcttgaaggagggtacatttcggatgccttcccatacacgacagtgatcagtgcgcttgtcaaaaagggccggatgcaagaagccaatacctattgtgagctcatgatacaaagtggttctacgcttgacaatgcatgctacaacactctgattcacctgcgatgccaagaaggga

SEQ ID NO: 12985 - DNA, 700 bp, Zea mays
  unsure (1)..(700): unsure at all n locations
  Clone ID: MRT4577_111838C.1
atgctttttcttgctctggtggtgtgatatcccctgggagtcgctctgagggcgaacggttttccctgccctgttactctggcgaagcagatgtttactatgcttgtgtggtctagagataccattgcacacaatagggacccctctcacatgaggattttggcagcacttgctcactgtacttgacacaacatttgatgctgatgtgactgttctagctggattttacacgatcatgacccacaccgcacgtgtccaacgacattgcctcatcgatgcagtcctgcactgcgtgtgccatatcataacggtctctgatatgattgcatttagctcgcacataatcatttatgcacacgcanagcagtgtcagatccatgctagaactatacgctacagacgtattttactagtcatatatggatactcataatgtacaatataatacgacgtgtaaaggaagcgatgtataagaatgatgcctagctctctagtccgatggcatagatgataaagattgaggcatggaatatccagagtcaccggaacccacagcattagcctaaattatctcatacagctactcctaatttaagcgatgctatgtatgatatgcccacatcattttttgtacttgagtcatccttcgtacatatttatactccagattgcctaatcactaaccagtgtgagctgcatg

SEQ ID NO: 12986 - DNA, 1136 bp, Zea mays
  Clone ID: MRT4577_111839C.1
ccggccggactagaattccccctcgtttgcgcgtctcttcgaaccccacctcacctgccccccgcgcgggccctaccgcgcgtctcttcgaacccaagccaaccaggcaaccagccgtgagcccgtgattcgcctcggctcgccgccggccgccggccaccggcccccacaccacgacagatcgcaagcttgtgaggagctccgcgcgactaaagcgatctaatcacctagccgccggccgccaggccgcggcgctgaaccacgggcgcgaagcgtacgcgaggctgccgcgcctgggtctgggtggagctcgcgtcgtccctgcagctaccgcgggcgcaatgcctgccccccgcgcctgaccatgcatcccaggcggctcaagaggctggcgaagaggatcacgtgacgacgcctcgccgtcgtctaggtcgtcgctcgcgcgcctgcggaacggaaaaaaggacgcgcaggatggatggctccatttcatcggcgctggcgcttctcgtgctggcgcttcacctcgccgtggacggctgctcggcggtcaacttcgaagggtcggtactgctcaagttccagtcaagggtggaggaggatctgtatggcgccatggtgagctggagcccgggcgacggcgacccctgcagttggaacggcgtgcgctgcgccgatggcagagtcgtgatgctaaacctgaaggatctctcgttaaaaggcaccctaggtcctgagctaggaactctaagccatctaagggctctagaactctccaataactttttcagtggagcaatacctaaggaattgagtgctcttgcaatgttggagatactggatttaagcaacacaactggaagtggggaagttccacaagagattgcagaaatgccatcacttaggcagttatcgctttccaataactgctttcagtggcctctgatccaacattcctatgggaactttgatcaggaaaatggtttcaatatttatgatatctcgggagaggtaatatgaatcaaagagctgagaatgggttggaatcaggttcttcttcacatgagaacaaaaaggacactagcaacctttctgctcgacttcattcacaatacgaagcaataaatccagcagca

SEQ ID NO: 12987 - DNA, 475 bp, Zea mays
  Clone ID: MRT4577_111840C.1
tggcctggacctttgggctgatttatgtgcttgtttatgtgcttgtttatgtgcttgggaacgcgaagacacggggaatactattagaccttaccgacgtcctcgaggatagaaaaagacccaacgtaacctctgaggagtcctaaaccgaatagttaaagggagggaccgtaagaagcgagctcgacgttccggtaaccgttctagaagcaggccatttcgccgcggcttgcttactacacgcctccggcggatgggtaacggagaccgcgcataatgatgaaaaatcgactaagcactctgtaattgtggcgtaagcagacttagaaaggttcgccccagcggataaacactcaaccgacgtagccgaaaccgacgccgacgtaccggtcgatatagtcgggaacgccgcgaccggcggaaccacggagtacactgagtaggtcggcacatacctaggcgacctagtacgcct

SEQ ID NO: 12988 - DNA, 438 bp, Zea mays
  Clone ID: MRT4577_111841C.1
aaaatggctaaaaaaaacgggggggaaaaccaaaaaaactgggggcagggaaaccccggccccattttttttgaaaaaatgggtttaaaccttaatttcaaaaccccaaacttttaacatttttcccccaggggaaaaaaaaaaaaaaaaaaaaaaaaaaaaaaaaaaaaaaaaaaaaaaaaaaaaaaaaaaaaaacaatctagctaagggcaaaaaaacccccacctaaaaacctaaaaacagaattttgggggaaaacccccgggggggacggcaccaggaacccttttccaaagggggtgaaaggccggttaaccacggagctaaaaaaccccctaaccaccttttccgacgcgtttttccaaaaaaaaaaaatgacgtcctccatgacgggggggtaaaagggaaccggaatcctgccgtcccccccgggaaac

SEQ ID NO: 12989 - DNA, 464 bp, Zea mays
  Clone ID: MRT4577_111842C.1
ggccgaccacacccttccgaaaaaaaaaaaaaaaaaaataaaaaattttattttaaaaaaaaaaaaaaaaaaaaaaaaaaagagggttaataaaaaaaaaaaaaggaggggccccccctttaaaagaaccaaacttacctaccccttcattccaacttaaaatttttttattagggcacccaaaataaaatcaattgcccgcgttttaaaaccttcttacctggaaaacccttgccttacccaaattaaatccctttgaaaaaaatccccttttcccaagttgggtaaataccaaaaagcccccacccattcccctttccaaaaatttccccaccctaaatgccaaatggacccccccctttaccgccccataaaccccgggggtttgtgggtttaccccaaaggtaccctttacaatgtccaagccctatacccccgttctttttgttttttcccttcttttt

SEQ ID NO: 12990 - DNA, 122 bp, Zea mays
  unsure (1)..(122): unsure at all n locations
  Clone ID: MRT4577_111843C.1
ggtgcatgagtaggtggcctgcagtaatgttagcngttaaccttccctgctanacttatgcatcttcacaattctaattctactnactatcctagaaatcgctgtgcgccttgatccaagcc

SEQ ID NO: 12991 - DNA, 501 bp, Zea mays
  Clone ID: MRT4577_111844C.1
ccggccgggatctagtctatgcttctcctcgtcctacatggagagtaccatcctgcagtagcttgagctctcgcggagttggtaggtatgcctaattacgatctcggactcctggggacggactactgccgcatcgactcccctgccagtgacttcgagaacggtatctggccggaatccagacgtaagctggcaccgcagagagcctgcaggtcgtgctaattgcgagatatccatccgccgagtacggtgagtaagagtgaggtccagacccagctgagttaaggtagcgccatattgtgtgacacattccgccgagaggatcatcccccttttgataaaaaaacatctgtagccttccagctaacaaacttcaagactacccgctgattggtgaatatcatagataccggaagatttcagaatgcatgtcgaggaactaacccagatactatcgacgatgctgacagagtccattttggaagtggccctgatcgcgat

SEQ ID NO: 12992 - DNA, 506 bp, Zea mays
  Clone ID: MRT4577_111845C.1
attaatgggttagtgcgatgatccttttatttagtatatgtgcgcctggtaataatggttagatctgttgtcgggtcggtgtgctgttgtggggtgaaatgaggttacacttactagatcaaacgattaaatatcatatttaactcatatgctatacaagttaaaccgataaaatggcttagaaagctagttatagagtttttattcatattcggatgtttagatgtccaaggtcaatgagataagttttaataaccaattaatgcattctctagctgaggaagatatagtgcatgtgcgtatttaaattcttcgtgacgtttgaacaagatccgaccaagctggacaagtgtgatagtatacttaattttatgtctacagctagtgtgttactcataagtgttgtagagtgtgtgaattggatccaattatattagaataacatgggtgttgtgcttagtgttgtttcaacagctagtggttgtttatgagtggtgtaatacatt

SEQ ID NO: 12993 - DNA, 441 bp, Zea mays
  Clone ID: MRT4577_111846C.1
acttggtattcgacctacaggtggatgggaccgtatatactatattatagaagagccataggctatttcatttaagggcgaacaagtgaggctggacaagaatctttaatgttgatcagatcaatatcatgatggatgccttaccatgaaatgaatttataacttctttaaataggatatgctctaaggagtaccctactttcctataacgactgaaacgatgattcttctttatgcctaaggataattcattctgtagtatcgaactataaaatacactgccataaaggaccgccttccatctctatttctagactccatagagataacaagagtatagagttgtttcgagtccaagagaatttggatcattacgatgagaaaaagagcttttgcttagtatcactcctcattatgatggatgaaggggacatcctgtga

SEQ ID NO: 12994 - DNA, 1615 bp, Zea mays
  Clone ID: MRT4577_111847C.1
ccggtcgtccgctaatgtgcatctttagaagaggagaaagagtcacttaaagctaaaatatcgaagctgcaaagcaacctaagaatgggccttgaaattgaacaacatttgcaaagaaatgcacgaatattagagaaaagacaggcactgtatgatggattcctgagaaatggattgtccgaacttcaaaagttctacacatgtcaaaaggctgaaattatgaaaatattggaagaagaatcgttgcggttgatgaaagttgttgcagagattcaggataaactaactgaaatttgtatcaacactgaagttagtgaccaccctgccgatgagattcaatgttgtgacagcagttgtaaagatgtgcatgttactaaagatatcagtcctagcacatgtcgtaagagtgattatcctgctgatcttaactccgtgtcgtttgatgaatctaaagcacttgcacaagccttacaggagaagatggaagcacttatgctcttctcacaggaacaagaaagatacctattagagaaacagagagacctgattgttatcgaggaactccagaagaacttatctcaagttaaagatgaaaaggtgaaggtcctgatggaattaacaaaactaaaagaacaatatttgctattgaagggctctgctgtcaaggaaggtcatgatactggtgattcatctaaactcattcctgggcatgaccaacaagggatgctgaagactatgctgaagaggacatctttaagacactggatgaggaaagaaagtaatactattggacatgggagctctgatggaaatgatcatacagtttgcaaagaacattcagtggatgttgcaagattaagagttgaaaatgctatgcttcttgaaggtgttggtactgttgagcatctcacttcttcagtgcatagactgcatattgtgcttttgaaggcttatgatgatatcaagtcagctgatcctttggagagtacctttgaagcgctcaacagtcttataactgaagcaaaccttatgaagacagctcttaatgtggttcttcctgtaagctggtccggggattcatcagatgcaattaaatatgaagctatgtgcgatccatctgattcacctaaatcgaagtctgggaaagtagacccgctctcttctgcaggcatggagatggtggagctactaatattggctgctgagattctcaaggagagctttctggtgaagaaataaggcctccatgtaaggacgagtatggctctccttgtttgtttagaagcatgcaatttaatccttaattttttttgggtgtatatacttaaactgattgctaaaagtgcactactagattatttcggatgtagagaaagagccgaatgtgcactgtaatttacggttcgctgctattgatgtgtcttgtgttggtagactaaaggatttaagagccatgtgtacaaaattcagtttacaagcaaagatcaaaggtggatggatgtttgatatgcaaaaaaaaaaaaaaaaaatggtacgggttcctttctctacgagacgctcgatctcgacatcatccacgaccctgaccaggtggatgactacttcagggacacca

SEQ ID NO: 12995 - DNA, 286 bp, Zea mays
  Clone ID: MRT4577_111848C.1
cagagaataagccaatttattcgatatgcgtcagtggaacgcgccaaatgaacagaaggatgacattgctgggctcgtgcttgagtgcatgttagaggcacttgctggatcgatccctcgagagactacactgacacgagggatatataacaaaaaactcacactttgaggaaaagggggcatacgatggaaatcgaaatatactactgaaaggtacgggatgatagatattatcttcggcgaccatgattcaacaaaggggcggggtcggtacagaggccatatt

SEQ ID NO: 12996 - DNA, 252 bp, Zea mays
  Clone ID: MRT4577_111849C.1
gggcgacccacgcgttcgattagttatttacccaacaccgttttaacattctaaacaacaccaaaaaggcgggggggcgggggcatttcatctttgacgtagcacctaaatccaatcttctagcccacaatgctcaaaacaatgactgggtaatccctcacgcttcccatctcaatagccaagtatacaatcccactttttccaacaggcgatataaccaagaatcctacaccgattatccttaacaacaca

SEQ ID NO: 12997 - DNA, 2691 bp, Zea mays
  Clone ID: MRT4577_11184C.1
ccacgcgtccgagcgcgacgccctgccagtagccgccgcaaccggccgccggtcccgcgcgaggggaggaggagatcactgcggcggcgtcttctgccggtttgaggattcggggcatcactgcagcagctggcgccaggctccagcatggacacggcgtttctgagtcctccgcttgcccgtaatctggtttatgacgagtttgccgttcttcaccccactagctacccttttcatactcttcggtatttgagatgcaatccaatgtattcgagaccgctgctaacaatagcaccagcctcaccatcaaggggcttgattcagagagtggccgcactacctgatgttgatgatttcttctgggagaaggatcctactccaatacttgacacaattgatgcacccattcatttgaaaaatctatctagaagagctcaagcagttagccgatgaagttcgttcagaaatagctttcataatgtccagaaaatgccaaccgtgtggtgctgatcgctcagttgtggagctgacaattgctatacattatgtgttcaatgccccaatggataagatactatgggatgctggtcaacatgcatatgcgcacaagattctcacaggaaggcgctctctcttccatactattacacagaaaaatggcctttctgggttcacgtcgcgttttgagagcgagtatgatccctttggtgctggacatggatgcaatagtctatccgctggccttgggatggcggttgcaagggatataaatgggagaaaaaatcgaatagtgacagttataagtaattggacaaccatggctggccaggtgtacgaggcaatgggtcatgctggcttcctcgattccaacatggtggttattctaaatgatagctgtcataccttgcttcctaaagcagatggcggggcaaagatgtcagtcaatgccttttctagtgctctaagcaagattcaatccagcaaaggatttaggaggtttagagaggctgctaagggacttgccaaatggtttggcaaaggaatgcacgaatttgctgccaaagttgatgagtatgctcgtggtatgataggtcctcatggtgcaactctttttgaagaacttggattatattatattggtcctattgatggacgtaacattgatgatctcatctgtgtacttaaggaagttgcgagcttagattcaactggcccagtacttgtacatgtaattactgggactgaaaatgacactggtggaattattggaagtgaaataaatgcagttgaggaagggccttcaaactcaagccctgatcttctaaagtttttaggaactggactttctaggacatataatgactgctttgtagaagcactaacagcagaagcagagaatgacaagcgcattgtggtagttcatggcggcatgggaatcgatcgatcactccgcttattccagtccaggttcccagacagattttttgacttgggcatcgctgagcaacatgctgttaccttttctgctggtttggcatgcggaggtctaaagcctttctgcataattccatccacatttcttcagcgagcatatgatcagataattgaagatgtggacatgcaaaagataccagttcgatttgctatcacaaatgctggtctggtaggatctgagggtccaactaattcaggaccatttgatattacattcatgtcatgcttgccaaacatgattgtcatgtcaccatctaatgaggatgaacttattgacatggtggcaacagctgcaatgattgaggacagacctatttgcttccgctatcctaggggtgccattgttgggactagtggaagtgtaacatatgggaatccatttgagattggtaaaggagagattcttgtcgagggaaaagagatagcttttcttggctatggcgaggtggtccagagatgcttgattgctcgatctcttttatccaactttggcattcaggcgacagttgcaaatgcgaggttttgcaagccgcttgacatcgacctaatcagaacgctgtgccagcagcatagttttcttatcacagtggaagaaggaacggttggtggctttggatcacatgtctcacagtttatttctctcgatggtctacttgacggtcgaacaaagtggcgacccattgtgctgccagacaggtacattgagcatgcatcgctcgcagagcaacttgacctggctggcctaactgctcatcacatagctgcaactgcattgaccctcctagggcgtcatcgtgatgcccttctgttgatgaagtaggggaaggaaccaccaagaagaatggaattggatagataaaaggcaatatgtgcaaaagttgattcggaggacgctcatcatgctgttttacgattgtgttgtctggatagaactgaagcgtgccgtgggaggtggccaaatgcacaaatcccaaagagggacgacaaagcctatagcaccatagattaatagtcacggtgtatatactaaaaagaatttacagagcaccgatgtaacgttgttactgtgcatgttaatactgaaattgtggtacgacgccaactaggagaatgagctggagctgacatgtttcagttaatgtaataaagctacttagttttgtaaaaaaaaattcattccttaatattggaattcat

SEQ ID NO: 12998 - DNA, 1836 bp, Zea mays
  Clone ID: MRT4577_111850C.1
cattggcgtcctcccacgcgtccgcccacgcgttcgctcgtttccttccgatccatacacaccgcgcacgtacgcgtactccatcgtcccggtgcaggcgggttcacgtcacgacctcgggccgagacgagatggcgacgccgaacgggcttgctcggatcgagacgaacggggcgacgaagcccgacaacggcgtgtgccacgacgacagctcggcgccggtgcgcgcgcagaccatcgacgagctgcactcgctgcagcggaagcggtcggcgccaaccacgcccatcaaggacggcgccgcctcgaccttcgccgccgcgctctccgaggaggagcgccacaggcagcagctgcagtccatcagcgcgtcgttggcgtctctgacacgtgaaaccgggccgaaagtggtcaagggcgacccggcccggaggggcgaggcccccgcgacgggtgcaccgccgacgccgcaggcgcaccaccagcaccaccaccccgccgcccccaccatcgccgtcagcgacagctccctcaagttcacccatgtcctctacaacctctcgcctgctgagctgtacgagcaggccatcaagtacgagaaggggtcgttcatcacgtccaccggcgcgctggcgacgctgtccggcgccaagaccggccggtcgcccagggacaagcgcgtcgtcaaggacgaggtcgcggcggacgagcactgctggagcgagaatggcgtgtccaacatcgagggcggctgctatgccaagtgcatagacctgtcgcaggagaaagagcccaagcgcggcatcctctcgctgcactccggctgcaatatgggcaaggacggcgacgtcgccctcttctttggcctctcaggtaccgggaagacgacgctgtcgacggatcacaacaggcttctgatcggcgacgacgagcactgctggagaacgttgtcttcgatgagcatactcgtgaagttgactacgccgacaaatctgtcaccgagaacactcgggctgcctacccgatcgagtacatccccaacgccaagataccatgcgtcggcccacaccccaagaacgtgatcctgctggcgtgcgacgccttcggcgtgctcccgccggtgagcaagctggacctggcgcagaccatgtaccacttcatcagcggatacaccgccctggtcgccggcacggaggacggcatcaaggagccacaggccaccttctccgcctgcttcggcgcggccttcatcatgctccacccgaccaagtacgccgccatgctcgccgagaagatgcagaagtacggcgccacagggtggctcgtcaacaccggctggtctggcggcaggtacggtgtgggcaagaggatccggcttccctacaccaggaagatcatcgacgccatccactccggcgagcttctcaccgccaactaccagaagaccgaggtctttggcctggagatcccgactgagatcaagggcgtgccgtcggaaatcctcgacccaatcaacacctggacggacaaggccgcgtacaaggagacgctcctgaggcttgccgggctcttcaagaagaacttcgaggtgttcgccagctacaagatcggggacgacagcaacctgaccgacgagatcctcgccgcaggccccaacttctgaactaaagcagtgggtccgtccggatgaataaaacggtggtatgcgtgtgaagaagaagatgatgacgacgaaaaaagtgtgttggatcgatgggccagcacagtgtagactagcttttgtatattatctcgggttggaaatctggtgttgttacctaaaatgttggtctgttc

SEQ ID NO: 12999 - DNA, 757 bp, Zea mays
  unsure (1)..(757): unsure at all n locations
  Clone ID: MRT4577_111851C.1
ccggccgggagcatagtaccattcactgatccaagacaaaacatggctgtgaatgtgagcaacatgtggtcgtcgatgtaggcacatgtggcgatggctaaggcgttggtgttcttggtgagcggcgcctcgtgcggtcctcccaaggtccccctgccgacgggcgccggtctcgacgacaacggcggcggctatgggtacaaggacgtgaacaagccccccttcaatagcatgggtgcatgcggcaacatccccatcttcaaggatggtctgggttgtaggccctgcttcaagatcaagtgcaataagcctgcagagtgctccagcaagcccatggtggtgcacatcacggacatgaactatgagcctatcgcggtgtaccacttcgatttggcaggcacggcgttcagcgccattgccaagaaggacgaggaggagaagccgtgcaaggcgggcatcgtcgacatgcagttccgaagggtcaagtgcaagtacggctccaagatcaccttccaccttgaaaaggggtgcaaccccaattacctggcgttgctggtcaagtacgtcgacggcgacggtgacanttgtggtggtggacgtcaaggagaagggctccgacacgtgcgagcccctgaagcactcctggggcgccatctggaggaaggacagcgacaaactgcttaagggacccctcaccgttcgcctcattgccgagggaggcccaataccatctacgacgatgtcatccctgccaact

SEQ ID NO: 13000 - DNA, 729 bp, Zea mays
  Clone ID: MRT4577_111852C.1
ccggccgggagcatagtaccattcactaatccaagacaaaacatggctgtgaatgtgagaaccatgtggtcgtcgatgcgggcacatgttgcgatggctgtggcgttggtgttcttggtgagcggcgcatggtgcggtcctcccaaagtccccccaggcaagaacatcacggccacctatggcaaggactggttggacgctaaagcgacatggtatggcaagccgacgggtgccggtcccgacgacaatggtggcggctgcgggtacaaggacgtgaacaagccccccttcaatagcatgggcgcgtgcggcaacatccccatcttcaaggatggtctgggttgtgggtcctgcttcgagatcaagtgcgataagcctgtggagtgctccggcaagcccgtggtggtgcacatcacagacatgaactatgagcctatcgcggcgtaccacttcgatttggcaggcacggcgttcggcgccatggccaagaagggtgaggaggagaagctgcgcaaggcgggcatcatcgacatgcagttccgaagggtcaagtgcaagtacggctccaaggtcaccttccatcttgaaaaggggtgcggccccaactacctggcgctgctggtcaagtacgtcgacggcgacggtgacattgtggcggtggacatcaaggagaagggctccgacacgtacgagcccctgaagcactcttggggtgccatctggaggaag

SEQ ID NO: 13001 - DNA, 390 bp, Zea mays
  Clone ID: MRT4577_111853C.1
tggctgtggcgtaggtgttcttgatgaccggctcatggtgcggtcctcccaaagtcctccccaggcaagaacattacggccacctatggcaaggactggttggacgctaaagcgacatggtatggcaagccgacgggtgccggtcccgacgacaacggtggcggctgcgggtacaaggacgtgaacaagccccccttcaatagcatgggcgcatgcggcaacatccccatcttcaaggatggttttcctcgtgggtcctgcttcgagaccaagtgccataagccctgggagtgctccagcaagcccgtggtggtgcacattacggacatgaactattagcctatcgcggccgtaccactttgatttagcaagcacggcgttacgcgccat

SEQ ID NO: 13002 - DNA, 417 bp, Zea mays
  Clone ID: MRT4577_111854C.1
attcggctcgagggatgtccggacagcagatggtacccccagggaacgaaacgcatgtggggagggatttccgaagggcgccaccaaagatgacgggacggtaagttgttacttctaggaggcccagagcaagagagtcaccgagatgagggggccacagaaagaacagagctgtcaagagctcgagcaaccggctaatgtacgggggcgtaccagaggcagagaggtgctgaaagaagaacatctgcagatccacccagacagaataggacattccgatggcgaacacaggcatatctctgagagaatttcgatggagctctcaaagtcagttgaaaacatagaactgacacagctacactagggctacatcatctaaaaacatgttggaagattctacgtaccgagttaaactca

SEQ ID NO: 13003 - DNA, 584 bp, Zea mays
  Clone ID: MRT4577_111855C.1
cactgatccaagacaaaacatggctgtgaatgtgagcaacatgtggtcgtcgatgtaggcacatgtggcgatggctaaggcgttggtgttcttggtgagcggcgcctcgtgcggtcctcccaaggtccccctggtaagatcatcacgaccacctatggcaaggactggctggacgctaaagcgacatggtatggcaagccgacgggcgccggtctcgacgacaacggcggcggctatgggtacaaggacgtgaacaagccccccttcaatagcatgggtgcatgcggcaacatccccatcttcaaggatggtctgggttgtaggccctgcttcaagatcaagtgcaataagcctgcagagtgctccagcaagcccatggtggtgcacatcacggacatgaactatgagcctatcgcggtgtaccacttcgatttggcaggcacggcgttcagcgccattgccaagaaggacgaggaggagaagccgtgcaaggcgggcatcgtcgacatgcagttccgaagggtcaagtgcaagtacggctccaagatcaccttccaccttgaaaaggggtgcaaccccaatta

SEQ ID NO: 13004 - DNA, 357 bp, Zea mays
  Clone ID: MRT4577_111856C.1
ttcctgggtttacccacgcgcccatacaaaccatcgctgagaatgcgagaaccggggggtttttagatgcagtttccggttgttaccgctgcggcgttggtgttcttggtgagcggcgcatggtgcggtcctcccaaagtccccccaggcaagaacatcacggccacctatggcaaggactggctggacgctaaagcgacatggtatggcaagccgacgggtgccggtcccgatgacaacggcggcggctgcgggtacaaggacgtgaacaagccctccttcaatagcacggtcgcatgcggcaacatccccatcttcaaggatggtctgggttgcgggtcctgcttgtagaacaag

SEQ ID NO: 13005 - DNA, 1294 bp, Zea mays
  Clone ID: MRT4577_111857C.1
actcctaagggcgattgggaataacgaggccggccggaaaaaaagcatagtaccattcactgatccaagacaaaacatggctgtgaatgtaagcaccatgtggtcgtcgatgcaggcacaggtggcgatggctatggcgttggcgttcttggtgagcggcgcctggtgcggtcctcccaaggtcccccctggcaagaacatcacagccacctatggcaaggactggctggacgctaaagcgacatggtatggcaagccgacgggtgccggtcccgatgacaacggcggcggctgcgggtacaaggacgtgaacaagccccccttcaatagcatgggcgcgtgcggcaacatccccatcttcaaggatggtctgggttgtgggtcctgctttgagatcaagtgcgataagcctgtggagtgctccggcaagcccgtggtggtgcacatcacggacatgaactatgagcctatcgcggcgtaccacttcgatttggcaggcacggcgttcggtgccatggccaagaatggcgaggaggagaagctgcgcaaggcgggcatcatcgacatgcagttccgaagggtcaagtgcaagtacggctccaaggtcaccttccaccttgaaaaggggtgcggccccaactacctggcgttgctagtcaagtacgtcgacggcgacggtgacattgtggcggtggacgtcaaggaaaagggctccgacacgtacgagcccctcaagcactcctggggcgccatctggaggaaggacagcgacaaaccgcttaagggacccctcaccgtccgcctcactaccgagggaggcaccaagaccgtctacgacgatgtcatccctgccaactggaaggccaacaccgcctacaccgccaaataattaactttagtgctgacaatactttaagtcggcctatgctagctatactagattgggttggatcccaagcaatgcattacacatgcatgcattggaccgtgatatctatttgctaccactaccctattacgacagtgatgctggcgccaacaataatggcgtcatcctccttctccatcttctccatctccatatatagctagagtgagacttcgttgttgtttaaaagagaatagttaagaaatggattgacaagttatataataagtgcctaatgaaatatttgatacgccttcattttttacaaaagaatccatgaatgttgtgttgtccatgtacctcctacgcaatcctaactttatcatgtgtggctacattttaatagaatacatattttttatgact

SEQ ID NO: 13006 - DNA, 269 bp, Zea mays
  Clone ID: MRT4577_111858C.1
cccttcaaactcacacagccacccctgtgccgggacaatttttttggtgtcgaccccctacacctcccctaatcaacctatcgggacccctacgaccacgcccctcatttaactcttgatcataagattccacctatcttaccatcgactccgcccaattatctcaaggcaattccaggccttatcagaaatcatgcctctacgcactatgaccctcactacgacttaccttactcgaactctgagacaaaccagtcatggagtcccat

SEQ ID NO: 13007 - DNA, 1291 bp, Zea mays
  Clone ID: MRT4577_111859C.1
ccggccgggagcatagtaccattcactgatccaagacaaaatatggctgtgaatgtgagcaccatgtggtcgttgatgcaggcacaagttgcgatggttgtggcgttgtccttcttggtgagcggcgcatggtgcggtcctcccaaagtcccccctggcaagaacatcacggccacctatggcaaggactggttagacgctaaagcaacatggtatggcaagccgacgggtgccggtcccgacgacaatggtggcggctgcgggtacaaggacgtgaacaagccccccttcaatagcatgggcgcgtgcggcaacatccccatcttcaaggatggtctgggttgtgggtcctgcttcgagatcaagtgcgataagcctgtggagtgctccggcaagcccgtggtggtgcacatcacagacatgaactatgagcctatcgcggcgtaccacttcgatttggcaggcacggcgttcggcgccatggccaagaagggtgaggaggagaagctgcgcaaggcgggcatcatcgacatgcagttccgaagggtcaagtgcaagtacggctccaaggtcaccttccatcttgaaaaggggtgcggccccaactacctggcgctgctggtcaagtacgtcgacggcgacggtgacattgtggcggtggacatcaaggagaagggctccgacacgtacgagcccctgaagcactcttggggtgccatctggaggaaggacagcgacaaaccgcttaagggacccctcaccgtccgcctcactaccgagggaggcaccaagaccgtctacgacgatgtcatccctgccaactggaaggccaacaccgcctacaccgccaaataattaactttagtgctaacaatactttaagccggactatgctagctatactagattgggttggatcccaagcaatgcattacacatgcatgcattggaccgtgatatctatttgctaccactaccctattacgacagtgatgctggcgccaacaataatggcgtcatcctccttctccatcttctccatctccatatatagctagagtgagacttcgctgttgtttaaaagagaagagttaagaaatggattgacaagttatataataagtgcctaatgaaatatttgataggccttcatttgttagaaaaggatccatgaatgttgtgttgtccatgtatctcctacgtaatcctaactttatcatgcatggctacattttaatagaatacatattttttatgactaattgaaatatatgacagtacatgttgattc

SEQ ID NO: 13008 - DNA, 216 bp, Zea mays
  Clone ID: MRT4577_11185C.1
acgcatgcatgcccttcggcatcgtcacgaagttcacgaccctcccttaggctccggcaaacgacatcaagacgtgacagaaaggaagaaagacgcttgcgccagtgctgacgacagcgactccgtcaccgtggcactcgatcgcgaggctctagtgcccgtgcccaccaacgccttctttgctgactacccagccgatggtgccctgctgagggt

SEQ ID NO: 13009 - DNA, 208 bp, Zea mays
  Clone ID: MRT4577_111860C.1
aggacccgctatcgttgatattgctgagcggcctcgacacttgctcccggaactacattattagtgtattagcactagtagctattactaggggaggtggccatggaggatgtgaaggcggaagtaacccgggggcgcgtgttgctccgcggggacgatgcctatcagatgcggctgatgcttatgtatcgcgccccgcgggcactac

SEQ ID NO: 13010 - DNA, 1169 bp, Zea mays
  Clone ID: MRT4577_111861C.1
cactccatagggcgattgggatcctcgaggccggccgggagcatagtaccattcactaacccaagacaaaacatggatgtgaatgtgagaaccatgtggtcgtcgatgcgggcacaggttgcgatggctgtggtgttggtgttcttggtgagcggcgcatggtgcggtcctcccaaagtccccccaggcaagaacatcacggccacctatggcaaggactggctggacgctaaagcgacatggtatggcaagccgacgggtgccggtcccgacgacaacggtggtggctgcgggtacaaggacgtgaacaagccccccttcaatagcatgggcgcatgcggcaacatccccatcttcaaggatggtctgggttgtgggtcctgcttcgagatcaagtgcgataagcctgtggagtgctccggcaagcccgtggtggtgcacatcacggacatgaactatgagcctatcgcggcgtaccacttcgatttagcaggcacggcgttcggcgccatggccaagaagggcgaggaggagaagctgcgcaaggcgggcatcatcgacatgcagttccgaagggttaagtgcaagtacgactccaaggtcaccttccaccttgaaaaggggtgcggccccaactacctggcactgctggtcaagtacgtcgacggcgacggtgacattgtggcagtggacgtcaaggagaagggctccgacacgtacgagcctctgaagcactcctggggcgccatctggaggaaggacagcgacaaaccgcttaagggacccctcaccgtccgcctcactaccgagggaggcaccaagtccgtctacgacgatgtcatccctgccaactggaaggccaacaccgcctacaccgccaaataattaactttagtgctgacaatactttaagccgacctatgctagctatactagattgggttggatcccaagcaatgcattacacatgcatgcattggaccgtgatatctatttgctaccactaccctattacgacagtgatgctggcgccaacaatgatggtgtcatcctccttctccatcttcttcatctccatatatagctagagtgagacttcgctgttgtttaaaagagaagagttaagaaatggattgacaagcaaaaaaaaaaaaaaaaaatttgcggcc

SEQ ID NO: 13011 - DNA, 305 bp, Zea mays
  Clone ID: MRT4577_111862C.1
tctaaactagagatgtctaggcgtggtaaatatgctaaacaaaggtaagttttggatctgcctcttattttgtgagtctattatatttctgattgttatagagtttatggaaatttaggaagggttctttgaccggaactgccttcgacccgctgcctttgccaagtggtgttccagtgcctatgtgtttttgtggtgatccttgtaaggtcgataagtctgaagatcatgacacctatcgacagaggtattggatgtgtgctaactttgcatttgagccaactgtggttcaacgttatatgaat

SEQ ID NO: 13012 - DNA, 1223 bp, Zea mays
  Clone ID: MRT4577_111863C.1
actcctatgggcgattgggaccctcgaggccggccggggtagcatagtaccattcactaatccaagacaaaacatggctgtgaatgtgagaaccatgtggtcgtcgatgcgggcacaggttgcgatggttgtggcgttggtgttcttggtgagcggcgcatggtgcggtcctcccaaagtccccccaggcaagaacatcacggccacctatggcaaggactggctggacgctaaagcgacatggtatggcaagccgacgggtgccggtcccgatgacaacggtggcggctgcgggtacaaggacgtgaacaagccccccttcaatagcatgggcgcatgcggcaacatccccatcttcaaggatggtctgggttgtgggtcctgcttcgagatcaagtgcgataagcctgtggagtgctccggcaagcccgtggtggtgcacataacggacatgaactatgagcctatcgcggcgtaccacttcgatttagcaggcacggcgttcggcgccatggccaagaagggcgaggaggagaagctgcgcaaggcgggcatcatcgacatgcagttccgaagggttaagtgcaagtacgactccaaggtcaccttccaccttgaaaaggggtgcggccccaactacctggcactgttggtcaagtacgtcgacggcgacggtgacattgtggcagtggacgtcaaggagaagggctccgacacgtacgagcccctgaagcactcctggggcgccatctggaggaaggacagcgacaaaccgcttaagggacccctcaccgtccgcctcactaccgagggaggcaccaagtccgtctacgacgatgtcatccctgccaactggaaggccaacaccgcctacaccgccaaataattaactttagtgctgacaatactttaagctgacctatgctagctatactagattgggttggatcccaagcaatgcattacacatgcatgcattggaccgtgatatctatttgctaccactaccctattatgacagtgatgctggcgccaacaatgatggtgtcatcctccttctccatcttcttcatctccatatatagctagagtgagacttcgctgttgtttaaaagatcagagttaagaaatggattgacacgttatataataagtgcctaatgaaatatttgataggccttcattttttataaaaggatccatgaatgttgtgttgtccatgt

SEQ ID NO: 13013 - DNA, 262 bp, Zea mays
  Clone ID: MRT4577_111864C.1
gtccaggcagagatatttaagttaagggacaagcttgagatggcattggctttagctgaggaaaatgaagctgctgctattgaagttcgtcaaactgcagagattagtaaaatttatgctgaggaaaaagaagaggaggttaagattcttgaacgatctgtcgaggaacttgaaggaacagtaactgttcttgaggaagtggtatgcaaccttaaagaggaagtaaggaactatcaaatacataaacaatctgaagcccatt

SEQ ID NO: 13014 - DNA, 357 bp, Zea mays
  Clone ID: MRT4577_111865C.1
gtttttcttttccatgtccgggagcacagtactgttgaaatgcatgcggagggcaggtttggttggtttaattctagttcggttcgattatcccctgctgcggaagtatgtcacccaccgtacattggcggtgtgggtggaataatggttcgttggttcttgccatttattctctctttgatttgatgatgcagagtagatccattctccatcagcaacctgtctggtttcctttgctcatgagagcattggtttgttccaatgatgatgacacattccctttctcagcggccatgctatggacagcttagtgcaagaatggaagggatttttcccccaacaatagagaaacccaac

SEQ ID NO: 13015 - DNA, 387 bp, Zea mays
  Clone ID: MRT4577_111866C.1
gggttggggttttttttgtttttttttttttttttttttttttttttttttttttttttttgggccaaacccccaaacggggtttggtttttcgtttaaaaaaagtggttggcttgtccatttcccgcccgaaaattacaagattttcccggtaaaaaaaggggggttggtttcccaaaaaaggtcctttttttttaacaggggggggggggggggtaaagtttccggggtgccctgatgaaaagttcccaggggcaggggtttttttcagtttttgacgacaaaaactcggcatgggtgcttctttgggggacgcccaacggggtacctgccccgaatatttttttggataaaatgggcggttttgtgaaaattcttcccaccccc

SEQ ID NO: 13016 - DNA, 402 bp, Zea mays
  Clone ID: MRT4577_111867C.1
gggacgcgtggtctcaggcagcattctgaacgtgtctgacgaggacaaaacaacggcgctgaagaacaagatgacaatcaccaacgacaagggccgtctatacaaggaggagatcgagaatatggatcacgacgctgagaagtacaagtctgaggatgaggagcacactaagaaggtggatgccaagaacttggtgtagaactacttgtacaacatgcgcatcacgatcaaagacgagaagattgcgttcaagctgacagccgatgacaagaagatgatcgatgacgccatcgacccgggcatcatctggctggaccccaaccacctcgccatggctgacgagttctatgacaccatgaaggagctggagagcctctggaaccccatcatcggcaagatgtg

SEQ ID NO: 13017 - DNA, 238 bp, Zea mays
  Clone ID: MRT4577_111868C.1
acccactcatccgcacaaccttccgcagactcttaagcttatttattcctcatttaaacacctctacagtgagatcttttatcccgaacattgacaactacctattccaacactccacactgattataacacataatctacatttcaaagaccatccacatttttctaccacatataactcccaaatctatttaccatttatcaatcaatttaatccatatatacttctattcctatc

SEQ ID NO: 13018 - DNA, 464 bp, Zea mays
  Clone ID: MRT4577_111869C.1
aagctgtgccgcctgccggaacctggcctcatttacagcgtcgacaagcctgtgctggtcgacccgctcgaacgcggaccggtggacgcgctcgcccttgacgggtcctgcacccaacaccgcatgcaacagcgccgtgtaccgttgccgaagcgcctggtgcaacaccatcactatcgatcggaactatcacgcactgtgacgcgatggactcgatcgcgcgccaaaacgcgccctgcacctgcggcatccagatcgtgctgacgcagaagcgcatgtgaaggcactgggtcggtacaccttataggcagtagcggtacgcgccgcgacggacgggtcggattgaccgcgacgcgatcgccgacacttaacgacgtcacgtgcgcgtcgatcgcccgaaccgtgccgtcaacctcttggacgagcaccatttgctgctcgaggcggatcgcgccgaaaccgtc

SEQ ID NO: 13019 - DNA, 392 bp, Zea mays
  Clone ID: MRT4577_11186C.1
cggccggattcccgagcagccgccctttttttttttttttttttttttttttttttttttttttttttttttttttttttttttttttttttttttgtttttttttttttttttttttgttgtgggccctaaaaagcccaataaaacgcttgggggggcccggccccccttgccaattaattccgggggaacaatcccagtccatttggtcttgggggaacacaaagaattggggtcctttttggcccccttccagccttttaacaaaaaaaaagaggggtggggggcccaattcggtttcattttttgcccgggccttttttgacggcccaaagcttttaaaactttggggctggaacaattttgccccccccttcaaaaatttctggccc

SEQ ID NO: 13020 - DNA, 187 bp, Zea mays
  Clone ID: MRT4577_111870C.1
ttcgatcaacgtagtaacacggactcggctcactccagcgaatcggctcacggctcgagttttttctcaatccagactttctggaatgctcaaacatttcttcatcaaggtgattcacagtcatgaattcaattattgcaactcagaacaatgcaacagcaaaaaggtttcccactgaggaaactgt

SEQ ID NO: 13021 - DNA, 299 bp, Zea mays
  Clone ID: MRT4577_111871C.1
atccgtccaccgaacctcgcccattagcaaattccaggtcacttggcggacactctcatgtacgccaagctccatgagctgttggccctcgaatagcttgcgcacatgctgagtgcgaacccatacgtgatccaggagtatcactcacgcaacggagttcccttccagcaggtcatttggatcctcgacagggccctgataatcaacctgcgtggcatgaactacctcggaacatcatacctcatacaaggcaaactgtccgcctacaacttgccatgttaggtatcgcacatcatgcc

SEQ ID NO: 13022 - DNA, 638 bp, Zea mays
  unsure (1)..(638): unsure at all n locations
  Clone ID: MRT4577_111872C.1
cattgggaccctcgaggccggccgggatcatcctatataatctcccgctcccggtcatcctccgtgtacgccggccgccatgggctccctcacctcggcctccacctcactcatcttcccgcaggcctcatcatccagaagacgcgtacgggtctccacactccctgggattatcagaacaggaggagcggctgcgaatgtcgtcaccaaggaaggacgcaatgggcacaggatcctgatggtggagagatcggacacgggaaaacacgagagcaccaagacgcacgtaaacatcggtaccatcgggcacgtatagcacggtaataccacactcagcgactggctcaacatggtgctctacctccggataccgtgagatgaccacaataatcactacaagtatcgatgccagacccgaggagctgtgccgcgcattatcaccatcaacaccgacaccgtcagagtacgagaaacgagacccatgcactacagcgcacgaaagactgcgcccatggcacggnctacctatgtcaaagaacatgatacaccggagactgctgagaaggacgaccacatcctcgacaccgctggcgtatacatccccatgccggacaccaaagatgacatatctcctcgac

SEQ ID NO: 13023 - DNA, 365 bp, Zea mays
  Clone ID: MRT4577_111873C.1
accgggccgagcgacgcgtccgtcggcctccaacgcttccgtgagtgcttgcttaaccacggccgctgggccatcctcgcggccgtatgcactctctccggcgagtggatcaccggcctcacctgccaggacgccggcaaggtggagctggaggacgggtcctcctacctgggccagccgctgccgttctccatctcgacgctcatctgcatcgaggtgctcgagatcggctacatcgagttccatcgcaacgccgagctcgacccgcagaataggctgtaccccggcagctcctacttcgacccgctcggcctggcggccgacccttaaaagaaagagcggctgcacctggcggacatcaagca

SEQ ID NO: 13024 - DNA, 342 bp, Zea mays
  unsure (1)..(342): unsure at all n locations
  Clone ID: MRT4577_111874C.1
ggccgggctcgggnaattacaaaaaaaaaaaaaaaaaaaaaaaaaaaaaaaacacccaaaagagcccaaaagggccaaaaagaataaacaaaataaaaaggaaaaaaaacggcacaagagggaaaaaagagaaaaaaaggatgaaaaaaaaaaaaaaaaaggggcccttgggccccttgaactccggtttttgtccccttaaaggggggaaattgggggcttggggaaaacaggggacaaacgtgtttccgggggaaaatgaaaacccgtttccacttccagaaagatatgaacccgaaaaaaaaaagtgaaaaaccgggggggccaaagggtggcgctacc

SEQ ID NO: 13025 - DNA, 391 bp, Zea mays
  unsure (1)..(391): unsure at all n locations
  Clone ID: MRT4577_111875C.1
naaaaaaaaaaaaaaaaaaaaaaaaaaaaaaaaaaaaaaaaaaaaaaaaaaaaaaaaaaaaaaaaaaaaaaaaaaaaaaaaaaaaaaaaaaaaaaaaaaaaaaaaaaaaaaaaaaaaaaaaaaaaaaaaaaaaaaaaaggggggggccgtttttaaaggttcaaagtttacttccccgtgcttggaaggtaaaattttttttttagggcccccaaatttaatttccctggccgggtttttaaaacgtggggatgggaaaaaccttgggtttcccaaatttattgcctttgaagaaaatccccttttccccagttgggttaatgacaaaaaggccccacccattcccctttccaaaaatttgccaaccttaaatggaaaagggaacccccct

SEQ ID NO: 13026 - DNA, 489 bp, Zea mays
  Clone ID: MRT4577_111876C.1
gggggaactcccccaccacagaaggaacaaaggaaatacgacctacaaataggcaaaaacattactcggagctacagccttacaggcccaccagcaaaccagataggggcccgcggggaaaaactatagctgcactggaggagcagcaccgtcattggacacacacaaaaaaaaaaacgcgggggcactacaaaactactggtggatcctgcatatgccatccggctgaactgaacggggggcaaccaagctttttttttaaaaggcacagatggggcataaccataagccacgccaagcaaaaaaactggaatgggactcgaacatgcatggctccaggccaaaacaaaggaggggccctttaggggaacgactgtcccacggaggaaggggggaccaggccggaaaggaggcccaccagggggccactgggggaggggctggactccgtctgcacggggttgtcacgggagtccacgaaggggtcgt

SEQ ID NO: 13027 - DNA, 226 bp, Zea mays
  Clone ID: MRT4577_111877C.1
cgtcgaaggtgtccggggcctcgggtttctacaacaaccgggttcgtttgcttttttttttacacgggcgtcatatcgagcggtggggatcagctcaaattgaagaatgaataagctaatcctaggctctagactagacaagcccgttgttgccggtggagacggttggtgctggcggtaggcgggcaccggtgacgtgggcgctagggggctgggcgcgggcccg

SEQ ID NO: 13028 - DNA, 212 bp, Zea mays
  unsure (1)..(212): unsure at all n locations
  Clone ID: MRT4577_111878C.1
tttcttttttnncnnngnnagaaagagcaaaacgaacattttattatttgattgagacacaccaacaccaataacaagtggtgctaaaatgctcaatctaagcaaaatccttagccgaaacagaaggagaaaaaaaaaggtcactgtgccttggaactaaggtgggatcagctttaacaacccttcacctcttatttttgatcgtttactta

SEQ ID NO: 13029 - DNA, 1610 bp, Zea mays
  unsure (1)..(1610): unsure at all n locations
  Clone ID: MRT4577_111879C.1
ccggccggactttgtttggaagatccatcttcggccatggccatcaactataaaattggtgatgctcttgaaattctaccaagtcaaaatccatcagctgttgatgccttcattgaacgctgtaacttggatccagattgttacataacggtcatgagcttttttgcaacaagtgaacgtgaaaaggagaggcttcagtattttgcttcaccagaaggaaggtccgatctttaccagtacaatcagaaggagagtaggactgttctagaggtgttggaggattttccttcagtgcaaatgccttttgaatggctggtgcaactaacgcctccactgaagaaaagagccttttctatctcatcatccccactggcacacccaaatcaaatccatttgaccgttagcgtcgtagcatgggttactccattcaagagaacccggcgtggactctgctctacatggctggccgggctcaatccaaataaagacaatcttatcccgtgttggatacaccaagggtccctgcctcctccacgtccattggttcctctcgtgttgattggaccaggaacagggtgtgcaccattccgtgcatttgtggaggaaagggctgcacaggctgcagctgaaccaacagccccggttctgttcttttttggctgtagaaaccaagaaaacgattttctatacaaggatttctggctaactcatgcgcaggatgagggggtgttgtcctcgaaaaggggcggtggtttcttcgtcgctttttcccgggatcagccgcaaaaggtctacgtgcaacacaagataaaggaacagagttcaagactgtggaacttattactgtccgatgcagtgatctacattgcaggctcttcgacgaaaatgcctgccgatgttacagctgcgctagaggaggttatttgtaaagaaggtggtgtcaagcaagcggatgcttcgaaatggctcagggatctagaaagggctggtagacttaacatcgagacatggtcatagttgtgatgggcaagaaagtacatattatttatgtttgctgaatatagaaccagtgagaatttcactgtaaatcaaaggcattggaaatgtggaaacgtgtagatgttaaagcatccaatacggagaaatagttggaggatgatctaaactttcctcatttagccctctgtacgaaacgccatttcgtttgattaagtgagcacagtaattacatcagcttttggtacatattatttatgtttgctgaatatagaaccagtgagaatttccctgtaaatcaaaggcattggaaatgtggaaacgtgtagatgttaaagcatccaatacggagaaatagttggaggatgatttaaactttcctcatttagccctctgtacgaaacgccctttcgtttgattaagtgagcccaggggnnnnnnncaaccttttaggccataatgtcatagaaggcttaacgacaatttaatgaacatgtaatgggacatgtaatgtgctatgtagtactatcctagtgttactactttatccaattatctttggtgtgttgaatggatggttaaatgattctagaaattttgtaatggtatttaga

SEQ ID NO: 13030 - DNA, 340 bp, Zea mays
  Clone ID: MRT4577_11187C.1
atacaacacacactacagggataccttagtttcatacatacaagcacccctactacgtacttaatttctaccactttctatcatcataaccgttaatattaccaacaacaagcaatcattccaaactaactacttttggggtatgtagaggtccaactactccaatacttatcttcccctaaccctttaaaaataaccagtcttcacaccttttattcatcctcattattattcacactcatataaatctctacacaccgattaataactaacatcaactccttgaatgacatcctacccctgcttggacctctccatttgctgataatctggccttttc

SEQ ID NO: 13031 - DNA, 576 bp, Zea mays
  unsure (1)..(576): unsure at all n locations
  Clone ID: MRT4577_111880C.1
atacctgnnctgatagcaggtttgatcctagnnacaattacaaggaaacctgggcgaacagggtgccctggtnntgacgacacnggcttcgnaaaagtggaatgggggcgtaaaacctatcgcgcgcgtgagacttggcgtgttcgttaggctcagcttctcgtattgcgttgggtgcgcgnntcgaaccccaatggtctcgtgctgtggatcactttggaggccaccaaaggaaagcgcaggattggtggagaacantgaagggcgcctanatggtgcatcccactttgcgtgacgccgggagggtcgtgcgacagggatnncgaggggnggtggtccaaagcaaggcgccaaacgcaacggtcgagtgcataccagggtgagaaattcggtgtgtcattccgacgggagttcaggcgctnncctccgcgaaacttcattccatgaatccgtgtngtatttctgnnggcgtggtgctttgtgttcaaacaaacacaagtgctgtgcagtcctgtggtgtgtgtgattctgcgttttccgataccagtttttgggaccaaaattcaatccttgcat

SEQ ID NO: 13032 - DNA, 307 bp, Zea mays
  Clone ID: MRT4577_111881C.1
gtcaatgactggagtgcgtttgttggaatgagctcaacatcgacagaaatatctgtcatcgaaagtatattcaaattgaatgatgcccaaccggtaaatgtaacaagctcattgcgacagtcactaattgaagcaatgtcataaatgaactgggacacgaattggttcaaaaatcctgtcaattccttctattttccaaaacattcgagcatctttattaaaaaaaagttattttatttgtgcacatttggaatgaaagggaaaaccaaaaattgatttggcaagattttgatcattattgttgcat

SEQ ID NO: 13033 - DNA, 569 bp, Zea mays
  Clone ID: MRT4577_111882C.1
tcgacttaagtctcgctcgtggcaaaaggtaaaaaaacaggcgcaatggcgagcaacaccatggcacctattcttcagggctttgtcggaaaggaacatggaacaggccgtcaccacaccgccttcggtgaggcccgcgatgaacgatgcgcaagagggcggagcaagagccaaaccggcggaggcgtacgggagcccaaggaacgggcacgaccgttggctgtacctgggaccactgttcggagagacggcaagctacctgactgtctatttggggacaaaactgatggaacaccgtgaaggtgcctgcagaccagatggacattggcgaaaaaccgtgagctggatgtgatccaatttcgctgggccatatcttggcacgctagcaatgcatcaattgggaaccagttcgcacgatatggacaaaagggatgtgaggtcgcttagagaaatggccattgacacatataggaagtgggtggattggactaccttactgaaccagggctcattcacacgcagtatatactaggattgtgtgcatgactacaaaaggctcatggagctcc

SEQ ID NO: 13034 - DNA, 868 bp, Zea mays
  Clone ID: MRT4577_111883C.1
ttttttttttttttttaaatcccaacacaatcattatgagtaatctagaggaaagacatccttccctaaggtacaatggagcaagacaccgacaacaacatggaattggagagcacaccacaccacacttgctaaccacaatagcatcatcgatacatatatctaacaatctcttcaactcaataactgagcgaactaactagaacacaaatgtgcttattaacataaaatagaacttgaatttcgcaagagcaacaacgatcaccaattcattcttttcaccgaacacctagtaatcgacgtgatagagctttccttttcaagcaaatcctataaactttctctctgccacactcgcacacaaatacacataacctcatatcaacataaaatcaaaaaaaatctgctcgcattagaagaattagtgaaataaaagaaaggggttaggaatcaccatgactaaacccggcgacgacgtcggggctgcggacggtggggaggagcagagggtatgaccgaccagcaaggaggcagggagcatcgtggtgaaggagatgggggggcaagcaccagggcacactcttccatgggatcggcgttagggatgatgaagatctagtccgtggcgagaccggcgtccaaaccaagtatcattgccggcggcgtccatggctgggggcaggggcgagctcatgactggggagggtgcagctggtgagctgcaggggaggagcacgccataagagggagcaagggagggcggcatgagagagcaggagcagggagccgagagggtgagggtggtcggtgctgctgccaggagctgcccgcgtgaggaagatcccggccggcctcgaggtacccaatg

SEQ ID NO: 13035 - DNA, 281 bp, Zea mays
  Clone ID: MRT4577_111884C.1
tcggtttattctcgaattacgattcccaatccaggaaaccctaccagccttttggaaactcaaagagggacccgatggcacccaaggcggagaagaagccggcggcgaaaaaacccgcaaaggaggagcccgcgggcccggcggagaaaggccccgctgggaagaagccgaaagcggggaaacgggtcccggcgggaaaattcggcggcaagggaagcggggttgacaagaaagggcgggagaaaggcaaaaagagcgggggacctacaagaactacattt

SEQ ID NO: 13036 - DNA, 336 bp, Zea mays
  unsure (1)..(336): unsure at all n locations
  Clone ID: MRT4577_111885C.1
ccgggncgacccacgcggccgcncacagctaaggcgaaaagcgaaagcgggcggcgganagaaaagcnagaaaaccncaagcnaggcggcaagaaaggaggngnnnanggccannngnngangagcgcccgnangnngagcngnnnnnggcaacnnacngcaaganngcnngngcnggncaagannncaccagnggcggaggggggggggcancnccaagggannccccccagcaaggagacccgnccaccgcganccnaacacnggcggagganggggaacngcagcgganccacgacaaggggcncaagacaggcganggggcagccgacaaca

SEQ ID NO: 13037 - DNA, 584 bp, Zea mays
  Clone ID: MRT4577_111886C.1
aagatattcttccgtcctcgatccgatccgccgagtgcacgccacctttaccccactcctctagaggcctccagggccaattctctgagagaattggaggcgtcaacacctacttttctccggacgatgacggggaaaacggacaaccaacggaagcgcaaacgatgcaatgactcatggaaaccaactggaccgacaccgtaaccctcttcctaaccgcaactccaacaccctaaactcccaagacgggttcaccccgaagcacggacatgacagggacaacaaagctctggagtagaaggccgccaacaacgcacagcatgcaccgctccgctaacaccggcacctcctcggacaacagacataacaaggtgggaggcaaaaatcatgagggagtggcgcgccaccatctccgaactcttaatggatgcctagtatttgaaaattgttggcatgcttgaacggaccaggcttgttgatgctgaaactctgaagatatcgacatttgaagataataataaggcctgctttatctggcattgagttctcccccattcattaaaaggacaactcatctaaaaacc

SEQ ID NO: 13038 - DNA, 266 bp, Zea mays
  Clone ID: MRT4577_111887C.1
gtgtaataaagtctattaattacctgcagcgcatacagaacggattcagagtatgctgataagcccataacgcggcacagagggacatgcaattcacaatatgctataacattcattctccaatcatagggcctaatgaatctacacaagctcactctttcatcacacgcactcttaaacctgcactctcctttgaatattactactcgatgcctactctctctctggtatagggagtccttacataatttcctcttgtgatttgc

SEQ ID NO: 13039 - DNA, 953 bp, Zea mays
  Clone ID: MRT4577_111888C.1
ctcacacttcccacagcaagccacactaccactacactggtaccactgtttctccgtcttagaagcgcgcacacacgcaccaagatgttcggcggcggtctcgacatcatcggcgggatcaccgggagcaagacccggctcaaggggtcggtggtgctgacccgcaagaatgcgctcgacttcaacgacctgggcgccaccgtcatggacaacgtcaccgagttcctcggccgcggcgtcacctgccagctcatcagctccaccatcgtctactccaacaacgggaaccgcgggaaggtgggcgcggaggcgagcctggagcagtggatcaccagcctgccgttcatcacggtgggcgagaacaagttcagcgtcaacttcgactgggcggtggacaagctgggcgtgccgggcgccatcatcgtcaagaacaaccacgcctccgagttcttcctcaagaccatcaccctcgacaacgtccccggccacggcaaggtcgtcttcgtcgccaactcgtgggtctacccacaggccaagtaccgctacagccgcgtcttcttcgccaacgatacgtacctgcccagcaagatgccggcggcactgaagccgtaccgcgacgacgagctccggaacctgaggggggacgaccagcaggggccctacgaggcgcacgaccgtgtctaccgctacgacgtctaccacgacctcggcgactcccgccagatcctcggtggctccaaggagttcccctaccctcgccgctgccgcaccggccgcaagctctcacaaaccaaccccgatcgcgagagccggctgctgccgctggtgcagagcatctacgtgccgcgggacgagctgttcgggcatctcaagaagtcggacttccttggctactcgctcaaggcgctgggtgggagggatcataccggccatccgcacctacgtcgacctct

SEQ ID NO: 13040 - DNA, 238 bp, Zea mays
  Clone ID: MRT4577_111889C.1
ctctcacgcagggagaaatcgctccaacttttggaggagtacgacctgtaccttctgtgccgacgatcgacacagcatattggtattgattgactgacactggtgctcattttcaggtttatatgttaatagtctttggacagtttttccgaagggtggatacacagtatggacagaggagttaatgcgagcaggatacatatagaagcaattttaagagcatgacaactactactgt

SEQ ID NO: 13041 - DNA, 612 bp, Zea mays
  unsure (1)..(612): unsure at all n locations
  Clone ID: MRT4577_11188C.1
cgtcagcccctctcgtttttgatggcggcttcgcctccaacgcgtgcgctccgaggcgtggtccagnaaagcgcgagcttctgcttctgtatcctctcctcatccgcttgttctgctcggggtccctccttcctcttttctttttttttctttctccttttccttctctctttttggtggttttgctcttggggtttttcccttctcccttttttctctcttttctctgccttgtcttgtttttctttttttctttttttttccttcctcttttttttttttttttccttctctttttttctttcttttcttttttttttttttctttttcttctcccttttcttctttctcttccctttcttttttttccttcccttttttctttttttttttttttcccttgttccctttttttttctttttttttttctttttttttttttttgtgcttctttctttttccttttttctccccttttccccctttttttttttttctttttttttttgttgttttttccgttcttttccntgtcctctttttttttctccgccttcccctttcttcccccttttccgcgtttttttttttttttctttttttttccttt

SEQ ID NO: 13042 - DNA, 2243 bp, Zea mays
  unsure (1)..(2243): unsure at all n locations
  Clone ID: MRT4577_111890C.1
gccggccgggccgacggtgggatccgattgtggcaaagccacgcccgtgcagtccggcccctgccgaaagctcagcagggggaggcgctgcgcttccgcttcacgccagatccaacctcaccagctcgcccccatggccgtccacctcctccttgccgttgccgtcgctctcctcctctgccccggggatgcgtccgtgcacgactaccgcgggctcagctttgccaacaagggcaacgccttcattctccacgccggcagcgagggcctctacgcggcctcccacgccaacaccaccgccgaggacgacaccgccgcggtggccgacgccttcatccggtttgacaagattacttttaggcgaccagaagatactaatgattctgtgaaggagactagttcagctaaggttcaggtacttgtttttgaggtagaagaccgtgaaatgattggtggatctgcatatggaggtcagaaggctatttgttgtagttcagatcttgcgaaattaggagcttgcacagaaggttctgtcatctatcgcccatcccaggtaaatcctggttggccaaagttgtttgtagcatcttttgagggaagtgatctgatcgcaacgctaccgtcaaggaccattccaattaccaaaactgggatgtacaatatgtactttatacattgtgatccttcacttgctagtttggaaatcgaggggaaaaccatatggaaaaatcctactgggtaccttccaggtcggatggcgcctcttaagaacttttttggactgatgtcttttgcatttgtcgtgcttgggatctattggttttatcagtacatgaaatcttggaaagaggttcttccacttcagaactgtattactcttgtgattacactaggcatgtttgagatggcattgtggtattttgagtatgctgagttcaatgagactggagttcggccaaaaggtatcacattttgggctgtcacgtttggaactgtgaagaggacggctgctgaagttattgtcctcattgtctcaatgggatatggtgttgtcgcgcctactttgggtggcttgacatcgaaagtggtcatgcttggaggaacattctttctagcaacagaaattcttgaattggtagaaaatcttggtgctgttaatgatctatctggaaaagctcgtctgttcttggtctatccagtggccattttagatgctgcatttgttatttggatatttatttctttagctaagaccatcggtaaacttcaggcaagaaggttgatggccaaacttgacatttataggaaatttgcaactgcattgatcatatctgttctggtgtctgttgggtggattggctatgagatttactccaaatcaacagatgtatttaatgaacgatggcagcatgcctggattattcctgccttctggcatgtcttgtctttcttacttctttgtgtcatttgctacctgtgggcaccttcacaaaactcaatgagattttcttatgatgcaagtgaattctttgatcgaaaggataatatctcattaattaggccagcacccagtgcatccaagaatggatggaatttatcttctacaccagagcccaaagctacaaaggatgtgaataccgtagcagattttgaaggtgatgatgaggaaaacaaaagggagtagaatgtactgtcgatttgattacggagggtatatttgagatcctttgaagtgtgtgctagagcaattttggtatttaggagaggattggccatgttagttattattaatggagcactccactcgatgttatttcttcgattcgttaccactacagtagttcttcacatggcgagttatgctgttatcttcatagtcttaatgatggtatatgatagaaacaattagtctggtgtataatatttataataatggcaccatattgcttctggttcctgtgaactcgacatatgttatgaatgtcagagaataaattacgatagaaacaattagtctgatgtataatatttgtattactggcaccatattgcttctggttcctgtgaaaactacatatgctatgaatgtcaaattgttttgctggtctttgttagaccttttnncctttttttggggggggttcccaatttttttggggcctttataccccctgggggggggggccccacccttttttccacaaaaaaaactttcanaaataggagagagatatattttttct

SEQ ID NO: 13043 - DNA, 890 bp, Zea mays
  Clone ID: MRT4577_111891C.1
cattgggtacctcgaggccggccgggactttttctccttccctccccgtttcctactgacggccgaggggggcacatcctttggcttttgtcccggttttgccctccggctcctgccgagctcagcagggggaggcgctgcgcttcgcttcacgccagatccaacctcaccggccaccagcttgcctccatggccgctcgcttcctcctcgtcgttgccgtcgccctcctcctccgccctggggatgcgtccgtgcacgagtaccgcgggctcagcttcgccaacaagggcaacgccttcatcctccacgccggcagcgagggcctctacgcggcctcccacgccaacaccaccgccgaggacgccgccgcagtggccgaagccttcatccggtttgacaagattacttttaggcgatcagaggatactaataattctgtaaaggagactagttcagctaaggttcaggtacttgtttttgagatagaagatcgtgaaatgattggtggatcagcatatggaggtcagaaagctatttgttgtacttcagatcttgcgaagttaggagcttgcacagaaggttctgtcatctaccgcccatcccaggtaaatcctggttggccaaagttgtttgtagcatcttttgatggaagtgatctgatcgcgacgctaccgtcaaggaccattccaattaccaaaactgggatatacaatatgtactttatacattgtgatccttcacttgctagtttggaaatcgaggggaaaaccatatggaaaaatcctactgggtatcttccgggtcggatggcgcctcttaagaacttttttggactgatgtcttttgcatttgtcgtgcttggggatctactggttttatcagtacatga

SEQ ID NO: 13044 - DNA, 137 bp, Zea mays
  Clone ID: MRT4577_111892C.1
gttccaatcagaccgccgcatccagtccttccatccatcgcatgccgtgagctgcgtctactattcctggcagcgcattcgagcataccatataggtagcaggtagccgatggccaaggtagtctcgcttcatagct

SEQ ID NO: 13045 - DNA, 302 bp, Zea mays
  Clone ID: MRT4577_111893C.1
aaaaaacggaaaagcatgccgttccaaatgtgcaaggtttttttccatcgaggggcgctacacacgtttatttatgggccgaaaccaaccaacgaaaaagacagtagcgtgcatgaaacatcggctgataccccacgcatggttaacacaacggggttggtggcaaactccatctgaaacgggcgaccataatgcaagtaaccagccaaaactgggttttttagggaaacgcagcctactttgtttggggaaacccggtcagggagctaccctggttattgtttgaagtaacccgccaaaac

SEQ ID NO: 13046 - DNA, 286 bp, Zea mays
  Clone ID: MRT4577_111894C.1
acgcgcacgcgtccgctagatcgcgagcgccgccctttttttttttttttttttttttatttatttaataattttggggggagaaaatggcatgaaaaggtaaccgaaggccgatagtgcattatttaaggtacgttcaaatgtacgggaaataaatatcattggatgacaagggggtttagtatgatctggtttaaacaaatgagggacggggattgatatttaacaaccaaactaggtgtatagatcggcatcattatcttcaagacccgtagaagcaaacgga

SEQ ID NO: 13047 - DNA, 419 bp, Zea mays
  unsure (1)..(419): unsure at all n locations
  Clone ID: MRT4577_111895C.1
ggggctgtaatacgancttatggggagctggtacgccgcaggtaccggccggatcccggcgacccgggtccgtctagaggggggccgcctggtttttttttttgttgttttgtgtttgtgtgtttttttttaaaaacatacaatgagggnnggnnnngtcaggagaacgctaggggtggtgtgccgattttttaccggggggggagaaaaggcaaggggagtgatgccgggtggggctccgagggcgacgacgttgcggtgttcatggcaacccggtgagactggggcgggggcgttgggcaagaggggggggaggaacgcgtagcttggggcgggacgggcgaagttcaggggagggcgcgctggggagacagaggacggggccgggacaagggtgatatacccgggggggggcgggg

SEQ ID NO: 13048 - DNA, 2795 bp, Zea mays
  Clone ID: MRT4577_111896C.1
cattgggtacctcgaggccggccggggccctggcctccgccaccacggggggagcgggagcccgcgttctgtgccctccgcgccgctgcagtccctccccctgtccaggcggagagatcaggttgccggagcggagggggggattggaattggagcgccagcaccaccacagatggggggtctgctcaaggaagagggcccggcggtggatgtctccgtggagggtaccctggtctggctgcgccgccccaacggctcctggtggcccagcatcgtcatctcgccgcaagacgtccccgaaggctgcgccccgccgccgcgctgccccgccacgcccatcatgctcctcggccgtcgccccgacggaccaaccttcgtcgactggtgtaacctggccaggtgcaagcgcgtcaagcccttccgctgcggggagctcgacttcgagcagcgcatcaccaacgccctcacactcgccgccagcggcaacaggtccagctggagctacaacaagggcaggtacgcccgcatggagggcgccattctccaggccctcgacatagagaaggatagcgctcttggcccggtaaccaaggcctacctccatgcccccagctgctcacctagtcccaaagttggaatgcccaacggacaagtcaaagatgctgcaccaaaggatccttctccagccatccagccgcctctgccgccgccgcggtccaagaggaagcgcaagacgccctatgactccgaggacgatacgcctcaaggctcctgccgtatgagggatctcagggacatcggatccaagacggtccccacaatggacttggccaatgctgctgcagtctctgctcccaagtacgatgatctaactaatgctgggcaggccaaaagaattgtgcactctcaggccaccgcaaagaggaagcatgctggtctgcatcaggaccaaccttgtgggatccccaggaagaaggataggtctcgtccgctctcggagctctgtaatggagacatgtggggtggttccagaccaaatggccagaaggccgatgaacatttgttgggtgtggctacatgttcaagcagctcctctggcacttcaaccttggacactccattggacatgaacaactgtcatcgcagcatggcattcaaaacagatcaagcaaagggcacagaaatatcctgcatgacaaggctactgagtgatgattcccggcatggaaatgattttgtcggaactcctgctgcacaaaatattgtggaaccagatcatttgcatagatatcaaccttgtggattggcaaagaatcctacctggaaacccaataagcaaactaatgacgcccgcaaagctgagaaacatgcacgcaaaaatatgaagatgagaaccataagctctgttgatcaggagaacaagaacaggacaagagattctaatgatcatgaccaccacaaaccaaagacaggaaagcacaaatcaccaagagatggggttgtccttttggagaaaaggcaggagaagcgttctttggacaagaacaagcccgctgaacatgatattaaaatgcatattgccgtagttcctagtggtatggattgtgttggcgcctttcagcagcagcgctttaaaagcaggtgtgatcctgaagagtcattggaaagcttaagcaaccattcaaactgtgagagtggctcggtatcatcgctggtgtttgagaagccactgcaggcattgccgcccggaaagaatctgctgggttatgaaatatgtcatgcagcgaagccaatcaagacactgcatttgaatcctgccctgtatgatgtggagttgagcgtgttggggagcagcaacacggggcgccgtgtgccccttgtttctctaatgagtaggtggaattgtaaagccgtcgtggggtatcctgtctccgtggaggtcagcgatgatgtgtttggctgtccttctccttcatcagagaaagatatccagcaggctgctacaaacagtgtgaatgggatagtattgaagaaggatgaaactgagggtttggaacgcgtcgttgcaccagcctgagcgcagacatcccggccaagatgcaaaagccgcagcaggagggcatcagagaaagcagtggacaagttatggcagccacataccaaatggccagcatcctcgtcgagaaagatgcggaggctttcctcttttggtccaggccagagagatgggaagtcagcggtgaggaaagtgtccggggcaaccgtcgcgtgcatcccgctccgagttgttttcagcaggatcaacgaggcgctgagcttctcagttaatgagaatgccctagctgggtgtgggactgcttcccggctgaggaatacttggtagctaggttttgctgtttgttgttcaccgcttgctttttttgtagccatgccataatagcattggtaaatgtttagtgtggcctatcacttggagcatggtaataggtgatgatgtatcgtcatcttggttgtgagccacatcacacttcactcacagtagaggcagtagaaggaagaactgtgctgatgcacccctctttattaaaaaaaagaacatttgatgggtctgtggagcacatggtctgatggtggaagcaaataaattagcgtaggatgatggttacttgctgggagtctgttttggtattagtgatgcatcgctgctgtaatgtaacttcctgtgttgccatcctaagctaattgtaatcggaagtgtcagcttctgcttgccttttttttttggttacttcctc

SEQ ID NO: 13049 - DNA, 524 bp, Zea mays
  Clone ID: MRT4577_111897C.1
gagaaaaaaagaaaaaaaagtaataaccaacagggtggtctcctctgtctgtctgtctgtctgtctgtctgactgactgactaataaacaaacaaataaagagtcagaggctacagtgcatgaacatgggtggttctggttcatgtgatatgtgagtgatgagtcaattgactgctctgctagtcactgccagtgctaggcttaaagcttaaacggagctaataaaatttccttttgtgtaaaatgaaatgttcccttttgtcttattattgttagcaagtgaatagaatacgtagcacatgccttgcattcagtggccaatctttcttagtgtacatataagctatacaaattattgatcagtaacactagctagggaaaaattgatccacgatgtacgtttggttaagtcaactcattgaaacggttatgctgtccattaccatgcattaataggattactcctcacaatgaaccaaggacggaactgaaggaaagaaaaaggccacccatgctagttgatg

SEQ ID NO: 13050 - DNA, 741 bp, Zea mays
  unsure (1)..(741): unsure at all n locations
  Clone ID: MRT4577_111898C.1
gggcacccataggccgagtgcactatggtggaggacggtagggggtgcgaacgagtggacgaatttgcggtgacgtgatagatatgccttgcttgctcgatccgtttgacacttgactttcttgcgtgacccactggtaaacttggcggtgcaaaagcgagcttagcaggggggggatacagtgagattcgcttaggccgacgacggagtttactagttcaggtgtgcagtaaataagatctcggggggaagcttgtcctggacacctggctgtatctgtatgatttcaaaccccgcatgatgttctgcactggcaacatgttttttttatttaaagaaaaaaaggacgggcgatttggaccatcgattcgcgacgacgtgatgccgcccgtgatgcttgatggctctggctcgcgcccatgccgccgctccgtcctcggacatgctattgctgccgacgcggcctcctccgcaccgctcaactcgcacgcacaaaattcgcggggggagtgcccggtcctgttcttccaggaaggtgcattgcattgcagtgcacccacgacgcaaccagaaaatgctctcaccacgaaagctctcggtggcaccacctcggacgacgtgcgtnccaggatccatgcgaatagctcatgcgattcgacgtcttggatgtattttagccgtttctgtatcggcggnagcaggattgagataaagatnctctgcagtcggttcatgcatgca

SEQ ID NO: 13051 - DNA, 388 bp, Zea mays
  Clone ID: MRT4577_111899C.1
ccacgcgtacgggcatgtgcaatgtttttttcctgtttcttaacatccaaaggatgctatactcaccgagggatttttacgagagcaggtgcatatatatcaaccttgtggattggcaaagaatcctacctggaaacccaataagcaaactaatgacgcccgcaaagctgagaaacatgcacgcaaaaatatgaagatgagaaccataagctctgttgatcaggagaacaagaacaggacaagagattctaatgatcatgaccaccacaaaccaaagacaggaaagcacaaatcaccaagagatggggttgtccttttgcagaaaaggcaggagaagcgttctttggacaagaacaagcccgctgaacatgatattaaaatgcatatt

SEQ ID NO: 13052 - DNA, 231 bp, Zea mays
  Clone ID: MRT4577_11189C.1
accacgcgtgcgcaaaaaacaaaacttctactttcaaccttagcaaataaaaattgggctgtgtttattaagaaaccagagccgacccacacatccattcaaccacatacctacactatacccacaccaaacaacaaatcactgcctgtctttttacaacttacctactgacaaaaccctttcttaacccaacttaatccctttgccacacatcctccttccaccacctta

SEQ ID NO: 13053 - DNA, 340 bp, Zea mays
  Clone ID: MRT4577_1118C.1
tggtctaacccggccataactgtcctaaagcgggggacatatatcatgccgcgctgatattcactcctaacgacatctccacacaacgatgaccctgtaggtctacgacgacatcactccaaacttcaagccattgaaaaaggacatgaagaagacctagctagtttattttgacacccttaatgaataattgacctatggcattaatgtcggacgcgagacttgttaaaacgtcatgatagactttgagcgatttaataaagatgaggctgagcatactgctccagcaacagcaaaaatgttttatgacagaaagcagtctaagatctaataattaaac

SEQ ID NO: 13054 - DNA, 814 bp, Zea mays
  Clone ID: MRT4577_111900C.1
cgattgggtacctcgaggccggccgggaaaaaatatgaagaaaaaaaaccggccggaccccactgctccgcctcgcctcacgccaccacggggggagcgggagcccgcgttctgtgccctccgcgccgctgcagtccctccccctgtccaggcggagagatcaggttgccggagcggaggggggattggaattggagcgccagcaccaccacagatggggggtctgctcaaggaagagggcccggcggtggatgtctccgtggagggtaccctggtctggctgcgccgccccaacggctcctggtggcccagcatcgtcatctcgccgcaagacgtccccgaaggctgcccccgccgccgcgctgccccgccacgcccatcatgctcctcggccgtcgccccgacggaccaaccttcgttcagtcaatctcctgctcactcctcaagtcctagagttatggagtgcagccagctactctaagcctaacgaacacttgcttgcgctcgccacagcgactggtgtaacctggccaggtgcaagcgcgtcaagcccttccgctgcggggaactcgacttcgagcagcgcatcactaacgccctcacactcgccgccagcggcaacaggtccagctggagctacaacaagggcaggtacgcccgcatggagggcgccattctccaggccctcgacatagagaaggatagcgctcttggcccggtaaccaaggcctacctccatgcccccagctgctcacctagtcccaaagttggaatgcccaacggacaagtcaaagatgctgcaccaaaggatcct

SEQ ID NO: 13055 - DNA, 292 bp, Zea mays
  Clone ID: MRT4577_111901C.1
gcgtaccggagtcctcgtacgtgctctcccacaccatcgtcggcttcccgtcgctgatcgtgctctccttcgcgttcgcgctcacgacgttcttcgccgtgggcctggccggcggcgccgacgggttcttcttcttcgtggccatcgtgctagcctccttctgggcggggtctgggttcgcgacgttcctctccggcgtggtgacgaacgtgatgctgggcttccccgtggtggtgtcgacgctggcctacttcctcctgttcagcggcttcttcatcaaccgggaccgcat

SEQ ID NO: 13056 - DNA, 178 bp, Zea mays
  Clone ID: MRT4577_111902C.1
gtcaacagacaacctggaaacaggttcatcatcaacttctttatggcctacccaaacagatggacttttgcatcaaggttttcctactaacttcaatcaacaacaaatgttcaaagatgcacttccagatgtgggaatataaaaaatggatccggcttacaatgccctctttgggatc

SEQ ID NO: 13057 - DNA, 412 bp, Zea mays
  unsure (1)..(412): unsure at all n locations
  Clone ID: MRT4577_111903C.1
aggacagaaagngcaccagggcacgcaaaagaccacgcgcgaggccaaccccaccaggggcgacaaagccagcaacgagaagaccgacagcgcggggcaaaagaaggagaagcaaacggagacggggaccgacaggaccaaaaccggcaagaggnccaagcacgccggacggggagcgaagacaagccacacgagnggcgagacagaggacacccccgacgaggaccacaaaaagggccagccgacgggccagagcaagacgggagaccccagaccgacagagcgccaggccaaacacaaccaaggaggacaggaccgaagaagagcacggggacgccagggaccacgccggaacaaacgccaaggcaccagaggaggccgaccaaaaaaggaagacgacgacgaagggaac

SEQ ID NO: 13058 - DNA, 330 bp, Zea mays
  Clone ID: MRT4577_111904C.1
attacctaaaccaaagaaactggggcgtgaggggtatctttaacagacaaggatctaccataccttttgcttttgcacatttatacgttcatttattatcacttacattaaaaagggccttcatatcctgaccataccctgatacacaaacggctcgacttgagttgccaatactcacaacattaagggagcattctgtgattggacccataacttccaactaatcttttggcccatcggcttgttgatcttgccaaggatcctgtcactggctattgcacaacctgattcctactattaacttacttagggattccaatttatcatttt

SEQ ID NO: 13059 - DNA, 723 bp, Zea mays
  Clone ID: MRT4577_111905C.1
cctcgaggccggcccatacatatcaactgcaccccgttgccgacaatttttcaaaccgaaacctccccataaaccgacaatatggttctcgctgttgaccttctcaacccctcgcccgccgctgaggcccgcaagcacaagctcaagacccttgtccctgctccccgctcgttcttcatggacgtcaagtgcccgggatgcttcaccatcaccaccgtcttctcgcacgccaacacagtcgtcgtctgccagggctgctcgcaggtcctgtgccagcctaccggtggtaaggcccgcctgactgagggctgctctttccgcaggaagtaaacgattctctcggaacgatgacggtgggatttgacgggttacgatgacgactatcatggaataaggaggtagatctcattggtaccaatcgatccgactgcaggatagaagagggatctttcgactcgagtcaatgcaaaagtcataacgggagttccggatattcagcgttgatcatagggcgacccatttctccttcgatctattcccttctgtttggcatctctttcacggctcttatgtacatgcatgtggaaggggagatggcatctctgagctctggatacgttatccgagggcaaggaccggtttgcaatcgaggatacctccgcagctcgcggtcctttgtaaatcgaaagtcaatttcacaaaaaaaaaaaaaaaaaagcggcc

SEQ ID NO: 13060 - DNA, 510 bp, Zea mays
  Clone ID: MRT4577_111906C.1
aaggatggaatactagagaacgggccgcccttttttttttttttttatttttttttttttataggttggttttttaaaaaagcaaagactcttctataccatactaaatgaaacgggggaaaaacataaaccgaccctagggtattttaagaccacgataaaaacccccggttgtttaacttaaagcgaaaagtttaaaacccattatttaaaacacccggggaaaatgggttaaaataaaaaaggggggtccatttttaaccaaataacttggaagacctctaaaattgggcccccaaaaacaaagggaaaaaaaatccggacaccctttccacttaataaaaatgcaagggccttcattttctggggggggaccccccggcccccttttttagggggggggggggagaccttttttggggggtcctgtattccaaaatatggcgcaaaaattttaaaaaaaaagcccccaatgtgggaaaaaaaaaaaaagtctccaaaagggctttt

SEQ ID NO: 13061 - DNA, 528 bp, Zea mays
  Clone ID: MRT4577_111907C.1
caagggatggcctttgccttcctatttttccattaaaaccgcctaattaaggggctcccacataaacatataataaagtcaacaaaccgaccaacgactaataaataaaaaattccgaatataaccaggccagggaactacggggaaaattggcccacttttacaacaaaaatacaggccagggatctgagcccagtctcgcgcgagttcaaagggttccagcttttgattttattccaaacaacagttaaaaaaaaagggccggaaaaatggcagtttttttttttaagctcctacgggaaaaacgagtacggacataaaagtttggggggggccctgacaaaagccatgggggcaatcaaatccaaaacccggttgctggacccccactggttgtcataccaaaacaaaagcttaataaaaaaaaagctaagtccgaaaccagccttggaataaaagatgctggacctaaaatccccaacaaaatctttggaaacaacgtcctcgtttgggtagccaaaaatacct

SEQ ID NO: 13062 - DNA, 457 bp, Zea mays
  Clone ID: MRT4577_111908C.1
cacaaaaacttgtatgtgattgaacgtgtaacattatgatgaaatctaaaagagggcgaccaccaatgaagtggcattggtgcgtagtaatacctgctgcgtctgtcaaagcatgaagaatgaatggcagctcacaccacatatctgacagggtgccagcattaggcgctgctggctataagaacgacagcaacttgctgtgagtcaagaaagtggaagaactcacaccaggtagctagctgaatggtagctgaatgggctgctgtgaataatgcaagaaaagatcaatgctgcaatgcagctaaatggaagaaagtgataaactgatgcagctgatagctggctgaatggtttgctatcacaatgcgaataagaagcagagcccattgcatctagtgccaatgaatgcaacaaactgctcttgttgaatataggcaataatggttgctagcacaag

SEQ ID NO: 13063 - DNA, 395 bp, Zea mays
  Clone ID: MRT4577_111909C.1
aaagggaaacattcaaaacttcacagcccaaataagcgtggcaacttttttcataaactttacaagctacagccgattttagacagaaaccttccccgcggctttttttttggcaccaatatgaaaaaagcctcaatgcccaaataaaaaccctaagcatgagagaagggaacctttggaagaaccaaattccccgaaggaaaactcctttaaactataaaccaagggccgcccgttttgaaatgaacaaaaaatttttttttgctttcaccccatgcgtggccaaaaaaacagtttgaggccccccttacaaagggtggaagatgtacccattgacaatcgtgatcgccaaaaatagagggaagcctttcttactaaaggaaaaccaggaaagg

SEQ ID NO: 13064 - DNA, 276 bp, Zea mays
  Clone ID: MRT4577_11190C.1
ttttcacgttgggagacatcgcagcaactattcgattagtaggacctgcatgtttggcgccggtgattgacacagcagatggcattgtagacagaactggaggtcattagaatgtacttatgacttgagtccgtggacaggttacccgaagggtggatacagagtatggacagaggagtacagttaagcgggatactattggtgcaattctgagagcatgccagttaccgctgttaatagttgttgtcggggtcggcgatgaactcatgggacatg

SEQ ID NO: 13065 - DNA, 369 bp, Zea mays
  Clone ID: MRT4577_111910C.1
tcgaacattttttataagatggggccaaatggatatgcgtggggtactgtttactactctcatcccttcagttcctgcaatcttggatcgtttcatagatgctgtgattaagattgctggtgagaaggttggtctgacaataaagcggttcgattttgcatattagctgattcttgcatcaattgaggggagctggtttggatcctgtgcaccttgacaggatgatatgggataccattatttataaaccaaatacttccattgcttgtaggacgtgaaagattcgtttcattgcggtggtgcacctttatcatgtgacactcacagatccatgaatatttgtctaggagtccccttcgtataaaggct

SEQ ID NO: 13066 - DNA, 781 bp, Zea mays
  Clone ID: MRT4577_111911C.1
ctcgacgggagctgcatgacgtccgcacgcctcttcacctgctgctgctgctccagggaccggccgtctccgacgacgagaatgcgcgcgtcctcctcctcgtccttgctgctgctgttggcggcggcggccgtgggcgtgctgctgcaggccaggccgtcggagtgcgcgcgcgccttcttcgtgttcggcgactcgctggtggacaacggcaacaacaactacctcatgaccacggcgcgcgccgactcgccgccgtacgggatcgactacccgacgcaccgccccaccggacgcttctccaacggcaagaacatccccgacatcatcagcgagcacctcggcgccgagcccacgctgccgtacctgagccccgagctccgcggccagaagctgctggtcggcgccaacttcgcgtcggccggcgtcgggatcctcaacgacaccggcttccagttcgtggacatcatccggatgagccgccagctgcactacttcggcgagtaccagggcaagctaagcgcgctggtgggcgcggcgcgggcgcgccagctcgtgcgccgctcgctcgtgctcatcacgctcggcggcaacgacttcgtcaacaactactacctcgtccccttctccctgcgctcccgccagttcgcgctgccggaatacgtcggctacatcgtctccgagtacaagaagatcctcatccgcctgtacgccatgggttgccgccgcgtgctggtgacgggcacggggcctttggggtgcgcgccggcgatcctggcgc

SEQ ID NO: 13067 - DNA, 883 bp, Zea mays
  Clone ID: MRT4577_111912C.1
aagccaatcaagttcgtatatgtaatttcacctgcttgttcagaagctagctaaacaagagactagaacttgtcacaactcaacgaacaagaaggatgcattatttgagcagaaaataaaagaaggcttgctgattcagcctagctcgctgatgggaggcggaggtctgaaggagaggagagcacccgatcaggagcagccgttccgcacccggagcgggttggagctgctggtggaagacgacgacgacgccgctcggtccgggcggcgtgtgcagcactcggcgatgagcgctcggcgcgccgtcagcagccccatcggcaccatggggcggtcgaagacggcgcagtccacccagtccttgagcagcttctcctgcccccacgtctccgggacccacaccctccccgccatctcccgcctgtgccgcttcagcctgtctcgcgtgctctcctgatcatctgccgctgccttgggctccgccacctgcaggtccttctcgtccccgtgttcctctggcgccggtgcctctccggcgtgctcgggtgcaaatacctcttggtgataaggcacgggcgccttgtcatcatgctgctcctgcagcgtcgccaagttctcttccgtcacggcggtttcagcttcgcattctttggcctggtgatcgacctccccagtctccggcagcgcttcgacgtcgctgaacgacgccatgccgcagccaagctatgcatgcgacacagcggtccgtggcggctcgatcgaccaatccgtacgcagtagtgtattagcaacacgccaacacctgttcttggctggcttcaagcacggcgatataatgcgcgcgcgagaggcatgggaaaaagatcagagtaaccccggccgg

SEQ ID NO: 13068 - DNA, 816 bp, Zea mays
  Clone ID: MRT4577_111913C.1
cctcgagggcccggccgggataccaaaatctgaaaggaatcaaattcgtttcaactaccaaaatactctgttcttcgtcgcttgctcttccggctcacgtcgccgtggtctccggccaaggggtcgtcacatacaaggaccagcgagatggggggcgaggctgagcctgacaacgcggtgctcttcgttggggtgtcgctggtgctgggcatcgcctcccggcacctcctccgcggcacccgcgtgccctacaccggcgcccttctcgtcctcggcgtcgcgcttggatccctcgagtacggaacacaacatggtctaggcaagcttggagctggaattcgtatctgggctaacataaaccctgatcttctgctggctgtttttctacctgccctcctctttgaaagctccttctccatggaagtacaccaaataaagagatgtatggcacagatggtgttacttgctggacctggtgtgctaatatcaacagttttacttggcgctgccgtaaagctcacttttccttacaactggagctggaaaacttcattgttgcttggcggactgcttagtgcaactgatccagttgctgtggttgcactgctaaaagaactcggagcaagtaaaaagcttagcacaatcattgaaggtgaatccttaatgaatgatgggaccgctattgttgcctatcagctattctatcgaatggtgcttggaagaacctttgatgctggctcaataataaagttctttgtctgaagtttcacttggagctgttgctctgggccttgcattttggatcatgtcaatact

SEQ ID NO: 13069 - DNA, 829 bp, Zea mays
  Clone ID: MRT4577_111914C.1
ggaacagaggcgcgagcagcttgcaggagaggccgaacactagaaacgacggtcgggtcgctcatgagctcggtatgggcaagctagtttccatggtgagcgacggcgacacgaatagtgctaggcgcggcttggctggagaagacacaagtcccagcgagcagagaggcacggtccgagcacagggtgatggggcgcgctggagatggccgagaaggagaagtccaagcgtcgtccatagaagaaacctcggctgggcgtgcgctgggcgtacaggaagctcggttgaggacagaaccgagcagggtatgtcgagtagggaggtcgacgcggctggcaagggagctagactgagcagatagatgggcgtcgagctggacataaggaagatgccacgagcggccctgtctccggcggccggactgggccagcgccatgggcggccagggaaaaacagggggcgccaagtggagcaggaagcaggggcgagccaggcgcgcgtgcaggaggtgaggagaggggatgggcgcgccatgggagaagccaagttgaagctggagatggccggcggccgtcacgcaggaagcaagccgcgcacacgcaaggagcaggagacggccgcgcggccaacagaggagccaggggcgctgcgcaggaagaagcgctagggagcagcgtgagcctgggtgaaatccgagcagggagggagagggaagcaggggaccccgagcttgaggacgacgttgacttgggcgagcgccagggagctccagggctggagaaaacttccagctgatcccagacccggccggggtagaggtacccaatg

SEQ ID NO: 13070 - DNA, 589 bp, Zea mays
  Clone ID: MRT4577_111915C.1
ccgtgttacactgttagttgcaactagtgttgcagaggaaggactgatattaggcagtgcaatgttgtcattcgctttgaccttgcaaagactgttttggcctacattcagtctcggggtcgtgctagaaagcctggatctgactacatattgatgcttgaaagaggaaatatgtctcatgaagctttcttgagaaatgctcggaatagtgaagagacattgagaaaagaagctattgagagaactgatctcagtcatctcgatggcacttctatgctaagccctgttgatatatcacctgattctatgtatcaggttgaatcaacaggtgccgttgtcagtctgaactctgcagttggactcgtacatttttactgctcacagctgccgagtgacagatactctattcttcgaccggaatttattatgcaaaagcatgagaaaccagggggttcaacagaatattcttgcaaacttcaactcccttgtaatgccccattcgagaaacttgaaggtcctatatgcagttcaatacgcctggcccaacaagctgcttgtttagctgcttgtaagaagctacatgagatgg

SEQ ID NO: 13071 - DNA, 694 bp, Zea mays
  unsure (1)..(694): unsure at all n locations
  Clone ID: MRT4577_111916C.1
aattcggcacgaggggatgttcaaagagatgattgttcatagaagttaatgttcttctgacaacatatgagtacttgatgaacaagcatgataggccaaaactaagcaaaatacaatggcactatataataatcgatgaagggcatcgtattaaaaatgcttcttgtaaacttaatgctgatttgaagctttatcggagctctcatcggatattattgacaggaacacctcttcagaataatctcgaggagctgtgggcacttctaaattttttgttgcccaatatttttaattcgtcagaggacttctctcagtggtttaacaaaccatttgaaagtaatggtgataattcacctgatgaggccttactttcagaggaggagaacttgttgatcataaatcgtcttcaccaggttcttcggccctttgtactcagaagacttaagcataaggtcgaaaatgagcttcctgaaaaaattgaaagacttgtaagatgtgaggcatctgcttatcagaaacttctcatgacaagggtggaagaaaatcttggtggaattggagccgttaaggttcgcttcgttcacaactctgtcatggaattgangaacatatgncaccatccatacttgagccagcttcatgntgaaagagatgagggctacctaccctaacattttactacatctattttgag

SEQ ID NO: 13072 - DNA, 116 bp, Zea mays
  unsure (1)..(116): unsure at all n locations
  Clone ID: MRT4577_111917C.1
nagatctgatgnagcgcagtcagtcggaatcggatcgagcatgagtttgatggactgaatgatcaagatcgagttgatattcatgacgttatggaacagcgagctgttgccattgc

SEQ ID NO: 13073 - DNA, 455 bp, Zea mays
  Clone ID: MRT4577_111918C.1
cgccccgggactctgtgccacgatcacctaaccacaatggcctttctcctttttagctcaccggcgctcctccctgggggcatgggcaagcctcacatctcctgcgcgcaaacaccgcaccctgcatttgcccataaccagccgccgttcagcgagctgccggaaccacagaaacagcggcactccgtgcaagcgcagccacagcaagcggcggcggcggctaggcccaaacacgcgggcgtagcggactccactgactggatagcctcttcgtagacgctgcggtccggaatcggtgcggcgctggcgtgggccgtcttcctgtccgtcgacgacgagtctgaacagcgtaagacacgctctgaggttgctcatcagcaggccaacaccaaggacgtggagcaggagcactaggtcgtgctgcccaacggcatccggtactaccagatgctcgt

SEQ ID NO: 13074 - DNA, 480 bp, Zea mays
  Clone ID: MRT4577_111919C.1
ggtttggggtttttttttttttttttttttttttttttttttttttttttttttggttttttttttttttttttttttttttttttttttttttttttttttttttttggaaacaaaacttttcgggtggggggattaaattaaaaaattgggggggggggggaaacggtttttttgaaaaggaaaagatagggaaaaattttgcataaaaatttaccgggtgggcgggaagggaaactaaaaaatggggcagggccaaaaaaaaaacggggcggtttcaatgtaagggccggttcccatgtacaaaaaaccgacaaatttgatttggaacccccaccaggttaaataagggtcaaattctcggcctatggtggatttaaaaaggtgggaaacccggccggttttttttctgaattcaatggctcaattctgggctgaggtaaataaaaagggggccaaccccgggggtccgggggggtg

SEQ ID NO: 13075 - DNA, 1625 bp, Zea mays
  Clone ID: MRT4577_11191C.1
ggaccctcgaggccggccgggctcatctatacaaatacttctcatcttacttttttttcgtcttcttccctataaataactggccttcccaaatcgcccacaactctcacacagagaccacccacctgcgctgcgcctcggttttacggcccttccctcaccgccccgcgcgagcgaagccatgaagcttgaggtcatgccgaagcagcgggtgctggaggcggagcagagggaggaggccatggagatgagtggcctggacctgtggaagcacgagaagcccccaaggatctgctccttgcccccgccgctcccggcgccgccagcgtgcgacgaggcggcgctcgtgccgccgctcaacttcgccatggtcgacgacggcatattccgctccggcttcccggagaccgccaatttccggttcctcaagtccctcaacctccgctccatcgtgtacctgtgcccggagccgtacccagagacgaacacggagttcctcgagaagaacgggatcaggctccaccagttcggaatcgaggggcgaaaggtaagaaaaacttggtttcaacgaaatcctctgctgcttcgtggttggttagcgatagttcatggaggcgtagaattacttttggagggattaaaatatggtttgctttcggtaacttccatgatgtacggcttgtttgccccgagccgacgctgctgatcatatgtcgtctcgtgtatcctaatttaattagtatttagtactagctgcgcttccgctgactatgtttggggagagttccagtgctttgctcaatgaaatttatttgttattgtacctgacttgcctgaaacgcagtgttatctagagaatttttcaaaattcacggcgaatcggtagtggtccctttcagcattgctttcattaatcaagacagctgtgttgctgatttagaacattttttccccaatattctcaagtgtttttttattgttgcgttcctctgaatacaagcctaccaccaccagcgtgtacgcatcaccgcttttggcttggagcatctccatgtgttgcctttatttcttttttttgtgattttcccttattttggctccatgctatgttttctttcgctgtttctgcaaattaggtaaatcatgcaattactttgagtcgttcagttaatagtaccttttattacaactcccgtcatgttctactgtttgtatcctgtacttcgtagatgtttgctagatttctttttatgggcagtttcattggtttcagaggaaacaagcaattcttgctggcactatgttttcttttctccagtttgtgatgtttcttttgattgtgcatttgtgctgacagttatactgaacttggtaactttatcatatttttgcactctaaaatccgtcaatcattccgttgtttcagcaccttgagctgttcagcttccttctgtgtttggcagcctaatcaattatggggagatatctatgtggtaatggctgtgtcaaacagcatacacgatttttttagaaatgtaaccgatttatctttatgagtttgtgagaaaagctgcaagatattcctgtaacttcagcaatgacgtctgaggataatgaatgcacga

SEQ ID NO: 13076 - DNA, 373 bp, Zea mays
  Clone ID: MRT4577_111920C.1
aagcaactcgtgaaatgaaacccaaaagctttggtgataggtaatccgaacatgtacactccctgcctgccctccctgatatcgaaagcctgaagataactacttctgagttctgaccatgcacgtactctgaatttcctatacggctactacaccaaataaacccaaaaggcagagtccagcagactccatccagagcagccagcaccactagatcgcgcacttctccatcgggccagcgtaatcaccctgccgtcactccagctcgacagccgaggtgtgcctattacgaaccgcgtgcagctccgggggttgcccgtacctggcggcagcgactgcgtaccacccgcacgcgtagaggaaggcgaggagc

SEQ ID NO: 13077 - DNA, 371 bp, Zea mays
  unsure (1)..(371): unsure at all n locations
  Clone ID: MRT4577_111921C.1
ggcccgacccacgcgancgggggcancaaggnggccagtttcagcttttacaacgccgccnacgacgagggcgcggcgggcaaggccgaccgccncacgcccgacacacaggaggaggagcgcgacacggacgagacccccgagcgccaccgcgagaagagcaaccgggacggcgacgccagcngcgacangggcgccaacaaccgcancaacgggaaacccgccggcgccgacgcgcgccagcngncggagaccgnccggagccagnggcagcnccacggggacaacaggcacggacggcgacnccggacgcggcaaggaccgggacgccaagaggcncaacnacaccggcgncgaggccaccgccgcgg

SEQ ID NO: 13078 - DNA, 413 bp, Zea mays
  Clone ID: MRT4577_111922C.1
ccggccggggccagataaccccgcatcgtcagccatggccaacagggtcaccgtcgcaagcgtcatcgccgcggtcggcatcgtcaccgtgatcggcaccatggccacggtgaccagcgccgacgacaacgatggcaacatgctctccagcgtgaaggtctccacggtgtgcgccttcacgcggtacccggagaagtgcgagcagagcctcaagcatgtcgtgagcgacacctccagcccggaggacgtcttccgggacgcgctcaacgtggcgctggacgaggtctccaccgccttccagcggtccgcgcacattggcaaggacgcccaggacaaactcagcaggaacgccatggacgtgtgcaagaagctcctggacgacgccaccgaggacctcagggccctggcacggg

SEQ ID NO: 13079 - DNA, 340 bp, Zea mays
  unsure (1)..(340): unsure at all n locations
  Clone ID: MRT4577_111923C.1
nttcttttttttttttttttttttttttttggggtttttgtttttggccgatggacaactggttgcatctataaaaaaaatcacccaaactgccatacatgagagtggatagacagggaacttgaagcaaaacagagacacaagctgtatcggcccacatgggggaccgggccccattaccaccacctgaccaaacgacgcacactttatttagcccatgtcactcgcagtccgtaccgggcagtccacgcgacagccactggtatagctacgacacactgtcacacacacagagatggggagaaaccgccacgttcgcgtttttctttaacaaaaaggc

SEQ ID NO: 13080 - DNA, 290 bp, Zea mays
  Clone ID: MRT4577_111924C.1
ctagaagaacgcccaacaagccaagctcgaagtcgaagcaatggaggcactgtagggtcacgaaaatgttgtcaagcttattgaagccgtgaagctcgaagagtcttatattatcatcatggagtactgctcgaagggcgacttattgcaccacgctcaaaccaagctgagactctctgaagcagaagctttgcccttcttccaccaaatggtcaacgcactcgaccacacgcacgaaaagggatacattcacagagatatcaagctggaaaatatgttccttgacgacc

SEQ ID NO: 13081 - DNA, 1301 bp, Zea mays
  Clone ID: MRT4577_111925C.1
gccttataaattatactacatctttataggtgattaaaatattttatcatcacacatgcctatcaaaattctactcggtccactaattcagctaagtgaccggaatagcgaaataattcgccatagctgaatccggctcaataatcgcaagaactgcgaagtcgacgagagtttcgtgacttacgcaatttatcgagcaccctaatgagcctcgcactaacatattaatttattcaactatcgaaatatactgaataatttatcagcttaccgtttccacaaccaacatgaatccacgagatcggtagcgattttccgattcaggcaatttgtcgagcgcttggggaatatcgcgctgctagcttcgtcttcatccgatccttgggattccttgatgacgcacggaataacgacgatctttgattgaagtcttcgaccgagtacttgataagcgatgcacagtgaccttgcttaattttgtctaaagtccaggattcgtggttcgacgagatcgagcagggaagaacaaagtttgacggttcgacgacatcggcgaggtcaacgacgagccgatcaaccaaaactccacgatgccgaccgagacacaggttagagaacggcggctgacgagatccgagctggggaaaaagaacacatgactggacgttaacggctgggtccgaacgcgagggagaaactcgaccggcgagctggagcgagctaggcacaccacgatttgaggaagctgcgtgcagaaaaacgtgcgcgcagggacgagctcgacagggatcttggcgagaccatggcgctggaagtcgagcgcaatccgagctgggcgagctgcaccaaggagcagcagccggccatgggaggtggcggccaagcaagctggggatggccgacggcgctggggctggacgctggataccgagcgcgaacaggaagaagcggaggccgagctgggcaccggcgcgcgtcatgggagagagcagagcgagctccggccaggaaattggcgagctgggagatggagcttagagggctgcgcagcggccaggcgagctgggcaagacctcggctgggcggaccatggcggacagaaacaacgaggcagctcgacgtgctcagctgccgtgggagataagaccggcggcaaggcaagaaatatcccaggcggaggagataaatgaagagagagacacgactgaagaagaagataaggaagagaactgcgctcggcggtaggaaaatcaggaatagagaaagcggcgggaaaaatctcccggccggctcgaggtccc

SEQ ID NO: 13082 - DNA, 170 bp, Zea mays
  Clone ID: MRT4577_111926C.1
gactcccgcgccaaggccgaccagttgggcgagtccatcctgttctggttctgccgcactaagggtccatattatttcgaagacttggtcgatatgatgtatgacccttagtgcggcagaaccagaacaggacgctcgcgcccaaccggtcgaccttggacgcgggagtc

SEQ ID NO: 13083 - DNA, 1406 bp, Zea mays
  Clone ID: MRT4577_111927C.1
tgggtacctcgaggccggccgggccgggacagatatgttctctttttcatacgtatgatgaatcgaaagggattgatatgttgtgtgaggcttggaaagataagcatgggatgtcatcttggacttgggatagagataacagagtctgttagagggagaatcacggcgagagcgtgctcgtgggcacccctctccgtcaactggggtgcgcgatcgatcgatcgaaatatcgaactgcagttgccaaaaccccaatccggtcttctatttccgatcgagccgcaaaggaggcaggaagaaggccggcgcaggcgcaggcgcggatggcgatgggagcgacggttcgcgcggcggccgcggacgccgtggtgacgttcctgtgggtgctgtgcgcctccgcgctcggtgcctccacagcagccgtcacgtcgtacctgggggtgcaggagggcgccggccactacgcgctcctcgtcaccacgtccctcctctcggtgctcctcttcaccttcgatctcctctgcggtgcgctcggcggcgccagcttcaaccccaccgacttcgccgcctcctatgccgccggactcgacagcccctccctcttctcggttgcgctccgcttcccggcgcaggccgccggcgctgtgggcggcgccctggccatctcggagctgatgccggcgcagtataagcacacgctcgcgggcccctcactcaaggtggatccccacaccggtgccctagccgaaggggtgctcaccttcgtcatcaccctgaccgtgctctgggtcatcgtcaagggcccccgcaacgtcatcctcaagaccttgctgctctcaacctccatcgtctccgtcatcctcgcaggcgcagagtacacggggccgtctatgaacccagctaatgcatttggctgggcatatgttaacaattggcacaacacatgggagcagctgtatgtgtactggatatgcccctttattggggccatgcttgctggatggatatttagggtggtgttcctaccaccggcacctaagcccaagaccaagaaagcatgattactcgtttatggatgctggtttagaagaaataagaaaacagaggaaggtcacataagctcatgtgctgtacttgatttcctcaacttcccacaaactgggtgttgtgctctgttacttatttctcatcaataatttatgtgtacttgtaattttgggctagtcaggatgtgtttttgtccttttatttagtttttatatgttttctttatgagtacagtaaaatcattgatctcaactgagttggaaatgagctgaggttggctctttaaaaaaaaaaaaaaaaaaaaaaaaaaaaaaaaaaaaaaaaaaaattctaaaaaaaaaaaaaaaaaaaaagggcgg

SEQ ID NO: 13084 - DNA, 377 bp, Zea mays
  unsure (1)..(377): unsure at all n locations
  Clone ID: MRT4577_111928C.1
aatccaaaataaaacatgctttcccatataagcagccacgccaatatgggatgcatacgatccggttggggatctacatagatcccagacattatttatccttagcttttttggatccattagtccacgctacagcttaaagcacaatacccagcaggggttggagcagtttggggaccctcccacatttatttttttggttacaacaatagtcagcagcaacgtcacgatctattttccttttcctttccccttcccgtnnngggaataaagttttgtttgcacccgggctgttgccggggccttcgtttcctcccttttttttttctccttttctttggtggcagaagctagctcccgttgctttttaagttctt

SEQ ID NO: 13085 - DNA, 300 bp, Zea mays
  Clone ID: MRT4577_111929C.1
ctcagagcctcagatcgccagcgaagtcttgcggtcgcgaagagcaacgcaacaagatggtgagactcgcattcgggagcgtcggcgagtgcttcagggtcaggtccatcgaggcctacgtggcggagttcatcgccacggtcgtgttcgtgttcggcggcgtggggttcgcgcatcgggttcaggcaagtgacgagtggcggcgcggtggaccctgcgggactggtggcgagtcgctgtgcgcacgccgtggccgtcttcgtgggcgtgtccgtggccgcgaacaggtccggcgggcag

SEQ ID NO: 13086 - DNA, 213 bp, Zea mays
  Clone ID: MRT4577_11192C.1
aaagaggaagcgttctatgaaagatggatttcattttgataatttcgccattatgcctgtttcatgtttgaacatactttttttcatctattttctgggtatgatgccatgtaaggtgtcacaagttacagtttcagcatcatcaaactgcactgttacattttcatatgtgaaatacaagtgctgatttattctattttagaatacaagtgt

SEQ ID NO: 13087 - DNA, 538 bp, Zea mays
  Clone ID: MRT4577_111930C.1
cagtccgtaccgtatcacgcacagaagcacatatgctggccccagccagaagcggcctccgcaggtacgcctttactgctcgatcacggctccgcctctccctccgtgcctctgtgtcgtccagttcgcggatgaacaggccgaggagtgactatatggccacgacctccaaccgccgtgatctcatgtgcggcggacttgtcgcacggtgcttccaccacagatgaacagtgtgctccttctctgtacatgcggactaatgctcgtctgctacgatgactgatgacccatgcctccatcctctagctgcctccgatccgcggctctttcttgctgtccattggtttccggccaccatgtatccttgcaccttctgtgctgtgctgtgttgtgttgcccctgctaccgtacttcagttttttactcctaagtcctacaatggcaaggatgtaccgcgaggtgtgtcagcgtgtatctttttgtgtatttgctctgtacaaaaggggtggaaaaaacagaaaaacttcagttctactgc

SEQ ID NO: 13088 - DNA, 879 bp, Zea mays
  Clone ID: MRT4577_111931C.1
atgaagcaatggcgggacgacttcgaccggttgctcagtatggcacattctacctcgaccagatcgaggccacggtcatcccggtgccaaaatgaggcgtcggcgtctgtgcgctcaccctcagtgaggggtgcccagaccaacgacctccgggcagagctcaaccgcaggcgagcgggggaggatgcccgggaggagctctgtgcgcggttcgttgcgaacttcgccagtgcttaccagcagcacggtgtggaggcccacctccatgcggtgaggcaggagcccagggagactctccgaaagttcatctcccgcttcaccaaggtgcgaggtactatacctcgcattttcgatgcttccatcatcatgacattccaacagggagtacgtgatgagaaaatgctggagaagttggccacgcatgacgtggagactgtccccatgctctttgctctggctgacaagtgcgctagagctgccgagggccgtgcatggcactcggccccacaaactggggttgcccaatcaagaggctcgggtgccatcccctgggacgtcgttgctgccgcgaccgggggccgaggcgaccacaacaaacgcccacggccgcagaggggttgcagcggcccatgccctgtgcaccccaacgattgccacagcgccgtggagtgtcgcgagatcattgatctcgcgaaacgtgtcaacgagcggcgcgagcagtcctccaaggacgactccccacctcgtcgtcgacctagcaaagaaaaggtcgacgacggcgaggtggccacagttgaacgggacctcgggtatcagtcacccgagggggacctgaaggaagtcttcgccgaaggttcctactccggtgggaacaactag

SEQ ID NO: 13089 - DNA, 384 bp, Zea mays
  Clone ID: MRT4577_111932C.1
gaacaagttgaaagaccaagttctgaggaattactagctgatgtttcacttggactagggaaggtagagcctcataagactgaacctgcacttgctgctctggttagtatccaacagcatgggttcaaacaagctgaaaatggcaacactgaacctaaaagcatggataacgctaacggcgatgatgacccgatatcaaggctacagctagcggacggtactgccatttcagaagctgcagtgaacgccaagttccttgttgagcacgaggagggttacattccacatctagctgcacttgtgatcgaaaagcaattccataagatggatacagtacagtcgtttctcaccgaagatggaaacctggtgttacgatcgagagat

SEQ ID NO: 13090 - DNA, 235 bp, Zea mays
  Clone ID: MRT4577_111933C.1
ctcatgtgctgtggcccaacggacggcctgggtgctcattcacaggagtgggggcgttctaagacaatgggccgatcaggcctaccggcaatgcgctaaccaggagcgagtacagttggaacaaacaggcctatatgctgcatctggagagccccgcaggggttggtttttcatactccactgatcctgcctcctctgagggtgctggtgacagcatgacagccagggacaactt

SEQ ID NO: 13091 - DNA, 340 bp, Zea mays
  Clone ID: MRT4577_111934C.1
cgggcctgagtttgtaggcgcacggcgcctagcctagtcaacatgccggtcgccagaagctgggtttgtcgcaaaacctatgtgaccccacggagacccttcgagaaatcgcgtctcgaccaggagctaaagttgattggagagtatgggctccggaacaaacgtgaggtgtggagggtcaaatttaccctggcgaagattcgtaaggctgcccgggagctgttgacgctggacgagaaggatcctcggcgtctgtttgaaggcaacgctctgctgagacgacttgttcgaattgggggtgctggatgagggcaagatgaagctggattacattctgggc

SEQ ID NO: 13092 - DNA, 1163 bp, Zea mays
  unsure (1)..(1163): unsure at all n locations
  Clone ID: MRT4577_111935C.1
gggtaccctncnagtcctgccggggatgtagctagcgcatctattgtttgctctccacatctctctcgtgcgtgtgtccatgaaaaggatcacacacgaatgatctacacagcctaggcgagctctctcctttgtctctttataaaagggacatccctcgggccggccgggatgatcgctacctcgctttccctcttgatccctggctgcaaattgccattccgacataataaccactgcaccagccgcttcggttcgcctcttcctactctccatatatctcatcctgatcttcactcatcacctaaccatacgagatctgcatatatagctccatcagatcttgagcgcaaattcctctcagtgcatcccatgtctgcaatctacatgagccagctctccactgccctccctctcatggagggagatcaccaagatcatcatcaccaccaccaaggccacttccaggccttcaccctgccaaaggaaacaccgatccttttcccctttgtgatcagcaatagtagcgccagcgaaggcagtttgagctatggatcggctgcagaccatcacttgttgaggcagcgtcatcaagctatgctggagccccaacatatgattggaggatcatcaactgcgactgggaatagtgtcttctcgacgccgttcccgaccgtggagagcatccgcgacgacatgatcgagcctgcctcgtacgatccatacgacatggggaagctgcaggtcggcgggtcgatggatgcttgcagctggacgccggcggcagccaagatgaggatcacgaggaaggccactgccgatcccagtgcggggaagaagccaaggagaagggcgcaagcagggtacgacgacaccatgagcggccaaccgaatttgggtgttattagggtgtgctccgactgcaacaccaccaagacacccttgtggaggagtggtccttgcggccccaagtcgctctgcaacgcgtgcggtatcaggcagcggaaggcgaggcgggcgatgatggccgccgcctccggctcggtgtcagcagttcccactgacagcggcaaggcctcgcccagcaacgccgccgtggccgcagcagcagcacaccccaaggtgaagaaggagaagagagtggacgtggaccggtcgctgcc

SEQ ID NO: 13093 - DNA, 106 bp, Zea mays
  Clone ID: MRT4577_111936C.1
tccaagatcctaacgacacagtcctctcctggaatgacgatatacagggtctccgcgcgctatcaggtcgcttctcaatgaactacgtccggatgatctacttgta

SEQ ID NO: 13094 - DNA, 205 bp, Zea mays
  Clone ID: MRT4577_111937C.1
gttcaaactgatacaaactatgttgacaactacataaaatcatacatttttgagcctaccaccagtggaacagtagatttaaaaatactgcattcgaatgcaagcatggctaggaaggacaaaaaccgtaaatctactcggcagataggtgactgacctgtccaatatagatataatccttgagcctccctttaacctaattgcg

SEQ ID NO: 13095 - DNA, 1630 bp, Zea mays
  Clone ID: MRT4577_111938C.1
ctcgaggccggccgggccgggacatcctctcttctactatctaccacaactagttgccagagttcgtcatggacttctacaaagagttcgtggagacttcgtccgatgacgattccgaagactgaggtcgacactcgacaccatgtacgtttagcaagcccttgagcaactaggtgttggaggttcgagcgggcgtcgtagacgctcttccttgccacgtctagtaatccatagggatcacagtgctagcgaaaatctgatgtgatgctacgggtttagcgggataaagctccactacttcggtccaaatcctgtctatcccgcccacattttccaacgaaggtttcggatgcagcggcctttgttcctgcgtatccttagaggtgtgcagcaagtggacagatttttttactgttaggtgtgatgctacgggtttagcggggctcggtccgttgcaaaaagtctctgctgctttgcgtgtcctcgcatatgggttgcctacggatgctgtcgatgagtacattcaaatcggacaaactaccgctagggactgtctcatccgtttctgccatgcaatcatctcatgctacagccaacgttacctccgtattcctaacagaaacgatgttgctcgcatacttcgtgtcaacgctgataggggtttcccgggcatgcttggctcaattgactgtatgcattgggaatggcgtaactgtccaactgtatggcggggtcaattttgtggccggaactcacgtccaaccatgatattagaagctgtggcgtcgtacgacctctggatttggcatgccttttttggaatgccaggaagtaacaacgacctcaacgtgctccataggtctcccattttcgatcctttacacaacgacgccatgccccccgtgcactacaccatcaatggtacacaattcaatttcggatattatttagcagatggcatatatctgaattggcccacatttgtgaaagctattcgtcacccattcgaagaaaagaagattcactttaccatgatgcaggagagtgctcgtaaagatatcgagagaacttttggtgtgttgcagtcgcgtcgggcagtactccgcgggccagcttatggttgggttcgcaatcacctcacggagatgatgattgcatgcattatcatgcataacatgattgtcgaggacgaaggcgaaggagcagaaaatgttgattttgttggtgccaccccacctcctgatctttcgactgcaattccgtaagtccggaacgagtggttgaacacgactgcctggtccgaaatgccaaatgaaggagatattgatatcacctgcaagaacacgtacctatctttgcagtacaaccttgtcgaacatctttgggcaaggcgtggttccatgggttgaagtatggctacttaattaagttgtcgagtatcagtgtaatgtgttggtgtctactttagtgtactttagtcgatgtaagcctccagttgtggtcaagataactgctgttatgtgagcgtcttggatgtaactatgtatggtttcatccatacttcaataaaatttagataatgtgtgctttgttcattagcaactaaaaaagaaaaaaaaaaaaaaaaaaa

SEQ ID NO: 13096 - DNA, 646 bp, Zea mays
  Clone ID: MRT4577_111939C.1
cattgggtacctcgaggccggccgggagagttccatggagctgatgcgaaatcaaaaaataacctatatgatcaggaacatccccctagcagtgctgtccatataatggaagaataagtccgctgccgctgccattctgctcgacgccgccgagctcgattgacttgcctctgcgaaggtcgccgaccaatgcatcgacacctactacaccgtatacactccaacgccgagatacatgaaccaccacaaagtgacagtgcatcattcaataccagagatgcactccgttattgctgcttcacatgcggcaacgtggacacggtgaacatgcttcgtgctgaacttccaaatgacgaagctccgttgctacggggacacagtgaccgaacatatcgaagaatgcagaaaccagtccttgtgcctacaacatatgtcgaatactatgagttgaccatcctactcccactaggagcataagtgtcgtgacatatcgtatatgcaactacgggacaggtgctgatagacatcatgtgtatcgtggcgaaactgcatcatgcgaaagtatccacatacagtgcagaacaaggtcgatgcacactgatgattactcaggaacatgaatccagcactttataacccaactact

SEQ ID NO: 13097 - DNA, 839 bp, Zea mays
  Clone ID: MRT4577_11193C.1
aatttgatttctccgtctttgcctcggctcaattctctccttcctcccgcgctctcgctgctccaagccagatctaggttttcgatcgatttcgacagccgccgctatgtcgtccgtcgagatcccgctgcggggcgcgagcgccatgctcgtcatgaacgggtctttcaccttcgtggatcccgtccagccggcgcagatgcgcggccccggcgggaagaagagagatcgctgcggggatctccttctcgccgacgactccgaggctgcaggttggtcgtcggcgatcctggaccgcagcctcgccctccgccgtcggcgaggcccatccccctcttccttccaccgcggctgcctcgtcgtgactgaggcgcagaacagccgtgaccaggagacagctccggcagttgtggcagaagaaatcctggatcggcaagggagtgaaaaggagccgactgtcgaggagctggtctactggacagtcatctagtcgtatcaaccaaacccccctggtcgtgctgaccaaatcgcctgaagaaggttcaatcttttaccctgtccttgtgtttattacagagtctttttgaggccatatgaatgacttgctttcttttgttttcctgtcaatgttggagcacatacaaccgaattaaactcactgatggccttcatgttgctgagtgttgaggaggcaaccagaagtaatcggattacaagtccgaaacatctagcaggataagctggaaggcaaaggctgggaagaggagtcgctgatttggtgggggatggcgaggagttcttctacttagttgccatctaggtcgaggtcttctacttag

SEQ ID NO: 13098 - DNA, 421 bp, Zea mays
  Clone ID: MRT4577_111940C.1
agggcaaaaaagaggcaaagggggttttttgggggataaaaaggggggggttataaaaatcctttccgggaatttcaacgggggaacccggggaacttggccggaagggaattttataaacctcatctttttatggcataaaaaaggcaaagggggtattattgggtttaaaagggggagggttataaaattcctttacagaaatttcaacggggaaacccggaaaacttgaccaaaggggcattggttgggatatgcaaggacctctgggtggggaaccccacccccaaaccggacagaatggggcccaacatgaacatggggatttttacgggggggccctgaacgggttccccgggaaaaaaaagggcgccccccataaaaaagacgggctgcccgcccaatgggcctgggaaccggg

SEQ ID NO: 13099 - DNA, 290 bp, Zea mays
  Clone ID: MRT4577_111941C.1
ccttcattttttaatttggatggtttgacgacggaacaggctcgcgcaccggtacacaaggaagaggaactgggcaggcagacgtgatgtgcaagcagtgggcttgggatcatacaaatcaacggaagttcaccgccagagcgaaagcacaggcgtggctccacctcgcactgtgggtggcatcgactctgccgtcgtaaacgcggagagaacacgtgtaacatgtagagtaagtttgtgcctgaaacactatgaatcaagccaaggccaggtatagcatgccccggctc

SEQ ID NO: 13100 - DNA, 604 bp, Zea mays
  Clone ID: MRT4577_111942C.1
cttagggcttagttttgtggagtctttcccctgcccttgaactcgagctcgtgtccatcgcgtgagaggaggagttctggttttcaggtctgagtaacccctttccatcaccaagtccggtctgccccggagctgtgtgccatctctgcagtttggtgaccacgcccagctgaccctccccctcaccgcggcccaggttcctcgagagctttctcagtcgtgtgggtcgcgccaccgcagatcggtaccatggacagcctcaccgtcgaccaaccagcgtgcttcttccctgagcattttcatgcgagccccgtaagctgtgtatggcactgaagcttcttccctgagtaaaagtagatttaggatttttacagcagataccaaatttcaggggattaaaatatgctcttagaaggtctatttgattttagaaataaaagtttagttccaaaaattatgaaaatttttgggaaaccttgtctttaccagctgagcacttggtccaagtttgaaattgtttggaagaaattttctcagcaaacagattgttgcccgaaaagaaaaaggattttaccctcgggtaattaggaaatgaagttgctta

SEQ ID NO: 13101 - DNA, 370 bp, Zea mays
  Clone ID: MRT4577_111943C.1
atatcaccaacggcgaaaaacggaaaaggggactgatcaaatgaaggtatgataagggaacattaactggcaggagaagagacaatgagtcacaaaaaattggccattctgctagatgaatcgggcagcggcagcagaggctctctcactaccacgcctagcggcccctgaactgaatcccggagcgcttgcgctgctgcttcttgtgcggccggcaacatgctggctaggctctaggccctgtcaccggcatcctattttcgggcagatcccgcttatggttcaatgcacaggctttaaattgattcacggtcacccccgccctgaagggaccgatatactatctcccagctaaaaccaacgcccacct

SEQ ID NO: 13102 - DNA, 290 bp, Zea mays
  Clone ID: MRT4577_111944C.1
cccactcgtccgctcacgcgtgctcccacgcgtacgaaaaaaaatataaaaaaaaaaaaggaaaaaaataataaaataaaaaaaaataaaaaaaaaaaaaaaaaaaaaaaataaaaaaaaaaaattaaaagtttatatggacgtgcattttgagctatctaagattgaaatcagttccttaaaagctataactgtattattagatgacttaattcaatttgaatgttcgtcttttcaaaacgataatgattgaaaaaaccgtgcagttaccgaagttaatcacctttgat

SEQ ID NO: 13103 - DNA, 209 bp, Zea mays
  Clone ID: MRT4577_111945C.1
tttatatataccgagtggtcactgtctagggggtcctgtgctggttcattctacggaacccgcgtcgtaggaacgaatgacatctacctcagtgaaggtgcctaggacgcaatcctggcttacggttggtctgagtttaaacgctcgtagcgattacgtgtaccacacttagcgtgtgggcccgggggcatatagcgggcttatagcgc

SEQ ID NO: 13104 - DNA, 397 bp, Zea mays
  Clone ID: MRT4577_111946C.1
cccccttcttttttttttttggtttgttttttttttttttaacgcaagccttgttattattatcttccccaaaaacaaaggggtctgaaaccccgcaccaaatatccaacgggtaacatttgacctcaacccctttgaaaaaacaaacgttcatcaagggacagggttttcgggatacctgcttattaaaggggcggcgggttttttgaacaaccaaccatttacatgctggtgggtttgggaaggggtttttgaaccttggccaaaaactcctttaaccccggattcccaggcaggtaccttttcggaaatgtaagaaccgggggggaggacccccctgccccgggcccgcccgtgggcaaaagcaattttcaataaccccgcccggagcccccgc

SEQ ID NO: 13105 - DNA, 389 bp, Zea mays
  unsure (1)..(389): unsure at all n locations
  Clone ID: MRT4577_111947C.1
ccccgcgtccggaattgtcacagcatatcagtactgctggaattagcgcctcngcaacacgagcgttggagattggnnggagggggngtatgctcctggctactttggatggggcgccggggcgcttcagccaggagggcggagaggcagagtctttcctggtcgcgtcggcgggggcgggggtacgcccggaacttaccggaccgagcccagcgggcgttccagcctgacccttgagtgaggggggttaaggaattcgtccgcagaggcgtctttgggactcacggctttgctgaattgatgggctctttggtaggaaatgaagggtccggacgtgccgattatttcctcgttgggaaggactggcccagctatattgaatgccctga

SEQ ID NO: 13106 - DNA, 352 bp, Zea mays
  Clone ID: MRT4577_111948C.1
agctggctgtaccgggccgagtccataccgagctgcgcatagaaagcagcatcacagtcctctggaccgatgcctcgattaaagaggctacgaggctgaatgcttgatgagccagagcctgtccagaagtgagcggaatctacatgacaactaggaagcaagtcttgattatcgctgagggcaggcgtggtgatatgtgcgagcccctaagcaggatacaaagaatatgatggaagcgctcagaatagccgctaccagctacaaatagcgcgcttaggccatgaggacaaaatctagacagagcatggagactgaagctgcggacaaagatgagacacctaaccgagcgagg

SEQ ID NO: 13107 - DNA, 183 bp, Zea mays
  Clone ID: MRT4577_111949C.1
cgcgcgcccccgctcacttcacttctctcggtgcgcaccgatccgaaggtgcctgctctcctacctcgtcggcgaaaagctggcggtgcgctgctgacgcagccgatcgtgccgacgcgggtcacgcagttcacgcggccccacctcgaccgctacacgtgccttaagccaagctggcgcagg

SEQ ID NO: 13108 - DNA, 380 bp, Zea mays
  Clone ID: MRT4577_11194C.1
ggcacacaacccatgaaacagggggttttaatgaatgatagggggtttgtcacccaatctgaaaccacaaggctttcagggtccccatgaattttgtgaatcattgtaaaaatacaaggtgttttattcgaatggacaaaatgatccatgcatgggaaaagacgatcttccttattaggactggccaggcgccccatggacccttattactcgacgctttggacctttgcggaatgaaacacataggtggccactatctctatcagggccaggttgttgtgatcgttgaaacctggattgactggtgtgactgggcctcctctcacattgaaagatgtggaacgggttatattatgtgtcactacagaactgctggtccc

SEQ ID NO: 13109 - DNA, 901 bp, Zea mays
  Clone ID: MRT4577_111950C.1
agggccgcgtcgaccaacattctcctgggtcaaaatctgcaagctaaaatagcagattttggactttccaagacatatttgagcgatacacaaactcacatatcagtcactccagctggcacagctggttacatggaccctgagtactacctgaccggaaggctcagtgagagcagcgacgtgttcagcttcggaggtgttctgcttgagggagccacaggcgagtccccgacatcgccaggccaaggtcacatcactcagcgcgttaaacagaagattgccactggcaacgttggctcgatcgctgattcgcgacttggaagtgcctacgacatcagctccatgtggaaggtaatcgacaccgctgtgatgtgcacggcggactctactgctcagaggccaacgatggccacagttgtgatacagctgaaggagagcctggcgttggaggaaactcgtgaaaagggaagtagcaacagggtgagccgagggagtgatgtagaaactatggcgtccacacttggtccattcgcaagatgaagctgtgcctgtacctggattcagttcatggttgacgctcgtgaactccttgtcatgtgaagacaactagtagcgtataattgtgggctgttttgaaccagcaattgcttgtgtgtgtatggactttgacaaaaatttggtgtgagcttgcagcttctccagaatccaaatgtcatgctctgtatgtatcttttgtcaaagatttcccgtgtctagatagaactgcatggaactaatttcataaaggattgcctttgctgcttctccagaatccagatattatgagctccacatgctctgtatgtatatttgacaaagattttccgtgtttgtatgtaattgcatggtactaataataaca

SEQ ID NO: 13110 - DNA, 291 bp, Zea mays
  Clone ID: MRT4577_111951C.1
gggcccgggacgagatactagccatcatgcgcctgtcgtccctcctcctcgtcgtggccgccctctcggcgcgcgccgcggagcagcaggtggagtcggcgggcggaatgacactacacatgtactgcaagtggacttagaaaatactgtgtcggcgtagaggaatcgatcctccacggttcgagacttcgccttaattacataaattaattgctatgatcatgtcacccagtccaacgacgtatgtatgcatgcacacacgcgttaattaatccttgcctatttactact

SEQ ID NO: 13111 - DNA, 837 bp, Zea mays
  Clone ID: MRT4577_111952C.1
atggagactgacaggtgggcctgcctcgctgggggggcatcggtcgtcgtggtcaaccgtgacttacccccgggctttgggtactcgaggacttcgcctcaaggtgagcatactagtcatagtagcaggtggcagaaaaagcagaggaccaatgtgcgcaccttggccactcatgtccacactgtatggtgcaaggacatatcgcatggacagggatggggttcatgcgaatggtcgactgcaacaagcggacggcatggcgcatgcacatggatgagcgatgactggggcttccgagacgagtggagacgaagcagatgtcgcgaaggcgacagcgaaagcatgatgtcctatgggataatgggagtgaccacgacgcctgaaattgggcaccacagacaaccatgggtgcggacaacgactctgcaggagtggatggaataccagaaagcagtatcatattatgcaaaggcactcacttttccaaccaaaagtttgagtgcatttgctggtcttgcttacacttatcatcttatggatgattttgaggctgccataaattattaccataaggctctatggttgaaaccagacgaccagttttgcacagacatgctaacatatgctcttgagtccatctgccaaatcactgctcgtagaaagcctggtcgagaaataggcagcgtccgaggacgctttgtaccagccacctacactatggaaaaactggggagagaccggagttgcaagatcaggttgttcagaggtatttttgcaaatcctaatagaaatgcatttacagaaatagagcatcgtgtcagacaagaaataggttag

SEQ ID NO: 13112 - DNA, 361 bp, Zea mays
  Clone ID: MRT4577_111953C.1
agtcgcactaggaacttactacattcttgctctatagaaactgtcaggcttgtgagagttctgttatgtaccgcttcttttctaaagaaaaatagtagagttttagaaaacataatgaatacagcttcttttattgaactcttagaagtactccagccattgtagtttaatttatctgcatacagttggttgtattgaacactgggacaccctgaggtctttgttgttcaattatgattatatttctgtatactttatttttaatggttaatcaaaatgctagcttatataatgctccctcaaatgcaggttgcaatattttccagcatagcttgctcacctacttctcaatttagaagac

SEQ ID NO: 13113 - DNA, 347 bp, Zea mays
  Clone ID: MRT4577_111954C.1
gcagcgagacgatcgcctgcgcacgcacgttagcacgttgtggtcaagatacaggtgagaagaagagaccagagcctgatcgatggcggtccatgttctcctctctggccgctcagtgctgggcagccccgtgacattcgtccgtgtactgatgtcctcggtcgaggaagggtccctccgccggcagggccatgtccatgcccccagagcaagcacaggcgccgacaggcagctgtggttcgcgtttcagcaggccctctcctacctctatggcactgtgacaggagacatatggcttctacccgcgtgggcctctcggacccggaggccaccgggggccttatccc

SEQ ID NO: 13114 - DNA, 257 bp, Zea mays
  Clone ID: MRT4577_111955C.1
cccacgcgtccgcgctcgctctcgctctcgctctcgtcaggcacaggcacgcacgcacgagtgaacacaggcgcgatctcctgctccctgcctccctcgttctcctctgcccgtgcgcgctccagggcacacacgtatggagcgtgcgagcaccgtcatggaggagggcggcggcggcggcgccgcgcgcggccgtggagcggtgggagggctacgtggactggaggaaccggccggcgaccaggggccggcacgcg

SEQ ID NO: 13115 - DNA, 903 bp, Zea mays
  Clone ID: MRT4577_111956C.1
gccgagtacattgagaacctcgatttattaaaaaaaaaaatatcaagcgaaaaaaagaaatttccctgctctttccgtcgcctccgccgtcgccgtaagactgtcgatggccgcagccaccgccaccgtcaccttctcgccatctcccccatccttcctcaactcccatatccctcgtggccaccgacctgcctccaccacgacgatagcttttgcacgccgttttcgcggtgtaaaacctagtcccgatcgctcccgaggcaaggtcgaccaggtcgcccaccccgacgatggattcggcgcactcgaagcggagctctggcgcctgcgccgcctcgtggagctaaagatccaccgcctcggcaccgaggccgacgccgcctaccgcgacctacgctcggcggtgcgcgaggtcagcggagaccgcgtcgtcctaaccttccgccgctcgtcgctgcgctacctcaccggagcactcctcttcttgctcgcctgcgccatcgcggcgcgattgctgctggggatggtcttacgggcgtggcagcggcggggtttgaggaggggattgtggggtgaaggcggcagggcggttgtgcgaaggagggaccgcagcttgggagggaaggaggtggtggttgctgtgtcgtcgccgcctaaggaggcagctcggaccagtcgtgtcgcagagccagcaaaggaggtctggagggggtactcacaagctaagttgccagactggtggcccaatgttggagcgacggtgatggaaccctggcagagatggagaagtgggcaagaatggcaaacagattggtccgaggtgaatgcctgtaaattttcattctaggttgctggcgtaaatctgaatgtgttgcccaaatgcaccaggctggaacatctttt

SEQ ID NO: 13116 - DNA, 2680 bp, Zea mays
  Clone ID: MRT4577_111957C.1
gcgagaggacccaacaacagcaggggacagtgagggcgaagggagcggcaaaagaccgggacaacagcaggtccccggccatcacgcacccgctgcccgcgggccgcaaggaggagccgacagcagaggcggcccccgaagctgcgccggagtcagtgcagagggtcgcgggcacgcccgccgcctccgcgggacccggcgccggcgagcgcccccacgggggagcgggaggacagcagccggagcaagggctggccgggggcgttagtgtgggctaagaggaggaaggacgtaaggcacagccgaagacatccctgggcaccagcccgcgaccccggcgtgatcgcgggagctcccgtcatgtcgcggtccagcaacagctccgggtgagaagcgggcggaaggggttgcagccgagtcctcggccgcgatagcagccgcggcgggcacggcacatcgcggcgcctgagggcgcgcgcccggggcgcctcaccccggggctgccgggtgtacgcgcgcacccatgccgccaccatctccgcctcccccgccaggacgcccggtgccagaacctggatcaagaaagagtccggctgcgcgggcacgagcaaccgcagcgcatgccccagcggcacccggcgcaacggcggccaggccgagctcaagcggcacgccaagcgctgcggcccccgcgagccccgctccgcgcgcgccacgctcttcaccagacgggacagcgtcgttacgcatcgcgccttctgcggcgctctcggggcggagaccggcagggtgctggcgccaccagcgccgccatcgcctcggccgcctgatttggaggctgacgaaaagggtgctgatttggaggctgacgaaaatgttgacaaggacaacggcaagcagggggaggaggagaatgaggattctgccgtggccgaggtggaggagcctcagcgtgtggaggtggtgccagaggagccacagcgcattccatctccacctccattgccgaaggagccaccgtgccgtccgtccccacctccattgccgcaggagcaactatccccacctccctcgccaaatgagccaccgtgctgccatccgtctccacctccactgccaaaggagccacagcggcttccatttccaccggagcagcatgcagttgtggtggcattggtgccaaatgtggatgagccagaggtggttgctgtgccaagtgtgactgccgaattagaggatgaaaccgatcaagacgaagatgcctgtttcctggaagctgatcagtacaaggactcggagcttgaggtctccaatctgctggacaaggacaccccgatgcttccttgcttcctcgcgtcgccctcggaagccattggcaccgatggaagcggcacaacaacctgcggcgcaggtggcagcgtctccaattccatcgcgccgtctacaaccaccaacaccttcgccggcctcttcgcgtcggccacaacaagcaccacttcccacagcacatctctgcgcgatctcatcggcgtcgatcccaccttcctctgcctcgcgatcggagcgccgtctctgttcccgcagacgggcgcgagcaactcaggcaccttcgccctgctgccgccggcgccgcacatgtccgcgacagcgctcctgcagaaggcaacggaggctggagcgacgcagtcgagctcatcgttcttgaaggagtttgggctggcctcttcctcctcctcgtcgtcgtcgcaaccttcatcgaagcagaatcatcatcaacagagggagatggagccaagtttgcaacaatggcacccctctagtacccagcaaacggagatggagcgccgccaccggaatcatcatcaacagagggagatggagtccagttcgcaacaatggcaccgccaccaccggaacgaccggcagatggggccggagagctaccggagtaatcagcaaatgcagatggagtccagctcgcaccaatggctgcaacacagaagctctgagcaaatggtggggcggcggcaccacctggagaggggggaatccagggggatgctgctgtctggtggccttggtctgggcctcgcatacgaaagtggaaaatcaggcttgcctgatctgatgacaggaccatcgccatcgccatcgccactgttgggtcccaagccagccacgctggacttccttgggctcggcatcggcgggaccatggtcggctccacgggcctcccggcattggtggctggaggagagctggacatggggtcgtcggcgcaggtgcctgccccatgggacgacgcccagaggaaggccaacggccgcacgatcctgtgaggttttctccttttttttgggtgacctgaccttcttagaggagttcggtttgcccattctttttcagtcgcagctttgcttttggtggggctagaagctctgtgaggtgtagcagtgcagtgcaggcctgtacatagctcgacctcgacgctcctcccgatcctgcatctgtgttgtgtctgaaaaaacaccgagttgaggctgctattatagccacaattcgatcccggcaggatggatggaaatggaacctgactttgatttgatgccccgacgctttgggataatcggatgtgacggggcaacagggttattataaatcttgcggtgataattcatt

SEQ ID NO: 13117 - DNA, 448 bp, Zea mays
  Clone ID: MRT4577_111958C.1
ctgatttgggatttttaggcctgtttgggacgcagaaattggaaaacacaggaacaggatgctctaacatcttgaatcctatggattgagaaaatcatttggagcacaggaaaaatacgccaattcgatgagaggctgacacgaaggaaactttccatgaggttcaatctcttcagtaaattcctccaaaattcctatgtaacaggccattacataggaattgcacgggatttgtcaaaacccaatcctttttccccaaggggttattcctatagggtttcaatcctctactggggtttggatactacatggggaatcgattggtttcctgccctggaatcagtttcgttaccggcaaattttgtgttctcgctctgaccagccgcgaaggccaataacatcttccaacaaggatctactcaacagtaccgcgagctgtttggtgagg

SEQ ID NO: 13118 - DNA, 680 bp, Zea mays
  Clone ID: MRT4577_111959C.1
cagcaaaaggtggcgatggagaggggggaatccagggggatgctgctgtctggtggccttggtctgggcctcgcatacgaaagtggaaaatcaggcttgcctgatctgatgacgggaccatcgccatcgccgtcgccactgttgggtcccaagccagccacgctggacttccttgggctcggcatcggcgggaccatggtcggctccacgggcctcccggcattggtggctggaggagagctggacatggggtcgtcggcgcaggtgcctgccccatgggacgacgcccagagaaaggccaacggccgcacgatcctgtgaggttttctcttcttttttttttgggttcggtttgcccattctttttcagtcgcagctgtgcttttggtggggctagaagctctgtgaggtgcagcagtgcagtgcaggcctgtacatagctcgacctcgacgctcctcccgatcctgcatctgtgtctgtgttgtgtctgaaaaacccccgagttgaggctgctattatagccacaattcgatcccggcaggatggatggaaatggaacctgactttgatttgatgccccgacgctttcggataatcggatgtgacggggcaacagggttattatatatcttgcggtgataattcggatactgctgttggaaagatccgagattagacc

SEQ ID NO: 13119 - DNA, 702 bp, Zea mays
  Clone ID: MRT4577_11195C.1
ccactccaaataggctcgacacacactcccctcgctctgaatccggcggcgtgaaagccttgcggccttgccttgccttgccttcctgcgagcgcgaggaccacggctctccttcccttcccggcgtgcaccgtagcccgaagaccgtcgtcttctcgcgtctcacgccgtttggtgcgttcccgttccccgcgtcggcttgccgtattttctgcacgggtgtcactgtcatgtcggacccgtgaagcgattccgtcgcccatgggccatgaccctgcctgggctgggagaacccaaccgcagcgtcggcaagccaagtcgatccctatccggctatggctgcccgctatccccaggcgctcaggcggcggcgtatccgttctgttgcagacagcaggtccttcctagtagcgccaacggccggctactgcacaagttgccccggatgcgatgtgccaagaaggcggtgacgacgagttcccccttccccgcacctacgtgctctgctacgggagccacccttccgcgttggtctcctcgggtacctatcacggctatcacctaccttgccaatctgagtgtatcatatattctttattttattatccctataccatgacgttttccccatacatatgttgcctctggaaaaaaagatgattaatttgcttttagcttatggtttggcatcgtttatactac

SEQ ID NO: 13120 - DNA, 950 bp, Zea mays
  Clone ID: MRT4577_111960C.1
gcccccaccgacctcctttgtctccccctcgcccagcgcccacctcttccgtcctcctgtttcccgtcccgcacagcgctacgcacacagactatttctctctctctctcgccctctatcgctcgtccgatctgcatctgcttttcttcccccctccgcgtgtcccctgtcccttccggcgtgcgcgaagatttgattttttttttgtcggggagaaggcggagtaagacagaccaggccgggaggaaggagatcctgatctgttcttggagtggggaggcgaggagaggagaggaggaagatggcggcgcaggagcacgagcacgagcacgagcacgagaagcagcaggcgaagacgagcaccacgagctcgctcccctccagcagcgagcgctcctccagctccgcccccaacaaccttagggaaggaggtaggtgccgctcccgcgcccatcccacgcaccgcccaccctctcagatctcctgcaccatctctcgtttcgtccgcaagccccttagctgaagctgccggcgcaggcgtggagagcgacgaggagatacggcgggtgccggagctgggcggcgcgtcggcgtcggcgtcggcgtcgtcgggcgcgggcaaggaggacggcgcgcgggcggtggccgcgggggcgcaggggcaccctccggcggccgggaagaagcgcggccgcgccccgggggacaaggagcagaaccggctgaagcggctgctgcggaaccgcgtgtcggcgcagcaggcgcgggagcggaagaaggcgtacctgacggagctggaggtgcgggccaaggacctggagctccgcaatgcggagctcgagcagcgggtgtccacgctccagaacgagaacaacacgctccgccagattctgaaaaacacgacggcgcacgccagcaagaggagcggcggcggcggcggcaagggtgga

SEQ ID NO: 13121 - DNA, 1205 bp, Zea mays
  Clone ID: MRT4577_111961C.1
aattcggcacgaggatcgcctcggccgcctgatttggaggctgacgaaaatgttgctgatttggaggaggctgacgaaaatgttgacaaggacaatgacaaggagggggaggaggagaatgaggattctgccgtggccgtggtggaggagcctcggcgtgtggaggtggtgccagaggagccacagcgcattccatctccacctccattgccgaaggagccaccgtgccgtccgtccccacctccactgccgcaggagcaactgtccccacctccgtcgccaaaggagccaccgtgctgccatccgtctccacctccactgccaaaggagccacagcggcttccatttccaccggagcagcatgcagttgtggcgttggtgccaaatgtggatgagccagaggtggttgctgtgccaagtgtgactgccgaattagaggatgaaaccgatcaagacgaagctcggggtttccaggaagctgatcagtacaaggactcggagcttgaggtctccaatgtgctggacaaggacacgccgatgcttccttgcttcctcccgtcgccctcggaagccatcggcaccgatggaagcggcacaacctgtggcagcgtctccaattccatcgcgccgtctacaaccaccagcactttcgccggcctcttcgcgtcggccacaacaagcaccacttcccacagcacatctctgcgcgatctcatcggcgtcgatcccaccttcctctgcctcgcaatcggagcgccgtctctgttcccgcagacgggcgcaagcaactcaggcaccttcgccctgcctccggcgccacacatgtccgcgacagcgctcctgcagaaggcaacggaggctggagcgacgcagtcgagctcatcgttcttgaaggagtttgggctggcctcttcctcgtcgtcgtcgtcgcaacctccatcgaagcaggcgccccaaggaagggtcggcgccgccgataccagcgcggaaccaccatggccgtaccggagtaaccagcaagtggatatggagcgtcaccagagtcatcaacggagggagatggagtcatgttcgcaacaatggcacccctctagtacccagcaaatggagatggagcgccaccaccggaatgatcaacagagggagatggagtcatgttcgcaacaatggcacccctctggtaccagcaaacggagatggagcgc

SEQ ID NO: 13122 - DNA, 367 bp, Zea mays
  Clone ID: MRT4577_111962C.1
gataattccagcaagcccatcgcctgaacattagaatcttgcaatatacattctggatcccattgccacatagctttttcatcgagcttgctccatggactgaaaccaccatatttctactacattggatcctcaataaattcacatactgaacatggaaggaactcctcttcagtgttttcttagggattgtggttgctcatcagatatggttctaaggcacgatcaacattctcagtgctccagaataatagcatattcctgccatcttttctcttgctgataatatcttcactttcccaataattctgttgatcacttgtagcagccctggaaatgaacccaacagaataacatttcgttttat

SEQ ID NO: 13123 - DNA, 1313 bp, Zea mays
  Clone ID: MRT4577_111963C.1
acacagactctttctctctcctcccctctctcgtcctttctctctcgtccgatctgcatctgcttttctccccccttgtctgtctccctcctgtccgtggcgtgcgcaaagatttgattttttttttttctcggggaggagccggagtccgagcaggagtggcggcgggagggaagagatcctgatctgttgtcgcagcggggaggggaggaccggaggaggaagatggctgcgcaggagcaggagcaggagcaggagaagcagcaggcgaagacgagcaccacgagctcgctcccctccagcagcgagcgctcctccagctccgctcgcaacaacctcacggaaggaggggcggagagcgacgaggagatacggcgggtgccggagatgggcggcgcgtcggcgtcggcctcgtcgggcgccggcgcggacgagcgtcccaagggggaggacggcaagcaggggcaggtggcggcgggggcgcagcctccggcgggcgggaagaagcgcgggcgcacggcgggggacaaggagcagaaccggctgaagcggctgctgcggaaccgcgtgtccgcgcagcaggcgcgggagcggaagaaggcgtacctgacggagctggaggcgaaggccaagggcctggagctccgcaatgcggagctggagcagcgggtgtccacgctccagaacgagaacaacacgctccgccagattctgaagaacacgacggcgcacgcgagcaagaggtccggcggcggcggcggcggtggcggcaagggcggagacggcggcaagaagcaccacctcgccaagagctagtgagaaacgagagagggagctggttcgtgccctgctcgcgctcgcctgatctgaccattgctggcgtgttgctgttcctgacgacgccttctctttttcttctttttctcctactgttacccgtgggtttcgtctcttgcctcgctgatgcacactgttttaactgttagccatcccgtctactcaccagtgaacactgctgctagttaatttctcggtggtttagggtgccgtgccagaacgccgtgtaacttcgttcttgtactgtcctgtgtagttcagccttgcggtttggcaattcgattcaagattactgtacgctgccagctcttggagagaaaaaaagaagttttcggtgcatgtaaataaccatgcgcgggaaagaaaaacgtgataacaatcacacgacgtcaagcggcgagggtctgaattaaggtcatggttgtttacctctagtagattatataatacaacttaaataaagtaacgatctgttt

SEQ ID NO: 13124 - DNA, 355 bp, Zea mays
  Clone ID: MRT4577_111964C.1
gttggagccccctttccccagcccatccattaggccagcaacgcttgtagaactcactctgggctgtaacgtggcactggtaggttgggacaccagggaagaagatcaacgcctcactgaaacatggctgtgtttgcagcctgctctagtgggacagcccagagcctggctgcccatcatgtggccccacccaatcaagggaagaaggaggaatgctggactggaggcccctggagccagatggcaagagggtgacagcttcctttcctgtgtgtactctgtccagttcctttagaaaaaatggatgcccagaggactcccaaccctggcttggggtcaagaaacagccagcaag

SEQ ID NO: 13125 - DNA, 548 bp, Zea mays
  Clone ID: MRT4577_111965C.1
gtataatagattttgtatcatatttattcgcaatggaagaaaaagtcatatctgaataattattcgtttttattccccattccagtttccagccaatcatgctttctcgcttgctcgctagagctccgccggccgccggcgcagctgaatcgccgcctgcttcgctcctccctccagaaatattggctgcgccactgcggcaaggtcatggcgcacgcgcggttatgtgtgcctatcgcctcccggagccgggcgcgaagaggagaaagcgaacaaggtagcgcagctgctgccggaaatggcgtagcgcgaggtaccgtcacgaagacgccatggaccgtcaaaccttgttgagggagaggtgtgaatggttgtactcggcggggggcgttatttacagtctgtgccggtccgtgtgctgtgctgtgcctgcggaagggcgggcgggtcgaaggcgtttgagaaaatgctgctgtcagcgttaacctcctggaagggccagaacgcatgcagcgcctcaactcgtcactccatcagcacggtgagcc

SEQ ID NO: 13126 - DNA, 641 bp, Zea mays
  Clone ID: MRT4577_111966C.1
ggtacgtccgggccggccgagcgaattttcccaccgctcagcagtgacctcgttcccgtcctcctcgcatccctctcgtccgccgccgcctggctcgcgccgccgacagtttctcggcccagatcgagacacgcccgccatcctacaccaggtgccgaggccttcgccgatcaaagagatcccagacagcagatccgtccgtgccctgctcctcgaaccatggggacctctgcccaggaatcgcctctctggaagcgtatcgacgatgccgagtactatctagtcagtggatcatttgaccaggcggtgttgactgctttatccgtcgccgatgaaatacacatggcttctttggagagcgctagcgaccaggatgagctcctggagatgcttgaatcggctgggatggtgcttgtgcaggcactaaaagaactcaggagggcctctgagatgtttgctcagcttaagatgatgtttggttcagtgccatcagtgcctgctagagttttccttacaggagctaccattcaaatggcagaaggatctatatctgacctcagaccaatctttgaggagtaccttgccaattggaggtatacggatgatgagggttatgttttttatggaggaaatgacagcac

SEQ ID NO: 13127 - DNA, 585 bp, Zea mays
  unsure (1)..(585): unsure at all n locations
  Clone ID: MRT4577_111967C.1
gccgggacgagggcctcggtgcttatcgccactctcgctgattatgcttgaacgggttaccggccaatttgggctggttccaatcaccccgacttactgacggtgacctctaggggggacaggctgcggggcgtacggagcgatcaccctcacatgaggggcggggcacataatttttttttttccgcggctgaccacgcctgtccagcacgacttattgagtcggngagggcgccccccccacaaggtgtgntgattgggggttgttccgcgttcttactcactgactcacaaaaaaaaaacgctcggctgaggcaagcgcgttacacttcactcgtaggcgggactgccgtggtgcaccccgtcggcgttggcggcggcacgatcatggagcatttggccacgctgaggcccggaaccgtagaatggccgcgttgctgcagtctttccgtaggcttggtcctcctgtcgagcctggcggaaatcggtgctcggtgtcggggggggcgggcctggacagggctgttgggatgcctggcgttctgccgctgcgtgctccctggggcgccttgctgtggcggccct

SEQ ID NO: 13128 - DNA, 343 bp, Zea mays
  Clone ID: MRT4577_111968C.1
attcggctcgagctggatccttcaatctgttttttaactgcggacatttaccaactctcgggggatttttaaatatggggggggtggacagggttattgccaccctacttggctccctcttcctttaaaggtgtggaatcctttcaatccttcccccagattaaaactctaagtctagaaataaaaaacattcagatgcctacctagttttctaaactacaatactccgcttcaacgcacggcctgcttaccgttaacacaacatgctgcgttagccacatagatgttacccacagcacaccacagaggtacgacgtggtgattttatgctacctggagggga

SEQ ID NO: 13129 - DNA, 178 bp, Zea mays
  Clone ID: MRT4577_111969C.1
gatgtggagaaaacacctttcccttctagttttgagagacttcctcttggctcccaggatgagggattccctgactttgacatacatggccaccttagcacaaaagccttgtggtatagactaacaaatttggttttatgtcctacttctccctttccatctttcagcagagacttaa

SEQ ID NO: 13130 - DNA, 545 bp, Zea mays
  Clone ID: MRT4577_11196C.1
ttgggtacctcgaagccggccgggacattctccccagcgaggagacctgacggaggtgatagaactgaacaggcactggtaggtatacatatacagctgaccgcgtagtagcgatgcaaggacacatcgacggcgtggagcgtatagcacacgttgaagcctatggttgccttccacctagcagacggacgcgatgctcaagaatccgcaaaggcctacatgacttcatcgtcttatatgtccgtcaacaagcataaggctcatgatgtaacgtctgtagaacatgggaacgccgctctacaggaaattaaatcctacacagaactctatctcgcagttctactctctctatactgtatatgcagaattcctccaatacagcacgtcaaaggcctcgccatgcaaaaactttatagaacggatgctgatgcagcacgaaaatgagaggaagttaacaatttctgacgcaacctcccctattctgtatcatgattcagaatgccaagtgacaatgtttcaggcctccctggagataccatacccta

SEQ ID NO: 13131 - DNA, 1321 bp, Zea mays
  Clone ID: MRT4577_111970C.1
cattgggtacctcgaggccggccgggcagtacgttgtgcgccgcgggagcgctccccttctcctcccttctgaacagcttttccgcccgtctccactgttcactctccagttgcgacttgcgagtcttcctgcaactagcgcgcacaccgaattgttggcaagagagaaacccttcctcgtcccgttcaaccggcgccgccgactcgcgtgttcctccccgcgtcctcgttctccttgctgctggacccgctagtggggatcgacctgatttctcctgtgctgtcaattggatattacccaggctttcaaggtagaaaagaagctttttgttccatcatggccttatcaactccagcgtctattttggttgacgagaaccaacagataaatagaggtaagagggccgatggaccaagggccaaagggctgaagccatccgagaatcctggcaatcaagggaggagagctcttaaggatttgtccaacttctctaaaggcactggtttgaaggacacttccaccctgaaagagaagtcccagcagaagcctcgtagtaatgtggccaacactattaaaggcaatgctttgaaggacaagcccatcctgaaagagaagtccacccaggaacagaggtcaaaagctcttaagaacccaatgaaaattttagttgatgaagagatcaaaatgtgccatgagtgggctaaggatggggtggagggatttcactcaacacaaaataattctcaaaagttggataaggatctgctagacaaacgtgtcaagaagaaagtggcggcagtaaactcagccttgtgtggttggccagatacagtatttgattctctaatgtatccatctatggaggttgctgagcttttttatgaacaaaacgtgctggaggtggaacctgagattctcccggacatcagttggcgtctctctagttcagtagatggtaaagcaaagattgctgaagaccgtcttaccgatgatgagcttgaccagtaccattctttggagaacaatccaattatttttgagctgagagacgagccagcgatcccgcagctgggagtgtattgaagaatctgtgccagctggacagaaagctctgtttccttgctgcttgctctggagtctggagttgtctagtctagaatgctagtaggtcttgaccctggtgttttccccagctatgttctggtgatgtaggatttcagtttgagtactggtaccagttccagctagagatggcaacgggtacaaacccgctgtgttttgtcgtcacaaacccgtacccgtgaaaaatatttatgccca

SEQ ID NO: 13132 - DNA, 356 bp, Zea mays
  unsure (1)..(356): unsure at all n locations
  Clone ID: MRT4577_111971C.1
cacactacctcttccgaagcgagaatcacgtggaaacagtcgcggcaagtgctgccgagcggcnctgacaaacactgctagtcatataccgatctcgactcaatgtattttgctgaattcccaaaagcaactttacctgcatcttctaacacatcattgaccacagatattggtgcctatgctgcgggctcttaaacgctttctcgtgcgttctcaaatcgaacttactgctacgagaattcaactgctactcggagctcttaatgttatatcagatacaaagactgcaacatcttatatctgcaccatctgctcaacaaacacaccagatttgccacatgaaaagaagcaattta

SEQ ID NO: 13133 - DNA, 1361 bp, Zea mays
  unsure (1)..(1361): unsure at all n locations
  Clone ID: MRT4577_111972C.1
aaaatctgaccgttgtgcagcgcaggagcgctccccttctgaacagcttttccgcccgtctccactgttcactctccagttgcgacttgcgagtcttcctgcaactagcgcgcacaccgaattgttggcaagagagaaacccttcctcgtcccgttcaaccggcgccgccgactcgcgtgttccttcccgcgtcctcgttcagtcgttctccttgctgctggacccgctagtggggatcgacctgatttctcctgtgctggctttcaaggtagaaaagaagtcttttgttccatcatggccttaccaactccagcgcctattttggttgacgagaaccaacagataaatagaggtaagagggccaatggaccaagggccaaagggctgaagccatccgagaatcctggcaatcaatggaggagagctcttaaggatttgtccaacttctctaaaggcactggtttgaaggacacttccaccctgaaagagaagtcccagcagaaaactcgtagtaatgtggccaacactattaaaggcaatgctttgaaggacaagcccatccntgaaagagaagtccacccanggaacagaggtcaaaagctcttaagaacccaatgaaaattttagtntgatgaagagctcgtccgatgccatgagtcacaaaataattctcaaaagttggataaggatctgctagacaaacgtgtcaagaagaaagtggcggcagtaaactcagccttgtgtggttggccagatacaatatttgattctctaatgtatccatctatggaggttgctgagcttttttatgaacaaaacgtgctggaggtggaacctgagattctcccggacatcagttggcgtctctctagttcagtagatggtaaagcaaagattgctgatgaccgtcttaccgatgatgagcttgaccagtaccattctttggagaacaatccaattatttttgagctgagagacgagccagcgatcccgcagctgggagtgtattgaacaatctgtgccagcaggacagaaagctctgtttgcttgctgcttgctctggagtctggagttgtctagtctagaatgctagtaggtcttgaacctggtgttttccccagctatgttctagtgggatgttggtgatgtaggatttcagtttgagtactggtaccagttccagctgaagcgacagccttatgcctgctgacgggtgatggttgtggaacaacgggcgatataattctaatattttcagcaaactagtctgtggtctctatatttattctcgtgaatcctaaacggtgctaagtttttttggcccttaaaaaaaaaaaaaaaagcggccgctctagaggat

SEQ ID NO: 13134 - DNA, 422 bp, Zea mays
  Clone ID: MRT4577_111973C.1
ttggtttatttcaagaacccgaaaaagaaagctcgttgtcggtgtccagggaaaaaaaaagatgaagaaaactggtttgggtacgtacggtgacggataatgaatcacatcgcacatatatatgccctggtggttgcaaatttatgccgacaccgagtggtagctgtacttaaccagtaagtactgctgcttgcagctcagatggaccggccgcccggccgccggattccgccgtgatctctctctgcttgtccctcgccccaccaccacaccacaccgtaaaggtaggtccatggccaaccaacaaccaatcaaccgaagcagcagcgcctgaaccgctggcactttaattctgacgacgacgacgacgacgccttgattagcctgcaaatactactgcatgcatctgccgcatgccgccg

SEQ ID NO: 13135 - DNA, 2077 bp, Zea mays
  Clone ID: MRT4577_111974C.1
ccggccgggcatggaccgcctgcctggcctatcaaccttgctctgcacaacaacagcttcaccggcgccctgccgccgcagatagggagcctgagcaacctggaggtcctgtctctgttcacaatggcctaaccggtggaataccgccggagatcggcaggcttcagaagctgaagctcttgttcctctacgagaaccagatgtccggaaccatccccgacgagctcacaaactgcacgagcttggaagaggtggacttcttcggcaaccacttccatggtcctatccccgaaaggatcgggaacctcaggaacctgaccgtgcttcagctccggcagaatgacctgtcgggccccatcccggcgagcctcggtgagtgcaggagccttcaggcgctggcattggcagacaaccggcttaccggctcgttgcccgagacgttcgggcagctcgccgagctcagcgtgataactctctacaacaactccctcgcgggccccctgccggagtcgctgttccagctcaagaacctgaccgtgatcaacttctcccacaaccagttcaccgacagcatcgtccctcttctcggctcgacctccctcgccgtgctggcgctcaccgacaacagcttctccggcgtcatcccagcagtggtcgcccgatcaaggaacatggtccggctccagcttggcggcaaccggctcaccggcgcgatacctgccgaactaggcaatctgacaaggctcagcatgcttgacctttcgctcaacaagctctccagcgacatcccggcagagctctccaactgcgttcagctcgcccatctgaagctcgacgggaacagcctgacgggcaccgtccctgcatggctcggcagcctcaggtcgctcggcgagctcgacctctcgtggaacgcgttgactggaggcatcccgccggagctaggcaactgctcggacctgctgaagctgtccctcagtgacaaccacctcaccggaagcatcccgccggagatcggcaggctgacgtctctgaacgttctgaacctgaacaaaaacagcctcaccggcgccataccgccagcgttgcaccaatgcgacaagctgtacgagctgagactgtcggagaactcgctggagggaccaatcccgccggagctcgggcagctctcggagctgcaggtgatacttgacctgtgccggaacaggctctccggcaagatcccggcgtctctcggcggactcgtgaagctggagcggctgaacctgtcatccaaccggctggatgggcagataccgtcctcgctgctgcagctgacgagcctgcatcgcctgaacctatccgacaaccacctctcaggcgcggtgcccgcggggctatcgggcttcccggcggcgtcgttcgtcggcaacgaactctgcgccgcgcctctgcagccgtgcgggccgcggtcgcctgctactgctaggcggctgtcgggcacggaggtggtcatgatcgttgcgggcatcgccctggtctcggcggtggtgtgcgtggcgctgctgtacaccatgctgagggtgtggagcaactggcgggcggtgtcggtgtccaactccgatggcgaggagtcggcacatggtggcggcggggggaagtgggtggacggcaagtacaggaaagtggggtcatcggtgtcttggtcgtcggaacagaagcacaactcggggtccgagaccaccagcgtgctccatggcaagtccacggaggccgccggcgccgggaagagctagctgctcgcggcgtggcagcagtgaacgtcactttttcttcctagcgagctcaaaagccaaaatgtatgtgtatcgatgatcgtctcttgatctcctcttgtttccgtgtgtgtttttctttgattaattgttactgcttccgccacaaaaaaaaaaaaaaaaaagaacaaaaaaaaaaaaaaaaaactcgacgccgggcatggctcggcagcctcaggtcgctcggcgagctcgacctctcgtggaaccgttgactggaggcatcccgccgagctaggcaactgctcggacctgctgaagct

SEQ ID NO: 13136 - DNA, 375 bp, Zea mays
  Clone ID: MRT4577_111975C.1
gcggcgcacagtggcgtgcacgtgctggtccggagaggttctcatagaattttctcttcaccactcaatcatatctacttacacaagcagtcaagcagtgaacaaagaagaaatttcttttttcggagacaaagagatatttcacacagtatagtgctggcggctgcagtttcttcagctgatccgggtcctaagcacataaagaagccagactatgtgacgacaggcattgtaccagactggggagacagcatagtagttcagagtgaagatcagattcaggggcttcatcaagcttgtcagctggcccgccacgtcctgctctaggctgggaagagtttaaagggtgacatgacaactgtagagatagatgct

SEQ ID NO: 13137 - DNA, 716 bp, Zea mays
  Clone ID: MRT4577_111976C.1
ccggccggaaaaaactacctcaaactttattttctattgaatttctagagtttgattgttgaagatatctcctcctatcatgccgtcagcaactcgtcaagaccagatcctattggatccctgggaccccagctcaacagagcacgtcaatcgtatctatgaacagagagttcaatgcggctgggataaacagcgagtcgacggatggaaaacgaagcagacctcaggagaaaagtgtatattttggattacacttcgaccggagaaccctcagacacgcgaatcccttgaacttcatttcgatgcattccccgctgagaaagaaccattggtagacaccgccgacagcctccgagccaagccacgaacgccatcacacacaaagttttacccagtcggccacatctcgcttgaccataccaatgagaagatgggagacttcgttctggaccttcccaagaaaggagtctattggatcaaaaccttttacatttccaaagcactgcgaagcaaaggcatcggacgcgccgctatggaccttgttgaatcaatggccattgacgagccgctatgtgccaagaccctagccatcgacactgcccagaaggatacgcaaaagaggatttacagagagaaaggggtggaactagcttctactaaccaggaatggtatgaacgaaggggatacagggtgattcatacggaacccgacttct

SEQ ID NO: 13138 - DNA, 288 bp, Zea mays
  Clone ID: MRT4577_111977C.1
gtaatagcactgataaattatacaaacgcaatactttacaccccagctccgcagaaacacggcactattcctacgggtacgggcgcacttacctgccatccacataatcatcctgaatttgcactgcaacacttacctatccaaactctattaataactgatactatgattcaccacgctgacatttatacaaatcaaacgctcctccgcctacttaaatattttaagaaaaatattatcacactacacataatttcctcaatgcatgtatcaaactaacacctgaag

SEQ ID NO: 13139 - DNA, 279 bp, Zea mays
  Clone ID: MRT4577_111978C.1
tcgctcacgcgtacgttcacaatgacatgggggggttcaatttattccctgtccaggaccagctggtgcgttaccaaagcatgtatccgccttaacatcggtcaatatacaagtggtgtatcatgactagttttttgggtctgcaacaacatgaatggaatactgaacagtattgcgtgatccaatcccacgttattattctagtgtcactcggaattccggagataccttgtgataccatttttatttgatttatctattacattggcctctccggtc

SEQ ID NO: 13140 - DNA, 842 bp, Zea mays
  Clone ID: MRT4577_111979C.1
ggccggaaaaaaaaaaaaaaaaaaaaaaaaaaaaaaaaaaaaaaaaaaaaaaaaaaaaaaaaaaaaaaaaaaaaaaaaaaaaaaccagggcaccacaacccacgggaaccaacccaggggggggccacgggggacccgaaccccctcccccgaaaaggaagggcaacgaagttgacgggggcgaagttgggcgggaacaagggaaccaacccgtcaaagcccatcaacgtccccgccgggggaaaggccaacaaggccaccccgggcgggggtttcaacggcccggggggggccaacgccgtcttcgggggccgggaggccagccgcgcccccggaaaaaggcccaaggacaaggccaacgcccccgggaacccccccgggctaaccaaaaagaagtccggggcccccgccaacgggaaaacaaagttcaaggcaaagaaccccgtcgccgcccgactcgccgccgacgccggaaaccggaagtcccggggaaaattaactcggcccggcctcttggggggtaaagggttgggctggcttgctggtgcaaatggctttgcaaccaaaaaatcggaatggaaggacgtaggggaggggcccgctgaaaaacccgagctccaaatcctttggaaaaaaggcgggggataacaaaggaaaagagagaacccggggggggcttgggatgggggggaaacccccaggaccaggaaaagaaaacggaaaaaaaaaaaaatgggaaaaagggcctcgcctccaaccaaaaaaaaaaaaaaaaaagaggggccccaaaaaccaaaaatttgttcccctttaagagggggaaaaactggcgagcttggggg

SEQ ID NO: 13141 - DNA, 338 bp, Zea mays
  unsure (1)..(338): unsure at all n locations
  Clone ID: MRT4577_11197C.1
ggcaattctatggagcaatgactgcccacactagtagatgcatgaggaggatggcgcggtatgatatccaatgcgcatgcgattaatgagatgctctgatgcattcaatgcgacctgttgatatctgcctctgcgacgtacactctgaaaattttacgtaacgaccgttgctggtgtctctacaggcattgaacctactcatacatcgaacggtcgacacgaattcgtacttactttatgtgacgctcacattcgtgtgaaggctactcagtatatgttctatctactgctntaaatgcgttcacctgttcactgttaagcatcatcgctggaaatat

SEQ ID NO: 13142 - DNA, 267 bp, Zea mays
  Clone ID: MRT4577_111980C.1
cctgtaaactctgtacaagaagggacatcgccgggttgagtgcaatactgttttctgtatcaaatgatattcagacgcctgttgtgcactgtactttcttccaacatatatgtgcgtacgatcataaaatggacactcttaaggataggctcaaccaagtcaactgactcgtacggggcaaatgacgacgatgaagatgacttgtaaagattggttcaatctaaaatagtgatatcttatgcggctagtagtattcgttctatggca

SEQ ID NO: 13143 - DNA, 403 bp, Zea mays
  Clone ID: MRT4577_111981C.1
aatgattcttgggtttttttttttaattccgtaggggttcttttatgattaacaggggggcgtatggcgcccaccctttggatttaggacggaccatgggaatcgggcaggcttgtgaaaaaaggaggtccattcaagattgcagaaatcattcgaaaagaaagcctacagtggaaagcgtggggcgcctaatgagccacccaactcacaataagggagcttaccgccctgactgggggggggttaacagacgggtttcgtcacgtgaaatgaggagggctacaaggcggaattaaaggaggaaaaccccttgggccacagggtttaataaatttgccaccgcgcgacgggaagcccccaacccaacggggccccgggggttttttttactcaaccaaagggg

SEQ ID NO: 13144 - DNA, 412 bp, Zea mays
  Clone ID: MRT4577_111982C.1
gggagggaccaaagggggggtccttaaaacatttgtttggggggcaaaaaaaactaaggttcctccgggttaaaatttaaaataatggaggtttttttttttatacattttttaaaaaaacacattttacaatggaagaaggggatcacacatgtagcagggcaagaaaaaacctggtaaagctacgggaataaaatttttgtttaaaaaaacattaaagggggcttttggggaaaaaaaaaacatccaaaaaccccctttagggagggtttcaggacccccatacccaataaggggttacgtggaaggaggctttttaaaaataaaaggggcagggtggggcggggcatacgaaatccggggggggaaaaaggaactcctccatagttaccttgctccggggtcggggggg

SEQ ID NO: 13145 - DNA, 344 bp, Zea mays
  Clone ID: MRT4577_111983C.1
tcgcttttggggccaagagcaacaacttggcgctggaagtggtaccgggccacaccgcgcgggacacgttactcggcgcgcgcctggcgtggaccaacgccggcggcgactgccgcctcgtgctccgcgtgcgccgccacaaccgcacccgggtggtggggccctacttgtagcacataaagagacgcgtcgacgagatggaggcgcgccgccgcgagctgctggtgcacgccaacgccgtcggtggcgcgccgcgctgggggggcgcccccttaacgcacccggacacgcttgacacggtggggaaggaccccgaccttaaggcccgagttcgagccgacctg

SEQ ID NO: 13146 - DNA, 118 bp, Zea mays
  Clone ID: MRT4577_111984C.1
ggaccgggccgcgatataccgggcgagccacgcgtgcgcacatgttcgcagtcaggcagaggttagagagggtgcgcgccctaaccgcgccgaggtgctaagggcacaatccgacata

SEQ ID NO: 13147 - DNA, 682 bp, Zea mays
  Clone ID: MRT4577_111985C.1
ccggccggttaatctcattatgctaatacgttctcacgatcctttcatttcgacatggttattcatattcccttctaaaacactctctgaagaaagaccacggccggagagctcctcctttcttcttcactatcgcccatatatcctcaccatacatctgcatgtgacatcttaagcctttcttcatgttgcctccaaatgaaaaccaacttaaacagacacatgatatagtgtcgcttctgctctcggagatctacatcattctaacatgttgatcttattaaatcgttctcgaggtgctgtgttacttgctgctaatgccgttactatgctgcttccactataacattctgcacaatttatatgacactattcccaagactcattctctttccggcgctggatgcctgccaactggggcatcttactcatttctgggatgaacactgctctctctgagatcaacctcttgatgaacaccacctgccagaacactgttctcattcacatagctaatgacatcatgcgcttgaccatcgctgtacttgagatataccacgtcgaatagcacctcttgatgcgtataaccccaactgtgtatcatctcggcttaagccagtgatctgcagactcctcgcatttcataacgtattctctctgtaacgactgatgatacagagct

SEQ ID NO: 13148 - DNA, 102 bp, Zea mays
  Clone ID: MRT4577_111986C.1
tacaggcagacgcccttttatttaatatcacaggaacgcacagcaacgaacattttaaagaatagctccagactgctattctcacacctatgcactgacttt

SEQ ID NO: 13149 - DNA, 392 bp, Zea mays
  Clone ID: MRT4577_111987C.1
ggtccgatatgcccggtcgaccccgcgtccgccccgcgtccgccccgcgtccgcccagcgtccgcggacgcgtgggcggacgcgtgggggcgccctgcggccaggccgagccgcggtccgcggaggcagccaggcgcgcgcggacgcgcgggcaagacgcaggcagcccgcagcccctcgctcgtcgcctcgtcggtcgtcgtgctgctcagtgctcgtcgtcgtcgcggactgcctctgctcctggtccactcggagacagcggctggcggctggcttccctaagctcgttgccctaatcttttattgggccaacccaaggtattgcttaggcattactaggccatattgggccctccgcccctggtgcgtggcctactggtctggcggtt

SEQ ID NO: 13150 - DNA, 200 bp, Zea mays
  unsure (1)..(200): unsure at all n locations
  Clone ID: MRT4577_111988C.1
gtgttgaagaccaaacggcatccatttcgtacaacaacacgagctgctaaaaaacaaatactgctacactacgcataatacaagctcatacagcgaaaggtgcacaanacgnnaattgagatatttacagtgagcagtcaattccgtttaagctacccaacagaatcctcaaccatagcctcctcgctgtcgctgccatc

SEQ ID NO: 13151 - DNA, 460 bp, Zea mays
  Clone ID: MRT4577_111989C.1
aaaaaaaaacccccccccatggggggggggatttttttttattccgggcccaaattggttaagggaaatatcccggtggtgggccggaaactaaaacaaaaaagtccggggggggggcaaatgtgctgaacaccacacaagagtttacatggaaacccaaaattgattttgaacgggatttaaattttgccccaagcaaaaaaaccggggggaaaaactagaggttggtgcctaaaacaaaaaaaccaaagacaccggggggtttaagggaaaaaaacccctactttccgagcaaaggcattgttataaaaaaaaacctcggggggttgggacacattttcattttaaaatttggaggcagggccttaaaaaggtttggaggcgggggactccccctttttttgggaaaaaaaaactgccttttggtttccttttggatccactttaggaggatacccag

SEQ ID NO: 13152 - DNA, 399 bp, Zea mays
  Clone ID: MRT4577_11198C.1
ggccgcttttttttttttttttttctttttttttttttttttttttttttttttttttttttttttttatttttttttttttttttttttttttgggttttttttttttttaaaaacaaaaaagctaaaacaaataggcccttagtttttatgttggaaaacatgtttagcccctttttttactaaaaggggggggggggttttaaaaaaaaaaggggggggggggggggggcactgtttgggccttggtgtagaaacaaaggtcaattttggaaacccggttactggaatgggctaaaacatcaccattaatttgtttagtccaaccggaaacaagacaaacagggggccgggggttcaccttgaacagaggtttcgaggcccaaataaatcaaaacc

SEQ ID NO: 13153 - DNA, 324 bp, Zea mays
  Clone ID: MRT4577_111990C.1
actggctgtcttgacttcttgcactccttggctccttgggctgtgcggatgcgctgataacgttaccactttgctaccatgctcacatggttgtattgcttcctctgttcctctaaacatctgagcattggggatgtgaatacgcgattacccaaccctttaagattacacgagccatcagggctgggatgttagcattttaactttattacccttgtcactcctacaacctattaccgtatttcagtatggagcttttgtgggttcgttggatcaagacacaacagctccaccacctcgtgctctcgtgcctggataccttgt

SEQ ID NO: 13154 - DNA, 251 bp, Zea mays
  Clone ID: MRT4577_111991C.1
cgcaggcctacggtagcatcgttcacgtgttcctcatgctggacaagctcctgatgcagcgcatcaatgaccagatcacagattattgcacggccattgaaagcgattagagctgacttagtgtgacagcttactttgaactgtataacttgacacgagctgacaaatagaaatccagcgatggctaacgactaggacggtgacgtgagtgtacgagatacagagcatgcactatcgatagcatctgccga

SEQ ID NO: 13155 - DNA, 1046 bp, Zea mays
  Clone ID: MRT4577_111992C.1
atcagaattactagtcaccagcagagggacgacgggaggaggaaacccttcgccctcgctgccgccttctccttccccggtcgcgtcttgttggggctctctcgtggtctcgacccgccggccgagttctcgcgtccaagcgtggcaatccacatatctctgtctccctctctcgctcacccctgtatccccgtctaaccgaagagcccaacttccggaagcacagctcgaagcagatccggatccttgtgagatcgctcatcgagtatgctctgaatcacagaggctggaaacgcacggttgacgtgtggatcgctcggcgcggagaggccgtcgtagatcaaacgccccagtccatgggtccttccagcctggaggatcaggaggatcgaggggcagctttcacccacatggatgaaggcgacctcttcgcaacgccaagcactacgattcggctgtccgaggaaaacccaggttccaagttctccgacgcaacggagggggatggaggcatcgtgaacaacaccagcagggattgcggcgagcggtacccatcgaaccaagagccagctagaaggcctccgccgatgggccagcagcggtacgacgatccagggccgtgctggaggcaagaaccgagcagcgggcagacgaaagagcagttcgtcgcggagatgctcgctaggccctcgagtgcggcggggtcaggccccgggagaccgcagcaggcgaggcccaggcagcagcgtcaggaggacgcctcctcaccatctcaaggcagcaggccgcagtcgtcggctgcttctgataaaccggtggcgcagcagcaacctgacgcgaactctgtgcgagcgaagctcgagctcgccaagaacgccaagctcgaggcggccaagaggaagctccaggaaggctaccaagagtttgataacgcaaagaagcagagaagcatacagatggttgatccccagaacctgcccaagcaagctaacggcacccggaattccaacctagcggcaagccaaggaatggcagcagcaggaatt

SEQ ID NO: 13156 - DNA, 390 bp, Zea mays
  Clone ID: MRT4577_111993C.1
cggaataacccgggagggtcctacgcacgccgtttgttttccgcacagcagccggagcccaaagcgaggccttttatgagagaagcccgaggcgggtcgacgagaacgccaggggcgcgtcccatgggtagcagtgggattcccggggtacccgatgggcggccttgaagccggcgcctggccggacgaggagtacacggacgccacgtccggagcgaagcgccccctcaactcccgacgccgagctgcagcagacggtggcgccgcagttcaaactgcccagggaaagaacaagggcggcagggcggtcattgcagaaaaggcggcgatcgagaagttcctccaagcccaggacgcctgcccctgcaagatccgtgccaagcgcgggtg

SEQ ID NO: 13157 - DNA, 598 bp, Zea mays
  Clone ID: MRT4577_111994C.1
cgctcggcgcggaggggccgtcgtagatcaaacgccccagtccatgggtccttccagcctggaggatcaggaggatcgaggggcagctttcacccacatggatgaaggcgacctcttcgcaacgccaagcactacgattcggctgtccgaggtacgtgattcacgcacacacacaaacacacaaatcaaccgagtgttatatgtgtccgtggcgtgatctgacactgcaccccatctcgtatctcctcaggaaaacccagcttccaagttctccgacgcaacggagggggatggaggcatcgtgaacaacaccagcagggattgcggcgagcggtacccatcgaaccaagagacagctagaaggcctccgccgatgggccagcagcggtacgacgatccagggccgtgctggaggcaagaaccgagcagcgggcagacgaaggagcagttcgtcgcggagatgctcgctaggccctcgagtgcggcggggtcgggccccgggagaccgcagcaggcgaggcccaggcagcagcgtcaggaggacgcctcctccccagctcaaggcagcaggccgcagtcgtcggctgcttctgataaa

SEQ ID NO: 13158 - DNA, 263 bp, Zea mays
  Clone ID: MRT4577_111995C.1
ttgtgtcttctactacgttcctcatcatcatggcaatccttctcatctccctcatgctcttggcctcccctccttccacttctctttcattgcaaggtcctttgtgccggggtggatttcttactccacataaatatggaggacttcatcatcacgttcaatgacatcactgctaatcaggtacctttagacccttacttcgatcacacacttcacatcccatgacttatttattgctcctatatcatttgtctatccattca

SEQ ID NO: 13159 - DNA, 1912 bp, Zea mays
  Clone ID: MRT4577_111996C.1
acgagtagactgagcgcgcggccccacgggcagaaagggacgcgactcgtcagggcgattccgattacgagtagacgggcaggacaggacaagggaggaacggcggcggcggcgcagggcagggtaaaccatggcggcatcggccaagggacggctcgtgcccgtgctcgcggtggcggcggcgctcgcggccgtgctcctctaccgcgcgcccttctccaagagcttgggcggcgaagggtgcagcctcctcccgcacgaccacttctgggtcgccagcgaccgcgtcgtcacgctcggacgcgtcggccccgccgcagtggaggtcaaaggagggctcatcaacgccatcgccgtcggggactaccggagcttcgtgctccgccggccgctccttgactacggggacgccgtcatcatgcccggcctcatcgacgtgcatgcccatatggatgagcctggacgtgccgagtgggaaggcttctccaatggcacaagagcagctgcggccggtgggataacgacgctggtggatatgccactcaacagcttcccgtcaacagtctctgaagaaactctcaaactgaagctggaagcagctcgggataagctatatgttgatgtggggttttggggaggccttgtgccagagaatgccttcaacccaagtgctttggagggcctcctaaaggcaggcgttttaggactcaagtcttttatgtgcccctcaggcatcaacgactttcccatgacaaattcaactcatatcgaagaaggattggttacactggcaaaatacaagagacctttacttatccatgcagaacgtatacctgaggctgaggatcatgatttgcaagacgatgaattagatcctcggtcctatatgacgtatctgaagtctagaccaccatcatgggaggaagcggctatcagagatctgcaacgtgcaatgaaggatacggagttgggcggtcggtccgaaggagctcatattcacattgttcatctatcagatgcaaaaactagcttggaacttatgaaggatgctaaacgcagtggtgcaagtctgtctatagaaacatgccctcattacctggcattttcgtccgaagaagttccagatggagatactcgctttaaatgttctcctcccatacgtgatgacacaaacagagaaaatctttggaaagctctgcttgatggacacatagacatgctaagttcagaccactcaccatccactcctgacctcaaactaatggaggaaggggacttcttaagggcatggggaggcatatcatcattgcagtttgtcctcccggtgacatggtcatatgggcgaaagtatggcattactctgaatcagctagcctcatggtggagcgaaaggccagccaaacttgcaggccaaaagaataagggagctattctaccaggataccatgctgacattgtagtatggaaacccgaaacagagtttcaacttaacaataaccatgctatatatcataaacatcagaatatttcagcgtatttaggaaagcaactttctggtaaggtcctgtcgacttttgtgagaggaaatcttgtgtttgctgaagacaagcatgcaaatgctgcttgtggtgttcctatcctcgctaagtaacatacaggtggatccagagctgccattgttgatccgtagtgtatacaatcgtatgcacgtgtcaatttgtaggttgctctcctgtatataattgaactcattcatgtcattgttatatagtagcaatctatttatattggcacacattttgccttgatccctaattaaactatcattagttttttttggtgatattgtcaccatcgggagaaggcataccctccataatgctaacaaaatacccgctgagacttcatcagt

SEQ ID NO: 13160 - DNA, 1799 bp, Zea mays
  Clone ID: MRT4577_111997C.1
caggagggactagcctgctgctttgcattgcccaaaaggatcaacctattcccattgttttctgcacctgataaatacatgagaatatggccttttttacacataagagaattgttgcattaccctccacatatacaccacaaatctaatggcagcataactgcaaaccgatcacagcttaacctgtcgatgtacctgaagtaaagacatggaactccaagctcgatcagaacactgggcagacgccgtcacccaagtccacccctttcgcggtggggcacctggcgagggggcagtgctctcctgcggtgccccaccagtcgatgctcttgttctgcatggtcaacgagaagtacagcaccacccccatgaacgcgacgccggcgtcgagagcggcggagaggatgtagttgtaccgcgtccaccacttcttccggtaccggaagacgaagaagttgaagacggtgccgacgagcagccacgagttgtagttgacagccgtcgccgggggcatgtaggccgtcgcgccgaagagcaccgggaggttgatcagcggtatccacctctggccgggaaacgtcctgtggagggcgtacacgatgaccgggcccgccgcgccgatgaggaagaaccagttgagggcgccgtagttcccgtctggcccgaagatgcgccgtggacccacgaggccccagatgactgacgcgtcgaagaagacgcggtcgttaggacatgtccaggggctgtctggtgggagtgagtcggagcagatgccgtcgatggagcccagcagccaccatgccgtcccgatgttcaccgtgccagccacaatggtaccgacaaactggacaaggaacatggacttgggagggatcttcatatagtggccaagtttgaagtccgagaggaaggcaacagcctgtgccatgctcatgtagccatagactttgaagcagacgacggcgataggagagcccggcataattagacccatagcatactcagtgatcacattcagacctggcgtctggttggtcgtcgcagtgatgatgctgatgggaagtgtgaagacgaatgccatgccacatgcgaagatgaggccccaccatgggagctgtacctcacgcttcagcacggtacagaggagaagggacactacaattgatagcgccatcaacgagtagaaccaccatgctgggatttcgctgtacctctccatcagcttcgtgtggatgtcaggcttctccttctgcgacgatctgaaacggtagtagatttccttcccatagaagagcccgacatgagtgatggtggcggcaatggtggcgaagctgaacccataactgagtgcaaagaacacgctgaggctgaccttgccgttcttaccataagcgtccaggtcaagctcaaaccggttgttcacgatcgattggacgtcgtagctgctgccgttcgacatgaacaggtgcgaggagaagatggggaacgtcttggcgctgtacaagtcgaacccccagtacgctgcaggcatgatgacgtagacaaagaacacgtagccaaagaagatgttggcggtggcgaagaagggcgagatgagggggctgaagaggaaggaggagacggtggaccagtcgagcgtgaaggcgccgaggccgaggccgctcatgcccgaccccagctgctgcgccgtcacggacctggagaagacccagcacacccacgagatggacgtcagcgtcgggaagaggtagcccggcacggcgtcccaggcgaagctgcacgccagcccacgagaaaga

SEQ ID NO: 13161 - DNA, 320 bp, Zea mays
  Clone ID: MRT4577_111998C.1
cccactcgttcacggacgcgtgggcggtcgcgtggacggtcttgaatatccaggaccgattcatgtctgcttgcccgcatgtcctaaagggagtcatgttggatctgatgaaaaatctcgacaaaggccaccaagcaactatggtaaatattggttttaggcacttaaccatatgagacattattatatccatataccttgcggaatttgcacagacctagacattgctcaaaggccaatggataaccttataggagtggtgaaagcttacacatttatagagatctctgactcttgttcaaatctaataattgcagact

SEQ ID NO: 13162 - DNA, 924 bp, Zea mays
  Clone ID: MRT4577_111999C.1
tctgtgccgaataaatctcccgatcgagagagcgcccgagatcccttccctcctccagaccccactcttcccgcccgcgcacgcgcagttggtgcgtcatgtccgtggctgcctgcctctgcctgccttccttcctccttggcctgctggcctagcttccccttcaccccaaaggcaccaaccagtggtggcagcagcagcagccccagccggcaggaggaggacctgcgcatcatcgggagcccgggaatctagagggtgagagtgggcgaggaacgaaaagccgcggcagatagagagacttgctctggacaaaagcggcaggaggaggagaggccgggaccatcgcttggtgcctccttcaagttcttgggggggctgactgcgatcatgagctctcggcgagtgaggagcagctagtagggccctgacgagcctccgacacgctgaggctcagagagagccgccctggccctggggtcggtcgtcgagagagaaagagatagagagaggggaacggagagtgattgggaaagagatcgaggaagatgagcttcaacaagagcagcggcagcaggggctgggggcagggagcggcggcaggaggagacgagctggtgctgcgaggctccatctccaagaagtggaccttcctcctctgcttcggcagcttctgcatcggcctgctcttcaccaacaggatgtggacggtgccggagccgaaggagatcatcagacggtcgacgctcgaggtggagaagatgagccttgtcgacggcgactgcgctccgaaaagcgccggcgatgcaagagacgttcccggcgaggttccaagaactcaagatgtcagccagacgctggacaggacgatctcgaacctggagatggagctagcgtccgcgaaggcgacgcaggagtccatgc

SEQ ID NO: 13163 - DNA, 223 bp, Zea mays
  Clone ID: MRT4577_11199C.1
cacatgcaagtaggtaaagcgaacgggtgagtaaagaggtgtgaaagagtggaagaacatgaatgcacagaagaatgtaagaaatggttagagtaacaaccatgaaggaagtaaaaccgggaatctgagaggaggaaagccagagtggaactgagaaaaggtccacacacgagaagtcaccaatggggacaattgggccatgtacacggaagtatgacccaat

SEQ ID NO: 13164 - DNA, 226 bp, Zea mays
  Clone ID: MRT4577_1119C.1
cccgggctgtagccctctagtgctcctgtgtggaaaactattcacctcaatctatctacatctgtcaaggtggattagggtgtaaattaaattaatttacactccaatcggcctataagggctcccacgaggatcatgctttggttggtatattccagtattcacctggaacaaaaatttgagctgtaactcaaaaagtaccacttattggccgtcctgtctcata

SEQ ID NO: 13165 - DNA, 2733 bp, Zea mays
  Clone ID: MRT4577_111C.1
aggccggccgggaccgaatcaccgctcaaccgtcattcggtcattcctacaggctacagtcctacgtacagccatctggaccagagttctgaactactgccgccggccacctcctccgcccgccgccagcgtctccggctccgatcacctcccccgcccgcttacggccatctccccgcccacctacggccaccgccgcccgcgaaggcgtctccggatccggccacctcctccgcccagcgtgtttaccggacacgtctgccacccgtcaggccctgcccgacgctagggttgggcgacggcgtccaccggctgacgcccggggagatctcgcccgctctgctccatccaggtgcgaagtaatggaggtgctctgcatcggaacagcggataccaagtttgaggagctgcttttcctcgcggcgcaactccgctccgccctcgccgcctctggctccgactcgaaggttcaagtgagcatagtggatgtctccacaactgaaaagacaacggcaaatgatttcaaagacatcatatttatccctagaaatacaattctttcatgtcatttgggtgttgaccaacataatcttccagataacagaggtgaagcaattgcactcatgtcaaaggctcttcagagcttccttaaaaaaagatatgacagtggtatgctggtgggtgctgttggtttaggaggcagtggaggaactgcactaattgctcctgctctgagattgttgccacttggagtgcctaagcttattgtatctactgttgccagtggtcacactacaccttatgtcgaaacatctgatttggtcttgtttccttcggttgttgacatctgtggaataaaacagtgtcagtcgtgttatattatctaatgctgcagcagcttttgctggaatggtacatggaatcttgtcggcgtccaatgagtctgatgaaacgtcaacaaagccaactgttggtattactatgtttggtgttacaacaccatgtgtaaatgcggtcaaggatagactgaacaaagaaggttatgagacccttatattccatgccacaggtgtaggaggcaaagcaatggaagacctagttaggggtggttttatacagggcgtgttggatgtaacaacaacagaagttgcagaccatattgtagggggcatcatggcttgtgatgagaccaggtttgatgcaattatagagaataagatccctcttgttcttagtgttggagccttggatatggtaaactttggagctcgagatacaattcctcttgctttcgcagaccgaaatattcatgttcataatgagcaggtttcattgatgcgtacgactgtggaagagaacaagaaatttgctaggttcattgctgataaaataaacaaatcttcatccaaagttactgtttgccttccccagaagggcatatctgcaatagatgctccaggaatgccattctatgatccagaagctacatctacactgttgggtgaattaaacacccttatacagagaaccgatattcgagaggtgaagctgtttccttaccacatcaatgaccctgaattcgcaaatgcattggtagatgcattcttgagtatggatgtacaggcctctagttcagcccaacctaagcaagatcttaatattggaaaatcctgttcaggacagaaaatttcagatagttctattatatggagaactcctgtggattttccagatgcaaaaccagaaatattgcggaggacgcggtcaatattacataaactgaaggaacagatcagtgacggtactccagttattggagctggtgctggcacaggcatatctgcaaagttcgaagaagctggtggggttgatcttatagtgctgtacaactctggacggtttcgaatggctggaaggggctcactagctgggctcttgccctttggtgatgcaaatgacattgtacttcagatggccaacgaagtgttgcctgtggttaaaggagttcctgttcttgctggggtatgtgctacagatccatttcgtcgaatggaatactttctcagacaactagaaaccattggattttgcggtgtgcaaaacttcccaaccgtaggtctgtttgatgggaattttagacagaatttggaggaaactggaatggggtacagcatggaagtggagatgatttcaatggctcatcgcatgggtttccttactactccatatgctttcaatccggatgaagctgctgccatggccaaggcaggagctcatatcgtagttgcacatatgggtctgacaactgcagggtctatcggggcaatgacagctgccactttagatgatagtgttttacgtgttcaggccattgcggatgcggcatttggggttaatcctgatatcattgttctctgtcacggaggccccatatctggacccctagaagccgagttcgtattgaagaatactaaaagggttcatggattttacggtgcatcaagcatggaaagattaccagtagagcaagctatcacgaacaccatgagagagtacaaaagaatttccttaaaatgagaaccatcgtttacatgcgtgatttaagcctgctgttctttcgttacacttcgcagattctgtcatctctgcctctttatttgtcatatacattttcttaccaatgtacctttcttgttggaatataatcataataaatgttttctttgacgaggc

SEQ ID NO: 13166 - DNA, 403 bp, Zea mays
  Clone ID: MRT4577_112000C.1
gcaaaacccggggcgcgagcccaaacgaaacgaccggcggggcggatattggtggtagcagcaaatatgccaaatgagaactacgaaggaccaaaaggagaaaggatacatgtgaacggcacttgcacatggttaatgcacaacataaaggacggaggaaacccgggagatagcacgatcacccacgtcaccctaaagggaatcatattaagaatttccgagcacaaacgttaccggagacggcaacgttaggaagttcggacacacccacacaagccactggatgagctatctcgtaccgttatcggtacggctaccatgcaaccggtctaagcgcaggtattggacattatcgcgtgaccttggagccagtccaatcgcatctgagcctttcatgatcctg

SEQ ID NO: 13167 - DNA, 586 bp, Zea mays
  Clone ID: MRT4577_112001C.1
ggagaatactttttgcgatgcctactggagactttgattcgaagcccagttgggccgaccaggtggaggaggagggggaggacgacaaatgtgtcaccagcgagctcctcaaggggatccctctggccacaggtgacaccagcccagagccagagctactgccgggagctccactgccgcctcccaaggaggtcatcaacggaaacataaagacagtgacagagtacaagatagatgaggatggcaagaagttcaagattgtccgcaccttcaggattgagacccggaaggcttcaaaggctgtcgcaaggaggaagaactggaagaagttcgggaactcagagtttgacccccccggacccaatgtggccaccaccactgtcagtgacgatgtctctatgacgttcatcaccagcaaagaggacctgaactgccaggaggaggaggaccctatgaacaaactcaagggccagaagatcgtgtcctgccgcatctgcaagggcgaccactggaccacccgctgcccctacaggatacgctggggcccatgcagaaggagctggccgagcagctgggcctgtctact

SEQ ID NO: 13168 - DNA, 418 bp, Zea mays
  Clone ID: MRT4577_112002C.1
acgcgttcgaccacgcgttcttccactcgttcggactttcttttactcactccatcttccccccggtgactttttcatagatgcatcgggcccatccaacctgataggaaaagctagctagcatttaccatctctaggccggcggctgtagtctgcctgcagctgatgttagctacaaacattgggagctagccatgtggagggatcccctggagctaaaacagatcgagaacaagatcaaccgccagagcaccttagtcaaacgcctcaacggcctgctcaagaatgcttacgaacacttcgagctctgcaacacctaagtctcactcaacattctcttcaaccgccgaaagctctacaagttctgcatccgacaaaacattaccaaaacacttgataggactaaaaaaacattatt

SEQ ID NO: 13169 - DNA, 269 bp, Zea mays
  Clone ID: MRT4577_112003C.1
cgccgatcgacgccggcaggtacgtctgtttcggcctacgctacgactggtccgagttgggcgcgttcaagacgttctacgacccggcaaatcgcctccgcgtgctgtggggatgggtcttcgagacagactcgtagcgctcggacgtgtccaatgtatgggcgtcgctgcagggtatccctcggacggtgctactggacaccatgacgggtatcaacctgcttcagtggcccgtatacgatgttgagactctgagcaccagctgcacc

SEQ ID NO: 13170 - DNA, 201 bp, Zea mays
  Clone ID: MRT4577_112004C.1
gggggggcaatactctttttttttcatttaaattgtgcattcaggggattggtcaaaacgacactgcgaatcatggggaggcgtgacacattattactcaatcatcgggggtaaatgagtcaactagctaggtagccagggggtatactacaggacatagtttcttaaatgggggacaccgaccgcagcagcgtaggggca

SEQ ID NO: 13171 - DNA, 315 bp, Zea mays
  Clone ID: MRT4577_112005C.1
ggcaacaacaaaaattcattttttttatttgaggcacaaaacccacctgaaattccagggtttttaaaaaaaaaacctggggggaatgttttttttggttaaaaaaaaagccttaaaaaaatgcatttgtttgggggaaaaaggttgggcacattggaaaaaacaaatgggtcagtaaaaaaataattatattttttccaaaggggctttcaaagggggaaactgaataattttttttcacaggggaaaccaacaaaacaagggttttgttttaaagggagaacaaaacttctgggggggtttaaacttgggggg

SEQ ID NO: 13172 - DNA, 1213 bp, Zea mays
  unsure (1)..(1213): unsure at all n locations
  Clone ID: MRT4577_112006C.1
ctcgattactatagtcaatttgattgggatgctaagggaatcagcttgtttggtccagtttccttatcttcactacctgatctagttactgaccctccagctattcatgatgatggttttcttctgcggngaaaagtttctcagagaatgtgcagatgcatttagtgtcccccctagaaactctgagaaagatgcacaactattttctcggaagtttctaaatatagtagatccactgaaacaaagtaataatcttggacgcagtgtcagcagaggaaatttttaccgaatacgtagtgcatttgattttggtgctcgtaagcttgggaagattcttcaaaggcctgtctgttatactgttgatgaagtgaatcagttctttgggaacacattaaagagaaatcgtattgggttcagacaagatgttttagtgagctcatctgatgatggtggattgacttatcatgccaccaatggttccttgtctctaggcttggattgcaaaagagtcaacaactgcagtgcacctttatacagcaatccctgtggtgatttctcttatcggtttaataacatcaacatttcagattccatcaatcatgatgactcaataaaacagaaacaatgtaactctattgctggagagaaagcgataaagtctatttctgatgggttgctagatagtgaaggctcaagtcatgctagtactgatgattcagtaagtgtgaggaacagtggtgacttctatgaagctttaacaactatctcgccatctgggagacgttatgccccacatcaattttaccaattagaaaatggtaaggtggttgttagacataacacaaacatgtcacaccatgggatgccaacaaagcagttcacaagcagatcttaccactcttttgaagatgctaagtatcacaatgagttttcaggaagctttctgccacccattgagcataatgcttactcttctgctggctttgttaattttctggccacctctaactcagcatgtacacatgaaaattcacaacttggtggagccaataataacatcttgaaagatctcactggagattttgagacatacttccataatcttcagtatgcgcaagggttccagcaagataatccagtaaacccgttttcctctggaaggcctgctccaccatccctgcaatgtcaagacacgtgcccttcaaatggtcga

SEQ ID NO: 13173 - DNA, 503 bp, Zea mays
  Clone ID: MRT4577_112007C.1
cgagtcgagaccaaagcattagatacgtgataggaataatttacatgtaagttaatgtaagtttacaatcaaagatggcagacaactcgaccgggtgcattgcaacgtgcaaggatgcagattagtggccatcactttgatgcagatgagcgagcttgccgacgacgatatgcatcgggccttctactggttacatgcatatgtgattcgagccttcataggatgacactcggcaaacagaggcgcaatgcatgtcgacaggcgaactcacccgggcttatgaattgaaacctcatcaaccccttaatccatatggattgggatagaactgaataagccctagatgggaattaatccaccatcttgctcgttgccggcaatcaagccatgccacctcttatcttgcattcaattcggagttggttgaacaagagatatggcaagttttcaggttttcaggtgaactgaactgttccatacctgcatgccccgggctctttaaa

SEQ ID NO: 13174 - DNA, 369 bp, Zea mays
  Clone ID: MRT4577_112008C.1
ctgtctggggttttcttttttcattgtttccgtattccatgctgtttgatgctgggttttgctgaacccgtcgcagaacacaaaaccaacggctgacactttttttcctagaaaccaaaaccacaccaggggggggacaaacacgaaaagaacgaagctaaaccatgggcaccagggtagagagggccgggcctaacatgttccttggccccgcggggcccaccgggaaaaaacctccaggtcccgttggagaggccgtagcccccggggggggggacaccggcgaagacgtcggcgccctaaccgaggccctccacgccatcgtagccggcgacaccgaaggagacgccaccgtcatcacggggcccg

SEQ ID NO: 13175 - DNA, 299 bp, Zea mays
  Clone ID: MRT4577_112009C.1
agctagcttagcgtcaagttcaggaacagcttaattctactcatgtggagaaggaagaagttgctgccaaactagctgagcatgaaaggacagtagagcatttgactgaggtgcacagtagaggtatagaactccaatctgcagctgaatcaaggaatgcagaaattgaagctcaattgcgggaagcacttgaggcagcaggacagaaagaggctgagttgagaaacttgaatgaaaagctggttgcactcgagtccgagattgaaagtttgacagatgtaaatcaagccttgaaacag

SEQ ID NO: 13176 - DNA, 292 bp, Zea mays
  Clone ID: MRT4577_11200C.1
aaccaggggcctccaagtgaaagctcttcctgctcccactgctccccagccctgtcccaacatggcatatgtgggaaagcggcaggcctgaagcaaacgatgttctggctgtggtaagcagtgtcacagcatccctagtcagtgatcacagagtcacctgggttaaaagtctaggtctcacagtcaaggcaaggattatgaaggtgacacggcaaaggtggtctgaaggtgctcataattttctcaaattcagtggggaagggaaggttggaatgatgtccttcaaggccac

SEQ ID NO: 13177 - DNA, 1159 bp, Zea mays
  Clone ID: MRT4577_112010C.1
agaaaatctcgtataacgcaagtcgtcaaaataccgaaggttaacaggcagattatggacagtataagggaagatgaaatagatcttgatatggagaatgttgataaatcaagtattaagaagaagaaaagaaaactagaactgaataaggccattttggatgatgatcggttcaaagaaatgtttgagaataaggattttgaaattgatgaagaatcaaaagaatacctcgcacttcatcctcaggcagccacaaaggagcctcgcctgattgaagaacattttgatagtgttagcgaggacgatcaacaatctgatggtaacatatctgacactctagcggaatctgacagtgatgatgtcatgcataattcaaagcgtataaggttatacgaggtcaaggatgaacaccatgcggaagcatttttgaacagcgtctctttatcaaacgaggatgctgttccccttgaggataggatagctgccctggaaaggaaacagaactccaaagcacttgatgcggtcaagtacgggcctggtggctcacgagagatttcgtttttctctaaaagccgtagaaggcacaaggaagagtcgtctagcgacgatgaacccaagggtgtcaaaaagagagctgtgcagccgctgggcttgaagcagggaaaagccgagttctatatgtttggcggaaatcgtggcagaggtagaggcggtggtggcagaggtggaggcggtcgaggaagaggtggaggtggaggaggaaaaggtcgaggaagaggtggaggacgaggcaggggcaggggcagaggatgaatggggcccgtcacattgaccccgttcctgcctttgcaggggttttggtaagcttgaaatggattgatcctgcacatgcagtgggtagaaagtgtgttccttcacaacataggcaagagctagagtaactgaggattgctgcttcagaatttttgggaagagaactttgttagaagacaatattacatatcttatggtctaccttgtaacggatcgttgcattctggtgggtgtctatgggtacggtatagcattttttttgtaataggcaacataactgctggcattttcatttttgagtactgaaggctctccaaatccatgattagtagacattcgttcatag

SEQ ID NO: 13178 - DNA, 304 bp, Zea mays
  Clone ID: MRT4577_112011C.1
cccacgcgtccggacggcccagggcatcggttgctggccggcgctgtggggacgcgtgcgcacaccagccaaggcttgaacgtatatctaaaagactgccaggcttgcgctcctcatacttgacacgaaattcctgatatgcgtcgtcgctgactgtgacaacatcaactgcccgtctccacacaatgacaccgaccccgacaacgcctgatacttctacgtccgacaaataaggcggcggtagtggtaacggtttaactttatggtgaacgtatgacgcaatgatgtttgagggatgtgctaa

SEQ ID NO: 13179 - DNA, 659 bp, Zea mays
  unsure (1)..(659): unsure at all n locations
  Clone ID: MRT4577_112012C.1
gggtacccctcgnggggccggccgggnaaaaaaaaaaaaaaaaaaaaaaaaagaaaaaaaaaaaaaaaaaaaaaaaaaaaaaaaaaaaaaaaaaaaaaaaaaaaaaaaaaaaaaaaaaaaaaaaaaaaaaaaaaaaaaaaaaaagggttggggatcccttccccaaaaattgggggcccttgacccgcggcggcggttttttttttgcccccccccccggaccggggggggcttaaagggggggggggaccctggttaagttttaaaagaaggggttggggcccttggaaaaaaaaatggccggggggggatccccagggacaacggggggaaaacccccccccccacccccgtgggggaccccaccgtgataacggtaggttcccccgaaaagagggccctgggtgggaactttggggggggggccctctttttccgcttaaggggtttaaggggaaaaaggacccggggggggggggggggcaaaatggggctgggggttttgccaggggggggggggcggggccccggccctgggaacctattaagggagggggggtttaattttggccccggtcggccccccgttggatttcaaaaacgggtccctggaaggggtgggctaaagggacttgggccttccccaacaaaagtttttt

SEQ ID NO: 13180 - DNA, 345 bp, Zea mays
  Clone ID: MRT4577_112013C.1
gcctcatgacaccgccgcgcgcgctgcgttcaagctgcactactaccatgatcatgagtacggcgccggacctgccgacccgaggcacagctaaccggacgacacctacgactcgccgcacattctatgcatgcgcacagccaccgtcgagacttgactctagtcttccgcgccatcgcaggctagtcgagcccgagcgtcagacgcgagccgcccgcgaccgagctgcccaccgtggctgccgccttaactgactaccacaacggccagttcggagaatcccccaccgcactgcgcggagaaatacagctatagccgctaaatgccaacgaatccacgtggcaa

SEQ ID NO: 13181 - DNA, 341 bp, Zea mays
  Clone ID: MRT4577_112014C.1
aagggccaacggcccagcaactaaaaaattacggggccccccacaaagaaacacccgctaaaaaattttacaagggccaaaaaaaaacgaagcggggggggatatccaaaacaggccctttttaacacaaaaatttccaaaggaaacccctttggggataaggaaaaatcctgacggggaacaaaaaaactgagacatggtttcaccatagggcggggcaacaccacatccgttttgaaacacatgtcctttagcaatctaaagcccaggggacagataaacacccccaatacctttggggggccttgacagccttggagggtggggaaaaaatttgaccc

SEQ ID NO: 13182 - DNA, 2149 bp, Zea mays
  unsure (1)..(2149): unsure at all n locations
  Clone ID: MRT4577_112015C.1
ccccgcgtccggtcaagaaaaaaaagggcaggaacatttccagtgagaccagtcagaaggtaaaaccggtgatctcatgcccagaatcagatggttgtgctagagcttccattaatggatgggagtggcgcaattgggcacggaatgctactccgtcggaaagggctcgtgtgagagggtaccatgttcggactattctttctgcctcaaatgataatgtgtggaaaaattctcaagcaaaggtttcatctgcaagaacaaatcgggttaaactgcgaaatctgttagcagccgctgaaggttctgaactgctgaaaattacccaaatgaaggcaaggaaaaagcgtttgcgttttcaaaggagcaagatccatgattggggtctggtcgcacttgagtcgatcgaagcagaagactttgtaatagaatatgttggtcaactgattcaccggcgggtctctgacatacgtgagtctcaatatgagaagagtgggattggaagcagttacctctttcgcttggatgatgattttgtggtcgatgccactaagcgtggtgggttagcaaggttcataaatcattcttgtgagccaaattgctacacaaaggtgatcactgttgatggacagaagaagattttcatttatgcaaagaggcgtatatatgccggtgaggaaatcacatataattacaaatttccattggaggaaaaaaagataccgtgccattgtggttctcggaggtgtcgtggatcaatgaactaagaaggccatcttttgaggttgctgcaacacttaagattcttggctgtgtgcaactcatcaatcaggatttacatcaatatcaaaatatggagtgcacgaacatgctggacagcaagaacaaactgccgcattatacttatttaagctatattggtcagactaattccacggtatcccaaggatggtgcaagaggaagcccatactgcgctgccctgtggaggtcgcgagcatgggaaatcagttgaggatgggctgagctagtaaagggttgttttctgacaaggccagtactattgtttttttttgacatacctgggtggagttgcaaactcttgtacaggcgcaggctttacttattacattgtttggattggggatatagttcacatggtgcatacgaaacggttagattggtttaaattctctacctcgtccttaaatcatttatcatactaattagttattgaaagatgaaacacccgaaccactagttcttgtaatacttccactgcttttgtgaaggatgttatgagcatcaaaccgaactgaatggatgccctgctcctgttgatcaacttgacttgaatggacggtccggtccctatttgatgtggatgcatggatggcagtatgaaactagccactggatgaccattttctgctttagtgcatcctggaaataataaagcatctattttccaccagggtgtacacgttttgcagcaataatctatactaccttttggttttagctatctcgtccattccgaatggcgtggaaaggatctacttactgtacccttggtgtcactttgtgcacatcctattctatagtagtgcactggggtacaagttgtctcttttgtaaaagcggtgcaagtgttttattcatggacctactgttcttgcatgcaggtaccaaatctgctagggcttgcttgtcgtcggttcatccatgaggtatacgcgtgtaggcgtccacgaatttttcaaatgagtggtatgtgttccatctcttgattggctgtctatattcgtgcatttttttattatcaaacaatagaaccgctaactcacaaatactcatgttttggacaagatacagccagagttttgagaccctgactaccaataaccctttcaaagatttagtttatttagaggcaaacatgcttcacaagtcacaacctcataaaatctacgagcttttatttacaaatacgtctcgataatgaagtttggagacaacaagtatcacatgtactgaaaagacacttctgtgacctcatcgtgccatcggagggattgtgtaacatgttacaacagaaatacaaaatagtggccacagtatggccaatgattaacctcctcctncccacccccc

SEQ ID NO: 13183 - DNA, 2494 bp, Zea mays
  Clone ID: MRT4577_112016C.1
cattgggtacctcgaggccggccgggatccccgccggccggacgctagcgaaagcctctcgcgctccgcctccgtcgtccggagcgcccgcgtaaagccaaacaccaaaacctcccttttcccccgttccgttccgttccgtcccgtcccgtcccccacccctcctccaaccccggtctcgcgcgatccgccgatccggtttccccgcgcccggccgcccgtcccgatcccgccgctgtttcggcggcccggttccgccctccgtccgtcgccttgcggcggcctggcgttgatgtggcgtggcacggggcccgtgcttcggttttgagagctctcgtgtcggtgcggagaggcccgcggcggtctttcaatgaggcggcggccggtcctgccggcccaccacgacgacgtggacaagggcggcggcaagccggcgtcgtcgcgcctctgcttcctcgccacgctctgcgccatgttctgggtcctcatcttctacttccacttcgccgtcgtctccaacgaccccgccgcctcggcggcgcagggcgccgaggctcgcattgccggcgcccacacccgcattcccgaacgcgacggcgcgtcccgcgtcgacgttcccctcgccttcgcctcggagccgccgccgccgccgccacctcctcctgccgcgcggcccaaggaggcggaggacgaggtcgccgccggagtccgccgggaggaggcgccgcccgaggtcgcggcgccgtacccgttcgagcgggcgctcaggacggcggagaaccagagcgacccctgcggcggccggtacatctacgtgcacgacctgccgccgcggttcaacgaggacatgctccgggactgcgagaagctcagcgtctggaccaacatgtgcaggttcatgagcaacgacgggctcggcccgccgctgggcaacgaggagggcgtgttctccgacaccggctggtatggcaccaaccagttctccgtggatgtcatcttcggcaacaggatgaagcagtacgagtgcctgaccaaggactcgtccgttgccgcggcggtgttcgtgcccttctacgctgggttcgatgtggcaaggtatctctggggctataatatcacgacgagggatgcggcgtcgcttgatttggtggagtggctgatgaacaagcccgagtggagcgtgatgggtgggcgggaccatttcctggttgccgggaggatcacctgggatttcaggaggttgacggaggaggaagcagattggggcagcaagctgcttttcttgccggctgcaaagaacatgtcgatgctcgtggtggagtcgagcccgtggaattcaaatgattttggaataccatatcctacgtacttccacccggccaaggacgctgaggttttcctttggcaggataggatgaggagcttggaacgcccatggctgttctcgtttgcaggcgctccacgtcctggtgatccaatgtccatcagagggcagctcatcgatcaatgcaggagctcaagcctttgtaaattgttggagtgtgaccttggggagagcaagtgccactccccgagcacaatcatgaagatgttccagagttctatgttctgtttgcagccccagggtgactcctacacaagaagatctgcctttgactcgatgttggctggctgcgtgcctgttttcttccatcccggttcagcgtacgtccagtatacatggcatctcccaaagaactatacaacgtactctgtattcatccctgaagatgacatccgttctggaaatgccagcattgaggagaggctaaagagtattcacccagatgtggtcaagcaaatgagagaggaggtcatcaatctgataccaaaggtgatatatgccgatccaagatcgaaactggagacattgaaagatgcatttgatgtttccatagaggcgatcattaacaaagtgacaaagttgagaagagatatcatcgcaggccaagaagacaaagattttatcgaagagaatagctggaagtatagtctgttagacgatggacagcaggcaattggacctcacaaatgggatccattcttctcgaagcctaaagataaaggtggagattctagtggttcatctgcagaagctgccaagaattcttggaaaagtgaacagagaggacaggattgaaccatgagttggtcgtctttgggatgagatcaagggagtagagttagctatactctctgaagatgctctgatgcatataggttgcacatagatcaagatccagtagttatggtgatcatgaacatcattgatgatctatgtcaccctgcagttgtatgaagccattccaccaaaaatgctttgggggaaatttggaagacagcctttgcgtaccccctatgaatactatttttcacactaattttgctgtttctgctcaataatcctttgtaaacccttacagaatttagaggtatatcaaattttgtttatgtt

SEQ ID NO: 13184 - DNA, 409 bp, Zea mays
  Clone ID: MRT4577_112017C.1
attcggctcgaggcgcctcacatggctttttttgttgatgtggccaaatttgtattgttcaaccatacttgcaaaacctcagatggagttaatgcactgtaaacgaccccggaatcagaacctggccaactcttccatgggcacatactaccaatttgagagaccggattacggagttgccatataagacttatagctgcaaaacgtatcaactgaccagccatttacactattatcttccaaagaaggttaagctttatgcagagagcctatcgattgcttgccttgtagagtatgctgatagaaaagctcactcacattaggtatctcttcatacatatagcgtaaacttttctttggatgtgaaacatattaagccagaagaacgaagcttacctagacctggcgc

SEQ ID NO: 13185 - DNA, 268 bp, Zea mays
  Clone ID: MRT4577_112018C.1
tcgtttttttttgaccggacttacagtggtcgccgtcaaatccactccatatgggaccataaggtccttttgcaagagctggtaccggggcatcaacaaattctaggacgtgctggtgtggtttcaaatcgagtggctggtggactggcacacacatgttaaggctcaactgcatgcagacgaggaaacttacagacaaacgagtcatgagcatgcactgatcatatgaaatcatcgcagggctattgattgactcatggtatggata

SEQ ID NO: 13186 - DNA, 142 bp, Zea mays
  Clone ID: MRT4577_112019C.1
tcggtaacaatcagttcgacgatcattcaaaacagcgcgcagtgacttgtgtgctaacggacttgaaaattgttcctgacttgggctttttgaattaaaccgactgcagctggttagccagtggccgttttcacctaaatta

SEQ ID NO: 13187 - DNA, 821 bp, Zea mays
  unsure (1)..(821): unsure at all n locations
  Clone ID: MRT4577_11201C.1
cgaggccggccgggatccaacttcaactcatcaactctacactaatacttaatcactacaactaccactttcacacttcaacaacaccacctccaaatcatcaacatgaagttcaccaccgccgccgccgtcgcctccatggccgccatctcctccgcccttcctcaggcttctactcccttccctcgccccgaggccggcgacgtcttccgtctaatgtctctgcgcaccggcactgaaatccagtacggcgacgtccaggccaaggatggcaacctcgtcatcaattcgcccgaccagaacaacaagacctgtgccatcaacggcgaccgcgaaaacgtcaccagcggcatcaactacgcctcctttacgctcgaccaggatgatggcagcgtctacatctacacattcaacccccctctccagctgtacgtcgaccgcagcggcatgggccagggcaacgtccgctactccaccggtgtccagcccatcggcaagaaccaggagcgtggccccttcaagatcaacgacgaaggtgacctagtcttcgctgctggtggtctgaccggcgacgttggcttccaggcttgccccggcgctgttggtggaggctggaagatttggctctctggtgtagacaagcctgctggttctgagggatgcaccccgttcaccatgaaggcgctgaaggagaccgagaccaagaagtgcctctactcttctgctcctgcttagatgctgangctggtagagatctttgaactgtacaaatnnngacatctgagacaggacttctgggttctantggatatggattattg

SEQ ID NO: 13188 - DNA, 295 bp, Zea mays
  Clone ID: MRT4577_112020C.1
ccaccacggatagtccatttcccaacaagcaatggggtaaagattcacatgagcctcagtcggctacataaaaatagcacaagcgcgctcttcatttttctggaatcacaaactacacatctggtcacaaactatagggaatctatccagaaccgaccaatgcaattgccacataacttcccgactataatatgcacaccggaaactgggcatacatatgtaatctggagcggtggaacctctataatagtggctcaagaactaagaccccttttaggcactggtaacgcaaacc

SEQ ID NO: 13189 - DNA, 419 bp, Zea mays
  Clone ID: MRT4577_112021C.1
gaaatatcgggagttacaccaaatttgttgctaaactttaatcatgtgtttggactaaagtaagaaaatacagataatgatacattttattttatttggttaagaaaagaaagaaaaattgacatttagatgaagaaaaattcgaaattttctttctttctattttctcttctattcaatttttaagtttttctctcttcactcattttctttcctctgatacagagggtaatgctgtaacttgcaactgtggaagtgaaggtcttccaaggaacttgtgcctcagtatcatttgcccctccccttttgagcagactgagtgtttaacaagcaagatggtaggtttggttattcatgatttgctaaaccgagatttcggcttttgttgtttgcagttgtctcttgaccaatgcagtata

SEQ ID NO: 13190 - DNA, 989 bp, Zea mays
  unsure (1)..(989): unsure at all n locations
  Clone ID: MRT4577_112022C.1
tttttattatcatactttgcatattttcaagaacaaaaaaaaagagtaagaaaactggtaaataatgtctggtcagcctagaagatggaaccaatttcatgaataaaaaatatatttgtgaccttgcttgggtgatgaatccttggatcagagggtatgttctggtgaccaaccaacatttttgtttttgcatagagtgaacttagtgactcagttcgacacaacctctttattaaaatgcaggggtaaggcttgcctcggttatctttccctagactccactcatgtgggagccactaccattgggtgtgtggtattcggccggtggtgcgcaggttgtattggtgggaaactggagggcggggcgtggtggctcgtcgcctggaagatggtctaggcgccgtggctgcccgagaggagaggctggtaggtgaacaaggggcagggagcaatatctttagtacttcttgcctatctggcagattacaaaagtcctacttatataggcctatagccaactgaaatctcctaacaaataggttgatctaaacagcttgaactaactgaaatctcctaacaaataggctgatctaaacagcttgaatctctatcttaacaaactcccctatagcagacttatcccttcaggcggcctaggactcgccatccttatcccttctcttgtatgtctgcccgaccataacaaaaatgagcttagagaggcattgcaaaggatgaaaggggtaaggcgatgggccctgatggtatctcaattgaggatgggagatccattggggaattagttgtatggctaaccaagttgttcaactatatcttccggttaagcaagatgcctgataagntggagcagaagntatattggtaccaatttacaataatacgagagatattcaatgttgtactaattatatgagaaattaagttgatgagccatgcaatgtgnagagaagttattggagtatcgtcta

SEQ ID NO: 13191 - DNA, 779 bp, Zea mays
  unsure (1)..(779): unsure at all n locations
  Clone ID: MRT4577_112023C.1
tacctcgaggccggccgggagcagtccagcactgagccaccccatcccacccgagagcggtcgagtcgagccccgaaacccgcccggcacggcgcacgcgaacgcggtcacgcgccgcgcacatgtgcccccgccgtctccccgcaaaagcgcagcgccaccgtcccgccgccgccgccgcccgttggtttccttcgtttttttcccgctccacgccgccgcggaggcgcgatcgcgtgcgagaagccctaactcgagctctggactccagctcagagcccgggcgacgcgtggtcgcccatactcggaggtcccgggtccctggaggcttcgatgcagaaccacgcgtacagccggctgggcatctcggggaccggggcggtcgtgccgtcgcctccgtcgtcgccgcggcgcgcgtggggggaggagggcctcggcgaagggaggatggtctgcaagggccagcgcggacgcgggctggggcggnggcgcggtgcggagggttgcgcgagcggtgcttgcggcgctgctgcggcggcaggctgtgttcctctttgcgccactgctgtacgtggcggcgatgctgctctacatgggctctatctcgctcgacagtgtgccccgcatcatcccgcgcccggcgcccgggtcaatgtaccgcagcccgcagctctacgcccgtctccgcgccgacatggacgccgataatgccaccgacgcgctagcagctgtatggcggcatgcttacagaggtggggtttggagaccttgcataagca

SEQ ID NO: 13192 - DNA, 115 bp, Zea mays
  Clone ID: MRT4577_112024C.1
cggttggaccgcaaacatggacaggataatgaacgcccaatctctaagggacaacagcatggcagggtacatgtcaagcaacaagaccacagagatcaaccctgagaacccaatc

SEQ ID NO: 13193 - DNA, 2188 bp, Zea mays
  Clone ID: MRT4577_112025C.1
atgcagaaccacgcgtacagccggctgggcatctcggggaccggggcggtcgtgccgtcgcctccgtcgtcgccgcggcgcgcgtgggggaggagggcctcggcgaagggaggatggtctgcgagggccagcgcggacgcgggctggggcgggggcgcggtgcggagggttgcgcgagcggtgcttgcggcgctgctgcggcggcaggctgtgttcctctttgcgccactgctgtacgtggcggcgatgctgctctacatgggctctatctcgctcgacagtgtgccccgcatcatcccgcgcccggcgcccgggtcaatgtaccgcagcccgcagctctacgcccgtctccgcgccgacatggacgccgataatgccaccgacgcgtggttttgtttgatcgggtgtcaaatttctggtgttccgtactattgtctgacacacctaacactagcagctgtatggcggcatgcttacagaggtggtgtttggagaccttgcataagcaataataccaatggcttgcctgaatcaaatggctacatatacattgaggctaatggtggtttgaatcaacaacgaacatcgatttgcaatgcagttgctgttgctggctttctgaatgcgactcttgtaatcccaaacttccattatcacagcatttggagggatcctagcaaatttagtgatatctatgacgaggattactttatcgaacgcttaaaaaatgatgtccgggtgattgacaaggtgcctgagttcataatggagcgatttggtcacaatctgagcaatgcatttaatttcaagataaaagcttggtctcctattcaattctatgaagatattgttctccctaagttgatcgaagaaagactcataaggatatcaccttttgcaaaccggctgtcatttgatgctcctccagctgttcaacgtctacgatgtctagcaaattttgaagccctaaaattttctaaaccaatcactactatatctaacactttaatttctcggatgagagaaaaaagtgctgaaaataatgggaaatatgtagcagtgcatctccgctttgaagaggatatggtagccttctcttgttgtgtctttgatggtggtgacaatgagaagaaggaactggatgcagctagggaaaaaggttggagagggaaatttacaaggccaggacgtgtaataaggcctggagcaataaggatgaatgggaaatgtccactgactcctttggaggttggattaatgctgcgtggaatgggttttaacaataatactgcaatatatttagcttctggaaggatatataaagcagaaaagaacatgtctcctctccttgaaatgttccccctcttgcagacaaaagaaacattggcactggatgaagaacttgctccattcaagaacttctcctcaaggatggcagcaattgactacagtgtctgtgttcatagtgaggtttttgtgaccacacaaggtggaaattttcctcattttcttattgggcatagaagatacttgtatggtggccatgcgaagacaattaagcccgataaaagaagattggctatactctttgatagtccacgtattggatggaagtcactgaaacgtcaattgttcaatatgagagcacatagtgacgtgaagggtattgaaataaaaagagcaaatgaatctgtatacacctttccatgccctgattgcatgtgccgttcaaacaaatgagaaactccaaatccatcatggccagatagcatctaaaagttgtatcttgactcactgaccccatttctttctcagtgtcacggcatacccactccttaatcttcatatgcagtgtggtggtgagatgttccatgtcctctaagcatcccgactgagatatattgaatctttacatttaaccctggcactaacaatacactgatccatgtctagaatgtatgtaaccatatctagggctattccttaacagccagtgttaatctgtttgtgtagtactaagatcccttgtcctccttgtacattgatgaaccatgaagaaattgtcatacacaattttgtagcaagacgaatattgtttattttgccttttttttactaatttctcaagtatactatctcaatgatttgtccttttgtttgttacttatttaatgtattacatgttttt

SEQ ID NO: 13194 - DNA, 262 bp, Zea mays
  unsure (1)..(262): unsure at all n locations
  Clone ID: MRT4577_112026C.1
ctcctcgcgattccaatccacgcacgctttcacngcttccgnctcgctcaggcttatantcagtgatggaacaactggaagcgggctgccaacagccggaaggcccaatcctatgcatcaataactgcggcttcttcggcagtgctgcgacgatgaacatgtgctccagtggcacaaggagatgataacgaagcaggaacaggcccagctggctgcctcctccatcgatagcattgtcaattgcggttacggcgggaaaaga

SEQ ID NO: 13195 - DNA, 331 bp, Zea mays
  unsure (1)..(331): unsure at all n locations
  Clone ID: MRT4577_112027C.1
aggacctaggatgcggggcgtccgagaatgtctggaccggccaagaaagattttgatggagcccttttacttttttcactttctntnaggaacgtggacacggtaggcgaggctattcttaaggtgaagaaggctttttttcgcttcgacttaataattctattcaactgnacccacaatatctcctacttctacccttttattttccttacgtccccacatatatgttttttttttttgtaatgttccaatgtttttcttttctagcctccttggtttcttctaaaatgtgttatatcctcaatatttctatttttaaatccttcttatt

SEQ ID NO: 13196 - DNA, 720 bp, Zea mays
  Clone ID: MRT4577_112028C.1
cctcgaggccggccgggatcgacgctctcgccacatcttctgcgctccgttcggcagcaactagcgcctccgtttgccatggcttcgtcgagcgtttccccgcttactgcagtccaataggtacatctggcagaatggtgatttaccttaacgcaccccctcccgacctcgtatgccaagatggtccaaacgatagacttaaattcgaactttcatctatgcatccgtggcgtgcaactatgtgacaggctcactcgcgtttgctatcttttgacaatgacactgcatccttagctgtttttgatggacatggaagaaaagtagttgctgaattctgtgccaaatatctacacctagaaggtctccataccgaacgctatggtggtgtcgacctgcgtgctgctgcccacagatgttacttacagaatgcatgaaatgatgcttcgtcaaagacgatggcggcacactccttccacttcgtacatgagagaaatctgttcgctgatataacagatggtttgattggcccgcctaactgaagcggttcatgatgatagacatgatgcctgagctttctaggaagaaccacactctgactatagtgttccaaactgaggaagtacagcatgtgcaccattagagacaaataggctactcgttgtgacaagtggtgtcgactcccgctgagtcatctcgaggaatgctcctatgtacactttg

SEQ ID NO: 13197 - DNA, 297 bp, Zea mays
  Clone ID: MRT4577_112029C.1
ctttctcttgggggctcacaggtgatacgatggacttgtataagctcatagcactcgctggacaccacggctatgacaagcgaaatgctcttgctggagaaatatacattaagtacttacgcgtaggacagtatattggtgacaagcaccttttgctcgacagtgaaagaaaggtgggcatactaggggccagacaactgcgaacagacacctaccaaccgatgtatataagggtgacgatgaacctaacaaagattcatctggattatccgtggtaccacatcttctgaccaatca

SEQ ID NO: 13198 - DNA, 335 bp, Zea mays
  Clone ID: MRT4577_11202C.1
ggaattatcctgctaaaaattactgccgagcgccgtatgagagaccacgcgcttgactggatcgcaccaaaactgataagaacatacactaacaacacatttatgacgctgcgacagaccgtttctaatttaaggaccaaatcaatgtataaagcacagaccgaaactggctaaatcaaagggcataactcgactgcgactaggaggacatgacagacacatgattacacagatctagcttagcaagggaatgatgctgccctattgtcaactgtgactactcaacaagacggatcacagcagatactactttgacaaattattgcctacaacaa

SEQ ID NO: 13199 - DNA, 272 bp, Zea mays
  Clone ID: MRT4577_112030C.1
gaaaacaacaacccgacaccaaacataactgggacggggaaggcaacaaaccccccaaaaacgggcgcaatgaaaataaaaaaattcggtcaggcaaaaaaagtgggggcgggggggggaaaccaaaggcgaaaatgagtggccccctaccctaaccccattttgaacacttgtccgtccaccgggaagggaagcgggcaaccaaaggcattaatgaataagccaactcgcggggccccccgccaaaaaaaaaaggggaaaaggcggggacg

SEQ ID NO: 13200 - DNA, 436 bp, Zea mays
  Clone ID: MRT4577_112031C.1
ggtgacggggaaacacaaaaggccctcgcggcttgaggggagactccccatgtccacatctcacttttccaaaagcccggggtagaccagggggggggggggcccccggggccccccggggcgggggcaaattaccactcgtcaacgctgccacttcccagagagggggggcgggcccccccccacagcaacccccccagggaccccgccgggcccccaccccaggggcccagggggggccacgaccaaaggggacagttgtgacgagggtcgggcccttcgagcccacgggccggggggccccaaaaacaacggggggatggggccccgaaaaaagggcgaggaggtaaaaaccaatttttgcttcccgccaaacgaccccccccacgggccaaggtagaaggcctaaaggccccccccaaaaatcgctaggggg

SEQ ID NO: 13201 - DNA, 244 bp, Zea mays
  Clone ID: MRT4577_112032C.1
gttcaatttagttgtcaatggtctaaatgctgatgtgctctacaagggaagcgtgcatgagattacatcatccatcaataggatacaattttttttgggatgtgatgttgatttgttgtatatgtaacattttctttggatagactatttggttagttagatggcatgactgacgtccattattcggcacatcatgctgtctacccagaattgagggaggaaacatatgcccttatgttttgct

SEQ ID NO: 13202 - DNA, 154 bp, Zea mays
  Clone ID: MRT4577_112033C.1
cggatggagatcgctggacactcctctcatcagcatggcttctcatccccatcaacagtggtgcatgtggaatacataggcacagatgtcctaatgcggtcctccacaagatgtcagaatcgtgtagaaagcaaaatctcacagattttcatct

SEQ ID NO: 13203 - DNA, 1233 bp, Zea mays
  Clone ID: MRT4577_112034C.1
cggccggggttgacctggagctggtcctggcgattgcatttcagtattcaacaatgctgtcaatcaacttgcagaagagattttggctgcagcaaacgcaaactgtagccaatggccagctcccgagattgatcttctggagagaacaagcaatgagaggatatatgcagaaatgttcttgcctagcattggatggtcttcgccatcaaggatccagccactgcttgcagccattaatagctgcaagattccagagttcagttacgatctatcttggctaaaccatggttctcacatgggcaagcagatccaggatcagaagaagttacttgaggagtgcttggcgagatacttgaccgaatcagcccggctgttagatgaaagccaggtggtcaccgaagtgaatgttatggtgcagaattgtgttggccttgaactccaggattcgtcttactatctcgctcccagatgggtggcgatcttccgtcgtatttacaactggaggctagcaaagctctctaccggaaagttgtcagaagcttatgttctgactcagcacctgtatcaggctcctacagcagctggctcaaatggtaccacacaagggcttactgctaacaccgccagcagcgatgctgtggatcacatcatgatgcctgctgtttcaaccggcatcacactagacgaaatcattgagatcagttgtgacctcgatgctgttgatgcgcagaccgtaactctggcaccacgactgcctgtgcatgttcatgaagaacctcaggcacttgctgacaacaacggcgtgcatggagttgatgaaatgtacataccaagaagagtagagttgggagaggtgatgcccatcgagacagacgacaagctttcccggctaagagtagagttgggcgaggtgatgcccatcgagacggacgacaagctttcccggctactggagcagtgcaccaagctgcaggacaggatcgatgagacactttccatatacttttgagacccgtagtaaggctggaagggttttgttacaccatccttccacatttgttgtaacttgtaaaactagattttgtggaagtgaaaactaacactgccaagttaaagcgttcttgtttggcaggaatgaaatatcgaagcgtcatttttcttctcgaaaaaaaaaaaaaaaaaaaaaaaaaaaaaaaaaaaaaaaaaaaaaaaaaaaaaaaactcgagaggggg

SEQ ID NO: 13204 - DNA, 248 bp, Zea mays
  Clone ID: MRT4577_112035C.1
gaacgcacacacacacacacatacaagtggttggcaaagccaaatgtatgtactaccaaccagctggctcgggcagaatcagacggccatcatgtctgaggagaagcaccaccacttattcaaccaccacaagaaggactagtagcatctctacagcaagtacggatactccgagaccgaagtcttcaccttcaccggcaaaggctattactagaggtacaagaaggacgataacgagcacaaactca

SEQ ID NO: 13205 - DNA, 564 bp, Zea mays
  Clone ID: MRT4577_112036C.1
cattgggtacctcgaggccggccgggaagaagttcctctcctctcctccccgtccgctgcctccgctccgctcatgtcgtccgtgccgagcaccacggcgttcactcatcgcagcctctatccaacgccgttctcctcgtgtccccgtcggggcccgccttccggacgagctccgcctctcgctcgctcacgtccgggcggccggatgccgcgagaacgccggtgatgccacgctacggcctcagcgctgcagtgtgtcggacgcggcagcggccgctcgaaatatcaattgcataggcggagtaccaccgagaagatgctggacgaactactcgcgcctgcctggcgcaactgtctccaccactgcagcactcgggcgaaacatcacacgcatctaacgggacggcaggaaatgcccttgtatctggacacggcgcgaggggcgatgatgcagagagccaccttgccatctagaccgcatccacagaggtggccagtgagagtgtctgaggagatgcccgagagcgagccggacccggatcactacctcccggacagcgacag

SEQ ID NO: 13206 - DNA, 525 bp, Zea mays
  Clone ID: MRT4577_112037C.1
ggcgtcggagatttccaagattctcctcggtggaggcaagaagagcagcgttgcggcggcgagccggcttccggaggtgaccataccggagcagtctgcgctcgccaccacgtcctccgtcgttcctctaccgtgtcatcagcagaacagagccgcaagaaggtcttccacgagcagcggccaccaccaccagtcgatcggcaagtggttccaggtccaccacagggaaacacgccgggcgaagcagagcagcaaggagaagcagcgcgccgagaaggcccacgtgcacgccatggtgtccgtggcccgggtcgctgccgccgtcgccgccgtcgcgtcggccacgagctccaacgcccaggctaccactaccaagatggcgacagccatggcgtcggccaccgagctgctggcctcccactgcgtcgaggcagctcagcacgcgggggcgcgccacgaccaggtggccgccgccgtgcaggccgcggttggcgtcagaagccccggcgatctgatgacgctcac

SEQ ID NO: 13207 - DNA, 794 bp, Zea mays
  Clone ID: MRT4577_112038C.1
gggtacctcgaggccggccgggaattcggcacgaggcctaggcgcgccactctccctggcagccgccgtttgttgtcgcgagcgcgttcctgccccgccacagccgaagctcccagcgtcctcctgcaggccgagctgaaggttcagcgcgccggtggagttcgacgacgaaactccgtcacgtcatacctctccgcctcccgtcttccagacgtctccaatcagggctcccagcgtctcggagaagaggagcagcacggcacggcggctgtggcgaggaaggctcctgtcccatcccaacccagttagcagccgcccaaggaggaggagattcaatcggcgtgcgggcgtccgcggtccatccatcgatccaattccaatctgccggtcattactgcatttggaagactagggacaatgtttggatgtgatatgtataatattaaaccagatcttgtttccatagccaaggttctttcttctgcatatatgccaattggagcaattctcgttagcccaggaataacggatgtaatttattctcagagcaataaacttgggaaaggaatattgtagaacacgttaacaaaattgctccaaggttccaggagggaatcaaggccttctcaggcagcccaattgttggggagatacgcggtctgggactgatacttggaactgaatttgtcgacaacaaatctccaaatgatccatttccagctgaatggggttcattggtttattgatctcatgtccccttttcaaacatttcagaagtaatccaacttttaggc
